United States Patent Application Publication US 2007/0150978 A1 - sequence listing, part 3

SEQ ID NO: 13624 - DNA, 469 bp, Oryza sativa
  unsure (1)..(469): unsure at all n locations
aaatattaaatgattgagaccagccagttctctgttttggcttagactagtagataccatgcctcctgatgttaatgattataaaatacctaacaaacacatctactttgacgganagatatgtataatggattaaaaaaataggaaggtggaatagacagaacgaatcagtaactattggtttccagcctagcccctatacattttgtttcttgtatccttggacgtgatacactgtaatacattatacctacgatctttctagactagctccaagaatccagtagtgttgaatatcttctacttgtcattntgtgcagcctaatggatattatcanggtaatgaagcagataccacgcgtgaacttgctacatatgctgatcacatacaggttgaccactaggttgaatctaaattgtttggacctataaattngatggaaatatattctgctgatcatttcatgtt

SEQ ID NO: 13625 - DNA, 317 bp, Oryza sativa
  unsure (1)..(317): unsure at all n locations
tccattcatcatcatcatcattggtataatacaacatcaatcagtatcagtcttttcatcatcagaattattagatccagtcggccggaggttgttgtcctggaatctctcaactacatcaacggctatcttatcggcagctttttgcgcattgttgatgaggtcgagagcggcttcttcgcttgtcccgtctgcaaagccatcaacggcgtcaatgtcaatcttcgggtacaaagacttggtcattgccaacgccaagctcgctcccatacttncagcttncttgatattcttaaaatatgtatccggagcaattc

SEQ ID NO: 13626 - DNA, 352 bp, Oryza sativa
  unsure (1)..(352): unsure at all n locations
ctctgcaggcacgcaagacttgaatgaatgtgaataatagaaatgttcanttgnttatgcatacgccatgcacacactgctntaataaatgtgcttaagtccctaaaagacacatggtntcaccacacccggaaatatacggcatatgtggttgataatccgagtatataaaactataaaggaattaccatcccgctcgtaaaatgactaaaaattataatcactctaagccataaaattgtgcaataataatgcacacgtacgtgcaaaaagcagtggtattgtatccaataattgttttattaacccaatagcacattgactatataaaaagtcagtaggacactataaa

SEQ ID NO: 13627 - DNA, 444 bp, Oryza sativa
  unsure (1)..(444): unsure at all n locations
ntcaatattggaacatgtgcttctatcagtgtgaaacattagctaacaagtttgttcattcaacttatatatacaggtggaaagttacttactttgatgagcatcggtcatcatcccttttagctcggtcgaacagcaatatggtcagaaagatcacatagaagtacggcaggaactacacgaaagcagggaccacaggtattaccatcctagctaaagtcgagataaatggtaatcagggtgtgcttacatgatcaaaaagagctggaactgtccagaaaaaagcagatagaatctcttgaacatagtgaaaatgacgagacaagccccacctgtccaaatggaaaatgaaggtgcatgctcaaaagccattcattggctctattggaacanacatggtacaaatcacttttgatgaactatgtaaagaagaaatgacgaata

SEQ ID NO: 13628 - DNA, 181 bp, Oryza sativa
ggcgcaacaaaccgcaccctccccacaaaaccccaacaaaaccccccacccgccccacttgcacggaccacggcgcacgccccccacacagccaccaggcgcccggcgccaacagagccgccaacgagcgacaggcgcacgccacagacacgggcccagcgagaggagcgcgagcaaggac

SEQ ID NO: 13629 - DNA, 241 bp, Oryza sativa
tatcgcttgatgttttgtctggttcaataatacagcttatccgagtgagttttatggacctactgtgccagaaacttctcaagctcaagcatttacttttctagttagagatcagcgtcttggagctaatgtgggatctgcccaaggacccacatgtttatgtaaatatctaatgcgttccccaacgggagagggtatttttggaggggaaactatgcagttttgggaccttcgtgctcca

SEQ ID NO: 13630 - DNA, 197 bp, Oryza sativa
  unsure (1)..(197): unsure at all n locations
tgctcaggtagctggaagaagaagaagacatatatatangtggtggactttagntcccggtgagaacaccaaccggtgctaaagatcaccgggatctttagcctcggctgtggcctacaaccgggacaaaagtcccacccctatatataagtcctcttcctcccccagctaaccgagcaagcacgagtaatcaatag

SEQ ID NO: 13631 - DNA, 431 bp, Oryza sativa
  unsure (1)..(431): unsure at all n locations
tccgacgtggctgatccccacaagctgggtgatccgggttattaatgtcatgtgggtaaagtgtaccccctctgcagagttaacaaactgttcgaacaaccgtgctcacggtcatggacggatgtgaggtgattccttancgtagttcttcgttttacccagttttatgaaaaagtgataaggtttgggaaacccgatatttggaaggcaagtggctgtcatggagacagcgggacatggagtccctaaaagtgactggttgtttggagacaaccaaaactctgaaagtctagaanattggtttggtttgtgaaaccagctttgaagccaactctgggagttgtgcaaatcttgataaaataatattgttcactcctcacccccagccgagttgagacttgtcttgctctggtcgcggaatgcacacactt

SEQ ID NO: 13632 - DNA, 193 bp, Oryza sativa
  unsure (1)..(193): unsure at all n locations
agcttcgagtatacttatatcacgggcaggggctggcntgttcctctctatccaccgtcggatccatgctatgcctcatccaccggcccatgtgctcccctcgctgggggcttggccgtccgatggcatccaacggcgcatatgtcgtcgtcggttgncgtccattatcatgcattcacacacacattcacta

SEQ ID NO: 13633 - DNA, 264 bp, Oryza sativa
  unsure (1)..(264): unsure at all n locations
tggcagagtgagaacaagtgtgctcttgtctactggcaaatgaatgagcccccgggtgctcgtgctcctgttggactgactggtttgactgttgccgagcatttccgtgatgcctgaaggcaagatgtgcttctcttcattgtaacattttccggttcactcaggtaatgtttgtgagacccttatgccatctcattctggcaattctaacaatgtgtattcatgtgtagttgatgcacacattatnttttggtatgtgcatta

SEQ ID NO: 13634 - DNA, 279 bp, Oryza sativa
ttggggagtgggggaggagagagatgctgtatttgaaaaccgaatccctgccatctctggcgcgggcgtgggcgggatataaagcgagtgggcgccggatatgccgtgcacgcgcggacgtggctgacgtggcccggataaagcggaagcgtggactctgcggtgggtgcaggcgcggcggcgcctgctggaagaacgggacgggtctgatatgtggggcccacctatcggcgtcccggggagagacggagcggcggcttggctgggcctcggtcttgc

SEQ ID NO: 13635 - DNA, 211 bp, Oryza sativa
  unsure (1)..(211): unsure at all n locations
gatcctctggagacacctgcggcacgcaagcttctcccttatatggtattcctatataggttttgttgtaaanataaagcaacagtttatggactatctccaataataatggcacaggcgcacaagcaacaaaatttatggaaacatactagtaccatgacatttggctttatgacaaaaacaagctctctagcactatccttgaaaatca

SEQ ID NO: 13636 - DNA, 450 bp, Oryza sativa
  unsure (1)..(450): unsure at all n locations
ctatgtatctcagcttccatcgctgcaagcctgcactgcttcgatctctctgaaccatcttgattcgctgctggggngaaagcctgggttagttacttaatttttcatttaaacttctaactttctcatcatatcaaaactttcctacgcataaactctcacattttttatcacatcattccaatttcaatcaaatttctaatttttttacgggaaaatcaaacttctaattctagcgtgaactaacacacagctcggccatctctttcggtctcatcgatccatcgctctctctctctcctcgacgttcttgcctagctacaggatagatggtgactccagtccaactccgcgtggagnaaaaatagcaataataattaagcttaattggaggagacatatatctggatatatatgtgtgttcatatatggagtgcaggtcatacatat

SEQ ID NO: 13637 - DNA, 399 bp, Oryza sativa
  unsure (1)..(399): unsure at all n locations
cataggcagaactaaacatttgtcataatttttgttgctccttaattttgggttcgatctgcttcagtttgagctctaattatatactccctccgcttcaatatgtgtgacgcccgtgacatttttaaacatgttngactggtcgtcttttcaaaaaattaagaagtattaatttgttttcctatcatttgattcattattaaatatattcttatgtacgcatataattttatatattctacaaaacgttttgaataagacgaacggtcaaacatgtgctaaaaagtcaacggtgttaaatatttcgaaacggagggagtactaagattagcttatatcatgtgaaatattaccaattaaacataaagctcattaaactgcgagcattgaaatattaaa

SEQ ID NO: 13638 - DNA, 294 bp, Oryza sativa
  unsure (1)..(294): unsure at all n locations
tcatgctcacctannacattacttgtatagttggaagcagcctatgtgattttgttgatccaaaaccgtttattagtcatcctctacatgaaagactgctgtaaattaccattgagcagtgctataatatatataattgcngagatgttgatttcttgggcatcgggaacagagggctgatgatacacaaatgtttaatatagtaacatagtgtagctgagatgagagaacttgagaacttgaggtcggctgcatactgttgaaggggcagtgactgctaatacagtgggtgtg

SEQ ID NO: 13639 - DNA, 404 bp, Oryza sativa
tagcgccttaaaactcagctggctagattcttttttttgacaaatcatattttatttttagtcttgcggttcttttgacattttcataaccgcactgtatagtaaattgtagacaatatcaccacgctagatgcgcgggaacgtacgtatttgtgctttcggttacaaaagtttgagttaaaatgccgtgcgtggccaataaacagtaatttcggtttacagattgattatagatatctctatatacgatttcagggtcaagaatcaagcctcgccttcgcccttccacagcctcacggccctgccctcttccgaagaaaaagtgtggcaaaataatcgagtattctagagaaatcgccgatccctccattcgcggcgttgagctccttgcagcaagcacctac

SEQ ID NO: 13640 - DNA, 431 bp, Oryza sativa
  unsure (1)..(431): unsure at all n locations
tagcgacctattatactcagcttgggctgctgggctaaaattgaagaagcacaagcagtacaagctccgtctttagcttggagctccccgtgcacctaagacgatgccctcttctcaccctggagctagcttaagctcagcacctcctcctcctcatgggtatgatccaaatgctttcttccatcctcagtatgcttactttggaatgcaacccaataaatacttcaacacggtactttgggctattaataccctaagtgaaagcattcaacgcttgtctaccgggtatgaagcattgcatgatgatgtttgtggcttgcgcactgatgttggagacttgaatgctntcatggngagaatgcacactcgagtgggtgcattggattctcgagtccaaatagtggagagcacccaagcttttgtctatcatc

SEQ ID NO: 13641 - DNA, 303 bp, Oryza sativa
  unsure (1)..(303): unsure at all n locations
gcatgcaagcttcaatgttataaatgtattgaaataaagcttgtgtgttatacatatagcaaangattggagtaatttattatgtctcaaaactaatgtaaagctcaatcttataaacataacataattgtaaatatgcccaagtggtcatgacttcaaattggcaactagccaattggttgcgattaaaaagaaccttttgaggttttgtccttaaaacctacctgacttccgtggtttgaatggtatgtatggagaaatagatggcctttgaatgggttgtaatgtgaaatattttcccga

SEQ ID NO: 13642 - DNA, 338 bp, Oryza sativa
cctgctgcatgcaagcttatctcttacgatccaggaatggatcattttaacatcacctttgttcgcctcgaccgccgccgactggtgtttccgcctgcacggctggcctattatgccgccgttgttgggcgtctacgtcttcaccgaccggtttgccttcgccgccgacgactggtgtcctcgcctgcacggctggcctattatgccgccgttgttgggcgcctacgtcttcaccgaccggcttgccttcgtctgcgccgaccgatgtcctcgcctgcacggctggccattatgccgccgttgttgggcgtctacgtcttcaacgaccggcttgcctt

SEQ ID NO: 13643 - DNA, 354 bp, Oryza sativa
gcatgcatgcaagcttgtcactcttcactcgtggcacagatgcggtggttatatcatcattactgcgtgaagttgggtaatcatgcagctttcaaatgtgtctggattggtagattattttactccacaatgatgatgctagcacggatcctactcattgaaaggcctatccataatggtggtctgattgctaaagagttctttttcctttactctctaattgttcgtccataaaacaagttgtgtaaaacatggccaaaggacctagtggagatgtggttgatccgatattacacaattttgttgactttttccaatttaatctttaaagaaaaatttaattctccttatcct

SEQ ID NO: 13644 - DNA, 371 bp, Oryza sativa
  unsure (1)..(371): unsure at all n locations
atgcataaagccttnttcttttagtagtgttgccatcaaaccttgaatattcatcttctcatcatgctaccctaagcgctgatcctagcgaaaaatattacttgaatacagatattggctttcattntgcgaaatggaattgtatatcctaactcatccggtacgataatcattgttagtgcgaacaagtcttactttgtttccatagcagtggtgcatcagcttcacgttcaccaggaaaggaaaaccaacaccactcaattttcgatactaccgtacattaatctctaggacattacgtaagcagacagtacatttatgttgttgagcagtgcagacaaaccggatngactggtacttgcgcttggcat

SEQ ID NO: 13645 - DNA, 486 bp, Oryza sativa
  unsure (1)..(486): unsure at all n locations
tcgtgccaacccgctcttncttctncagattgcttcaacccgattattttccgtcgggcgtcgggccgtcagctacacgttggggacgccatttcaccggctcttnnttttttttttgcggggggcatttcaccggcttttgtgtcagttggagcaaattcaacccagaaatcaatgaagcttcattctagaggtgatgcctaggcaaataagacaaaacagtttactaaagaataaaaattaatttataggtaaaatatttactgcctttattctaacatatgtatagctgtcagttaccgtgtccaatgtttgaccatccgttttatttgaaaaatattgatgattagtatttttattgttattagatgataaaacatgtataatattctatatgtgaccaatttgtttaaataagatagacggtcacatattggacacggaaaccaacaattacgcttatattgggacagaggtagtatatat

SEQ ID NO: 13646 - DNA, 276 bp, Oryza sativa
cacgcaagctcgcaacacttcagcggctctcaacacattttcttgaacctgataagctaccatctcggagtcttctggaggacgatatctctacgatcccgtatatggtcagcgtcgacgtcggcacccgaacgacttgtctaacagcgttcctaaccgatgccgcctcagcacggatagcccattcgtccgagcgaagaactcgcctgcagagatacacggacagaccgtttgcgcctgcatccacggattggcccacctgctcagatcgacctt

SEQ ID NO: 13647 - DNA, 377 bp, Oryza sativa
  unsure (1)..(377): unsure at all n locations
catggctttcaaaggggctaacaaagtaatttcttactctatactcatattctatttacctggaaattgtagctattttggctcttttgaactgttaatgttcatgctgtctaccgatttttatctgaatgatgtgttttgctcaagtgcatacgctctgctattgaaccagctgtttctggatctataatntgtggatttttggatgactttataatttgcaatgcaagagttgggttgtatttttcccgctactttaaattcataatagatattgattcaactctcangctgtttggttntaatggtgggagactacggatggatgagagaattgatttgagcatgagcgatcctgatttagtccctctgattat

SEQ ID NO: 13648 - DNA, 280 bp, Oryza sativa
  unsure (1)..(280): unsure at all n locations
aaatcaactgtgcatacaatgtcaacttccaataaatgcttatgcactactttcctgctataatgcctagcaactcgatccttatctttggtaaccttaacaagggcttgtaacgcgattgaaccaagtgctccctctcatcggacataaggttataatactcatcggctgtcaaaccgtcttgcaattctatccttctatagccgattctaacttcccatggcataacagcctcatgtccatatacaagcttataaggaggaactngaattgatccatg

SEQ ID NO: 13649 - DNA, 495 bp, Oryza sativa
  unsure (1)..(495): unsure at all n locations
agaaactcagctgaatcacaataaaatcatgatttatacgaatataatgttcatcttattaagcacataggttcaagaataaacactaaacacatatacctattgcatttatcactctttctgaaataaccttaagcacaaaataacaaagagaatttttaaccttttcttttcttgagcctttctcctcatatttttctctttgttatattccgggtacgtccctgtcgtcaagactgtgtttacggattcggcacccattattctgcttacatcgaatacgtccttgtcgtcaagactgtttccaaggattcggtattcatcttttctcataattttattctcttttcacaatgagcaattaaagctattngaggaataacaagtcaataaagcatatatatagagcatttaanaatcaaaccacatgctagcatcaacactgcatatttacttaattcaagtgtagaacttaagtgtcatgcatcatctccc

SEQ ID NO: 13650 - DNA, 348 bp, Oryza sativa
  unsure (1)..(348): unsure at all n locations
ccttgctctatataaatataattctgccagctctgaagatgaagttgaagtgaagtaaagaatanggtgttgtctacttccctgctgctagctgtggtgttgggtgttaaacccgtggttacgctgctgccgctggtgttggtgtttgcctcgtccgtgtcgtcggttgcattctctggctgtctgagctgcaacctaagttaaagtaaatacgtccactatttatcttaaggattgcaatgattcatatttgtcaccgtgggtaccagcgctacatcctgggactggtactgagatcgcggtttcgtaagaagcggctcgcgctgtttttcctacgacacgctccta

SEQ ID NO: 13651 - DNA, 404 bp, Oryza sativa
  unsure (1)..(404): unsure at all n locations
agctttggattgtagaggcagtttgagcatgtgtntactacatattactctctccatcctaaaatataagaaactaagattagatgggatatttttagtactataaatctggacatgctgcctacgtctagatactacgaatatggacatgctgcctacgtccagattcgtagtactagaaaatgtccgatccggttctaaggccatgtttagattacaacttttttcttcaaacttttaacttttccgtcacatcgaactttcctacacacacaaacttccaacttttccgttacacgtttcaatttcttcaaactactaattttagtgtggaactaaaaacagactactacatncgtcctaaaatgtaagcatttttatctatanatctggatattttggga

SEQ ID NO: 13652 - DNA, 396 bp, Oryza sativa
  unsure (1)..(396): unsure at all n locations
agctngctcacctcataagctattaaaattaatctttcatctaaatgattttcaaaccatgtaagatcaattaagaatgtgagtcaaaacaaaataaagaatttaatagaagtttctagatgagtcaaaatagttggccatttgatgggtagataaaattgaagctagactctaatggaaatttcaaacaattcaagtgaggttgaggtggaaaactacatgaaaactaaaggtgggaaaattcattcaccagtactctatgttgatattcgcaagcagtgcatatttgttgtagatactaaagaaaatttttcattaaatttgtctaaaggagtctacgcttaatagcattatcgatataaataagatatcattatgatttacttacaaagctta

SEQ ID NO: 13653 - DNA, 363 bp, Oryza sativa
agcttgagattcttggagaaagcctcgtagaacttgttgtagtcttccttgttctcagcgatctcaaagaagagctccacgcacttcttcacaaggttcttgcggatcaccttcaggatcttgttctgctggagcatctcacgtgagatgttgaggggaaggtcttcagaatcaacaatgcccttgacaaagctgagccactctgggatcaactcctcacagttgtccatgataaacacccggcgtacgtacagcttgatgttgttttgcttcttcctggggtcaaagaggtcaaatggcgctctctttggacaaacaggatggccttgaattcagctgacccttcacagagaagtgcttgac

SEQ ID NO: 13654 - DNA, 434 bp, Oryza sativa
agcttctgcattgccgcgtatacttcttcagttagtgggataattttaccttgctgctaatatcctcgtgcattgccgctatttatatttttgcaacgccagttataaatctgagtctacagtctactgacaccgagtaatagtagcgaagtcatgaaaactctcgatcatgcgaatggccttctctgcagtttagatctttcacttttatactttcagtatgaactgcgaagtaatgtggcttccatgcaaattattggttattcggagatccataggaattctggagaaaatggtaaggattttaggtcccactcacagtccactccacctcttcatgttccttggtcaagccactcaacgatcgaaataatttcgacctggattaatcatgggtcagtctgaaaactaagcccaggcgtatgacccacatt

SEQ ID NO: 13655 - DNA, 464 bp, Oryza sativa
  unsure (1)..(464): unsure at all n locations
ttccaagaataccccgatcaagaacccaaatatttttgtgtgaggtggaatttcgtatcagtaatcaacatgaccgagaccacagaaacatagagggaaaaaacatcagacgaactggaggagaatcttctgagaaatgggttctggaattcaattcatttcgaagcaaccatccagtcatcaagacggttgagcacatgaacagaagccnatgatgatccaaaaacgtccaacataatgagcagttgaaccccaccacgtgcaaacagatcagaagcaaccgcattccttccagaaccaaacgcatgaactaaacggacggaacagagggagctgatcaatcaagccagaagaactgaggagaggaagctacgtacaaggatcctctcgtgccttctctctgcagatagcatgcagcttcccggcaaccaccggtccggcgtcggcgatcaacggcgaaactg

SEQ ID NO: 13656 - DNA, 386 bp, Oryza sativa
  unsure (1)..(386): unsure at all n locations
ctgcagctnttcaaaaggagaatgctatatatctaactcgacgatagcatatagtcctgtcagtcatttcgacgatagaggctaaccgacgggatcggatggtaagatcgatctacattatatagcatatatgataactcggcgggtttcatagacaagactagagtggtgcaaccatgtaagcactagttccgagaacggaaaccacataacaggctttacctcttgtcggagatcgaacccaatgcagcccaactcgaaagcaagaaactcatcgaaataaagaaaagtaaaaatggtggtgatgcgccgagagtgtattgaactgatgtcgntcttngttacaaggtatcggatcacatntttgtacccagaatacataatat

SEQ ID NO: 13657 - DNA, 324 bp, Oryza sativa
agcttcatgagttctaacacgcatgacatctttctgtgcttcgacttgcatccatcatacaacggcatctggcaatcttccaccaacttactaaacttctcataatctctgtcgttgtcctctgcgtcttcaatgtcatgcaacattgtagatagacattgagtgtccaaatctatggtctctccacctaaaggagaaggtacgaacatgccttctcgagctgcggcggtgttctctacatcctgatccaacacttcttcagctgcgacatcaagcgcctcttgctctccatgcttggtccagcaggtattattcttcatgaat

SEQ ID NO: 13658 - DNA, 445 bp, Oryza sativa
tccgacatctaaagcatactgaataaaccagacctattgcccttgactattggagtaggcgtggtagagcacttactcacattattggcaatcacttccttatctgacgtggggtgcggtggcaagtaattagtcactttgagtattggcacgacaaaatttatcgaacggtaacaacagacaaggtcaaatggggattgagttgggggcttgaggtgtgaaaatatcatcactggttaatatgaacaatggtgaatacaagatgtgctttggaaaataaagagaatgtgagaaaggagtcatgatggtgggatgaaaatagacagaaatgatatcattactatatgaagtaatttagatccgctgaaaatttctatcaaatgactactatccgagttgcagatggcgatgataatagaaaaatcatctttacagaacgaatact

SEQ ID NO: 13659 - DNA, 350 bp, Oryza sativa
agcttgtttatgggcatgacgcagtactgtcgtgggagtatagaatcggctcatggaggacagagttacaaaatgggttgacagccgatgaatattataatctcatggctgatgaaagggaatacttggttcaatctaggttgagagcccttgccaaagttaccaagaataaagaacgcattgctcgacattacaacaaaagattggtgcccaaatctttttcggatggtgaacttgtttggaaattgattttgccaatagggacttgagataacaaattctacaaggggtcaccgaatttgaaaggacccgttccaattcataatgttgtgtccaaaggagcttatatg

SEQ ID NO: 13660 - DNA, 348 bp, Oryza sativa
  unsure (1)..(348): unsure at all n locations
tactaaataataactggagacattatactattttggatcatactatgagctttaatcatagagatctaaanatagtcaataatacatcatggctctctccttatttttcccactgggttttcgaagaggtttacgtgatatatttaattactaattatttatcgnttctaagattatctttacagatacctggaacaataaataagcaatgatcacaggttgattcgatcaagggggagtgttaagaaactacgggtgatctcatccacccaagaaaataggaacaacggttcctaaactaactggcagagaagaggagatcgctcctctctctcccttttgcgtccc

SEQ ID NO: 13661 - DNA, 362 bp, Oryza sativa
agcttctccccattagtgacgcgaaaaacacacgctggcctggtgttaatgactaaattcggtaatccaagtatcagaggtgaagatgggatcgaagcggacttcgagatggagatcgctccataaacagagaaaggatcggctgaagtccgaatcggctacgaccaagattggcagagtccgaattggacaaggttagtcgattgagccgaatccgacaatatgacgcggcatacgttgctgggttgggttgatgtgctttatgaagattgccacgtatggatagagtcctgagaaggcaattgtatctattaattatgatattgtatgtaatttccttagagatatgtttgggcaaaagt

SEQ ID NO: 13662 - DNA, 301 bp, Oryza sativa
  unsure (1)..(301): unsure at all n locations
atgatgatgacatcactcatntggatacatcaccaaactgggagaaggaggtgcacttcatatcaaattttagcccatctcgttattcaagaacagcctgcactctaatcttcgcctagacctcgtctggacacccttcttaacacaacatatgtgtggaaagctatcaacgggaatggtttcaccctaaaccttccaagtcaatgggaatcgatgaaacaagagaacatcccaaaactgttcacgtgctgcgttaatgtcaataagaatgttggggtgtgtatcgtgttgaagaccatta

SEQ ID NO: 13663 - DNA, 326 bp, Oryza sativa
  unsure (1)..(326): unsure at all n locations
cctacatacgatgccacgagcacgccaacagaggtgacgaccatgacggagaatgagaagcagcacatgatggcacacttgtgtcccttccgccaccttcctacaccacagctgatgccacagcacccgcttgctcttccgctggtggccaccccaatagctccgtgtgatgcgaatgaacgaaggagcgacgcccgacgttcctcagacgttgcacgcgtaacgtcagacgatccacttncaaatatcatatgcatcacatgtctatatcctccattctaaaagaattaacttctaagttgaatagataagcatcatcacgtcat

SEQ ID NO: 13664 - DNA, 304 bp, Oryza sativa
  unsure (1)..(304): unsure at all n locations
tttcngtagagctntagaaaattccacaggtcacatatttcgtgcatttgaatttaatttttctatgggtgcttcttctgtgctcctgagcttgaaaaaaatatcaaaaaataaaataaaaataaaaaagttgcacatctctctcctctctctcctctacactggagaggagagagataaaaaaatttacaattcacatatttcgtccatttgagtttattttttctatgggtggttcttgtgtgctcctaagcattaaaaaatatcaaaaaataaaagaataataaaaaaatccggcgggggg

SEQ ID NO: 13665 - DNA, 251 bp, Oryza sativa
gctttataattgcagaagaagaaactgctgtgaggaagaaatcggcagcaacaactctcaaaccagttccaccagtaagatggtctcaattctttcattaatcgattataatcaatcttatctaacactcgcctcttttcagcctcctcctccttctccccctgtacagcaattatcaagtaaccaaactccatcggctgtagggagtcatcatgtcgaggaagaagaacaacctgctgctcctgctattc

SEQ ID NO: 13666 - DNA, 464 bp, Oryza sativa
  unsure (1)..(464): unsure at all n locations
gaccgattaatacttcatcggtcacttgtgaaactatttcgntacacctatgctaagaccggaattgttagtaattctctccctattaatcctattgatgttgataaaaagaaagggaaaaatgttattgttaaagatcctcggcccaagacacttatgatcaataatgcgaaggccgaagatcataatagtgcaaaggatgagtcatctaatatccaaaggaccaaaaagccgaagctcacttttgatatgcttatggctaaatacaagaaaggattatccggtcaatgatttgacaaccaaactagtgattcgaaaagaccaagatcatctcgtaggaagagaattggtcaaacatcaaagcaatcggagccatcaaccataccaactccatataaacctncaattgtgatgccatgtatnncatatcaatgcactatatgagtatctcttatgtatacatg

SEQ ID NO: 13667 - DNA, 319 bp, Oryza sativa
  unsure (1)..(319): unsure at all n locations
ttttgatataaaataataatctacttcaaccgatatgcccttangcacggccctacataacatagaaatcacacgtggaaggggtgggcaattaactagagcagcaggtgctgtagcgaaactgattgcaaaagaaggtaaatcggccactttaagattaccatctggagaggtcccgttggtattccaaaacttgctatcaacagtcggacaagtgggtaatgttggggtgaaccaaaaaagtttgggtagagccggtctaagtgttggctacgtaaacgccccgtataagaggggtagttatgaaccctgtggacca

SEQ ID NO: 13668 - DNA, 349 bp, Oryza sativa
acgggtgaaagccactcgaaccatactgctggtcttcccgaatgcgtgaggcgccacattgactgacatctagggtaagcacttgttggtccggctgccagcggaccaaatcgagaaactctgattctaatatacccaaaatacaggggttaagtcgccaggagatatggggaaagctcatctcaagggaacaccgatcacactagccctaatgacgtcaagaaaagagtgggggcaaacagcagagttgctaaacacccctttaaaggcgatactactgtcacgcctgcctgaatgacggctacatctcaactgggatgaaagctcgaggacgtccctaaggacaccc

SEQ ID NO: 13669 - DNA, 382 bp, Oryza sativa
gcagcgattctccacaactaaatgcttaagatattcaaccctgataacattgtatatgtgcaaatatttgtggggacagctctctcatgcaacacttgatctttattataactcatttcacgtccctgtaagagttgcaggaggcttgctatttgaactgttgagcagtccgttggtgatccagctcgtgacgacaaagacattccaattgtgctccgtgcttggcaagctcaaaattttctgataactgcacttcacgtgaagggatctgcaccaaacgattacagcattggagttactgaagttcacgtggaagctcatatatatatatattaagccgtttgctcagcaatcatccttcttaacccattgtcttgcatgt

SEQ ID NO: 13670 - DNA, 330 bp, Oryza sativa
agcttgtgacgagagtatgaagggccggctcttatgtgattgtacccgaaattctgttgtgagactgatccaagatttgctagcctgacaagttggcccaagaatctgaaatcataccatggattgaattacctgatatgttggagatagggctcatctgaagtgtccctcttgtatcaggtaggctcccaaaaaagcggttcctgtataaacacatgacgcacattctcgacaattagcctgtatcgatcgacaatgctgcactcctgaacgtttgacacagatttaactggataacgctggaactacgaaataatctgggtggcccag

SEQ ID NO: 13671 - DNA, 386 bp, Oryza sativa
agcttgagcaatattgttaatcaacatcatgttaattagtgttttgcctactctagctccctcaaatagctcgattgaattgtagaaggttcacgggatcttgttcaatgctaaatattgatgaaaagcggtagtataaatactatgcattcgtatgccgatattgtagaattagattggaaaacattcaatttgacttattttcagcttaaaatgcataagttttatttttgcaaagatggcgattagcttactacacatatatatctcactggaggtaattaaatgatactaagtggtagcctttgcagatcggttttataacatgcatgtgactcctcaatcttatacgatcgtttctctgttcccctcatttatgcacgata

SEQ ID NO: 13672 - DNA, 455 bp, Oryza sativa
  unsure (1)..(455): unsure at all n locations
ctcagctttatgaggatcgcgggttccttgtatcaaacgtatctaggattctcccttgatgcttaaattcctcttctcatttaaaccttatgcttttagttggattactttattttcgaatggtatgctatttggatactaaatctttatttntctttctcacgtaacttttttttttcatcattaagtttcaacttggtactttaagtttgatatcttcaattacaaattctctttttggaacctctctctggactttaaagctttattttagttctgaaatcttaatttcctaaattttgtatgaacttatgcttactagtttgtgaaaagaaaatatttgcttgcatttaaaccttgcgggtttttngtgctatgatgttntaatagtagactgattacaaatttaatttctatagntatgttaccctcgttatcgaaaaaatatcttgtta

SEQ ID NO: 13673 - DNA, 443 bp, Oryza sativa
agcttgccatttccaagcatctgctgcacccaaaacaaaagcttgaaataaattattccccgttgttcaactgctggcttaattagaagccttattattccgacactaaacacttagaacgtagttacaaacaccaacacaaacatatttgcaccaggtctccagttacatggcaactatcaagttactgcagtttgttcattgatcagaagaaaaccagcattatattgcagttactgttaccaccagtggaaattatattctccactgtccattctatgatcagcttccttccatcttgcttctattcactcggtgatgacaccattggcgacggcggcgatggcgaaagcagggtggaagaagtggacattggctcatggagtacactggtggtcgaaaccgatattggattgccatctagctgcagcatcactggccca

SEQ ID NO: 13674 - DNA, 444 bp, Oryza sativa
tgcatcaatacacccatcatctggtcttggacaccaatagttaatcatgagcggcggttcttctggcattgggataccttgcagctttcaactgaaccatcgatctgtgactctaatacaccggccgtgctcttctctctaacactgaccatcttctgcacggcggaagagaggtggaagacaagggttgctaaagataagaccttaaaccacttgactaatggtctgttgcgagtagaattttattgattcaagctgcttaagcaaacaacctagtatggtcgcatcctcaccaatgacgcaaaccatacccctacacacaagcagacaacacacgatctataagctaacgaaactactcttctgggacagattgggctaaggcatctcctgggaaacttcacttgacctttgctgaacgacggctctggactgatcttcttg

SEQ ID NO: 13675 - DNA, 354 bp, Oryza sativa
  unsure (1)..(354): unsure at all n locations
agctnttgttgccaaagatgacaacgtttgtttaattgatgtcatctaggctatacagctgctgataacttaaagtttctctgtttgaagttgaagtggatgactcacatctattgtttcctctgttcaccttcaaaagaaaatatggagtttgaaacataaagatcaatgaatatgagattagcagcagaaaagcacatatttgaaagtggaaaagcatggaagtccaatattggtaaatcanggtaggtagcttatagattaattcgagattctattgtgcagtttagcgtttcgagatcataccttcttctgggtactgactgaacgatcacaatgggacttccaacgttc

SEQ ID NO: 13676 - DNA, 446 bp, Oryza sativa
  unsure (1)..(446): unsure at all n locations
ctctgcaagcaagtatgacctcttcacccacaaggttgggttcaactatgctggaggttgttatcggtgtccatatcgaaccatatctcggatgcggtctacgtctgagatcttgaagtagttcatcatttgaaatgttcgctatctttntgttcaggcttctaatcttaacagcaacctcatgacgtgtccaaatattacaatgacacgaagggcaattgcaacgtgttggtttgcttgatgatgatgaaggatggtcagctagtaggatgcttcctntatatctagccaaatcaataatatcatcgacatcatacataacatctcttagttgtccaagccaattattaactgcttcatgatccaaccctcgtgtctcagcgtcattaagagaacatcgtatgtaatctgttttctcaccagttcactgagctcttcttctactc

SEQ ID NO: 13677 - DNA, 283 bp, Oryza sativa
  unsure (1)..(283): unsure at all n locations
ccgagcttcgagcttccgtgccgtccgctagagagatctcgcccgccgttcccgagatcccgccccgccgtcgagatcacgcgccaccgaggagaggagattcggcggtccgcctatcgcgtgaggacgagcgagactgcatactccagaaggtgcgtgatttcttccagatcgaagatactcttttgtcaaagaaaaaaaaaatattgaanagaanaattttgaatagaagaatatcaatagagacgatgatgcggcggtttgtgaatttggtggtggacac

SEQ ID NO: 13678 - DNA, 464 bp, Oryza sativa
  unsure (1)..(464): unsure at all n locations
taagagtagcatcaatcatatanagagtagcgctatcaacctatattaanagcagcgattctccacaactaaatccttaagatattcaaccatgaaaaatttgtagaggtgcagttattcatggacttagctcacttatgctataagtgaacaaaaagccctcataactcagtcaagagattacggaggcaaaagtccactgtaaaggagctctaactattaacaccttgaatcatgagacattaggggaaaaaacctgaagtagaaaagctggctgtgtctgacactccagctgtccgcagttcagtcacacttgctcttaatgggaaaaaataattcttgttaagtcttttttttggttntatcatataactcttacctttgttaacgctgatctcattatttgtaattnttctggtgctttggcttggcatcaccacctaatgctttcgcattaattacta

SEQ ID NO: 13679 - DNA, 428 bp, Oryza sativa
gcttggtctactgtcagcgtgagatttattgtttgtctacctaaatctggcaagtttgataccatactggcagtggtggacaagtttaccaagtttgccaagttcatagccttgtctcatcctttcacagctttgactgtagctcaagcttttatccaaaatgtgtatgagatgtttggaatgcccagggtaatcatctcagaccaggacaggatgtttacaagtgcattgtggcaggaacttttcaggctagctgatgtaaaactcaatatgagttcattttatcatcctcaaacaaatgggtagactgagcgattaaatcaatgcctggaggcttatctaagatgcactgttcatgcatgcccacataaatggtcgcaatggctggctcaagcacagtataggtacaatacctccaaccacagcac

SEQ ID NO: 13680 - DNA, 439 bp, Oryza sativa
  unsure (1)..(439): unsure at all n locations
ctattaaactcagcttacanatcgtaaaccgagtgtctatgaaacattgctatttgtatanacagatctcattctacatattatcaagggtgggcccactaatgattcaaggatattcagatgtatacccaagatatatggacaagaaatacgtatatgtactctatacttcatatatgtattcaaaaaattaaagaagctttaaactactcatcttgggccttgnttcaccatttagtctcggaataagttcaccataggtccctaacttaacaacgagatgttttgagggcccttaaccacaaaaccagatatgtgtacccctaaactccctcacaccattcaccggaggtccctccgcagtatatatcgccagctctgctgacgtggcattctagtcaacaaataaatttaaaagacatgggatcacatgtcactc

SEQ ID NO: 13681 - DNA, 419 bp, Oryza sativa
agcttattgaggatatggacctcttcatttacttgcgtggcgcgcgcgctgtacatagtttccagcaaccacaacgtgcacggagcatttcttctctcccagactctgctgccggctattgcttgtttgctggtgactgcactagcaatgaccattgaatcaaggagacatatgtgaagcgatcatcctaatttgctgcgggaaagaacacgagggaggacaatggaatccatcgtatcatccaaatttgcttggtgaagaatcgagtgatgggcactttcgctcttaatgtttataaccaacaacacatctcagcaggtccctatcgattggccatatgctgattatgatcagcacaaccttatagcaaaagataaaaaattataggtaacacctttaaaatatatatgtccttacaa

SEQ ID NO: 13682 - DNA, 379 bp, Oryza sativa
agcaataaacgtcgacacaagataaagagtacataattatcagatcctatttgtgaacctcaatccaaagttgacaaaaaaaatgcataacagttatctcaagattacgacacgttgactttagaaatttgttatcttcatcacacttttgtagcagagcccaggaccggaaccaataaattgccctgaaaagaatctgcatataggataaagttgatgactcatcaaaaaccatatcattcatgctcaaacataaagcccaacatacaacagacaaaggaaaatgtacgaattaccccctgaactatagcggtcgaccgaattacctccctaaactcgaaaactagacatcgttcaccctgaatgtttaataccggac

SEQ ID NO: 13683 - DNA, 421 bp, Oryza sativa
  unsure (1)..(421): unsure at all n locations
agctngggatccagagcggcagatgcttcttctgcctccttcatgatttcaacggacggctggccgatcgatctttcggtaattaatccttcgtaagagacggccggtcaatctgtgctatgctttataaacgaggagagtttgtggcagcccgatttaagtgttgtctcgtgatttctgttcgaaatcatccgagaggctttgagaactagtatatatatatattggcatataggaaagagaaacgaagaaatctgcacgcctaaatctgcagcgcccatgtaagtaaatcacgaaaaggaaacatgaattcctacacgtacggcatcaaaattcacaccaattataatctgcaccgccggtaaatcagtttttttgcaccgcatagagacggatcctccacattactatgccaccgaca

SEQ ID NO: 13684 - DNA, 422 bp, Oryza sativa
  unsure (1)..(422): unsure at all n locations
gaccttgatactcagcttctcggttctggctctgcccaggcatcgattcaacccctataagaacgagctatatagcggatgcgccctcaccaagcttatggatgtgcaatgcgtcaccggttgcatggtcgccctaagtcggttcatatctaggctgggagagaaggcgctacccttatttaagctcctcaaacgctccgggccgttcacttggacggaggaagctgaacgtgccctcactcagatgaaggcgtatctcagctctcccccagttttgatcgccccggagccagatgaacccttgctactctacttagcggcgaccccgcaagtagntagtgcggcgctggttgtggagcgcgattaagacaatactcattccgcgcatcctcaccctgtgctggtttggcccgggagagagc

SEQ ID NO: 13685 - DNA, 328 bp, Oryza sativa
agcttgcctcatgtgcttcaaactgcataaatttatggactttgttttggatggtaacagtcatattgctaacattggaatcatcgtccatttgaaccaaactgactagattcctagccgacaactctttcaagtagaagtagccaatgtcctccattgacttgccaacttttgaccttagaaatccctcagctacccacatagacactaggttgcgtgcctcaatggtaacattggctggaaatgcagcaagatacaggaagcaacatttcagctcatgtggaagatcatcaaagcaaaatgagagcatatcatcaatttggtttga

SEQ ID NO: 13686 - DNA, 349 bp, Oryza sativa
  unsure (1)..(349): unsure at all n locations
cgtggcttgaacgatatgtccaaagacatcaactctaaggcccacttcgcaatccgtccgtttgcttcgcgggtatgaagtatatccccgagtggaaacgatgtgaccaccgtgaccgagtgactntgaaagtagtgagataatttcctgacggtaattaagacaccatataataacttttgaacctgaggatatcttgtcttggagtcggctaaaacctcgctaacgaaataaattggtcgttggactttttgaatatggccttcctcttcgcgctcgacaaccaggaccgtactcacaacctgggaggttgccgacacatataacagtagcggctcttgtggacgtg

SEQ ID NO: 13687 - DNA, 352 bp, Oryza sativa
agctttaaaaaacaccatacagctaatgaatatctctgctacaggttgcaataaccgatcgacaagactatgcaaacaaatgggaactaccatgtgtggtgctacctctaccacatcaattgccatccacagcacctagccccagcaacaatgtgatgacttctgtgagttatagttttcactttatactaaaattttcataaagcatgtgctgttcatgatgaaacgcggttccattattaatatttctgcacaaatcttcttgaaaattcatgctagaaagtgaataattgttctatataaattcttttattgggccggattactgctactggatcgtgagttattttct

SEQ ID NO: 13688 - DNA, 408 bp, Oryza sativa
  unsure (1)..(408): unsure at all n locations
actcagctgaccctccgatgctggtgttgcgaggcttgctattgttatattgagtggccataactccggccacagtggntaagtccggtgtctgtgtttcatcgatgctagttgatgcccgacgtcngcttgccatctgtgtangttgattgattaagtatcctaattttctaaccgccttttacggctttatcccattatgggaaattgttttgatgtgaactttgttttgcaagcatggtggaataaactcatttataacacaacaacaataaatatcataaataacatcacagagtttcacaaatagtacataaatcatgatgtaatcgactgcatacatacgcagtccaaataaggttcatctcaaagatacatcgaactaatcatcaatctactcgtcaatct

SEQ ID NO: 13689 - DNA, 425 bp, Oryza sativa
  unsure (1)..(425): unsure at all n locations
agcttcgtaaacctgcaaatgcttcaactacttgtcatttctagtnataatcttcatgtcagcataccaaaagagatatttagtattccatcaataattgcaattgatttatctttcaacaacctatatgggcaacttcctactgagattggaaatgcttaacaactcgtatctttgggactntcatccaacaaagtgtttggagatattcctaacagtttggtaagttgtgaaagtttggaatacattgcgtntgactctaatattctcagcggaggcatcaccacttcattatgaagcatgaaagagaggattaagctttcgaccaaaacgggaagaaatttattaaatttttaatatatgtatgcgacccaaatttatatattttatctccatagctatgattacttaaaaacatcttaccg

SEQ ID NO: 13690 - DNA, 323 bp, Oryza sativa
  unsure (1)..(323): unsure at all n locations
acacataagaataatttcgcaccgtcggccgccccttttctcctcgtcggggtgctgccgccgccccgctcctcgctacatacagcgggtcgatggctctcggcggcgcggcagggtgatggctccctggtggcatggcgggtcagttgctccttgacgcagcggcttcccggtggcgtggtggttcaagatctatcccctgagctcgggacctccacnggagcgaggcggcgaggtataggtccatcgaggagcagcggcggccctccgctcgctccttnctctcctctcatcatctnttgtggtgataatattgctcttga

SEQ ID NO: 13691 - DNA, 375 bp, Oryza sativa
agcttcttggatttggctgacaacaatcttacatgatgaataccgtcaggatcgcaacttgacaccctctatgaagagcatccatatatgtacggtggcaatagcggcctctgcgggccgcctcttcgagaaaattgttcagcaaatgatgcatcaaagctagatggacaggaaatagctgagcgtgactttgatccaatgtcctttggttttggacactgtttggggttcgtgttcggtctatgggttgtgttctgcgtcctattgttcaagaaatcttggaggctttgttatttctgcttcattgacagaatatacgatcagatatatgtctttttagttcttacatgtaaaagatttggcagagggtgatct

SEQ ID NO: 13692 - DNA, 304 bp, Oryza sativa
  unsure (1)..(304): unsure at all n locations
ctcagctactccatcttaattaatagtgtattgttttagttgatgccccacatgcatggcaggtgtgcatgcggcatgctgtcaagagatcagaacgtggtccatgttatctataggaaacccccggttgggccatgaaggcctgactcatggagacatggcccttctgcagataacacaacaaacggcccanaatccagcagatggaaacccaactcctagacctcttaacagaaatgggcctatcatcagttggaccggttgtccggcccgtcgtggcccagcacagcacgcacccgcagct

SEQ ID NO: 13693 - DNA, 392 bp, Oryza sativa
agcttgactaagtttgtagaaaaaagtagaaatattttcaacccaagacaaatttattatgaaaatatattcaattttttatttgatgaaactaatttagtattataaatattactatatttgtttataaacttagtcaaacttgaaacagtttgactttgaccaaagtcaaaacgtcttataacctaaaacggagggagtaaatatttaggactgatgtaatatatttgtaaataacaaaatgatatgcaaattgtaaagttacttccaaaaaaattatcatatttctacagggaaggacgaaggagtattatacgtcttttacaaaaagtactactagatggaataattctgctggaggtcatgggtggaggggtggctttggtctcaat

SEQ ID NO: 13694 - DNA, 455 bp, Oryza sativa
  unsure (1)..(455): unsure at all n locations
atttatatgaccattatnttatatgagtggtttgatcaagtgttcaaatattaatgtatatatattcccatgaaatactcatttgtaaataggatcattatagtggtgatcgtcatttcatgtggatttataatacttcatgtgagattggatccaaatacattagatntaatcttactatcccattagttagttaaacctgacatcggcctatcaaaatggttcgaatatttaatatttgatttgtgatttataatagaaattaacatttgacttgtactttatttggcttgctttcttgtgcactaatatttgtaggggtaaacgtaaataatatattctcgtaaattacatctattgattaaatgtagatcttttctctactttctttgtgattacttacgcgttggcaagcaacagcaatcataacaaccagcatgatngcacaagtttta

SEQ ID NO: 13695 - DNA, 370 bp, Oryza sativa
agcttattcacggcagcttcttcatataggcattatagtattgagcattagacaatgtaaagttaacttcatttttgtgtcattgagtgtgtgttttgggcggcgggtgaggtacttctgttcaaattagtcctagagtttggatagtgattctgtccatctgtaaactgcttcctaaactactaaacggtgtatatttttgcaaaaaaattatatacgaaagttgctttgaaaaatcatattaatcatttttgaagtttaaaatagtttatactcaattaatcatacgctaatggctcaactcgttgtgcgtatcttctcaatcttctctttctctctactctcagactcacaaaaactgatgaaaact

SEQ ID NO: 13696 - DNA, 437 bp, Oryza sativa
ctcagcttaccaatcaccagagatctccacggtatataattaatattgagatggcaccgtactatataaatagagcctagtttcagctgtgcccaaatcatgaaatcaagtagctctccccgatcgattgagtactgcacaatactcgacctaagctaagctagctagctcgcttgcattgccaggcgatactcatggcacctgctcatcatcaggcagcggcggccaccaccgtcaccactcaagatatccggcgagcacagcgcgccgatggcccggccaccgtgctcgccatcgccacggctaacccggagactcgcagatcgcaggatgaatatgccgacttctacttccgcgtcaacaagagcgagcatcttcctcagctcaaggagaagctcgagaggatcttgtagcacgcatgcacaatcgaccgatac

SEQ ID NO: 13697 - DNA, 403 bp, Oryza sativa
agcttgaacctcccgatcgacgcgtatgcatgtactatatcgccggtgtggtgacggaggtggggaagaacgtcaccatgttcaaagccggcgacagggtcggcgtggggtgcatggtgaactcgtgccggtcatgcgagagctgtaacaatggcttcgagaaccactgcccggagggcgtcttcacctacaactccgtcgacaaggacggcaccgtcacctacggcggttactcgagcatggtggtggtgcacgagcgcttcgtggtcatgttcccggaggcgatgccgctcgacgtcggcgccccgctgctgtgcgccggcatcaccgtgtacacccccatgaagtaccacggcctgaacgcgccggagaagcacgtcggcgtgctcggtctgagcgggct

SEQ ID NO: 13698 - DNA, 418 bp, Oryza sativa
gcttatatgttaacataatgagtaatgccattcttttcacttgtgaacaggaatcatacatgaatttgtctgatgcaaccttcaaggtacaccaaggaggcagtaacaatttaagaatttgcatgatagttataatgctagtaaattttgttgctacttttacctatcctctgctcagttgtgtttactggttatatatgtgcacaggatcttcgaaagaaacttcccgttactcgtactcttttcccatggcacaacacattagccctcagccttacaagagacctcaccaaagaactggctatatgaaaatgaagcttgtggaggtcagttcattagattagctttgatatggattttttttatctccatgctatagtgttgtctggagatcctgcaatcatatcctgtaccaaca

SEQ ID NO: 13699 - DNA, 347 bp, Oryza sativa
  unsure (1)..(347): unsure at all n locations
tatgctgcaagaatagtgcctcaaatactatattggtagtatttatgataaatataagcatccacaaccatccttctaaacacgttagaaatgaggaccgaaaggtggagtggtcctcgcacagggaagtggtactaaccaaacaggactctggggattctttatgtgagcatgaatcctgtgggattttgaaagagaaactctcatgctcatatgtggaatgttttctctcgtcctccagagtcgatgtctcaagcttatccgcggcctgaaggttntccttctcaagagatgcatcgtgcaagaactgggttatgtcttgatgataaacaagaacaacgntctga

SEQ ID NO: 13700 - DNA, 264 bp, Oryza sativa
gcttatgtcgatgatgtgggtgtcaagaccttacttaaagacgaatcgattgaagatctagaagaaacctttgccatcattcgcgccttcaggatgaaattaaacccttgaaaatgtatcttctgaatacccattaggaagctgcttggctttatggtatcccataagggcataccagccaacccggagaaaatctacgccatcctcaacatgaaaccgccaagctcccggaaagacgttcaaaagcttaccgagggcatggcg

SEQ ID NO: 13701 - DNA, 467 bp, Oryza sativa
  unsure (1)..(467): unsure at all n locations
gatgagaagtacaaatcctataagatcagcatacattgcagctgataatagggaatgctacaactgtgggcaagtgggtcatgtgagttacaattgtcccacttctagaaacattggtggtaggggatcgattcaaggagggcatggtggatttggtggaactcgtggtggatttaccagaactcgtggtggtcgaggaggtgatcgtggaggtcatggtggaggtcatggtangggcatangtgctcctcaagccaatgcagctatggaggatagtaaagctattatactctaactggtgaacaagtgacataatgggaggaatggcagaaaaacaagaccagtgagagctccaacaccatcactcactttggtaactntgccaactacacccaagtgggcgaaggtactcangcacangtacttgcatctacatatagacattctatagattggatcatagactc

SEQ ID NO: 13702 - DNA, 346 bp, Oryza sativa
agcttcacctgaacatattgcataatcttacttttcccagtataaaccgggcagggtgattacggagtgtgactattactcttttcttttaagataatgatgagcaatctttttgcgtgttcgcgagacaaagacacgtagaaaccgaaaagctgggcacagttgtcttcggtgcgacaagagcacaccgaaaggttgagagttgctacattcccttcttattaatatggacaaaaccatgaattactggacattgtgagagatatacaattgtgttgtcgtcagaacatgagtggcatattatacagatgacgcagtactaaacaagtgtgatatgatcaaatat

SEQ ID NO: 13703 - DNA, 411 bp, Oryza sativa
  unsure (1)..(411): unsure at all n locations
ggcgctggagccccgtgattgctattccgccaaactatgggttatcgcgtggagaaggcacgcggagggaagaacaataacgtgcgggaatttacgtgtgtgttgccgaaatcgcatcgcatcgcttcggcggattccaaatctattcttgactgggccgctgctggcggtcgtcagagctagagacaatcatagtggactaacaaccgaaattgtgctttggtcagctcaatggttgattgctgtttatctgtagtacgaggtgctaacatttactaaggccttgtttagataataacttctttttcttcagacgtctaatttatgtcttcacatcgaattctcctacacacgcanagtttcactattctatcacatcgttctaaattcttccaactttctaatttaaca

SEQ ID NO: 13704 - DNA, 427 bp, Oryza sativa
  unsure (1)..(427): unsure at all n locations
tattgatnactcacatttgtctgtggtcctatgccctaacatgctatgtatttagaactagcttctcccagaggtaaaataattcaaaacaaatattggaatagacagtaaattttacattttaggcaagtagcaatactcatgcagtcatgccatatgaacattgacgtgcccaaagcagtggctcagaactttcactcgtgaaagttagcacatggaagactatagagactccatgtgcatatagcatagcagagtatgtacatgaattangatacatagatcagatataatccatcaaataggtacaaatgcaggtagacattgtatcaagtatggtttgtcgataagtgattgatttttaatgtggatgtaagtatggaacttttcaactataaatttactncatgaaaagctattataacat

SEQ ID NO: 13705 - DNA, 374 bp, Oryza sativa
ggcacatcataacggaagtggaagaagatggacgttctattgccccggccgaagccgccaagaactatgtacgtcacagcggttgggttgtgcgggataacgtgcctgtcagtacagtgtactggcgaagaacaagggcacgaggagatcatgagagctttgtcccagattcggagaaagagatgctgtggaccacaatgctcgagacattcacccttcctgctggtacagaggacaaagtgaataggtggactctgaagaaaatggcagaacagtttcagaacttcaagggagatctgtacaagaagtatatactgaatgggcagacaccgaacttcgacacattcccaaagctaagggatcactgggacgag

SEQ ID NO: 13706 - DNA, 244 bp, Oryza sativa
  unsure (1)..(244): unsure at all n locations
cttattntatgtcttgaccctcttaataacgcgttttttcaaatagataattatatagacaaatttatttatgaataaacatatttctcgatgctagtgacatacccttgtcgccctaaaccgtagcagacgagatgcagagggattagcgatgagatctatttgtaaaatagaatttcttacaaagaaggttaaaatataaatatttcaattccaaatatgctcttgacttaagagggggggg

SEQ ID NO: 13707 - DNA, 422 bp, Oryza sativa
  unsure (1)..(422): unsure at all n locations
taattntgaagcaatgggctcggctggaggaggaagaaagtgtatataaagctgtgcaactttagtcccgggtggtaacaccaatcggacataaagatctcaaatcaaccaaccgggactaaagatcccaagccccccgacagaggtctgacatgccctgtcagaaggcgaaccgggactaaaaatctttagtcccgggtggtgtagatcccttcgtcccgttgaagtaataaaccgggactaataagccactttagtctcggctcgttttggaaccgggactattgtggaaatcggccgaccctccaaagatctcttctccagtagtgtacacagtcaggccgtcggtggtttggtcaggccagcgaagtcactatgcggtggccggacgctatgactcacacaggatggaaggggtaatc

SEQ ID NO: 13708 - DNA, 366 bp, Oryza sativa
gattgatcacgagttgctactatgctgcatatctcagagatacaggtgctaggtatatataccctcactcaaattaaataatctttggcacggtggcttacccttacccctgattcccacgaaacactgcttctccttgccttgggcgggtgaaagacagaacatcaattatagtaccaatcacccaatctttattcacctcttattcccgaagtcttcatatgatttttgcaaaagagagccaagttcctcacatgattcactcagtctctctaagtgtatcagtatgaaattcctcaccaaatgttgcttgttgattctactctaaagttgtatgtggagacggtagggatacacatgcatact

SEQ ID NO: 13709 - DNA, 286 bp, Oryza sativa
  unsure (1)..(286): unsure at all n locations
agcttntgattntactacaatatgagntctgtaaacatatattaatttgccttgagtttgattattactggagtcatatgtactgtgtactgtgtaaatattggggtgcagatgagctgatcaagacggccaagtacatcgcgacgccggggaagggcattctcgccgccgacgagtcgacgggcaccatctgcaagcgcctggccagcatcaacgtggagaacgtggagcccaaccgccaggcgctccgggagctcctcttcacgacgcccggcgcgttccagta

SEQ ID NO: 13710 - DNA, 392 bp, Oryza sativa
  unsure (1)..(392): unsure at all n locations
cctaacgaacttctctcttgcnggccggtcttcttcgactagccatgtacatactttgtataattntttccttctctattaatatatgnggcaaagcttttgtcctcctttaaaaaaaataataggcaaatttctaagtgaccgaaaagggcaccattggctttatggatggtgacgaatctatggcgcatctaacgtaggcaaaagcgatcaatatatacattgatatatcgtacacttaanttggataanaaaaagtacatgcacgacactccatcaatcatggcaaatgcatatgttatggttttcgttcaccggggtgcttgtaccatatttgccgctccttagagcaggtacaatagcagactattagtcacctgcagacatatttt

SEQ ID NO: 13711 - DNA, 385 bp, Oryza sativa
  unsure (1)..(385): unsure at all n locations
gtcacctgcagctgcagctgaagtaaacatcgttagtttgagtctaaaactttataaacatgatatgtgaatatagaatctgatagatggatatatacacccccaataatacaggcccagacatggaatcatattctctgttttttttatatacacccccaataatacatatctagtcagattttaaaataagacagagccatccagtcaaggtcccctctcatattccacaatatgtgctagtattattatttaattttgtgcctttgtacaattctctatatatacctgatgcatcaataaccaaccttgagttgccttgtcagtccacgtgctgcagattcttaatgaatntgtntcgtgcgtgcttatccagaaatataaa

SEQ ID NO: 13712 - DNA, 413 bp, Oryza sativa
  unsure (1)..(413): unsure at all n locations
ctcagcttaagtcaattgctctctgttcacaactctgtgatgaanatctggaagttcgtttcanaaaggacaggtctcgagttcttgatgcttctgaatctcctgtttttgacatttctcgagttggtcgagttttctttgctaacttcgactcttctgctcccggtccttctcgttgtctcattgcctcagagaatagggatttgtttttctggcatcgacgtcttggtcatattggctttgaccacttgtctcgcattagtggtatggatttgattcggggtttgcctaagttgaaagctccgaaagatcttgtgtgtgcaccatgtcgtcatgggaaaatgacatcttcctcccacaagcctgttacaatggttatgacagatggaccgggacaactgcttcacatggat

SEQ ID NO: 13713 - DNA, 377 bp, Oryza sativa
agcttctgctatgcgtttaacataagctgcacaatgcatgcatgatccccgttatcttcctctacgaccagacgaccaccgattcctccctgctggcctgaccaccgtcacttaagttaaagaattcgctctaaaaaaaatttggaatctataatctcttgctttcaactttttttttaagagatcttgctttcgacttgaaatcccgtatgtctaaattagctcatgggccccctctctcctacgtacacagtacattgattcaaatgcgtacctgatttttccgttcaaaaaaaaaatgcgtacctgatttattattactaggattaagtccactttaagccccttaaatataggtccacgctaagtctgaattc

SEQ ID NO: 13714 - DNA, 449 bp, Oryza sativa
  unsure (1)..(449): unsure at all n locations
cagatcaacatacacagagaatcgaaggcggctctgtgcctttgaccgaaaacagagacgcacctgctgccaccattttggaagctgtaggccgagctgacggcaaataccttgtctttaaacacaattattaattcttctctagtgttcctatcccacaagaattattttcttactgtccttacaagttatttccttgcggattctcgatagattttggcactttgccatagacttatacacaccattactggtaccatgtatgaatgcgatcagaattcatgtctatgtgatccctacaccaaaacgcatcagtagtggaatggttntgcagggtgaaacacagcgaagaanaacgacaatatccaataacatgtcattccaatcttaattaagattcgtacacgccgaatactatcgagaaaagaanaaggtgacaaacattcata

SEQ ID NO: 13715 - DNA, 439 bp, Oryza sativa
agctaggcctgctggagttcacaactttatatcaagtcaaggcaataaatgcaacaccagaccagacaaataatattctttttttttctttatactagcataatgtacaggtccaactgatatttgttaagtaggaaaaaattaacaaatgattacatttatgttgatacatcgagtcatcaactgcttgatacattactgtgcaagaaactacactgttttacaatgaaataattaaattcagcaagctggagtatgacggtttgtctacattcctgtgccactcgagctcttgaaatgcggtcggagctagagctacttgtttagcttccagcatatccatcatgaatgcctcattagctgctacaagactttccaaagcagtaacacaaaacatgggataggaaaaaaaaagggaacatataaagtgcgaattaaa

SEQ ID NO: 13716 - DNA, 438 bp, Oryza sativa
  unsure (1)..(438): unsure at all n locations
aagagaaaccatcagctntcagaaaacataatattatataatagtaatcaatgaaacttaatggaaagacttccctttactcgctcactactatctccgtcttaaaatatagcaatctagtataaaatgagataaattctagtactttaaatctgaacaggcataaacattaatgtaaatgtgagtatacattcatcattgtaagacattcacacataattactctgctatatataaacatctctagctgagccgacacatacgtcttggtatatattcacaaaattattataaacacttctctcgctatcgattggcatgtcatctaatagaanaaacttaactaanatagctgtggtatagtaaactaatatatatatgtgcatgtatatagccttagtggctagtgatcgatggtgcagcattagagcaagtata

SEQ ID NO: 13717 - DNA, 411 bp, Oryza sativa
  unsure (1)..(411): unsure at all n locations
agcttaattaacctttgcccgtgctatcgcatgtagttgttgcacgcccattagtattgatccagtccaaaccagttctccatgtagtcatctaagcttgcatgctctgtggcaaccggagagaaattccacttgttagaaccctaaacccacaaaatagagagctaaagactaaaaccacagcttcatctatcagaacactcaatcctcgatggagagctaataactgaacactcactcttcaaaattcacatcatccgtaccaaaattaaaggttcagccttagtaaaattttttgtatggaattggataagaaaacatataaatgtgatgagagctgaggagaaacatgacctactggcctggtagttagtgttggaaccttgaactctggatgatggctgngatgct

SEQ ID NO: 13718 - DNA, 458 bp, Oryza sativa
  unsure (1)..(458): unsure at all n locations
gcgaggttgagtccacgctgaagaggcgcgaagatgacattctcacataggcgctcggaaccaaagaacatcctggccggactcggggaattggcagcgatttgccttggaagcatggactgccgcagcacagctcccaatacaggaaactgaaagtcttcaaggaagaaagggacgctcgtttgaatgccgagcgtaatgtggaggccattcaagaactataagcaagcatggacgctatggtggaagaaagggttaacaaggtcctcgccgacatgaatataccccgaggcacaacacatgctgtgcatccaacttctcgtgcacaacacgacgcgagtctgtcacagcgtatgagtatgtgtgcatccacagaggtgacgaccnctggtctcctggtcgcaccactagctgcagtggaccacatagaggtaattattattcgatccatatctaat

SEQ ID NO: 13719 - DNA, 305 bp, Oryza sativa
  unsure (1)..(305): unsure at all n locations
agatgccttcatgtatatcaaggaagaggtgtctgccgtccgccgacgaaacgcatttgagaagtaccccgtttggcgctttcttgtatagatcgttgccgatcgtgcaatagattntcgctttacgggttattttctcagcctctgcgtcgtcctcgggcaactcttcgctggtggatgaattgatcagtggggtgcgccagtcgtctatggtatcgatatcggcaacggcgcgttctgcctctgtggcctccgagctgatgtcgggggtgtctgggttaatttcgccgctgacctctttcact

SEQ ID NO: 13720 - DNA, 312 bp, Oryza sativa
tgcacgcccattaatattgatccagtccaaaccaattctccatgttagcatctacgcttgcatgctctgtggcaaacggagagaaattccacttggtagaaccctaaacccacagaatagagagcttaagactaataccacagcttcatctatcagaacactcaatcctcgatggagagctaataactgaacactcactcttcaaaattcacatcatccgtaccaaaattaaaggatcaaccttaataaaaatctttgtatggaaatggataagaaaacatataaatgtgatgagagctgacgagaaacatg

SEQ ID NO: 13721 - DNA, 468 bp, Oryza sativa
  unsure (1)..(468): unsure at all n locations
tcacaaagcgagggtgagtccacgctgaagaggcgcgaagatgacattctcacaaaggcgctcggaaccaaagaacatcctggccggactcggngaattggcagcgatttgccttggaagcatggactgccgcagcacagctcccaatacaggaaacggaaagtctccaaggaagaaagggacgctcgtttgaaggccgagcgtaaggtggaggccattcaagaactagaagcaagcatggacgctagggtggaagaaagggttaacaaggtcctcgccgacatgaatataccccgaggcacaacacatgctgtgcatccaacttctcgtgcacaacacgacgcgagtctgtcacagcgtaggagtagttgtgcatccacagaggtgacgacccctggtctcctggtcgcaccactagctgcagtggaccacatagaggtaattattatccgatccatatctaataaa

SEQ ID NO: 13722 - DNA, 233 bp, Oryza sativa
atcttaagtcgacgcagctgcagctgtcacagagaccaactgttgtttttgtcagggcaagtgccgcacctcagagtgtttgtaaagacctgacggatctttaaaaccccgcagctgggactggtaccggtgccctgtatttcagcttctgcaacgagaggagagattggcgagctttctacgacgacatgaactatacagcactttgcacatgggatatgacgtgcccagag

SEQ ID NO: 13723 - DNA, 414 bp, Oryza sativa
  unsure (1)..(414): unsure at all n locations
gacatattgccagaatatcattcctgctcttttttgttacatatagccggcgattgcggatattgctctattatctgtgagctgatactcctgtcttgcataatgcgtctcatgtagcattgtgccaaccaaattgatgatctttaaatacaccagcgatgtgtntttgcattgcaaaaatgcaatggaattacagaaactgtgtttctttgaactgaatatatattaaacaaatttaaaccatgattttctgagattacctctcagtctctcgcatctgttttatagcgtgagaacttngtctaattaccaagggatcattcgctatatgtttccacgtaccaagtatggcttgatttgtcaatatccctggtgactataacttcaggcctcaagaaatgtcgtcatgtgctg

SEQ ID NO: 13724 - DNA, 426 bp, Oryza sativa
  unsure (1)..(426): unsure at all n locations
agcttaanatcccttgagtttcatgattgttatatactctgtagcttaccattctatggtatatcaccaccgtgcatcaacctaaatgaggtacccgaggttccaattgagaacggtatgggtagcattggcgtattctcatccctggtcgacctaaagattgtgaagtgcgattacttatcaaacctcgacaaatttatacaaccagcttgtataccggctatcaagcgaatcacattacaaagattaacatacacaaagacaaaggtattgcctctaccaattggtaaatttgattgcctcgaagaaatggacgtggctggttaccagatattcaatgcttcagaaagtctgtccatgcgcactctcaaagagctcaagctatgccattctggggaacctccatagcttttagaagttccctcc

SEQ ID NO: 13725 - DNA, 367 bp, Oryza sativa
  unsure (1)..(367): unsure at all n locations
cactaagtatcctggtcaggtgacaaaaaggacagaaagcatgaaaaatgatgaatcattctgattgtatgcaccacaagaagagaatgatgaaatgcagatatacttacaacaactggagcttataaagctggccaagagaagctggtatttctcccaccaaaaggttgtcttctaaatctaagcttgtcaaactataaagattaccaaattgctctggtatgccaccggaaatcctattaccagccaaggacctgcaagatcatacacaacagcatttcataatagttggagagaatcgacaggagaatcatattgcacttaacctaaccatcagttcatgcaggacacanaaacatactcacac

SEQ ID NO: 13726 - DNA, 439 bp, Oryza sativa
agcttgagcaggccgcactggctagatccgctcgcactgagagtggcgatgggagccaagtcacttgcctgtcaagccaatatagtcgatctcaccattcccgtaaagccgctcgatctcccttgccagcctgccactccttcatttcgctcggtctagattgagagagaaaaaaagacaaatggcacatgtggagggctgagagaagagaagagggagccagcctagcggtgacgatagtgaggaggacgcgcgatagttccatagagagaacgagaggatttagtgagatagacagagagatcaaccaggaaaggatttttgctggccttcaaataatcgatcgtccagctagctcaatcggctcagctcagtgcaatacccatctataccgatcaatgtagaaaccgacagaagtctcacagtgtcggtggtttta

SEQ ID NO: 13727 - DNA, 377 bp, Oryza sativa
  unsure (1)..(377): unsure at all n locations
tgaatcaagagcaccttgatctgataccacttgtacgcacagagatgtagcctagagggggggtgaatatgctttcctgaaattatctcaacaatcgcagcggttaaattaacacggcccggaacctcctggtgaagaacaccggaacttcctggcagagatgagcagcccggaacttccggagatcttgagctatgaaattccgggccacagagaaaatcacaatttggggaagcaaaacaagtcctagctagagacaatcaggcacaagggtgcacaagatgtaaatcacaagataccagcagattcatacacacatcatgcacaagagagacaggcgattntttcccgaagttcggatcacacggatcctactc

SEQ ID NO: 13728 - DNA, 334 bp, Oryza sativa
agcttctaaggagccggacggtcttgtatcttttatgcagccgggcgccgctggaccattgaaggagcccggcgccgcttgatgtccgaggcagccgggtgcggccggaagtccgtggcaactggttcccaacgcggcaaggcccgcggttgcgccgtacgttgaggacatcgaccgatacctccggtctctcgaggagagggggtttcctgatcgcctcttctactcctagtcgcagcttgcgtgtggaagcttgaactgaatcaagaggcacatctaatgctatggacctagtggtatgattgggatcgaaaattctaaatggattgtgggc

SEQ ID NO: 13729 - DNA, 422 bp, Oryza sativa
  unsure (1)..(422): unsure at all n locations
tctaatcntgtgccaagtcccgtcgtctcccattgatgtccttcttccttgaggaaatcctgtcctcagccatccccctttatgtccaactccctgttcatctccatccattccttgggatgtcctctatcacattgcttcgctgccttccctcttttgaggcttccttcccttaatggatgttggaaggcgtgaagccaacaagcaattcgctttagcctgatcaaagacgactccatgtatgcggctctaggccgcaaccttcagtgcctctcccnctctggggctttcttcccccaaagggcgttggcgggcactgttctagctgcaacaagaaaatgtttggattcttgaaggcttcatgcgggtggtctagtacttccatagccctttaggcaccactttcccctgccggcatgctc

SEQ ID NO: 13730 - DNA, 413 bp, Oryza sativa
  unsure (1)..(413): unsure at all n locations
agctttagctgatttccttgccgagtggacctagtgccaagaagacatgccagaggaaaagatggaatattggactatgcattttgatgggtcgaagaggcttacaggcactggagctggggttgttttaatctccccgactggagaaagattgagctacgtattgtggataaatttttctgcgtcccataacgtggcggaatacgaggcgctactccatggactaaggattgcaatatctctaggtattcgccgactaatcgtccgtggagactctcagttggttgtcaatcaagtcatganaaagtggtcatgcctagatgataatatgaccgcttatcgacaagaggtacgcaagttggaaaaataaattgatggactcgagctcacccatgtccttcgacataacaatg

SEQ ID NO: 13731 - DNA, 415 bp, Oryza sativa
  unsure (1)..(415): unsure at all n locations
ctgctgaaatgaatgatgtcagactaactgctttgtcgttcctcttttttgtatcaactgaaatagtagccagaagaatcttcatatcaaatttcatcaaaaaaagcaactgatgctctgaataccccaccaatgagaatgtggatgagtttgacttgctttgtgtttcactgttactacctaaagatagattctggatatcanggtagcttgctcgtcccgtctcaagcagagatttcaatagctccaactctttcatcaatgatgaaatggcttgatcaactacatcttccaatccatgttgcaggacaaaaaggtaagtggttgccacatctgtgaccatggtgtggtttggatgaagacgcaaccgagatagaaatgagctaanatcaagcaaggcttncacagcagatgc

SEQ ID NO: 13732 - DNA, 381 bp, Oryza sativa
  unsure (1)..(381): unsure at all n locations
agcttctccaggtttcatctcaaatttatatgttctttctttttgaaaagaatcacgaccgaaggtctttaatagttattttgtaccctcggattaaaattatttcaaagcacacccacaatcttcatgagcaggtttgaagatgagccacacggatcataattcgaacgagaaattccacttcaaagaatattgcgagctttgcaatttaattcaaaagcagttttttcagcagcagtattaatagctttaggaatcacacaaggaagagaaacttttctccaaatatcataattctcagccataatgtaagattgcatcctactacaccaatgagaaanatccgttccatcgaanacatgaggcttaggtaaaaactta

SEQ ID NO: 13733 - DNA, 483 bp, Oryza sativa
  unsure (1)..(483): unsure at all n locations
tcacgttagactcaccaaataaatatatgcctccaggactagtctatttggagntgtgtnttctccaaattgccaaaggtgagacgaggcacaaagacatcagtgtgcatacacatctaagccattcaaatgcaattttgatgtacagaaaacgataacccattgctgatacttgccattaacacgccaccatntcagggcaataaattaataaattaaacacaccattcttagtccattataatcaaattgccaggaaggtgattaagcaagcacaagccaccacgcacttactcatgtccaatggtaatttagacaaccatatatatttatgccgacataatatataatnntaacaaaaaacagcagtcgctgctccgatgtctagtacgacgaaacgagaatagctagcagatacagtaactgtaccatatagatctaatcaaacagatgacatgcccatgttgctacgatacgagatga

SEQ ID NO: 13734 - DNA, 473 bp, Oryza sativa
  unsure (1)..(473): unsure at all n locations
gatactgatttcttgacaatcttcanaagccatgccttttctggagctgaaaccagtgatccttggctgcgcgagaagctagagaatgccaagaagatctccagaaggcttggacaatcaccgttggcagcaaaagctgtcggttctcagttgagcaggaaaaaggatatagctacatggagagctgctntaaagaatggcaacttaagcgagactagaaaagctctattgtggagttatgagaagttagatccacgtcttcagaggtgctttctgtattgcagcttatttccaaaaggtcaccagtatgaaattgatgagttggttcacctttgggtggcggagggattagttgattcatgctaccagaataacagaatggaagatattggcagagattatttcaatgagatggtgtctggatctttctttcaaccagtttctaanacatatgtgggtacacggtatattat

SEQ ID NO: 13735 - DNA, 384 bp, Oryza sativa
agcttctttaacatgtttggcctatgaaattgttgctcttctcctatacatatgatactgtctacgaaatatctcgcgttctctgttcacattgcctgaatatatacattcattgtgcaatctgagatgccctttttcacgaggtataacttatgaaagttgacgaacatactgcgaagttagagatggagctttttgtcaaggaaaaagaaacgtttaacggtttgaaagaattacaggcaacaaagcaggttgctgacgaccttgagttacagttagagaaggcagtatctgagagtgcagcttctgctagaggtcacagtgatgcatggaatgtgtatccactccctgacaccgaacggaaatgcgagtaccatactgggc

SEQ ID NO: 13736 - DNA, 294 bp, Oryza sativa
agcttcagtttgcccctgctttagatggcgttaggtgggtccagattttgtaagataataaaatagataaggtaaagaaaagaatgtttacaaaatatagaaagactattgtacccctgtaaaaaacacttaccagttaccaccacctaagccatccaacccattctcctctcccattccaaacaggtggatgcaagcgacggagacggaggtggcggcaccggagcaactcacgagcaggctgcgacggcgcaagtggcagcgctcaccagcgtgagcagcggctgctcggta

SEQ ID NO: 13737 - DNA, 340 bp, Oryza sativa
cctatacagtagaactgcacgcgtgcgatctagccattgacctctatagagcgctcgttatgtttgtctccggcgtcggtcacgcagcagcggtgatgatagcagtggctgcagcaacctcagtctcccgctgtttttgagccgcacgatcttccttggccgcgcggcgaggaaggtggccggcggttgcggtccgagcgacaaggggagacactgggccgtcgtcgatgctggagagcagaccacagcgaacgtatgcggcggttacgacggtcgccgggcgctgttgttcttgctcaacatggtccagggctgctttctgcacccgtacaggtacgta

SEQ ID NO: 13738 - DNA, 399 bp, Oryza sativa
  unsure (1)..(399): unsure at all n locations
tactggtacttgaagctgaagagagtgtgcagatgcaccatgtatatatagtactgtactagtgactgatccgtgggttgaatgaatatttgcgtgcatccagatctgcgtgcgccgcaactatctgttatcgattgatcggtcgcctcgcctcaccaaacgtgttactccctccatatattaatttatatgtatgacgccgctaatttttcaatcaatgtttgaccatttattntatttaaaaaatttatataaatatgaaaatatttatgtcatgtttaaagaatatttgatgacgaattaagtcataataaaataaataataattatataattctttttgaataagataaattattaaacgttgagaaaaagtcaacggtgtcatgcattattacg

SEQ ID NO: 13739 - DNA, 424 bp, Oryza sativa
  unsure (1)..(424): unsure at all n locations
agcttccaaaggatgaaagcggaggtataatataccagctagaacggatgaacatccactcaagtgattagaatcaatggcgtagaaaagctaagagtgagagacaatatatatatatgtcaagggagaaaagagccatgcgccttcttattcctttagctaaaatgcgacatcctaaccattggataggtatgtatccaagggctaggatcagacgaagcgtcgacatatagatcctttngtctccttaattggatttagaattntttatttaaatttctttctaaaagagctactagcactaccagcctataaacctgctcatgcctctcttttgacatacttatattattccacttatctcactatttgtgtgtcttacgaaatagtaaaccgtcgtgtacaatgggtattaatatatttt

SEQ ID NO: 13740 - DNA, 434 bp, Oryza sativa
  unsure (1)..(434): unsure at all n locations
agcttgacaaacccggtgtgatgtctcgtcctccacgattcgacaacatcagctattcgatgccatcttctccaacgactgccacgattgcgtcaccatcttcgtcttcagcgtatcgctgtgcacctcggtccatgatgcccttcagtgcgtccatgaccactccttgccgccccttgcacgccatgtggcttggctacctcgacactagtaccgtgacttcggctacatcgaccatggctactctacgtacgattaccttgatcaccatcgtgtcccatgctttggctacctcaataacgacacaaagggctatcattggttgagtcttntatcggtgtcttctttagaccaagcgtccgctctgctcactctttgactatgggggaatgttagagtatatggtaggtagatgattattatgataggattga

SEQ ID NO: 13741 - DNA, 413 bp, Oryza sativa
  unsure (1)..(413): unsure at all n locations
tctcgggttcttgatctttgcccgaggcattgaggccaaccccgagaagatacgagctatagagcggatgcgccctcccagcaaacttatggatgtgcaatgcgtcactggctgtatggccgccctaagtcggntcatatcgaggctgggagagaaggcgctacccctatttaagctcctcaaacgctccgggccgtttatctggacgtangaggctgaacgggccctcactcagttgaaggcgtacctcagttctcccccagtcctggtcgccccggagccagatgagccgttgctactctacctggcggcaactccgcaagtggtcagcgcggcgttggtcgtggagcgcgacgaggacgaccctcgctccgcgcatccccaccctgtgtcgactcgacccgggagagagc

SEQ ID NO: 13742 - DNA, 400 bp, Oryza sativa
  unsure (1)..(400): unsure at all n locations
agcttatccgtctatcanaatattcaactgctgtataaaaaacgtacaacggaaaaatataagttcctaggctcctagcagacatcattgatccagctaagggaaaagagaatgatccacctcttctcatagagatcgtcgatgtatttgtcaagaacaaaatcctgcgagctaacttgctcggtggcctgcgcgagctggaggtcggacagcgccgtcgacaccgaactcacgctatccacgtcactacctccgtcaaattggtcctctccaccaccgccaggcgcttctcaccacccttgttttcttactaaagancaacggaaaaaattccaatgcaccgacagcgaagaccagcaggggaatccataaatggatacatgatcgaactcttgccatg

SEQ ID NO: 13743 - DNA, 422 bp, Oryza sativa
tctcagcttaagcctgaatccctttatgcatatctggatgtggatcctgctgaacaaacatataggatgagtagtatctgatataaatataatacttgatgaacattcaaacattctataatggttgtgaatatgtatttctcctcttgtcaattttgatttccccgagcagatgactccttacgttcaaacactctgtccgactagtctgtcatgcccggaaattcactagtaattaccaaacttatttgtgcataaaaccctcgtccagaaatcagccgaggtacacaaactgacaattcaatatacaaatccatcataataataacgttacatacttacaatagagaagaaaacagcagcggaataacgggctatcgatggcttcagcttcactctcacaggcagctcaactggggtat

SEQ ID NO: 13744 - DNA, 379 bp, Oryza sativa
  unsure (1)..(379): unsure at all n locations
agctngccacagttgcggcaggcgtcttctcgtgccggcttgtggntgccggcggcgccgccctgagcgcctctgcgagcgccaccctcggcgcgtcttctcgcccaccgcagctggacacctccgcgtgccttgtgcagcttgcggccgcctgtcgagggacaagactcccccttcctcccgtcaccctgagaggcctcccactgctcccgagtgagatggagcttcccgccaatggtgataagccccgagagaggttgtggctcatcaccgtcgacgaccttgaggcgacccaacgcctcctcgatcgacatcgtggagaggtccaacagagactcgatcgagcgagcaatctgcctgtacttctctgggacgcaac

SEQ ID NO: 13745 - DNA, 337 bp, Oryza sativa
  unsure (1)..(337): unsure at all n locations
cgtcttccaatatgtggcacggcactttctctcttcaagtgcatcctcgaggcctacaaaagggaacaactttagcaaatccaacttcgtggttatctatgaagactgagattcagaggctgatgacccaacctagagtacgccgaatgagtgagcttaagtgctaaccagatgggacgagcacattgtcgggtccaccgccactagagcgcgttcgttgacattcgaggcggacaaagtcacgggagaaacaggctcgacatcgagaacatcangacctcctccatgctggacatcctcgtcaacaatacctctatagaatacaaaaacctctatg

SEQ ID NO: 13746 - DNA, 340 bp, Oryza sativa
agcttgtcgtcactggcgaaggggtatcatctcccttctaggctccacaacactggccgaccatcgtcatggtacaagagttagccttctgatcgctgcagcacatacttagtattgagcggtttttatgggatgttaagggcgcaacctatcctgagaacgataagacgcgttccacgaactgggtggccctcttgtatatgcgccgacaatcggagccaaaacccaaattatgttgggtcgccttcgatcgtagtggctagacttgggagtactgcgccgtcaatcttcgcttcacattctcccatgcatgatggtgatggtggaatatatgtgtgcg

SEQ ID NO: 13747 - DNA, 449 bp, Oryza sativa
  unsure (1)..(449): unsure at all n locations
gtattaagaaagtaggtgagaataattggaggaagtgtgtgattggttgaaaagagaaagtaggtgaagaagaatggtcgtgattggttgagaggaggaggtatgtgaagaaataactttattttatgacaagacactgtgctagaaatagctacattctatgacggtgggagtagtacattntaatcatccactaaatcaagcatgatcggcttaattcctgatcagaacttggtggtggcgcacgaccgcgtgcagtgggatacgcatgatttcatcatgcacgacgcccatgataagagaacacagtacatgtggcagcatgtatgggaatggatagcactatctagcttggccccccgtgacaggcacgggctccaagaagagaccaccgacgtcaccggtctcatatggattgngatcctgtccttgtcagacgtactactgct

SEQ ID NO: 13748 - DNA, 303 bp, Oryza sativa
agcttcaatttatgacccgatttttgctgataatctctcacataaacccaactcaacacataccctctttccgaatgttgataattccaacccacgaaaatatcaaactttttcaccgacgcatagcaaccgaggcatagcaactaactcgctcactttgcaacggcactaatgcccgatggcgcccgagcagcacgaccagcagagtggtcaacccgctggtagccaacatcaccaccacgtgatgaaccacctctaccagcgcctctgcctccatagtcggatcgataattgaactcaccc

SEQ ID NO: 13749 - DNA, 464 bp, Oryza sativa
  unsure (1)..(464): unsure at all n locations
ctaagcttatacatctctcaagtntagtatatagtctctagagtatagtggaatagaaatagaatagaatctttagttctccgagtcttcagaagaattcgggtatggctctagtagctnttccttcttttgtaagacttgcacttaatttaaaatactcttctttatactactttggtattggattactttccgagtatatgatcgaaatgatcaaataccaactttattatatatccaagttatatttattatgatgctagcttatcanggagatgcaatggtgtgggtataatgatcgtatttacgatgactctatgtcatgacgatgatattagactagtattntgtaacttaagcgtggtgtttagaatactggatatcattatttgtggttatattctacngaagcgaagtgggccgctgatggtgacagctcaatacgggtatttctccgcgcgtga

SEQ ID NO: 13750 - DNA, 387 bp, Oryza sativa
  unsure (1)..(387): unsure at all n locations
gcaagcttgatccaaccagttagtatccagtatgttggctttgccaagtattgccgagttcatgatattgtgcttgatcttatcataagcctatcgactggacaaaatttcgtcgcaatagtggatgaacaacagcattggagttctttcaagaagattcggaggacctggttcccatccaatggcacagataatagaatagtcaagaagattacgaacaactgttcacaagttcgttcgctgctcttctttgagaatcctaaaccgaaacaaataccacaatntaagaaatgccatgctctgcgggtattggatctgtatcggtgtaggaacctggatagctagcatattaacagcctaacataccttttgcagttgaagtatctg

SEQ ID NO: 13751 - DNA, 245 bp, Oryza sativa
aacgacaatatttgacatacatatccacatcttacaaaaatggagatgaatacaaatgctgcagaaaagaataactagctatactttgaaacttgacttctgaacggggtgactccactccacatgtgatccttgacgacagcgactaaattaacttctggtagacactttccactacgaagaatcttcattctggttgtggggaaaagagagcaacactgaatactaccaactgtattcagcaa

SEQ ID NO: 13752 - DNA, 360 bp, Oryza sativa
  unsure (1)..(360): unsure at all n locations
agcttatncttgcggacttcgaaacgacattgtttttttgtgccggancngacaaggatctcatctagagtgggaagaaagcattgatggtgacgcacacacctcatgtgaccatagaggcgaggcgattctcgacggtcgatgaaagcaacattgagcatccgatgaccacaccctcactcgtctagatcttgtggatgttgctgttgaccctgtctcagatgcctctcaaaactatcgtggtccactgatgtctcgcatagttggtcgtgtgagaaaaagattggaaggggccaccgacgtgtctgggttcacagtcctcaccaccgccattgttgaaatatagtgctctacttgaag

SEQ ID NO: 13753 - DNA, 472 bp, Oryza sativa
  unsure (1)..(472): unsure at all n locations
tctgcacttgcttcgtgagatgactgattgccttctttataacctctcttaaaggctcagcatgaacaactggcagtctatggcagtatgcaatgcatattatcatcagtcagaatgcgacagaagggatctcattgcagtacaaggaaatgtactattgccaaatgcatggattaactaaagtgcatgtaacacattaaaactgatatgcatagttgattttttatgtatctttaatgtttgatagtccacaacacttcatcgaatggtgtgtttctagctttgtgacataaagtagactagaatctgtggatctaaggatgtgtcagaattcgaacagcagtaccttatctcanaattatatgtgcatctgacagattgaagagaagctaatagtttagtatacttgaagtcacatggccttaaacggcctgagctcatatcacatatacgacaggcccacctgtaacac

SEQ ID NO: 13754 - DNA, 427 bp, Oryza sativa
agcttatcatcctcactgtgggagaggaagtattattgatgaattttatggacagaacagaaattgagaaaccatgcttagtgctattcattattttgcttgctcatgagttctcattgaagtatacatcctgtttttcattactatcataaggtcattatcattatagctgttatattacatgtcgactgtaccatgtaatgaatagtgctcccatagaccctttgtcccataagacgtacactcccctgaatttgttagctatagcatgtgacaatccaattattgtggaatgtgtaaagaagaagcattacaagcttttactaaataattactttatgaaaacaagagcaacttttttcgtgctgtttcagtgtactattgtgaactgagcgttctatgagctaaatgggaggcttctgttttt

SEQ ID NO: 13755 - DNA, 439 bp, Oryza sativa
  unsure (1)..(439): unsure at all n locations
agctttagaagcgtgcggctgtttgtcaaaggcgccaatgagggggacactgngacagccgatcctcgcaaagtccaaagatggaacaggttgtgctgctacacagagccatacagctcgctcgacagcttccatgaaagtatggaaccacggngctgacatgagggcccgacgccatttcatgtttcagacttatcagctgtactagtatttctctattaccttaaaaatggagccattatttttcttcccaaccattgcacttctctcactcaaaagaaaaggaaacctgcctgtaggaaaactcacaaaaaaacgagacgttcccacacgaaattgatcaanaaaagatgaanaaactaaaccccgtaaaccatttgccatctttcttaaacgatagcttgggctctctactctaaattatactatcaatattata

SEQ ID NO: 13756 - DNA, 464 bp, Oryza sativa
  unsure (1)..(464): unsure at all n locations
catatatactcggttgtaacactaaaactcattttcggtccacgcgtcaacagcggcccctagcagaacgtattgacccaccgggtatacataaagatcatatcggctgaacctctagtgtatacttgtatgaacccctttgcctcacgatatcgattgagctcaaggctaaatatgtgacattctctaatagctcaatcattcactcgaacttggtgatagattatataacttgtgattgactcctcaatcacctttggcatggccatgcacttccataatctacaacatcgaggagcccagagatatctctccataagaggggcaaatcccatcttgattattcatatcccactacatgtttcatagcatacccgagaactacttntataactacccaattacggagtagcgtttagcagtccctaagtaagctactacatatgtngagaagccatgatatc

SEQ ID NO: 13757 - DNA, 346 bp, Oryza sativa
  unsure (1)..(346): unsure at all n locations
agcttcctacatgtcggtttatcaagcctatttatattaaagccagtgcatgtgtatagactgatgatggtgtgctgcccaacgtacaagcaagtgtactgttcagccctcaagcaagcaagtaaagaaaccagttaaaactagcacaagcttctctgctcctcttctctgatcccctgcttaagaaatatttagcaccaacacgatgaacgcgtcggggaggttgatgtgacgatcgaattggtangtatcgaagaggaggtggtgttggggaccttgaggtggagcagtggagaggaagacccagccatcgtcgtacgcgccgatgtagcgagcgtaccgcacc

SEQ ID NO: 13758 - DNA, 378 bp, Oryza sativa
  unsure (1)..(378): unsure at all n locations
ggcacttgctccgatgagctggcttcttgaggtatggacataatagcatagtttgctgcagcggattcagcctccttaactgtgtgaaagtattccggactttcaaatgctttgccatctacagtcactactgacttgaaccgagatgcatgacctggaccttcccgaattgtttggtacgaaggcaacaagtntgcccttcttctgagcataatattgcaactgacttttgtaagaagaatggttttctgcaataggaaaaatcattcaatatgagaaatatagagaatatataagtgaaaaacaacaattttcttacaccatgccagtacacggtgctcttagaccccgcaactacaaatgttacctattatatac

SEQ ID NO: 13759 - DNA, 323 bp, Oryza sativa
cgcaccacctctctccgagcgctagcggtgacgacagcgagcacaacccgcgtcgtcaaactcgtactccgccgcccccctttcgtcgaagtcttaggcgggaggaggcgctcgagggggtccaaagatccgtgacttcgtcgcccaccaacgatggagaatgacggcgagactgggagcgtctgcttcctcgctacggtgatggcagcacgccccacggcgcgctccaggctgcgggcgcgctcctgcgttacccgccccgcgtccctgattcagagactacaactctacgtttgctaaatgacgtggccaacttggtcatg

SEQ ID NO: 13760 - DNA, 421 bp, Oryza sativa
  unsure (1)..(421): unsure at all n locations
agcttaatgatactntgcatgatttgcatcctttcctgaatttgtcagnctttgtcttcatatgtggtcgctgggtgtttcggtttggatccgattcctaacacgaggtttacatgaatcccatcccatactgttcagagggaataagacattgtgaatcccatggnttatctatcgatctatctatctccaaggctggagcatctgcataaatatgtgacatcagacttgtacgaattcatcgttccatgtttaccctttaaacttttgacaaatttatatgaaaaanaaaccaccaaattcaaatgagttttgcagaaatcgaatcctttcgtctcaaaattataactacttctagcatttcaaaattatctcanaatataacttctttattaacaatcacttttcattttcattacac

SEQ ID NO: 13761 - DNA, 460 bp, Oryza sativa
  unsure (1)..(460): unsure at all n locations
actcagcttattaatttccggatttgacatgctgcttcttacctctggtagagatcctggtatagtaccacgtaatactcacccacctgagcctgaatcgattgatggaggcagtgatatgggaaatggacagactccacaacaactacgtttaccacgcacgaaggatgttttcgttaatggagtaattgtgaaggtcaaatactgtgatacctgcatgctgtaccggccacctcgatgctctcactggtctatatgtaataactgtgtggagcgttttgatcatcactgcccttgggttgggcaatgcattggaagggtaagtatcttgatgtgttggaaggtttaagatatccttattgcaattagcttgaagatttgatatcatgtgcggnngtgtgggctggatacctcttggtggattttctatattagatattagtagaatgctagttactac

SEQ ID NO: 13762 - DNA, 376 bp, Oryza sativa
  unsure (1)..(376): unsure at all n locations
tgacaatgtcctagaaaacataaatgtcaagttagatggctntgcttctgcttttcaaaattagctgagctttaataaaatgattgaaacccagctagctcaattggcatccttagtccatgcaaatgaaactgggaggatctctgggcaacctgactcctccactgaaaatgtcaaggcgatcacgacgaggggaggtaagtccactcgtgatccgccgtatcctaaccctgcagaaactaatgggataaccaaagaagcgtcatctagtgactcggctgagaaagaggtttagccagaaaagacagtaccgcaagagtactgcgacacacggttgctgncgttccctcaacggagtaggaaaccgtcagcggac

SEQ ID NO: 13763 - DNA, 502 bp, Oryza sativa
  unsure (1)..(502): unsure at all n locations
actcagcttgctactctgctggaatttatgctcttacaattgcactcattcttttcattccagattcatgtgaatgaatgccaacaaaattctggagatgctcttaaagttttgggtaagttcactcgtattatggtcactcgttatttaaatctggttcaatgattgcatggctctgtagctgatgcccatatcttcttttggtactaataattcatacttatctaataatattcatccatatgctctcatgctgtcacctgacaattgtttntttcatatccgtagtgtaagcatattattttatagatttgtatccaattaatgggggcagaagctgcaagatctgccttcatgagttgtgtccaagctgacctcatttatttgcatcaatattgtacaactatctcttaatggtggaaattacaagatctgcttttaagaattgtcttcaagcctgcagcattagttgcatacttgcatcatattatatgtataatca

SEQ ID NO: 13764 - DNA, 407 bp, Oryza sativa
agcttgtgatacacaacactagcaagagtcgtcttgcccaaacctccaaaaccaacgatggagacaaccttcaagtttcgcttggactctacatcatcatgcatctccatcagcctactgactagatcatcggtcttcttcttggtgccaacaagctccgaaacattcttatacagtgctgactgcaggcgaaggctatcgacagtttggtgaccgacaggcctggctactgtaacaccatcaaccttgtacttatcgcgcagctcactcacctccttgatgtggctcttgatgtctctgatgttggcaccgatcttatggcgaatcttgaacttggtcaacaggttgaggcttctgtcgatgaagcccctaaagctgcgatgctcgtcgaagtggaccatgaagct

SEQ ID NO: 13765 - DNA, 296 bp, Oryza sativa
agctagctcattattggtgctcattaatatgggcctccaaaggcattgagagaagtctttgatgtcaaccgtagtatgggagagtcgatatcgttcacagactaattaatgttggacttctccatttgtccataaataattgatgggtgccaagatccaatttaacttgctaaatttgaccatatatagcctatataatatagttagtttcaaaaagtaatgactgcagatatatcttaaaaagtactctgtaatctcctaaacttatggtattgtataaatgtattctaatataa

SEQ ID NO: 13766 - DNA, 295 bp, Oryza sativa
  unsure (1)..(295): unsure at all n locations
agctagcatatgaaccacatcgcaatctacataatctgcatatgagccaatggaaaacaaaaccctacaaacctgtgttacctttgctcttccggaatcgtttaaccactgaatatggtaagggtgtggatgtgtacgtgtagtcaagccaagcttcttgaccaaatcagaactcaacaagtttttgcagctacctccatcaatgatcacacgtgcacgatggttgttgatgacgaagaanatctgaaacaaattatagcgttgcaacttgtcatgctgctgtacatacgtgctg

SEQ ID NO: 13767 - DNA, 392 bp, Oryza sativa
actctagcagcggggcgactccactccacaggcaatccttgacggcagcgacgaaaccaacctctataagacagctccaactatgaagatcttcagctctggtgtgggggaaaagagagcaacgctgagtactatccactgtactcatcaagtcataccacaagaggaggtatgatgcaggatatatccaaaggaggctaacggttcatttgcataaagcacgcatttaacagcagtagttgaaagcagtaaaacaattgtagtaattaattaatattaaccaatcattgtgcaacgctacaccacgctgcaacaggcccaaccaaccacttaaactacaccagttcattaagctaaactatgggtgagactaatcacggtgaatctggttg

SEQ ID NO: 13768 - DNA, 269 bp, Oryza sativa
  unsure (1)..(269): unsure at all n locations
agcttgccaacacttgagtcttggtccacatgaaagctcgtgctcattgtggttcgctgcgctggggccgggcggtggcgcacgtgggtggcaacatctggtgcttggggcgtgcgatggcgtttggccgagcgatgacgcangtgggtggtggcattgggcgttgggggtgagcagtggtgcctatctctatggacgagcatcattaactggagacgcagggcgacggcaccatacgctccttttggtgatgacgacaggttgagcga

SEQ ID NO: 13769 - DNA, 454 bp, Oryza sativa
  unsure (1)..(454): unsure at all n locations
actcagcttgtggtagaggtgtggtcaactctctgtggtgtgaggaanattaatggagatagtgtcactatttatatggatcatcagttngtagtactatatgggtacataattaagggcgacatatcagattagctcaatttggcgatttgcatgtatctcttcctgattacgaagatggacatcctcccattcctcctacgcgttttttttctctcaaaaatgtactgcacatggtatatcagaaatcacgtgatttgatcgatcttttcccctccatgtatgactgtatgatgagtggaggaatggaggatgttatacgaagatggattctaatccctatagagagggataatttgtactatgtgaatagtactacaaatactgttaataatatgttgaaattgatattttccacaatctaaaatatcattttatatatccgacatatata

SEQ ID NO: 13770 - DNA, 437 bp, Oryza sativa
  unsure (1)..(437): unsure at all n locations
agcttcttcgcggcacctcgatgtttgcgtgtcctcttctggccagcggaagggtgacttccactagcctccttctcctgggtgcccttcacatccctctccacgtgccccttctgggtcccctcacatccctctccacggttcctttctaagtcaaatactggtttggatcctcgttcccctcttcttcattccaatactggctgcttccctccgcgattgtatcgtacaataattggtcctcatcgcgatcaggcatctgttcatacaggaaacagctgctaagtcatgagacatctatgntttaacaatcttatatactaacaatcatatatgctaagtcatatatactacgtctaactgtcgcatatgccaaagcctatatgcttagtctaactgccgtatatgcaagtctaactggcgtatatgctcaagct

SEQ ID NO: 13771 - DNA, 348 bp, Oryza sativa
cacgttgcacgggtggaggaggaagaaacggctctgctcctagctcacgcaagcaatcaactacctccagcggcaccggcccgagcggctttccttcaccttgatgagccgaaggactcgtctccctttgcgacggctccagcaacgacaaggcttgagggtggtacctcgacaccggcgccacccatcacatgaccaggcgacgggagttcttcaccgagttcgactccaacgtccgaggcaccgctcagttcggggacgccatcggcgtggagatcaagggtgttggctccgtcaccttcaccgccaagtccggtgagcacaggctgctcaccggagtctactaca

SEQ ID NO: 13772 - DNA, 390 bp, Oryza sativa
  unsure (1)..(390): unsure at all n locations
agctntgcaccggcaaaaaagatatgccgcataatcttcatccaaagtgcttaagtagatgtgtcactgcgtctacctcanaaaggcgtcagtcaattcagatgaagcgtcagatatggacaatttgcagaaaaaaatgtttcgtatttgtatataaaatatgtgttgtgactgacaaattttggggcacgaagaaattcgagtaattctctgatgaattcagacgaagagagagatatatatatcatatatattgtgagagaaaaagaagaggctgagaaagattcatgcatatgtattgtggctgtggaactggaatattttctcacaatggagagcaactacttgaggagacctgtcattttgcccgcaaatgctactactactact

SEQ ID NO: 13773 - DNA, 410 bp, Oryza sativa
  unsure (1)..(410): unsure at all n locations
agctttatatagctgccccgctgactntnttatatattcaaagtgctgtttgggtttatcaagcaattgattggatacaatatcattgctttttgccacgtaagtgtgcatttttattgaccaatattatggcttaagttgattatatattatggtcatttttcaggcggttggtaaatcctttatgagtttacttactcggatgttataccatatatgccatatatttccaggtgtggtgaaaccatgtgtcttttatggacttaagcacatctgttaaagcagtgtgcgcatggcgtatgcccaatactttcgaaatttctttattcacagcattcaagcttctttatagtttgtttgctatgtgaactctcaaagatgttgtcaactttaagttgtacgcatcatat

SEQ ID NO: 13774 - DNA, 374 bp, Oryza sativa
  unsure (1)..(374): unsure at all n locations
tgtctgaaacctgtgcacacctcgcaatggcgtgacccgcagatacacatagtcatccactgcgaactccagatcacggcgacggttatctgcataacttttctgccgagactgtgccacctttaaattatcccgaatgattctgactttagcttcagcttctctcaggatatcagtcccgaacacttggctttctccgacttgatcccacaataacggtgtccggcatttgcgcccgtacaacgcttcataaggtgccatttgtatgctggctngatagctgntattgtaggagaactcggcatatgggagactcttatcccaagtcttcccgaaatctagtacacatgcgcgaagcatatcttctaggatct

SEQ ID NO: 13775 - DNA, 445 bp, Oryza sativa
agcttcggactatactactcgttgaccctacttttgtttggtcgccatagccgctgtgcatggcttcctccacgctctccagagtttgatttgctcacacggttctaccggcactaccactcgttgcctacaatcccaacattgacctcgtcctgatctagactccttccctagaccctacctgtctgcttcctatcatatcgtgccatcgcttatcccgccaatgaggtcatcctttgtacgccaaccctagtgaccattatgaaagacgggagagatcgagatagttgagggtgagaggacagaggtatagaaatatgatagggtccgacgccaccgattaaagcctggtcaaacatgttatataagacacaatcattgttcaatccgggtggggaggctacaacgaactggtcttatagctgggaagacgattacctaattt

SEQ ID NO: 13776 - DNA, 375 bp, Oryza sativa
agcttcaagaagagctgtgtacccgattaatcttctttatcgcataccacccgcagacagatgggcagaccgagcgtctaaatcagatcctagaagatatgcttcgcgcatgtgtcctagatttcgggaagacctgtgataagagtctcccctatgccgagttctcctacaataacagttatcaagccagcatacaaatggcaccttacgaagcggtgtatgggcgcaaatgccggacaccgctcctgtgggaccaagttggggaaagccaagtgttcgggactgatatcctgagagaagctgaagcgaaagtcacaaccattagggataatctaaaggtggcacagtcccggcagaacagtatgcagataaccg

SEQ ID NO: 13777 - DNA, 295 bp, Oryza sativa
agcttgtcgtaatttgagccttgtatttgtggagctcctgactatgcttagctgaaaaacaacagatcatagagtcaaaaaccgttgcttgagtgaagatatgcgttgaggatgtccgagtagaaatcttgaagaattcaccaccacatgtagtagtagtttaatgcggtgtcgaatctggtagcacatgccaagatatcgatcctgttgaagacatcctggttggtgaagtagtaaagctcgcaatgtagacgcaatatagttttcggatgccgaatacaatgaagatgaagtc

SEQ ID NO: 13778 - DNA, 450 bp, Oryza sativa
  unsure (1)..(450): unsure at all n locations
atgaatgtatntaaattggcgggtactaatcacatagtaatttaaagttttacggactatataaacagccgcacaacaattttaagcattaataaaatattgtccatttctaaaaaacgaaaagaatctgtcaagggtatggataccatatacctaatagtagtcgactaaatctcggcaggacccaccacataccacgtcttatacggacactgacctcggatatggatggagttccggataaggaaagacaaccagagttctacatggaaacgataaggactactcggattgtatccatattggtttccctagttcatcagagatatgcctggatcggctctatccggtacctacagaggccggccgtanggatctagcgctatctctgatctcgccgagcacaaactcgaagaggaagactacctattgtcaactacgagtcagaac

SEQ ID NO: 13779 - DNA, 406 bp, Oryza sativa
catgcaagcttcggatgtgcatcgactacaccgttctttacaaggcatgtcctaaggacccttaccccctgcctcgcataaatcagattgtccactccacagcggggtgcgaccttttgtgttttctagatgcatactctagttaccatcagattcgcatggctagggaggatgaggaaaaaactgcattcattacccccataggaacttattgttatacgacaatgcccttcgggttaaagaatgcaagtcctacttttcaatgtactactcgaatttctttgggtagccaaataagacgtaatgttgaagcttatgtcgatgacttgattgtaaagacgcgcaaccaagagaccttactctcggatctaagcggaaactttgagagtctccgctccgcccgcat

SEQ ID NO: 13780 - DNA, 421 bp, Oryza sativa
  unsure (1)..(421): unsure at all n locations
acccacaatatacgtgtacctatgatagtacattcccctggaaggaatataatggccactcatatatgcccggaagttaaccttaaaattgaggaagttgacttcctagccaaaccgatagtcctagactcgcanagtttggacatcatcctacggatggattggctggctaagcacaaaggacagatagattgtgccgaaaagtccatcactttgcaaggatctggaggaaagcaagtccgctttacccctaacacccctaccgcaagtcggtctatcctaacctggttacaagtcacctncttggagtcngtgcctatagtctgtgaatatnccgacgtattcccagaagaattaacgagtatgccaccagaccgagagatngagttcgccatagaactggcaccaggcacagcttcaa

SEQ ID NO: 13781 - DNA, 437 bp, Oryza sativa
  unsure (1)..(437): unsure at all n locations
agcttagtgcagaaaagctgagttagagaggtatggcatgggatcataaaggaagtgttcaggtgcagaatgaaacatatgttaaagttgaagtggaggcaaataatgagaagggagttaggaggtatgcgccaaatcaatggtttgaatttaatcatcaagttccttcgccaccatattatatatatattcttcacctatgcaaccgaggcctatgtcttggccttattataattcttggatatcatacgagtctttatattatggagggatgttaccatatagttntgcatcttgactattagttgtaggtgttgttatcatttttagagactgaaataattaggtgctagagatacttatgattcttgtattatatataactcaatagaagttattctggtcatattttgtgcaagtggggaaggtgttgtact

SEQ ID NO: 13782 - DNA, 427 bp, Oryza sativa
  unsure (1)..(427): unsure at all n locations
tgcgtcaccgcccgtcctcatcatgggatggacgagtgactcatcctacaaaatttcttcaaaggattaaccccctcgtcccgggatcatctggacgctgctgatgaaggagcacccttctcaaagatggtcagagatatcactgacctgattgagaagaaggtctcaaatatgggttggagcgaggaacgactccaaacccgtcaacgcggcatgtgcaccatcgagaggacggaaatgctcaccgctcagttgtctctccttatgaagagactggacaacaatgagaaggatgccaagcagggcaccgttaaggccctggactntaacacaacatgtgaggtctatggcaacaccggtcactctgggatggattgtccanaaacccgtgagaacgtcatgctcatgaacaacaacaacgggaatc

SEQ ID NO: 13783 - DNA, 438 bp, Oryza sativa
  unsure (1)..(438): unsure at all n locations
agcttaaatggtnatatggaggagaggttatattaaagaaatgagagtgaaatagagaagttaattggtgacaaatgcgttgaggttagtgtaatagaggtaatatattgtataggttatttttaaatttatgagaagatgacgtggataaaacttgcttgaaccaacttggggatggtgttttcaagcaggaatcctatctcgcgcagatgcgcgagcaaactaactcggatctactaggctcaccctaccctacactgcagntgttagcattntttttctctttntcgagtgatttcctctccttccgtcagtntcccgtgcaactttttgtctctcgagaatttttttctttntctcgcgcaactttttcctttnttttttgcaagaatattttttcccgtgtgctatcangctaagtttcaacttttcatttat

SEQ ID NO: 13784 - DNA, 390 bp, Oryza sativa
  unsure (1)..(390): unsure at all n locations
tatctcacatactggttgggatcacacctctatgcanaaactgtccacattnnttttgcttttgcaaagatttcaggccactctccaagaggtctagcatgtaatcgaaccgtatgaatttctaatacagcgataaaatttttcatggatataataatagccatgaaaactccattaacataatatagatggtgactaaaacatcacttggttaacatgacagacagcaagagttcaaaaatccttcaagaaaacagaagtggaggttctcatagaaaaactaaacgatagaacggatagtagcaagaattcctgccacatagaaccataatgccatgtgaatttcagtaatcttcagatcgtcaccatcatctcgcatggccaccaccg

SEQ ID NO: 13785 - DNA, 384 bp, Oryza sativa
  unsure (1)..(384): unsure at all n locations
agcttgtgactgaattggtcatgagaaatgcggttatcccaaagntatattgccttgtccgcaagttaaccatagaagatcctgagtacatgagaccgatggtagctattgacgagcaaatgaatgctaacgtattagccatcatgaatgcatgaaaagcatacctcccagaaaatgttggtgtgcctccataagggtgatcatcagctctatatcctccaggaagagcaaacattgcaccaaacgtcacagtcacaattagaaccgaaccaatgcctagtggttgtgtcgattcttgcatcttgtctaattcttcggccagatcctcttttgataccacacgacggctatagatttcttcgatgtgatccccgcgatcgtgat

SEQ ID NO: 13786 - DNA, 434 bp, Oryza sativa
  unsure (1)..(434): unsure at all n locations
tctcgagatccaataaatgatggatccttgtcaccgatttcaacaaggactggctgaatctccctgaataggagtctcaaatacatgaatcagtctgacgtcataatttgtaaagtgtaaaaaaaagtctctccagttgaaagcacatatggcaagctagatntatgttattaatcaacaacaccagactaattgcattntaagtaaagcataccaaaaataccacaattctgttccgggtttcaagaatacattactaatacttatatcgaacaaatatagatgtaaatgacctgggaattaagtgtgacggtgaacaacaagaaatgtaggcatgaaaaatattattacatacaaacctgtgtgatggaagcattatagatgaatactggtgcaatctgtaccaagacatgatagttggtagagaacgataa

SEQ ID NO: 13787 - DNA, 350 bp, Oryza sativa
agctttgcgagtcttgactatctgttggctatgaagtcaacttcctcaagggcgtaccgagcccacttgttgaactgacttaagtactcattgacactgttgttgccttgtttaagtctgttgaattcttctttcttcatgtcaataatgctttccggcacatgagctgcacggaaagccgtaacgaactcatcccaagcaatggtagtgggttcagggtgtgcattgcggtaattctcccaccaatctgcggcaggtcctcttatctggtgagaggcgtaaagcgtcttctcaaccggagtacactgcactaagttgagttttctatcaacatctttcaaccaatcgtc

SEQ ID NO: 13788 - DNA, 202 bp, Oryza sativa
  unsure (1)..(202): unsure at all n locations
cgaccaccaccgtgctacggntgatctatatatccagtgaggagaagggttatagaggctgatcgaccatcgatcgacgtcgtggcgagcggctagtgttcgttgtcgtcgtcagcggcggcgaggtggtggtggtggtagctacgtacgttgtggacatcgatctaaaggtagaggcacggaggtggaggaatgttaccgc

SEQ ID NO: 13789 - DNA, 442 bp, Oryza sativa
  unsure (1)..(442): unsure at all n locations
agcttgatgtatccattaaagagttagtgaatttcatattgtatccaataaagaaaaagggactccatagattcctctttgattatnntttaattgagcacatttattgagatataaaagcatatatacatgataatgaacagtggccatttttgtgtaaggtgatggcaaataatgttactcctattgattactctggtaacaaataaagaagatattgaatcttgtttgcctgcctatagtcctaaagcagcaaaaaaaaacataggctttgaattaataagtgtctaaaacattttggactaataagtgtctagaacattggtctttattagcatatattcaaaaatgatctaaaacacaaataaactactcgggccattccctttgtggagtactgttcagaagattcncccctaacttcttcctaagataaaaataa

SEQ ID NO: 13790 - DNA, 317 bp, Oryza sativa
agcttgatattgcaaccatctgagaacttcaatcgtccttcatctatggccgaaagaacctatcatcgagacacattggaatcattattggaacgagagtgagaatcatgctatttacaataagcacgatggtggtatgtaatacagtctcacataaaatactgatgcgcactgatataccaatgtagcactttccctactgagtatctcaaaggtatcgaatccaaaggaactgttgtggacaaatcttcctacacctcatccaaggataccaagcagaagataggctacgatatagaggatttactagtgagaag

SEQ ID NO: 13791 - DNA, 423 bp, Oryza sativa
  unsure (1)..(423): unsure at all n locations
tagcgatcgaccttctacaagaaagctattgggcaccaaagtagtatatgtgtcacacttattcaactgacggacacacatatggctgttggagaaagctgcatatattgttcaccactaatacgttacagatctgtcctagttcactatacaataccttcaataaaaaggtttatcttatataatggtcattaactaatatagcttaacgtataacaatgttggaaataatatatgggctaatgcccactcgaagattaattctttctgaaatcatataagcccacctcatgagatggcgtgcatgaagagtttaataccactttgcttattctatgagaggnggacctccttataanggaggatgcccttctagccacttgaagcatgtgtggtggagagaaatgagaaacacatgcgcac

SEQ ID NO: 13792 - DNA, 428 bp, Oryza sativa
  unsure (1)..(428): unsure at all n locations
cgctncccttcgctgtgcgtgtcataggatatgtagttgactaacagagccttgccaggtgggcgctcatcctccagccgccctggcggccacccgaatgtgcctccccacaaaccggcatactcccggccaggcatgggcgcctgcgttgtcagcttgtagagcacacaccggatgttatgcatgcttggccaattccggtagatagacagcctcatccgcgcgccacggaggctcaagccgacgctctctccggctcgcaagaactcgtccaatggcagatgcttggggtgggcgactcacccctggaatggcggacccgaccgtgcaccatttgccgacgctgtcctgacaaaccggcaccaccgaaagggtctcgaaccgcatttgcaccgcagagcaggcgcatcgcgccttttctgccccac

SEQ ID NO: 13793 - DNA, 423 bp, Oryza sativa
  unsure (1)..(423): unsure at all n locations
tctgcaacagntccatagtacagcgtcattttaagagatcagtataacaattagaaccttcaagcaaggtgaagctgataagaaaatgagctacctgagtgggaaccacgcagcttgaagagaaccgggcaaaagcgcactgccactattgctttacttgcgccagggagttgtatcgcaggcctgtatcaccacaacaaggttgtgatcctaaaataaatacagaactaaatatatggtatacagggtatatgctaaagtatatgttttttctgacatataattaatgaaacgttgaaaattaagtgggacatatgaaataccataagttcctgtggaaccattttatcagctaagaacatctgtagggaatagcatgttnttatcatagtacaagaatgttggactggccattgaatgctc

SEQ ID NO: 13794 - DNA, 451 bp, Oryza sativa
  unsure (1)..(451): unsure at all n locations
agctagagaatatgttattgctgaaacaaatatgatatcttgtttggtcaaatcattacaaggttccctcccttcctctattatcttaacctccagcctaaccggtccctctctttctattccaccgttgggcccagcagtcatccaggtgagctggtgtcttgaggccctctcacccatgctgctgcttangtatgagccgaaccagttgtgccacgtccaaccatttaatgcgttgtgcctgcctatcttctccctccagctacaaaaccattacttttcagttcattacatgaataagcaaaaaaagaacattattagagttgtcgaattagacttatgactgaattgagggtgattaagcctgaagactaanacaaaccattntaagagtaaaccttcaacaacaacaacattttatgtagcatacttagaacaggataaatattat

SEQ ID NO: 13795 - DNA, 161 bp, Oryza sativa
cacatggagcggagtctactatatcatcccacaattatattattctctattaagatgaattcaattgagaatatgggttaattttgcatataccttacccaattaacttgctgtatgttgggtcaatttggtttttttttggaactgagagaatacaccgt

SEQ ID NO: 13796 - DNA, 383 bp, Oryza sativa
agcttattgttgagctcataaactgattgtgtatgcatctcttttctttgggtctggctttgtgtcaatttgattgcgtgtggttgtctaatacttcctccgtttcacaatagaagtcattctagcatttcccatattcatagtgatattaatgaggttagacatatctctctatctagattcattaacattaatatgaatataggaaatgttaaaatgacttacattgtgaaacggagggagtactatgaattaattagtaacaagtattactgttctactggtgtgaatttttagaatcacctgaactcctaagttgaactgtgaaatgtgctataagggggcctggctctaatgggtcatttgttattgcaacttgttat

SEQ ID NO: 13797 - DNA, 346 bp, Oryza sativa
  unsure (1)..(346): unsure at all n locations
agtactgaatnagcctgaacgacattgtttactgaactttcttgtgtaattcacaagaaatgttattttattctaaagccataacacagtagtgacaatactaaatcatgtttccttctcggctgcttcatcggagacgtcgtcattgcagatcttcattgttatctcgatgggagaagaccagcgaggatcatacccttctcccaccttccttttctcaccgngtcctttttctaccttcttgcacttctagtcttccatggaactctcaacacgccggcaaccatcacgtatgtattgaaacatcatcatgatggcattcgcgtgccccatgtaataattcccc

SEQ ID NO: 13798 - DNA, 320 bp, Oryza sativa
  unsure (1)..(320): unsure at all n locations
agctttggatggctgtggcaacatcatctgtctgctcttaagaaaatagtttggtgatgcggatcatgttatgataccaagattcacggtctgtttagttttgccatctgatgtacaaatatatgttctgtaagtctgcaaaggatggcacaacagcacagggcaatctaccttctgctccaaaaagtgaaaggccttacccaagcccacttcttcctccgccaccatcatcaaagaggccagttntcacggatgcaagcagtgttgactatcttagtggcgactcctacaagacagaaaaagtatcagatgactttatt

SEQ ID NO: 13799 - DNA, 432 bp, Oryza sativa
  unsure (1)..(432): unsure at all n locations
gattatttacagaaaagactattttatgtatatttgggaaacgtgacacgaataatccgcttagaacaaggccttgccactttgtgcaactgtacaatcagccatcatgtccttccaaaatatttatcggtgttgcattctacatatatagattctgctcgatttcattcgtgctaggttcaggtagcaccatgataactagatgatgcctcatacgcgctgctgcgtgactnggttaacatcaattaggtagataggaggtacaatctcaagaagaaacagaagaaacaaatagctttcttggaaaaattctttttagcatctctattccacaattgtagataatttaagtagcacatgtcaactaaaggggcgtttagccatatnagctctttatacggattgacgggctggatacatgtanatgtatgt

SEQ ID NO: 13800 - DNA, 344 bp, Oryza sativa
  unsure (1)..(344): unsure at all n locations
agcttttcttggcgcaaggaccttactagctctaagttagtggcgtggaatcaccttgtctcacgcatcgctatattatattatctcacgaccaagatgagtttaaatggaatctaaccactgatggcagattctcagttaaatctctctatcttgcgttggtgcagaccgatgttcccaatataaacaaaagaatctagaagatcaaagctccccctaaagattaatatcttcttatggtacttacgccgtggagtagtcttaacaaaagataatctgattaaaaggaattggagaggaaacaagtcttgttctttctacctcanagatgaaactattaatca

SEQ ID NO: 13801 - DNA, 428 bp, Oryza sativa
  unsure (1)..(428): unsure at all n locations
actcagctctgcctgactgagctgaacctctgtcggtaacatccctgctgatcttggacaggtatcaaagcttgtggttttcagtgtcggccacaacaatcttaccggtgatattccccaagtcactctccaacgtcaagaggaacttcatccatggccaagatttgagttggatgggcaacctcacatcattgagagactntattcttgaaggcaacattttcactggtaacatccctgaaacttttggtaagatacttaaccttacttacttcagtgtccaaaataatcaattggaaggccatgttcctctatcaatcttcaatatttcttccataagaatcttggatcttggcttcaatagactgtcaggatcacatccactcgatatcggcattaaacttcctaggataagtcgttntaacaca

SEQ ID NO: 13802 - DNA, 404 bp, Oryza sativa
  unsure (1)..(404): unsure at all n locations
agcttcatgatgggtctttctcaccagttgattttgctctgccctttgagaaagaacctacaacttcctcagcgttagttgtcaaagttccaaaatttccaaatgattcacatgatgaattggaggaagagaaagaaacagaagttggtgatcatgatgatggtcatacaacatctgatgctgctttgagtgaaagcactgttgacagcttcaaaagcaaatctcatgtatcttgcgatggtgctctagcatcagccttggaggcacttctttggtcaaccaagaaaacaccatcttcgcaatctgctgcttgccctgccagtaattcaactgctgacaatactactcgatcttctacctgcccantttcttctgaacaaagtgatgagacatccactaatgat

SEQ ID NO: 13803 - DNA, 472 bp, Oryza sativa
  unsure (1)..(472): unsure at all n locations
tctttacggacctatagatactcaagctacgcctcgtggtacaatctgaaagtacaatgcaatgcttgtgtgccacggctataccctaaaggatagcgatgattacttctacacatattcaccagttgctcgctcgactacgaatcgagtactacttgctctggcagcctctcattgacttctcgtccatcacacggactgtgagacaactctcctatacggagagctggatgaagagatctatatggatcaaccacacgggtatgtactataaggtcaagacggaatggtgtgtaaactattgaaatccttgtatggcctcaagctagcacctaagcaatggcatgagaagcttgacatcacgcttacatctgcangctttgttgtgaacgacactgacaaatgttgttactatctctatggtgggggagaacgggtgatcttgtgcttgtatgtcgatgacatactgatc

SEQ ID NO: 13804 - DNA, 399 bp, Oryza sativa
  unsure (1)..(399): unsure at all n locations
agcttataggtcggaaatcttcagctttggtagcatcagtctttctaggaatgaggcatatgtgcgcacagttcanatcatgaagtctgtagtaacccatgtctccaaagaaagaaacagcttgcatgagatccgttttgataatgctccaggcctgcttgaaaaaagccccaatataaccttctggtccaggggccttttctgagggtaagtctgagatagcctccttaagttcttcttcaaagaattcttcatcaaggtcggagagatctactgtcggcaggtccagagatgaccagttcagacttttctccctaataacaaaggaacctagcttttgagtgaagtatctggtggagttttcttctttttggcttttgtaactgaacactactaggg

SEQ ID NO: 13805 - DNA, 370 bp, Oryza sativa
  unsure (1)..(370): unsure at all n locations
gaataacaagcttcacaagaaatataagagagctataaaatcaacttgctgaatttattttattgcagcacgattaaatgaaacaacattgtatagctgttgctggaaaatgagccattattacaataatagatgtacagtactaataacactggaataaatnntcaacgaaaaccattaaaagagattatggaatgcatgtgccattattttggttcaattaaaagagaaagagaggagaacagtcctacttttccaatattgttagaaggcttgtatgggttacaatatggcataacctatggtcatggggctctgataccaacttgtcacgcccgcgaattctatccaaaattccagacgcttacat

SEQ ID NO: 13806 - DNA, 413 bp, Oryza sativa
  unsure (1)..(413): unsure at all n locations
agcttctcagattctcgtgcttgtgttcgattgcaataatcacatggagcttaagagtcaactatcctatcaaccactggatcagcaccagctttattcctcaaaagggaaaaaaaatcccgattgtactctcatctttattctgccccagcagcaatctcctctatctgaaaaatgctgtcgatctgtcatttgtgttangctggccctggccctggtctggccaccacggctcagttttggtgcttttgtagctaacttggtcatgcaaagatgctttctcttctgaagatcccaatcggtcgagagttgattatatataaaaacgacttattattgataaaaaaataatttgagtcaaaaatttatatagaaatgttgttaatgacttataagcccatactttaaaaata

SEQ ID NO: 13807 - DNA, 338 bp, Oryza sativa
gctagagacgcaatctttgcactagatggcacacatagattgaatgcctgtaatactactacaagggagctcccaattctgcactagctgacgggagtgacggcgcaagatgtctgcaatggatcgtcaggtttaactataaaacattacttcttcaactctggactaccatgttcattacttctagtcttttcttcctgcaaaatgttaattgggaataaggaaatcaaacctaaacatcaaatagatcaagtggctaaattcatattatcaacaatataagattcactgaaatttggcagcaaaatggatcgttctctagaaactaaatcattatg

SEQ ID NO: 13808 - DNA, 492 bp, Oryza sativa
  unsure (1)..(492): unsure at all n locations
cagagtatgaaaataggagctcttcttaccagctctgcttttctctagaagagacaggcttactgaaactagcactatcagcgcgtcttgtcctcagtcaaatccaattcaataaagaacaagaaaatgtatgtgaacaaagaaagaaggcaactgcactgctctaagccgtatgtcatgtgcaggtactgtccagttgagtctgctttatatcaaagcttctaatgtccgtatgctgtcgcggtttggtcaagtctaaatgctcattatggtggctcatgcgacctacaatttaaatagagctagtttggctgccaagaggcacctgtcaagaagactcatgctgtngatttcagctttcataggggtcttttgagggttgttaagcatatggatgggcgagtgtggctacaatgccaccgacttgctggggtactcaaaagtctgctatggttaattgcaagtggtgttttccggttgagttttttaagt

SEQ ID NO: 13809 - DNA, 424 bp, Oryza sativa
agcttgtcacatgaaaaccactatcttttcgttccagtcggcaacccttgacccactgagttcatcatcggtgaaaccaataggattcctttcatactattcaatccagaactaagtcattggaagaacacctttaaatcttggccgtctctagaaaaaacttcacccgagaaaagttggattacatggttcaagcgtatgtcagctatcaaacgagttcactggaaccaaatcggaatcggccaagcacttgacctaaccatagcaaactcagccaaagaagaacctctaatggctgctgcttcttacttttggtccaacactatcaatgccttcttatttaaccaaaggccgatgaccctcactctcatagtcatcattatgatcaccggtctagatgtcacttcatccgctaacccctgag

SEQ ID NO: 13810 - DNA, 267 bp, Oryza sativa
  unsure (1)..(267): unsure at all n locations
ttcttgtttactactacctcctcccaaatgttgctacctaaggtgggatttgacctatactctgtccagattcattgtcctaagatggatcgaatcccatcctacgtagctnaaattttgggacggaggaagtacctttatgaactgatgactttcatgaagctatntgattgtagcacctcaagctggttctagaatggcattttgggcttaggaaagtgtgcaaactcaacgataaggctgagctcaggcttggcgctgtgacaa

SEQ ID NO: 13811 - DNA, 196 bp, Oryza sativa
cattattaaaagggggttttttagacttaaacggaggaggatattaccaaacacagtacaacactctaaacaaggggcgtaatcctaattataatatgcgtattaacacatttactatgcagagattttaaacggtcttcaaaatcttacatgacaattttataataaaaggttgacaataaaaatgtgtaaaata

SEQ ID NO: 13812 - DNA, 319 bp, Oryza sativa
  unsure (1)..(319): unsure at all n locations
ggcagntgggaaacaactgatcatatagtcgagaattgtagctatcggtcgtcgagtagtcattgcttgagtgaagataagcgtcgaggatgtgcgagtatgaatattgtagattggaacaccacttgttgtagcaaaataacatggcatcatatttggtgacgtatgccgagttgtcaaaactcttgtaatcgacatggttggtgaactagcatagcttgtgaagtagaggcaatagagattgccatgccattgatataagatgaagtcgctctccatggtgactaaattgctatccgtgatgaggtgaacacgagtc

SEQ ID NO: 13813 - DNA, 365 bp, Oryza sativa
  unsure (1)..(365): unsure at all n locations
atcttctggtggggtccggcttggccctgagttaaatatgtgcataatggtgctgttcaagcttggcatgtacgtgcattgtgttcatccagggaaattaggcgaattttttcttcatatatatgntgaatcttggncatacctttatttcaaattcagtaaacatgtattaaaattttaaaaaaaaactcgttcagaatatctgaaattttcgaaatttcaatgcccaccgaaattttctcgctctccgaaaagaaaactctggtctcatctaaactggataaaactaaacaaagcataaaccatgtaggatacagagattatataattgattgaaagctaaagctacgctgttaccctcgatg

SEQ ID NO: 13814 - DNA, 346 bp, Oryza sativa
tactcatcgagccatgcgaaacctatttgagacaactctgatccactgtagaaacgatggcgaacaacgatatgacaatgatcatcacagagaccgaattaacgggaaacctccaaacggagaaaaaacacggcccaccacaaaatttcactatattgaggagtacatcgcgacggcgtacaaagatatatatggaaccggctcgtcctacacaagtgcttataggcaaaattgatacactacaactgctatatcacggcctttctagcaactgctgagtattatctctggatatgcgggaatgaatatatcaactcgcttcggtttgctgttagctgctacacta

SEQ ID NO: 13815 - DNA, 385 bp, Oryza sativa
  unsure (1)..(385): unsure at all n locations
tttgcagtgatagtgaagatgaagctgttgatgacgaggaagagaaaaaggaggtcaaggattctgaagattgcataattcggtaaatatgctttggacatgcatttgttttcttttgccttgaacattcactaaggatgctcaacttgtttgaccgttacaggctcatgggaccaagatacaggtgcagttaccatagcacctggagcttgngctcagtccataggataacagatctgatgactctgtagtaatagtttcatggagaaatgctttcttcttgaagcattntgtcatattctctggttntcttttgactgggaaaactaccaggactttgcctagtagtgtaatttcattaaagaatataaaatagtaatattct

SEQ ID NO: 13816 - DNA, 338 bp, Oryza sativa
gcacgcaagcttgatcaactatctgagggcctgatcatatctcttttgatcggcttgaagctcgtaagattgagctcttggcacaactccaagagtgcaacaccgaactagatctggaacacaaaaagctagccgatctcccgcaaactgtcgaagaacagaaggcaaggttgacatcggccataaaaaatgtcgctgacatgaccaaatccttaaaagttatctctggaaccgatgctcaagatgcccaagccattgaagaagtagaacaaattatgcagagagttatatcggctatccagtgctacttggctcggcgatattctgtaataggatgt

SEQ ID NO: 13817 - DNA, 295 bp, Oryza sativa
  unsure (1)..(295): unsure at all n locations
tctctgacgcactccagatcttatagtgttttgaccatcacgtgcacatttgatgagtcatctagccggtctaccctcacatgccccngtgctgatggacgcatctccactacatccgangggggtatccggtctcgcgcaggtggtacgaggcagtgtgactctcggtatctgtaaaggcatgcagagacgctttggagcgcgtaagattcaccggtactgcagagtcttcgggaccatagacatgagacctcagcacggggttgattacctctgcggaggttgctgtatatca

SEQ ID NO: 13818 - DNA, 288 bp, Oryza sativa
  unsure (1)..(288): unsure at all n locations
atatggacccatttttgaaaaaaaaagcttatacttaattaatcacgctctaatggagcgctccgttttctgtgcgcaattcgcatgttgggaacagctgattctaaacacagcgttgattcgtcttcgagatggaaaaggactaccacagatttgtagtgtgtcaagaaccaattacctttgggtacatcatgcgtgagttcctgtagntntgttgaaacatcacggttattatccattnntgttgcagtanactatcgacttggtatggtataatatacttctcat

SEQ ID NO: 13819 - DNA, 158 bp, Oryza sativa
gacttgtggcttcgacttttctcgagttccaacgtccgccccagtctagctttttacagatcctcctacttatccattaaattcataatagtaccgttaatccctttgtatccgctttctgaactattttccattctttcctgactacccttgctttg

SEQ ID NO: 13820 - DNA, 384 bp, Oryza sativa
  unsure (1)..(384): unsure at all n locations
gcttaccagcaattgcgaaccatctcctccattacgtcttgcggaggttcgtgcctgctaggtaaatgtccaaattttactgctntttccacgttgttagtcagcagagtgtaagtatcggcatgcatgatgctccacagcttgagggaatgccctccggagaaatttatactccttcatatgttgttgtactagtgtctgcgatgtacacgagagagagagagagagagagagagagaggagaggcgagttttgagagcttgtgatttcatttttccagtaataaaaaggggtgatgattctcttgggtgaattcgtgttgtttgtcggctgctcgttgtcggcgcttgagttctttttcctacccagctntatcatatgtat

SEQ ID NO: 13821 - DNA, 376 bp, Oryza sativa
  unsure (1)..(376): unsure at all n locations
aaacacattgtttttctctaaccctcttacaggatgaatgagggtttttaatactcgaaaagggaccacaagttaacacgcgaatttatagttttttttctattttggcaccttaatattggtagagaaattctatgatttattattggcaagcgttcaattatatgatacatgatttatcatcgataaacacaaggcctataatatgcctaaaggtgcatttggaagagaaggctgggaacttctcccccgcacatctaatacagggnggnttattagtgtatgtctgtatgatctaataatattagaaaaaaaacttgaaaaagagattagtatgaatttagctttcttatcgaaccttttttacataaacaca

SEQ ID NO: 13822 - DNA, 158 bp, Oryza sativa
gctactgtgctctggcgttggggaatgctctctttatggccgacccagacagtcggctcgagagcaggatcatcctaccttcagacttattgcgacgcgggaaagggagcggggctgactctcggtaaattaagcgaaggatgaggtgcagtgagtcc

SEQ ID NO: 13823 - DNA, 406 bp, Oryza sativa
  unsure (1)..(406): unsure at all n locations
gcatgcaagcttgcacagcttcgagtcatcggcttgttgttcttccgaatttcaagggaaggagaatggtatgagccatgtgggctgcaatatgggctggatcnagctactttcaagaagtccaagcaagcccaagaggcaaccatatataagtagcagcagcacttccaggaggggacgaacagattgattggccaaagcggcgaacggcggcggcggcgacctggaggctggctggcctctttgtcgatctctcctctatctcccttcttctctactagtctagaagcctactagaacctctagcccttgtatccctccatncttcacctcagaaccaactcactattgtaacagacttgggctgttcctgtgttggatttggcactgctatttctgaaataca

SEQ ID NO: 13824 - DNA, 326 bp, Oryza sativa
  unsure (1)..(326): unsure at all n locations
ctgcagcttcttatagcntatttgctatgtgaatttttaatgatgtagccaaccttaggttacactcatcatattttacaaagcagtcggtatatcacttggatcatattattcggggattcacaccgcatatgctatatattgatatcaagtcacttggttgattacaattatcaaaaccactcagttggtacatctattaggtgcatctattcgatgcacctgactntatttntcagccctccacagtctttatatttggtaaaagtactcgggagatcatggcgaggatgattgaagcactcggctttggagtaatctagttc

SEQ ID NO: 13825 - DNA, 436 bp, Oryza sativa
  unsure (1)..(436): unsure at all n locations
agcttgccggctgtgcgcgatgatggngtgatttcagatacggaaattcccgatcgaccgaacgacgttntcgtaatatgggtactgtttctgaccgtactttttcttaatttttaaaatttggtttttcataatttcttttacatcgtattaatatcgatactgagtagtttaaatgataaatatgttccattaccgatcgagtattgtttccgactgttttcagcccgcgcgtgcacccgagccggcggctgttgcggngacggtggcgtttaatgtggatgccacggngacacggtgtgcggtgcgccggtgcggtggctggtggtagatcgagctatagcgttagccggaataagagtnggagtcgcgggcccacggatcgatcaatcggtgccgccgcgacagcgtcggcagccggcaggcccgggcggcc

SEQ ID NO: 13826 - DNA, 420 bp, Oryza sativa
  unsure (1)..(420): unsure at all n locations
gcttcgatctgatgttgacgagatcgacgtttttcttttttggtggaagccaacgcgaatgagctccagatctagattgaacagacgacgaagactaatgatgcagaagcattatcattcagagctgacaagataaccacggataaaacattggagacactgagcttggagatgaagaagattcatgcccagaacgatgctgctgcagccatggttcttcagaaatccgacgaatttgaaaatctcagggctgaactgaagaatgtncacaaatcgatctccgagctgcggatgcgatgcaacgatctcactgatcactcctctcgcctccaagctgacaagaattcacgcatgagagctctgagcaacgagaatatcgaatccaccaagctgagactgaaactcatggagctcgagagc

SEQ ID NO: 13827 - DNA, 315 bp, Oryza sativa
accacaagaacgggtacttttcaagattctctgttccacgaagcttccagaatttgtttctgcggtcaggattcgttcgttgacagagcagcgggtccagcaaacttgtacgtattcgatttggatagcagtgctacatacgaatgccgccgtttttttgacaattttatccttttagaaaacttatttcgaaactaatcctcgccaaaaactttaaccaaaaataaaccgtggggtctgcttccctatacttgtggctgaggtcctatgatatagctccagtatctctggcgcttacacccattgtccacgcgg

SEQ ID NO: 13828 - DNA, 290 bp, Oryza sativa
taggatgaccaacagcagtgtaattgcctgcgccatgcttggtagccacatatcgaagtcgctgcttcgcgacggcgtcggagaacatctgaccgtactccacgctcccattgaacagctgatcattcatcttcgccacgaggcgcatcagcatctcaaggtcggcttgctcggggtcagagccgacacgcaaggagatgaggacggtgtcgacgacgtcctccaggtcgtaggacagcatgcgcacatcgtgagcccagagcctgacctgctcgtcaagctgatgatcc

SEQ ID NO: 13829 - DNA, 403 bp, Oryza sativa
  unsure (1)..(403): unsure at all n locations
tagactaaatggatactattgagattatcangacatgtttcaaatatcaaaccgaaagtctttaattgaaattttatattgcttttatctctatattaatgttgcattaagttaactgactaaatcttacgatcattatggcatcttaaccttacgtttatatcacataacttggtgaaatntttctctttagtcaatacctagtgaaaatctagctgccttgccgtggtccgcgcccgcggaccggacctattttcatgttcacatcacgtacctaagcacatgctgctgcgtctttgctgcgtgtgcgtccttcccgatggacacgtactggctgcacaatcttgtatggactctcgtcgcggataatcctaacaatgaacaacctgtgtgtgtgctatct

SEQ ID NO: 13830 - DNA, 437 bp, Oryza sativa
  unsure (1)..(437): unsure at all n locations
gcaagcttaattaacatgtcagatgtcagaatttgttatcattaatactgctggaaattgtactggtgcatagtacatacatatatttggcctctcagatgtgcctcacgtcaaatatataagcacatacatgaagcttcacaaatagttattcagcacacattatgttttcctattcaaccagggaacacgatcagtatgaagggatagaggagaaagaactaaatttcgttatacacaatgcgtgttgaatatttgttctatcagttaaatcaaagttgtgccaacatgattagaaggattctgcagtccagttttgcttgcacatagaaccatctaggtatctttcttttttctggtnttttcttaaaacagtcgctgctggtaggattagcaattcactctaacagacaacatttaatttacttgtactttac

SEQ ID NO: 13831 - DNA, 486 bp, Oryza sativa
  unsure (1)..(486): unsure at all n locations
tgcaagctntgtttctgcattgccaatagaccatatatctgctgctattccaacaatcacaaggttttttgtaaatatgtccatgctttgaatccaggaaccaaacagatcctgtctactcaaaactggtttcacattcaaagcacacgcaataatattccagataagcctagccaaaggacaatcaaaaaagagatgctgaacagttgccactttgtcacataattgacatttattgtctccctttctccaacctctctttagaagattatcttttgtgagaattttcgttttagtaaaaaaccaaataaagattctaattttcaaaggaactctgaatgtccagaatttcttattagggatactagtctgctgttacttgatggctctataaaaagatctcacagtgaacttcccatctttggataaaagtcaccagagcttgtctttacagttttctactaaattaacccttccaactattac

SEQ ID NO: 13832 - DNA, 342 bp, Oryza sativa
gcaagctcggaggtctcccgacgtggctgattcttattttctgtgtgatccgggttagtaatgtcgtgtgggtaaagtgtaccccctctgcacaggttaacaaactgttcgaacagccgtgcccacggtcatgggcggatgtgaggagattcctagcgtagttttgtttgactactgcttgtgaaattgctgttgtgaaaaggggttcgatgtttgaaaaatctgcagctgacgggatcagctatgcccgggtggccgttccaaagttgttggccgggtgccaatcttgatcaattctaaagactgatacattgcacaaactccgaccggacgagacacact

SEQ ID NO: 13833 - DNA, 309 bp, Oryza sativa
gctggcaagtgttacagctgctgtaacaggagacttttgcttccatgcaacagctaggcctgtttacacgacaaaggcacttttggatgaagcatacctgggcaagtgacaacctatgttggctactccccaggactgggctaccatctgaagaccaggggcctgtaccttgagtggggatagtaaactagtacgagctccgtgcatcttcttcctgtaaactgtcggatgagaaagacagcagaaaatacaacaggcagcttagactactctggaggtgtgtactttccatgaacacactaatgtcta

SEQ ID NO: 13834 - DNA, 240 bp, Oryza sativa
tacttgatacactaattacttgaaaattgaaagctctcttgagtgggaggaatgaaatgcatccttttacctccatgatggtggatggtgaatgcgaataccctcactgtatggggctaatccaccgttagcaagacctgatcgatgcctgagaggttcgcgaccagtgcgccaccaccatggttggtggggctcttgtgtctttcgaactggaatggccttcttggcatttagtttgcc

SEQ ID NO: 13835 - DNA, 125 bp, Oryza sativa
ctgcgtaaaatttggtgtagggtctgtgataattaaaataaaaaagggtcttctccctaaaacagcaaaaaaaagacgcacccccactccctatgacactcaacgtctgttcagtgtggttggtg

SEQ ID NO: 13836 - DNA, 454 bp, Oryza sativa
  unsure (1)..(454): unsure at all n locations
gtcacccgcggcatgcaagcttatataatactatcatgtagcttcttctttttttctccattcagatgaagaattttacggtacaatctactggcagtatacaactagttttgttttctgaaggaaaaaaaaaaaacctactcctggaggctggaactatcaagattcagtctatgtctatctgcaggtagctagggttggtaatctgacttaagcgtacccaggttataacagaattcgattgctctgagaatacattagttattacttgcacaattggactgacgaatcttgcttacctgcttaatcagcatgtattaaaacgtctaaacagcggcagactgggcaaaaaaagaatcatgtgttcctttctgctgattagccattngaaatgcttacaagccagtagcagcaactaaacaaaaagacacacgctagatgcaaccgtaacttt

SEQ ID NO: 13837 - DNA, 454 bp, Oryza sativa
  unsure (1)..(454): unsure at all n locations
cctatctagaataatggcacaatcagtgtattggttagacgtttctaatcctctangctcagcaattatantttaatctgaatatataactatntggtggctggatgatacatggagagacaacaatatcatactagacattgatggatctattggtagcaattaagtaatcatacgcactctctgatttatccaagatttaatccattgctatccgggacactatcgtggagcattacaactgaccngatcaacaacgatcacgccacacatatatgtattttctttcaccacttgcgaactggaaatgaagataataacttatatcttcagtgatctgtagcatgctatctcatagactaaattcttctgctatattatcctgatatntccatactgacagcatactatacatccatgataagtaactatgtgctatacttgataaactact

SEQ ID NO: 13838 - DNA, 408 bp, Oryza sativa
atacactccctgagccatgcctaacctccacaatcccaatcgcccttacgactcttctatactgacgccaccctagccgtcatgccacttacacagtaaattaacccctccgccgccgctcaccgtcgccggagaaccctatcaacctcccctctccgcccgcaagcacttccccctccaatcgccgccgcaatccccaaccctagtgccgccggccacaaatagagaacggccggaggaagaagaagaagaagagagagagactgaccggtgggaccatgcacaatagttcttaactttttctcaaattaatgtcaatctcaaactttagaagcccatatactttaaaatatagatcccaatccagtgaaacttggacgtaaattcctctaaattcattctctacct

SEQ ID NO: 13839 - DNA, 295 bp, Oryza sativa
cacttgagctaagacagaattaagaggactggtttcagcagagaagtacattattaattcaaggaggttaggtagaaacacttacgagacggaatttgagatcatctatgaagtcagataacattaagcaacgaaggacccgcctacatggtgtactactaatactacagaagggggttgtagttgtacctcccactcatctacaggtttagatactggaatattaagccacgcactctaggctagctcattgagttgaaaccaagacagtgttgaagcttaattaccgcaaaaa

SEQ ID NO: 13840 - DNA, 150 bp, Oryza sativa
ttgggcgccggccgtgacaatttatgttgaagttatataaatttgcttcatcgttattatattattagcgtgcaccagcgtaggcacatactgctaaaaataccccgctgcctctgagatgggaatattacatctgcaatgaacattaac

SEQ ID NO: 13841 - DNA, 147 bp, Oryza sativa
  unsure (1)..(147): unsure at all n locations
agctngccatgtatgttgacagattcacctgtataatcggcaatggaggccctggaatgttggtactacaaacggaatatagaaagttcaagatactagtaccctacanaataacagcactctgtagaaaatgaacaataaaaaaat

SEQ ID NO: 13842 - DNA, 203 bp, Oryza sativa
  unsure (1)..(203): unsure at all n locations
gaatatttcagttcataccctacacatttatcaagttcttggtcatntttgtgcctgaaagagtctcgttttaagcctatatacttgcattngcatgggctatactgtgtctacaacttgagaagttatattcaccacannattagtaaccatcatgtaccgactagagcttaacatcatgaagttggtaattattacatcaa

SEQ ID NO: 13843 - DNA, 462 bp, Oryza sativa
  unsure (1)..(462): unsure at all n locations
acccactggtagaaagagttctcttgcatattttgtgtactcttcacttgtgagtattcatacaatntgacttgtttctgctttgattgcaatgccatatccttggaacactgattcatgacgttttctcaaaacaggttggcatgaccacatattntttgcactatttgtcgggacttttacgttctgtgcttgtggaaattgggattgccgaagacatgcataatcctgtatgtaagttctccttgtaggttacttatggttcatttgctacttctgtttccaccttcaattacatgtgccatatggaagaaagagctctaccttttatggaggtacaagtgtataatattttcaacttttgcagttgctgcttgtgttttgtaagtcgtcncatagattactgcgatgtataaattgatatatctcatattctcttanaatttactatgctngctctgc

SEQ ID NO: 13844 - DNA, 434 bp, Oryza sativa
gcttcgatccaccaccagcagccaccgtgtttatgtaagctggggagctggtattattgccccagcaatttgggtctccagaacttgttcatagcttccatcgtagcggctaacatctgtggatgtaccacccatgtcaaatccaatcagcggttttgatgtctcaagttgaaacaaggtctgagagtagccaaccacaccacctgcaggacctgacaacactgctttgtgcccggagaatctcctctctggtgccagaccaccatctgactgcataaacagcacattcacctgctcaccttccccttcaaacctggacatgaatcctgataggtactctttgatgactggtgtgagataagcatccacactggcttgtcagccacgaggcacagcacggaccatcggcgtcaatgatgaagacacgatacatg

SEQ ID NO: 13845 - DNA, 410 bp, Oryza sativa
gctggcttggcacgatggtggtaaccattgtgttcggatccccattgcagttcgcatcgtgattgaagagatctactcaaagatctcctaattaatgtgatcgagatatgctagtagctacttataataattctagttgatcaatgtcgactgatattgtataaatgaaggaccaatccatatgcttcacatgcagatgttatatacgtttctgcaatgtagcttcaagaagtattttacgcaatcttatgttatatgtttgttctgattaataacagagtttgtattttctagctaaagccatagtgaaaacttattatttatatgtttgaaataataaaaaatataaaaatgacgtacatgcatgtcaacccactgtgttttatatgcatgactctggatttgtctag

SEQ ID NO: 13846 - DNA, 255 bp, Oryza sativa
agccgctgaggcgctagcgtcatgcctacatgcagagaatgctgagtggtgctgtgaaagtcgtgagcgcacgggctctctctggttacgatgtttgcctgcgcaggtttggcgcagctacttcctggctctttcggcactgtctttaggggatcctcggtggatgctgggcggactcccagtacggcttggtaggagctttcacggacagttatcttggagatgtcttgaagtgtcttttctctacctttggtt

SEQ ID NO: 13847 - DNA, 470 bp, Oryza sativa
  unsure (1)..(470): unsure at all n locations
tcacccgccgcatgcaagctntcgctggaataattatatatacatgctttattcaatngatttagattgtttgcttaggaaaatatcgtgtgaaattaatgtgggtatcgtacgtgcgatcgatcgggcaggtttagatcgccatctaagaattcattgcgtttgctaattatttcctggcggcgaaccttttcaacaactaatgacgtggtttcctgtcattctttcgtttgttcttcgctagaggaaaaantattgttcagctttgcgtctttacttgttgataacgtgctactagtattctcatgagcaatttcttgttatcattgaagacgtgatcatctagcatgtacgcgtacgtactgaggtcaaaacttatatcatcagcgtcgatatgtatctagttactactatatatggnctntatacgtgacagattattgatgaagatgaattattactattattga

SEQ ID NO: 13848 - DNA, 324 bp, Oryza sativa
tgtgacgttttgtctagctttatcttgattgtgatgactgagctctttgtgggaataggtcattatcgacacaaaaccagaaggtgaagtgcgtagttgagctatatagataatgggaactataggtgtcatgcaacggactacctctgtttgcgctgagttgtcaggatattgtggtgtcatgactattttaggcatactagatgacaggtgactagaagtacagagattctatgacactgcttttatacattatgctgaaacgtgaatgccaagaaatcttctactagctcatccgtgaaaaaaggagagaaaaaggatgct

SEQ ID NO: 13849 - DNA, 318 bp, Oryza sativa
  unsure (1)..(318): unsure at all n locations
gcatgcaagcttgcccgcaggcacgccgaacacgcacttatctgtgttcatctntatgcgggcggagcgaagactttctaaagtttccgctagatccgagagtaaggtctcttgtgtgcgcgtcttcacaaccaagtcatcaacataggcctcaacattgcgtcctaactggctacccaaagaaattcgagtagtacgttgaaaagtacgacctgcattctttaacccgaaaggcattgtcgtataacaataagttcctataggggtaatgaaccgcagtttttcctcatccttcctaaccatgcgaatctgatgata

SEQ ID NO: 13850 - DNA, 153 bp, Oryza sativa
  unsure (1)..(153): unsure at all n locations
tacttgacgtgacagtaataacagtgangataaagatatcacgatcagtgcatttttctttttgtaataaatgctatatctangactggctagatatagatcatataacaatgttgtcactaggagtgttgatcactaatgttgacgtcatag

SEQ ID NO: 13851 - DNA, 348 bp, Oryza sativa
  unsure (1)..(348): unsure at all n locations
gcttaccaagatacgagccaagaacagttccttatctatcatttggaataccatgttcatctgtctcctcaattacctttccttgcttcagntgctccaagcttnttacattaaaatttcctagaacctgtcgtacctccccatttagccctacatttaggaacatttcagctatgggtgataggaaaaatcatatatatagatatatataggaagaaaatatgaaacttacagattatattaattagtcttttggctgcaagaggcaactccgtgattatgtcatcattctctgaatgggcttgctcactatcttctgggggttggacattccctgcatcttgagct

SEQ ID NO: 13852 - DNA, 221 bp, Oryza sativa
tttttatgcgattttttcactcagatttcgggctttgactttacgatactgctactgatcaactctagacatatgcatttatcccttgaacttttgcatagctattgctgtcgcgatatttctaacccacacaaacacgcgtgggggactgtcataagactgacaaatttctgctcaactacaagtgagcacgtttgtaactgccgctcagctggtctcgt

SEQ ID NO: 13853 - DNA, 303 bp, Oryza sativa
  unsure (1)..(303): unsure at all n locations
gctgattgctatggtattttatatttatagtcaactntagattgcgtgcatcatgctttacaaagcatttggtatatcacatagatcatgttattcgggatttcataccgcatatgctatatattgatatcaagtcacttggttgactataattatcaaaaatcactctcagttggttggattatttattcctcgactatatgcttggtttgttcaactaaccatagtcgggggctacacctattacgtgcatctattagatgcacctgaccttacttttcagccctccacagtcctctgatt

SEQ ID NO: 13854 - DNA, 249 bp, Oryza sativa
tccattaaccttgtggtgactatgttatgttctagaggttccacagaattggccttaatcgaaaccgacagtgcacattgccatccgcccatgcgattttcaaatcattttgtttaaacacacgacccaattcgggttgaagctacaaccttttccatgttcacacaacggtattggattttgttaccctcaaacacaatcgagtccaaaggggatcacaggactgtttcacctacgaatatgcatctg

SEQ ID NO: 13855 - DNA, 258 bp, Oryza sativa
cccttgagtacacgtcacgctcccgctgcgtgaggacacggtgtaccgtgaatgttggaaggctgtgaaaactctaggacctgccgggcataaggggcggggcctaacttgcgggcactgttaaataacgtctgctctcacgcaacctgttccgcgtgacctctatgtttaaagtaaaatatgcacacgctctgacgctactattccgtgggctccctcctgctaaaacccctggaaaatgactttagttcacacgtc

SEQ ID NO: 13856 - DNA, 457 bp, Oryza sativa
  unsure (1)..(457): unsure at all n locations
gcttcttggcattttctcccagatatatttcttttgtgtgttctgcattgctatgatatttatgcataacagatactggtgattcagatattatgtggcaataaatagcctatcgataccatttgattgcaactaatcttctatcagtaaaaaaatatgtacttgtaacagttgcatccaaattagtctgtctctatatagttccctgtgacctgtcagatctagaagtggttacatgatatatggtagtaggttaatatgaagctaacccttatggttgcagatgtgctggtgttctaagctggtatgatgtctgttgtgcatgtgcaaaaacgagttcctacttactgtattagattccgtagcaaatatctcttactatatntcaatgcataagaatctagtgattcaatatgtggtaatggtgttcgcgggcattgccatgtgatatatcatg

SEQ ID NO: 13857 - DNA, 252 bp, Oryza sativa
  unsure (1)..(252): unsure at all n locations
actagctatgtggtgtggatnggcgtgtcgtctgacagatacattgatatataatcgtgtatagctgtggtagttgggttatatgtatatgattggtaatcactacggaaggggnagtcttggggctcctgagtttatttggctcgtgaattncattacttcatgcacagntgttngtatttgatatctagtcgctaagttggctgaaatatgagccgctgaactcttaatactctactccctctcatccac

SEQ ID NO: 13858 - DNA, 328 bp, Oryza sativa
  unsure (1)..(328): unsure at all n locations
gcaagcttacaaaagagaagagaatagctactattttctacccgaactcttccgaaggctaccggactccgatttctactctattcctattccattaggttaagaacactaaactaaacttgagagaatatgagagagctttgcttgaggtgtacgagtgaagtgagaagaggagctccttttatacgtaggtaatgacggntgtgatggttggaatgcgcggtaataccctccaaccgtcattggggaacagtcccagccgtccatccaaacactgcattcataggcgccacgggaagttcggcgggttttggctgaaccatgggct

SEQ ID NO: 13859 - DNA, 432 bp, Oryza sativa
  unsure (1)..(432): unsure at all n locations
agcttatcaaccacgatgcttcagattggaaatcttgagacagctgccatagttcatccaggatgctgtctcccaacgagcaaccgtgcaagtgccacagcgatctgcttacttgcttgtgtttgcaccatcgtgtcctcaagcaaagcaaggagctatcagctatatacgcctgtacgtgtatacgccaagatgctcagtctcgtatatcccatacaggagtccaaaaagtatacgtcaggagtaatatattggctgagatcatcagaggaaatcgtttctgattcaatcaagcatgccatactccgctgctgacatatatggcttggatcacaaaccaggtttatcgttttaaattttcatacataaattagaattaattcacagatcactaattanttntttggtctattatttntatgcatgtaccac

SEQ ID NO: 13860 - DNA, 194 bp, Oryza sativa
  unsure (1)..(194): unsure at all n locations
atatatatatgcgcctctntttctttgctaccatcanaccctcgattcttatattntgttaaatgaaaacttcacacttgtattggaaccacatagatcgatgatatcatnttcttgattgtgtgtgaagaagtgaatgcatcaccgtgggtatacatggttgtcactcgtctttgcgaagttcactacagtct

SEQ ID NO: 13861 - DNA, 435 bp, Oryza sativa
  unsure (1)..(435): unsure at all n locations
gcttgaaaacgaatganaagtttatttaaatacacagtatgtgtatnntatgaaactaatgagactaaataactagtatagaaaattctgacataaattctgaaaataaaaaataaaataaattaaaaattttatttgaaattataataggacaatggattttctttcaagcattcataaaaaaaatattatgagcattggtagttctatctttgtatgaatgctcctcattnttatgattttctaaaaaataacataacaacatattatttttatttcattatctaaaactaaattttgtcatcacatagcaaactcataactataatagtttcatgcgacaaagtattgcattttcaataatgtaattcataaatctttatgttcatccaaagggtaaaataatcatcttatagcaatgggatggcaattaat

SEQ ID NO: 13862 - DNA, 338 bp, Oryza sativa
  unsure (1)..(338): unsure at all n locations
gcttacaaaagaggaatggaaagctcctagttcttttctctatctcttctgaaggattccgaactcctaatttctactctattcctattccactagcttgatgacactaaattaacttgagagaatatgagagagctcttgcttgacgtgtgcgagtgaaatgagaatggcaattccttttatagcctccctatgatggttgtgatggttggaattggctgaaataccctccaactgtcattgtgggctaattcacaccgtctangcacagacctggatcggattgcgctgaagagggttccgccgaacctagggccggcctaaccagcccatggttt

SEQ ID NO: 13863 - DNA, 465 bp, Oryza sativa
agcttaaacgggtggccacccatccgtacgcttatttccatgtcatagcaacatcacctatcatgagatgcaaccacactagtgccagtggcaagtgcatggcagcccttgattatattttgccctgcagatctaccagctgataatacatactatctgtgattgatcaactatcattcaaagattagttaactgaataaagataagattaattagttctgaagtagccaagcctagctacttagctaggaggatacttaattacatcagtttgagggatattgctgcactagattttgagttaattaacatgtgaactattggttcttgcaatacttcggctctagaggatgtgagttcactatgtaatctttatccatctcctatttgacacggctcgagatctatatccatgcgaatttatacttcatatgctagataacatggtaatagtttatatttctt

SEQ ID NO: 13864 - DNA, 426 bp, Oryza sativa
  unsure (1)..(426): unsure at all n locations
cgatcctctaagtcacctcgccgcatgcaagctnggagaaggaggcgacaaagaaaatatatgctacaacgatgtatcgatcatgcaaaatcaaagacgggcagttgcacagtcatgcatggttgttgggtgacgctatagctgctagctgtgcacccatatatctagatcgttttgtgcttttctcttgtaagatcagttgatcgatcggctaaaggctaacatcgttatcaagcttcagattctgtccatatgcatgatgccaaatacaactgatgcataatatttgcctaaccaactaactagttcttgatctgcacgaacttgttttaatttgaactagcttatcgggtttgatccctttccgtggcatcccaacaagcactttcaagttttctggggtctttggaaccatcgacatgatgt

SEQ ID NO: 13865 - DNA, 315 bp, Oryza sativa
  unsure (1)..(315): unsure at all n locations
cttgcaatcgcacaaccatctatcganntctcccttccttctctttcttctttctttctttcgnttccccctctcacatgtcagggtattttttctcctcatcctctccggatgatttcacttttgctcgaaatctctcaagttgttgttgtgttgaaggtggcgaatggggaaactttggtggtggtggtggccggagtggaagatggcggcagcggtggcgatgcccgatgcggagcggcagcggcagtgaccgcagcgggtacgacaatgccgggatggactccnngcaagacgtgcactacaccccgggtc

SEQ ID NO: 13866 - DNA, 161 bp, Oryza sativa
atacataatgcagatatgcgtctgtttcgtagaagctctagactatcaaacggtaaagaggatgagatttatagaagtgattctttcttgaagttttgccagctgtccctagtaatgcccggctgatacttacgtcatgctgcccttattcttgtactcgg

SEQ ID NO: 13867 - DNA, 328 bp, Oryza sativa
  unsure (1)..(328): unsure at all n locations
atgtgctgtagaaaattctatgtgcattggtttctctcacgttttgccatttaattaccctattctatatgccatgagcgatgtgacggaagagatggcgagaaacttctgtctgatacccgagcccgtctctcattaaccgagactgcaggcatggatgtggatggctttgagttctgaaggcctggaagctatgtaaaagaggaactggaagacatcgaacgggcctagtactaatttctaacgtacgcctggnntaaatgttatgtagctccgcttttggaaagctctgtgtcatgtgagtgatgagcaacacgagctactattg

SEQ ID NO: 13868 - DNA, 252 bp, Oryza sativa
ttatcgtctcttgttgatgaacactaaattattctattgagtgagctacgcctttggatctctatactaccaatactgcaccttgttgcaatacacataattagtatattcactacctctagataccttttggatctggttggcttaactacatttcgcagtcaaatgtatgtttataaaatacttcactaaacatagattcggcacaagtcgtagattgcacctgctgctgacgtttcatagatagactct

SEQ ID NO: 13869 - DNA, 398 bp, Oryza sativa
tgcaagcttctaacaattgtgtgtgctccatattatcatatctctagagtcaataattttctatgaggaactactgaactcaatcacggtgagtgttattttgtcatgcctatgaccagcgtatgaagcagaggataatggagaagaaggtagaaggcagcaatggaaaaaaaaaaatcttccttcttcttctccatctttttcctccgagcaagtcgtcctctacggcgaccccaagctcgtcggcaaaccgaggacacgatcgatttccatgtgaactggccgctcttatttaccagactttggaaatgatcacatgaatatattttgagataatctattctattttgtacaagttcaacgattttacatcgacattgtctctttctattaattac

SEQ ID NO: 13870 - DNA, 194 bp, Oryza sativa
actagctgcgttctacacccaagtacaccagcctgaaccatcttacttgcatctgtctgggctcactctcgacatccacgagacaggtggtacaattctgtcgtgcgacgacagtaccaatggacgagcacactacagggaatcaggcgacaccctcaatcattaaggaatttgaatatggatgctaccgatat

SEQ ID NO: 13871 - DNA, 411 bp, Oryza sativa
catgaagctgggattctgactatatatctttttgtctacaaactgattcgaagtagtcaaatgagaaacttttatacaaataatacaggattgaactaatggtctttggtgtagacaacatggtctaatgatataggcatctaaaagtttaaatattagtaagcagatacagggaaccttcaactgaacttttgctactacaggattaaattgcatgcctgtccctctgccagctaatagttactctgtacacctggagtcactacttgctgatggcattagataccataatacattgctgtaattgcaaacatgcaggctactgcctgttgccagctgctactggcctatgaaatcgcagcccactgtcagtgactagtctgctatggataatgtgcacgatcactagac

SEQ ID NO: 13872 - DNA, 471 bp, Oryza sativa
  unsure (1)..(471): unsure at all n locations
tgcaagcttattacaattcactatttactaactattcattttgtctctntgnattatcagtagactttgggcttatgtctacctatttaagggggtagttagagaatacccacgagcaatgcaataagtaaaccaaaaccattaacttgttcctctggtacatactgaaacagtgagttttggtctaccttaattgtacaatgtaaatatagggggaaatacttttttaaagggaatccttgactccttgagtgcttataaataaaataattaccaaagtgtatgttctaattatctagtatgcagaacaacagtgcttgctcaatttccgtactaatgcgatgcctttttctaccttataagtccagccattgtcataccagaatcttctacaagaattatctcacaaacatggcttttgcttgtctgtctacagcacaacttcagatggatcagtgcaagtacctatgt

SEQ ID NO: 13873 - DNA, 270 bp, Oryza sativa
catgcatcagtttctatctgcagaatgtcttaaaaaaattggcatgcaaaaataaatcccgatactttgtcgttttatcttcatgttgcaccgcaacctaaatgcctgaacacaagaatttacgttctacaacaattacgaaggtactttctttaaataaccgtttctagtttaaaaccctgaatcatataagaattataccgtgattataactctcataccatattcagcgttccaacgattttgttcatcacttcgtatgactaccgt

SEQ ID NO: 13874 - DNA, 322 bp, Oryza sativa
gctttcttgttgctgaatggccgtcttctctttcgatcatacttctcctcctgctcgccggtcttgccgccgcctcatcgcgcaacgacgaggaggcccgcgcgctgatggcgctcaaagagagcctgtacccggcggggcgggtgctgggctcgtgggcccgctcccgcagccctgcgggggcatcgtcgtcggcgtgacgtgcgacagcggctgccgcgtgacaggcatctcgctgcaaggccgcgggctctcacggaccctccctccggcgatcgcccggctccggaggctcaccgggctgtacctccactacaacggg

SEQ ID NO: 13875 - DNA, 278 bp, Oryza sativa
gctacaacttgtgtgcacccgcgactgaaccacccttatgtccagcacaaagaagagctcagcgatcatcacaagtgctcccatcgagatggatcgcggtgcaactcacgctttgagtgtgctcgtggagcgaagccacgagacggaaaggaaaagagacagggggcagacaacagactgacgagggactagtgagcctgaatccaactaaacacagtatgagttggttgcgaaacaaagacattttttggtgttccgagaaggacatgagttgttcc

SEQ ID NO: 13876 - DNA, 368 bp, Oryza sativa
  unsure (1)..(368): unsure at all n locations
gcttcccagatagtacctggtgaagttgcttatgagatctcagtgaccaacctccagtcagaaaatagagaagatcaaatctaccgagaaaacactgactttagcacttcctgcaatggtacattggagccaattcttcttgaagaaaacaatgagtcagctgcgactggaaatataatagaagaaaagaatgatgtacagctccatgtggtcaaggaaccagaggaagaagtaaatgtatctgcattcgcgccttctcacaaggatagcttgatgcaagaaactgacttatctccatcaacggcttctcacaaggatagcttgcttgagggaacttacccctgtngacagattctcacaatagcttg

SEQ ID NO: 13877 - DNA, 156 bp, Oryza sativa
  unsure (1)..(156): unsure at all n locations
tcctactctatgtgataacacatcagattagatcagtgcatatagaatagtttgatcgatgtgatgcagtactgatcttggagaacgatccaatgagtatggctacctntntacagtgcatgtacctttctctgtcttcagaatatcagtatcttc

SEQ ID NO: 13878 - DNA, 453 bp, Oryza sativa
  unsure (1)..(453): unsure at all n locations
ggatcttagagcgactgagctgcaagcttaactcaatttatnttttaaaatcttctcanattngaatactcttaacttggattttaaaattttaaactgttaactcaaaatatgaaaatttttaacccaaaatttcggtcttttccaaaattgtaaaccctgcttgagagtagccacaatcagttaattaaccaagcagaagaaaatgtgcgctgctcaacgtctgtggcaaatggcaacgtatacttcggaaatactactagtataaacagcagataattaagtctcttttacaacttcattcaattaagggagtacctatacatctttcgaaagattttataatcgtatcacacagaattttaatctttatattaaaatccgatagatataataaaaagcaaaaagcaattaagaaacaccataatgaacattaaattaccatatcctcaa

SEQ ID NO: 13879 - DNA, 87 bp, Oryza sativa
  unsure (1)..(87): unsure at all n locations
tgatactataccttcatatattatgagatatttctacgaattatattgaaacacatctaggcattcattntaanttaatactatgat

SEQ ID NO: 13880 - DNA, 333 bp, Oryza sativa
gcttggtgactaatatatacgaaaagtttttctttttgttctgtaaaatgatatcattagattagattgacatgataaaatatatcagctctttatatagctgtacgttgaaaagatttgatggacacataggataggacataggaaatgtcaaaagtgaacactggagaccatatcatgagcatcctaaatgccaaggtgtattattaggagccctcatttattcctcagcatttggaagctcataattctcaactggttagttctcgtattgtgaaattaactataccgcgaaatttaacaaagatgcttgtattatagctaattattcat

SEQ ID NO: 13881 - DNA, 387 bp, Oryza sativa
gcttaacacctcttatttgactttctcactattttgttatacgaaaaagatccaaatccaaaatgcaaaggtcgtcttattcaaaacctcaatcatcacatcccctctcttccactttacacctcggaacgcactgatcttatagagagaaaggggctttcccatcttcttaacccgaaatgaaatggctgaagagagggaggtttcttttggggggtaccccccggaagagatccactggagacggggtgggcctgtagctcataggattagagcacgtggctacgaaccacggtgtcgggggttcgaatacctcctcgcccacagccttccaaaggggaagggcctttacttctcccctgagggtaggaaaaccatgatcgggat

SEQ ID NO: 13882 - DNA, 429 bp, Oryza sativa
  unsure (1)..(429): unsure at all n locations
agctggggtgcagtctttntctggagatgccatgttctacctatcacaacataatcaatgctaccaccaattccatgtgcttattgagtcacagcccctacccacatgatactgatctaatcaccaaaaagaacaggtcgaagcatgtacatgatgaaacgagaaaataatacagagaaaaatgaggaacaagaccatggacagagaacacaacaaagagtgaacaacatgttctgcgactaaatagtttaagtgcctaatttagacctagacccaaccatcagaatacaattaaaaaaaaagaggcaggtatctgcaaatgaaatggtgccataaaatgcatagtatcagatcagaaatctggaaaccttatgagggtgccaaagaaaattaactaataatcctagtggtatatatgaggaggcattt

SEQ ID NO: 13883 - DNA, 118 bp, Oryza sativa
gacgtattacattccgactgtcatactccaacatgccgcacaccgcgcgtcgccataatacacggcctgcacccggcactttgccacacccgtgaatatgatcgcgagtcctcacagc

SEQ ID NO: 13884 - DNA, 434 bp, Oryza sativa
agcttctacctcatgtgcagggcgactggaatttctgtgtctctagcagtcacagattccaagagcacaacgcctaaactgtgaatatcactcttttcatttatcatcccgctattcgcatattcaggtgccgcgcacctaacaacagatttatagagaagattttgatgcgcttttttccaaatttactgactacaaataaaatataacaaacatggtgcagaaaaaagctatacccatatgttcccatcactcttgtattgatgtagctactatcagaattcagtagtttggccaacccaatatcagaaaccttgctgttaaattcatcatcaattagtatattacttgacttaatatctcggggtacaactttggggtctattgcttcatgaagatatgaagcctgaaatcatgaactcatatcattacat

SEQ ID NO: 13885 - DNA, 470 bp, Oryza sativa
  unsure (1)..(470): unsure at all n locations
tctttagtcacctgccgcatgcaagcttgctgcgctacaaatcaatgaaacataatacttattttggaagtcctcttaatttcctgtttgtttggtaggttgaggagctaatgttccagttggtctgtgacccttcggnggctgttgtgaatgttgctctcaaggaacttgttcctgctgttgtaagatggggagataaactggatcagatattgagaatcttactggcacatatcctggcatccgctcaggtatacatgtttgtaaattttgggaaccttatagtttctttgaagtgccacatgtgttctgacacaattggtatgcttcagcgctgtccgcccgtttcatggagtgaaggtgcaatagactctcatctccgttgtttaagagagcaagagccgtggaacattgatgtcctcctcgcatgtgaccgcagtgtacctttattccccgaaagtatatctact

SEQ ID NO: 13886 - DNA, 386 bp, Oryza sativa
gatcatggcagcatgaattaacgaataaaaagaagaggacggcggcggcgtcaaggtcttcaccggaaagcagcctcgtcggcgtcgatcggtgcagactctgtcgacctggagcttcttagcattagagtagctcggcccgaatggtaatgctaatgagtaatgacaatgattattatctcagcattacgtacttctgtttactggcatagtatatgaaatcgatcgtcttagctcaagtgcttggtgtttgcctccctactatgtacttatctatgtattcgagaacaaattaccatcgatcgctatgcctatctgataatcgctcattgttcactaacgcatatttcaacgacaataattataataaaacttactatgtgtct

SEQ ID NO: 13887 - DNA, 129 bp, Oryza sativa
tatcttatcatgctaattctgcagacaaacatgtctcttacttctacctaaacttaacacatccttcactgagaccaatctacttttatcttacgtcaaaatgagacaggcgcatctgacgtttgtggc

SEQ ID NO: 13888 - DNA, 391 bp, Oryza sativa
  unsure (1)..(391): unsure at all n locations
ctgcagctttacgagtgcacccttgtaactcttttggagagtgtcaatctttctcaagataatgatgtttgggtttacattttgggtaatctgaaatattcttctcaaaaattntatgcccttaacttcagagctttacaaccaccctctcatttcctttggttatggaagtgcaaaactacttctaaagttaaagtctttggttggttgctgctgatgaatagactgaatacctagatcacaaacattgtgcgccacccaattgcgatcttaattgtgttctttgttctgctcatattctggaagatctgttgcatttggtcttccaatggcctttngctcaattctactaggctatgctgggtatctctcgggacactaccctgcatac

SEQ ID NO: 13889 - DNA, 436 bp, Oryza sativa
taagtcaccgccgctgcagcttcaggtcagcatgagagaaagatgttcttctagctggatcaaaacgttgactttcaaaatatatttgtaatttagaagtgaactgctagtttctaatgcactatgtgatgagaggccactaacaaactttgagtcagaactttatcaatgcaactgtctttgattttatgcttgaccatgcatactaaatatcaaccggcaggtatggagaagatgcaagtgcaaggacagtctagtcatgccatacaagaaaaccagtaaggacaaacgtgcatttactgtccgaactgtttggctatagaaacagcgtcagaacagtaagtagtcagtgcagggttcttttatatgacaacccctctctcttctctccacacacacattggttgtgtcaagtttagccccagctgaagtcata

SEQ ID NO: 13890 - DNA, 123 bp, Oryza sativa
gagaactttgcggagtgctatatcgcttagtactgataactctcaaaccaggtttaaatgaaataacgtttgaggaactaaaagcactctatgaatttgcactagacagagctggatcatatg

SEQ ID NO: 13891 - DNA, 221 bp, Oryza sativa
  unsure (1)..(221): unsure at all n locations
agcttggcactggcacgtctcaaaggcactattttttcaacgatttgttccatgttgcagaggaggacggctaccactggtagcatgggtccatccatctcaccaactgcgtcagagaacggaggtagtggggggcctncaacacctcactacaaaaacaattcaccatttattcctactcctctcatcaataatttatcctcactaatccttccacaaac

SEQ ID NO: 13892 - DNA, 355 bp, Oryza sativa
cagcttcaccttcttttgcaatcataggctctgtcctttaccaacggctaaaatccattcactagaatcacgcaattcatttcttttgttactggcagatctggattaagtaatctcatatttatgttcagagttaaaatcgaaacatttttccataggtcagagtttgtgattgatgcattaataacagcatgacgtgaacctttatgaacaacaagtaatatttgtctgaaatcaccacctataacaacaggttttcctccaaaaggtataatagagttgggaggacttgtctcacaaaggatatcacgtaatgtacgatctagtgcctcaaaacaacgcctatgtgtcattg

SEQ ID NO: 13893 - DNA, 376 bp, Oryza sativa
ggataaagttgaatttgattaaatttgaatcagtgaaagtcaatgttgagtgaagttaatttgactgaaatttctaattaagtgaaagtttgaattgaatgaagtttcaaactgcgtgaagttcaaattgattgaagttgaatgatctaaattcaaattgttaattttacacttgattgattgaagttaatttgattattttcatctcaggagcctaatgtttgctataaaacactacgtgtccctatccagaacaaataataacaatgtgtactggctatatggtatcactttaacatgcccttatccactccccttaactatctaatcctgtcaatatcatcacccttacgggctcgtgctctactgctcttcc

SEQ ID NO: 13894 - DNA, 452 bp, Oryza sativa
  unsure (1)..(452): unsure at all n locations
catgcaagcttatgtcgagctcgagcctgngcttacgttttttgctcgaactcggntcattcacaggtatactattagttatatctaaaaacatttcactcaaaaaacttgtgataatttgtagatactcctgccacctttgtatgaatgatctatgcttccaattaaattcatggaaattaatagcacgaagcatgctgcattggtatagttttttctttgaaaaatccagaaaattctaaacattttctcttccaagcctctgatgcatncggcgaccgtaccacacgtgagtacctcgtcctccattgacggctcaagaatatattccatctatataccaaatacaactatatataacaaactaaattgtgcaactatcctcangccctgttagatccaccccaaattttcccctgtccatcaacatttgacactgcataagtataaat

SEQ ID NO: 13895 - DNA, 83 bp, Oryza sativa
acagtatcatgaatgttctctgctggagcgcgcgcgaaagctggagtcgtcgtgactatcattgacagatttcttctgactat

SEQ ID NO: 13896 - DNA, 385 bp, Oryza sativa
  unsure (1)..(385): unsure at all n locations
agctttcatacgtattttccatgttctttttatgtgtctgatatatcacttgaaacgacgtgaacatgcaaaaaaataatgaacaaatgtgaaattgaatgcagtagtatgcacatgaaacttgtggcaattcaatcgtaatagggcgagccgtgaagccaaaaatatattcggggtatcaaactaaatatactgtgatttgatggtattaagngaacgatttattcggtttcaatgaactagctgacctgactagcaagcaacaatcatgtaacttttcaccttttcaggacctttttttttccaatacgatatctaataagtagatctagtatttagccatttcacaacactacaatatgtccacgtataaaactatccaata

SEQ ID NO: 13897 - DNA, 297 bp, Oryza sativa
cccttgcttgctcagattcttgtagcttcttcgccaactcctgcacttgtgatttgaggacattctttgccaacttctctgcagctagatgctctttaagtgagcctttctatctgctctgaatccccacaatctgcagaaatgtgggtttcttggtcttctcagcaagaacaccagcaactacctcggtcatggaaggcgcctcctcatcttctgcatgctcagacagcttggtttccacttcatcctagtagagcaagaaaaatacatggctcatgagacccagcaacaaaaata

SEQ ID NO: 13898 - DNA, 410 bp, Oryza sativa
  unsure (1)..(410): unsure at all n locations
agcttaaagccatgaatcccttttatgcatatcttgatctggatcctgcagaacaaatatataggatgagtagtatctgatgtaaatataatactcgaggaaaattcaagtattttaaaatatttataaatatgtatttcttcttttgtcaattttgatttccccgagcggatgactccttacgtttaaacactctgtccgactagtcatagcccccaagcatcgggagtcggcctaggcacttcccaaacatgcatatgagtgacatgagtttgtcattaatggaacgaagnttcacgaattggaatatactactcgggtacttttgcaattggtaagagtagaaaataaattatcttatctttatgcttntngattcttccgagtaatacttagcaccttgcgttact

SEQ ID NO: 13899 - DNA, 118 bp, Oryza sativa
acacacagactaagtcattcataccatatattataagctagctgagtactccatattatatatctagctgatcgaccagcaagaacagaaattgatttcagcaatataagtatgtact

SEQ ID NO: 13900 - DNA, 453 bp, Oryza sativa
gcttagttgtggctcagtctggcatgggctttttacacgaatggagatggacgaagttggggctcgatggacatctctaggacaaatgaaggctacacgagctgcagcccggtagtcgagatgtcatggcataaggccggtttcctgctgctaggggcacaaccttggttacctgtctcgggattccggccgtagccagggttgggtcggtactcttgtttatggctaggatgggttgggaactatgtgacgtctttcgtccgtatgccgtggtggtatgtggcacgtggttacacgtgaggaagatgtgtcttgtgggtaaagatgttcacctctgaacagagtataatctattcgaatagccgcgccctcagttatgggcaagcttagcaatgtacccaagttagtggtttaattcttataacttgcttaacaattaaaacgtggaatggt

SEQ ID NO: 13901 - DNA, 328 bp, Oryza sativa
  unsure (1)..(328): unsure at all n locations
tttagtgacctgccgcatgcaagcttctgcaatctgcaagttgcggatagttttgtttttgtttctgctcttttcttntttttatttaatttaactntgatcgtgttcggcagccaaaatcatcttatccggcccgtctaatttccaatcgacgggctgaaatttgggcccatatgaaccagggtttcaactcggggtcgaaatttccttccttcggttcatatctactttgacccaatttgaaaaaagatttatttatatttatgacaccgaattagttcaataaatataatattgaatatattttgagagtggtagaaatattgct

SEQ ID NO: 13902 - DNA, 442 bp, Oryza sativa
tcacccgccgcatgcaagcttaccgatggagtgtgcgtcttccggcggttgtcgagcacggaggaaaacttcctccccgtcttcggaaccttgccgccgctggtcgttgcagcggcagcggcaacagccgcatcggacacctcccgggcaacgtcctacttcaatgaagctgccgctgatggtccacgagcggcccgatgacgtcagtcagggggagagcctgtgcgacatgaagacacgatacaatctaagaattgaaagagaaaggaccttcgactacactcacgttaatcgcggcttcacgctcagccacctccctctcgcaaagaggggtggagacgtcgctcgccatcgtgggatcgctaatcatcacctgggcaatgcgttgttctacgggtgcgctgctcagacctgtagatcgagaaatcaagttcgacaagtc

SEQ ID NO: 13903 - DNA, 409 bp, Oryza sativa
  unsure (1)..(409): unsure at all n locations
tctggcattgggtaaaccattatcgatttttcatttgctcatctggtctatgcaagtgaacatgtaagattgtattctgtatataaacgagttctttgttgggccactaatttcatttcttttccaaaattacttggttgtgtcttctcttagcacatctatgtctaactcctggtcatttgactgtctacaagtgcctgaatgcctccgtatttgtgcacatttgcgccgcattggagtgttcagtgaatcagaatngccgttacagggattctgaacttctgatgtaatctggatttttttttttgcggcgaataatctgaatagaattatacgtcacgataatgcttctacatttaaaatttgaattatgagtaattaatttggtaccctaacccttacttcaaag

SEQ ID NO: 13904 - DNA, 375 bp, Oryza sativa
ttggtgtgctcagtgagtctgtgtgcataactgcgaggatgttggtttttgtgtcatggtgaagataaagcttctatttctaatttggtagattattccacgttataccatggaatcaaaatctaccaacgtaagaccttgaaattcacatgtgcatgtttcaggttccactctgctgggagggcacagtggagtagcatcctacggtgctacctagagaccataggtgatatcaactgaagatgaataatcatatacttcatacgctgtcacgaactgaattattgatttgtaaattcagaaacccgacaagctattatgaactaacacaaaaaaataatacattttttcctaagctaaatcatcttgactatg

SEQ ID NO: 13905 - DNA, 388 bp, Oryza sativa
  unsure (1)..(388): unsure at all n locations
gcaagcttcaggtattcaataaanaagaagtgtgtatctattgctacaaagntctgatacacatgacgaccttaacattctgtaagatggtttgaaatatattcaggtggggaacgcccccctccggcgacttggtcagaaaaaaacaattccgtaaatgtaatgccgaaacaatttctaccaaccatggcctaatttcctcatttttggtactcaattgccgattcctcatgattcttcccatcgcgctagcttctgctgcaggcagcacaatcttacccgctaccctaacccatccccacacctcctctccatgtcccgctgccgaggaaaaacctaccggncgattcaactacgcttcctgtctacgaagtgttcgacgaatcgc

SEQ ID NO: 13906 - DNA, 289 bp, Oryza sativa
ctagctatatcttctactagtctcctcaagctagtccacctatgtcttaccaggcagaccgtagatccaattcactatactgtacatccaattctactatactgacatatatgtacaactcatatatggacacatggccacatgacctacacccgactcccacacagatggcatctctcagtctaaccaaaccacagttggtaaaaattcatttatttcgaaacattaattgcctaatgtctttatgacactcagtatgctgattgtagaccatatggacgatcataat

SEQ ID NO: 13907 - DNA, 367 bp, Oryza sativa
  unsure (1)..(367): unsure at all n locations
gcttcaatcctttgaatcaaagggccaaatatattattttcctatatgatttgaatcctatgagattcctacataaatcctttgattcaaaggaggccttaagtttatagcaccgaaagataccggttcactttaataacacctaaagttcaccctgttcccatgcatttttaacgcttccgtcaattctcggtcgtgcctttgtgcctggaatttttgagaatgtttcctagcggttttgtgcctgctctcagtttgtgctagtacctgcgcctggccagncttttactctattagactctcgcttgatttgttttgattttcctaactaaaacaacattcttctaggtacggaggaagtactatt

SEQ ID NO: 13908 - DNA, 243 bp, Oryza sativa
aaatatgttacctaacagtttaaggattacaaatatttgtgcaggactagaaaaattatgtctaggacaattaggatcattaaacattacctattaagctgtggccaaaatttatcataataactgtctaatctagttcatgaacagttaccgatttgaaaataaagattcaagacttaatcgtcgagatcatatatattttgagctattatggatatagatttagactgttttttattgcat

SEQ ID NO: 13909 - DNA, 343 bp, Oryza sativa
  unsure (1)..(343): unsure at all n locations
gcttgaacagactccgttaggcgaatatgtcctttatctngaatntgctccacgtgcgaacctctgtgtaccaagaattgagatggctacttttttcgccgctcgcgctgagttgccctaacgaacatccactaggctcactttataaagagactccgctatccctgtaacttcttcttcttgactccacctgcaacaatgttncaccttcttccatatcattacagtcgtcctgtcgaccaacattgaattccttcctagctatcacatcatagactctctaaaaaccatgttcatctccatctacatatctctccacgtatgggtacatcgtagagtacat

SEQ ID NO: 13910 - DNA, 300 bp, Oryza sativa
  unsure (1)..(300): unsure at all n locations
ttctacttcatcttctatatgcttaagtggatattccgatgcggattttggtggttgtagaaatgataggaaacgtactagtggaacatgtcattntcttgggacatcatcgattgcatggtcttctacgagacaatctagtgtngctcaattaactgctgaatctgaatatgttgctgctgctagttgttgttcacagattctttggctttatcntacttgacagatatggtcttactttgagacacacctctctttgtgatatactagtgctttaacattgctagaatcctgtcacac

SEQ ID NO: 13911 - DNA, 426 bp, Oryza sativa
agcttatgcctcaatagagaatctgaagttgttattaaactcatcttggaaaccatattctacatatagactatttcctcacacttcaagtcttacacactaccttgcagggccagaccgcctgtaaattctaatatacatttctgcataaaatacaagacctaaaaggacaaggagtttgactgcatatttatcatagtatataaactaaccttctgtgaagttacagatcaatatgataatttggtacgcactaagcagttgatagcctcaatcaattaattaaaaataatatataaatgtaagttcagtatcatgcacatatcaacagccttaacttgtacattgatttagctaaattcacaactattatttacacccgaggtagccaactcatgtttattaactggcacactagcctcatat

SEQ ID NO: 13912 - DNA, 397 bp, Oryza sativa
  unsure (1)..(397): unsure at all n locations
gcttagcacatacacgagtggtctagttgtgttaagcagaggtggaaaccatggtgagattacagcaagagacggtgatgcaacaatacaggaatcccaacaaagacctgggaaaagatggattgatgaaccaattggtaatgatagaatcaaggagaggagtgagaggcgaactgatggaaagagaaatagccgtggctttgatgatgagaagagttctcatgttgatcgacccacactgaagaaacaagatgctgtgcgattacaagatcccagacattttgatagatnagacgggaggaaagagaatgcaaaactgcaccatgaagagcccaagtcaaataggagaatgtcgacatgcaaggatcattatcaagaaagacatgacaggtctgtc

SEQ ID NO: 13913 - DNA, 309 bp, Oryza sativa
accaacccctctgatacagctaccactgacaaaaacttcaactcttggtgtggggggaaaagagagcaacgactgagtactactcactgcactcagcaagtcattccggaagatgaggaatgatgcaggatataaccaaaggaggccaggggttcttttgcataaaactatcaattacaaacagtagttggaagcaggaaaacaactgtaggtattaatcaataattaccaatcactgggcaacgctacaccacgttgcaacaggccccaccaaccacctggacttcactagttcattaagctacacta

SEQ ID NO: 13914 - DNA, 196 bp, Oryza sativa
  unsure (1)..(196): unsure at all n locations
catttctctgtataacgattagttgtgaattgaccctgantntgtcaacttccagaacatctttatcttctctgaggtcaactgaactgtgctgagtnttgagtgcaactcacaccattcattcaactctgcctgacctagcgaccttcttaacctaattttcactnccctctatcaacattggtgactgtctatc

SEQ ID NO: 13915 - DNA, 336 bp, Oryza sativa
  unsure (1)..(336): unsure at all n locations
gcttgtgcaaactggattttttttttcagtttgtttgttgacatgtttggttttcacgccaacctttatgtgcacgaacttaaggttgttaggccttcacttaggatggctttgggcagagacttactatgtcctcgtcgtgcccagtcatttgataaactttggtagatcgcattcatttgcgtggacgtgggatggtgcatgcgtacagatcagatcgtggcaaagaaatcggggtgttttagttgtagtccttgcatatataataccacctccgtcccaaatatatccagattcattcctaaanatacttatattctaggatggagggagtaa

SEQ ID NO: 13916 - DNA, 254 bp, Oryza sativa
  unsure (1)..(254): unsure at all n locations
catctcgctcacacagacagtcttctatgatggacactcggattaggcgtttttctatgaagagatgctgtcccaaattacagactactcccgtatgcacattgaccggcactggagtgcttttccataactgtcgagagccgcgattgataaaaatggctcatatggctaagcaagaacatctaaccgcagcatggtgccacgtatggaacngaatgctgtgccacaggactctatgaacgttgacatcacaa

SEQ ID NO: 13917 - DNA, 448 bp, Oryza sativa
  unsure (1)..(448): unsure at all n locations
tagaaggggattcagcaccccaactgtagcactcacgattgctcctgccatctctagctccgttcctctcccacacacacagtagcagctatctcaattgctgttatgctaatgagagactaatccaaccatttgactntaaggtgtagtcttcacctgtgcacagtggttgtcgcaccatttgattcctttcaagtttaataggctattgattatttcctcatgatccacaccctgacaagtgacagggttcttaattaactgactacagagctcgagtctcgcacatgaccacgtgatctaacatgcttcacatgcctctgcctcatcttttgttgaaaaaaacacaacccagtcaaaaaaacaaatggcaaacctgggtgaatattagtatgatattaattcccgcatggcaggactatttgtgaaacatgagaggattctttgt

SEQ ID NO: 13918 - DNA, 415 bp, Oryza sativa
agcttcctgttgattaaagtaggaaatggatgtgctatttttcatctaaccgcgatactgtgaatgatgtatttccattaaaatgatatatcctgaaattataccatcaagaggagatatgatcatatgtatttccatgttgttatattgatcaggagcgatcatgtccacatctagcagatttgtgggcccggctagataaatggcacttctggcaggtccggtgaatagctaagtactgatgatttgctgcatgtgtgtgcttatcggcaattagctatgactaggtactaattccccttctttaaataatcatggaatgcacacatgaaagtaaatcacaggcaaacaaccaagtatttccttgcgcgtgacttgcccattagttctcaactacagtactccgcacaattca

SEQ ID NO: 13919 - DNA, 276 bp, Oryza sativa
  unsure (1)..(276): unsure at all n locations
cgacgccacgacgcatctgctgctactgttctacgtaccctatactactgccgactgagactngcgttctgccacaccacgtgtcctagggcgcaactacatggcaacacacagacatgcactcacccacacccttacctacacacgtactgcactaagaagttggaaaatagctgctgagacctatcaattgaataaaagtcgtcgaaaacatcatactggaaaatatcgacatgttatttcaaaataatacatgcctgacatacatgatgttca

SEQ ID NO: 13920 - DNA, 426 bp, Oryza sativa
  unsure (1)..(426): unsure at all n locations
gcatgcaagcttgccaaggagtctggctataccggtacctttttgtctacctacatattcttgaacttctacgcccttgagttcaataagtagctacacctataaaacagtatggtcttgaataagagttgctagctcgcgtgtgtacttatgtctctctatgatatgcttatattccaatgtatgtccctattgtgtcactatagctaatctaaatgttaatcttcgatataccatctatatctaggtttccggtggactttcgtccgtcacccnctgtccgcttcgtgatcgtgacatcggtttagatcaggattcaccgctggcctcaatgttggtatggactctgaatcaaacacaataaaatcagcttgaaggagtccaacggataaaagttcgagctaatcacaatgcaatacacaatat

SEQ ID NO: 13921 - DNA, 372 bp, Oryza sativa
agcttggacatcattctagggatggattgttttgctaatcacaaaggacagatagattgtgccgaaaagtccatcaccttgcaaggacctgcaggaaagcaagtccgctttacccctaacacccctaccgcaagtcggtctatcctaacctgtttacaagtcacctccttggagtcggtgcccatagtctatgaatatcccgacgtatttctggaagaattaacaagaatgccaccagaccgagagatcgagttcgccatagaactggcaccaggcacagctccaattgcaaaaagaccctaccgaatggcagctaatgagttagcagaagttaaaagacaaatcgaagagttggagagtaaagggtatgtg

SEQ ID NO: 13922 - DNA, 115 bp, Oryza sativa
  unsure (1)..(115): unsure at all n locations
aacatatcctacatacacaagctnnttgcgtacgtatcgtacacaccgattaatggatttcaccatttnttaannaaatngtacatgagtaacaatcttaactcaaaagtcatta

SEQ ID NO: 13923 - DNA, 337 bp, Oryza sativa
  unsure (1)..(337): unsure at all n locations
gcatgcaagctntcatgacaaggcatgttcaaagccttcttttgttaccatatgccgacgagaggagtgccagaccaacaacaggttaggtcccacaccatactgtgccaggaagcccaatggtctctcccgacaccacgcccggcgaatacacatgtctctcggcatcaaggcgtccctgataagcttgttactcagccaagggtgtcccattccacccatgtggtcgtacttgtcttatgtttgaatgaaattccaaagaaacggtccttaagtgcaagagcgggaaaccgtacacccggtacgttccccggtccgcgggattggaaaatcattt

SEQ ID NO: 13924 - DNA, 440 bp, Oryza sativa
  unsure (1)..(440): unsure at all n locations
actagctatcttttgttaagcttatcctgcacgtgcgtgacactgttattataagtaatattctgcttcatgaacctccttttgtgtacctctactactgacatctctagtctggaccctaccagagagatagtgctgaccaatacccgattaatttcgaataagctacctgccacgtaaaatatattatgtgactgtatnttatttaggtgaactatgtacttcttctttaccacaacttcttagatgctgtgacagcatctcgctcagcttgagattactactcgccatgtgaggtgcgtgctatgaccaccattttaaaagttagctgctactatggacttttatattactcaatgctgctgcagctaataaatgcgtctattcttcgcgactgtctctctagatcnacaaccgtacacggtctctctttatacctg

SEQ ID NO: 13925 - DNA, 361 bp, Oryza sativa
  unsure (1)..(361): unsure at all n locations
agcttgctgatgagaatggtgtcactgaaagaacagacatggagctcggctcgtacgtcgcccatggagctggtactaaacccaatttgaatggggaagatgacacacgagagattgctggattctggggttacctgctccagatcatctaccaggtaaagagggatttcatgcagccaaagaacttagaataaccatccacttgagcgcctttttttttcttattngttattgaagagagttatcttatctgcactgacatttgcgtccatggagagggggtctgatctcattangcttttcatacgcaattattgcactaacaactaaagtacgtttgtggtgtgctctgatgaattgg

SEQ ID NO: 13926 - DNA, 123 bp, Oryza sativa
gccttactcacgacagcgctatttggacggggctggcaggtttctttcgatgtgcagaagagctgttactctggctattggtacctttacgtaaaaggttaattgaatgttgcctctttttgg

SEQ ID NO: 13927 - DNA, 404 bp, Oryza sativa
  unsure (1)..(404): unsure at all n locations
cgcgcacaaggctgcgcgggcatcatcaagtggcggttggggtggcacgttgcagcatctcatctggaaagttgcggcaaagcacccttggccacacnggaccttatggcccgtctccctgagcgtgttagaaattctgcaggagtttaggaaacactcgtccaacggcgggctggtactttgagcggtaaaacttcttgacggttgatgtgtctcatgaggtccgcgaatgctgttgctgtgttttctttctggttagctcacggtatgactgtatttttctcttattatacaacgtcactgctggcggtgttaaatatcgatcgtacagtaggacctataatatctatctgtcgtgtcatcaagcggaaagtgtgctcgcctattttgtacagccattgtct

SEQ ID NO: 13928 - DNA, 393 bp, Oryza sativa
catgcaagcttataggtaatacacgtacgttatctatatacacgttcatagaacaattgaggtattaaaagctctaactattaagccaccaaaataatttttcattattcgcacttccttttacccacccacaagtaacaattttttcttttatcttaggcttagtcgtatttgtacgagcctagtatagtctcatactccctccatcccataatatagtaatctagtactggacgagacattttatattacaacgaatctggacagatgcatgtccagatttgttgtaatatgaaatgtcgcatccgatcctagattgttatattatgggactgagagaagtagacatacgtgttatctagagactcattcatataacaagctgtgacaatc

SEQ ID NO: 13929 - DNA, 362 bp, Oryza sativa
gccactaaagaatattgaatgataaacaacacccaatctctagtagtctcggacatggaatgcaatttttttacaagaatgtctctctttcatctcaaatatagacttactattttagaaaatatattatacattgctataataagcaatgtatactaattgattaaagcctttacgtatttctttaaaaaatttaaaaaaatgcaagtatgtgtgaacggacgtaatgttttgtgacttaaagtacttgtttttttttgagactttcataacgcgtatgaccagaactttgcttaccgcttgcctaaagcaggcatctcgactagcacgtctctttcttgacttggatgaaatgtcgttta

SEQ ID NO: 13930 - DNA, 397 bp, Oryza sativa
tgggctaaaagatgcctgctgtatattatcggttacctaataaatctcgtattgagctcttgaagtcgcctatcaatgacacccaaaaacatattagcatggaatcgatggtaattaacagcatctttaagaatttcctcgatctttgtataagcttatacttcccatacatgtcaacaactttaactttgagcttcacacaaaaagaagtgaccctttcaagaaattctttacatccacaattttctctcaaaacatcaaggtcttgccttgtgaaactaagaagatccatttgattcacaatatcttgctcccttcctagcagaacattgcagaagtcacttgtgtatcccaaattttcattcatatgtgcaacaaaaaccaactcaatgactga

SEQ ID NO: 13931 - DNA, 364 bp, Oryza sativa
  unsure (1)..(364): unsure at all n locations
ttcctttatcttaaaaagtgtgttagagtccgataaagactttatgttttccttttatcttcaagtagtttctttcttgtncgataaagacttgtatcaacccatgggtataaatatgtacacccggtgtctatataatctatcttcacgatcaatacaattcggcgcattgccaccttttaccttttctactttattttatcatcccggcggacctggcacctgacgcggtgctgaatcgatgttcgatctccggcgaaagggtaagtcccatgttccatcggcctaagcaattgtctatctacgtcagcgtcgtcaagactggataatacattcgactcttggattgtctggttcgacatct

SEQ ID NO: 13932 - DNA, 439 bp, Oryza sativa
gcttgtccttttagccatatgcaaatgttattatattttagagctggtgcacttcatgtctcatgtcaacgcatcacttgtcgccatttacaaatatgcgtgttgctttttgctggaagatttccaggctgaggatactaggataaagctattgttggtccgagggagaagtgtttacagattctaaactgatcactgataatattttcttttaggtggaactcctgcttttgttttatcgactgctggagtggacaaaaaggtgaagctgtggttagctcctaaggctatttcaacctgaatgagtgtgggtggatcctggtcaccctctacagcgcagattctgtgtgggcacttgaggaagagaaataaacatgaaagataatgccgatatgttgcttgagttgagtcttactgacgggagtcgtaaacatacatg

SEQ ID NO: 13933 - DNA, 389 bp, Oryza sativa
  unsure (1)..(389): unsure at all n locations
tgcagcttcgctatcgatctaagttcagacactttctttgttaaatacgaagcatgtcccttgtgtgagaaaaaagggaactgtgaaactgtagttgatggtgcatgtatatatacgtgtatatgttttccaactgtgatatattttacaattattttatattctaattctttttaaaataaacattntatattttgcattttgagaactagtaatattgtcgtttgaaacatagttttccaaataccaaaacggctaaaagcagtaccaccaccaaatcgagattatcagaatctactgcaattccaaattcatcaactttaactacaaggcaggtaaaatacagtatgaatccaattccaaccacgacatatattggatatcaaaat

SEQ ID NO: 13934 - DNA, 249 bp, Oryza sativa
  unsure (1)..(249): unsure at all n locations
ctgtacgtcgtctttgatgagatgcctatgtgcccgtttttcaaactactcatttggctagctagcttattaataagaaactatgccactgaagaatccagaaactttagctataatcatatagctaaggctcgtatcactgtgtatgccgttattagctcaagatgctcgggttcagcagtataatatntttattctgtcaaaacctcactcgtcaaattatggacaaaattttttggactactgcca

SEQ ID NO: 13935 - DNA, 285 bp, Oryza sativa
acattagatgagtagtattgagtaatatatatcgaaaaaatcagcagttataaacgatttctctcttgtatttgattcccgagcagatgactatacgttaaacacttgcccgatatctagccccagcatggagtggccaacacttccaacatgatatgaggaagagtcgtcttatggacaagttacggtggagttactactgggactttgattttagagcgagaaaatatctactcatgtttgattatccgatatattacacctggtactgccatcaacagcccg

SEQ ID NO: 13936 - DNA, 316 bp, Oryza sativa
  unsure (1)..(316): unsure at all n locations
ctaagctgtcaacgtcgcatgtcaatgcgccgcaccggtgaacctatatcaaccatggcgtctgggttggcttcgantcattggcaaattatccttcgcatcaaggagcgtagttcgtgctagtgaacgggtacttaccaatgggccaaccggccgtcaaaattgatatacggggtattgacttatttgagctatatcatagatcgattcgcaacatactangacaagagctgttatgttacgaggaaagttgcaaactatgggtaatgtgagtctttctactcctaactatggcactgatcatatagactgtgac

SEQ ID NO: 13937 - DNA, 451 bp, Oryza sativa
  unsure (1)..(451): unsure at all n locations
gcttatacatttctagactttgttaaactattcttttacgggatatttgcaggatgaattcagaaagagaaaaaaacactccgtaaatagaagctacggagaacgaatactaacacacttaactgatggatctaatatgagttttgagcagagagtagtgaaatacctgccctatactgcagatgacgatcagttgcacttctattttgtgtattgatcaaatcacttcatgcaattacatcctttcactacatctgaatcacctgataatactatggtaaggcagtgaatcacttgatgactactatggcagaacaatgagaatgaaaggagaaagattagagcaccttcggaatcaccttctattatgacnaggaaaactggatctcataaaggccaaaccatgacattaaaggtagaagacctgggataataagtaactacctcacat

SEQ ID NO: 13938 - DNA, 174 bp, Oryza sativa
tcatctctatgtaccagaatcataacttaaagtgactgtttttaccaggttgcttacatagtcttggtaagaccatttctatctctacctcaattgtgtacaaatcttaaaacaagcccccgagggccattatttcagagggagactagatctgtagcggatatccatcattct

SEQ ID NO: 13939 - DNA, 402 bp, Oryza sativa
  unsure (1)..(402): unsure at all n locations
tttaaaattcaaaaaatataaaagcacaaatcgcttgttgtatatccctctatcaacatgaaaaattaagcttaattcacacatgataaaaatttgtaaagaacgaaataacaataaatttagtgataaatggttttgtttctttgtgcatatcgaatttgacattactataaatttactccctccatccaaaaaaaaagtctaatcctaagatgtatttgaacatgcacattgtctagatacatccccatgatttgatttttttattctcttgataggagaatatgtatgaatacatgacacaatcatctatacatttcatatntgcatattcttntttgaanaaaatattttaacaagctaaaccctagacaaaaattgttacaatgttagatttgatgg

SEQ ID NO: 13940 - DNA, 204 bp, Oryza sativa
cagttcattcgtatttaatacctaaagacttcaatggcaaactcttattatggcctttatatgaccgtgtgttatgattgctattatagtacatcacttgacgttggtgtccaatcagctagagcgccatttacaccgtcagacataaaggctctttggaatattacaagccgacaatcgatgttgactgctatacggagtatc

SEQ ID NO: 13941 - DNA, 160 bp, Oryza sativa
  unsure (1)..(160): unsure at all n locations
gcttactaaagagaagagaagagctactattgtcttcccgaactcttctgaaggctgccgacttcgatntctactctattcctactccactagcttaagactactaaactatcttgagtgaatatgagagaactcttgcttgaggtgcgtgtgtggagag

SEQ ID NO: 13942 - DNA, 433 bp, Oryza sativa
acacacttcacttttattaaactgtctttgttgttggaaactacttatgttataaccagctttctgaaccctatggtactaagcttatgagatggctactgatcaggtggatcccccgacaatgctctggacagcgagccaaaaataagtagacctagttttcagcatcgctgggaaaaatgaccatgactctttcccttgcatcactctttgggttggatgaataccagttggcttttattagtctactcgcacttatataaatgatagggactttacatgcgtaactattgatttcatgggcgacactgtataaagatatatcatagctcatgcaaacttgcccgactctatctggttatgctacggatctatatacattaacatacaccggcatgaagcgctgtggtgctactctatctgaccatttatc

SEQ ID NO: 13943 - DNA, 337 bp, Oryza sativa
ctactcccctcatctccactgtagagcttatccacatcaatcacaagcttgctctcatcaggaagaaacttgcttgcctcttgaaacccgcggcggaactgcaaagcctgttggttctgcacaacaaaatcattcaggctaacatcaggcaagacaccagccgggctcagcaacgactcgaatccttctgagaaagtaacactgctgccgttcgaagacgcgaacgacgaagattgcgacgggaggttctcacgaaccggcttggtctggagctgatagaattccgtcgggtcgtacgggcaggcgccgcccgattcaccatgccccccgtgggatc

SEQ ID NO: 13944 - DNA, 412 bp, Oryza sativa
  unsure (1)..(412): unsure at all n locations
atattgagcaatgttggtataaaaatatagccatgcccccttccatattcatgccaagagaacaaaatggagagaagtatatgaaaaagggataatcatttctttattccatcattccacaaaatatttttcctttccttttccatcacaaataaagaccattgatctaggagtatgactgatgatcttcttgagtccgtatttttggctttgcaatatatatgatgcaggtatgtcacaatttatccctaccaagctccacatatcagccttagaataggggtgaattctagcacactttgccttggtaaggatccaaaagaaaatatacatccttgagagacatgagagaaagtcaatatgaggaaaagagctggtttgcgaaatacataanaatcccatgagtctgaca

SEQ ID NO: 13945 - DNA, 399 bp, Oryza sativa
tctttcctttgatctctcatcgtctgataaacacagtgacgcgtttcgagtataagacacgatatgaactcagaagactcactgatattagttacggcacgacgcggtatatgacatatgctgatatggggacgtgatgatcatggtgtatgctcactactcctcttgattgagcggctcactaagctcattttgcaatacgctcaattgcacgttatgtggactaaccgaattgatgcaatatcttatgatccatatcttgcaccttaatgcctactttggtaataactttcataggatctcttccgagcacacaattcggtatatatcctcacttgacagaatatctacatagctttgtcttatgtatgggtactacttagtgtagataaatattta

SEQ ID NO: 13946 - DNA, 381 bp, Oryza sativa
  unsure (1)..(381): unsure at all n locations
ctacctggcgcgccaactgtcaaaacaagaattcgtcaataataaaagggggtagcgcacgagacctaaatgtggatggatgcggagacaaggatttagacaggttcaggccctctcgatgagaggtaataccctactcctatttggggagttgaatccgccgggtgtattatagatccgacgatctggttgtgaattatgccccatagagggtctcctgcccaccttatataggacggggggcaggattacaagatagaaaccttaaccaatatagtatcagnttcctaaatctactttacaatattatcaaatcaaaactttaggctgttccataatatataagaaaaatgtatacccaagtcatgatccgttcatatt

SEQ ID NO: 13947 - DNA, 381 bp, Oryza sativa
gacactaaaaactaagcttctgacacttgaaacagagtctgatatcagcaccggcgctggccatgctctcatttctctataatgtatgtggcggagactaacgcttctgaccgaagtatggtgctgtgtttatgccatatcatcattcggcggcattatttagtaaagctttatgacctccgactcaagcacttttcacctatggaaagaaagtctggctattattatcgctgtaatcagtagcgcccgctgtacaacatgatgaatttttaattcgacctgatcaccgcatactgtctttcttgataccaaccacaaccatttcttggtacttaacaatgacaaattagtgggtcttgttatgcactggtacacaacgat

SEQ ID NO: 13948 - DNA, 440 bp, Oryza sativa
  unsure (1)..(440): unsure at all n locations
tcgacccttatttcatctagcatttcaagagatatctctcttccttctttatctttntggtcaaatatcattcttggagaatgtgcccctacttcgcttggagtcattgcttcatcgccataaaccaatctaaaaggggtcatgccagtcgaccttactaccgtgggtcttagtgcccaaagcactgatagcaagtcctccggccatttccctttngctgatccttctaacctcttctagataagcttcgtgattataccatttgccctttcacaactccatttgtctgatgatggcctacagacggcaaagtgatttgcaaattaaggcctttacacatgtcttgaaatatatcagattcgaattgctttccattgtcacatactatttcctttgggatctcaatcgacatattatgtttttcaaacaaacttttgact

SEQ ID NO: 13949 - DNA, 464 bp, Oryza sativa
  unsure (1)..(464): unsure at all n locations
taacatgtaatcatgccacatcatcccatattagaaataattacatacttatgcaacatcatctacaatctatttaagtctacagaataacatgtaagcatatccaaacatcacccctcacaccatgttcataatatttcagcaaatatatcattttataatcaatatattctacattaaagcgtggatatcatttgtttgttttataataagtactgataaacactaacgattcattatcttttactttttattcctagctcaattattaaaaatcaataaaaatgctagtaattcttgtagcaaagggcggngaatcaccttgattgtggatgcgtgagtgcagcgaaagtgtgtaatggtgtatgtgcatattccgtgtaataaaaaaatactgagagggagagagagaatgagagatgcattgcttactcaagtatcattctttgatttgcaagttgtat

SEQ ID NO: 13950 - DNA, 417 bp, Oryza sativa
  unsure (1)..(417): unsure at all n locations
cacttacaaagtatggatgttntccatgagcacactgtcaaatatctctgaatatgaagttgcatgatcatacatgtattttacagaagacaacgcatacaaagacctccagcatgctttcagcttacatttttcttgaccagtagcaagaccttttttctcccatacgttgccattgatgcaagtttacaaggtggcccanaggagttaatctgtgacatctcanaagggaaggaaaagaaacaaacaaaaaataagtctttagtcaacaatgtgcatcattggcgatgtacaacaaaccagttttttttttcttcagagaagaanataacaaggcacctgcattagtggccatttccatgcgtctcatgttctgcttcctctgcatcctcaaaacgttggtcattgatctgaagc

SEQ ID NO: 13951 - DNA, 364 bp, Oryza sativa
tgttgccaccttgctgcccctacttttagatccatcggcatcttttgtttatacactacggtatccgagggagaaagagatagggaaggagctcactggtgtgggagaagagaggctcaccggtgcctcatcaatcaagcctcatgtggagattggcgagagctggacgtggcataaaaagagatggagagggtgatccaaagtgcaaaagaggaaacgtatctcagctctatgtgaaaactttaggttaggggtagtccaaaatgatagtctggactaaacaatactaacccaaactagaattactctatatctaaaatatattatggaataagagtaatttacccaacggcggaggtggagc

SEQ ID NO: 13952 - DNA, 345 bp, Oryza sativa
  unsure (1)..(345): unsure at all n locations
ctaagctgagtctgatcttggctcggtagtcatatctatacactacatttattcttattctggtgactggttttgcaaggatttgtggacagccaatnaggaattattggaaacaatggcatttcgtttacagaatcagccctaaatggtttccactatttataatgtgtgtgcccaccgcactaattctttgatattccttcaaatattactggattcatgcacgaatgttactactaagagaaacttcttctaaaccacttggactcactacctagtgacctgggacatttttactagaatagaacatattgtatgcatccccatgcgatcacatcgatatat

SEQ ID NO: 13953 - DNA, 296 bp, Oryza sativa
  unsure (1)..(296): unsure at all n locations
ttactagacacgagtactcaatanaaggggttgtcgtggagattctgtcttatttgattatcatngactacaatgatcagactaacggatggcatgtgctctacccaaacagagaatttaatatggctattgctgcgaaagaagcctctataatcccaccaatctttaaccagagaggattatgcatagggcgataggatagttgtcatgtctaccttgaccatatatataacacggtggaggggtatgatttgttctgatcggtgtcccctctattagtattcttttttgggggg

SEQ ID NO: 13954 - DNA, 418 bp, Oryza sativa
tatgacgtcggagccctcggtgttttgagaagctggagccgctcgagtcttatggatgcggccttaccatggtgaaagaattgactatcacatggttgaattgagataagactgaattactcggttggggtatgccatatgtcaagtaaaccctgatttatgtagcctgttatggtgatatctactaattcatgacaactagcttctttaaaaatactttctggaggaagctcaccccttcaacgatgcctttagaggattcacatcaccgtcacttgctggtaatgcattgtgatttaacagtgtggtaatattacatttctttcaaccttatttgatatcatgccagctatgctaaatactatagctgcaacctgttttgttctgtatttgtctaggagatctcctataccgataa

SEQ ID NO: 13955 - DNA, 466 bp, Oryza sativa
  unsure (1)..(466): unsure at all n locations
ngatcatgattngaggttagggtacagtgtagtattagtatataactagttggcacccatgtcttttgccgcgggtttagtagttttatcgtcaagcaaaattatagttttaaatggttaggtgcaactctatgtttatacaaaatatatgataatgtggatttatatatgccttatgttattataatacaattcatgctttatnttttcaagcgtcattgtatattggtatatatatgaatattatnttcatgcgtaatatgggtatggttatagttagacaatttgcatctctctacttcactcaagttntttttttctaaaaatagatttaagtaatgatacctaataattatatactatcttatcatgcataataaaataaaacacacatattaaatgataatttgagttgtattcagaaaacatggttgtatgtacaaaatatgtagcaatgttacgtgtg

SEQ ID NO: 13956 - DNA, 459 bp, Oryza sativa
  unsure (1)..(459): unsure at all n locations
tactaagcttganactaaaagggacatatgcaatttttcaacacattacttgggattagtacactatataggttcacattaacagagtttcaatgttacagctctttattaaaggacatttggaagaatgaaaaagaagaaagtgttttagacaactattggttagataaatgaacattagaaccatgcaccagcacgttgataaccaaaattatgtttaatcaaatatttaatttatgaaaacattaagcttcgagagccacagagaaacttgcagattatagtcttatagatggtgtgatcatgtagcattagttttgcaatagcaaatccatgcaattattgttacagttcagttaagtacatataattntaagcacaggttntttgtagattacctcttgaatctattatcagaacanatcgcagcaaattcaaagctgataatacctgcataca

SEQ ID NO: 13957 - DNA, 404 bp, Oryza sativa
  unsure (1)..(404): unsure at all n locations
tcatacattctagcactagagcatttaacacaaagaacctaatgtagtttatatcttccacatttccttgatagntaataaattccaccatcttgaggtgtagatcaaagcactcaagtgaaacaatttgttgtacattattgaagtacgcataatagcgcacctgccaaggaaaaaaattaagagttgatagaaacatgatatgcctatcgatccaagaagatggccaatgccaagacgcgcacaatagaacaaaatgggtgtttactcacttatttaataaagagaaaattcctaccttgacgtatagcttctccacacatggaaagcattntataaagtcaataacaacattcggataanaatnggtgttaatggccaaaatctttacagtgcgcaccaca

SEQ ID NO: 13958 - DNA, 489 bp, Oryza sativa
  unsure (1)..(489): unsure at all n locations
tatttcttccacatgatgnttgttgacgcacctgattggtgtggtctttatgaaacaagagaaatttgactatctttgagaaagtatcttgaggtatctaatatggaggtaccatgttttgtattaaaaaaatatggtatctctcgatatatcttcaagaatggtaaaattatccttctcaatatatgtatatatataccttttcattcatccaacatactagtagtttcttagtgcatatctagattgttttgctgtgcttcctttctccattcacagttactcaagaagaaacgtgtgccactttgtatagactcacttctgtgtaatcttctaatagtggtaaatcacanaatatgtacatatattatnttgtatagttggtctagataagaatgagaaaactcagtatctcttatctcataatttgtcagagaactaactcatatcactnttgcatcaattgcgcaattcattaatttattatat

SEQ ID NO: 13959 - DNA, 353 bp, Oryza sativa
  unsure (1)..(353): unsure at all n locations
tatcttananaactgccaactatatatggactgaacatgtacaaaccctttaaagcctcagcatgatccttgtgtgaccgcgaagaactacctctatgaaacccactgctagctgcaccaaatctaaactatcagaanaacaatcaacattacacataattatataaacccatgagaaagctaatataccatgtgcactgtcctcatctgaaactaaggaagaactccttcctaanagcaaacgccgtcattgcctattgaaagctgncaaagcgggcttaaaatccataagggaacgtgttctctttgtcccacctggtaggggaagttcattttgcaagcaagttggnggg

SEQ ID NO: 13960 - DNA, 451 bp, Oryza sativa
  unsure (1)..(451): unsure at all n locations
tgagtgngccgagttgatttcgtgcttcacggggtaaaatcaccgtccaactgagaagacatttaagcatgggttaagaactcataaaatatgctgagaaataatcctgacatatatgagcactctgatacatatgtaagggaatactgtagactatagaaaattatgcaaaggtcgaagaaaggttacattttcctagtcaggaattgtggagcaaatgcttccaaaaatccaggaccatagttctccctcatccatccacaaaaaaagagaaatacgtccctaanagtaattaatgaacataaagcanataatagaaatgagtcatgactacactaatgcgaagccaaatgttaaaaggaaaaaaacatacctctatggctcgtacgacattcacatgacccttttctctagccaaatcaagtgccgtgtggcaatcatcatnttgtat

SEQ ID NO: 13961 - DNA, 233 bp, Oryza sativa
actcagcttgatgacatcttttaggtaataaaatttgagtagcggtcgtatgttcttgctgtgtcagtttcggttccgttgtttgttggatatcgcgatgtttctggtatggcttctgatggatactaccgttgtatactgttgttgctacaatgagtcaagttgagatacttggcctcagaaatggttctttgtaggtcacgtctagggactcattcctcggagagatttcg

SEQ ID NO: 13962 - DNA, 415 bp, Oryza sativa
  unsure (1)..(415): unsure at all n locations
tctattggtggaatggactactgtntaagacatatctcatatccagagctcctctctgtttactcgtgtatgactaatgatcttcatccccgtccctagaaatttgcggggccccatccccagtcacccatgggtgagaacccccaccactgccccgtaagggccggccccacgggatccctggccccaattgtgaaattgtcaccccaagtatcaatcccgttctggcccatggaccgcacgccactgtaatctcaagcccacaagggcccattaagccttcttaagagctcctcgcgagtcctaacccgatacgcgataaaaccaaactcgacaaaatacaataacaatacatattatttatcgagcaaatgacacaagtttatattggtcgcaaccgattactttatcaagt

SEQ ID NO: 13963 - DNA, 96 bp, Oryza sativa
tgtctgtctagcgagtagtgatagtcagtattgagcttctcgcatgatctctctgtttgctacgacagtgcttggctgtgaactagcagcaactga

SEQ ID NO: 13964 - DNA, 435 bp, Oryza sativa
  unsure (1)..(435): unsure at all n locations
cgacctatgatactcagctntacagaccttttttgggtgtgctctttggcgccagtgaaggatctgtctgttgagactcatctggagattcagcggtgacctttgccttgtagaagaagcactttnttttcaaaaattgatggattaagttatgaaaagaaagagcatgaataccttatccgaagtatcacggggaacaattgtaggtaaagatgcactttgtgagatcttctcttcatgatgagtgccaatttttgccttgcataggtggtcaataggtcagagtgtatcttccaatatttanngaaatttgtttatagcagaggaagtgcaagagtaagtattaagaacgataccttagtatcagtagaggtctttgcagtgtgagatggcatatagtaacctgagacaataatgctctttttggtaatacta

SEQ ID NO: 13965 - DNA, 475 bp, Oryza sativa
  unsure (1)..(475): unsure at all n locations
ttctttaatagagtaatttccttaaccgaatcctctaagaatttaactgctggttactcgataactcccattggccgattccagaactctaaagccaatattgattttatgttgatgacgtcttcagggcttaccatatttcgttgttaacacactggtaaaataattactagagttataagttgatagtttttttttatggccatctatgaacggtgtcgaacgatgtgagagcattcatgcaagtaaatttcttactttttgaaggggggcattcatacgagtaaatatgttacttttgaaggtgcatangtgggatgctaggagcaaattaatagaaatctcagcagagtaaatttgttacttttaaaacatggagagacactataanaacagagaactcggaaacaaaaactagatggtagtattttactanaacatgaanacataaaaaaatctggagagaagcaacgag

SEQ ID NO: 13966 - DNA, 453 bp, Oryza sativa
  unsure (1)..(453): unsure at all n locations
tgtctagggagaagaggctgagttatcgatgtctgccctgctattatttatgatagggtttctttggcatatacccatggacaattcatggcatagtgtcctggttccctacaatcgtgacaaaaggggacatcctcttctggcattggaagctcatcgacctgngtggcaaatgctcgatcaaacaccatactgatttggtcttgacttccaaccaatggtagctgtgaactaagcggcatgcttggaatggaccaagggtgtgcccctgttaactctctcgaggctagtgatggattgagttgaaaacttgagttacttgaggcatacccgctgacattctttcctttttctctgttaaacatctcgtacagggattgaggtgagagaggaaacaagccaggaaagaatagaccagaactagagacaggaccttataggaactaactcttc

SEQ ID NO: 13967 - DNA, 414 bp, Oryza sativa
  unsure (1)..(414): unsure at all n locations
gtgatatatgagcgtcacattgatatattttatattnttttataactctctaggtgacacgtaaaaatgaggatcatctcctcgagtgacgaatagactttccctttttatccctttgcatgattctcatntgtttgtatagagttatatatagggtggtttactcttatacttcttaatcgtaggggcgtatctaggggtagtccctgtgggcttgggactacnacctgatttggcccacaaacacctatctcttccccgccaatagccgctcgtgcccaactctttcccgtcgttgcctcccagctccttcccttcgccgccacgctaactgctaccgcctgccgtgcggttgtgcccagctactcccccagcgccgcacgtggagaagagaggaggggagaggagagagga

SEQ ID NO: 13968 - DNA, 404 bp, Oryza sativa
  unsure (1)..(404): unsure at all n locations
ntcatgacaaggcatttccaaagccgacacaggtttaccatatgctctttattatgggtcccagaccaacaacaggttaggtcccagaccatactgtgccaggaagcccacgggtcctccctgacaccaccccggcgaatccacatgtctctcggcatcaaggctcccctgataagctagttactcatccaggggtgttccattccacccatgtggtcgtacttgtcttatgtttggatgaaactccaaggaaacggtgcttaattgcaagagcgggaaaccgtacacccgatacgttccccggtccgctgttttggaaattcatttagttcgcaagcaccgacccacgtgtcgggttttcaagtctttcgtcaacccaagttgtacccaaaaggtttttagat

SEQ ID NO: 13969 - DNA, 446 bp, Oryza sativa
  unsure (1)..(446): unsure at all n locations
tggaggtctcccgacgtggctgatccccacgggctgngtgatcctggttatttatgtcgngtgggaaaagagtacctcctctgcagaggttaacaaactgttcgaacagccgtgcccacggtcatgggcggatgtgaggtgattcctatcgtagtttggtttgactactgcttgtgaaattgctgtgtgaaaaggggttcggtgtttgaaaaatctgcagctgatgggatcagctaggcccgggtggccgtttgaaaaagtgttggccccggtggccgtttgaaagttgttggcccgggtggccgttgaaaaagctgttggccgggtgccaaccttgttaaatactaaagactgatacattgcacatactccgaccggacgagacgcactgtctcatccgtgttcgttgaaaacactcactctagttgttcacaaaagagttcaat

SEQ ID NO: 13970 - DNA, 399 bp, Oryza sativa
  unsure (1)..(399): unsure at all n locations
tatagctaaaagcacgtaaagatggatgcgtatttcatataatgccttttcaggttggaaaaagcaaccatctgacatgaatttttcctgacgtgatcactaatacgtactcctaggtttatgggtggcgagagccgattatcggtcaccacgtctctctggcttcaaagcaatgagaggatctcgatccttttaggctagctacaaagcaatgagaggctgctgggccatcatactagtagtatcagatacttcctccgtcaaaaaaaagaaaaactcaatctgagaggggtctaggacaataaatctagacaaagtatagttcagatacattatattatgaggggtcacaggttaaattnnttttggatggagagagtactaatcgtattaattgat

SEQ ID NO: 13971 - DNA, 470 bp, Oryza sativa
  unsure (1)..(470): unsure at all n locations
actagctggtgctggaatgctattacaaatgtatcacaacatactatgatattaatactaaaaataataattgttatgcatataaaaataattctttcttataaataatatccagcataacanactaataaatataaatatgtctcacacaacaaattcctatactctaacagtatataaatttatatgtttcttcgtaccatagtggtaaaatgaactnttcccttggtaattaacgatcaacgaattaaataagggttgaaaggatccaagctacaattcgaggggacatataggaatgagcaaaacttaggatcatacatgagacttggtaaatattcaggggtatatggagaatcttcttatagaaaaaacataggaatcttgagagacgagcagagaaaacatgagatatataggctatggctaattgtcctccaagtaaattccaatctaatgagatattctat

SEQ ID NO: 13972 - DNA, 422 bp, Oryza sativa
  unsure (1)..(422): unsure at all n locations
ntgtcgttntctcataggctcttatatcaagggcattagcaaggtcctgtctctttgtagtctttcttccaaccctcttgaacttggatggctccactacaacgaaggcctgctctncttgactatcatctgttcctttgggaggctttggtttcttcttctgcagagtcttcagatgagatatggcatcatacacctctaccctctgtgtcatcttaaatgcctgcttgagtgccttcttggcctcctcagactcccactgcgcaagcaaagcacatccttgtttaactgagcacgccactggttcgggcggatgctcaacacacgagtatacatctccgcagcctccacaaagcgccctgcatccatattcaatccaccaagattgtacaaggcatcaacatgcccaggtttgagatcaa

SEQ ID NO: 13973 - DNA, 453 bp, Oryza sativa
  unsure (1)..(453): unsure at all n locations
ctcaagctggtttattttattcacttacctcttactttgattttctaactntattcttatttattctaaacttgtgctattgattggataaatgtcttaactcactcctttcacttggctttagatgccgcgctacaagcctgagtacttggttggtgttgagggatttgtccaggaattgcgtatgatgttctttgccataggatttgggaactggcccttttatgcccagaatcctcatgatcgtcaccaagagaagtgccgagtcaaagtcaccttgaacagtaatagtgaagatatcccctcagtgatgttcgaagctggaggaagaaactacattcatgcattgtaggaggtggcaaggatcgccataggagagcttcgcgatcgctacagtgatcaaatggccgacacttggtattgctaccatcctcgtcaaccacagggaagtga

SEQ ID NO: 13974 - DNA, 386 bp, Oryza sativa
  unsure (1)..(386): unsure at all n locations
ctattaatagaanaaaaaagtctttcttgatccctgcttcctgcattattttcaacagaaaaatgcggctgatcgatatgatatttgaaggataatccatgaaataaacgtcttcacttttcagtactcatatgcatcccatgtttgcggcacattgcagcggaataacttcatcggaaaagagtggtacagtatgaactgaaggcaaatttggagataagatggttctgcaattctgcaattctggtagttgccaataagatgaagtatggcttcacactttcacacaaaagttgaagcgtaggtgaaccagtctggaactattaccatttacaaccagccacaaccaatatgaattaatcgcgtaaagtggaattatctcatct

SEQ ID NO: 13975 - DNA, 412 bp, Oryza sativa
cattgtaacaacaatttctacaaagcatagcctcacacagcgaagaaagtgaaagatacagatgaagctacttcctcttgaactgtaaacaacttgtgaatttcccggctaaactctaccaaacacaagagaaacttggagaaacttcgaaaagaaaaaaatacgaaaagataaatacgtagtatactagtatagccgaaacatatccaggcatcaaggtcgtcgtcgtcggcgaagcgatcgatcaggcggccaatggggcggcgaagccgaggatgaactccctggtgtcgtctgcggcgcggtcgagcgccgtccggccgcgacgtcctgacgtcgtacttggcgccggcggaagactcctcagcttggcttgtcgcctcgaggcgggacatgatgagatgtcaccggt

SEQ ID NO: 13976 - DNA, 195 bp, Oryza sativa
tcgcgtgggtggatgatccgcggagcggagtgtggggcggctgtttctttatatctactaggcggaataaggcagtctgcgcaccatgcttaccccgaacacgatgtcgccgcctccgccacggcgttcgcatgagcagaggcggagggtgagttgtctgacgcgtcgtcggcgcggtgtggttttattctccat

SEQ ID NO: 13977 - DNA, 498 bp, Oryza sativa
  unsure (1)..(498): unsure at all n locations
ctcagctntatcttttaggggggtagatttgatccacgatcatgcattataatgacatttgtatatttcacgacaatggcagaagagcatgagccagaacttgtagaaactgctattactatccatgataatgactgcactgatcaactaatcaacttgatgactaaactgaagataaatgagaagccggagttctattcacatgcctatcaacggggagaacgttgggaatatgatatgactgtgaagatcaatcctccacgaggtgaacgtgatatgtattacttccgaacacgccatangcgggatactgtgcgagctgcattatatgatgtgtccagggaggctnttctacgtcttaatcatatctatcaagataggctacaacactctcgctattcttatcatcctatgcgagaaccaggtgaagattattgtaccctctagaacgtggattatcatgaacaaccagtaaaagcaactatgtctatctggatg

SEQ ID NO: 13978 - DNA, 459 bp, Oryza sativa
  unsure (1)..(459): unsure at all n locations
agattgatttccttaaccgaatatagcaggaatcctatattttcgacttgtgactcccatcggcgagatgctgcagccgataatgattcttacccgatgacgtcagtgccgattaccaaatttcactgttgacacaatcacaacaaagataaaattactagtttagagtgacaatatggtataaatggtggttcaaaataaaaaactagaaaaatataagtgggccagactaataattattcactaattaatttataatggtatatagtctagaccatcacaatatactgcgtacatatttctttatctaaagctaacatgataaattataggtcatcgatgcaaacgctgtgattcttatttattaggtgcgcccttgtcagaacataaactntataatgcaatacatggttttcgtatcagctccctttcatgaggatactggtctatatatggtaa

SEQ ID NO: 13979 - DNA, 399 bp, Oryza sativa
  unsure (1)..(399): unsure at all n locations
ntgggcaaccnncttgcctctctttgtttacggatttgctcaaaaaatttctcatgtgatttgctctcaaaactttcatatttgttaatcatcagattgtatcgagatttgtgcatgagtgaaaaaactgatagaaagaaattttcatgcatgtcatacgtaagatcttcgtactagctaaccaaaccatagttgaatgcaagttttatataagttatatcgtaggtacagtatagttacagtgcaggtatataatggtattatattttaatcataatatagatatatgtgaaagttttttactgaaataacttgtggcagtcccaatagaatactgatgtggctggggggctaattaattctattaggattatagtagtagtttttaccgatcagaca

SEQ ID NO: 13980 - DNA, 431 bp, Oryza sativa
  unsure (1)..(431): unsure at all n locations
ntggtggatctgattatatctggctagtcggcctatgtaactatatctatttataataggaaanttatttaaggtcaccttctctatttgtgtaatattagtatagatgaaagtgcgggactaatactgagacccctgtttgttcagcttaagattattataacctagattactatatcagattactctaagctaaattataataagctaacataaaataagctgcgagttgtttgtttctctggattatcgaagacatctgagagtagtgggtctttaaccactctataatgtgaacaaagcttctctagaggagattattacactatgagaatctggcttgcagagtataataacctattataatgatctatctgtttgtttagcttactccttataatccaaactataataatcttaagctgaatcaa

SEQ ID NO: 13981 - DNA, 251 bp, Oryza sativa
  unsure (1)..(251): unsure at all n locations
aatttacttatatatcttcaagccctttcttggacatgctcannaataagaagtaaatacctgttatttgtaacatgcaccccacataaggccaactaccatcttttattcaccaattttgaccaggacatatatactaacacaatctatggacatgtgcataattttagaatatccacacaatagagaaaatgctttgtggacaaaatatacaacaaatccattaactaatgcaatgatgttacatgaat

SEQ ID NO: 13982 - DNA, 295 bp, Oryza sativa
caaaacaactgcgatacccgtttaccaaaatgtggctgcaaatttttattttggcagacactatgtataggatgtcttacgaaccagaaggacataaacttcatcatcattgtgcaaaactatggatagaaggacaagactcctactgcagtctacaaggaacctacacaggacctctttgactttggtctgcaaagctcgaactgtcctataaatggccgtagccactctctagacgtaatgccaacccctagacaatactccaaaagacatcactctttttgttgctaacatg

SEQ ID NO: 13983 - DNA, 432 bp, Oryza sativa
  unsure (1)..(432): unsure at all n locations
tatcaaactcattcattatctcatgtttctctgttattacatgattgacttcgatcaactataaaacagaagtatttgaacactgatataagagtattatggttgcttctgactaacgctaggcttatcatgtactgcatttgctccagtgaccacttggcgattggcatgtctgctttcttaacaagtactacaggttggaacagacaataactttcttacgctcggagttcttatctagaacttgaattctttggctgctgcgctggaacatnctaaagggactatagccgatactggcctctgatttgacacagatggctggcgctgaaaatgagcattgacaccttgtggtaatgcactcgctagagtaggagctgttgcaacgcggactatatgactgctactggatgcatggatgacaattcgctg

SEQ ID NO: 13984 - DNA, 382 bp, Oryza sativa
  unsure (1)..(382): unsure at all n locations
nttagctcggccatatgtgatacacacatgtagtcccaagctaatnntcctcgtcacactgatagtgtcccgagtaatgtcgatggnggcaaaactgtgaccgatcagagtcttaatttttttaagttcaagaaagaaaaatgaatctcgatttntagactactatccaatgtcttttgtactctatatgtacggatgaagctataacaaatctattttcctttgcgttagatcgatgtacatggcccacaccattcatttatatagatctaataattaaaatcaataggtctgctgatttgaatganaaccgatggtaagaaatatttttcttctttttagaattataggatattatctaattngttatagcgtcacgtga

SEQ ID NO: 13985 - DNA, 380 bp, Oryza sativa
gcgattctacatttaaaggagacataccacaatggagcgcgtgatgttgtttattgttggtatgctcgacaaccaaatctcaattcatgtaactttatggcacaaatctacacattttcatacaaaatttgtgtgatagatgatggaaaattgctagccgaatcagattctggtgaattctgggttctttttggagggtgtgcaccaattcggaagagagctatatgtgacgatgatgttgttttgacaccacacgccccaacttttcaggtatgatttttttttaaattgcgcttacagaattgtgaatccagataggacccttgtcttttatgattcagatgctccacacaacttcatattcttgacttcctatgtat

SEQ ID NO: 13986 - DNA, 420 bp, Oryza sativa
  unsure (1)..(420): unsure at all n locations
ntcatgatgtatcccagagtcttttcatcccaatgtcgagctggctctctatcaatggcgaatcgagcttgcagaaccccaaaagctcgctcgacatccttccttattgcttcctgtgctttggcaaaatatttcctcttgttgccatgtggttctggtatggtcttcacaaatgtggcccaagaaggatatatgccatcagcaagataatatcccatcatataatcgtgtccatttatactatagttcacttcaggagccttgcctttagctagctttgcaaatagcggggatcgatgaagtacattgatatcgttatgagacccatgcataccataaaaagcgtgccaaatccagagatcctttgaagcaacggcttctaaaattattgtaagctcgtgcacgtgccctttgtacata

SEQ ID NO: 13987 - DNA, 378 bp, Oryza sativa
gcttgcccgcaggtacaccaaacacacacttatcgggatcacctttatgctgtcggagcggaggatctcaaaaagtttcgctagaactgaaagtaaagtttcttggttgcgcgtttttactaccaagtcatcaacataagcctcaacattacgtcctatgtggctacccaaagaagatcgagtagtgtgttgaaaagtatgacctgcattctttaacccgacaggcattgatgtataacaataggttcctacaggggtaatgaacgccgttttcttctcatcctccctagccatgcgaatctgatgataaccagagtatgcatctagaagacacaataggtcgcaccccgcagtggagtcgacaatctgatctatgcg

SEQ ID NO: 13988 - DNA, 419 bp, Oryza sativa
  unsure (1)..(419): unsure at all n locations
tgacaagtcnnnaaactttggaggttgcttctactgtctggcggttagtattatttctctctttttttcaaatggttgataaaactaatttttctgccagttacttattcattctaatttttattgtaataggtgaattatttggattttctgaattntggtatgcgattagtaccaaaagatgttccaagaataaaagtatggaaagggtcaatgatcaaaatattttcaaagtttgataaaatcagcacaggtgtctatggcacaagaccatttaaagatttttctgagtgctgttacaaaatggtaaacttataaatctatttcttatttttttaaaaatataattgtttcatggtttaaactttatgttatctctcttcttttagaatggaaggaatgatgtgaaagaaaatggt

SEQ ID NO: 13989 - DNA, 453 bp, Oryza sativa
atactaactaagtagacatcacaccttttcttgtatcttcaacccagcacgctttgtaaacaataatgtgtgaggataaagcgtcacgaacaatgattttatcataagggtcaccatgaaccaaacgcgcaataaaggtaatcaaaaccggctaagtaaatataacaaagtgagagacctaatgaccatcaaccaaacagacctacgatgtcccaccatgttcacatgaacagggacggctactcattcccatgacacccgaacaaagaaactgccgactattccacagtcaattaccacttttcatctgtactcaccaacgctcgtactaccaccaacgcgccgtgaccgactgccccggcccacccgagctactgagccggcaacgggcctcacgggcgatctgatctactgcgcaaatggcccacgctattgaatctggcgacgactttg

SEQ ID NO: 13990 - DNA, 386 bp, Oryza sativa
  unsure (1)..(386): unsure at all n locations
tgacttccacanggcattgatacggtcagctgagatgctttgtttaattgttctcgggttagaggattcctggataattgaattgttgcgtgaaatctctgctctgcgtacgcaaagctcaagttatctcacggagaaagggagaacaattctatagagaaggggaagtccgtcaagcggaccctttatcgccatacctattcatattagttgcagacgttctacaaaaatgatccaaccggcatacagcacaggtggcttaatcacccccctgatattgaagttcaccaccgacactgcaatatgcagacgatacctttgatcttataaaaagagatgcggatccagcaacaacactcanagaaattctggattcgtttgcaagc

SEQ ID NO: 13991 - DNA, 344 bp, Oryza sativa
  unsure (1)..(344): unsure at all n locations
tgaccctgaccaaacaaaccgcgaacgcgtcacccctgccggccgagtgtcttttcgctatggcaccgaggcccccaggccgcaacataacccacggtgccgaccgcgtcaaggaacacaacgatacgcccttgccgctcgggtggacctggccgtccggcagtgcggagcgataccactaagtttgttgctgaggtcactcacggtgtcacctgtttagatcagaatagcatatgaaacagaagntagcgaaatactataaaactaatctctcggtctataaaaatcaatctagaattggaaatacactattcggacaatagatctgaacagtctttgtctaa

SEQ ID NO: 13992 - DNA, 446 bp, Oryza sativa
  unsure (1)..(446): unsure at all n locations
tggcgcacacgaaggagggcgagagctcagaagatcactcgcagagccttttattggcgcgccagatgacggagcgtggggctcctcaccgggagaccgcgctggcccccctttgacggttcggncggtgaccctgtgtgagactctaagctcccaatctgtggaaggttcgcgagacaggaagcacacaagacgccggcgaagtatacaggttctggccgctgagaagcgtaataccctactcctgtgtttnggaggatctgtggttaaggacctatctagtaaaaccagcctctttcttgtttgggttccaatctggaaagccaatcctccccctctaaagggcaggcctcctttatatctaagggaaccacatgaccatttccctcttttcttaatgtgactctttcatactgcgggattgatagcgcgtcgatgactttgac

SEQ ID NO: 13993 - DNA, 411 bp, Oryza sativa
  unsure (1)..(411): unsure at all n locations
atataaatatcagcactctttatcatcagctcgatcataatctgacatcgatgcacccggagcttgtcaatgctaaatacgctgtgacattacacgaatccttccttggagtaaccgcgaacgatgctcgtgatgtgtgcgagttgctcaacanaaggcttactgcatgtgggcattgccaaagcgtccctcgccatctgagccacccttggatagagaactgacccgtgaaccttccaccagctgagaatatcaaaaccttgtgctggatcatggactagctcatctttcagataacggtcgaggtctggttgggcttctgctcggcggtgcttcatccatgcttcttgcagtggatcagtgctgccaactggcaccgcattcatggtactatcatcatcttcaacatag

SEQ ID NO: 13994 - DNA, 465 bp, Oryza sativa
  unsure (1)..(465): unsure at all n locations
ntgttggatactaatntacattaaggatctgtttgtagaggtctaactcccatatttatcttcagaagttgagtctggagtggagttgtggagctgcctaaacccaactctacctctctagttcattatgtgagagcgattcacccagctctactcccattttcggtggagctaaaaccaccgctgccgccttcctctccccctccaccctatctcgcagccgccgaagctcgccgccagcaaagccggctggcgagctangatggcagcggcggtgccttctcgcagcggcgcctcttctatgcgcggnggacgcagtgtttcgccagcgcggcggngtctttcaggctgggcggcagtagctccggacccgccactgccggatctatgacagcggcgtctggaagcgcgacgcgaggcgacgtggaggtctgtgcggcgggtctgcgtccggggcggtgcatc

SEQ ID NO: 13995 - DNA, 434 bp, Oryza sativa
  unsure (1)..(434): unsure at all n locations
tcagaagattcagagaggtgcagaaattaagctgcttcttcacatttatactatgtactcaagatgggtaatggcagcattaaagcctacgcggccgctgttctgatcaagatcatgtactcggttatgcaagtcgtgagcaaggttgcctnggatcaaggcatgagcccgttggtgtttatattctatcggcataccgctgctgccctcgtgttgatccctattgcttttgttctagagaggtcaacttctgtcaactatgccctttaaaatattttctctaatttgtgaggagagcttgtcaactgtgggtgattgtgactttacttgttttattctcaattgtcttgcaggggaaaagctaaactggtgacgctaaacaatgcaaggagaatgtttatacatgccttatatgggaaggttgaactggtttg

SEQ ID NO: 13996 - DNA, 461 bp, Oryza sativa
  unsure (1)..(461): unsure at all n locations
tcaataaaacaatanaatatgaaggtgaagatcattatatcgtattatgttatgtcaaatgtcaaagtacatatgcccaacctgaagaagctatagtacaccctacccaacttaatctaatctgtagaactgtagatcgattccaaatctaattaaaaaaagcaaacccattccattcccatgcatcaactaattaaagattgctagaaggagagaatatatgcaagaagttgggcgaattgggatcgatgccgccaccaagaaaaaaaatatatatttgaagcatcagagaagtgattaaaacagcaagtgaacacacaagcaaacgatgtataaaatggcatggaggagacgaggatcagtgctatacctctagctccgacgagaggccggtgcggcggcgagacgacngcgatgatctccaccttcacctcgtcgtcgtcgtcgccgtcgtcgtcttc

SEQ ID NO: 13997 - DNA, 410 bp, Oryza sativa
  unsure (1)..(410): unsure at all n locations
tcggctnggttgtcccgaataccaggcttctacatgggcctgatgcttattattcgtgggctggaagcccgttataagcatgggccagcgacgcccgtgacaaatgggaatatctgggccggcccatcaagccagctttggtcttcgtctcttccgggcccatcacggaagagtcttctcgaaatcgcagccgttcgaccacgatttgacggtcgcgatagatcgccgccgtcgaaacgtagcagcgctagcctttgcgcacaaatgtcgcaacgaaactacgaaagcaacatgtataaaatggaaatgaagccccgacacgattgccatgctcttcaataatacaaagcatcacatcaggatgaaacatgcatcgtacatggcatcgaatcgtgctattattcgcattt

SEQ ID NO: 13998 - DNA, 478 bp, Oryza sativa
  unsure (1)..(478): unsure at all n locations
tagatactcagcttacgagataccaatccagactcaagatgtaagggcagtccttactctgtagtaccatagccaagcaaagaactcagcaacactaaactcctgaacttctttattccaaacgtcttgcatagattctccaccccaatcgggaactgaagacttcacttgccacttgtcttgccagcttggctcccaacattaagcttctttgtcttgcctccgatttctgcaagttagcccaattttcaataaaatgacatgtaagatatatccgctcaattggatcattgngccatcttttatccaaacacactttgtttcttgacttccaaatggcccataatacagctgccacccctcaccatcacaagatgcttagagtggttgtcanaattagataacccttatccaaacatatgggttgtatctctagcaggtggtatattcaagcacacaacatcacatttctatcaat

SEQ ID NO: 13999 - DNA, 406 bp, Oryza sativa
  unsure (1)..(406): unsure at all n locations
cctcttatacgggtgacattcctggctatcttaccataatttagaactaagaatgagggtatgcccaggtgttacagttctcaacatgaggcttgtgaactgctgcacgtgttgttgacattctgctaccaaaaacgattagttctcttaacgaaataaaagaatataaaaggtaccatggttgcttatgttggattnttttaatatactgagacaaatgagtgttatttctttcattacacaactatactggacatgcgcaagagacattatatcttcattatcaggtggcactacatctttctcagatggtggttccactcctgtcttttcataagaaacctaaatgggacagggaatagacaaggctagaatgcagaatcacatattattgtacagttataat

SEQ ID NO: 14000 - DNA, 376 bp, Oryza sativa
  unsure (1)..(376): unsure at all n locations
ntggagaagaagtcttaggtggagtcctggcttataccccagttgagcttctgtgaagatggagccgtaggcccgctagtccgctgttgtttatttttgattgtcaggccttaagtgcctttgtaataatgtaaatattatcgatataataaagatgtgccttttgtatcatgtttgtgtggtgtaccctggcttttcctgngacggngattaatacactagcgttcgggaaaatgcaaaattttctcggtcgcgataggtattcaagtagcagatccaagcagctattgaaggaggcaaaatcaagtttgacgactctaagaggccgatgaatgttgatggcaatccttttccttgtaatatggtgcatacaact

SEQ ID NO: 14001 - DNA, 298 bp, Oryza sativa
aaaactactgtaagacagcaacgacaaagttttttttgatctgagctaattatcatgaacaaatcaacgatcaaatataatatccaaacaccaaatgctggcacctaatcatctactaacagcaagacaacactcgctaaacaccattatacacgtctctcaaaaacaacctaaaaaattccacttctttttttcttaatatattgggcggcttttttcttttttttcacctgcttttttgatctcctttttttttcagatactcacacaaccatggtgatgctcctcgcacaaaaac

SEQ ID NO: 14002 - DNA, 407 bp, Oryza sativa
  unsure (1)..(407): unsure at all n locations
tgaagctccttctacccttcctgtgaatgaattggataaaagcctttattctcttagtagtganaagtgctccagcttgcttggtgaacactgacttactgaagaccggaatggaccaatgtgacattgactcaagaaggtagacaataaggccaactatagaaaagccaagctgactgaatgaaataccgcagatcactctgactacggttcggtacctactttatatctgaagagtgaccacagcgtaatgccttaccgctttacacttgctttccttatttaactacttatctcagaatcctctctaaagaatatcttcaagttgaatggtcattaaccattactgtcacacactacttctatttctttcaaaaacctaattttctcttgtggtaaatgatagg

SEQ ID NO: 14003 - DNA, 414 bp, Oryza sativa
  unsure (1)..(414): unsure at all n locations
tgatgtgctggaaagttagaagaacaaataatattcgtgtgtgaanattggatatgattnttccacctgcatcttttgatattgtggtacacttagcagtccatttaccacaacaagcaagacttggtggacctgtacaggataaatggatgtttcttattgaaagggatgtgttgattacgatccttctctttggtctataatatatgtcgttgactgcagaagtgtatattattgggatgtaggtccttggacctttgaaagcatgtgagcaataggcacatcagagggtcaatcgcggaacntatattatgaggaatgctcaccatttgtctatgtatctatggaatcggacatggttcatcggagagagaatatgatgagagagcaatcgctgaccgctactaataattt

SEQ ID NO: 14004 - DNA, 503 bp, Oryza sativa
  unsure (1)..(503): unsure at all n locations
ctaagcttacaaaaggagagganagctactacagccatacccgaactctttcgaaggctttctgactccgatttctactctattcctattccactagcttaagactactaaaataacttaagagaatatgagagagctcttgcttgaggtgtgtgagtgaaatgaggttgaagtgtgtgagtgaagtgaggatgcgagctctttntatagcctcccaatgatggttgtgacgtttggaaaggtcggtaatacccaccaaccgtcattggggagctatctcagccgtccaggagaaacctggatcgaacggcgttgcggngggttcggccgaaccataggtcgggtcggcctggccaaaaatcggcatgtggcctccgttgctctcctacacagacttgtcaattntggctcaattgatcgtgtcaattctgagttcttggcccattcatgcatcaagtctgattgatgtcgattctctttcactttatgagtattctctacaa

SEQ ID NO: 14005 - DNA, 403 bp, Oryza sativa
  unsure (1)..(403): unsure at all n locations
tactttaaaggtgttttggttcgggtactcaacctgcttttgctgttgcaaaagtgaaaagccaaccaaagggtcccaaagctataagtgcctttgctccaaagatgcccttagtgtagcacaaatctcaaagcacacctacccctgctttcactggcttttgagggaaaaaattactcacctctaccattatgagaaacaactgctcgctaatctattacccatctcctctcgcgtgatgaaacncaagagtcgggtggagcgcatcgccggggccgataggatgctccatctagggtttcgtcgacagctcctccggccgaccgccggccgtctggccccgcttgctgcgctgctggtcccggtcacaccgcccatccgatgtgctgccgttgacccgcca

SEQ ID NO: 14006 - DNA, 452 bp, Oryza sativa
  unsure (1)..(452): unsure at all n locations
tagcactgattatggtaaacaaaattcagtgcaaacaactntgccagaattttttgatgaagagagaaggacatgcttaaatgagagaataaaggtgggcaatatgctatgactacaataacaagagcaacatatcataactctatccttatggactcttctgatgtaaatagatgctagctgcctcctacacttcaccttggccgttggttgcatcttgcatggccacctttcagaatgggcatcacctttaattaatgtggaccaactntacacatttacacattgaaaaatattttcttaattagctaagataagatatcataatggggctcaaaagtttagatttggctatgctggcttgcacatggctgcacccctgtatcttgcacaccattggccagcacactatatangacactangaattccattatgtccttctttttggac

SEQ ID NO: 14007 - DNA, 402 bp, Oryza sativa
  unsure (1)..(402): unsure at all n locations
tgcaatntccacccgacgttcgtactccatccaagcatgaatgaactgtatggtcggttcacggtgcgttatcggcccgccacttgaagtaactctgactgtgtcaatccattgtacgaattgacatttccttacatcctcctatgtacatccattttgggatagttaagttaatgatagtactgaggagtgatgaaaagaatagttgtaattaccacgaaatcatcgtcgacaatgtttggacacacgaaacacctttgtcctcgagttcggtgccttacggaccttatgacctgacaacggtcaccacaacgacactccggacgctcacgccacatggngagtcctaggggatttacgtgccattctaaagcctcagcagcaattcgacgttcatgctca

SEQ ID NO: 14008 - DNA, 171 bp, Oryza sativa
  unsure (1)..(171): unsure at all n locations
tcagcagttgtagcggatggagagctgaacaaggacgaagtggaagctttgatggcattccaagtgcgtctctgcattccacaagaaactggtgatgctgtccattcaaaaatctgtggcaagttgtttgaaaagtgatatganatattctatgttgcctgttctatattt

SEQ ID NO: 14009 - DNA, 410 bp, Oryza sativa
  unsure (1)..(410): unsure at all n locations
gcttcgcattctgataataatgatctttggtatcatgcccctgatcttagagtttttttttgaactcctgatcgtgattggatattggtatttctctcccactggacaagtagcttttgtttattattggcacgcgcgataatgtacagcatgatctttgccaaagattccactctgngacatcgaatcaatcggccatggcttgcgacagtgctcatgctagcggattggaaacaaattgaagcatgttgttactagacaatttctaaaataaatttcatgaactatatgtgtttaactaaactatccaaattataattaagcgcccatatcaccaaacccatatttaagtacataaaagcttagatttatattaagttacataaatataattctatagtgactataat

SEQ ID NO: 14010 - DNA, 447 bp, Oryza sativa
  unsure (1)..(447): unsure at all n locations
ctcagcttataaaaaaatagaagaacgaaaccaaggcaatatatatttttttattttgaatagaccaccttttagaaaactaatagcangtaccgagttgatttagagttaatacaaatgcaagcagggcaaccaaaataatgtttttttataatagcaaataaattattagtaccaaattgaaaagctttggagaatgtgtttctgcataaaagaaaacacgattttgaaaaccaaactagaattatatttttttgcgaaatagtacaagttgtcgaataccaattaaaattagaaataccaagtatagctttataatcaagaataaaaaagtcgagcattaaaaagagatagtttttatacaacacccacttttacaaacaaaaggtaagccaaaaaactaataaactggacacaaactcatatatctaaagtaagatccggata

SEQ ID NO: 14011 - DNA, 442 bp, Oryza sativa
ttcgtgcagcgggcgatgagttaggcttatcctcgtccgccattatctatagtattaaaacactggaacaacgtcttaaaattcgcttattcaatcggacaacccgaagcgtatcgttaacggaagcgggttctaatctctatgaacgattgcgcccagctctcgacgaaattcagatcatgttagatgagatgaatgattttcgtctgacaccgacaggaacgctcataatcaatgccgcccgggtagctgcacgtatattttaatgtctttactgggtggtttcacacgtgaatatcctgatattaaagtcgagctcacaactgacgactctcttgtcgatatcgtccaacagggctttgacgctggcgttcgacttagttgcatcgttcgaaaagatatgatcagcgtggcgatcggcccgccagtgaaattatgtgta

SEQ ID NO: 14012 - DNA, 409 bp, Oryza sativa
gcttcagtccgcaagctctgaagcttacggattcctacaccatcgattgctgttattgggtatggcttcctgctgccaaagccggaacccttaaactgatgccccccggcaccaccggaccatttttttgatggcaaacaaaaggttataatgcatgaacatgatgattattttaaggatttaattttctaatgtcaacgtaaaataaaatacctttggcttgaaaataagggaacaaaactcttcctttgtttctttttttataaaaatgaacttataaatctccttcccccatcccctgtggtataataatatcggtttacccagtagaaaaaagatttagcacggaagcaaaattaaagaaaattattttactactcttctaatataacgttatcatcctataaat

SEQ ID NO: 14013 - DNA, 448 bp, Oryza sativa
  unsure (1)..(448): unsure at all n locations
tcagctgatctgactggcgataatcactgcatgggttggtttgctcatgtctcctatcgcctaaccatcctcaccgccctgactatctcatgatcaatgatgcacgtacgaanaagacagtgttaaaaattactactacctctatattaatgtatatattaatgtataacgccggtgactttctatccaatgtttaaccattcttattattcaaaaaatctatacaattatcatttattgtattgtgactcgattcatcatctaatgtgctttaaacatgatataaatactttcatatttgcatgaaaatcttaaataaaacgaatggtcaaacgttggtcgaaaagtcaacggcgtcatacattaagatacggatggagcaggaattaacccactgatgatgccacgcgtatatatagaaccttctttttgaacacaaacacacgga

SEQ ID NO: 14014 - DNA, 386 bp, Oryza sativa
ctttagcgacctataaaactaagcttaaggtgctcaaaagtacctgctttccaagatacagaagaccaagcgcatcaggaagcaggcgtataatgggttctgccagctcagcctcactgcgctccatcaaggcaaatatgatagattgagcaatctcttcattgctagaaccaacaaacaccaatcccagagcgatggcggagaatatcaggacctcaagagttgatttctcagagtcccccaacacagttgatagataagatttaagctgaaatttcagatagcaggttatgtggaacatatagaaaatgtttctttttgtaaaagcacagaataacaattcttaaatcccacctcctctttctgagaacccgcatatgcaatac

SEQ ID NO: 14015 - DNA, 122 bp, Oryza sativa
  unsure (1)..(122): unsure at all n locations
cctatanatactcaagctgctgtgggatttggatattattatgctccgcggagaagtgcttgttctattctctgctcctgcgagaaatggcacccttggttattagtgacattcaatgggca

SEQ ID NO: 14016 - DNA, 163 bp, Oryza sativa
  unsure (1)..(163): unsure at all n locations
tctaagagaatctgcatcttgtgggccgcgtccatcgcactggttcaatcttctctnccctaccccctacattgcgctgcgacttaccgactagacggccgccgcagtaggcggagctaccgttatttctgtatgagtcctgacatgccaacgcccacccccc

SEQ ID NO: 14017 - DNA, 407 bp, Oryza sativa
tgaccatctattacgtactactgtctccgagcgttccataataattgtttttttgcatttctttcctttgagatgtaaccattcgtcttatgtaaaaaattagtgttaatataaaacatgataagtcatacttatatactattgataataaaacaagttaaaaataatattttcataatattttgaataagacgaatgatcaaactttataaaaaaaactcagagcatcaactattctaagactgatgacggtgtagtcctaccgaattgactcgaacgttgacgtacgcgtttgtgatccttctactccactatcgcaggtgggttttgcttgtgaaatttccacatgcatgaccatactacagacctccgtgaggattaattatgggctctaatcaactaagatt

SEQ ID NO: 14018 - DNA, 362 bp, Oryza sativa
tctactgagttaaccacgcatcttctcatgagttacagatgtgttcaaacacacctgcctaggcgttagaccaatgctcggggatgctcccttctacgaggcagggatacagcaacttactgtgatgtgaccttcggcacttacccccaaatccctcggaagatcccgggacgtaatagccctgcactattcctcctcctctaagatgatcgctgctcttcctgtcatatcttatattacatgtcacatggaagggataaccctaagcatatgggctcttgtcctggcatactgccttcttcctgttggaacgtcttactacatatccgtattatgaaattttcatcttcataaaaatttcc

SEQ ID NO: 14019 - DNA, 269 bp, Oryza sativa
caatgcagcccgtctccaggcttgggtgctactaaacttgacccggggcttgacaatatgtagcgaatcatatggctggctccctattaaaattactgcatatactgtattatttgtaccggaacaacttaaattacgtaggccacaatgacctgctgctgcttggcacctcatccacatgatgataccacgatataatcgacagctatgcatccacacgtacagagaagcctgggtcagctctgccacttcacttgttaaagactgct

SEQ ID NO: 14020 - DNA, 67 bp, Oryza sativa
atatacttcatgtcttaggtatcgcctgcatgccttacaagtaccaacatggcgctttacacattat

SEQ ID NO: 14021 - DNA, 260 bp, Oryza sativa
tcttgggcgcatcaccacgagctgtcgatcggaatttacgcgtggccacggatcgcgcgccggccgcggtggatcacaatgtctgttacatctggcctgtgcaactgcagctgcacaccaccgtagatagccggaaatggccttggccttttggcgttctaaatcgcttacgaacaacgtctttgtcgggtaaaagcggctggcttaataccctttactacactatgatgagggcttaattacggattcacattgtacat

SEQ ID NO: 14022 - DNA, 312 bp, Oryza sativa
  unsure (1)..(312): unsure at all n locations
tacacacactatgtcatctaataatctagaatacacgtgtcaaataaggactgactgacaattgcgtcgtgctagatntatganaaaatattgcatgtattttaattgaaatattattatgaatgtggacccttacccatatatcattttttctttacaaagtaaaagtcgatgagtgggggatgacttggcctcattactttcttcaaaataatagggagtgttacaatccaccctatctttaagatatgtagatacgcactctacatacagaagcttaaatgcattacgtgtcatcattctcactattga

SEQ ID NO: 14023 - DNA, 343 bp, Oryza sativa
atgatgtcctcgtacgtgggaaagtgagaggctcctcatcctctgtctggtaatggaaaacattcaaaatattcttcacatggactgggtgtcattcttttccaattggaacagtctacatgtttacttgtatgaaaagcttggcacacagacacacatggtagttaccgaccacacaaccatctggttataataaatggacttagggtgagtattcagtcactaacactatatgcatgatatgtacaggttgctgctagcaactaaaccactatacactgcccaatgccaatacaacaacggccacactctttctctttctctctcattttttttatttttt

SEQ ID NO: 14024 - DNA, 259 bp, Oryza sativa
tattaaggctataatgatattaaagtaaagtacgtgatgtacttataagagaagaaatgaggaaactaattgcctatatataataatctaaagctatagcaatgagatatatggttaatgaagatattaaacttactacataaatgactttatggatatgagaaatgtaagagaattgtgaatatatgaaatatgggggagattactactttttaagttacgtaaagtaataatgatgctgtatgttaatgacattcta

SEQ ID NO: 14025 - DNA, 75 bp, Oryza sativa
  unsure (1)..(75): unsure at all n locations
acgcccccccgccgcgcgtggaactntctccccccnccccaagagcgtgacccccccngncaccccccaaccccc

SEQ ID NO: 14026 - DNA, 126 bp, Oryza sativa
attttgcttctaaactactgttgctgacaacgtaataacggacctgcccataacccacaggcaggtaccgcggtgcgggcgtacactgagttattactaatactactataggaaagaacctcatgg

SEQ ID NO: 14027 - DNA, 120 bp, Oryza sativa
accgtaaccaatctcgagtgcggaagactaagtggaaacatgaatataaccgggcaaccgaaatcttgaaaaaaggacttccatattcgcaatgacttatcaatgatcaatcatatatat

SEQ ID NO: 14028 - DNA, 280 bp, Oryza sativa
  unsure (1)..(280): unsure at all n locations
gtatcggagtattaaccgatacatgctatatctatcttgatggctatgctatanacatatataatggtggtattaatatatatttcgatctaagtgaattatactggctcggcatggtgaccgatctattccaatcacttgatttaagtatatattaatataagaactatatnatcgttatatctacagccgatcgaatagaattagtttcttactatctannttataaccgtcnatcgattcataaatgacatcggctcanagaataatgatatgtcat

SEQ ID NO: 14029 - DNA, 296 bp, Oryza sativa
  unsure (1)..(296): unsure at all n locations
catggctggccaatcacccacttcgtagcggctgctctgaatatntgaactgtaatttggccatggctgcatttagtctgcccatatgtagctatctgcatgccgatgacacgctgttgtgcatctctcattggctatcttgcaggtatatctatctatgatttatattaccaattgctgagctactgttttattaggattgcgcgactgcgtcacggacaacctactgactgtgtcatagatcaaaactgtggaagatgtctctgtttaagcagcagtggctttttataaatgcg

SEQ ID NO: 14030 - DNA, 57 bp, Oryza sativa
  unsure (1)..(57): unsure at all n locations
ggatctnatatatagagagagagagagaganggagagctataaccacaaaaagagta

SEQ ID NO: 14031 - DNA, 142 bp, Oryza sativa
  unsure (1)..(142): unsure at all n locations
gagcaagatgcaaagattgtgtntagtacacggcagctaccctgngtntactctctccgttccataatataattacagtatggactgatagagtgaanaaacatgatcactatgcggtatacaaatgaaaaacatgctattc

SEQ ID NO: 14032 - DNA, 162 bp, Oryza sativa
gtgctaatcgtgctacttttgtttggagatcgacgtcgccatataaacatcgcgcttgagagatcacaacctcggttggctgaattactaaatcggccaacatgtccgaggctgtcccatgtcgttaaaggggcccactgttaaccccatggaaccaggccc

SEQ ID NO: 14033 - DNA, 210 bp, Oryza sativa
actcgctgagcttaaatactttctaaacccaccactgtataatgttaacgaatgtaattcgaacctatatggaaacgttaacgaataaaatgaagcttgaactgggacgagagtcactaggcttcttaccaaaatagctgatgtgcgtgaccataagcacttggctggggctaggggagaagaatagggctgggatctttgaggaaaaag

SEQ ID NO: 14034 - DNA, 67 bp, Oryza sativa
  unsure (1)..(67): unsure at all n locations
ggaattatacattntctctttataccaatagccattctataagtgagaacaatgtgaagtgatgatc

SEQ ID NO: 14035 - DNA, 378 bp, Oryza sativa
  unsure (1)..(378): unsure at all n locations
gacataactactgcttattgatgctatgatataatgtggtgccacttatattatactatgtgaggaaaaagaatccctngaacattctgtttggtaaacaacttttcttaactaactctcgctaaatgtgtactagatagatctgacggtaaatcagactatattcatttgctgaaaataaggaaatgatgtctcgtaactactaaccctcttttcggctcgctcgctcgctcgtttccttctaacctcggtcacgacatccacatatgcatgattgacacccaccgaaagcagggtctgcggtgcaaccaccgcttacttcctcgcactgcgcgcccggagctagacttccttttgtctttcccggaggccagttac

SEQ ID NO: 14036 - DNA, 309 bp, Oryza sativa
taatactggcacccacccagcacacgcgctctttgaacaacactaacccatgaaaaaaaaaaactgacttgagttcaagcgctcctgcggggtggacccgggacctgccctcctgacccgctccgctgaacggatgccctccctatccgtggtggtggtgccgaggttacggttgggcagtcgcacacgcactcacactctaggctgcgtgccgagggacccaccctagcctgctttaacaactccggcatgaaatcaatctggttgtacctgtggtgtagggccggataagttctctgaggcgatggc

SEQ ID NO: 14037 - DNA, 410 bp, Oryza sativa
ctcagctactaagctgagttacacagaatgtgaatgcttgagttagtagttaacacatattatctactatataaagatggtatatgctagagtatatatcatatcaccacatacggaccagtaactgcaatgtaaagtgaacacgtataccataccaatgtgccacttactcaccaaagagcccgcttatacagttgggcctggacaggtacattatggatcatcacgtgatctcgatttgtcaactccactccagactggatgctctagacataacaagggcaattctcacccacgaaaacttccttaattccatggtggtggacatgagtctgctattaatcacagacttaacgttgaattgcgttcttatattcacatgtctcatattgctaagctgctgcacgttt

SEQ ID NO: 14038 - DNA, 275 bp, Oryza sativa
  unsure (1)..(275): unsure at all n locations
ggctaaatgtagaacttctcctcatgttttgtgtatatacttggacagtccacacttttgttcacacttgtgtagtgacaagaaaattggtgggaaaaaatttaaaattgttgtactttaagttatctatttaaatggaaatatctaaaaaaaccctaatgaatagaaagcacatatatgtaactcaaatgtatagatgtgtgatttatatatatgatagnagatgctatgagctgcaaagttatactatatatgtgcgctatgtgaaatatatg

SEQ ID NO: 14039 - DNA, 223 bp, Oryza sativa
  unsure (1)..(223): unsure at all n locations
tgacccccataacatacaccacgatggcgtcagtcacagcatctaagaagctcaacatggatcttttcatatcgaagagganaatgcccgagaagagcatcatcaatgcgtagagcgatatgaggaatgcgactatgactcggattcgaagcaagatgtagttctcctgagtccacttgatgagaaaattgcaataattcaccacgactcattttagtcttcc

SEQ ID NO: 14040 - DNA, 332 bp, Oryza sativa
  unsure (1)..(332): unsure at all n locations
tcttcttctgaatcatttttcaattgagaattgagattattganaggtcagtatatgaacctcccaagccacactgcannataactaaacatatggcttaaccagcanaaagtcacggctagtcaatntataagccacggtaacaaggaataaagaaccagtgtannatgtccataacanaagagattgttcactccacacaattctatttgtaaataaatataatgcacattngaagtanagcaagaattaaatatatgattgcatgctcgaaggatcttgngatctgctgacttgtaagcaataaatgtttaattcgattctgaacactt

SEQ ID NO: 14041 - DNA, 258 bp, Oryza sativa
ctaggcttactactctccctcccagacgcgcacgcgggactcgaacccggcagaacgcaaggagtcagcagttctgctctcaagaagccgtcattacaacccccagggtggcagctcctgactccgctcccggccgccgccctcgcggggtgataagctcgtgcgggcgatactaggggtttttcggggaaagaacgacgtggagaaaaaccaagcgggcgcggccctttgtagttcacggtggtgggtcagatatat

SEQ ID NO: 14042 - DNA, 392 bp, Oryza sativa
taactagctacttctaacaaagatgtattcatatggtgtcactagaattttctcatatgtcttgcattaagcggaaacttagctgttaagtcttgtaaactactaggttgtatctcagtgtactctgcagaccacttgcagaatgccttctgtctgataatagggcgatctactgacatgctatgctaatacagacatatgtcgagatattgcttgcagagacaagcagtactgtgtggatagtttatgctatggtgtgtctaaatatatgagcgacagtcagagagctcatatcgtcattacggctctgtagagaacctacatgcctcagaactgctgtcttatgttgacgtattactgagtggctcagacactatgtactatttactaca

SEQ ID NO: 14043 - DNA, 274 bp, Oryza sativa
gtaaatatatggctagcaatgaaaatcgtatacattcgccacacacattactatttgctctcatggaaccaacacatgaaaacatgtaagtattactattcgcttaagcagtacctcgtaatgatgcaatagcgcccatatcacctgaaattctagtccatgagtgcaaatttctaccttgctatatctacaactgtctaacgctccatcgacatgcgatgtgcatctatcatatcaacatcttaagatgcattttgagacattctacttattc

SEQ ID NO: 14044 - DNA, 352 bp, Oryza sativa
ctaccgttgcagatcgcctgcacttgctcttatcgtatctagattaaccgtgtgcttagcatgctctcgctacaatttctgtacatcctcaggggatgctcgggaaaaagggacgaaagcaagtttttagctgtgttgaaccccttcttacatttcctccctaatgattttttttctttttgactcagattttaaaaacactaggctgggcaggtttaatcattgaaatccactgtatttcataacatgaaatgaacttcaagggttttgagttcatagattttttatatgtgccaatagtctctgtatggatgtctaaaatgtgtctaatactaatcacatctcttgtttt

SEQ ID NO: 14045 - DNA, 188 bp, Oryza sativa
  unsure (1)..(188): unsure at all n locations
tttcttgagtaccgatttgacattaatgaaccatggatagtattgaatgcatacagcaaaatggacccaatacaatggcagacacaatcttcaagtgcatgtctcacatctttattgcanacaaagaaatgaatataaatgagacactagtatagtcgtggataaagtttatggaattaatgtacgta

SEQ ID NO: 14046 - DNA, 90 bp, Oryza sativa
  unsure (1)..(90): unsure at all n locations
atggctgctggatcctgaatcggtttttttggcatgctacaaaacatgcgctgctagctcggtgtcactatctgantggcttatattata

SEQ ID NO: 14047 - DNA, 116 bp, Oryza sativa
  unsure (1)..(116): unsure at all n locations
aagggcctctgtccctggctgacaacgtgcagtgttatagtggctnctccaagcacaccctgacctacccacggcacactatgctatatactactctactcatatctgccaaccgt

SEQ ID NO: 14048 - DNA, 248 bp, Oryza sativa
agcatgtttttcatatgcgtcaccaaaaacagtctatatcgatgtataaagcacattaatcactttcttgggctaaaaaatagccagattaggcgtgtgacactgactgatcaacagacatcgagccaatcgagaactaaacctggcacacagatctcagacatctagagttttatctatacaatcctccagttatgacatatctcacgatacatgcctaacctaacacatgcatctctcaaaacgca

SEQ ID NO: 14049 - DNA, 192 bp, Oryza sativa
aaaccgagaaatctcctgtaaaggctgtgaagtatttgcgccaatgtacctagggttgatctcaaaaaacgtgctaaaccgttattctcaaatcatctattagagggcgtagaacgatcacatgcgtcactcgcttgaaactacgccaatactgcaacatctagtgtgttttggcaaagcataacttctcca

SEQ ID NO: 14050 - DNA, 324 bp, Oryza sativa
  unsure (1)..(324): unsure at all n locations
tcactctgataaagagtactgaaactgatactgctttcaccatgcggctacccgctgtagcgcacctcacaatgatgcacctattacatggtcatggaggaaaatagctgtgtcatgaaatgaaatggagtcttacttctgggagctaccnctgacgacttagacttactattgtccttattcttttatgctgtatagtaacagcgctgaagttgaactatttcgatgttatgctctaaagcaacatgatcgatgctaaactcttactgtatcttgctgttattatgacaattnctaccctaactcactcttctctgcatggtg

SEQ ID NO: 14051 - DNA, 373 bp, Oryza sativa
  unsure (1)..(373): unsure at all n locations
ttaccttaaatcgcggagttccctcctttctcggacagcgtgatcgcactactataatggcggggacgaacaggaggtttatcttccattaacctccaactggcaatacagctcaaaacggtcacacccctctggaccttataagactggttattgngccaaactgtaacttgggagatagtgtcttcaaacgatataaattggctgtagaactatagctcatctgatcgcacagcaatgtcgccaccctatacgtactctgatacgtatgctaaatatgcactgggtatgtcaatgtggagaccaatacaactgctcctccatctgtacgttcatagattgcccttttcttcagagcatgctagctatctct

SEQ ID NO: 14052 - DNA, 358 bp, Oryza sativa
acttgtgcatgtcggcggcggatgcgcatgccaggttattttttattgcttcctctcaagaccacagatgcgaatccgaagatttttgtcactcgctctgctgactaacctacggcctaaatcgtcgcttgcttgtctgagagtcttgtatcaaactgagaaggtcctcagtactcatatgtacttttaggtccacttcgtcttttttggcagtggtataagagtcacaaccatgaagactgtttgttcaccaatggcgctgcgtactatgttgcagacatgctctcagcctaactatttactgatctctgcgtagcacttatatagaagacctttctgatgtacactctgaattcca

SEQ ID NO: 14053 - DNA, 250 bp, Oryza sativa
  unsure (1)..(250): unsure at all n locations
tcttgagccatcgtgaacttcatcgccttcatctaggccgactgactcttctgtcgaacacatngcgatcattagtagaatgagaatgagaatcatgccttttacaatatgctcgacgattcaactcttcttgagatggtatgacatggtctttaggtaatctaatttgtctttcttgtaagagataatcagaaatcttatcacactgggccacatcagaactatatataacattacttagtcgatcttt

SEQ ID NO: 14054 - DNA, 179 bp, Oryza sativa
acgagagacatgcatctcacttatagaggatagaatggactcttctctagtttactaatgggttggtctttccaggctctaattcacaggatcttcgatcacatatacctgggtaccaccatagtataactcacatgggtctcaaaccccatctcttcgatgcatatctatcacatttc

SEQ ID NO: 14055 - DNA, 155 bp, Oryza sativa
taaacccactttccctacccgagctctgcccttcctatcccgtctgttcacaaagagccgctgaatcctcctcgagcattttacatttcgcggtgccgacatacataccacaacatctgcactcttgtttccacacgcacgcggccaccgctctg

SEQ ID NO: 14056 - DNA, 430 bp, Oryza sativa
  unsure (1)..(430): unsure at all n locations
tctgcatcttcagagtgaagttgacgctgtcattgtcctttgagcatttncaaggatgataacaatgatggtaacatcatcgtggtactttctcctgctcccaacaggtattctcatcaattcttcagctgttaaagctggcacaacatatgaagaacaaaaggtgaagagttagttaagtccctgatatcaacataactccaaaaatggagcaatgatgctaattatgcaaaantataaaatcatcataggtgtatttctctcaaaagagatattaactgtccctgcatctancagatactatagagcttaattaattaagtctaacggtgtaataatatggaatatgcatttcagcgcanaagaatcttaatgctaactatttcatantttaatactacnnattataaactggatatatatttcggat

SEQ ID NO: 14057 - DNA, 138 bp, Oryza sativa
tggcacatggacaggagacttgggatacaacaaagacagtgtaaagagggttattgacgattgtgagaacaatacatctattctttaactcgctataatattatagattaagaacaacggttattggacataatatac

SEQ ID NO: 14058 - DNA, 131 bp, Oryza sativa
cagatacacgaggctgccagtcgactaacggacgcagtataagcctcttctcatggcacgttccgacccgacagagagaaagaccagctatcactcgccctgcatactccatagcatccaggactaacatg

SEQ ID NO: 14059 - DNA, 115 bp, Oryza sativa
actagctacccatcgcgaacttggggtgcactttttttttgatcgggcgccagacgaggggcggaaataaggccacatcgcggtctgttatattaccacagctgtccaccgggat

SEQ ID NO: 14060 - DNA, 435 bp, Oryza sativa
  unsure (1)..(435): unsure at all n locations
gctctatacagatgtggagctcggtgttgactacttcacanctnttacttcaaactcatctcctgaagctaaatattggagttgaacctctagcaaacacgagctgagaatcacagacatgatcattagtattcactagcaacatgtgtataagctactagtacttatttctttagaacagctactagttctaagttgtgcttgcaacgtatagtatcacatcatagatcgacataccacttatcatgcttactacggtagtcgtcttactaatctccctcctcaattgttatattataactattaactcttattaatgaaatgattaaattgatcggttatagacaattgacatctaaaatcaattagtacctaatatacattgagatatttataataaaattgcttgattgagatactataatttctatgaat

SEQ ID NO: 14061 - DNA, 232 bp, Oryza sativa
  unsure (1)..(232): unsure at all n locations
caatcgataggatttaccaggaattctcanatgacccaagaaacatgcgtttcgcaatgtgtacggacggcattaatccttttggtgagttgagcagtcgtcacagtacatggccagttctgcttggtaactataaccttcctctctggttgtgtttcaaaagaaagtacattatgcttgccatgctcattcaaggaccgagacaaccttgcaacgatatcgatgtgttcct

SEQ ID NO: 14062 - DNA, 270 bp, Oryza sativa
  unsure (1)..(270): unsure at all n locations
taagctgggcacantggagaatggtcacatatacggctgaagcanaagatacgctcatgcggaatgcattccataagatgggcaagcatggaagaaatgtgagtcgaagctcttcaccgagtttgtcaacccgtccggcaatcatacgtcgttcgatgagtaccctcagataaccaaagcggtgtgggaggaattctgctctctcaagaacacccaagactntatggaatcaagcgaggcacatcgtctactgcaatagcggaatgagca

SEQ ID NO: 14063 - DNA, 158 bp, Oryza sativa
  unsure (1)..(158): unsure at all n locations
atgcatatggaagtatatttaatgactgcacagcaattatcaacacacaaggaagatgatatctcacagaattgtgcccatcaaatatcttctgtgtccatatgcatggtggacatcctgcaacaancaattagcaccactgatgagatggattaaca

SEQ ID NO: 14064 - DNA, 227 bp, Oryza sativa
taagaaagaacatctcctatcccaccatcactggcattagtctcaatagtgaattatttagacatatcatgtaaggctaacacagatgttttgactaaagcttgtttgagggtaacaaaagcttgattagcttcatatctacgcacaaaaggcacattcttcctcaacaattgagttaatggtttgctaatcaatccaaaaaatttaacaaacttcctgtagtaccc

SEQ ID NO: 14065 - DNA, 171 bp, Oryza sativa
  unsure (1)..(171): unsure at all n locations
gctcccggttagctcgctttatctntccactgcatnntgtaatctcttatatatttgtaagacgtgggtctgtatatcaacaattgtcgtatgtgtaccctggctggccctggacagggatataatgcacattcagcttagaaattctggttcgagaatttctgggtgtga

SEQ ID NO: 14066 - DNA, 207 bp, Oryza sativa
gctagatccgagagtaaggtctcttgtgtgcacgtcttcacaaccaaggcatcgacataggcctctacattatgtcctatttggctacccacagaaattctagtagtatgttgaaaagtatgacctgcattctgtaacccgaagggcattgtcgtataacaataaggtcctatgggggtaatgaatgcagatttttctcatcctcct

SEQ ID NO: 14067 - DNA, 424 bp, Oryza sativa
acaatgagtggtggatgcttctgccttctggtcattgtgactgcacagtatagggaaagaaacaaacaactgccccaatctaatccaagccagttggatccctggattttattagctgtcaatactatattatgtatggtacactgcactcatggttatgttatggttcttgccaactggtgactactcatagctggatggaatatggtcgtgtaacatatcttttataagagaagtatgcatgtcaatttgtcaattctatcacaaatcatataatacttgcattttcatgacgacagttgatattttcttcatgtatcatctaaactatatatgacaagaagctgaatgaaatatattcttgccacatatagatcataactcacttactgatgagagtattatttcactacaattcactttc

SEQ ID NO: 14068 - DNA, 287 bp, Oryza sativa
cctaatacttactctgtcctttgggcggaggttttccaggccctaaattagaaacacttctctgggaggattggtggcttgactccacctggccgttttttcaacttaatagggaaaggtgcccctacctaaatatggataacagtgagataccgccagggatgcgctctcaaagccaatgcatcacgctacttcttgcgctgagagacatgagacaacgccagcaggccccaacatctggacagtttagaaaggagagcacactatgatatactggcggctccatg

SEQ ID NO: 14069 - DNA, 205 bp, Oryza sativa
agtgtgaatgacatgtatgggacgctctatgtcattgtgaatgatctcaaggggctcgtggcagactacaccgatcctgaggttgcccaaaagatgcttatagccctaccggagaagtatgagacccttgtgaccatgctcatcaacttcgacatgtcaagaatgacacccgcgagcctcttggggaagatcaacaccaatgaca

SEQ ID NO: 14070 - DNA, 476 bp, Oryza sativa
  unsure (1)..(476): unsure at all n locations
ctcggacaaatgctgtaactctgcatgcactatatatgtcaactgataatattttcagttntagttgccatcttattagtttttaacccaaaaatacaatgatcatggacatcactgatcatttntgaccagtcgtattatttgttagcaattcattgttaagttattgcccttgaacaaagctcttgccactgttatattacatataagctccaaagacaacccattcgttctattataatttgcttctcgaatattgctngtatgctgacaaaatgtaactattctgtcatgtttgtttcaaggtttaagcatatcatgtcctgcttcgtcgaaaatcttttttctaacagcggcatcacaaataacttgatatgacttatgcgacagtacaacccaaactcaaactangctgaagtatggacatacctgaagttcatttgtatatgatgatttaacattcactacatatatat

SEQ ID NO: 14071 - DNA, 98 bp, Oryza sativa
acttatcatatttgcagccttcatcttcctaccctcagaagcatttgattcaattgacatgaatttcacagatgcaatgtgcttattcaacatgccaa

SEQ ID NO: 14072 - DNA, 419 bp, Oryza sativa
tattattgctgacttggcatggatggattagctgtattcattctgaattggcgccacaagagagaaagagaagagcccagctctgaccgcggtatatatacaacttgatgagttcgtgcccacttgtgtgatagattatacgcataattatgctttcattaagatgctcctggattattataaacagttagcgttagctacctaccagcctgcaacagaagcatgcatgtatgggtacaaaaagtcaactggtgagatcacgcttaccatatcgatgaagatattaagttaactaacatgaggttcgcagtcaataagtgataaatgatactctcctcatgtatcattagggccttctcattcctgtaaatacacctgtgctttataaaaaaaataaaatagatattagaatacttctc

SEQ ID NO: 14073 - DNA, 194 bp, Oryza sativa
  unsure (1)..(194): unsure at all n locations
gacaacgcttcctgtggcctgtgtgatacaagatgtctctctaataagatgccttgggagatcaacccaaaatgggccggcgaggagaagccgtgtctatgtggaaaagtcgtcgggcacanaatgtgggggaagggggtgcgaacgatactgatcacttctgcgtcttacctccgagatggggtttgggacgc

SEQ ID NO: 14074 - DNA, 307 bp, Oryza sativa
cgaatagctatgattctactccactttcgtacatcgaaatccattcctttctcgctgcatgacgatacagcctcatcaccccttcataattactcttccaactttatatagaaccatctcaagagacgcgaactcctcttcatattcgttttctacgtttatgggtctaaatatacattaacttaattttctatatatggaataataataatagtcatgttactttattactggaagataaccataatatgactagtcttaatattagaatatggcgatagtataagttaactatctatcaacgtat

SEQ ID NO: 14075 - DNA, 285 bp, Oryza sativa
acttcgcaatccgtctgtgttgcttcgcgaatatgaagtatattcccgagtggaaacgatgtgaccaccgtgaccgagtgactatgaaagtagtgagataatttcctgatggtaattaagacaccatataataaactttgaacctgaggataccttgtcttggagtcggctaaaacctcgctgaccaaataaaatggtcgttggactttttgaatatggggcttctctttacgctcgacaaccaagaccgtactcaacaactgtgaggtcgccgacacatataac

SEQ ID NO: 14076 - DNA, 482 bp, Oryza sativa
  unsure (1)..(482): unsure at all n locations
tcagtgtnatatactaaacgaaatatatgatattgaagatgtgctcagaatgttaatgaatgcaatacctacctgatctgattacatgaaagtgtatgtatgaatattctcctttcttctgcaatgatgccaacttttgaatttatgtattcttgagttttgatgcaataacactagttactataacataccatcaacaacaacattntgaattatgtattcttgattnttgatgcactgacactatgtactattacataccatctacaccacaacaagaatgtcagtaccatgaaaattgctttgttgaatgaaatgtgaatttaacccagtagggggtagaacatatcttggccaacttatacattacctagttcatcatgttttttcncttgttgccgttgcaccactacaataaaagtggagtgtgctatatagaaagaataccattgtcgatatcgacggtgtcactattgtatatg

SEQ ID NO: 14077 - DNA, 55 bp, Oryza sativa
aaagcaagaaaactgctgtttttgcaaccacagtggggcgaatatatatatatat

SEQ ID NO: 14078 - DNA, 305 bp, Oryza sativa
  unsure (1)..(305): unsure at all n locations
aagcttgtgtatgccgtcagtgtattaattatacttatctctacaaccttnggttatattctntacctagatctgacgtgtgggccatgtaccnctagctaacctacactaaacatgccgtgaccactgaaaacttcaactctgtcacggcaactggattctgggacgcttttgatatttagcacataaaagggtgatgtgtgctaccggacaacgatggtgccttgcagctctgggcagtaatgttcaaggctgatctgttaactactatacnaaatagaatatataggctgatctaaatatta

SEQ ID NO: 14079 - DNA, 182 bp, Oryza sativa
tctcaatttgcagatttcgagcgtaagctctttcaatgcaggcattgtctgcacattatttgggtgctgattccacttccactcccacttctactacttcatgcctattagaatcatctacttcaaactagggtatacttgggcaccatggtggtggtggctggatgatggtcgataataat

SEQ ID NO: 14080 - DNA, 321 bp, Oryza sativa
  unsure (1)..(321): unsure at all n locations
gtatagatgtgacacatcaagatcaaaattcccatctgtgaagacagatgaatcaagagttatggtacagtgcattctttcaaccaattgatgcactcgacgcttntctggacatttctctaagtgccaatggcactaactcgtgccaataccatgaatagctacaatgaatctgttgcgatcacatatatttccacgtgttcactttcagntagcatagatcagctcaaatccttactaacatatagatcgtaatttttattnnttctttcacattaaatcactataaagaataatcattgccgacatgtgctataaatg

SEQ ID NO: 14081 - DNA, 308 bp, Oryza sativa
  unsure (1)..(308): unsure at all n locations
gttatgtctctggtgagcttggggtcaagagctaatgattttttatcgcaggcaactatgcacgcatcggtcggcttttataactagatagataaggatccccagctagcatcaacattaaaaatgtatgattggtaggaaattaaatgcttttcataagtntatttactatgacgaatgagatccaaatacctcactatttcctctcgtatactcgcagatttgcactcgcatcccatctaacattaattntttgaacttgtgtttgacacgcaatcgaaaatgtgatacaatgatctatgtgtcat

SEQ ID NO: 14082 - DNA, 226 bp, Oryza sativa
acgcgtctttttaaaactcgtcaaacgtctaggtttactatacgtctctttgtcatatctagcaaaaattaaaataaatgattgtcattatttggccaagggcggttttcaaaatttaccacttccacaagtttttacacatgattatatgtaagaacatgtcaattttgttaccccataagatacctcacactgtgttaggatcaagcaatatgtgtgttcacat

SEQ ID NO: 14083 - DNA, 120 bp, Oryza sativa
tggatttgagcttatgagacaagcattattagcttccaatccacatgatattcttccatgtttgtaccaccattgaccaacgatggctaccaagtgtactaatgtactgacattttctta

SEQ ID NO: 14084 - DNA, 201 bp, Oryza sativa
  unsure (1)..(201): unsure at all n locations
tctttgcataggaataagaccaacgataaagaactgatctaatgttatcattcacaanaccatcccagaaaagggacaagtcataccatcacccactttacagatgaggtgatggcaccatattcaacaagtgggagtatgagcggtagcgcgtgggttgcagtcgccactgcgtggcccctgacctcacatgcccatgga

SEQ ID NO: 14085 - DNA, 178 bp, Oryza sativa
accacccacgcgacgtcaccccgggtgagcgtcatgtgtctctttgtcgaacaacaacacaagcgttatcacgccgacgccgagcacgtctactgctaaccgctcgttcatgaactggtcggagaagtgtggccacgtcacgaccagcacgccatgggcgatggactccagcatcgag

SEQ ID NO: 14086 - DNA, 76 bp, Oryza sativa
cgtctttacaaccaagtcatcgacataagcctcgacattacgtcctatttggctacccacacgaaatccagtagta

SEQ ID NO: 14087 - DNA, 164 bp, Oryza sativa
tttgtaggtagatagcagtattatctaacctatatatagtaaatatgtgcaatatgggtcttgaatttaattataaataacacaacaagtccaataaactgagaagagtacatgtgacttgagagtcatgaacatttagccattattaattttctatatattat

SEQ ID NO: 14088 - DNA, 235 bp, Oryza sativa
gctatcacacgatggcagattatgcttgatcaaatcaacaatgatggccctccctgtacacacaatgtcagtgattcagctgcctaaatgggcgataaaagaaattgaacgcaaatgcatgggattcctttggaaagggcaagaggaagtgagcggtggacactgcttggtcgcgtggaaaaacgtctgtatgccagtgtgaaatggtgggctggggatcaagaatttggaatac

SEQ ID NO: 14089 - DNA, 310 bp, Oryza sativa
tagttatagaagaatatgaagagcgcgccaatttgacataatgatgtaaaaattgtacgacaatgtgcaatatatacattctgtttgtggtggaaatgggctttgtatatatcttatattacccttgccattggcatgttctggagttaccaacttcaacaactactgtactttgttgacttgtggatatgcaagaatctgatatcttaacttatcggtgtatgatgacagggaggataagaaactgctactgatattgacacatgtaaactgcaatctatggatgctgactcgatagtaacgctctttt

SEQ ID NO: 14090 - DNA, 375 bp, Oryza sativa
tagcttgcgcgctatggatgagtggagagagcctgccccttgtgtgccaaagcgaagcatgcgcggaagactccgctaagtgtgcggctttcgtgtgcgatcgtaggtggaagacgcgctggctttctccggcctcgtgcatagtgcgggtcgcgcaacgtgcccatgcgtcacgggtaggtttcctaggtctaatcaacataatcaatcctgattgtttacgttgatctcaggtgtgaaccgaccgcatggcaccttctttgacgttggtcggaacttatcgtcttttcagggaatatttttaaatgctcacaaaaacacttcgagtgttacttctataaacatgaatgtatattgatagttttaagtaatgat

SEQ ID NO: 14091 - DNA, 335 bp, Oryza sativa
  unsure (1)..(335): unsure at all n locations
tgtactattgactactgggagcaaaaaaagttattntagtcatcggtactttactcatatgcttccttgaaagagatttcgttattattggcacagttgtcttacaatttattgagcaccgatcatgaaagatatgtaggagcaactcattattagtggttcgaaggagcttgcgatcatattcattgtttcatcaaaattggtatggatgtgagacccgaacattttatctaatctgatatgtcaattatgtgagaagtgcatgatgaacggtactgaccttggacatatgggagtctattgaaagcagctacctgtctgagacgtttgtgtgt

SEQ ID NO: 14092 - DNA, 401 bp, Oryza sativa
  unsure (1)..(401): unsure at all n locations
tacaatatcattgcgtttcgtcacgtaagtgtgcattnttattgaccaatattatggcttaagctgaatatatatcttggtcattttccaagcgggtggtaaatcctatatgagtttatataactcggatttcacaccacatatgccatatatttccaggtgtggtgaaaccatgtgtcttttatggacttaagcacatcatttaaagcaatgtgcgcatggtgtatgcccaatacaatagaaatatctttattccaacataccaagctctttatagctgttgtgctatgtgaaatatcaatgatgtacccaactttacggtacattcattcatatttacacagcagtcggtatatcactcngatcatgttattagcggatcacaccgcatatgctacata

SEQ ID NO: 14093 - DNA, 226 bp, Oryza sativa
  unsure (1)..(226): unsure at all n locations
tcagtggctatatcatattatgtacactagttaaatacccgtgcttngctacggatgaaaataaattatacatgtgcttacattgnttggaacaagctaatttaaggtttttggaacaatatcatccctgattccttgtggatgtctttgcatttgtaaacttaattctagagatgaaataagatattaacaatatgtagacgtactggtttataanattaaagta

SEQ ID NO: 14094 - DNA, 61 bp, Oryza sativa
tagctggttatgagtcccacttccaacagacggagggctgtgttttttgacgggatataga

SEQ ID NO: 14095 - DNA, 86 bp, Oryza sativa
  unsure (1)..(86): unsure at all n locations
atgaaagggtatacctatgttggnaaatataactcacataataatttctttaccaagcagtctttgatggacagtcattacattca

SEQ ID NO: 14096 - DNA, 233 bp, Oryza sativa
  unsure (1)..(233): unsure at all n locations
cttgatatgggatgtggggtaataagctaaatcttcacatgaatcaacttatgntttacttctaaagaaatggtatggtattaagatctttcctctctgaaggtggctagatttggtgggttttngcttaaagagaatatcttgacactctcttttngcccccgagattcacataaatctcaaatacaatttgctctggagagaggagatcctgcatttcttttgatgctggg

SEQ ID NO: 14097 - DNA, 456 bp, Oryza sativa
  unsure (1)..(456): unsure at all n locations
gtgattcacgcttgcgtagacatctcgagtacacataacctacgttcatgcctttaagatgaatagatgatgcaatatctcactcttntagctacctttttgcttttaagaatgaggcgacaaaattttcattaattaattgtgcaactagattgctttcacaatcacaagtcaaaggtcgcaggagacacaaataaattcaatgaggatacactctataatagtataaataaacattatatgccaccactaagtagcttttagaattctctattcttaaatgaataattgtattcctcgtcgcactctacgaagatggtgcccttcatattatcgtcgcccatctgtggtcggctacaatgtagtgagagaaagcaacccattatgttctctgatatanatatgcacgtaaatatctcgtatgtatatattgtcatcaatgtagtatatcacatt

SEQ ID NO: 14098 - DNA, 192 bp, Oryza sativa
ctatgtacgtcacagcggttgggttgtgcgggataacgtgcctgtcactaccgtgtactggcgaagaacaatggcacgctgagatcatgagagctctgtcccacattctgagaaagagatgctgtggaccacaatgctcgagacattcacccttcctgcgggtacagaggacaaagtgaaaacgtggactct

SEQ ID NO: 14099 - DNA, 150 bp, Oryza sativa
  unsure (1)..(150): unsure at all n locations
tttttttatttttttattaannnaaagggtatgtgcactgaaaaaatactgggaggccacaggtaccccaattttttgtaaggtataaaggtatcctattagaaacacctattttaccttacctgggtaacctatagcggttataccaaa

SEQ ID NO: 14100 - DNA, 207 bp, Oryza sativa
ggcatatatgagttgcacttatattccttccagggaatgtactatcattggtacacgtaaaatttgtgttttccaaccatttcttttcacacaagcttgtgatatgaaagaatgggatagctccgaatcaaacagaactattgcgggtaccgagttgacagagaacatacccatcacaacgtctggagcatcctgagcgggttcagc

SEQ ID NO: 14101 - DNA, 384 bp, Oryza sativa
  unsure (1)..(384): unsure at all n locations
ataatctggatagcatcaaagggacatacctgaaataataataacacaaaggaagcgaggctaagaatattgcacatttggaaagaagatacaaaaaaatgaaggccaagcggaaaagcagttacaccttcacacaaataccacatccaatacatagttcctcagaaattaaggatactctcgatgatggagtaacttctatgcactgacgccctgtcaatgtagataaagaatcataagccacatgcacaaatacttgatcttcttatctcaaaataaangccttttccttggttgaaggaaatgtcatatgcagaaataatggattaaacacaaagganatgtcagatcagaaaataatggtatagaacacaaagataatct

SEQ ID NO: 14102 - DNA, 176 bp, Oryza sativa
  unsure (1)..(176): unsure at all n locations
ctcttctatatacatttctggtattgaatatatttcgagtatatgagtaccttctttatattatgttcatgttatactgaatatactgctagcttatctgggatatgctttggtgcaggtataatgtntgcttatgcaattattctatatcatgacgacgatattagagtagtatc

SEQ ID NO: 14103 - DNA, 352 bp, Oryza sativa
  unsure (1)..(352): unsure at all n locations
acttgaagttgatgctgtcacgaggcccgaatccgaattcaaaacgtgtagaactttatctcttgtcttatatggaccaaaagtgacgtggtgagatggaagtgaacttggagaaagtcttggtttggtcccaatcaaacattataattggcttgatgaagctatgctctgcaacagacaatcacacaggaaccaacatgangggatggatctaagatctgagtatatttcatatggaaaatcgaaaggggatngacaagctattcaacaacctgaaacaactcatcttcatgccgatgggatgttgtctggacttctggtatanaatctatagcatccaaaacattagtac

SEQ ID NO: 14104 - DNA, 365 bp, Oryza sativa
  unsure (1)..(365): unsure at all n locations
gatccaatcatacttctattctgcttttgatcaacagcttcaccatcttcatcatgatccaacacatgtgtagaaccaattggtgttgaaattggcttgcaattctccatcttgaaccgtctcanaagatccttcgtatactttgtttgatgcacaaaagtaccttgatgtgtttgcttaatatgcaatctccaaatgtacgataactcaaccatcatgttcatctcaaattcctgtgcatagttcgcaaatttacaaccaacgcgtgagtcaacaaccaaagataatatatccacataaatctgacgaacagttgatataccatgcttaaaacaaaagcatttgtcacctttccattgtaaact

SEQ ID NO: 14105 - DNA, 211 bp, Oryza sativa
gactccactgaatactggcgcttcggtgtggatgaaagtgatgaggtacgcctcttcattgttacttccataatggatgtgcagtatccaccctgtagatgtactgagaatgtattgatattatgtctagaagagaatgtaccgatgcagaggaaatgcaatcctcttgcattatggtgctgaccactttgaaacatagagttaattcttt

SEQ ID NO: 14106 - DNA, 307 bp, Oryza sativa
gacgagtatctcgtccagacttgctcattccgctaatggtctcatgcagtgttacgccaaaaccgtagacatcattctttaccgagataacaccttcaacaatatattctggaggcatatagcccctaaatataacccaatacaaattaaacactcataaatttcagttgagaaaacagaaaggagataacttcatatggaattaataggatgccagatatcttacaatgttccacgaacgcttgcattaatctcatcatcttctagcactttagctagtccaaaatcaccaatcttatggttcatg

SEQ ID NO: 14107 - DNA, 239 bp, Oryza sativa
  unsure (1)..(239): unsure at all n locations
gtttcgatgaaatctttactactctgtctgccaaattgaatcatgtattcattctaaaaaaattctgaaaatggataagagccgagaagtcttatattatgaaccttcgattctaanattcanattcttctacattgaatgtatagctgcagcaataaatttggatcagcctttctactccctgcatctacggtgagcaggtatctntaggtaaccgcacaataccctaaccctaatta

SEQ ID NO: 14108 - DNA, 385 bp, Oryza sativa
  unsure (1)..(385): unsure at all n locations
ttggtcgatgaatgtgagcanggagttgtantacccatcaacgttcagcagcccaacctgaaagatgcatggttcatcatgaaaagaataaagctctctgtcagaaatcattagcactgaattaagatgaaatggataatatcgtaaagagttcagttcagagagaagcgagtgcttatatactccataatataacgattaatgcactgaattataccggatcatgagtgatgcctaattgacccatgtgatgacttcagcagctcttcagtgtacgatcctctgaattgttcatacatctagtagttggggactctaacgacgaagacagtatactataccgtagtaacagggtgcacgttgcactgggtgtatacttgctgca

SEQ ID NO: 14109 - DNA, 302 bp, Oryza sativa
  unsure (1)..(302): unsure at all n locations
ctcagcttgtctttattgaaactcntttaatacatttatgggattgaaatactttcttagtatatgagtacctactttacattatgttcatgttatattgaatatacggctagcttatctgggagatgctttggtgcgggtataatgtttgcatatgcaattactctatgtcatgacgatgatattagagtagtatctggtagtttagacgtggtgtctagattaccggatatcattattcggggttatatattgcggatgagaggtgggccgctgatggtgacagctcaataccggtattc

SEQ ID NO: 14110 - DNA, 63 bp, Oryza sativa
agacaaacgcatggctacatcattccttctctcttgagacatgtcactgaaatttcacacttc

SEQ ID NO: 14111 - DNA, 425 bp, Oryza sativa
  unsure (1)..(425): unsure at all n locations
tcccgaatcatgaagatattgntcgcactgcatgtgcaattttgaatctaatcactacaccatccaccccgatgatcacggatgagtctcctgcattcctccaaaggatacatagtgacatttgtgagacctattcaacccctgtcggtcccatttaggtacttcatggtatctattgatgcctacacgagatggaaccatgtggacctgttgtccacaacgaaccacggattctccaagctaattgcacaaataatcaggctaatagcaagttgccctgatgaccgcatccaatccattaagatggataatgctggtgagctcangtcgaaagctatcgatgattattgcttagctatgggaattagcggggagcattcagtaccacgtgttcacacacgacatggtctaactgaatccttgat

SEQ ID NO: 14112 - DNA, 398 bp, Oryza sativa
  unsure (1)..(398): unsure at all n locations
nttcctttagcttgcgctccaacagcgttgctggaaggctgacctcctacaaaagcgtggcattgacagacactcggactatcctttctacacccaagagcttaagacggtgaaccacatctttcttgactgtgtattcacttgccaggtctcgtgcaatgttctttctcctcctagctggccggacctcgccacttcccatggctgctcacttcangtctggtggctgactgctcgggcttgcctgccagagcatcttcgcaagggtttcgactcccttgttcttctggtatcctagcaactgtggaaggagcagaactccagggttttcgactactctctctctctctctctctctctctctcttcggnttcggtagtgctggagtccatcttcta

SEQ ID NO: 14113 - DNA, 475 bp, Oryza sativa
  unsure (1)..(475): unsure at all n locations
tggcaaagacaaaaaatctctcanatcaagtgtaaaagattctttctaaccaaaagtaagtctggtgatacagatgatggtgctcctgctagtaaagcaaaggctagagaaccctttacaagatatgggcgtgcagctaagaggactggaagaaagaaattgctcatgttgaagaacaaaaagaaaaggttcaaggcaaagcagcccagtaaaaagaggagattccgagcactatggttttatctacttgctgcttttgaccagtgagaaacactagacttgtcttgtgagatttgtgccgcttcttcaaaggaaaagcagaaatcatgctntgtgtttgtaattatttcaggagaggagtaccaactntaccacaactaccagcaaagtatttgaggatcaagtgagttattttggtgcacttttctagtcaaaacagtatttgttaagccacactaacaactgccttttgtat

SEQ ID NO: 14114 - DNA, 432 bp, Oryza sativa
  unsure (1)..(432): unsure at all n locations
nggctttcgctcanggtccttgataatgattgaacccctgaaagcgatagtatgcttgaaggtcgtcgtgctgttactgcatcatgtatgttgttgatgttggcgaactgagcatcagcagtctgttaccattcttgcgtctgtgctatgtgttccgcgaggttgttttggatatctcccgtctgcacatcgagggtatacattctgctggtgatttcactcaagacccaacgagaggaacttgagcgccattcacttggggatggaggcatactgcttaatctggagggttggttgtcccccactgtatgtcatgaggtgcacgccaccggtcctcactggcacttgtccagcttgagactccgatgttgtggcgtggagcttgggtccatccgggcgcatcccaagttgccttccaacctgcctcataca

SEQ ID NO: 14115 - DNA, 188 bp, Oryza sativa
  unsure (1)..(188): unsure at all n locations
catgcaagctggtaaccatanctngcataccaaggattcaggtgtctttttatctctataaaatatacacaccgagtgggggtacctcgtacggccggacctgttaacctcatttggccatcgtcttggacgagcctccaagaatcagatcacacacagtttcgctcaccaaaacctcgaatcttacc

SEQ ID NO: 14116 - DNA, 289 bp, Oryza sativa
tgagcaggcaatgacgcatgagcagagtgaagcttagctgttcttactgggtgaactcagcactcactttagctgtgtggtactatttagactacttgcatattacctatacgttgggatgaggacactattgaaaaagtattatgtagcccactgttatcaatattgtctatgtatatcgcacaccttggtctcagcctatatttgtgaatgagtcggcttatttttctttcttctcacaaagatgggagttgagggtgggagtacgtgatatagtggatccctgtca

SEQ ID NO: 14117 - DNA, 313 bp, Oryza sativa
  unsure (1)..(313): unsure at all n locations
agctntctctcttaatactctaccaaattttgtttttgcatcaaagcaaacaaagcttagtgtgttatactatcaaaattggggaatgctaaaatgtatattaatttgatattaccaatatagtatggttgatttgggaaataaagcgaacaagccctcgtgtgactcacctgtgtgcgctggagagatctggaccgtcccgttgatgctggccgttggatctgatccgtcagaggcctcgtggattaggataacatcagtgttggtgtcttgtgtgttggacagtatactgctgataagaccgtgaatcttg

SEQ ID NO: 14118 - DNA, 437 bp, Oryza sativa
tgtccagagatcgagctaatctgcagactgttcttgctcttcagtgcgagagcgtctgcctcacctgcggcttatataaagctcacacgatggctgcgggtatcaccgccagcggctgtggcagcgagccactcaccaggcggcctgaatggttcgggctaaagtggatcccacgcatcttgtagtctctctctaccccattgccgttgcgtgccatgaaagagacgattgagatagcctcgacgaaagaggacggggagagcatcgcccttttgctctagaggcgagcgcgcgagcagtgatgcggcaatggcgaacgcagacgtaacactctctcagagctaggaacaaattatatgagctgataggaggagatagaatggtcgaacgtgcagcctcgaatcctcgacgactatggattctctgtctaagatcac

SEQ ID NO: 14119 - DNA, 92 bp, Oryza sativa
cacctgcggcatgcaagctatgctgggttatatcgtatattcttctattccataataatacaaattaatatagagatggtccattgtatgcc

SEQ ID NO: 14120 - DNA, 473 bp, Oryza sativa
  unsure (1)..(473): unsure at all n locations
ntgcaggcttcaggcgggtgtggaagtagcgctggcattttgagtttgcaaaaaggaagacctgtacaatataccaatacgtttacaacaaccttctaagcagagaaatatcctgacattaaagcaatcattcgatgaacagcctgacctgtgaatcagcacgaataaagcgaatgcccttccctggatatatcttctggccactaaaacggcaaagctctgtcctgtaggataaaaataaaagtaatagttgaaataccttccaaatatgaaatagtactcattggtaaatcattgctattaaccttttactaccattaaccaaaaaactacatagcctagagcatgcacaggataaaagggcactaaaacaatctacaatcatattgaaacaacaaaatatacacaggaacttacttcagcaccatcttctcagcttanatcctcacagaattctgccaaattccaacatc

SEQ ID NO: 14121 - DNA, 436 bp, Oryza sativa
  unsure (1)..(436): unsure at all n locations
agcttccatctatctattatattatattattaaaacatcctcgaaaggaggcaccacgttcgctgtgggggctagaaattcccacattaatcgaagaaaaagagaaaaatctacaccgctagatcgtagtggatctaaattataacggtatagattgatagctatatatatgtagtacaactgtagttgttaaaatataataagttgtggatgaaatatagctatctactactcatatntggaatcaggcatattagaatcggctttttttctttgatgaaaccgttatggagtatgattacgattgcagccgcaccaattatttctttcctttatgataccgttccggggagaattgagctgccaggagccaagtgccgaccggtccttattcttgtctggttgacggtcttgtgctagatattagattactgtg

SEQ ID NO: 14122 - DNA, 480 bp, Oryza sativa
  unsure (1)..(480): unsure at all n locations
ttagttagaagtgacatgaaccgaacctaatgataaattataccgccacaagagtttagggttgattcgaattatttccaattattgattggcaaacatctacttacacccatttcaaaatataagcatatctagctatatatctatataagcattatgtagatacatagccagaaaggtggagtattaatattttgcaaataaattatataggtgcacttggcatagttgtggctaccatgatgattgtgcatcaatagttagtgcagatctcctaaagttacttctattatattaaaacataggtgtagttgcgctcttctgcaatgcttaatactccttttatcctaaaatattgttatttttgactatgaatttttttaaaaaatcgtctagataactcatagctatttctggtttaagtttctaccacaaacaactantatttgggacgaggggagtacagggtgtgactcgcta

SEQ ID NO: 14123 - DNA, 290 bp, Oryza sativa
atgcaagcttagctgatcctgtgtatgcgtgcaggatgagtttattgtctatatgctgtcgctgcatgtgtgtgtttgtatgtctatttgggcacgtatactaagtgggagctacgtgggctggagcgcggctacgcatcggcgagcttcgaccttggcatccgcgggtcgctctacaccgatagaagagtgcgcgactaaaactgatgggagaaaagagtgcgctgtctgtctgtgaccctttcccccgcacgcgtcacgacctgcgacctcttctaggcgcgttggtt

SEQ ID NO: 14124 - DNA, 458 bp, Oryza sativa
  unsure (1)..(458): unsure at all n locations
ntccttgacttgtctggacattcggttgtttcactnttgatgccaaatntgtgtctacttgtttgggtttgagggcaagacattttttttccaagatccaaattcctaagtcagtggcatacgataaagcattaccataacctatagttatgtcggaggaccaaagctaggaaacacagccaacacaaagaagaaaacttgcctcgtccccagtgctgtcggtgatgtggtgcagccatccatgccattcanggggcacttgggatgcattgtagcgccctttctctgcatattctacccacctgtgccttcctgcagggttaccagtatttagttntgtagaaagcacctctctttggaggagacagaaagtaagaaacgttacattactacaaagacatgcataccaatcaagcccagggtgatcacttatgagcanagttacaaatctcagaagt

SEQ ID NO: 14125 - DNA, 467 bp, Oryza sativa
  unsure (1)..(467): unsure at all n locations
tgtccggcctaaaaaaaactgattcgtgtcgttcattgcatcaaatccatgaaaatctacattaatttgagaattgagtctttccgaatcgcaaccgatcgttcggtggccataacaaaaaatttgaatttgaattcgaatttcttgcgctgtgatgtgatgtgatgcagcgggtacacgctgctgagagacccgcggcacaacaagggtttggccttctcggaggcggagcgcgacgcgcactacctccgcggcctcctcccgccatccatcgtctcgcaggagctccaggagaagaagctcatgcacaacctccgcaactacaccgtccccctccagcgctacatcgccatgatggacctccaggtacaatcacaaacaccaccaccaccaccaccaaaagtttgatcacccactcaaatcanatgcattgataatgttcatgcagcaagaactgtggattactt

SEQ ID NO: 14126 - DNA, 374 bp, Oryza sativa
  unsure (1)..(374): unsure at all n locations
cagcctagtgtgcaaagtatagagcccaatgtagagaatccattgaatcgggggaaatgctggtctcctagcgtntcgtaccacgtggggtcacgtactaagcaagccaaaggcaagaagagttagaatcagaagagaaaagcgtctatgcgaactgaagaagaagtacgtaagatggctattagcagcaccgaatggcctcccgcagggataactattcctagacgtcaaagaggaaataccttccgaggtgcacgacagttgacccagcacctcctaagccatggtggcagagtatcttgatagtgaagggtcagatcaagtctcctcggatgatgaagatgagtctcctcacatctcggtgggaagagatg

SEQ ID NO: 14127 - DNA, 215 bp, Oryza sativa
  unsure (1)..(215): unsure at all n locations
tgcaactacgcngttatatatttattttcaactgcgctaataagggcacatccgctntctctgtatgtagattaaaaaaatacataccatatattntcccttgctttgctatttgaatgcttacctcaatgcaagagcagggaagaagtctgattgctaataaaatgagtggaagaaagccgtcatggaagaatttggggtccaaagccacacct

SEQ ID NO: 14128 - DNA, 317 bp, Oryza sativa
cctcggcagagaccaagaacccgagaagcatgcccgcatgcacgccgaacactcacttgtcggggttcagctttatgcgggcggtgcggagactttcgaaagttttcgctagatccgaaagtaaggtctcctggttgcgtgttttcacaactcagtcatcaacataggcctcaacattacgtcctattaggctacccaaagagaatcgagttgtacttttaatagaaggacctgcattctttaaccctaaacgcattgtcgtattacaataagttcctatgggggaatgaatgcagttttttcttatcttctaacca

SEQ ID NO: 14129 - DNA, 435 bp, Oryza sativa
  unsure (1)..(435): unsure at all n locations
ttaactgaattacattccagtccaattgtgggtcactctgggttcccagttacatacagaaaactgaagcagctatttgcatggcccaagatgaagaaaatgactaagacctttgtgcagcaatgtcagatatgcttacaagccaagcctgacagggcaagatacccagggcttttgcagcctctacctgtacctgagggtgcttggcaagttatttcactcgactntattgaagggttgccaaggtctgatcattctaactgtattctcgttgtggtagacaaattttctaagtatgctcatttcctgcccttatcccatccatttactgcactgagtgttgctaagttggttatgaagcacatttttaagttgcatggccttcctttggaatcatttcgatagggataaggtttacaagtcgttatgggacat

SEQ ID NO: 14130 - DNA, 375 bp, Oryza sativa
aacaagcacctatagcatggtgctccacgcttagtgatacgctgtgagatattgcttttaagtgatcccatgctgatactgcgttgttcttctatagtataggaggagacactagattcgttgtgatatatgttgatgatagtattgaggctagttctacacagaaagctactgatgctctattaagcgatctgaagctagacttcgctctcactgatttgggagatcagcattattccctgggtgccgacgtcaacatgatgcctgatggcatattgctaacacaatataagtatgcttgagatctactcgctagatcaggactggataaaagtaacgcttctactactcctctctctacagacgacaaactct

SEQ ID NO: 14131 - DNA, 486 bp, Oryza sativa
  unsure (1)..(486): unsure at all n locations
atacaatactcaagcttcttncanagcatacggctntctagatgtatatgacgatctctagacatatggatcttatatgaatcgtatgatgaagtaccacatgagtggatatataggaaaggaatccaaatctgccgaatcgctcatgttatgatcttctacatcctangtctccgcgttccgtcatctggcttatgttcttcatgtagcattcagatcgaatgactctatgaaattacgtcgatacttctacatattatgggtaacgtaggagacatccctattttcccccggcggtcttaattaccactgcttagctttcaattcgcctctgaccatcaaattaaatgtgaataacccgtcctcctctctttgaaacaaggagcgcttccggttctgtgcgtgcttcaaaccaatttgtcttctccatattaccatatctctagagtcaataattntctatgaggaactactgaactcaatcac

SEQ ID NO: 14132 - DNA, 264 bp, Oryza sativa
  unsure (1)..(264): unsure at all n locations
gcaagcttgtgcacagtgcacagtcatatatcagactatttattatttacttggtgccactaccatctccatacgtgatggcacatgtagtggttataacacggccacaccaccggccgggcctacgtacataacacgtacgcatttctttgtgctagcgtaccttcgctgatgaacacctctgtgcggacgcgcagcggctgcagctaccacttctcccgcgacggggacgacgacagggacntcacaaaggaagctactacc

SEQ ID NO: 14133 - DNA, 439 bp, Oryza sativa
  unsure (1)..(439): unsure at all n locations
tcattattccattcagaattctcgctatgcagtgaagcatcactagcgtctagcgaagactagcaaagaattgggaagtgccaaaaatggaaaccacacatgtctcctgccctgcctccggcgaggttaagattatggtttcggggtggggtcgggggagatcggggtttagaggatcgccgtggcggcgaggcggtgctggtgccgccggccacgggtcggaagacggccggcgaccgggtgcaacgggaagaaaagttacggtgaggggagcggctacgagaaagagcgcggcggcggcggcggcggcttccggtggtggactcgggtcggcggccccgcgccgatggtggccccgacggccacggaggttggggaaaccatatgaatatgagattagatgagactgaggaggagcanggagctcaccggagttggt

SEQ ID NO: 14134 - DNA, 361 bp, Oryza sativa
  unsure (1)..(361): unsure at all n locations
agctttgatatgatattctacacaactctaccaactttgtagtattctaataccaaagcatatctctttcggccattgacaatgaatattgattaggttccatctccttctgatgtgacctaatttggtcctacctccaatatttgttntcatgtgcccttgctagggtgaccatcctactttggttcaatgttggccgacccaccaaggtcagatgtgaccaagcattgcgtgtgcctaagtcacatacctgtatgtntattagtaatgattttttaagctttagaacgttcaagttttatgtacgtatttttcaatgtactgattaattgagtgccctatcaaacacaatagttgagtg

SEQ ID NO: 14135 - DNA, 449 bp, Oryza sativa
  unsure (1)..(449): unsure at all n locations
cttggagaagaagtcttaggtggagtcctggcttataccccagttgatcgcctgtgaagatggagccgtangcccgctagtccgctgctgtttatttttgattgtcaagccttaagtgcctttgtaataatgtaaatattatcgatataataaagatgtgtcttttatatcatgtttgtgtggtgtaccccggcttttcctgggacggggattaatacactagcgttcgggaaaagggcaatttctcggtcgcgacattcacttcagacaaccaaaattcacacttgctaaacttggcatacagttgatgttctcgtagcttctctagtgcaaggcgaagatgttcttcatgctcttctttggttcgggagtagataagaatgtcnatcaataagaccaccatgaacttgtctaggtattccataaacaccttattcatcaagttcatg

SEQ ID NO: 14136 - DNA, 269 bp, Oryza sativa
gctgactaataagctgtggaacgcaggtcttgtgccatgactggtagagatacgtttgtcatgtgatattactggaggaaatactgcctccgtttcacaatgtgaggaagatctaaatgttgctcattatctagatacagtctacatctgctcgaatgcacaatatgctgcgatgacttacattgtcagacggagggagtcgtcaaattgacatgcgtcatcacacagatagaatacgagatgtggtgacttcatcagatcctactgta

SEQ ID NO: 14137 - DNA, 250 bp, Oryza sativa
gcttggcatatagggcaatattaaatatatttttctgatgattgctcattactacgggataattggtcgtctcagtgcaattagttgtattatcaatccttaagcagtcaagaacatgtactacataacattgctgctcaaattgtgtggtttggtcctggtgctacgcatgttcaccaaactgtttcaggtcatgttatctgcacctcacggttagggggatattatataaccatgtggatatccggaa

SEQ ID NO: 14138 - DNA, 488 bp, Oryza sativa
  unsure (1)..(488): unsure at all n locations
ngatggagcaaagaccgattgatacttcatcggtcacttgtgaaacgatttctgntacatctatgtctaagatcggaattgttagtaatcctctccctattagtcctattgatgttaacaaaaagaaagggaaaagtgttattattggggatcctcggcccaagactaggatcaataatgcgaaggccgaagatcataaagttgcaaaggatgagtcatctagtttgcaaaggaccaaaaagccgaagctcacttttgagatgcttatggctaagtacgagaaaggattagcgggtcaacgatttgataatcaaactagtgattcaaaaataccaagatcatctcgtangaagagaattggtcaaacaccaaagcaattggagccatcaactataccaactccatgcannacctccgatgtgatgccatggtatccatatccaatgtcactatatgngtatccttntatgtattatatgccatggatg

SEQ ID NO: 14139 - DNA, 283 bp, Oryza sativa
  unsure (1)..(283): unsure at all n locations
gcttctcggttctggtctctgcccgtgtatcttattttcncccagagataccagctatagagcgaatgcgcccctcagcaagcttatggatgatcnatgcgtctcccgatgcatggccgccctaagtcggttcatatcgaggctggcggagaaggcgctacccttatttaagctcctctaacgctccgggccgtttacttggacggaggaagctgatcgtgccctcactcagatgaaggcgtatctcagctctttcctggtcttgtcgcctcggagccaaatg

SEQ ID NO: 14140 - DNA, 450 bp, Oryza sativa
  unsure (1)..(450): unsure at all n locations
agatagagaaaatacagggtgggattcttgagatgaagatcttcttggaccgatgttagcgcttcggaacatgctgttaagacgagctctgaagaaattagagtccattgatgagtcctatttagtgtgagttacctttcgtaacttccctcttttaaacactgaggtgatgcctgtggtcaagctcttattttgagctgttttctgggcaattagaaagcccaagcattgatgataagattgatacatgaggctatttgatattaaatgccatctgagcacttgagcaggagctgaacaagatgtgattatgtcgagggaatatgtagtgaatccaactgaccattagaccagaactctgaagtacttttgggtacttagaatntaagagaaataaacacaagctggaaatcatctggtagtatactcctgaagcatgttctgcatttt

SEQ ID NO: 14141 - DNA, 278 bp, Oryza sativa
agcttactcaaatacctcaatacacacaactctgtttttatatggccagtgagttggttttggaagagatagagtaaatacaatcgtggtatcttgccaaattcctatggtacccctccagttaaaacattctctgaaaagtcaatctcctctgcaagagaaagagtgccaatttctaacggaatcgtaccatttaataaattcctgtagaggtatagcctctgaaggttctggatgttcccgattgttgcacgaataggcccaaccagattattgtc

SEQ ID NO: 14142 - DNA, 467 bp, Oryza sativa
tcgaataaataagatcatccattaaaaccaatgaccaatgatggaaatacatagcatactattactcagtcccttagatgttctttgatcaagcgatcgtatccgcaagaatcattacaggtctgttagggctaatcaccgtcaaatgaacatggtaagatggcatgaaagtaaaaaagccatgaagtaccatgtcccatgggaaatctccaggggcgcaagaaaagggaagcctatgtatgataatatttccaggggcgcaagaaaagggaagcctatgtatgataatacaacatgatagtactccctccgtttcacaatgtaagaacttctagcattatccatatacatttagatgttaatgaatctcaaaccatacttttgtttaaaatcttatcatctaatgagtgttggcatgctaataatcttacattggaactatagaatacttataacgactctcttct

SEQ ID NO: 14143 - DNA, 224 bp, Oryza sativa
actagcttctcgttgctagcatgtgaaactatagagtgagctctatcttgatcaaagagagttttaacatcacaatcacgttcatatctatcaagtatgccactgctaattcaagtactacaacgtgttaggacacctcttggtcaagattcagttattcccgtcatatcttgcgagagattgaaagaacatatgaagtctattcttaattgatttgattaatt

SEQ ID NO: 14144 - DNA, 450 bp, Oryza sativa
tcttggcatgcttcatgtaggagcttccctccaagatgtgctccatgatggcggcggcctcgatctgtcctggatggtgcttgagcttgtgagtcaggtggtcggtgtactccggcttgccgttcatcacctcgcagaacacggccgagaggacctcggcgaggatggcaagaatgttagcctcaaagagcacggtcgatgcaaggccagagcccacggcagtgccattgaccatggcaaggccttccttgggctgcagctcgaagaagccgccctggatgccagcaatcttgaacgcctcagcggcgttcaccttgctgccatctggtgcaaccgccacggcgttctcgcgcccagtgacaaggccggcaatgtaggacagcgggacgaggtcaccggaggcggtgatcgtgctctcgagcggcaggcacggtgtgacgttcgcgttga

SEQ ID NO: 14145 - DNA, 473 bp, Oryza sativa
  unsure (1)..(473): unsure at all n locations
agctntcttagtggctctagcttatgagagtgctttttctagttctgggagtaagaaatctgtttctaagaagaactttcaggtgggacgaggtggagagaaacagaagttggctcctggtgaattgtggaaggctcagcagttgaaagagtaccggagagcacaaggattatgttntaagtgtggtgataaatatattccangtcatgtgtgctcaaaacaggaaactcctcagttgaaagctatggagttacaagaggaggcaattgttctgactgatgaaactttgatgctgttactgcgttggagttgtctgaagacagtgccaatttgtcgcttcatgctttggccggcacttctcacaccaacattgttcaactcaaggctctgtctagcaatcaggtgcttatttgatttggtgattcttggagttctcatagnttcantaaattctgctctgtggcatcgttaca

SEQ ID NO: 14146 - DNA, 408 bp, Oryza sativa
  unsure (1)..(408): unsure at all n locations
tcggcgaccagatggggaacgcgaggtacgtggagcacgttgtggaaggccggttcgaggtggtcggcggcgagctccagaggcgggcggtggatgaggccatccggcggctcatggcggagagcgacngcggcgagatgagggcgcgggcgcgcgagctgaagaaggcggcggcggagtgcaccggcaaggccggctcgtcggagacggccatcgtcnaaatggtcactcacatgctgtcccttgtatttagagtagtactccctcaatttcacaatgcanaactttctagcattggccacatacatttcacaatgcaagactntctagcatcgtccacatacatttatagtgtagtgaatctaaacacatacatatatctagatttattaacatctaaataaatat

SEQ ID NO: 14147 - DNA, 465 bp, Oryza sativa
  unsure (1)..(465): unsure at all n locations
ntgattntctntntctctaagtcaaacttcttaaaagtttaactaactaagtttatagaanaatatagcaacacttataatacaaaattagtttcattacatttaacatggaacataacttgatatttttttaatatattgctatattttttattaacttggttaaaaaaaatcaaaacgacttataatataaattataaaatagaggtagtgcatgtctattcaactagaggatacctcgcatgttgctgcggaatatttgtattaaaataaaatttaaaaattcaagtacactttatgtgattaaaaaaatagtaagaaaagaagggaaacagaggcaacagagactgcagtctaaaattctggatgatactgtagcaactttttgcaaggaatataataatagcaatgctntactttgagtacattgagagnttgagatctcatataaaacaccatcatagt

SEQ ID NO: 14148 - DNA, 484 bp, Oryza sativa
  unsure (1)..(484): unsure at all n locations
gcgcacacgaaagagtgcgagagctcagaagatcactctcagagtcccctacctggcgcgccagatgacggagcgtggggctcctcaccgggagaccgcgctggcccccctttgccggttcggccggngactctgggtgagactctaagctcccaatctgtggaaggttcgcgagacaggaagcacacaagacgccggcgatgtatacaggttcgggccgctcagaagcgtaataccctactcctgtgttttggtggatttgtgtatgaaggaactacaaagtatgagccagcctctccctcngtctaggttcccaatctgganaagtccaatcctcctctaagtgggcaaggtcctccttttatatcttaaggggataccacttgcaccatntccctctnnttttgtgtggngacttactcctccttttcataaatggacggagaattgtatagttggccgtcgagtcaccttctgatgggac

SEQ ID NO: 14149 - DNA, 444 bp, Oryza sativa
  unsure (1)..(444): unsure at all n locations
nggcgagttccttagaaggtcgattatcccagttgggtatatttgtgttgtgtgagccttttntgttttgtaagtagcgtcttttaagtgtttttggggagaatggtgttttagtcttttccccatttttatacctttttaatgaaattatatgcatactcatgcatattaaaaaaacattgcggatattattatttatcgcttgcatttttgctttagtttactctcggtctgtttttatcaagaacttgaaactaatatgaaacaaaagtccctgaattttctggaggggacataattgacttgtatcttgccattcaggttttgtagagccattgattaggaatgtataattgaaatacaccgaaacaagattctcagctcaatttctagttaagttgtagtttcaaattaaaacaacaaaagcctagcatanaattagaa

SEQ ID NO: 14150 - DNA, 387 bp, Oryza sativa
  unsure (1)..(387): unsure at all n locations
gccgcgggcactgttcttatcatgtgatctatagaagtctaaaacctaccaccttcactgaatatataaagaattacacgtatctttgctcccgatgagaaagggattacgatngattggcttcctttatagcttttctaccgcgcataccatgctgttttgcaataactaaggtcaaagggagggagaacgaaagcccatgaaaaaaaatagaagggtggcaccattcaaacacctgaaggatgtcacaaagaaaacaatttcggtgagtctctactgtgatgataaagggaagtgaatgatgtaccatacaacttctttggagcatggatgcaagcatccacactgaggtgagtacacatgcttctgtgctaggtttcctctttt

SEQ ID NO: 14151 - DNA, 445 bp, Oryza sativa
  unsure (1)..(445): unsure at all n locations
atcacaactactccgtgttaattcaagtgttagtgtgatggaagctgctgttctgtgagtctatttatagcatggagatcgatgaatcgatcagaatatgtgcatgcatgcattggagggaatgtttgtgtgtataattaattaagaaattctaatcatttttagcagcttgattatcaaccggcagaacatgggagcacgatttgcagttatagatcatcgatcgaacaggatcgagctatacagaagttgacattgccggggtcaacggctaatatagctccgacaatggatatgttcgaacgggcgtctagattaggggtatttagttgggttgttctgacggcgttttgcgaggaanaataactcgtttctgaagatctccggtcgatattgtctgcttcttgcacgtttggtttgacatcatgaaggtacgtataatcgt

SEQ ID NO: 14152 - DNA, 481 bp, Oryza sativa
  unsure (1)..(481): unsure at all n locations
acccagagtcacctgcggcatgcaagcttattgatctggtgccgcagtaccctgtgctgttttcnattctttcganatccaactcactccctcttgggttcacatgcgcacgcttcctaaacggtatattattntgcaaaaatttactatgtgaaagttgctctataaattcatatttatctatttctntaaaaaaattagctaaatacgtaaataattatacgctaatgagtcgctctattttacatgcaatacagattagttnccatcagtagccacgaacgcataacgggacgggcattctctgcccgtgtaaataactttaattttgtgttacgataaatccagcgaagatagaaacctccgtattttgattgttgggagatcattgattccgggaaaatattttctccaaaaaaaccagagaggatttgatgctcctactgaaagagactaaattgtcatttgtaatcgtttaata

SEQ ID NO: 14153 - DNA, 484 bp, Oryza sativa
  unsure (1)..(484): unsure at all n locations
tagtggaaagcaggagactcacacttctgagctagtcttatgaatgcttagcctgattntctcaggtttggctccttcaacatcaaagatggctctcaagttcggttttgggaagataaataggtggagaatgcctgtttaagagaacaatatccttgtctctataacgttgttaggcataaacatgcaactatttcagaaattttccaaaccagtcctctaagcttttcttggcgtanggaccttactggctctaagttagtagcgcggaatcaccttctctcacgcatcgctaatattatattatctcacgaccaagatgagtttaaatggaatctaaccactgatggcagattctcgggtaaatctctctatcttgcgttggtggagaccaatgttcccaatataaacaaaagaatctgaaagatcaatagccccctaaagattaagatcttcttatggtacttacgtcgtggagtagtct

SEQ ID NO: 14154 - DNA, 371 bp, Oryza sativa
ctgttggcaccttgccacattttgtttcattttatacattgactgttttcactatgcaaagggcacacttggccggcatcgcattccatatttccaacaccagcagtatatttaaaagtaggaatcttctgtctcataaaagaatacaaatattaagctgacgaagccattataatattttaactggaagacgcttaacccttttttcctttatttatattatttcaggtgaaattctgctgctgagatcatctatgaccttgttgatccaaatgctaatctgatattgtgtgctgtcatagacccatcactcaatggccaagtatgtcacagaccaacatatactcgatataattttcttatcaaatatc

SEQ ID NO: 14155 - DNA, 464 bp, Oryza sativa
  unsure (1)..(464): unsure at all n locations
actaagctttcttaattatcctggtagntatgtaatcatgatgtgttattgcttgnttagcttcttaattaatggtggtctctatcccgtgaggtgagaccgtgaggccccactggaggaaaagcttgggggcacatttttgcattgtttcctctttttgtgttttcttttgagtttgtaatcgtcttgtttgtagaacgcgtccaagtctacaagtccagtcattttaattattgacttgattattgcaaagttttctggatgagcagctgaacttcacgcgtcgaaggctctgtttgttctgggggacagaggcgattgtgtctcgtttccgcgcgcacgctnttcaaactactaaacggtgtcttttttgcaaanaatttaattatgaaagttgctttaaaaaatcatattaatccatttttgaaatttacaatagttaatactcaattaatcatgagtta

SEQ ID NO: 14156 - DNA, 364 bp, Oryza sativa
ggtaaccaccgacactactcactggcccactataacttgacccatcgtcaacatctggactgaactataatcttctaatctatgggaagttggagagactccgttcacacacggagcagtagcagtgtatatgtcagctcaacactgtaacatcagaccgttctggagcttactgcgaaagataagcatggaccacaggagtattctagacggacatagccatcagtatacggtccctcgatgctatagtacaattccaatatataaatgacacttgatgaatacactgatcagcatattttccgagcgtcttgttagctgtactccgtgtgactacatacacataacgatatgagtgatattg

SEQ ID NO: 14157 - DNA, 421 bp, Oryza sativa
  unsure (1)..(421): unsure at all n locations
acctgcggcatgcaagctntctntgcaacacttctcatttctagtgcgcacgttattccttanttntccgcgcacatgtttgttaaattntgaaataatatattntttntaaaaaatatttcttaaaaagatatattaagatttaccttaaatattatctttactaatatttaattaattatggattagtgatcatttcgttttacgtacaaaatatccgtctcatctataaagaacacagtcgtgttcactgtcattncttttctcttctttcgccttgctgagttgctatctgccattagtagtactagtactatgtcccacacgagcatgacatgatatgcctgcactcaactgatatgtttgtcatggttactggttgatcctcttcaactgtatatgacttctgatgcctaataac

SEQ ID NO: 14158 - DNA, 465 bp, Oryza sativa
  unsure (1)..(465): unsure at all n locations
tgcanatatgcaagtgccaagtgatggcagttgccatggtgcttgccttattcaaaattaagcttcacatatttatcattcaaaggattatgtgtgaaacaatttacttctgtttagcattttgatatcttcttcaagcacatctttgaactagtttcttatagaaagatggaagtgtcatgaacgaaggattaaatataaagatgaaagaaatttagaaaaaaacaatagcatagtcttcaattgtcatatgtcacagtactcaacccatggcatcaactcctaaaattttaagaaggctgacctttagaacattaacaagaattgtttcgctattatcctgcagacgatcaggtcgatgaagtttatgaggatcaagtccgcacaattccagcatanttggaacctctangcactgcatatanngatatnnnttgtaatatgtccattaaagtgtaaagatat

SEQ ID NO: 14159 - DNA, 467 bp, Oryza sativa
  unsure (1)..(467): unsure at all n locations
tccttcagctgacttatagtatctgattatatctggggatatattgatcagagagaatggaacaactgctgaaatttcaatataatacagcntatgcatcaagtgacataaccaagtaaaacaatcccaattaggtattcatctcaaacctgttggttcacttgatttacgccactcagttaatgcattagacaaggatgttgcctgcagaaatagaacaatctttagtgccaacaaggaaatggttaaacaagaaacatcttttgtcaactgttattctataagggtcaaatgaacatgacctcttcttgcttaagcacttgtgaggcaagtttcagctgagcaaagtatctggaggtcaaattaacatgggaatgtacattgaatatactttcaattctcagatcncaaatgaatcacacggaaccttgtagcaagcatgattctctctactttgcagattaata

SEQ ID NO: 14160 - DNA, 476 bp, Oryza sativa
  unsure (1)..(476): unsure at all n locations
ttgngccaattctcatatcgtgttggtgaggaccttgctcatttacatgcatactaaatatactgtgctcancctttgctatgtagctggtattataatctcttgttggacattactttggctgtcaggtcctggtaacttttgtttggtgcatgttagtcttgttccagttctgaatgttgttggtgaacaggtaccacactgttgattcatttattatgttgtactgtttattaatccatcttatggcttttatggtcttattttggtaagttggtgcagtcgcaatacatttgacaatttcctctacatctatgctatttactcttgtagaaaactaagccgactcaacatagtgtccgtggattaaggggtcttgggctcacaccanatattntagcctgtcgcagtactaaggttagctgaaaattntcatttacctttattctgtatcttggtagtccctgaatcttttc

SEQ ID NO: 14161 - DNA, 309 bp, Oryza sativa
  unsure (1)..(309): unsure at all n locations
agctngtgaataatgcaataanaaatctgttctgcttgtcttgacccactatcttattggcagggtctcttctccagaaagaaagtcaatacattctccaaatcagtgatgcatctgtgcgttgatcctgtctgacttgctgtttctcacgttgcaacagaagcagaccttggtttaacagatgcctacataaatggctgcttctcttttgttaataagagagaaggcgctttgaatcttttccttgtaatactatataatttagatcattaactttcttggataagcaatattcatagtgctatttat

SEQ ID NO: 14162 - DNA, 482 bp, Oryza sativa
taagataccaatgcgagttcatactcctggaggtggcatgttcacaactcactactgcccatcaatgacagttgaaattcaagggttgatttttccagccaacctcattcttcttgagtccaaggaccttgatgtcattcttggaatggattggttgacacggtacagaggagtgattgattgtgctagccgcaccatcaagttaaccaatgcgaaaggagaagtggtaaccttccagtctccagtgccgcagaagccagggatcagtttaaaccaggctgctggtgaagaacaagaggtagcagtggagaaaaccactaagaagttggaggatattcctatagtcagagagtatccagaggtttttccggatgatctgacaacaatgccaccaaaaagggatatcgagttccggattgacttggtacctagaactgcaccgatccacaagaggccttacagaatgagagccaacgagttgg

SEQ ID NO: 14163 - DNA, 483 bp, Oryza sativa
  unsure (1)..(483): unsure at all n locations
tgtgatattcaacaacatccagtgaaatccagcataactcagtttcgtttcagcttgttgctattggtggttaaactaaccatctgatccttaaccctgtaccaagcatgatattgcaattgagtgtcactactattaccattattacaactaatgaatccattcgttcacatgggacatggtggccggttntttgttaccatcagaagtgcgtcagttatgcgtcaagctgacggtcttgtgttctctttggctgctcttctggacatatatgcttgcaagtagtaggagtagcaattctctattattacctgctctgttgctcagctntgccatttcttgcccctttcacctgccatttttcttcttagcatgtgtttttcccctgtacgtcaacgtcaacacattcaactcttcattacgaattctnccatattaactctcacctaatatactttgtcaatctaaatcccttcctgaatt

SEQ ID NO: 14164 - DNA, 298 bp, Oryza sativa
  unsure (1)..(298): unsure at all n locations
ggatcattntatgttcaatcatgtacgttngtatgttacttgaagaacatcagtagcgtttgtatgttataaacatgtggaagttattaattttttaataatagatctaatctaatggtgtaaaataacgggtccaccaatttaagtgaaaatcaacggtaagattagatagtgccatgtggcgacttatgagtgtttgtatgagtgccacgtggcggctttagagcgtttgtagaaagtttaatggacttttagtatataactaggaaggtagcccgcgcattcgcgccggcatata

SEQ ID NO: 14165 - DNA, 155 bp, Oryza sativa
tggacgctacttaattgctctgactcatagaggatgcttctctactccggcgacaacggcattcagccgcgagctacatagctgatggtcagacgtgagcgagaagaggaaatatggtgaattgaagagagctgagaggtagcctattgcaagat

SEQ ID NO: 14166 - DNA, 441 bp, Oryza sativa
  unsure (1)..(441): unsure at all n locations
aagtgagttcaaggaggatgcgacatgacaatttatctattaattaggaagagttagttagtttccttttatttttacgaaagtgtgtttagtgtctttaggacttgtatcttttcttttctctttagaaaagtttatgtcttgtccaataaggactagtatctacccatgggtatagatatgtacacatggggtctttgtaatctatctccatagatcaatacaatatattttcggcacatcgccacccttttactttcaacgagttcttgtttcgagttgggttgcatcggttntgatctcagacaaggggtaaagcttgtcatggcggctggtatcggcgggattagggcttacattattttgacactctaatctagctaatgcatctgcctatntatcatatgtcttagttaatccanatcgatgaattaattacct

SEQ ID NO: 14167 - DNA, 303 bp, Oryza sativa
  unsure (1)..(303): unsure at all n locations
gcaagctttgcngtgatcctagagtcgccaaccacctctatctattatatagcttaacctagatgtgttntgataactgaaccggctagcggagccgatttctatataactacccgtctcgtgggcaaaactgaaggttttcatgacaaacctacaaagagatgtcgcactcttgcatcggcggcggacggtttaccgcgcacactgacaaagatggacaaactaagagaaaacttaaagcaatatgaaaaaacgattcgattgattgattgtagattnnggttttacaatgaaccggccatg

SEQ ID NO: 14168 - DNA, 184 bp, Oryza sativa
  unsure (1)..(184): unsure at all n locations
cgcttcggtagggtgtttaagagagntttcactaaaatctactcatctcttatcactttcttaatctaatttgtgttttcttgactgtcacgtgcttgaagaaaaatatcatataatccatccgtttcataatgtaagactttctagcattgtccacattcatatagattttaatgaatctaga

SEQ ID NO: 14169 - DNA, 262 bp, Oryza sativa
cgcagctgcagcttcatccgagaggggctgactttggatgtctgtttattcttgaggacatacaccctgagtggctggcgaaccctgtggtcggtcccaaggcgaacagcaagcttctgatgtgcatctactacaccgactctaacaaggcatgttctaaggatccttaccccctgcctctcatagatcagatcgtacactccactgcggggtgcgacctcttgtgttgttagatgcatactctggtaccatcctatcccat

SEQ ID NO: 14170 - DNA, 486 bp, Oryza sativa
  unsure (1)..(486): unsure at all n locations
tnncttaaacgctctcaaaccgccacgtggcgctctaataaattagagaaaattctagataatctgaaaaaaaagaaaaacatctatccctcgattttcacttaaatcggtgggtccaatattataaaccgttagattagatttatctcaaaacaactcctctgttccattccatatataggtacgttactgcttgcatgcgatctgttaaagggggtgcatgcacgtacataacctttttttccaaggtacgtgactattctttctctttttttccggtatataattgagataataataataatagtactaataataataatactactaataataataattagtgataataaattttgaataaaagtcactttacaaatatagaatataccagcatacaaatctttacaagtgaacataaataaattagctctacaatatttgaaaataaagtttacaccattatattatattatgtacccatta

SEQ ID NO: 14171 - DNA, 245 bp, Oryza sativa
  unsure (1)..(245): unsure at all n locations
agagcgaccgcagcatgcaagctgatagacctntaggatcacgagcttcacaattttcttgtggctaatccataaatacctacaacgcttgtttctgttagatgctgtacagccacgagatgataaagtaacataacatgagcatacttctataaatcttaactcttgtagctagtcacagcacgcattactgtctcgtccttatggagatttcaaactagcaatgcatatgatttcagcatttg

SEQ ID NO: 14172 - DNA, 424 bp, Oryza sativa
  unsure (1)..(424): unsure at all n locations
gtgtcagttgctactagtatttgacaatattttaatgcgacatattaaaatttcagcataatgaagatttctgaacagaatgactagaagctcacgttcgttaaatcagtgagatatgaagtgagataagagatagtggatttattgaggagcaaccttagcatcgtgttgaagcaaaangttgactgtctcttgctgtccatgaccagcagcccatatgaggggtgtgccggcatcgctttctgattcaacatcaacccccttggagagaaatagtttcataaggtccaggttccctgcagatgcaaacaaaaaanaaaggagagtggtgttggacgcatttatagaggcgttggcacaatccaaatgggagaaaaaagaanagagtatagaccatcaatccattggaagaatgaagtgaaat

SEQ ID NO: 14173 - DNA, 268 bp, Oryza sativa
  unsure (1)..(268): unsure at all n locations
acgctcaaataatctatagtcaatctaattttttattttacaatagntcactataaatatacactatgggtgtgtttggtaggacttattaacctgcttttccttttgcaaaagtcaagagtcaacctaaggacccaaaagcataagtgcttttgctccaagtgctcttgatggaaataatacccacctctgccattatgaaaaaacggtccgatattctttttctcgtctcctccttctcgcgagtcgtgacttcatggggcgagcg

SEQ ID NO: 14174 - DNA, 464 bp, Oryza sativa
  unsure (1)..(464): unsure at all n locations
tgcanagaggaataagaaagatacggtagctatatcgatattgttcttcttcaagagtgccacaacacaaagacccaaatagcttggaagaacaaggaagctagcagcaacaaacctgttgaagatgatctacaggtttccctctcaatatgtgagcgagatcagcaacttggaaaatctacctactctccatagtgctatctatctatctatcagctgacctgttcatctgctccccttatataagagtagggagaggagtatgccagtcttaaagagagggaggctctcatgtactctgaatcttatgacctaatatgtgtgaacagcaaccactaagtactggagataacctctgtctctcccctctatatagccccccttctctctctctncacaactctgaaacttctcattttccaagagagtgtgactaattatcttcagaaacttcacaactgaat

SEQ ID NO: 14175 - DNA, 340 bp, Oryza sativa
tgctatgtgctatggctcatggcggcgatcgaatacctgttaaccgtgaaacgctggccacactactcgttgatgtcggatcatagtgacaaagtctgcaagctgtgcatcaacatggtgctgccattgccgtgactgtaccacatgaacttacaacatgtgctggacgttccctgcctgcatactacgtgtattcatcctgcggatgaatatttccagatccactcgcaaggagattgagcaatgcgtccaagaggattgagagcgaccacttgaactgaaggatcgcgattaatcgcaccgcactactgcggacataccaccggctgctatatgacta

SEQ ID NO: 14176 - DNA, 320 bp, Oryza sativa
  unsure (1)..(320): unsure at all n locations
gcttcatcaccaaaattcttagtcacttttcttattttatcaacaggaatgatggggactgcaattggttgcactttcacaggttgaggacctcttggagttggatcagctgngcgatatgcatcgctccctgcagacaaattgcagttcagtaaaacctgagcaccatctgtaaaccacagtatgtaatgggacactgcagatgattataacaaaaggcccagtgccattacttgctggatggntccctgngtatggattcctgttgtctggtacttcttgagtatcttcatcaccacagcatgcatagcacgacatat

SEQ ID NO: 14177 - DNA, 386 bp, Oryza sativa
gtgtttggatcacggagttcatcgaagaaaggatggatcaatgcttccgactgtaatggccaataaagaaatgcacaatctgtaactactaatacttggcaaggcagtgcatgtttgtatgatgaagtaattataaaaatgtaacacaatagtgatgccaagaactaaaactttctctaaaaaatggtgttggctcaaatagtgcaacgacaacactcacagcagtggaccggaggtatggtgaatactgcaaaagcctggagacgagatcgactgcttcagcaagcattcttttatggaagatctggtggtaaaaaaaaaggaaagctacattatgtttcaaccctaaaataaaaaataaacagtccaacataagattattttct

SEQ ID NO: 14178 - DNA, 59 bp, Oryza sativa
cacacacacactcattacacttgtcacctcgtgctcaatggacagaacacatacccacg

SEQ ID NO: 14179 - DNA, 426 bp, Oryza sativa
taactaggctcgataacacacctggacatcaatgtatgtttttcttgaaacatatgatgcggatgatactggattcgaatagacacgagactatcctcggacttcacgattcttaaaccagaacgcatacaacgcggccgaattgtgtccatgatatacatccaagtatatactcaacaacttatgccaatccaacatcggtctataacgcactgctttcaacacaaatcctacatatatagggcttggtgcacggccttcaacaagcacactaggaccttgtttgtctagatagctaccgaagcgctgttactaggaatctacactacactggacttctccgtgcgtgactcccagacacatatcaacgaaggagtactaccttcggagtgcgatgagctgctttactaacacatgctggacgac

SEQ ID NO: 14180 - DNA, 215 bp, Oryza sativa
attccctctgtgggcttgttttaatagtgggaagaattgaaaaaatataggatttttaccacgccactcttgtatatattacacaaattgtggagttcaatcagatcaggactctccagaagaagggtacgttcggggctactaattttgtttgctattgtaaatcaataatattttgcattagcaacttgcaaatgtttttttcaggaaattat

SEQ ID NO: 14181 - DNA, 470 bp, Oryza sativa
  unsure (1)..(470): unsure at all n locations
tgggatatttggaagcaccataatgactgtgtttntaatggtggcatccttatgtcatgttctatagcaaatgagagtagttatggtgtttagttggagcgcatgctttgctggagctccttgtgaggttgatagcacgatgtgttttagttgaggtttggtggtgttgtgtgttgtgttttggagatgatcctttcgacctctcccgtgtatttgttcctcttcttcttaatgaaatgaggaagtatagtcctcatgcaaggaaaaaaaagataacactaaaataaaagatcaataatattcaatcctagaggacttaaaaaacaatggatggaacatttccatggatatgtgaaacttaatattgatgtagcttttcatgcggacgaataatcaagcgtagccgctattntactatgtgatgaagcataccaatntcttagttgccatgtgttcttataccacatacg

SEQ ID NO: 14182 - DNA, 390 bp, Oryza sativa
  unsure (1)..(390): unsure at all n locations
agcttctgtatcgctgatagcaaaccggcgtgtctgttatgcataacacacacatttggtctggtttcaacaacacacagtttaatgtgccgcanaaaccatagccagcttgatgtgttctcgctnttaacaaatgcaaaagcaacaggaacgacatggctatccgcgtcgactccgatcgcggttagaaatggtcctctgtacttgcctgtcatgaaagtgccatcaacacagagcaaaggaatgcaatttctaaaggcctctatcatgcacccaaatgaccagaaagcccgacgaagaacattctccccatattcattcacctcatcgagaatagccatgtgtgtgcccgggtttcttgccttgcatcacctcaatagtgggggaaga

SEQ ID NO: 14183 - DNA, 256 bp, Oryza sativa
ctattacggaccttagaaactcaacttgctatcttttctacagaagttcatagattggttgagttgtcatgcatgattaaatggtttaaaccatattgtctatatacactcacaagcaagcacgcctttaataagagtatacggaagggactactcaataatttttattcaaaaactggtcaaatgtacatacagtgtaaatacatctgagcttatatgttactgcaggctaattggttctaacattctgaaaatt

SEQ ID NO: 14184 - DNA, 446 bp, Oryza sativa
  unsure (1)..(446): unsure at all n locations
ntgtcggcaggctctagttaccacgctaagaaacatgatcatgtgatgcgcacagtttgtattatagggcctgctttggagattacctatttcttttcactggtaaaaatctttccacctgtaatttgacggtcactaaaacctacaatcatgtgttttatacttttattaccccttaaaatagtactgtatttgggtatagtaatcaatactaccgtatgatccactgcatcaatgaaaataggtgcaggtgccgtcacaagtaccggccaggttgtagacgacgacatagctagagacgtactgtagcagaaacgctggctggagcgaaggaaatcangctagatttatagccaactgtaacacggattctaatacgttgtgtgtatgagatgtgggactatatattaatgcttaanaataactattatatgaatgagctatta

SEQ ID NO: 14185 - DNA, 488 bp, Oryza sativa
  unsure (1)..(488): unsure at all n locations
taaggagttagtgggggataactntatagtaagatatgattcgtacatccacatgtgctagtatgggatggcctaagctgattaatatatttaggactagccttgcattctggtaggccggtgtgtatgaattagtcgataattctgaggaattagtcgatgattcagaggagcttcctatttgccccgacgtggtagtttaggtgactaagtctgtccaatacaacggtattgtgccacgtgggtgggttcccgttgtgtccgccaccacggcgttaagtttaaggcgtgggcccgccacttaacggttctaggtcatataacgtgtatggcttangatggagtaacacgtatcgtgctggtgtaaggctaaatcatgaattntgganaagctntgttgcgggtaataaatcgggtacttatgtatcgcgtgccatgcctcttgcatgatattatttcgcatcatgtgggtaaagtgtacaaactct

SEQ ID NO: 14186 - DNA, 476 bp, Oryza sativa
  unsure (1)..(476): unsure at all n locations
tgcagactnttgtgctcgacacaacaagtttgaataattcttttcttatagttcttgatgtgaccatcgatgttttcgatatgatcacttgaggcgatcctcttaattgtccgaaatgtggcgttatgcaacaaaattgaagtactcctactacattcagaagacgagaaattttcattctggagtaacatagtatggctgttgtgataatttggatctgacattggtgctacacatcgaccttttcttcgtgaaccttgagtttttttaaaggatagagtatgaaaaaaaattactaagattacggatctgatccgtggtcgtgactaggaaaatgagaaaaatataccactatctacgccccgtcatcaccaacagaaagaccgaatagaatgctagcattagagcagctgtcgctaggccaacaaaagaactacaaccgagaatcgccagaacccaacccttacaaccaacac

SEQ ID NO: 14187 - DNA, 327 bp, Oryza sativa
ccccctataaggtgggtgttccgaatggctgcgatgaggaaagagggctgttgctccggtgcttctcgtgagcggtggtggctgactatgatctccgctttctcagagccattccttgatgcttcacatgtggtgcttcatattggcttggacgccaccgttttgcagccgctgatttgacgtgcctgtggaaaacgcgtgggactgttgagctgatccgcgtggctttctgctcgggtagtgggcacgtgaatctgactgcattgatggatttcacaataggtctgaatggtcattgctccctttctcccttcctctcgtttcggc

SEQ ID NO: 14188 - DNA, 143 bp, Oryza sativa
gacgtggatctgtatgtcaacaattggtcgttgtgtaccctggctgggcctggatagggatttaatgcacattcagcttagaaattctggttcgtgaatttctgggcgtgacagtggatctggtgacggctcaacgacttata

SEQ ID NO: 14189 - DNA, 481 bp, Oryza sativa
  unsure (1)..(481): unsure at all n locations
taaggaagctcatgacaacctcctttccactactcaacatggagttctcattgatgttggcatatcttgtgatttgcttgatgatagtgctatttgccatattgctcatgttgtatcatctagcatttctacctcttgtgatgatcttgtggatatgcctagctctagctctagcacttgtgtttctatttgtgatgcctcacttgttgttgagaacaatgagcttaaggagcaagtggttaagctcaacaagagtttggagatgtgcttcaagggtaagaacactcttgacaagattttgagtgagcaacggtgcatccttaacaaggagtgacttggattcatttcaaagaagggtaagaaagcttctcaccgtgctactcgttntgtcaagagtaatggtaagtattgctccaagtgtcgtgaggttgggcatttggtaagccttccaagacttgcatgnttgattctcattatatgc

SEQ ID NO: 14190 - DNA, 459 bp, Oryza sativa
tggaagagaggcaagggttgtttgcaaatcttttatttgaagacattttgaaatcactaagtgatttatttctttctaagtttgggccgaaaagagacttgcgtctcgattcgactttaagagatgtttttcaacagctcatttggcaatgtaccgacctcccgggtcagatcattacttctcggctcccagagccattccacttgattaatcggctcccagagcctttttcattttctcggactcccagagtccagctacccagcagcacaacaatccgcttccactcgggaagcctagtctatgatgcccgcagacatcccgaatcacacagattcgtttctgaccactcaggtcgtccatctgccacataggctgattctggttacgattcccacaccacaacaacttttcacaaagcacaggcaaacaaatctacgcaacgggaaccacctcaca

SEQ ID NO: 14191 - DNA, 371 bp, Oryza sativa
  unsure (1)..(371): unsure at all n locations
actcaagctctgcgacttgctgtgcgacatgcatgtatgcatgacttgttgtgtactatatacangtgcangtgaccatcggtgttttgtgtatcacaccttgacgccaatctcttccttgttctatgacgggtgatacgcgtcattctagcagtatgaagacttcgttctcaatacgacataatctcatactggagtaacatattgtagggagcttatatgatccgaatctgacataggagctgatcctacatcttgttcttctgatccgtgaatatattttgaggagagacgatgaaagaatgatcacgaagcattctgctcttacgctgtgcgacagggttgattatgacatgcgcatgcttatacct

SEQ ID NO: 14192 - DNA, 363 bp, Oryza sativa
aactacaactagccaacactatactgattgaacattatctcctaacattgcacgcttatatgtggttaaactagccagcactatgatgatccgtgtctcttcgccctttcgcgcgcccgcacgtctatcaccgccctttcaccagatccctccctcactaccgtcgacatcgatcctccccgtggcccacgccgtactacaccaactccctccccacacgcgtcgtcaccgacctagtcgtacctagctgccagatacctcctttcctcctccattgtttgatcacattatcttataaagacaatattacatattggaatttgtgactgatagtgaaagtcatggtgcatctatgcaatgaac

SEQ ID NO: 14193 - DNA, 421 bp, Oryza sativa
tgcctccgtcgatcatcgatagagcaacgtgtttacgcctgcagcagcgtctgcggcggtcgacaccctgcctctgccgctaaacccgaacgttagctgcctgaatgctcccctccccttcggcaaccgcacagaggccaacggaaccggactcatggaccttgccgggacgccgttcgccttctccgggaggaacacgctgatggccgtcggctgcagcaagcataaccacctgcgccaccgcgtgccatggcagctcagacgccatcgctagccactcctgcagctcacgacctgagcttagactatgcaatcggtaacaacagcagcgaggaagcaacaagaggcagcagcaagcttgctccaccggataaatgcaacgcgaatgcttcgactcgctcggggagagggctgtctctgc

SEQ ID NO: 14194 - DNA, 511 bp, Oryza sativa
aacccggatccttaagtcacctgccgcatgcaagctgctgtcccgggcaggagatgcagatctctcttgtagccacatgcgcgaggaggagtcatccctgtggagcatcgcgtcgcttggtcaaagactaagaggagctctagctctccgacaacaaccggcgtgcattgatcttctgttccgccgcgatggcggcgccacggcccctacccctgtactcacacctcttgtcttctccgagctcatccccaccccttcatctccctatcttctctgatcttggccgagggggctggctctgttatcctcttcatcggtgagggtgtattatatggaggattacatgggaacacattgaccgattgacacataattctatgacggtgcagatggatgcatatatcaagatcagcgtgactggtgtcctctgcctagctccaccattgttggcgccttgcttctcctttgaagcatggccttggcgagcccactccactttgcttcatgactc

SEQ ID NO: 14195 - DNA, 479 bp, Oryza sativa
  unsure (1)..(479): unsure at all n locations
ntcactgaagaagaaaccatcaaaagcttcactctatactacccgaaataataacactgcaacactcaaatcctcctcaattcatcaccttaaacctgtctctctcaaacagcttattattcacaacccaattatcgcaattagccataaacctaaagctcagattgctccctccttgcaaagccaaactccccccacatcacctacctccaacccatttcgccatcaccgcgaaaattcaggccagttgatgacgatgacgacgacgcagaagaacagacaccaaccaatgcaaaatcaactaagtgatgatatatatatggcactttactcttgtttacgccggtagctatcatcaatcaagaactctactaatgtaagcataacaacaattgaccacgtacaattgtgaacggcgagctcgtcggttttctcttccatttcgacggcgaggnggggaagggtggcaatgttgtctt

SEQ ID NO: 14196 - DNA, 484 bp, Oryza sativa
  unsure (1)..(484): unsure at all n locations
gcttcttcttgtctttcttgaagtgggggctatccttgttgtgtgggcaatcgtcaatgaagtgctcgggctcgttgcacacatagcacacccttgcggagtgtcttccacttgacttgttggaggaatacttggacgaacctttcttgaagaagccgctttgcttcatgaacttgtcgaacttcttgactaaaagagccctctcttcatcatcgatcttcgccttgctcttgctcttgctcttgcgactctcttcttcttctttcgtcgccttcnatgccaagtctttccttctaatgcctgtggttgacggttggttgatgtattggatgaccctcttggactcttgctcaagcatgtcatgggcaaagatactcccgagcagtcatgatgttgagagtcttgagtccgacctcacaatgatggtcccaaagtgagtccttggaggttgccgaccatctctgacacacctattggcatgtct

SEQ ID NO: 14197 - DNA, 435 bp, Oryza sativa
  unsure (1)..(435): unsure at all n locations
atatataatgagttctggataacgaaggaaaaatagagtctctacatgtgaaacgacacaggactacctctgattgtatccatattggtcctcctagatttacttggacaagggggcatctatgggtataaatacaagccccctatgaggagagaggactagcctcaagacatataaatcaacatagatcaatacaagccaacacatgccacgataagccgcacgatatcgatattagagataagtctagacaaaccaaatatggtgtctgctgaggccaacaagatggatctagcgctatctttgatttcgctgagtgcggattcgatgatgaagactacccttgcgttcactttatgttggatatccataccgccaagtngacgatagctagactaagttatccaattatttgataggtccgatcgtgatgaa

SEQ ID NO: 14198 - DNA, 280 bp, Oryza sativa
  unsure (1)..(280): unsure at all n locations
tgcgctgttgacatgcggagcccacatgttaacctaaaggagcgccgttnacctggtacacatagacagtccaccggtcaacagaagcggaccccgtgtgtcaaccgaggcgagtagccgacaaacggacttcactagacaccacgcgggctgcacacgtggaaaccactctgctaccgagcgaacacacttacacggacactacactgtcaccacccgcacacgtgaacgactaccgacacctgttcaccggtaccggggtcgaacaccgcacaactgg

SEQ ID NO: 14199 - DNA, 431 bp, Oryza sativa
  unsure (1)..(431): unsure at all n locations
tcacaaaatcaaactatcaacgaattgaacgacgtgcgatatgacgaggttgttccacgtccagcgcacacatcctaaatatatatagataaaaaaaaccacgttatctcgccattgcacatgttcgttgatagtgtgattttgtaaacatcagtaacaaaatatatgtaggtaagtgttaaaatatgtatggttttctatattgaaccaatttacttgtgatataacaattgatactacaatttcgattagatggtgggggcgttctggtacctgctatcgatcgagaggctggacgactgctggagggagaactgcagggtgctcaagttccatcagtgcaagaagtacatgtactgcggaggagggaacctgtggcagtcgggtttcctggagtggaggacgatgatccngcacgtgctggtgatgga

SEQ ID NO: 14200 - DNA, 401 bp, Oryza sativa
  unsure (1)..(401): unsure at all n locations
agcttcagtgcttcacacgggtgatgatacaatgtgtttgatactccacagggtaattattttgtgctgctagttattgtacctaatcaaccaggcaatgcttggccaatccagagtaaagtattgtgtatagtatttatatattcactcttttgaaaatttgaattttcgaccttaaatttggagttgatttggggtnntttttcatcgaagtttatttttcagcatttggctttagatcgctaagaacacgtatataaaacagtttattaccaaatatttttcgtttgtaatatgccgtttcgcttatctcccaataagcgaaacgatgggtctgtagtttgttagctggcaagctggcctgtttgtggttcaagtctccactgatgactgatgaacca

SEQ ID NO: 14201 - DNA, 264 bp, Oryza sativa
  unsure (1)..(264): unsure at all n locations
tacacacacacaaacgcacagatgtgcatctcaagcaacagctcctctccttcctccttctactctccctgacgtctctcctagcttctctctctctctctcgctgttttgtcagtgcaacaaaccccaccacgagcagtgccattcagaccttcacacacacacaccaccttgctgatgccactgtccatctctgcatgctctgaccctctcccnctctcctagcttcgtaacatcccttttgcagctagcttctctctctcc

SEQ ID NO: 14202 - DNA, 415 bp, Oryza sativa
agcttggatttacatatagaaccagtgcatgatgtcttaacttagttgtaggcgtgtcttcaagctgactccataatttgagtacatatataatagtctagtttagtatacgtgctatgtatatcctatcggttcattctactttacatgcgagtggtggtcgatcgagcagagaaacttgtgggttcgtccattcttatccgtcctcagattcagcctaaagctcttggcccgtcacactcaacctattgatctgaatatttggcacaagttactaacacttgaacccaccaatcaatcaaaatatataaatctaccaattattctaaactacatataagttaacgggttagccgcacaccgttaaagccgcttattggggtctctcacgcaccaggctgcacttgagcggcag

SEQ ID NO: 14203 - DNA, 440 bp, Oryza sativa
  unsure (1)..(440): unsure at all n locations
tttctcttaattngccttgaaacttgatacgaatagtattttggttgttccccaaatagtttgggggttcagtttattagatccgcccctgttttagcataattntgatggtatactttactatatgcgtatttaggcgctaatcagttttttgttttgattctagataccgtgggagcactgaagaaaactgagaaatggatgtttttcagcgattctactgtttcgtaaagcaaccctactgttagtgttggttgtttgaagatgattgaggggtcaaggtttcagaatatgttgggcggtgctggaattggaggtggtatatgttgcagaggaaggcaagaaaacgagatgaatggcttccacaatatgccctactaccacaaggtcggggagagctcccacatgtccgtggataacgccgacaacctgaacatgat

SEQ ID NO: 14204 - DNA, 491 bp, Oryza sativa
  unsure (1)..(491): unsure at all n locations
tgaatcanagtgggaaggaccgtacctcatcaaacacatgtccaggacgggatcttttcgcctagcgacactcgaaggcgaggagttcgaccattcctggaacgccaactctctcaagcgcttctatgtctagaatgggtggcacccaaatcgccaacttgtaaaaatgtacataccatcatgtaagccctttggcactatgtaagccctttggcactatgtaagcccttcggcactatgtaagcctttcggcaacacaaaaaaagaagaaagagagaaaaaagagaaaaaaaaactggatgtagggctattatccaccatggaggcctgaaccagtataaaatctctgtgtcctccgccttctttntatttttcgtgtgattgataatttgtggaaaaaccccaaggcaaacgcctgaatcagcgaaaacgctaggtgggcgaaacgaatcggccgaagcatcgcttgccgaacgttgaaaccgcaacag

SEQ ID NO: 14205 - DNA, 472 bp, Oryza sativa
  unsure (1)..(472): unsure at all n locations
tagggagagttttgttagcagtaatcttgtgtgccacggttagttatttgattagttatctgcatgtttccgtttgttttctgaataaacgcatgagctcacgtgttgtgtgatagccatcgtgtggagtctgttatgagggtatccgagtttagctcgttgcccgcgtcttgtgctgggagctcggatcacgtcgtgtggttgtggggatggacgcagctagagcatggcgtgagaagtggtcttggtggttagttgtttccgttgtattcgttcctttatatatggaagtaaacagaanagcagctgagttaagcgctgcacanaatttgctctgtttcctctgttctgcgaatttgcagggttagccacagtacgcgtgcgttgtgttcgtctggtttcctgctagcgatcgctggggaaattcctaacattctccttgaagtcttcctcannaaactctaaaaatcct

SEQ ID NO: 14206 - DNA, 420 bp, Oryza sativa
  unsure (1)..(420): unsure at all n locations
gcctgccagcaagctgatgtgaagaagttgcaggtgttagtcattattaacagatcatagtattacttgtatttcagcttagactgttngtcagctccctttgttgctctttcgtacaactggactgacctctgcttctcacttagtacaaaaatatgcaacacttctacacccacaaaagtagatatgcttagcaattgtgtatagcttcacatcttaccatcaaatgtgaccacatcaaattgcattctatgtntgatttttcccttaagtattgttgctatgtgtaagttggaccaacgattaatggatggntactcatgtccaacttgtcgaagacctctctttctgtcatctcaaggtcacacaagatctacagcagaggtatgaaacgtccagttaatngcagaacaacttaat

SEQ ID NO: 14207 - DNA, 317 bp, Oryza sativa
  unsure (1)..(317): unsure at all n locations
tgcaagcttcnactgaaatatatcatctagagctacccgacttgctatatcattgaatcacatgtgctacctagctagagctagatcgatggagatatatatatatgtgtgtagttagcccctccatatcacgggccatacctggaacctgtncctacctagttataatntcaagttcagtatactgattgcacgctctagaaataatttatggtgcctctacaaagttaacacgaaagaattgtttatttatgagagtgaattaaccggctagatttcctgttaactggtacttcttcgtttacaatattagttat

SEQ ID NO: 14208 - DNA, 480 bp, Oryza sativa
  unsure (1)..(480): unsure at all n locations
tgcatcacaaggtccacacacatggagtacttcaatgacaatatactctgtcgccaggaatgtcaccgtgaaaaataggctcatagtatgattaaatctaactagattattcatctattggcttaattaaatgggatttattcactttttacctatgaaataacttcttgttgaatcgcttcgtctggttctatttactgagagttangctgtgtttggaagtattgtttaggtgggctaattctcttttttcaccgttaacatgctttccaaactacttaaaaagtgtatttcgtaaaaagctttctatatagtttttttaatcaaataaattaatttttttcaagtctgtagtagttgataattgatcacgtgttnttcctagtagttacatataccaagttcgtttagctagaacggattagctgcaaccgagcttgaacataaacnagataatacaattgcttacagctgaatgaa

SEQ ID NO: 14209 - DNA, 436 bp, Oryza sativa
  unsure (1)..(436): unsure at all n locations
gcttgtagccttgtccatggagtcgctgggaaattttctatttctatgtggcgatatgtgggcgttagccgctgacatgtgggtcccatgagtcccacattgactcanctttgacatgttagctaagaccgggcataatactgccttagaacctcggacgatcctgttntgtatattgagggacccgctatatattgatttgctacacgtctatcgtgtgagtttttcttaggcatttcacgattctttagtcgcaccatatgtgggccaagatttatgccagaattggtgggctgcatgcctggataacgccgtgtgttggatgcttacggccgcggtctcttctaaataaaaatgaattctttaacgggtaaacattaagacatttgaacttagatattaaatacaggcctatataactaaaattcatatgtta

SEQ ID NO: 14210 - DNA, 365 bp, Oryza sativa
atcttaattgctgccatgataattagagcttgtgttgttggtgaagcaattattaaccttggaagtgcttcatgtgtaatgtatgagaaatccactgatagcctaaaaacagccagccgcaaacaatgccgcgttgacctgcgaaatgataagcataataattagtggtgtctaaactttgcgctggtgtagtggtcaatggtaaagaaagaaatagaccagtggcgccgtgcattggatgaagagaatgtggagagaatgataaagcggatatgcatggctttggtgggcgaacatccgcagcgcgagtgccctggcctgtgggcaagcaccgtggtaggcggactgagttcctgcacacatgc

SEQ ID NO: 14211 - DNA, 320 bp, Oryza sativa
  unsure (1)..(320): unsure at all n locations
taactttacatttataaacatttatgcagctacatgcaaaaatattcatacttggattaaataaacttaaaatatatacgataacgaaatttcaattacaatgaaactaaaatagcagatntacaacgatgtaatttaggcttagtaatgtgcaaatttaggtggatgaaaatttatatttttttaggtgattaaagattagcaggcgcattntataatatgatatacttgtataattttatacagtgaattcatttttataattgactacctgttacgttaataatacataatttatcttattaaattaaaatgcatca

SEQ ID NO: 14212 - DNA, 495 bp, Oryza sativa
  unsure (1)..(495): unsure at all n locations
tattacggaactataaaactaagcttnacaaaagtntaaagcgagcgtgcttgatctccaaattggaagctattcaattnttaagatatatatatgtatctttggtcaatatttagagttgtttcgcatgatgtagcatcaagctaaacaaaaattggctgaatttaaagaaatctggcaaacatgaaaacttgtcccaaattacagagataaaanttttttaatctctttttttagggggcaatagaaaggaattttctgaaaatttcaaaatgtaaagcaacaataaataaatattggttaaatctaaacaagattgtataaactcagaaatttaatacgttttgtgatgatgatatcctagtanggaaaaataccctttgtttcgaaattgcagttcanaatatagaaccctggcctaagttaccacagggtaaaagtgtcatttctaanatcttctgtctccatttgagcanaatanaataaaataaaata

SEQ ID NO: 14213 - DNA, 369 bp, Oryza sativa
  unsure (1)..(369): unsure at all n locations
agcttgacgagtagtctatacaatgcacactgcgatttgtatttgatnactgacacgtcaatgtctatgtgtttggctgcttgcctggntaagtggttaccaaatacttgcctgggtactacgttggtttgctatgctactaaaatttggtgacagcataatacttgtctatatatgtactgagtgttagattgggttgctatgctactaacaaaattcgtaacactatattagaaatctggtgacacttcattaagatactacaataagccatgtttagtactcttatctatctattcaactcacaaatcataatttgatcttaaactanaacacattcttttcatacttacccttaccaaattttgt

SEQ ID NO: 14214 - DNA, 466 bp, Oryza sativa
  unsure (1)..(466): unsure at all n locations
ngaccaactccacagnttctcggctgtgccactattaatttcagcccaccccattcaagtcaagtccttaacaaaactaaattttatcgatgtttaccatcatcgtttaaatntgagagtttcataaactactcgattcgattatgtacacaatacatggcatgcctaattcacctgcagtacaattgtactgaaatttttcggagtcagntatcttctcttattattgngatatgtgatgccatgtccataatgcatattttaaagatgatatatcacatctttaaaatctgaggcctctcagcttaatgttntattccaaaccaaagctggcgtgtgcaaaatggaattcaccgctaacacttcagcctttcatatccgtttcatgccgtagtgctagtanggggagaataaatatttagcttgcttatatgaagtagtagtcaacaccaagatcaaatgctca

SEQ ID NO: 14215 - DNA, 435 bp, Oryza sativa
  unsure (1)..(435): unsure at all n locations
tatgcgtaagatatgttccacatcttgttatgttatagcatcactcaactcttggaacaactcaagagtctaactacaccaaaggatctctccaaatttaatttatagtatcgggttggtatttgtattaaacaccatgtagtaaattagttcttgtcaagaattaccatgctattttccaagagaaaataaatgccatatgtctcgtacatatgatcaaactgctttttttttcgaaatacatgtgggcaatactctcctcttctctacaaatgaaattccacactttctatccgtatctagcctaatatgcatgaacatcttattaaatgacactctcacacctgtngatataagtagtgttgactggacatatgctctggtagcattcattaacaaaaatattgtaaagaggagacaccttcactgtattca

SEQ ID NO: 14216 - DNA, 453 bp, Oryza sativa
  unsure (1)..(453): unsure at all n locations
ttgcaactataanacatgtgtaagcgctagcctgttatatacatgaaggctacgccgttgacatgcggaccccacatgtcaacctaaaggaccgcggtagaccgagtacacagagacggtccacgggtcgacggaagcagatcccgtgtgtcaaccgaggcgagtggtcgacaaacggactctactatacaccacacgggctgcacacgtggaaaccacgcggctaccgagcgggcacactaacacggacactacacggtcaccacccgcacacgtgaacgactaccgacaccggtacacggataccggggtcgacaaccgcacaacgggtacggtgcgacaccgaaaggacgaggacggtgcagcgagaggagagatccttaccaccacgcgacgaggcgtgggaacgacaacgacgaacgggcgcagcggagacggtcgggaacaaagaag

SEQ ID NO: 14217 - DNA, 474 bp, Oryza sativa
  unsure (1)..(474): unsure at all n locations
tcggctcgtttccacccctagccgtcagtgtatttttctcatcaattaatttatgcgggcgatactgagtacgaatagccacgagtcagtccgcgtactttactatactttagccattccacatcagtccgtgccgctctctgcccattctcttctccacggcaaaccaccaccggcgtcaccagcccaccaccggtctccaccgncacccttttctccgaatcccgacatggagaggcctccgcgcaggccctccgccgcgcgcccgcgcccgcgctccctccagcgagccgccgcggcgctcttcctcgccatcttcgtcgcgctgcccttcgccgtgctgtaccgtggccccgtgtcgcggtcgctgcacgactcgtgggagtgggacccgctgccttcgctcgacgcatccgatgaggacnggcgccgccgggatgatgatctggtaatactgccccctccccttctact

SEQ ID NO: 14218 - DNA, 348 bp, Oryza sativa
tgacaagcatctataaagcgaagtatgtgtatacgtggtgtatatgcatgtattaggtagcgaaacatgcatattaagcaagatcagctgagaccccgatacttatggatgcgagtggggcggtcaagtgtgctttattgtcccgcttattccactaataatatattgtttgttcttaattacgtactaccatgcataacatagactatcgagcggggttttatgccggtagtgggactacccacttgcatacctaccgatactatgcgtattatgactagttggtggctaggttgcatggatctaggctcgtttgcatggttctatgcacgacttgaccatcacgca

SEQ ID NO: 14219 - DNA, 329 bp, Oryza sativa
agcttctatgcacatagaagtgatcatgatccattctatctagccaccatactgagttggttattttctatcacaggagctgaagtagcatcgtactgcgcaaaacgatttcacattgagctctgcaatcatgaagactatcacaatgatctcaccaacgcactggacaatgtgtttcttaagttattttagcctactttatcattttgtttatagctgcactaggaaatgtgggatatcattgttcttgtgtaaatgcctgcacatggatgagaacctgccacaatccgatgcttggagagagttagttattcctcgtgataatggat

SEQ ID NO: 14220 - DNA, 308 bp, Oryza sativa
  unsure (1)..(308): unsure at all n locations
ngtcctctccttcactcctcggccaaaatgttttccacgtgaagaanaacgcacattcagccagtaatttaatagaggggcccgtttttagttttgcaaattcagccgtaatttaatagaggggcccatttttagtttttttaaataaaatttaagttttctgttggagagattatttttttacttattattttcagtttaagaaacccacaacaatnttttagtaggatatgatacacaatctctcgatgatgctccaagtttataagagttggctttactactaaataaacttgctctaataatac

SEQ ID NO: 14221 - DNA, 425 bp, Oryza sativa
  unsure (1)..(425): unsure at all n locations
tgcagcttgaccgggagcgccttgcatctgtcttatccgaactnggggattctagcttgagctttgagtcgctaactcgcgatcgtatgcgggatatggtccgttgggtattggttggatcgagaataaagaagatatttcccgaccgtattttgggcgtgtttatgctcaacgcatgaatattgtacgagtttcttttgcagtaatttttttgagccttactaaaactgtacatntctgaaggcccttacattaaaactagtgcatatgttgtgctgccattaatcctgaattataatggtgaaagtttaagatcccttctggcttgtcaatttagctacccacttggtccatggatcttccatattttgttaatagtcatcaatccaagcaagaactacataagcctaaacgcatttttgtct

SEQ ID NO: 14222 - DNA, 444 bp, Oryza sativa
ggacctatgaaactcaagctggcatagattctgcaggagacatgtgagtacaaaagttatatgtggcgctcaaaacattcagttcggaaacagtaacaaagccaatcaatattagaggcaaattcaactaaataatacagtacaagagaagtacttagctaacatgattggatcagcatcatgaccatacagaataccaaatcaatttgggtctggaactctcgattgaaacagcaaaatcgttgtgagaacaaatacaaatataacctcacagcaaataatttgcagcgagtccactgctccaaagtctgcctaacctaattggatcgacggggcacgcgtttaccgagtcaaatgacaacccgatgcaacgttgacacgcatcaattcacgcgaaatcttgacaataattccgacgaaatgggagcaaatacagagaaactc

SEQ ID NO: 14223 - DNA, 166 bp, Oryza sativa
gacccaagcaccgcgctgcacatcccatcgttatgccggcggatttgtttttggcaatcaaatcaggttgctcaattgtaccctctccatcccactaacatgttaccctatgtcaataaatgtgcgctaaccatttgggaaacagctgtctggtctagggaataaa

SEQ ID NO: 14224 - DNA, 488 bp, Oryza sativa
  unsure (1)..(488): unsure at all n locations
ngagatgaattatgtaaatgacaaggcagaagaggtatgactatntgcattattctttnttatacatgttatagatcttatattacaatataaatattaatttgcagtcaatgttgaagtacaacgatgattatggcttcactgatttgaaaaaaatatttttgtaatgcatatgatatatatataattatttattggatgttctgtagtttgggcagcacaattttcaggtaaaagaagagccaaaaaatgaaagtagtgatgattatgaaatgaacaatcatcgcaaaacaaagaaagagagatcaaacatgagatctacaaaaagatcaaacaaggtatgtataattgctttcttacataacaattcgtaaagttgtttatagtagtacactaataatgatgttntataggaaccatacattaccgattctgatgggaaaacanaatgaaaggcaatcacaatcgatgatgattccgaagaatca

SEQ ID NO: 14225 - DNA, 393 bp, Oryza sativa
ctcattgttgctctacctcctccgcgtcagtaagtggagctttggagaagaagtattatgcggagttctggctatttcccacttgagcgcctatgaatatggagtcgtaagcccgctaatccgctgctgtttatttctttttggcaagcctgaagagcctttgatataatgtacatattctcgtataataatgatgtgcttttatatcatgcttgtgtggtgtaccccggcctttcctgcgacggggattaatacactagcgttctggaaaagggattattccgggcgtgacacggtcgacagaactgggatgagagacatatactccatcttttataaagttgagaagagaccttatttttggaagagtgttacatgactatggcggcatga

SEQ ID NO: 14226 - DNA, 464 bp, Oryza sativa
  unsure (1)..(464): unsure at all n locations
cctgaggcatgctagctngcaaacttaaaaagatgatcactagtcgtttatcactctctctagctaagcnttaggtcacaccaagcccatgattgaagtccacttagacagctcaccctagggtgtgagagtgatagtgacggaaaaatgtgccttgctttggtgatctgatcgacgaacggaactatatttgatcattctaactcagggattaccaggactaaagaaatggatttcataatgggttaggcttaaagttgggtaaattcaacgaatggactagcttgccaactatcccttcttctccaccggtctaagtactagttagcttcatataaaagatacagcaatgattcttacatctattgctcaatggcttgctgggcgaataccctacaatattggatattttacgttattgaatttgatcagagtctggattgtactcaatggcacttatatca

SEQ ID NO: 14227 - DNA, 422 bp, Oryza sativa
  unsure (1)..(422): unsure at all n locations
ctaactactggcttacatcgcttagcaaattgcgtactgatcaatcatttaatctataagaaactgtgatccagccaacttggctttaaatatgagatgattctgcatttcagcttgctgtgatgtcagtcttcctggggcctgaccaagctgtcacggaggaacggttgatagccgacaaggattgccgcccatgggtcgagaagtatcaacgcagtcgcgagacggtctctcgaactgactacgaggtaagatcatctaccttcgcccaaaacatccggatatattgctaanagttgctatattcaagatggagaatgtnaccattcgtgctgcacggtaactcagaactctctgtaggttgatgctgacatgtgtttgtatgtcaaggtgacctgataccacgctcacaaactgagctc

SEQ ID NO: 14228 - DNA, 321 bp, Oryza sativa
cctgaggcatgcaagcttcacagcggcttggagcagctagggctcggctcgatttatatagcgagccacggaggcagctcgagctcggctcgtctagtattcaagccgagccaagctctactagcatcaaccaagcccgagccaagctcacgagcccgagctttttatccacccctacctcatgggactctctcatggagtggggaattgctctacatatttacataagacagtctcaatacggttatcttaagtcggattattatcagaaatgcaatgctttggagtgaatgatgggcgcacttggacaaaccatgatat

SEQ ID NO: 14229 - DNA, 230 bp, Oryza sativa
  unsure (1)..(230): unsure at all n locations
gaaactcaagcttataagatgagaaacgtgcttcaagaatgtgttaggcattctatgggctaagctccaactatccttgggcttagagagcacatcttcactggaaggtctgtattatttgcaacatgtctttcaaacttggttctgtctttatatttaaagagtattttctctatgtgtgtgcagngtttcttcacttgctggattcatgtcatatcaagaaaccagct

SEQ ID NO: 14230 - DNA, 94 bp, Oryza sativa
  unsure (1)..(94): unsure at all n locations
aaaaaaagagaaacanngaggggagaatcatttggcagagcccagcaaccaaacgggcgcttgaaggaaccacacaatgacaaagggggcgggg

SEQ ID NO: 14231 - DNA, 451 bp, Oryza sativa
  unsure (1)..(451): unsure at all n locations
ttatggaatcagcttgcatcacctaaaccctttttctatattccacattgccaatttcatcgcatgtctgtgaagccttcttaggaattaaaccccacttcgccctgttccgccgaatcttctttctcaaaccccaaccaaacaagagtaagccatgtgtagtcggaggggccggatttcagctgaggggaactctgagccagaaatacttctcaatgcccttcaagacttcaaacaaaggatggcatgcgaactggttttatgttcagaatcctgagcctgctctttccgaatactcttgtcttcccccggtgtaccaagatacttggaactctcttccaatcggagatgaagctgcccaagccttggaattgttggatcgcatgttanaactcanagaacaatgcttgcaaggagagcagatcactcggcatttcatcatatgccgact

SEQ ID NO: 14232 - DNA, 286 bp, Oryza sativa
  unsure (1)..(286): unsure at all n locations
agctntatgtcatgcatgagaccgagctatataagatatgttcctcangaattctgcaatgctgtgtttctttggaggagggaaggcaattgctgcaagacattcacaaaggcatttgtgggaatcacgctggcgcgcgaacaattcttggcaaggcttatcggtaggggtttttctggcccatcgcagtatctgacactaacaanaatgtacgaacatgctaaggttgtcaatttnttgccagacaaattcacctaccagctcaggagttgcaaaacatcccatt

SEQ ID NO: 14233 - DNA, 478 bp, Oryza sativa
  unsure (1)..(478): unsure at all n locations
tgcttagcagcacanatcaagcaagctgaattatgtttatgaaacactcaaaaaatctagatatcaattcaaattgcaactggagaggctgaaatgcagttgcacagctcaatggattaactggaatgcgaattacaagccaattgggagtaggcactaacctaggaccctcttcacatgcagatccaacggcactgccatccaaaagtgttgaactcctagctgtgacctctgtgtggcgtccttccatcgagtaagcatttcatcgagcactttccatgcatgcctgcattgcacacttgtggaaacaaagagcacaagaagacataaagtacatgggaaggtaaagcataggatccttcaatgcaatgcatagatagagcagaatgccaccgttggtctagaggaggttctcatctatccaaggtccagtaagcaacgatgggtgggtttcttggtttggctacctcttggtctt

SEQ ID NO: 14234 - DNA, 472 bp, Oryza sativa
  unsure (1)..(472): unsure at all n locations
gctggatgtcttggatcacattcactattacttgttatgcaaaacacttattagagatgaagaagaaagatgctcctttcacaaaattgataaaactttattttcttgtgagtgtgcaagtagtgctgggaactaacttgttaaggtacatgtaacacggcattgggaatagttgactaggattaaacaacatccaaatggaggagacttctcatgagatcaggtatattcctaggatcaaaccacagttcaaataacctaatactacaattntagattatttgggcacgtaggaataataattttagtgttctttgcaaaccttagctctaagctcattacataatcgctaaccatataatgttntaatatgaaaaattaatattatatttcaattagatctttggacagtaattctacatgaaagggtaaaaattttattcatataccagccaatgagacctatacacat

SEQ ID NO: 14235 - DNA, 471 bp, Oryza sativa
tggttcctttggctaatgcatgtgcaattaacgggctctggctaacaaaaatgacgccacccaatcagcacacgtgggagttaagctaacaggaataatgatagggaacctaagcctattactccacactaatctgtctgagaattgctaaagaccaagtgtttgtgggacggagagcccagatataactttataattgcaggtagttagcgatgattagctatgactaagttgggtttaactataataattactaacaattactgcagctatgtgtgcttgttaattactatataagcataaaaaatagtgtttacataataaaacaaaatatgtgttgacataacgcatatatttaaagcaaataaaaccattcacgtatcatctagcgcatccaaccaacagaaggtacaatctgataaatccaactaagagagccaactggtaccatcccatctagcactatacaac

SEQ ID NO: 14236 - DNA, 486 bp, Oryza sativa
  unsure (1)..(486): unsure at all n locations
gctatgacatgcaatatcangaactcctcatctttatttatttntgtaattgtgcctattgccagaaccaatatattaccctgaaaattacctacatatagaaaacatatggtgattgatcaaaaaccttatcattcctgctcaaacataaagcccaacataaggcagaggcttcattttctctgtcaatccccagaagtcaaccatcaaatcactcatatctatgtcagtgcacttgccaatcgccatgaacgactgatatgtaggtacttagtgttcttcaggacagcatgcttctcgatctgcaaatcctcagcttcttgctagcgaccagagagaaaacaaagcttcttgctagcgaccagagagagatccaatattgattgaaatattcaactgaatatatttcttgtgacagagagaaccgtatgtgtctgtcgtaaaacattgctggaaataaatttgatgaagattactgattaatta

SEQ ID NO: 14237 - DNA, 459 bp, Oryza sativa
  unsure (1)..(459): unsure at all n locations
gcttgctctacgaagcanactcctagatattagcttgggcttcactagattacctctttccttgcggagatgaggaaacccttcacaaactttcttgggtaatccacacgaacagatccttgtcggtgacgcctagccagctaggtggaaaaaccaccacgattaataagctcaagatttggccaacgctaatccccaagtgctcaatccgaagaaccctagctctcaaaatgttgccccccggtcttgtaactggagacctcatgtgttttcctataccaatctcttgattagtagttggtacacatgtacatagttgacacagctgcgctacactacaaccattcctaagactgtcaattttataaaacaaaaggtgagccattctttacccattgaattctaaaaaaccttagtgaaaggaatggttagttatactgatgcctcattccatgaagc

SEQ ID NO: 14238 - DNA, 291 bp, Oryza sativa
  unsure (1)..(291): unsure at all n locations
gtaacctgcatntgatctatcacgcgctacatatatattatctgtgctcgccttcagagagatgtcttctcgtaatgtatacggagggaggattatgagtaatattaactgctatattgaggtactaaaggcaataataactttattagagtagattctgatctgcgtgattctacatttatctgaaacgtaaatgcgcaaggatcgtctggaaagtggaaacagatgatatactcgcatggatattgggaactgcatcgaagacgttgatctccaagatatgatccattc

SEQ ID NO: 14239 - DNA, 474 bp, Oryza sativa
  unsure (1)..(474): unsure at all n locations
ngacatgcatatataaaacgaagtatctatataagtggtgaatatacatgaaacaagtagtaaaacatgtatattatgtaagatcagctgaaaccccgatacttagggatgcaagtggggcgggcaagtgtgcttttttgtcccgcttatcccacttctaatttattttttcttctaaattttgtactaccatgcaaaaaatagactagcaagcgggtttttatgcgggtagtgggactacccacttgcatccctaccgatactatccttattatgtctagttgttggcttgtttgcatggttctaggctcgtttgcatggttctaagcacgactagacaatcaagcagttaaacacttttcaggatggtagatacattagctaatctaatctagcaagacaatntagccganaccagcatataccctanagcaagcagcggccgataaagctaaattgagaagctaagaatag

SEQ ID NO: 14240 - DNA, 361 bp, Oryza sativa
  unsure (1)..(361): unsure at all n locations
agcttgtttatggacatgaagctgtatngctatggtgtagttagaatcagctctagaaggatagaattgcaagacggtttgacagccgatgagtattattaccttatggccgatgagagggaggacttggttcaatcatgtttcgagtccttgctaaagttaccaaagattatgaacgagttgctaggcattataacaagaaagtattgcctaatgattttttggaaagtgaacttgtatggaagttgattttgcctataggaactcgggataacaagatctgctagtggttaccaaattgggaacgatcgtttatatctacaagttgtgtctaaaggacatattgtcgcaaggcttgatg

SEQ ID NO: 14241 - DNA, 409 bp, Oryza sativa
tttggatactcgtggcacgcttttctaaactgctaaacgtgtgtttcatgtgaacactttctatataaaagttgttctaaaatatcaaattaatatatttttcaagtttgtaatgattagaacttaattaatcacataatattatcacctcgttttacgtgaaacacttaatcttcatcttaaaggaagattcaaacaccacctaagtttctctctcctgattagtattcccagaggtctcctttgccttttgtgccgtatttgttttggctatcttgttttcccaacatctaatcgagaatactgtgtcggccgggttgtcaagtttcccggtacaaatcaagtccaaaggcacagtttctgaacaggtgatcagtatcctcaaaagcttctgagcaaagagagcata

SEQ ID NO: 14242 - DNA, 359 bp, Oryza sativa
  unsure (1)..(359): unsure at all n locations
agctntagcctcctagagatggacgagtccgcgcgtttccttctcgctctctatatatatactnctcgccaccgnccgacgccgggcaaacgcgcccgacttgttggaagcttttgaaacaactatacggccggatcggaggagcaacgaccactgccgaccgaagcgtacgtgggcgatcaaggtgtgatgggttagacgacctaaattcgaagcctcaccccttctaattatgtgatattagatcctttcttgatattcgtattttcgtgcgtggccaaatattcatactgtgccaacgattntgctatcgatcactcgcgtgattctttggctgacatttcacgtttattttgcag

SEQ ID NO: 14243 - DNA, 469 bp, Oryza sativa
  unsure (1)..(469): unsure at all n locations
tgctntgccaagaaaccaccaagaataagcttggcttgctctcaatgacctcttccctttcggaggcacatgtgttggtattcaatacgatcacagataaattcgcaagtgtgtggataccgctatagtatttcatcaggaagtattccaagggtatcgttatttccccgcaaaaaaaagggtatcattattccttctccataaggaagacgacggtgtaaagaatggatcgatatattcataatcatgctattaatataccataatctaacatgagtaaatcataatgataataatatgaaagtgtgacgcacataagaatcatctcaataaataaactagctagctagtgaagaaagacagaagaaagttatggnttcatatgtacttctatctttgtcatgtttagtcgatataacattcatatacatatacatggctaggacttatttctaggtacataggcact

SEQ ID NO: 14244 - DNA, 127 bp, Oryza sativa
catcagatcatctaaatcaaaggcttagttctactgcacaaccctcctacacaagcgtttgcacataccccgatcgcctcaatcttcatacacgttgacatactgcactcccatcccctttacatgc

SEQ ID NO: 14245 - DNA, 458 bp, Oryza sativa
  unsure (1)..(458): unsure at all n locations
cggacgtgcagttatttcatacttgatctctcttatgtatggnggactcttgtaattggcgtggtgacaaatctcatctgcctaacttaatcaccggcataagaatatctgcttgtgaccccacatgtcatccactgctacattactcctacagaaaattttgagcaattaatactgcatatatatacaactacaatgtaggcacctacactgctacacatcactttctaattgattaagccaagctcagagtgattcgaccaaaaaaaatatctaaaggtatgcttagatcccggcataaattttcacttgctcatatcacacatttggatacatgtataaagtcttaaatatatgaaaacaactaatcataccgattacgtgtaaattgccagacgaattctttaagccgaattactacatgatctgtaaatatatcgctacagttaacatgagct

SEQ ID NO: 14246 - DNA, 485 bp, Oryza sativa
  unsure (1)..(485): unsure at all n locations
tctccaaattactcctacactctcatctactctcacaatttcataatataggctctagatttgagtggaggaagcaaagggatcttgggagaggctataacaacctatgggatgaaagaactgaagtggaatggccaaaaagtgagctgggtgcgatctagatatatataacggctaggtgacgtcatctagccattactcacatttttgaactggaagaagtctggaagttcctgacccccggaacttccagccaacacttacgcaaatttcatccaatgcaaggtccggaagttctgggtccagggaccggaacttccggccagccttctatgtccggtctggacccatttgcaaaaatggttcccaanaatattctatcactatgaacccactaagagggaaattttatatctcagaaccacacttganacccctcttaatagtacgggttttcctaagactcgatttcaaaaattaaacta

SEQ ID NO: 14247 - DNA, 379 bp, Oryza sativa
  unsure (1)..(379): unsure at all n locations
atgcaagctttctntaattaatggcatatgatatgcgacttaagaagctatttcaacaccagacactgntgaaacctntggctaacttaacttcatgtttattttgtaatgttcttactatggctgtgttgtattcctggtaagattcaaatatatactgccggaaactttattttagtacaattgattggctgaatttattccacttttcttcaagacatggaacatcttaacctcacgcttcttggtctacactatgctgaatgggaagcacgttgtggatcaattattcctcatctgaggcataaatatattaaccacacgttgatatgcaatgcaattgaattgatcgaattgacttacatctcaaagaataatt

SEQ ID NO: 14248 - DNA, 456 bp, Oryza sativa
  unsure (1)..(456): unsure at all n locations
tgtagatattaatacgcatgtacatatataaacctaagatcaagatatgcattataacaataatatatcattattaatttgtattttcgtaaggaggatatgcgtgcagatgtcaactatagctagctagcaagatttcaggtgatacattgccttcatcctggagcagagcacatgggagctgcctactctgactgaccaacaaactaacccaaaatcaaagcccaagctagtctatagtttatcaacatcatccacacatatatatcaatatatatgacctgcttcccatatatgtacattatttaaggcgaattttctgtagaatgtcactatcctaagtggatcatatttcctcctcttcttttctttntttctgaaatggatgcatgatgggtagagagagagagacttatggngctcagctaggaatgtggtgagagtgagatacccttt

SEQ ID NO: 14249 - DNA, 277 bp, Oryza sativa
  unsure (1)..(277): unsure at all n locations
tgcaagcttagcgatgaccagctntgtgctagtccttctcttgtgttgtgggtggagctgctaacttatgatggtggtgtccttatatgttttttcctgattacaatattccagacttataatcttgtaattntttttcttctatatcaatatgaaactntgcactttctggtgtaggtcgtttcaaaataaattagaaagtagcttgaaatgcaaatataatagcatggactttttgttaatttgtcatcgttgttcttgggggaggggggacaat

SEQ ID NO: 14250 - DNA, 479 bp, Oryza sativa
  unsure (1)..(479): unsure at all n locations
taacacccaaacctaatatctagcaaacactgcaattcgtattaaattataaagatttaaatttctgagagaacaatgcaacttacctatttcacttcctgtggggcttttcttttagcataagctctatacctccatgaagattttatggggagatagtaatcaactaattgtcatccctttatataattatgctcgggaaatccttaatgaatacccccctgcctctgatggttagtgagatcttgcatgaagcttggaagctcccttagattgnggcattgctcaatcaataaataccgaagagaacccgaggcagaacaaagagtgtcaggaagacgctctatctntggaagtccaatgatctgcaatgatcgaagactccatagcccatccatggcctnctctggatgcatcaaatacagctccgggcaattgtcgatgaacagctctcgcagactggagaggtgtgtcatgct

SEQ ID NO: 14251 - DNA, 325 bp, Oryza sativa
  unsure (1)..(325): unsure at all n locations
tgctctggagagtgtatgaggactctattctctatattctccacagctgaagaacctatggatgctgaagattggttaaggatcattgagaataagctaactcttgttcgagtacgtgaggccaataaagtgatctttgctgcagaccaattggaatgaccacccngagactggtgggacacgtacaaagaaagcctagaagaagatgcttgagaaccagactgggaggaattaccacagactttcgtgacaacttcttgcctgccgcggtgattctgattaagaattatgatttcatgagactactgaaaggaattccacatac

SEQ ID NO: 14252 - DNA, 456 bp, Oryza sativa
  unsure (1)..(456): unsure at all n locations
tgaatctttntgtggtcttgtgctgctgaaagatatgttattcttgttgatctgatacatgcatgttgatgtagtttttgatgaataaatcaaatgcaatgcttcttgatcttgcttctgttatttgttctgcaatcagaaacccatgattgcccaataacagatggtgaacatctgtgaggactctgaatctcattgcgttagatgctgtttcttttgtgcatgaagcactgaatctttagttctttattactccactgataagttctgaatcttgtggtctcataaacgcattctgaatctctctcttgcgtttttgttcttttccctccttcaagttatctctaataaaagcgatttcctcacaaaataagttatctaagcaagaagactgcgcaatgtcaagattagttagcttacaaatgtaacctactactaataactacctatggatgt

SEQ ID NO: 14253 - DNA, 418 bp, Oryza sativa
agcttagctgtagaagggcgcctctctcttgtcgtttctttcgtgccgagccagctcgacgcattgtgtgctgttttcttcctcccatccgcgtgtgccgtgcacgtcgtgtgccaacaccagtgttaataggaacgacgagtgggagtggatctccactccgcctttcttacttacctccacggtctaaccctgatcctagcccacagcaataccctttttttttttttggttcgctccctaagtccactgaaacctgaagcttgctggtttcctccctccgtttaccccattttatcttcatttatatatttgaaattttttcagcttgctgagcttactcttcccatattactatttagtgtctactcactctttttgcttaaattgatcacgtcctccccatctttttgcatcc

SEQ ID NO: 14254 - DNA, 420 bp, Oryza sativa
  unsure (1)..(420): unsure at all n locations
acacataaccactcagctntctcagcgaatccgagccggtggctcgtgttctctcgtctcgtgcaaccacccggtgtgctcgctttcgactgtatcgccgaggatcgctccgccgttcgccgctatcgtacgtcgttcgttccggccggtgtcgtcagttacctcccgccggcccgcgtggcagccacgtaagcgccacgtcggtgccagctcagccgaggtcgggacgggccgaccccggtcaacccctcccgtgagcgcgttccaccgcgagccgtgaggctgcgcgtgggcccgcgcgcatgcaccgcgttcctcccccgcccgcgcgcgtacgccgcgtgctcgctccgcacagtgagccgtgtcaccgacaagcggagtccacccgggaccgcgcgcggtgagctccgtccaacg

SEQ ID NO: 14255 - DNA, 467 bp, Oryza sativa
  unsure (1)..(467): unsure at all n locations
ntgagcttaatgatgatcattggccgntnttaccggctgcttttggcgatgcgcctctcttttttttccacctccttttgattcagtggtctcgaacccagctttggaccgggcggccgggtggtgactggtgagtgcaccgggcggaaatgcgcgtgcaatgttgctgtcactgatggagctagcgaaagggatggtccacgacgcagtcctcggcgtggtggtggtgatgaattggcttcacacataacgctctcatcacgcagaaaagaccaatcttgtgttagatttaattgggtaattaatccatttaaatcaattaaatcaaataaattccaaggctcattatgctaggaattcatgtgaattcattcttctatgggatatcaatgggatgaagaagtttgagaattaatccatttgattcaggaattgataacttatatcaattagtcctaattgatgga

SEQ ID NO: 14256 - DNA, 369 bp, Oryza sativa
atcataatatttgatctcttatgccatggcaaagtatgtgtgaaattaacattatagcataccgaacacgatgtgctatctatgatcacaaattcacaataacagtgttagcaagttgcactcaccggttatatttccacgtgtgataagcacacgaagataatctcgcagccctgtcaatactattctttcttgatcagcatttatctcagaaatatcctgatcacgtgaaggcaccacacatggacttctataatcctcattttcgaatgattattcaattcatcacacataattgcttgtgttcttgtgatgccgcctagaattttaatagagtagcttgatgggctctgtccattaatgtctgac

SEQ ID NO: 14257 - DNA, 438 bp, Oryza sativa
  unsure (1)..(438): unsure at all n locations
tgattgctggatgtctgccagactgccagtaatgcaaaatggaatattattgatcaaccagttggcctaaaaattttgactgacaaaatcttatccatttccgaagtatgggtttattttcatttcaggactggtcattgatacaacattttatggatttagtggataaatgtattgctggtgatggttatgccacaaattagaatcccctttaccgcagtggttntaagtttagatcttttttgtgtatgtatcatgaaagttacactaattgtatgtatctaggcgacttttcatcccacagaacatttacatctagacctctgacagtcgaaacaaccaacgtacagaaaagccaccagggtgagtaaaaagcattggcagcataagcttgtgtgcagcctgagacagggttggaataatctcttgttccaaaaa

SEQ ID NO: 14258 - DNA, 101 bp, Oryza sativa
  unsure (1)..(101): unsure at all n locations
agctntggccttctatgaattaagtagactctcatctcttcatgttggacgtaagctgtctgttcaattctggagtgtcttggctcgagaattttggggat

SEQ ID NO: 14259 - DNA, 473 bp, Oryza sativa
  unsure (1)..(473): unsure at all n locations
tgcatgatgcanaacaacaaatntactntttgtgtgacatcctcatctttagaatgggtcacattcgaaaagtcgactccccaaattagtgtgtgttaacctggcccaatatagccatatatgtctgtgacaccatcaacttgcatcttgcaaaggaaaaacagaaaaaagcaagatgctgatacaaagagtggtcacaggtcactggttcacagtacgtccaccgaaaccattgtccacaagcacataataacacagtaaccaaggtactcattagcctcaagttcattgcagctagcaaaaaactgactttaaaaagtagtccactaaagaagcactaggatgacgaatagcatgcaaagttaggaccatcaatcacatctcagctaagcataaaagagtcaactaatgaagatcatgaaattagctacacaaatntctgtngagcaataccatatctttagatgatatgc

SEQ ID NO: 14260 - DNA, 463 bp, Oryza sativa
  unsure (1)..(463): unsure at all n locations
taagttaacaatagaaacatgtatccttttcaatccaaaagtttgtaagactgtagcactaaaagtccactaacctttaaatcagtggaacatttaaattttggacataacctttaaaatcactggaaaatttaaattatgaacatatgaagttaaaaacaaacatattggttacaggttcactggactcatggtacaagtcaaataagatatgtttaccataattcacaactgtagaattctcagctgctcaagatataagcaagctcaaccacaacccatattgattctgtgtaaaaaaaaggtacatgtgccaaccacatacttcagatttgttgaactgcacagcttatacttttcttattccattntgaatgccttgcttcaattgtgtggcactgaggtgaaacaaattctcctattggtttttnttccacangtgattataagctgtaacacttat

SEQ ID NO: 14261 - DNA, 161 bp, Oryza sativa
tgtcttgagttgtgcggtgattctgtggcgccagtcttcatgccgaaccctagtatactaccatggtcgtgacgacaataggctttggatcctataggccaaatccatacttcgtggcttacggataaacagttccagctcctagctacaggttacttgac

SEQ ID NO: 14262 - DNA, 336 bp, Oryza sativa
gcctcaagattagcggcgtatcgaaagatgtcagaccgtatgatgtcgaacgagtacgcaacaagggatatgggagattggttctttaaattaatctacttattttgtaaatacatccggcatgtattttaccagggacgcaatagtttatatgcaatttatcggacctattcagatcatacaacattgtcagatctataatttattatgtttacctagagcatggtttttatacaatatctattgtgcgagtgctttcgatgttatgacaactacgcgctaatgctggggactcgctctgtgtctctttggatgaatcatgcttgcctacgatat

SEQ ID NO: 14263 - DNA, 430 bp, Oryza sativa
  unsure (1)..(430): unsure at all n locations
actttagctattgtaaaatgtgggtggtcnttttctacaaatttggattagtgataatccagattcgtaactagaaatagctaactgaaatataaggatttctaagttgcagctaaagagcagtttattgtaagttgagttacttgcatcagccatttcagctggtaacttaattaattatacttcagcatctctcactgcctcaatcccttcctctcacgtcgaggctccctagttctagcatcaaatatgcatccacgtggaatgtactttttttatttttctagttttagttaagacttgaactcaacatctttaatcggctctaatataatcctatatactccccccaaccctaaaaatgtcattttaacttaaaattttatctatagaaactgtgtttctagagtggagtagtccactagacatc

SEQ ID NO: 14264 - DNA, 421 bp, Oryza sativa
  unsure (1)..(421): unsure at all n locations
ttaaaagagaaccgtatagatccgtatgttgaaacacgtttggtccgtagacagaagcaacgtatattcaccaatggagacttaaaagactagacggcaaaccagcagactcaaggacagagcttcaaagagatggatgtagagtttaaactgcagttattaccaattacaggtacactgaatacatgactaaattcagttccacagcttttgttaaatttattctactatcaaatatgtgactntattcagtgcacctttcttccatgtatattctttttctttgtactgtgtacttttgtcttcctctttcatcatctcntgctgtgctagtcctcagaaccgtagccaatattagtgcaatactccctccggtcccaaaaaaaaagacaaaccctggacatgttcagattcatagcca

SEQ ID NO: 14265 - DNA, 459 bp, Oryza sativa
  unsure (1)..(459): unsure at all n locations
tctttgaagttttccggcaagttgaaaccagtcatgcactatcctgttttcacaaaaaagtgaaaacaattaaggttagcctgccnaggaaaatggttatatagaggtaaatataaagtattagttcacgtaatctctattatgaatattccccggcaacggcgctagaaatgttagttggtatttcttaacaacattactagaaatataatttccaacaatggcgtagaaatacttctggtatattatggttacagagttcatctgcaggcgcacggatataccattgtagcatttcacccgagagtattccaagggtatcgtatttattttatcccgtgataagatcatgtagagagaacttgactaataatttatatattacttgtgataatcatattctaagcaagggttaaaataatccaacggtagagtgacacacaagcattagctactcat

SEQ ID NO: 14266 - DNA, 468 bp, Oryza sativa
  unsure (1)..(468): unsure at all n locations
ggagaagatgtcttaggtggagtcctggcttatactctatntgagcgcctgtgaagatggagccgtaggcccgctagtccgctgctgtttatttttgattgtcaggcctgaagcgcctttgtaataatgtaaatattatcgatgtaataaagatgtgtcttttatatcatgtttgtatggtgtaccccggcttttcctgngacggngattaatacactagcgttcgggaaaaggcaattttcccggtcgcgacaattttgactntactttttttgattctgaaatcgccttcgccaactagatactcctgtaaaataattggttagatacattgactttctattcaaaaagtatttgttgatccacttataaaaactcgctatacccggntccgcatatgcatgcatttatgctcgtagcctatatccgcatccataatccccatccatagcggggttgcatttgtgt

SEQ ID NO: 14267 - DNA, 462 bp, Oryza sativa
  unsure (1)..(462): unsure at all n locations
taacattcatcccaacgcaatacttcatgtactggcaaatcgctgttgccagatgtcgctctactatgtacccggacagggaggacttaagtgatctcgagggctgtcaccacctctacacccacctcaaacgtactgtgggatacgcaacaattactggataacaattacctaaacaccacgtctaagcaattaatatctactttagtgtttataactcaccaaagcaatcactatgttttagttaattatagtgaacaataatcccgtatgctatttangaactaaccatgagataattctcacaagataaatctaaattactcaagaagaatattatattgaattcagagtaataaacagaataaaagaaataggagaagattaccgacaactccagaattctttcgactttctccactctactctctttctattctagtatacaatataatacaatag

SEQ ID NO: 14268 - DNA, 446 bp, Oryza sativa
  unsure (1)..(446): unsure at all n locations
tnccactcacaataacctgtanaccaaagaacagcaaatcaatacataaatagagcaggaatccaagcagaaccatacagctntcgttttgcatgagagtacctcacagcccttagcaccactctccataacaaacctgagcacaccatagcacgccctggcaaaagaaacaacaaatttagtcagacaaaaatcaaaatacataaagagaaacaaagcatgcttgtagagaacatcctaaacagtacaagctattttagattggaagtaaaagagattaaaattaaatgtggccaacaggatcacacgttagaagccaattaacaaagcttctcagcagagactacctagttggctcaagtaatctagtcatcttccgacacaaagttggtacatggtgacctatttgtntatagatgacatagaagaaatgcagacacctttac

SEQ ID NO: 14269 - DNA, 408 bp, Oryza sativa
agctttgtatgctctatgcatatggattgacttctagtctatgtacttgtattttgaactttatgttattggttaaggccatgaaccactctggctgaagacaccatattcccttattgaacttcattatatgctagtcatagccttaaattaggtcgctgaaaactttaagattagtctttaggatatagaggacgctgggagaatatatattaacctatgctgtgggagcgattcaggaacatcaattaagaatagatagggtcatactatggacatctagtgaaactgctgtcaaacccacatcctggttgcggctgtcaagatagagatcggtgctaccacgcgggtggacatggtcgccctgctgctgtggaatcgacatgaccagctacctgctctgaccct

SEQ ID NO: 14270 - DNA, 424 bp, Oryza sativa
tattgtcttgcaagagaagtaaagtaatatagacataccctaatctccgagaggactaagaaaccaaagaactattctaagcctaaacaccactaaactagagagtatacaaatgtagactagagatatggcttcttaagtgtgtgttgggaagatcttctcttctctatttatagccttgtaatgacgattggaaggtcggtaactcccacaacaagcgtcgttgcctaagctgcacccttgcacgcactccgtcgacgcttccatgctgctccatcacctcggccatcgcgcgaccccagcttctccacacctccttgttggaccaccgtgcatcctcctcattgccaccgtttggatccactagctggggcatcagatccggtcgtgtggggaccgaatccagccaaaacaacacctaatc

SEQ ID NO: 14271 - DNA, 440 bp, Oryza sativa
  unsure (1)..(440): unsure at all n locations
tgatctagtggtgaactggtgaagtggtgatggcacttctgttgcgtgcaagtcagagtcaatcctatatcgacatgtcaacggactacaaatgggatntgaagggacgatataaagattttgaacgtggtattcatgtgttcaattaaaaataacaaactttctgtcctaaaaatatagtttggttattntataagtactatttaaaaacgatgtgacaccagcatgtgtataaattaattaatttctgatccataatgattaacaataacttgaatttctctttgtaatatgagactttttatggttctttagaaaatactggaagatatcatgcttgtatgtaaattntggtatacctctcaatatccttataatttatgtatcaggaggtactatatataaattaacagtaaatatttttggtatctacttattta

SEQ ID NO: 14272 - DNA, 364 bp, Oryza sativa
  unsure (1)..(364): unsure at all n locations
cagagggaatccattgacctggagaacatcgantcgtccacaccttgaactcaatctgtcttcagtcactgaattactngccttcacttagatcgctccagctgagatgtcctaanttgcagtactgtgatacacttgccagcttcactttcctcaagaaactaagcataaagtcttctccacgacttcatgtacctaattcgcttcgaagcagctggagagctgataccttcaatcgtctaccatggacgatctcttgtacagcttgcattttgtgctaantcagctacgtctcatttacaaaaccatattgatagctgctcatcaagctgagtactgcttactgaatatcaaacatcactgg

SEQ ID NO: 14273 - DNA, 472 bp, Oryza sativa
  unsure (1)..(472): unsure at all n locations
accttagaatactcaaccttgcgagaggcaanaaggaagacaatggtgttgagaagactattgagaacaagccgaagagcacattcaatggaaagaagaccaatgagactctcaagaaggcctttgatcaagtctatgccactnttgagccactaagtgatgtagatggagaaagtgaagatgaagataagggaaagaacatatccggtgtttgcttcatggcacatgatgaatcggatttagagtatgaagacaatggggtgagttcttttgaggaagctattcttattttaagtgcaaaaaataagaagtatgagaagatgtatagaacacaggagtttattattgaatctcttaattctgaaattgctagattaaaatctcttattcccaatgatgatgatcgcaaaagttgtgacggtttaatgaatgacaattctaacaatagagatgtcaatgttgcacatgattt

SEQ ID NO: 14274 - DNA, 297 bp, Oryza sativa
  unsure (1)..(297): unsure at all n locations
tccccagttctggtcgccccggagccaaatgaacctttgctactctacttagcggcgaccccgcaagtggttagtaccgcgttggttgtggagcgcgatgaggacaatcctcattccgcgcacccccaccctgtgctggcttggcccgggagagagcanggaggagaggccctctagccgaacggtggcccaaggcccccgacgaccggagcaggccctcttgccgcttgtcaggcggtgccaggtgcccccgacccccaggatggcccgagggccactgcgggaaggccgcaccta

SEQ ID NO: 14275 - DNA, 471 bp, Oryza sativa
  unsure (1)..(471): unsure at all n locations
tactcaagcttgagtccctcttgtacttttacgatttctggtggctccctatttctagctagttcaatattagtaaggtgttttggtgtgatcctgacttctccctgngtttcattcttcatatggttcttcctgcaaattattcattcatatccatgaattcgaactatgagcaattgagcataatctctgcattattatccatctctcgtgcacttgtccacagtaatctcgcaagggataaactctggagatgtgaagaagctgcaggatgctggtatctacacttgcaatggcctcatgatgcatacaaagaaggttgcaaaattgggttcccaaatcttcatgctatctcccacttgttctatttctggtttatgacgattatattctttcaattgtcccatttctgtcttacaatataattatctgatattgttcaatatatggatccatcttgtagagcctgac

SEQ ID NO: 14276 - DNA, 465 bp, Oryza sativa
  unsure (1)..(465): unsure at all n locations
ggatgattatctntctcggtaataaagatttgagtgatcttagatnctgtgattcttcttatgatgcacattatccacaatttgagatttctcgtcactttntgaatgatcttgacatgtctaattgggagatgaaagttacatctattcaggagtttgttaacatgtctactttgactttggattcgctttacacaaaattgaaaactcatgagatgaatattcttgctcgtaaagtcgattctaagtcaagtgctttggtttcgtcttcgacttctttggacgttggtgcttcttcgtcgaagtcttctgttcttgctttatttaatgccatgtctgatgatcaactcgaacagttcgaggaggaggacttggtgttgttatctaacaaattttctcgagctatgaaanatgttaggaacaggaaaagaggagaaccgtattgctgttttgagtgtggagcac

SEQ ID NO: 14277 - DNA, 455 bp, Oryza sativa
  unsure (1)..(455): unsure at all n locations
gactgtcgacagtcacgacgtggtcaggcccacatcgcataggtggaggaggaagagtcngctctgctcctagcacacgcaagcatcgagctatctttagcggcaccggccgcagcggctttcctccacctcgacgagccaaaggtacacgtcttcctcggcaacagctctagcaacgacaaggctgattggtggtacctcgacaccggcgccacccatcacatgactggctgacgggagttcttcaccgagcttgactccagcgtccgaggctctgtcaagtttggggacgcctccggcgtggagatcaagggcgtcggctccgtcaccttcaccgccaagtccggtgagcacatgatgctcaccggagtctactacatccccgcgttgaggaactctatcatcagcgtggggcagctggatgaaaacgggtcacgcgtgtnggtcgagcatga

SEQ ID NO: 14278 - DNA, 447 bp, Oryza sativa
gctcaaagaacacaagctcagtaagcactgaagtattgtccgttccttcaagccgcccagctcgtctgagcctggatgaaagggcctcccacaatggtgtgaagaacgtgcctgctgcgaacactgtgaggaagccccaacggaagtctctccccaaactgccatcagagcaaacagtcactgaacaggtagaaaacaacacgtcggctacagatcccgttcgggagctgatccgtgcccaagttaccccggatgatcaatttggtggatagaaaagctaccaatttgagccgcccaaagaaacgcgcaagttatgcctcaacttcctatatttcattctctgctatttctgctgtaaaactgctggatatgccactactatgtactaaaattagtcctcatcaccaggagtttcgaagaacgcaagtagcccctgtaatggttatc

SEQ ID NO: 14279 - DNA, 264 bp, Oryza sativa
  unsure (1)..(264): unsure at all n locations
gcaactgatgtctgtgacttgactgtggagaattcccgcccattacccaatgttttacacagagctgacttcaatggagttgtttggcgtctattatctgttttttcaccatgataaagaatctgtagcctgatgccttgaaaaagtttttangaaaaaatgctggacaccggtctaggtgagcttattactactactatgttgtgagatgtgaaggactactgagatttctacatgaacatcaatatatanttactgcactgt

SEQ ID NO: 14280 - DNA, 457 bp, Oryza sativa
  unsure (1)..(457): unsure at all n locations
ctcagcttcgatgacgacgatcttggtgagcttacttaacggtgctgtgatctcgtcgtcgccatggctgtgctcctacttcttcttgcgggcttcttggtgggaggacgccatggctgccatgtgtgtgtggaggcgtgtggctagctgagccttttactcttcatctttatcaggaaaacgacgttgctgcaactgcaacgtacgatgcgtgccattactgataagctatcaatcgatcgagttggttggtttggacttgatttgtgatgatgagatcatgagatctgaacatattatttgcatgcctggtgctaattagaagagtaatgtactccattgtgattaactaccagtctaagtctactgctgctgatgctgttcacgctagctctgaaaactcaaacggttgactngatgcaactgcgtgagatgggagacattactatactaatta

SEQ ID NO: 14281 - DNA, 404 bp, Oryza sativa
  unsure (1)..(404): unsure at all n locations
tgtgtacatgcggcaccgacggttcctatgctcaatctttattctgtaagatgaaggcggagttcgatggcactgaagagactgatcctgcaccaaaacctacatcgggggaaaatgtgtgtccaatgacagagaaaattgtttgcgagtttggaaaagtgactaagaaaccatcaaaggggacaaagcgcaagaaacccgagaaaactatgaaaccagnggatagtaagaagtaagatgatagttcgaagccagatgataaactccctcccccattcaagaagcattccatattctttaagtacctcccgtactggaaagatctggaggttcggcatgccataaatgttatgcatctagaaaagaatgtgtntgacaacatatatggaacattgttggacatg

SEQ ID NO: 14282 - DNA, 239 bp, Oryza sativa
ttccgtgctttatctgaccgtttttcccccgtatattcggcctttagagagctaacattgcactagtcttaattacagtgtcataaaagggactaagatatcctcaccgtattggaaattgagggtttctaatcatgaataagggatttaatgattgaacttaaagtaagcttgcaaattgagaagtttctatgggaggtactcttgtcaggctgtgtaagtacacatgatgttaactc

SEQ ID NO: 14283 - DNA, 462 bp, Oryza sativa
  unsure (1)..(462): unsure at all n locations
tatcatattataatgattataataagctgtgaaccagattataataaactacttcaataagttgtctattttttcagcttactctaaataatttggattataataattccaatccgaaagaagcagtgcctaaaacagggccagagtttcgcttgggtgttgctctcgtccgtcactttgtccaattgtccatcattggtacgcttgctcccccaggctcctgccagttgcttctctttgtccggccggtgtcaccgctgcatgcgtcggcgacacgatcgagcccgtgtgatagatatattangcactgggcagcgtggcaaggtaataattaacgatttaatagcaaatatatagattgtggattgcggtcgctataatttgtataaaattacctgtgtcaaaataatatgtttcgctgctgtttatcgaaattttagtggaaaaagtttcaccgctgta

SEQ ID NO: 14284 - DNA, 460 bp, Oryza sativa
  unsure (1)..(460): unsure at all n locations
tgtggcttataccttcctttactggttgccgttctatattcggcacaatggtatgtcctatatgcttcaagtacattctatttcttaatttttcagttgagaatcagtagagtatgatcttattgcttgatgctagttttttataatcaccgttaaccgaatgaagactgatagtatctactgtctagcactctagcaatgggtttaactcaactatctgcgctgcaagtttgttaaccttgcatcctgagccctaactttgctgtcaaactctagaggcttggaattatgttgatgccagaagtttcaagatgctgggttttaggcctgattcaaatttgttggatgattagatagttatgtagcatcatcaatacatcaattgaattncaaaaacaaaagttctatttatgagaccgtgcgttatgttccactggttgattacaatagtgagtgaata

SEQ ID NO: 14285 - DNA, 343 bp, Oryza sativa
ttcggataaagaactggaacaacacggtgtgtgattgcgcgaaaaattggggggaattcacgaaggcgacaaagatgaacagtaaatctggcaagaactagagcgttttgctaatgcactcgtctgaaattgaatctgctaacgaagctaagaacagaatcgacgcggaaccaccagatctaccaaaacgcagccaagaaaccgcctaaaaccatccagatttccgcaaccgcagccgagaacaaccaagaaaaagatgaaccgtcgcgagaggcgcgtcggggaagggagagagagaacctggatcccggcgcgggaggagcgggagacgggcgccttcttg

SEQ ID NO: 14286 - DNA, 162 bp, Oryza sativa
catgaagagtatgctctgacaaactatatcacgtaaactgggatttatatattagaggacactgtcatacttcttctgaaccagcagatctgatatcatcattacttattaatgtacatttacaagcgcattaagtctatataagatttaacacatactaac

SEQ ID NO: 14287 - DNA, 450 bp, Oryza sativa
  unsure (1)..(450): unsure at all n locations
tcatctattcatccttcttctcaccacatatactcagcttataaatcagaagagaaaccatatcacaaagacaatagaacacataatttacaaataaagaagcaaattaactcaacacgtacaactcacacctttccatgcacaacatttcaaagaaaagttaacaagatctcatacttagtacaagcttgaacacttctcaagaaatgtagtctgaaagtaaaccagcctatacaaatgctcctnttttctcatccaaggtgcgacccagccagggtagggggtaagggcgtgtcacgccccgaactagtcccgaccggaactagcccgtgacgctccaaattaacctgttaatcgataccagtcccaggaaacagtgctggtatcacaggaagacagaatatcacagcaacagaggtctctttattatagagtacgagtatagtcatg

SEQ ID NO: 14288 - DNA, 433 bp, Oryza sativa
  unsure (1)..(433): unsure at all n locations
tattagagnaattttggctcgtttttaccaagagaactgctgcaagctacatagttgaaagcacatactcctaccagcgatcatatattttcagttaccatctgaatgccatggaggacatagaataacttccattgtaacgttcagtcaaaattatttacaggaaacaattgattgtatatacaactaatcaaacaaaccaaattagtactaataaaaaacaccagtcttggtttaccaaagcaatcgtttgtcagagaatgcgacacctaagctgactctaggccacatgtgcacatctacagatcatcctagttcttctattgttttcagaagctaagaacagccctgcatgcatgattcatcacatatacacttatagcaccaagcgaagccatccaccataccacttctaatgtgttaggttggatgt

SEQ ID NO: 14289 - DNA, 475 bp, Oryza sativa
  unsure (1)..(475): unsure at all n locations
agactggaggaacaatccattanggttacctaaatggtcttagcgtccaaagtgtgggtgcagagatcgctggcaggtggctacatcctttgttgaacaaacatttcgaaggagatattttgtctgccccaatgtagacaacgatttcgttgtatgtctaaccatttacaaaatccgctatgatttgcacaaaattactacccaaactgaataacattactatttttacagggcaatccaaggatgggtggatttactcgatggatcgacaatgtcactccatcatatcatggccagaagataacagagtcagaaacacaagtagagtatcaacgattgaaggaccacgagaatgcaatgcattctgaccgacctagaaagtgccgataggttaccgcatgcttgattcgtcnggattgacanatttgtaccgtgtatcgatggcacttcttatctatcttatcattacaatggt

SEQ ID NO: 14290 - DNA, 477 bp, Oryza sativa
  unsure (1)..(477): unsure at all n locations
ctaagcttcatcattgaatacttncttctggtgtgacaccatgttattactgtgcttatcaatcatatcaagcaactgatcngtgtgagccttttctcgtaataggttgatgagctgaacactctcctcgggctgtgagagatcaatatttttccttccacttattatttccatgagaacaactccaaagctgtatatatcaactttttcagtgatctgcgatgttaaccattcaggtgccagatatccaggtgtgcctctcatcactgtcactaccttgctttgatccctgtctattagcttggaaagtccaaagtcagccaatttagcattgaaattctcgtctaaaagaatattctgtggtttgatatccagatgagcaatttttcgcctgcattcctcatgaagataacataaacccttggcaatatccataatgatcttacaccttgtgcaccaatcaagaggaagcattgt

SEQ ID NO: 14291 - DNA, 462 bp, Oryza sativa
  unsure (1)..(462): unsure at all n locations
gtagcgaatgctggtgattgccgggcaattctgattcgtgctggtgaaccattttctatgaccagtgtccgcataatatttcttctttattttgcacgcttcttgaaatttaagcattataacataagatatgttttcattctgccttggtaggatcatgttgctagttgtccaaaggaaagagaacggattgtaaaggaaggaactgaagtcaaatggcaaatagatacatggcgtgttggtgcagctgctcttcaggtgctagcttttgctctttatggcatgtgctcgcatgagtatcattcactatggtagccatgattagctgtagatgcatgatataatcattaattttgataacaatagaaaaaaacaatgctcacataacattatacgccctctatccatgangtttttttcagttgggtttagaactgttgaagtgatattatgctgtttctg

SEQ ID NO: 14292 - DNA, 451 bp, Oryza sativa
  unsure (1)..(451): unsure at all n locations
ctagatgtatatgacgatctctatacagatggatcttatatgaatcgtatgatgaagtaccacatgagtggatatataggaaaggaatccaaatctgccgaatcgctcatgttatgatcttctacatcctaggtctccgcgttccgtcatctggcttatgttcttcatgtagcattcagatcgaatgactctatgaaattacgtcgatacttctacatattatgggtaacgtaggagacatccctattttcccccgggggtcttaattaccactgcttagctttcaattcgcctctgaccatcaaattaaatgtgaataacccgtcctcctctctttgaaacaaggggcgcttccggttctgtgcgtgcttcanacaattttgtcttctccatattaccatatctctagagtcaataattntctatgaggaactactgaactcaatcactt

SEQ ID NO: 14293 - DNA, 465 bp, Oryza sativa
  unsure (1)..(465): unsure at all n locations
atactcagctntactgagcattgagatatagaagaattcctgaactttataattcataataacaagttcctctttacccagaaaaaaagaaccacttagaatagccaaacagattatatttgtcgagaaatgcaaaatgatatggagatgaccctcattatctattttggccaattgtattatttccttgcgtattcctataggggggttttgtacatgtgtattcggtttctcttttatcatttcgtccaagataaaaaggtcttctaattccatgaatctttctagaactcttttctcttgaatagcagttaagagagtttgggattgcctggtattccaccaattcttaatccaaagttccagacatttgttaaaagagaaagagactccccaaggcaaaagtacgataaatacaagatatatganagaaggccatgctntcttttttttcatttttgatct

SEQ ID NO: 14294 - DNA, 366 bp, Oryza sativa
ccacaaaagcttgactcggcgtggcttttccgcttttccccccttagaacgtcaggatcgataccacttctgatgcacaatgcttgtctgtcattcacactatcttacaaacatcttcttttgggtggccaatcgagcctctaccacggaccgggcgaatcaaaggtgactacgctcaactcatataacaccccgttgtctacacccccccagccgcagggacaactgcagtgacgcacgtaactcgttgtctgtgagactctccctgcgccacacctggtgacatgctcagcttgacccattgctcgatcggcgaagaccgggataaacaactcaggccgggcccatgcatctcacacggacaaa

SEQ ID NO: 14295 - DNA, 442 bp, Oryza sativa
tgaaaaaaaggagatgagctgcaaaagatcctggtatctaatattccatatcgatttcagcatcgaggtgaaagaaatgaattgaaaaggtgctgggaagagcacaaatcaaagcaccgctttccatacgcgcaacgcagtgcatgcatgtacactgctctggtgaattattgtagtcgtactggttcaattcataaggatactcatctcccaagagagggttatcgaataagccagatatctctgcacaaagctctaattcctgaacatagctcggaattgccagtaccctcttcaccttctccctctgctcattgacaccacacttctcttgctttgaaatgctgagctcaagcatcttcaccatggtgctgaaactgtgcccgagcacgacgatcttcccgagcttgtccgggctccagttcaagatgagcaaattctc

SEQ ID NO: 14296 - DNA, 384 bp, Oryza sativa
  unsure (1)..(384): unsure at all n locations
catgcanacatgccanatcatcatgtactaacaagatgtcccatcatcatgattaacaagatgcccatcatatncactaaaaccatatattaacatatgaacatctatatattataattatattataaatttaagctttaaatcaacatgtaatatatcccataatacaatattaaatatatttatatttataatgcttgaccagtatctactagagctactagtatgcattctatcttcgtagatatacatcatattaggctaatgatatcatggcaatattctctcttctcttaatatctatactcatatttacctaatatatcacgcaacattatcttttttatagctatactattactgaatatcttctattatatatta

SEQ ID NO: 14297 - DNA, 435 bp, Oryza sativa
  unsure (1)..(435): unsure at all n locations
nttgactgcgcgacagtccgcaaggtcatggagggaggtgttgtggacggtgcaccacttgccggtagggcgctccctgctgggaacgctggcctccttctttntgtcgctcgcaggcctcccctttcgggtggcccgcgaagcgccctcgacggcgaggacatgaccctcgccgtcggaacggactgacctctntttcctcctcctgtctcgccgccctgcctgagcggcggatccgggggcggccgaagctgccacaccggaaccggaggggttccaagtccaggcctcctccttgcgagccactcggtccgcgagctgaaaaagctctgcggtagtctggggctctttggaggcgatcttttcgagcatgcggttgtgccgcacgccccccctgaacgcgtagattaccgcgtgtgcanggatgcatggtat

SEQ ID NO: 14298 - DNA, 451 bp, Oryza sativa
taatcctcttaattaatgattcggcgagaccattctgagtgtggacgtgtggtacagaatgttccactttaattcccaaagccatgcaatattcattaaataccttagaggtaaactccccggcattgtccattgtaatggattgtatccggttatccgggaaactggctctcaaccggattatttgggaaataccggaatgatccagacatgggattaattggtccacatatgtttccctgtattcgttgcaagaatactggtgattctgcgttcacctttagattagagggtctaacgattaatttcgctgttgcacaatcagtgcaaacaaaatcttcttggtttgggaaatcgttagttcgtaaattatggccatttgaaagtgagatgattctcgtcatcatccctagacctggatgtcctaacctatcatgccatattctgtatg

SEQ ID NO: 14299 - DNA, 391 bp, Oryza sativa
tcactccttggccctacaatgagccagacatggagaagacagtggcctatccttttgagagtactgccactgcacatgctcaccgggatgtggcatacaagcattatgtcaatgagatggactgcttacagtctcaacatgtaagtacttccaatatcacttctagttagacatttacttctttaattgagatactaaccaacgacatctcttcaacttttgcagattgaatggttaccataccacacaaatgaggcttcaagcctgaccctgaactcgatgtgcaatcgagactttgactatttaatgtaccagtgcccattgatttgtttctgggcagttgagtaccaccttccgcaccgtgtcatgcgacagttcgggaagaaacaag

SEQ ID NO: 14300 - DNA, 433 bp, Oryza sativa
  unsure (1)..(433): unsure at all n locations
tggagaagaagtcttaggtggagtcctgtcttataccctagttgagagcctgtgaagatggagccgtaggcccgctagtccgctactgtttatttttgattgtcaggccttaagtgcctttgtaataatgtaaatattatcgatataataaagatgtgccttttgtatcatgtttgtgtggtgtaccccggcttttcctgtgacggggattaatacactagcgttcgggattaatatttttctcggtcgcgacaagctggtatcagagccaggttgactgtaggataagccaagtggataaaacctaagggcatattttataaataaaactatgcgaaagttccttttttttctccttcccctaatgctatttgcaaaaggtttactcccttcttccttcttcggatntcaactagtactagatggtcaactt

SEQ ID NO: 14301 - DNA, 383 bp, Oryza sativa
  unsure (1)..(383): unsure at all n locations
aagcgagcactctcctagtatcatgtacggcgctagncggcacactcaccctattttcttcgaaggagagctccacttgggacacgtggtactcaccctccatagctgccttcagcggtgggatgatctcctcctgcatcatcttctgctgcggctttaccggaggcttcttcggctcctcggacggatgcgctgctggcctcgcctctccggtggcttacttcttggcataagccgcatccatcttatcactgactgtacaccacaccacaaatgcatagtgacctctagatcaacacaataagtgcaccttttctatggtagcacgctatacattggcatggtgctactatggaatacctctggctggagcaatcaacact

SEQ ID NO: 14302 - DNA, 403 bp, Oryza sativa
  unsure (1)..(403): unsure at all n locations
tactaacctgcctgagcatcttaggatactaacagatcttaccctatgctacctctagtcatcaatatatgcattattacgtcaaccttacgatccctaccccattgacccacattctaacgctttgacgaanaaatcagatggggagctgaatgtaccctgcacagtgctatcataagcgtcatgaagttattacagtttatcaacgtatcatcctattaagtgacttccacatttcttaaactgaccaaatcttgccatatatgtcgacgtttatgacgcaagcgtgtatcaggaatgacacatctgagaatgttccctcatccattaccacaacgtatcatattttcagaacgcactatatactgaatatatcccacataccgcatacttcatgtcttca

SEQ ID NO: 14303 - DNA, 432 bp, Oryza sativa
  unsure (1)..(432): unsure at all n locations
atggtgctgntatgttataaacctcttttctctctctggttttttttggcggtatgtttcacttcttgctcttggattaatagtgatagttttacttgaacttgcattaatttaattttatctccaatcanggctgtatggtctgtaagcaaaagatgtttttttggcgttgtggacggtgtacggttgcagcacatacaaaatgtgcaccatggccagtaattcatttaaaagatgaccaaggaagtgctatctgttggaggcatccctctgattggctccttcaaaatgaggtctatccttttacccttaagattgaccactntatgttgctagatgcccnccaaaaaaaaatctagtacaatatgatatgttctcaagaatcaagacaaaaatgggtgtaagattaaaactaaattggtggaacatact

SEQ ID NO: 14304 - DNA, 114 bp, Oryza sativa
ggggggcgcaaaccacaactcttttttccctcaagaacccccccggtcaaagctgaaaacaaagtgacgatcactgctgcagtaaagctctgtgtctgtgtaccaattagggtt

SEQ ID NO: 14305 - DNA, 402 bp, Oryza sativa
attaatgaagatgacagtagaacttggtgttatagctgctgcaaatgcttcacttggaggaaagtagatgttgttgtccaactcgtcaaaattgagttgattggttgataactccaaactctggtgtaataatcggagtcgctgaaattaaatgtcggctctgaagtgaagacgaagataataactccccaagttgattcgtattgattgattgcttcatcttgacataaagcttgtcgaattttgagccgtgtatttgtgtagcccccgactctttgattagttgggaaacaactgaacatagagtcgagaactgtagcctcttgtcgtcgaatagttattgcttgattgaagatatgtgttgaagatgtccacgtagaaatcctgaatattggagagcca

SEQ ID NO: 14306 - DNA, 467 bp, Oryza sativa
  unsure (1)..(467): unsure at all n locations
tgcggggggtatgtcaaagaatattggcatggtcaaaattgttatgtttataaaaaagtttgacattgctcgttgttaaaaaaaatgcttttttaaaaaaattaaataacaaaagattcagctctaattcacctatggggcgatacagtacatacactgcaacccgtgcaactatgcaatatatttattccctatgtntatctcttggctttgcaggacggaacacgttcttctgggttaaagccatgaactggtcttgccttttatttttaatccgcattgaatatatcttgttagagatgacacaccagagccatggcctagtccctgtggcctccaccctgactagccacttgtcaacagtaggttntaccaaacttgcaatacctcacattacatttaaggaatattggcattatttatacacaacaatttaagtttttgtccatcaaacatcatnttttttt

SEQ ID NO: 14307 - DNA, 249 bp, Oryza sativa
  unsure (1)..(249): unsure at all n locations
ccggatcttaagcacctgngctgcagctgctaagaatgcnattgttattaatagacatctgaatctgatgtgctcggattcaacaccctcttaccgacaacaacagcaccaaaacagggcctgatgangagtctgaatataagggngtctgcattcttctccatttctgactgttacacgatcgcccccaaattacaactttgtatacgattaccgtgtaaacagatctgatctaacaggttgtgtgac

SEQ ID NO: 14308 - DNA, 371 bp, Oryza sativa
  unsure (1)..(371): unsure at all n locations
catattcgtattcccttttcttcctttcaatctttggagagaaaattgagattatttgcatctgtctgtctgctctcctggccttggatcagtaggaggaaaggaaaagatcaatcgatttgagcaatcctggttcgacagatggcaagtntacctggtcatcgtaatcagtttatttgctcggagacaaatcacagtgaggtccactaaggtgtcatatgtcatgtagtcacctctgcattctgtcctgaagattggctccagagttgcatattcacaagaaattcagttctactactagtagaggagagggtgtaaccaactctatcagcgacacgcaacctgatcgattccccttgcattatacagat

SEQ ID NO: 14309 - DNA, 430 bp, Oryza sativa
  unsure (1)..(430): unsure at all n locations
actcagcttagcttacccctgtgccttcgatccttctggcgtttatatcaccctctcgaggctctgcttcagtgtcctctcgtacccgggcttagtgcgggtcgcgaagaactgggagatctctgcttccttctctttcgaggtgaactaccggcaaacaaagaagcagcatgtttcagcaaatggcatgatgagagataactcgtgcggaattgaacagagaatgcagatgagtaataccagtgtaacaatagatcttatgaaatccgatatgagggaacttcctgaaaatgcctccgagatacgatcccagttttcctgcatccgaacgaaacaacatttgtaagctcaacattttctattacttcattgcatgtttaatactccctccgtccncacatataatggagtctaggttgtttccgagaaa

SEQ ID NO: 14310 - DNA, 443 bp, Oryza sativa
  unsure (1)..(443): unsure at all n locations
tcagtcttcgtcgtgaagttgtcgtgtctccgtttataaacttgagaggagtttcttctaaattaagcaatagttttatcattttgcctataactaattataaaccataacacttaattagtagcgattaaaatataatttataaataacaatttatatatctccttaatgatttaaaagaaaattctagaaaaattaactctaaatttaagttttaaaatataaattctgacatcagcttataagctgaaaaataaagtacggtcgtcacatttttccgatccattgaatcggtagaaggtccttgtacaatctgtaccggttgttcattgcgtgatcggtnacttgctgatgaaatctccgcatagaaatggataacagacagatgatccataatttcctcatgacacaagcaggttaacacatgtgtcacaacgggatca

SEQ ID NO: 14311 - DNA, 483 bp, Oryza sativa
  unsure (1)..(483): unsure at all n locations
ctattacgcgacctatgaaactcagctntataagtcctggttttacatgaataatatggttgcttcttattntccactgttatgctgtaccatgcagggacttattaccaaatccagaaagggcctggatcctgcagttgctcgctatgccagaggttttggtcctgaagaggtgcaagatctccatgagggggctagtcttgttgaagtggtataaaaataattctaggattgttgttttcccctcagctgctggagctaaaatattttattgtaacagaagattttccagtgcttctgtgcttgtgcttgaactaattcagctttatactgatcatcaggtcaggaaagtgaagcctcatgtgcttttaggactttctggagttgggggcatatttaatgaggaggtaagaatcaacaattcctaacatgttgatttcataattntaccccnaaaaaaagttgaagaatggtcctcactta

SEQ ID NO: 14312 - DNA, 340 bp, Oryza sativa
aaataatattccgattatggattgatcactacctaactggtaccgaacactggtactgccctaacggaggataacattataatactcctcacttccggcagatccttattaccaaatctcaaaattatggtgagagtacgggagtataatggggacatatgaaagcgatccataaaagagaaaaagattgtagagtaatgctgcttaacacgggaaaactctgataatatccaaatctgttaacattatcaggtgaactgcaatatttattaatgaatatcaacaagtaagggtactaccgagacaatggcatcacatagccattgtatgaatatgtgtg

SEQ ID NO: 14313 - DNA, 457 bp, Oryza sativa
  unsure (1)..(457): unsure at all n locations
tgtgtggagtaggatgcagaaggcctaactaaatgagtatatactntgtggctttcacgctgtgttgtgagaggacttgaagggtttgacttgatcatgtaccaccttgatttttttaaagatgaggctgcaaagtttcccaaaagaaaattcactcagcactaaataaatatagataagatgttgcaacttgcaaagcattgttggtcaagatccaacaaaaaagaacatgaacgtgagactattaaatgtctgaaaattaataaagttatgatgacttgatgagaccatacagatgagaaacaattntctgtaaatatgaacttcattgaatgtctattgagtattgatctgaggtttaatgcctattgagtattcagcacaatttcgttagagaagccaacaacacaagattcactaatgtctntcaattttgagtaaatagcatactatcatt

SEQ ID NO: 14314 - DNA, 428 bp, Oryza sativa
  unsure (1)..(428): unsure at all n locations
tgtgattatgtcacgagccacgcaccttcaacttcttcttaagaacaattaactacttaaacaatgttattagtaattaataagcatgatgtataggctcacatcatgtatatgaaagaaaccccgcggcaaanaaaattaattaataagcacataattaattttaaaagagcatgtacgtattgccgaatatgaaaaattaatctcccttcgttgtatgcgtgcggaagtagatcctctcacctaattatatactagaaaagatgtccgtacgttacaacgggtaaacatttttcagtaatatattgagagctaagtaataaattaaaatattgggatcactatacattataattganaaagttaataaaaatcttaatattggaatcgctatagattataattaanaaaaagtaatgaaaatattt

SEQ ID NO: 14315 - DNA, 280 bp, Oryza sativa
agagtcctgaatgctgcgcgcacccgagcacgcacaacggtcgtttgagacagacggagctggggtgcttctggctgtcatgtcacacatacacgcggtggccccccggagcggtcgccgaacagcgcgcccgcaaggaacagagcggtcgatagggcgagaaggagagcgcgcggatagcgagtgaagacgcagaggagggaaccgtcggagctcggggagcacacggggggacgggcgagatgcagaacggagcgcgccgatcacgcacgaggtccgg

SEQ ID NO: 14316 - DNA, 389 bp, Oryza sativa
  unsure (1)..(389): unsure at all n locations
ntataactcanatgccatgtgttcgccttatagtggtaagttcgaaccatttataattagtatgttcaatcgagcagtcatgattttttaagaatctttgttctgttttttttttcttaacttgttttgtataggtaattggtggagacaatgcaaatatgccatctaccccaacatctactggagtggaaattataatttactccagactactcaaccaggtgaatttgctacatgatccttcagtttttgaaaactatattgtactaccttcatctcaaaatataagaacttttggggttgaacaagggtattaaggaagtatgtggagttaaatggcagaaggttttgattgatcgaaaagaggaagtagatggataaattaaatg

SEQ ID NO: 14317 - DNA, 450 bp, Oryza sativa
  unsure (1)..(450): unsure at all n locations
tacttgcaaagtanatatgtttaccataagttagagttatatgtgctgaaaattaatgccattaccagtttacttgttatttctcacaaatattttagtgaactcatccgtcctaaattgatattaattcaatcaatattccagtttatgtcatgtcaaatccgagcccaatttaagcccacccaattaagccctgctaagtcgatcgagcttggcgaaaattaagagcatgtgtaacagtgcaagcaggacagccagggcaggcaaacccaatccccagaaattccaaggaagcttcttaatcaggcatgcaaagccgcaattagaccctggcttaacggataagttacacacacaatactagtatacatttctgtccaagttaacaacaattagcatcactggccctgcagcatgagctactggctaatacttagaataactatagct

SEQ ID NO: 14318 - DNA, 238 bp, Oryza sativa
  unsure (1)..(238): unsure at all n locations
tgattgtcaactcttttgtaattgtcaatgtctttgcatgctccccctcgtaaacagactgtcgtctcttctggtggtaatttgagctctgcgctgccaaggataataagtctttttggttattaaatctcgtgattttccaaatgatattctgtgacatataagaaatgtattcatgagtactntaattatgacgagatacgtacttatacccaagtaccatccattaaattcgcat

SEQ ID NO: 14319 - DNA, 399 bp, Oryza sativa
  unsure (1)..(399): unsure at all n locations
tcaagacaacgttggtcatggagtacgtnctcaaccccgcccagccaaaaccatttgggaaatacccattcatcacccgacccatgtgggatgagnttccatgcctccaaatcaacgaagagtctcgggcaaaaagccaggcctaccgtgatctgcaggcaaggaaccttcacccgcaccggcttggcaccggaggctacgcggggaaacagtctgaataggacaaggaggatgaagctgcagcggaatctaacaccccgcaagtgcttgctgatatcccggtccagcgggcaaggaactgggcaagggcatgggtgaagaagaatagtgacgaaactctttcgttcccaaatcccgaagatcaagcggtgtaccagaaaattgtagtttaacacatag

SEQ ID NO: 14320 - DNA, 455 bp, Oryza sativa
tccgtctatccatgccacataatttgctactctattccttgatgaaaaagaccattttgttcatcaaaatatattcctgcaaagagtgcgataaaaatatttcgcttaccctgcaggttggaagcgcctgtgcttaccatcatgtgggttcattctttggtaaacggtattttgttctcttggttgcatcagtccttgtgatcacttggctcaatctaaggtagggcacactaacaaggataaacaaaagctaacatgggaatcactattgatccattgttacgttttatcatgctcacttgttcctgagagtttgatttcattgcagcaatgatgtttacgattcagatacttgggctgataagaacaagaaagaatctgttgttaacatcgttggcaggtactgctaataccaagcaataatgcaactactatgcaagcttttgttttttaaa

SEQ ID NO: 14321 - DNA, 459 bp, Oryza sativa
  unsure (1)..(459): unsure at all n locations
cgagaacaagctagattatgcgagatatatgatatctcggcaacgtgggtggacaggaatagagtgtcatanagatgtaagcactaatcccgagagtgcaagccgccatgacaagatttacctttatgtcggaaatcgaacctgatgcagcccaactcgaaagcacaaactcatcgaaacaatgaaagtaaaagggtgacgatgcaccgaagtgtattgaactgacgtcccttgattacatggggtcgggccatatttatacccgaagtatatgataggtcattgctggacacgactcttatctctaacataaaatacgaatgagccctccacgagggcccttaccaaaatatgtctagggaaactagaacatgtcctaattaatagatacaatttcccttcttagaactcatatccttgtgtggcaatagatatggaggtcttcatctaactgttgat

SEQ ID NO: 14322 - DNA, 479 bp, Oryza sativa
  unsure (1)..(479): unsure at all n locations
actcagcttttataatagaacttgcatagcanatcagaaatatgctttaattntaagtgtgttatgagtctaatgcctacataatcaattgaagagaacatgaatgctatctactgctgctaaagatatatcctagaataacagagaatatttttatgagtgaattatggaaaactgaactatagttaatcaaattaattatgagaaaaatgagtccaacttattttatctcctagggatatgaaactaaagatatggaaccttgtgccagattcagtccaataccattttgagatacgactagcataatcttggtaggaataagatcatcaaaccttatttgcaacacttgtctttgtacaaaatggttcaggtcttctactacaaagaatgtttaacaggatccctgacattgattgaaattattgtgttttgctgaatgatgataaatgcgtaattntggtagctaactcatgctt

SEQ ID NO: 14323 - DNA, 462 bp, Oryza sativa
  unsure (1)..(462): unsure at all n locations
gagctacctcgcgagctgctcgttagctcgtcagtacaagatatttccatacttttatatacttaatactttctccgtttcatattactccctccgtttcacaatgtaagtcattctagcatttcccatattcatattgatgctaataaatctagacatatatatatatatatatatatatatctatctagattcattaatatcaatataaatgtggaaaatggtagaatgacttacattgtgaaacggaggaagtataagactntctagcattgtccacattcatatatatatatattaatgaatctagacatatatgtatacctatatttattaacatctatatgaatatgggctagagcttagtctagtaattacattataactatttatatttagtgaattctttattatttgatgtttattattatggtgatatgtaataaaatgactaaatttaaa

SEQ ID NO: 14324 - DNA, 358 bp, Oryza sativa
  unsure (1)..(358): unsure at all n locations
gtgagttcgtgctgacccaaggccttcatttatgctttcttggttacgctataagtttatactagtcgggcgaaatgttatcatctgttatgacacttgtggtggatatgaggttatgatgatgtgagtctaattgacactaatcactggaccaccaatgacttatgatcctggtgacaagcggtgatctgtatttgtgaacaatggtgaaactaaatcttctcttttcctgaagaccctcgtcttaataggattgagttctactaccatcctgtanaaatgggatatattattttacttgtaatatcaatacttagccaatttattttatattgcaattttataaacacgcaacatg

SEQ ID NO: 14325 - DNA, 463 bp, Oryza sativa
  unsure (1)..(463): unsure at all n locations
tcctggcgtggaacatggattatgctattcttctcccatttctttaacatttccagatgtactagcataatagattatattgatcagtgtcactttcccggtcgttaaaagaaaacattctgatcgctctcaaacaatctaaaaacattccaaccctgacactccagatttcagaaaaaaccagcagatgagcaatcaaacatcaccacagaattctagtagtcaccttattttttttcttcagccatttttgcctgtgctgaatcgataaagtctcgtctctgttgaagtttcagatcatcttttttattgaattgtttggtgcaggatacctggtaaaatgtctactctataacaattttcttcagaggagataatgacagttcaatatccttcanaatactcctaaagaaaaagaataatgacagtgatgatgcgccagacaagcactgtagactgtact

SEQ ID NO: 14326 - DNA, 450 bp, Oryza sativa
  unsure (1)..(450): unsure at all n locations
tgccgtgtatcagctctctgccggcgcttctggaggcagtacaaggcgctctctaccttgtacaagcttggcagaacgaattatatctccagttntaatctgcgacagaacttctcttccatctgtggtatacctgcagatgtttgatcgacacagttctctgttgttaatccacaaaataaaccaagtttgctgtctagtggtcacagttctgtaatggcaatcactacttacccgaatactgagaattgcccttcatcaaaagatattcctcctaaaccagactgcacaagataaaggaaaataatcacaaattaaaatatttacgcaattagttcttatacatagggcacgctatgggtctagaaaagcagaagcattcagaaatatggttcacaacacaagaggtagacgggtgcactgntgaggtacatgcacttatgcaatctg

SEQ ID NO: 14327 - DNA, 457 bp, Oryza sativa
  unsure (1)..(457): unsure at all n locations
nttcacttgatcgtcaaattggctgcataagtttgaccaatgttggttcagagttcacacaagtagagagacagaaaagactatctacaggaaccatttcaattctcttaaaggaaaattgaaaacattacaaatccaaacagggtcaggaaaatatggttaacggtgaaaattactgggcaaaagctaaggtaccaccccaggaagatagtattctctgcatcttgcagttacagtgagatatatggcacataaacaatgccagataaatattagcatattgaatacccataggtggttgtgaaacaaagggaacaggcaagaagcaatcgttggattgattcatttctaaaattaccacactctattntctgatatttgtccaatattcaagaaacaagcatgttctaatttgtgatattatcatggaaaaagttatcctactttatttaccttt

SEQ ID NO: 14328 - DNA, 441 bp, Oryza sativa
  unsure (1)..(441): unsure at all n locations
ttgacaccaagtgtcacgtgctccgaatggctcgacatctcaacctgataaagattctgaacacttgttccaacctggactttaaagcactggtacttcagtacatgcccaagggtagcttataagcactcctgcactcagaacaagggaagcaattaggctttctcgagaggttggatattatgctagatgtgtcaatggcaatggaatacctgcatcatgagcactatgaggtggtcttacactgcgatttgaagcctagcaacgtactatttgacgatgatatgacggcacatgtggcagactttggtattgcaaggttgttgttaggtgatgacaactccatgatctcagctagcatgccaggaacagatgggtacatggcaccaggtacttaatagttntcttgctttctcaactttgccgacctttattatattg

SEQ ID NO: 14329 - DNA, 365 bp, Oryza sativa
taaaactcaagctttttgtcttttatgatggtgaagttgtaagtctaatagtcaagcaggagaactatattgaacgtgctcttaaatggtttctcagaatgtagagatctccacacgttcctgggtactgtaggaatgcatagatgacgagatccaacggccgagaagtcgagaaaaccgctggagagacgtcaccgcaacgagtctctcatttggtttgtgggggaatcagtcgccaaatgcagcttcatgcagcgaacgaggagttttgcggcagcggcggctcgtggacgctgcggcggagtaatggccggggatgagaccgcgactggctccaagccgccggtggcagcaacgaccattcg

SEQ ID NO: 14330 - DNA, 365 bp, Oryza sativa
tctctttcgtccttgagtgtgtagtttgaacgacttattctcacatcatatcatgttactcaggactcgggtgcgtttccaccgcctcagcgaaagcaaaggttggtgacgatcggcgagaagtaagtaaatgcttttgaggtttttatattctcaaagttttgatcacctagcctcatggagacaagatggcgcgtgcgaaagcggcgcatagaggggctgatgctgcttctagtgcgttccctgcggcgacctcgacggaagtcgtggccgttactacgaccaggaggcggcgccacgtagtcctatcgcccgcctcatgcccgtccggccttcgttccccgacgccctcacttgtggggagc

SEQ ID NO: 14331 - DNA, 468 bp, Oryza sativa
  unsure (1)..(468): unsure at all n locations
tcatactactctacttgctaatggtgtaaactttctttttaagattttttctctcatataattcctaaatttatctcaaagattaatactgccacttggcccaagcggctggcagtgtgcgccagctttaaaagtacttattattgactgatctgcagaagcaaaaaggtgatcaaacttaaaaagtcgagacaatgtacaatgcccattttccggtattttgtcgaagctcaaattctcatatgtatttcctcggtttcataaaaaataaatataggaaggaatatgatagattattcgtagtactgtgatgtgtcatatcttgttttatgtttggctcttataggacggatatgaagtacttggattgatgagctacaaaagaaaactagttttttcagttttttccttccccacgtgacaatngaacacttcanacgcttcactgtcaggtagtaatacactaca

SEQ ID NO: 14332 - DNA, 439 bp, Oryza sativa
  unsure (1)..(439): unsure at all n locations
tatatgaacccaactatgtcttgtcacccgtgcagggactctgtgaataatttaactgaagccacaatgattgattcccctttaacttgcatttgaccatcttgcttatggttgtctatttcagaactgcttagcatatgatagaaatcaaccattcactttttataacttaaattggatctgctaaataatatgagttgattgaatttagaatctttgttatacaatcttccgtctattatcatagttatttggctaatgcagcatcttaaaaatagttaatgtcaggattgttaggacattaaacaaattcaaagtaaaacaatgaccagaatgtttacatttgcatagaagcagtattactggatcctacaagtatgtttcatatgatcacaatgaanaatgttattcatgcacaaaatggctattttctttgact

SEQ ID NO: 14333 - DNA, 410 bp, Oryza sativa
tacagaacccgtgggcgattttttttgtgttcccaactattggcatgcgaggttttcctgaaccgactagttacttatccagggtgtgccattccaccttgtgtgtgcactttgattatgttcgatgagtttcccacaggaatcggtccttatatgcgaatacgggacagtgccacatatgcacaacctccgcatcgcgagttttcacaattcattttatttttcaacacaccgacaccacatgtcgggttttgaaggcttcacaaacccattttccaagttttcgacaaacaacggtgtatgtgggatatatggtatacgcgcttagagagcacgaataccgatgtaccacaatggtggagcgacaaggaatcacggtagtacgacctaccgaaattaatgcgactact

SEQ ID NO: 14334 - DNA, 467 bp, Oryza sativa
  unsure (1)..(467): unsure at all n locations
tcttgtccgcgttggctttntgtggcaatagccgcattatatcttcgttctgttggcccaagctctcttctccgtaccacttgtaatatgagtctactttctcgatcctataaaaataaatattgtacaagatatgatatattctagtactataaatttaaataagctattcagattcatatagtactagtatatgccatatcacgtatatattatttttgtttttatagaacggngagagtatataggtagtttaattactgaacttcccaacctagtggtaggcatgagacgtcactagtcagatcatttaggccacaacagaagtttcatgtttcttcttgtcatgttttctggatatgctaaatagttccaagagcgtaaaanagagaagagagagtaaaataattaaatagtgttgtctgatatcattgtagtggacacaacagttatgggcttgctagtct

SEQ ID NO: 14335 - DNA, 459 bp, Oryza sativa
  unsure (1)..(459): unsure at all n locations
actcaagctaaggagttagtgggggataactntatagtaagatatgattcatctccaattatattcaaactagaaaactaaaaaataaaagttcaagatgccatgctatccacttatccaggaacactagatttcttcatctctaggcaaaaacgtaaaattgggtgcagaggtggtgctctgttcgctaactgttttaatcatttgagcagaaatgacacatgattttgttagtgcaacatttgacgatgtgcacccgaactctgtaatgcaggcaacttcagttttactgagcggtttgctgtgaagtatgctggtgctgcagcaatgtacatggtgtctaagaagctaaagaagaagtacaatataactgatgcgcgtgcttcattatacgatgctgccaacacatggatggaagcccttgatggaagggagtttctaggtatgatatttttccat

SEQ ID NO: 14336 - DNA, 469 bp, Oryza sativa
  unsure (1)..(469): unsure at all n locations
ctgcagctgcatcgagacttgatggcctatgactctcgtacgactgttatttcatgcgattctactgacaattcacctataatatatatatagccgcaatcctcacactggtcaatataatattaacgttataattcattggactctagccatcatatatctaaaccatataaatacatagctgccaccattgtattctgaaaaacaatatatacctgacttatactctttgatttaagactctgatgaatattgattcgaccaagattgatcttantcttttaagaaactcaatactaaaaatagtctggtanaacattatgtaacaatgaataataatatttactagttaatatcaatgacaagctatcaagtagacccttattaaataggataattatactattaatctaattatgcagttacgatgacatttcaaataaatatacatgaatatctacattatgta

SEQ ID NO: 14337 - DNA, 374 bp, Oryza sativa
tggagtactgggcgtgtgagctactggtactgatcgcctgattgctcccgaatccgacagtgagcacctcgctgatcgccatgtggtaagttcgtctgtgcgctgtcccttccatgaatcgatcgcaaaggaagaaactgatctgattaatgcatgattgtgttcagctcgagcacggaggccatcgcctacatgatcacgtacgggttcagcgccgctgtgaggtacgttacttacatacgcacgctacctgttcgatcgccggccattgttcgtcgccgtcgtttctgaccgaacgttgcacgcgccacgcgcgacgcgacacgcgcagcacgcgggtgtcgaacgagatcggggccgggaacgtggagggg

SEQ ID NO: 14338 - DNA, 448 bp, Oryza sativa
tgccctcgagaacacccttaaagactactgatgagtcattccttctaaatacgggcacatcaacatcggtaaaaagacaattgtagctcatggaacataattgagaaacggacaacagattgtagtttagagattttaccaagaggacgttggagatggaaagatcattggagattgcaatcttactcaatcccattacttttccctttccatcgtcccccgaagattatgttctcttgcgaagagccatttggatcaagggaagaaaacattgatttttctccggtcatgtgatttgtgcatccactatcaatcacccaacttcttccatcggagagatattactacaagagatcaatttctagttttaggtacccatacttgcttgggtcctctcatgttaataacaagtgccttaggcacccacagcactctcttgatagaaata

SEQ ID NO: 14339 - DNA, 448 bp, Oryza sativa
  unsure (1)..(448): unsure at all n locations
tcaacgtcacactcaggccaggtcagcttatcacanattggtagacaaaattaaataagagaaacatcattnttagtcttcttttgtatacagtactcgcgtttgtttagtgagaagagtatatatagaataaggccaaattggaccatttgatagtagtcctgtgtcccaattcccagatggccccttagcatgtcggtttaatgactttattaatcacacacctagagactatagagagagagaggggtgggtgtggaggaagaatgtggcgctcacttgcatatgggtcccatctcgaggccgccgaccgcaatcctcaactgtgtttggatggtgggtcccatctcctgaccgcaatccgcaatcctcaacttggcagcccatttttttttgggtgtttggttcctgagcggaggtgggatatggcggcccngangggaatatt

SEQ ID NO: 14340 - DNA, 414 bp, Oryza sativa
  unsure (1)..(414): unsure at all n locations
ngcgacgcataacaggcaatctaccgttgttgtgttagattattacagtgtgttaagntgctcgtacctttctctcggatgatattcatgtctctgtctactgtggcttactctgcatcaagcttaattgtgcagacagacacatcgccaaacaacactttacatgcatgttacctttcgcgatactatatacttatatgtttttattgcactgtaactactgctggcaacttgtctactgcagtacctaacctactattgggacgagcgggccttctcatggagaatatgattttactaggataactataggcacacgactgctgctgcgccctgtgaatggatatagtactatctgtggatgcatgaacattgctcgcacaacatcgtgtttacacgtgtgttttactctgc

SEQ ID NO: 14341 - DNA, 240 bp, Oryza sativa
gcccaaccctatggtactttctgtacaaatcaagtcctatcaatagcttgtgcgttcacagatacagctactggctactgtccaaaatcaatcgtaagagactctttaccagatgcatcaagtcatggtaaacatttcctctcactcattagaacagtcttaaaacagcacccggaccattacttctgaggagctaatctgagcggacaccacactgctctgacaacgtccctcgtgtac

SEQ ID NO: 14342 - DNA, 453 bp, Oryza sativa
  unsure (1)..(453): unsure at all n locations
nggcatgactgtnttgtagagaacttatgtatcacagacatttgttctatggttattaccaggagaaaataacagcagggaactggctgcgtttcttcatggaagagtagatgttagggaacactccatgacctgagtagcagtagccatacaacccaacggcaatgggaattcctgggagattcagtgctgtcccttcatccttggcctcaatgtgatcaacaagtccaacccagaacaggcaagcaacaatgactatagatgcaatcactcctccagctataacagaatgaacaagatgagatccaaggcacattgtgcaccccttttttttcccgattatatgtatgcgcaaacaccacacttgcacatccgntnggtgtgtgtccacatatactcaaaagaacaaataccagcagcatatcctttgcccactattnntttttttttgaa

SEQ ID NO: 14343 - DNA, 397 bp, Oryza sativa
  unsure (1)..(397): unsure at all n locations
tatctccggccgtgaggcctaagaaaaccaaagctaaatcgtcatcggccaggactccaaatccttggcagttacgagtaatctggatgaagtctatatattgctggtcatgcctgtgcatcgattatgcaatacggcgcctcaggtgtttaactccatcgcaggtatatatccattgtcgattctttagccgccggaattaggacgcttcttgatcatcctgtactttttcatcaggcaaccatctcgagatggccagggaagacggagcatccaggggtgcatgcgagcgtggcgccagcgaccggggcggcggagagcgtgtcccgcgagacgggcggagaacggnggacaggcgagtaacatgggacaggcgctcggcaggagatagacacac

SEQ ID NO: 14344 - DNA, 433 bp, Oryza sativa
  unsure (1)..(433): unsure at all n locations
tatggacttgtcgatattgtatgggatgaatatgcttgactagcactgcgatactgatccagtgtggtttccagaaatgtttaatgattggtagtggccagatttcttgtaaatttatttcaaccctaaattcgggttttatgcaatttaatggaaatacttcataatgatcaatcattcaggttaagatcgatctaaaccaatccattttttctatatacatacgacatgccaacggttaaacaacttattagaaacgcaagacagccaatacgaaatgctagaaaatcggccgcgcttaagggatgtcctcagcgtcgaggaacatgtgctagggtgtatgtgcgactcgttcggatcatgggttcaaacaaataagacaatttttgaagtatccatgatcggtaccaatgaatangatagagcttctcta

SEQ ID NO: 14345 - DNA, 466 bp, Oryza sativa
  unsure (1)..(466): unsure at all n locations
gatcccctgcaagctctgcaattctttattgggtntatgtatgcctttttacttnccctcaaggacataaacaaatgatttgggttgtttcacacaatgcatgaattgaaacgaatcattaatcataacatatcaattaaattggacatgacntaaaaggactggtgcgtaaacaagttaaaagttctctcctaaatgcataaatgaagtagatgttctattgtatatttaaataattntagaaactagcacatatatgtaaaatcaacatacttctatggttctaccatctaaattgttgcaaaattgttgagttcactactcagaaaaattatgtcaatacagcaggggaggacctaccagtacagcttctgcaaatgataaaagtagaaatatgtgtctcatacttcacaaaataatgcctgatagatataagaattgagaagaaatcaccaatctacatacc

SEQ ID NO: 14346 - DNA, 353 bp, Oryza sativa
atgacaccgaacacggatcccgctgcaagacaagacataactagtgttgaaccagcgaagctctccttaacaccaagacgagggaggccggtgctgacgatcgcctcgggaaccaaaagaatagtgaataaataccaacataatgggaaatctcgactaagacgactactactatagagatgatgagggtggacccctcttcctccctccatcaacgacaagctactggagaagaggaggaagaggggccaacggaagatggggttactatggctgagatggcgaaagtgaccagaagacgcggtgcaaccatatgcctatgagactcgaaactcaagttttggatattgaat

SEQ ID NO: 14347 - DNA, 322 bp, Oryza sativa
  unsure (1)..(322): unsure at all n locations
tgagataccgatggntatactgctaatatggtctcacttagattctacgtactatgaggtaccacatagtacaatttggctcttcatagtaccttctgctagatccgaaaactgctcaaatttttgagacctccttaatgacgggaaaactctttataactgttaagactcaagctgtgaccataatgaaaaaataatgtatatttatcgattttaccgccctagagaggtatctaagagtaacacagttgacactttgatattacactagttaatgtggcactttcacgtgcctatggtcaatgaactctctcttgattaa

SEQ ID NO: 14348 - DNA, 387 bp, Oryza sativa
  unsure (1)..(387): unsure at all n locations
gaggctcatgtgttgggcattttctganngcgggnaaagcgtacattcactgcagtgtgagttaaccaaatctattcgaatagccgtgctcgtggttattgagcaccgggacatgtattacacttggctagactctaaattctttaacttgtgtgggatgggatattgcatgatgatatttatgctgatggagccacttcctgagaggcgggaatgtggatgtcctcagaaaaccataacgactcaatgacgggaggctattcttgggatcacaatggatggtggacagaaccgtcattgtttaatatgaacactggtattaaaaacttgatcagtctatgttaggtcttatgcttgtgaagagaattgtcaaacttgctttgcgcg

SEQ ID NO: 14349 - DNA, 446 bp, Oryza sativa
  unsure (1)..(446): unsure at all n locations
atctagtgatggaaccaggcattgtatagatggtgctgatntaattatatatgaagtgacagatgcagattatagccgccgtctactgtttgggtaaggcacctttaattttctattttgaactggtcttgctcacatttaaaatgacttggttacattgtgttactgcataaccgatcaggcttccatttgtggaatatgatattttgtaattcttgataggtacattcccgttcgttctgatgggatcattggagaagaaaggctctctgagccatctgatataattctccctggtaattttaatatctgaacctattacatactgttctatgttcacattttccatgcaactacatgtattaattctccttttctttccagaacgacttanaatcgaagcactctctttcaagggaaatcatgttgagagagagacactgact

SEQ ID NO: 14350 - DNA, 387 bp, Oryza sativa
tcctttagtagatatatttccttaaccgtatatatcaggtatttcgactattggcgacttgataactcctatcggctgattccgagatgctgcagccgataatgattctcagccgatgacgtctttgccgattaccaaatttcactgttaacagtggaacatggatagcggaggatgtcgtggctgcaccggggatgagctccggcgtggaacatggatggcggaggatgtcgtggtcgcgctagcgacgagcccggcgtatggcgaggcagcggatgacgcggccgccggcgatgagctccggcgtggaacatggatggcggaggatgtccatctccggcatgggacgtgaggccgtcgtcgccgagcttcaacgtgaggagtgac

SEQ ID NO: 14351 - DNA, 437 bp, Oryza sativa
aactaagcttggggtcagcataatcaacctgatcttgtaagttgctttactgcggctgtgccgcactgccgtcttgattatggccttcaccttgaactccttgagagccgacaccctgtactccttgagagccatcaccttgatttccttgatcgccatcggagcacctttattacttggttgagccgaaccatctggagcttgtttcacctctccatccatagaagaaccggttccaggaacatcagcaactaccttcaccttatacttctgcaccactgtccccttgcggggctgcatgaacgagcttaagaactgggtccgtgcttgctgcatcaatgcttcgaaattcttcttttgatcaggtgtcaacttgtctggagtgatggtcacgatgttgccttcattaacctcagataggcccaaccgctggatct

SEQ ID NO: 14352 - DNA, 450 bp, Oryza sativa
  unsure (1)..(450): unsure at all n locations
tcttcttgaacacccacttgcaccccacatgtttacacttatanggtcgctctgtcacctcccaagtcccgttagcgataatggaatccatttcactacggacagcctccttccagtagtctgcatcaggagatgcatatgcttctaaaattgacttatgagtgtcatccacgaggtacacagtgaaatcatcaccaaaagacttagccgtcctttgtctcttactccttcgaggagcttcactgacatcctcctcagagacaagttcatgtgtatgttcagtttgttctggtggtgtgattgaactgggaattatttcagagggttggttcgaaccactatgtgtatccttcattgngaaaaagctctcaaagaaggtagcatcacgagactccataattgtaccaacatgcatgttcggtacctcggatttaactattaanaatctat

SEQ ID NO: 14353 - DNA, 444 bp, Oryza sativa
  unsure (1)..(444): unsure at all n locations
ggggttttctcctatgggagagatgcccttgccatgcatgnttggatttgcaacaacaatgaggagtgaggatgtctcactgagagtccactggctggcgacaccttcacgctcgtcgcggtctctttgggcatcgtcgatgactactcaatcatccttgccggcactgcctccttcttgacgtgttctctccatcttcatcgccgcaggcgtcgcgttatgcatccgtgtggtcggggttttcccgtgaagccactggccaagtcatccgtgaaggtccccggagatgagcgcgtcatatatagacggagccatatattgtgacacaatcctcacatgctagtgttgtacactgcattgtgtgtatgcttgtgcatgcatgcaactgtacactacagtgacacacaaaaacaatcaaatgctntattactaagctatactcac

SEQ ID NO: 14354 - DNA, 400 bp, Oryza sativa
  unsure (1)..(400): unsure at all n locations
tcactaaagataacccatgtgcaccagcataacgcttgttaatgaaggaatgggttgcaccagaatcaaacaatattactgccggtgtcgagttgacggggaatgtgcccaatataacctctggtgctgactgcgcctcctctgcagatgcatgattaacacgggcctgaacgaacttgggtccagcacgtcttggcttcgggcactttccaaccgtgtgtccgggtttgttacaattgaagcagagttcgggtttttctcccaacctcttgggctgttctggcagagctggctgaactgattgagctggaatctttagtgaactcggagtanggttgaggctgtgctgctcactgttgttgtgactatcactatggtgggtcttattgaagctaccccg

SEQ ID NO: 14355 - DNA, 451 bp, Oryza sativa
  unsure (1)..(451): unsure at all n locations
tatacctttctaccgaatagcaaggatctaaataatcattcatgttagggtttctatatgatattatgagagctaaagcatgtgggcatggtttaccagaaacttgccactctctacaggtgcatgtatggtttactagattgacagcatgtctaataatctgatgttcagcagtgatctcagtcacctcagcttggtctctatcaccttgaactaccttcaagtggcccagttctctagtcattgcattgagttgacaaaccacaatagatagcatcacaccatccaatttctcacctatcttcctcctcctagccaatagattcattgtctttgacctaataccatctgcaagctcaacaattggaagatgtttcatatctttaatccatttgntccatgactcttgctaaatggtggtgatgaagtcacattttatctcttctgagaa

SEQ ID NO: 14356 - DNA, 439 bp, Oryza sativa
  unsure (1)..(439): unsure at all n locations
tcttgaagaagaactaccttctaacagttggattgaaatatcctactccatccgnttcatattgtaagactatctagtattgcccatattcatatagatgttaataaatctagacacatatgtatgcctagattcgttaacatctatatgaatgtgggcaatgctagaaagttttgcattgtgaaacggatgaagtacttatgtgttactgcttagacccttttaatatgcatatacattatttgtatttcattttggaaggaaatattgtttttataatatttgtggttagagctactgattctgcttagttgaagaatataattaaacccctgtcgctctgtcttttttctttttgataattgcaggattcagctcgagcttgttatggacctaagcatgttgagatagcaatgaacgtcttgcattcaactctttt

SEQ ID NO: 14357 - DNA, 392 bp, Oryza sativa
  unsure (1)..(392): unsure at all n locations
tatcatcaatcaccaaaaaggaggagattgtttgtgcatttatcctnctagtgggntttggtgattaatgacaaatgtggttaagagactaatgagctcattgagtagctntcaggtgcattagtccaaggtgtggaagatggatgcttggagacccctcaaaaagtacaaaatcaaagcggaccagaactcgagaagtgcatangatagtttatcttctgaaatcgagnttttaggaaaaaccgtactattaagaggggtttcaggtgatgctctgagatatatcaagtgctcttagtgtgaaccaagtgtcaagtttccctaagagttctttttttttttgcaaatactccatctgtccaaaaatgcaagtccggaacttcctgtcttct

SEQ ID NO: 14358 - DNA, 441 bp, Oryza sativa
  unsure (1)..(441): unsure at all n locations
aacgccttctctcacagactcgatatgatattacttattgctgtcatgcaatcggtgacgcattgcacaatcctaaggatgctgtggggggcgcatccgctctatagcccgtatcttctcggggttggcctcaatgccctcggcagagaccaacaacccgagaagcttgcccgcaagtacaccgaacacacacttatctgngtttagttttatgcgggcggagcggagactctcacaagcttccgctagatctgagagtaacatttcctaggtgcgcgtctttacaaccaagtcatcgacataagcctcaacattacgtgctaattggctacccacagaaattcgagtactacgttgaaaagtaggacctgcattctttacccganggcattgtcgataacataagtcctatggggaatgaaccatttttctcatctccta

SEQ ID NO: 14359 - DNA, 460 bp, Oryza sativa
  unsure (1)..(460): unsure at all n locations
acatgctcgagcanctatgttcaacaaatttatcatgttaactctaatgaactattatgctatcacgagaatgtagctttagcaaacaaacatgcagaacactacaagaaagagtaattgatagtaccgaatttgcttatctttacctctatgtctgacaaaggttcgtaaagcttcttttcctgcacggcatacagtgtaattccagaaattttttgcacgcctacttgagtagctaccatactctgcacagattcattccagatatagtcaaatacatttctttctgattcataagacaatgaatttgccactggctttgatggtcaaacacaagactaaattgtttcaactgttggttaacattcatataatagcacgaatgaggaagatcagtatcgttgacgaaaattcacaaggcagtattgttggtatgattcatcaatagcgtcactggtca

SEQ ID NO: 14360 - DNA, 437 bp, Oryza sativa
  unsure (1)..(437): unsure at all n locations
agccgatttggctntttcagggtatgattgctccaatcanggagaaattctcatctgaagatattgaaagcttgtcgcatcttacacagaaggtaaccttgcatgaacagaggtttgcagaggctatgaagaattctagaaaggttaatcatgtctgtccttatatatatggatcggatgatgaggatgatgactctgagatagctgccgccgaatgggtacggagcaaaaaggttataccatgccaatgggtgaagaactcanggaaagaggagaggtatgactntaatatcaccaaggctgacaaaatttttgacttgctactccgagaaaagcagattcaacttcctaccggtcatacaattccatcggctgaagaaattgggcaagaaaaggtattgcaagtggcataattctgtgtctcatactactaatga

SEQ ID NO: 14361 - DNA, 266 bp, Oryza sativa
ccttgggatgtactcttcggtgttcagagcgagcgaatgattagcgagacgcttgcatacaattatgtacgggcatgtacggagcggtgccggtactcgcgacatgtggggttgcccacaaccgtggagacggacgccgcaatcgggaatgtgggagatcgtgggagccgccactccgggggcgtagatgtaaccgagacgccccatatgctggctgtcttccaaatactttagcgtgctgtacaatagatcagtctgtctgagta

SEQ ID NO: 14362 - DNA, 121 bp, Oryza sativa
gaaattatttgaatatttgattgattttgaattaatttgaataaaacctgatcaaattaaaaaaaaatacaaaaaactgaaaatttctggcaagatgtgagcttgccggggggccttttct

SEQ ID NO: 14363 - DNA, 460 bp, Oryza sativa
  unsure (1)..(460): unsure at all n locations
tatattgcaaattggcctatgaggaaatttgccatgtactcaggagttcgcagtaatcacaagcatagaagtgatacgtttctgtatgagacacataaattttcacggaagttcgcagtgatcacacataagtttgtgagtaatcacacagaagtgcatcccttgtactgcatctacctaccttttccctgcgctggacatgcttgtttcattttcttcccctctcctttttttactgttgaacaccctggaaatatttaaggtctctacaagctggggtagtccacaatacaaaaaacagtactagcacgtgaacattctgaaaagaanaatctgccatccaaatgccctcgctttcatgatgatcagagttcctcagaattgcccatgcgtgattcgtgattctttaactttggcatcaagcatttcgccgagaatagcccctcacatgacaatgatc

SEQ ID NO: 14364 - DNA, 255 bp, Oryza sativa
  unsure (1)..(255): unsure at all n locations
cggacacttagaaactaagcttaataagggaacgccttctctcacagcctcgatatgtaccgacctatggcggccatgcgatccgtgacgcattgtacatacctaagattgctggggggggcgcatacgctctataacccgtatcttctgcgcgatggcctcaatgcctccggcagagaccaataaccctagaagattgcctcatgtgcaccgaacacacacccataagngtttatttattttctggcggagcgg

SEQ ID NO: 14365 - DNA, 431 bp, Oryza sativa
  unsure (1)..(431): unsure at all n locations
tgagcaaagctcanacttagtagcagtatctggctntgtcatcatatcagctgggttatcatacgtacttctcttgcataccttgacatcaccttcagcaatcacacctcgaataaagtgatatctcacatcaatatgctttgttctctcatgaaacatctgatcctttgtaaggcatattgcactttgactattacaaaatatatcaacacaagacgtaactccacaaagctcagtgtacaaacctctaagccaaatagcttctttacaagcttcagaaatagccatatactctgcttcagtagtagataaggcaacagtggcttgcaaacttgccttccaactaacggcacatcctccaatagtgaaaatataacctgtaagcgatcttctcctatccaaatcttccagcaaatctgaatccacataac

SEQ ID NO: 14366 - DNA, 416 bp, Oryza sativa
acctactagagacgttgaagctactacattgttatactttctggtactaggactactgtgaaatcacatcatgcatgtctacacactacactgttctagaaaatatatagagtcaggacttcaaccttgactttagtttcacgagtagtatatagggttatagagtacgctggtatgttctacaaataaattatctccaacatcaggaagtcgccatttcttcctttgagtgtgtgtttggtcacagtgaatagatgaaactccatgaatttttagcactactatagacattgctgagaggaaaaagagttacgcgatctctttttatctattaatggaatatcctaagtcattgagcactagcgagtgatctataactctgattcggcggatactgaatttaagggactacaaat

SEQ ID NO: 14367 - DNA, 399 bp, Oryza sativa
tgaattaagtggaaagtgaacaacaggatgaagtcatgatagatgtcccaaagttagaagacattcctgtgggttgtgagtattctgaagtttttttggaggagtcgacagctatgctgccaaagaaagacattgagttccgtatcaatttggtcctaggtacagctcccatctacaagagaccgtacaggatggcagccgaagaaatggcagaagttaagaagcaagtggatgagcagttgcagaaaggatacattcgacccagcacatcgccttggggtgctctagtgatttttgttgagaagaaagacaagacaaagaggatgtctactgattatagagcgcttaatgatgttacgatcaagaataagtaccccttgctaaggatagatgatatgg

SEQ ID NO: 14368 - DNA, 452 bp, Oryza sativa
  unsure (1)..(452): unsure at all n locations
tacacattcttggtctcctttcttacaaaaaaaaaaaaatcttacttgtgtcccccagaagaacgtgagtacagccacttggtgcacaagaatttttccttttcttaaaaaaaactaggaatatagcccgcgcacatgcgcgggcatctttaatgtgtttgaaattntattacgaatgcttacgcgtagttggctttttttttattgaaataccctttgtactttcaaacttatttgggatttctattaatgttggttatgattttattctagttacgcttgcaacataaaaatttgttaactaaaattgtgtgaaagcatgccgttttgaatttataagaaaatattgtgtcatcaccatgaaagttctatgaaactatatatngtactatgggtatttctatactttaaagaataaatgcttttatactatctatttctttttggaattt

SEQ ID NO: 14369 - DNA, 467 bp, Oryza sativa
  unsure (1)..(467): unsure at all n locations
tatatattntctatatttattatcacttagataatccactataaacatacggatctgttcaaaaacttaaccaagcggatcatcctcaactcatgatgattttcagctgcttaacacaatttctgtccttaggctattntgttctttcacggcaataataggatgtgtttatgggttctttttgtttggtggatgcttctgcacatatttggggttgtttgaaagtgtggatatagctgttgatcagccagccaacacggttacaggcttgcagccagcgagttgttatgaaacgtgcatcanagctcattaaatgaatgccgcagcggttatacgatgtacattcaaatngtgcgtcgagagtccgtgctgtgtagttgtaattcataacgttgtagcaagcacttttaaatagccccacgtaattaattttatatgcccaggtaattatttttatactcaataat

SEQ ID NO: 14370 - DNA, 394 bp, Oryza sativa
  unsure (1)..(394): unsure at all n locations
tcgatctatgcttcgatctgcatggtccaagtcatggttatctcttgcccagcggcaatgccangccttccaccttcaccattacgctcttcttgtgtccctccacgtcgcggtgcccgtgcagcttcgcctcggcacctgcaaagtacggcctcgacgttgcaatggcggtggcgttcgcgccatcgacatggacggcgaggtccctgcctgttccctccagtccgagcacggacagcttctcgatgaggagccccttctgcaagctgagctgcctagcttcacctncgacctcaccgtcaccgncttgccgcgcaccgtcgcgtagaagcggacgtacgtcgccttgcccttcgcgagcaccatctncggccgctcgtcgtcgtcgacgtac

SEQ ID NO: 14371 - DNA, 388 bp, Oryza sativa
  unsure (1)..(388): unsure at all n locations
catgcaagcttgctcgnacaacttgatccatcacttattcactatacatcgatctacctctgcatatataaaccatggcagctctggcatttacagctgcagtgcagatcaacacatctctcatctcacttaattagcgagttatcttaacaactaaagtaggtcaccattagcattagcatgctagacatataatccaaatattgttgctgtgtgatcaatgagcaacgtgtcgtgcggcagatcagcagcgccggcggctctcgttgcacttgtggtggcgtcgtccgcgttgctgtcactgtcagctcgctgccagtgccacgccgcgcgatcttcccctctcgcggacgccatgtcgacgccgccgtctgccgtgacaaccgcg

SEQ ID NO: 14372 - DNA, 293 bp, Oryza sativa
  unsure (1)..(293): unsure at all n locations
aaagcatcctttgaacaaatgaagaaatagaactgattaatacctttcaaagtcatggcatatcataagtgcaagttcattaataaatatcttgatatgatcaaacttttcatgactttttggagatcaaaaagaacacttgaggcancgtcatgtgagaaaagctttgtgcattcccaaaaaaacttgagagtgtgtggaaaataattaatgcacagttttaactagactaccaattaagtagaagctgaccttgaaaatcgaagacgattgtaaacatttgtggcacggct

SEQ ID NO: 14373 - DNA, 429 bp, Oryza sativa
  unsure (1)..(429): unsure at all n locations
agctcgccgtatgcggagttctcttacaacatctgtttatcatgtccagtctacaacatggcgccgcntcgaagcgttgtatgtgccggaagtgccgcacacctctcttctgggatcaaacaggcgaacgtcaactgtttggaacagaagtgttaaccgaagcagaagagaaagtcagaaccgtcatagagaggctgagaattgcccatnttcgacataagagctactcggacaaccgccgaacggagctcacttttgaagcacgggattacgtgtaccttcgttgtactccgctccggggagtgcaccgtcttcagacgaaaggcaagttaacaccacgcttcgtgggaccatacacaatctttgaacgaagaggagaagttgcttatcagctagaacttccatccaacatgatctggatccatgacg

SEQ ID NO: 14374 - DNA, 339 bp, Oryza sativa
cggcaaggcttacgaaaacaaatgtactcagtttgctattttcccacacatcttcttagaattcagacaatggaataaaagccaacatactatattgtacatttaacaaaaaatttttaacctgaaacaccatgaatatttattctaggacgctatggactttctgtttgcttcttggacctgttcaattgacttgaaaatcttccaatttgaccggctaattaaaactaaaaactataatttacaaattaagttagaatctattgtgtgacatggttcgatttagctttcatgcatttgggtcatttcgcttgtattgtatgatagctatcttctcag

SEQ ID NO: 14375 - DNA, 439 bp, Oryza sativa
  unsure (1)..(439): unsure at all n locations
gctctggagaagatgtcttaagtggagtcctgtcttatacctcaattgaacgcctgtgaagatggagccgtacgcccgctagtccgctgctgtttatttttgattgtcaggccttaagtgcctttgtaataatgtaaatattatcgatgtaataaagatgtgtcttttatatcatgtttgtatggtgtaccccggcttttcctgngacggnngataatacactatgcgttcgggaaaaggcacatttcccggtcgcgacaagctggtatctgagccatctcgactgtaggataagccaagtggatataacctaacgacctatcttataaataaaactatttgtgaaagttcctttnttctccttctccctgtgctatctgcaaaaggtttactctcttcttccttcttcggatttcaactagtactagatggtcaggtc

SEQ ID NO: 14376 - DNA, 448 bp, Oryza sativa
  unsure (1)..(448): unsure at all n locations
actaagcttctcaaagctggtttcatcctagaaggtctccacctagattgttttttcatccaatcatggggcgcaaggccaacgggaagtggacgatgtgtgtccatttaaccgatcctaacaaggcatgtccgaaggatcacttccctcttgtcacaccctgattgtcgtcttaggatttataaattatttactaaattattaatggaatttatattaaatgttctttaatttacaactcaagntaaatgtgggaaataaaattttctaaatataaagcatggatggatttaatgtttattaaattctccatggttaattatactctctggaattttctcggatttttcggagctcaattattaatcttaatcatacaaagagaagttcagcacttatctaaatattacattaatcatcacatgatctacttataattggtaagcga

SEQ ID NO: 14377 - DNA, 486 bp, Oryza sativa
  unsure (1)..(486): unsure at all n locations
agcttcactgtntgaaacaacatcacttgcctgattcanagaatggcagtattcattgaagagttcccggactgtttcacgtattacagataggtagcttgccgaatctgttccaaaagctcgtttcagacgaaactcaatgaaactgaatttgaatctagggtctagcacaacaggtatggccaaccacaaatatgaattttgccaatactcattgaatgcttcctgcatcaccatagccactgtagctatttctctgtgatcatttaatgcttcttcttgcaaaactgtcctgactttccatatctcgntaaaatatatatttgctgtcggagagctagggctggaaataacttcaatgacacgataaattgtcctcaaaatcttgcaaacggactcacgcagttttgtatcttctggggacaccctntcttcagaaggaaatgacttcttgaaatgcacaagcacttcaagtctaaaataaag

SEQ ID NO: 14378 - DNA, 454 bp, Oryza sativa
  unsure (1)..(454): unsure at all n locations
agcttgtaagagaagcaagctagccgcaaagtcatctcgtgggagatacaagcttactgtgtaagccaactcacagaggaagccggaagccaacgtgtgggatacgcaagcttacagtgtaagccaacttacaacttacagaggaagccatcaacctcctctgcctataaataagatcctagaggtccaaggtgatattgactgctcttcgacacttactgccttccatcctatagcttgtactcaaattcacaagaaataaagtttctactcactcgtactttcgatattctacagctactgcgtttgactgctcgagtgttaatcggcagaatagaccggtttctcaacgatacttacgccccgtntgttctctccgaccggagagatatttacagcgcacgcataacgagaaaactcactagcacatgattaagtacagattaactattat

SEQ ID NO: 14379 - DNA, 444 bp, Oryza sativa
  unsure (1)..(444): unsure at all n locations
gcttgatagatcatggaccgcctgctatattgacctggcgctgccaggacgcctgtacgctactcttcttgccggagctcttgtacctccttacactaccttcttgtcgccccaccgtcaccattctgagcctcgctatggtgaacgattggattcttatctcggggaggggggggcgcttgaaggcacaaatatccgcaggcaaggaaagccttttctatctaatactgagaggctcttttcacggcaccactatggagccctggttgctgcttccagtctctgttccgatatctggaatngattgccaaaagctatgcacaagaattgaatggattatatcccttccctgtccgaattgttgcgagagtgagtgattgccctgaaagaagcaactctgctttccttcatctaaatctatctcctggctttgctacaaggagt

SEQ ID NO: 14380 - DNA, 421 bp, Oryza sativa
ttatcttaggtctgaaatccgaatatcctatcatgtgtattaacttaagcttactactttgtgaaaaaaagataattgcttgcatttaaacctttcggcttttatgtgctccgacttcttaatagtagactcataactagattaatttctagagttatacttccctgtttgttgataaaactatcttgattgtgggctagacgtctacatttggttgctcttactgattttatgaaaatcgtagtttgcttgattcgaacgatttattggatttttcgatgacccttcatttgtcatccataagtttaaattatgtacttttagttggactcctttatttcaaacgttcttcttgcatcgattcttcaaatatcctcttctgagttttcaatattctcgctatgcaccgttcatgatcctt

SEQ ID NO: 14381 - DNA, 430 bp, Oryza sativa
  unsure (1)..(430): unsure at all n locations
agctggattaatcaagtactagtactctctctgtctcattntaagtgcagtcgtggatntccgtacccaacgtttgacccatccgttttatttaaaaaatttataaaataaattntaaaaaataagtcacatataaagtactatttattttttatcatctaataacaacaaaaatacactaactataaaaaattttaaataagactaacggttaaacgttaggtacagaaacatttatagtgggatggagggagtaggtgtgcacaaggcttggtcgctgtcatgtacgttggccacgaacactgacgcaacaagaaattagatcaatttggtttgcttgtgcctcactccataaatgatggttatgaacaaaaaanaaacacaaattaaggggattataaacgtgtagtatcggaaacatgggcccttt

SEQ ID NO: 14382 - DNA, 408 bp, Oryza sativa
  unsure (1)..(408): unsure at all n locations
aactatttcaggtacatctatgcctaagaccaaaatttttagtgatcctttccctaatagtcctattgatggtgacaaaaagaaagggaaaaatgttattattggggattcttcgcccaagactatgatcaataatgcgaaggcccaagaacataaagttgcaaaggatgagtcatctaattcctaaaagacaaaaagccgaaactcacttttgaaatgcttatggctaaatacaagaaaggattagccagtcaacgatttaataatcaaactagtgattcaaaaagaccaagatcatgtcgcaggaaaagaatttgtcaaacaccaaagcaatcggagtcatcaactatacaaactccatgcaaaccttcggttgtgatgccatggtatccacatncaatgtcaccg

SEQ ID NO: 14383 - DNA, 420 bp, Oryza sativa
agcttatgcgcatgataccatattgtttatttctttactgttaagcagtatgaatcttttgccttcccgcaaaaaaaaaaggtatgaatctttctccgcaaaaaataactatgaatttcagagtctcaactatttattgaacatggtttgataaatcatctatgtttgttgcctcgatgtagagcatctgagcatacgaagcatcatgtatgaaaacgataccagtaaattccatcacaacaaataatattgctttgtgaaaatgatacttttctcatctagagaacattttagacattgagatcctaacatcttaaacccggtcatgtgcctaagttcattcataaataaaagacaataatatatgtgcccccagccaatggacggacaactttaagtcaggcttaataaagtaaagtt

SEQ ID NO: 14384 - DNA, 432 bp, Oryza sativa
  unsure (1)..(432): unsure at all n locations
tatacattatattcaatggtctacatctgaatcctaatattctttttacaagntngnactgggaatcggcaaactaacaagcaatccctaactggattaacaatttcaacatgtgatcaagatttgcttcattcagatgttagcagagcaatctaatccgctgcaccgaaaccaagaacaaaaatagcaatgcctgtagcaaagaaaacaaaccttggttgcagaaaccgacttgcagagaaagggttgcgcggtgctgtggatctcgaacaggaggcggatgcgacggatgactgcggcgcggtgccggatcttgaccgggaggcggaggaccgacagctggtggaggcgtacgacgcgccggcggacggtgtggcgtgatctggacaggaaggacagagcgtctgccctcgcggacggggaccgggacag

SEQ ID NO: 14385 - DNA, 463 bp, Oryza sativa
  unsure (1)..(463): unsure at all n locations
agctntgatcatctacaatcatctgcacgaactaaggctaaaatgagcactctattctacaggataacaacctgaaaatatggactaaacaagacacatctaataattttaacatggtgattattaatcgttccttttccttaataatttcaacatggtaagtatgtaaggttctaaaagtaattcaaaattggtactccaaaagattgatactttcaagttgctgcaagatagccaaaaatctcacagacaactctagtgttgtagtcattccaatcagcagaatctatgggcattttaacacccttcaaagacacattntgagccatgcctgtcatccactcactcacaccaatcctttntcaataccaacatacatcataggttgaaaattgagatgattgattctgaacagagtctacaagttgacatttatatgtacagaanagaacaacatccacac

SEQ ID NO: 14386 - DNA, 393 bp, Oryza sativa
  unsure (1)..(393): unsure at all n locations
tctagtagcccaacccagcgcggcgcggcgcacgatgtgctggatcttcgcgtacctcaactacaatgtgtcgcgggagcgccggtacatcctcgaggtcctcttcaatggcctccgccgcctcgagtaccgcggctacgactcctccggtatcgccgtcgacgccgacgttccctcctgcgcttctacttctgcggtgccgccgtacgccggggcgcccccgctggtgttccgccaggagggcaagatcgagaacctcgtgcgatccgtctactccggtcagtgccttttncctcctgattatgctggaaaatgggttgaattttgggttcttgggatggatttttgcacgattttcatgtgttatgtggtctgactcggctgtatcacttg

SEQ ID NO: 14387 - DNA, 438 bp, Oryza sativa
agcttatatagaccatatagaacagttcttattcaggatcaaaagtcgcgcaaagcgtgactatatgtggctagttttgtagatgtagatatcagttataagcgggccacagctataaaacctacctgaatgaagctcagggaaaaaaaacaatagatattgatcagaaccatcctaaaatatgtttaagcctttacggtgtaaagtgttgagttgtaaaagttgaaggtgaaaaacaaagctaaaggtgaaaatggattttgagcaaagttgtagggcaaaattgaacttaaccctatggattgttagacttctctataattgacttgatgtgaaaaacaactcatgaaattaatgaatttccctgatatcttgttgcgcaagtactagcgactagcgagtatgacatcactacaacgcgaactacgggagcaggga

SEQ ID NO: 14388 - DNA, 459 bp, Oryza sativa
  unsure (1)..(459): unsure at all n locations
gctntagcccccttatccgatgatgtgaagtattnattcttgatgatatctctcatcggctagaggcatcatcgttagacagcttagtggttgattgtggctcaattaggactcggctacatgagattcaagctctgatcccagatgagctagccgatgtcctaactccagctgtctatctcgagcagcatcaattcaagctggagaaggccaagctgagactagtcgagcgtcgggagcgcaaagacatcgaggccacaatttaggccaatcggcagcttgttcatgaagagaaggccaagcttgatcagttatctgaaggtccgatcaagtctaatattgatcggcttgaagctcgaaagattgagctcctggcacaacttcaagaatgcagtgccaatctggacatggaacataaaaagctagccgatctcccacaatctgttgaaaagcagaaag

SEQ ID NO: 14389 - DNA, 336 bp, Oryza sativa
cacccaacccggggtttttgtcattgcttgtgaccggccactgggtttgttttggaccatccgcgtggggtgcacggagagcttggtgaaattgatctgggtgcccctgtacaagcatgccacaacggggcgatttgcacctttgctgggatcagccctaacttgagagctactggtggccgagattggtttaatacttgttgatgtagctgcgagtgatgccctgcgagtagtagaagaagctggcatgcatgacgtatatttatagatggatatatgcatggattcttaatagaaaacatgtggctagagctgttgatcgattaaacaattaat

SEQ ID NO: 14390 - DNA, 440 bp, Oryza sativa
  unsure (1)..(440): unsure at all n locations
tgcggcatgcaagcttggtaggtctcgcatctagacgatgtttgtgttttattcagtcgntntgggaacgagaaagagatgagatagaatgagagagagaaatacgcgagagaccgcgtggaagagataaggttttttttgtgtgagagaagagaggtcaccgcccactactatggcccacagattatgcaacagagatgaagtatctggatttttgtgctggaatcattttttgagggacaaagtctccgctccaggaatcacttctttttgggacggaaggagtatgtatctaacacaagtactcactaaaagattacaaatgggacacccacaaatcaattttaatgtagaaaactgacagaataacaaacactaatatgggaaaaaaagactaacttgtgcagaatagtgggatggcttacaaaactatgaaaata

SEQ ID NO: 14391 - DNA, 462 bp, Oryza sativa
  unsure (1)..(462): unsure at all n locations
acacaagatactaagctaaatgtgtaaaacaataactttaaaaacttattatgtgttaggaacgcaagctcctggtttttttctcaattttaatacgtagtatttaatttatccaaattctctatattgctcggagtgtttaatttatccaaattctctaaagtgtttaatttaaactccataggatgtagtaaatgcattatgcaaaagctgagacataaattctcaatctactgacatgaaggaatagctgggatgaattataattccagtaatattcatggcctgtgacctgtagagctggtaagacctcaccctgcatattcattgcagttggatcgaaatangatatttagaactgtcggttaactttgaggatttatttagaaataatacccttttaatagaaaatcgcatacaatatagtctcagtcacccaaaatatgaaagttagcaccctat

SEQ ID NO: 14392 - DNA, 493 bp, Oryza sativa
agcttacaatggtcctaatagcggatatctttatgactctgtgtatggccagtataataatattgtgccgcaacaaccacctcttaggctaccaaacccaccaccaaatcgacataagcctgaaaatatggaggagttaactagtatcgttattagggataaatttgggattgaagcgatggatcgtgctaaggagtgccaaaagccgtatcctgattattatgacaatctcccatatccgcatggttatagaatttctgaatttaccaagtttagtggtgaggatagtaggaccacatgggagcatgtagattagtttttagcgcaatgtggtgaagctagtagttctgatacttataaattgtgcttgttttctttatctttgtccggtactggctttacatggtttacttctttaccggcaaattctattcatacttgggcttaattagaacaaaaatttcatgattattttacactggtaaaactgagc

SEQ ID NO: 14393 - DNA, 373 bp, Oryza sativa
tcactagctgcgcccgacgcaccatgcccaacctttctttcatgcgcacgcccgtcgcccgtggaaaggggaggagagaggaataaacaacacgctgcatgtggtacccacctgggtctcacgctcaatcagctgccacgttggacaaaaccgggtgcatactgaccttggacctattgtgaccggatttgattagtaaggagtgcccgaatctggtctgcggttgaggatgtcttgaactcgagacagttcaggacctcggtgtcttttcaatgctaggaacaacgaagttcaggatataatgggaaatagacataaaggccctaactgcacgaaacgaattcggctcaacaaaacaaaaacacggggcgga

SEQ ID NO: 14394 - DNA, 241 bp, Oryza sativa
ttatatttcagatccattcaaatttaaggggaaaaacggtcgacccccaactatacgcatcagacatgatatggatgagtccgaagcacgtgggaagactttacgctgcagcaagtgggatctgcgcggccatacttacaagaaatgcccgaagaatgcaaaagtttcaagcggcgctgatgctagtccatctggacaggcaactgatggtaggcgaccacctggtgaaagaacaacaagc

SEQ ID NO: 14395 - DNA, 460 bp, Oryza sativa
  unsure (1)..(460): unsure at all n locations
cgtgagcgtgcccgttgatttaattctgcaatcaacaagaaataaagacaaggaaaccgcagttaaatccataaacgatagccgattggctagttgccaatgacatattatttatctttaagccgatgtcatatgcgaatcgatcggcagttatgaataagtgacttaaaactaaatctactcgatcggctgtagatgttaacaatacataatttttgtgtcgatatatacttaaactaagtgattgggatagatttatcgccatgccgagatagtataaatcacttagatcgaaatatatattaacaaaaagactatagatgttcacagcatagccgatcagatagatctagcatgtatcggctaatactccgataccactttatatcaagatattaaagcaggtaanatatatcanataggaagcttaatacatctaaatgcagtaggatcttaacat

SEQ ID NO: 14396 - DNA, 194 bp, Oryza sativa
ttttaatatacgcaatgaagatccagattggtgaaccttgtataatctactgatccaaggcttgatacaatctaaacatggccgtttccgaatattaactatgggacccaacattcttcgtcgtcgccgttgccgtccgttggtcttccgtcgctcctttggacaccggtgagttcgatttgcacgcactaccc

SEQ ID NO: 14397 - DNA, 437 bp, Oryza sativa
  unsure (1)..(437): unsure at all n locations
agcttgtgtaaatggacaatgttgatatccatgtgattgtatagngcanatntagttaccaatatgcactatggtaccaacagtgagatcccatctcaaaaaataaagtgagatctgagagaaccatggttgtgttaatgcaagccatttgctgattttgcttctaccttaatttaatttattgccctacagtgaggtatagtattattctgagacactanggtgcatctctatacagtgtacttgtgttcaacatccatgaaattggcaaattgctcctacacatgtcctcgtagtgcttgactntgttgaccctgtttaatatgaaagttcacagtgtagaattggtgcattttcccccctttagacctaatgctcctggattatttcatgacattgtctaattgctgcatataagacttgaatccttagtacta

SEQ ID NO: 14398 - DNA, 398 bp, Oryza sativa
  unsure (1)..(398): unsure at all n locations
acggacactatnaatactcagcttgaggagcaagagacgaagtcgccaatgtcgcttctctctctcgtccaagctatgttccttaataacagtggtccgagtgcacttgacgcaaccgaaatctttgacaagctgagagttgcaccggatgtatatttcaagaatatcaagaaagctggaagtatgggagctagtatggcattggcgatgaccaaatccttgtacccgaggattganatgataccattgatggctttcagacgggacagcgaagaagctctcttgacttatcagtaatgctcnagtgcggtgacagattgaagtgagttgtaagcaattcggaacacgaccttcaccgacaataatactctgagatgaaggactgatttgactgatga

SEQ ID NO: 14399 - DNA, 484 bp, Oryza sativa
  unsure (1)..(484): unsure at all n locations
agcttaatntagtagtatctagctggtggaatatgaatagagtagaaattaggagtctggaagccttcggaagagttcggatatggctctagcagcttttcttttctcttttataagctntgtacttttattagaatactcttctaaatacatttatggtattgaaatattttccgagtatatgagtacctactttacattatgttcttgttatactgaatatacggctagcttatctgggagatgctttggtgcgggtataatgtttgcttatgcaattactctatgtcatgacgatgatattagagtagtatctggtagtttagacgtggtgtctagattacgagatatcattatttggggttatatattacggatgagaggtgggccgctgatggtgacagctcantacgatatataatcctaagttaattccctgaggagggtattcctccgtatttagccnncggtgtatagtcatgat

SEQ ID NO: 14400 - DNA, 369 bp, Oryza sativa
  unsure (1)..(369): unsure at all n locations
tacccagcttttgcaagattctctaggtactatctgaagttaatatgctaacttttcactcaattactacatatattcatagggtaactattttattccaatgtcaggaggacaagcaaaaacgctgatgtttgttcacgtaagcccggaactagatgctgtcggtgagacaataagcacattgaaatttgctgaaagggttgcttcagttgagcttggtgcagcaaaagcaaacaaagaaggcagtgaggttagagagctcaaagaacaggtgttcacttaactcctgattgctcatttatataaactatctagatgtggtacttctggttaaattatataatncatcgttttctctgctcttggttc

SEQ ID NO: 14401 - DNA, 455 bp, Oryza sativa
  unsure (1)..(455): unsure at all n locations
agcttttgtgatgtanaacatgaggcctgtgatatctgcttaactctagtgcaggtccaaagctcgccttcgggtgtgttagcgtgccagttgatttgatcctgcaatcaacaagaaatagagacaaagaaaccgcggttaaacctataaatgatagacgatcggctaagtgccgatgacatatcatttatctttgagccgatgtcatatgtaaatcgatcggcgggtataaatagataataaagtactaaacctactcgatcggctgtagatatcaacaatatataattntatatctatacttaaattgagtgattgggatagatcggtcgccatgtcgagacagtataaatcacttagattgaaatatatattaataacagaactatatatgtttatagcatagccgatcggatagatctagtatgtatcggctaatactccaatacaacact

SEQ ID NO: 14402 - DNA, 375 bp, Oryza sativa
  unsure (1)..(375): unsure at all n locations
ngtaatactccactccactggccagacctcggtttttcttgttaatcgcagcaggctatcaagtagcagcacctgaagaaaaatatgttcatatttagcacaaactgtatgtgtcaacattntgtttgattgatacaagcacactagagctatgggcgcgccttcgtctctccttctggactctatcctgggcaaaacgtatgaggaagtgtccatactacatatcactcacacgcatctcgttatacatacgtctctaataacattaagtacatatttagcatgtcttttcatattaggacgctctctgattaccatgtatggcctataactaatactagttattctgacactgataaactctgatggttgact

SEQ ID NO: 14403 - DNA, 477 bp, Oryza sativa
  unsure (1)..(477): unsure at all n locations
agcttggagagcttcatgtctgacaagatctgttttatatccggcgtgaagaagctgaggcagaaggatgcttatgaggtccccagggaaggcatcgcagttgaggagttctgaacctgaattgatcagtgttatctcatagtttcattcttaccattttttttgagtccatgtggtgtgtgattctctggaggaacacatggtgatttctggtgctgtgattcagcagatttgtatattggaaacatggagaaattgttcctcctgacaaaagacactcttgcatgttctctcatccggtccttcacatggatgatgtcctagcaatgtgaacattctagtatgtgttttcgttctgaattgcctatttctaggggacatgtgatccggtcgtctatggtcttcttgcatgtggtgggtggtgcctgtctgctgagttggatgtccttttgctgaacaagtngtatcgtctttcat

SEQ ID NO: 14404 - DNA, 383 bp, Oryza sativa
cactaatgcatataatcacttttgacgcaaccaagattgaggaaatgagtcatatgccgggatcaactaaataccgctgggtcccgggatcctggagggcatggcccatcaattgaactggtgttccttccttgctggacctcattatggcccatctcgaataactgtcagagacgtaacgttgggcagcagcagtaacagaagtccacttgacatccctcgcatttacgtcgagtttaatgggcattcctaaactacaataaaatgttcacctctcgtctaagtaaaatcatccaaatcatgtcccatgacaatatagatgaatggtttcaccaacataacatgtcagcagagtaaaaaaaacatatgaggcccatattgtc

SEQ ID NO: 14405 - DNA, 413 bp, Oryza sativa
  unsure (1)..(413): unsure at all n locations
agcttgaactgaaaagcaagttgaagagtgttatttgtagntgaatgcaccgagtcacttcacatgaaccaacaggcaggcaacagcaggtagtacagtatcattttgcagcattcctgcttcatcactagcttacgccagaaacaaatgcaggccattctgtctatctactaatcggcgacataatcttgaatcggaattgcaaattgaacagaacagagtgtagctgaatgcactgaaacgcaatgaagaatggtactgaaccaacagcaagtatcatctgatcctgttcatcatcagcttatgcttagtgcttacggagtacaccacaaacaaactctggccagtaccattgaactcagcgagaagaagcaaacgacacaatgtagatcaaggcatgaaactaattaact

SEQ ID NO: 14406 - DNA, 339 bp, Oryza sativa
taattgagaaagaggccacttggcttacagaaaggctttatattgaaacaaccaataaattgctcatcgaagctcatgggagaaatgaggaattgctcaataaaattgaagttgctgaaaatgacatatctaaatttcgagacaatatccagaggtctattgattggtctcagtttaccttttcctatgcttggttacattttatgaccgacctctgtcatagaaccccactcatccaaattctcacttaaatattttctagattctcatccttttgaaaatataaaggctgaatactatcttcaatgatagatttgaagaaactgcaacaacattgga

SEQ ID NO: 14407 - DNA, 467 bp, Oryza sativa
  unsure (1)..(467): unsure at all n locations
agctgggtcagctntntatcgagctttcttcttaattatttttctataatttcttgttaatgagccgagccaaaataaaaacacatttcattcaaaattgactagttttcattttaaaagaataatcacatcaatcagagcaattttgaaccaggccagctaaacgagttttttttcagccctttgaaaataatgaagtaccctgaaaaatcttgctaaaagatagaagcatcttaactaagtgatatttccagatatgttattgatagttgtatgaactaacctggtgtgtagggaaagagacctgcggtccaggactcaatttcttgactntaacatcagaacggaagctgatgacgccccatttgttcagtctaccatcaaactcaaggattatttcaccagacttgtgatcatcaacaaaccatattcgcctatgtgacctgcaatcagaaacgcaacaatat

SEQ ID NO: 14408 - DNA, 456 bp, Oryza sativa
  unsure (1)..(456): unsure at all n locations
agctttggtgatgtanaacatgaggcctgtgagatctgcttaactctagtgcaggtccaaagctcgccttcgggtgtgttagcgtgccagttgatttgatcctgcaatcaacaagaaatagagacaaagaaaccgcggttaaacctataaatgatagacgatcggctaagtgccgatgacatatcatttatctttgagccgatgtcatatgtaaatcgatcggcggttataaatagataataaagtactaaacctactcgatcggctgtagatatcaacaatatataattctatatctatacttaaattgagtgattgggatagatcggtcgccatgtcgagacagtataaatcacttagattgaaatatatattaataacagaactatatatggttatagcatagccgatcggatagatctagtatgtatcggctaatactccaatacaacacta

SEQ ID NO: 14409 - DNA, 279 bp, Oryza sativa
  unsure (1)..(279): unsure at all n locations
tggtgtactccactccactggccaaacctcggttgtgcttgtgaatcgcaacaggctaacaggtagcagcacctgaagaaaaatatgttcagatttagcacaaactgtatgtgtcaacattttgcttgattgatacaagcacactaaagctaggggccgttcgttgtcacccntttcctatttcctgtgcgtgcatacactatatgggcgagctctatcataaaataccactcatccttattgtatcttcaggatttttataattatcgggatttttat

SEQ ID NO: 14410 - DNA, 332 bp, Oryza sativa
  unsure (1)..(332): unsure at all n locations
agctggtgctggagcagttgggttgccacagacgcctgtccatctagtttgccttcatcttctgcctcgccaaaacgatgcgtgctagtggcagatttagaatcaagtaaggccctgtttagttcccctaaaatttttctcaaaaacatcacatcgaatctttggacacatacatgaaacattagatgtagataaataataaaaactaattacacaattagggaggaaatcgcgagaccgaacttttgagtctaactagnccatgattagctataagtgctacagtaactcacatgtgctaatgacgggttaattacgctcaaaagatccgt

SEQ ID NO: 14411 - DNA, 293 bp, Oryza sativa
taattactgcacttactactggcttgacaaataattgggcctgtggtaaatctctggaaacaagcattttctattaaaagaacatacaaactgcctttgaaaaaaaaaattgtagttcctcaccgacctttcggatcgagacctgtggtttggtgggaaacggagtgacggtcatacagagacagcattgaatctgcaggcccactgccccttgtaattaataatgttaatgacactagtaatccctcgatctcacggaattaaaggtataatcgataaataatcccggcacg

SEQ ID NO: 14412 - DNA, 495 bp, Oryza sativa
  unsure (1)..(495): unsure at all n locations
agctttagtgcagtttatcttttaaagaaaatctgttaattttaactatagaatgatgaatagtaaagcattgataaaaccaagtggtttgagaaggctgttcctcttgtcccagntatccttgattacatcaactgaatttccatcaactattcgccaaataagtcccttatgtaagagctctctaccatgttaaaaacaagaactcgtcaaaactaataatagggttggcgatgcaccgaaaaatatgttttgaactgttgttatcttacaaaaaccctatgtgtgtacatattatacccataggcaaaactaagtctggttatactaagatcggatcgacttagcactctatcctaaacaagaaactacttatacaactccaactcaaactctaatcagctaatatgtagcanaaagaaactaactgagtccaattctaacatgacttcctcagcttagaactctacctttgattnggccttgactaatgga

SEQ ID NO: 14413 - DNA, 423 bp, Oryza sativa
  unsure (1)..(423): unsure at all n locations
taagaactacttcctccgtttcacaatgtaagtcaatctatcattttctacatttatattgaggtaataaatctcgatagatatattcattctagcattntccacattcatatttatgttaatgaatctagatagatatatgaatgtggaaaatgctanaatgacttacattgtgaaacggagggaatatgtgaatccgccgctctatgcttaattagagggtacaaatctagtgacaagtggtagtggaacaagggcgatggtgccgtgatggccattacaatcgtggcaggtatgctcaagtacttgtatttttttaagggtatcagttataataatctgtaacgggtgctaatacctagccgttatagatgaggtttcgacgtcacctattacctctcatctataacggcaggtatgaat

SEQ ID NO: 14414 - DNA, 487 bp, Oryza sativa
ttaagtcacctgcggcatgcaagcttccgataacatcgctaggaatccgggcttatatggcaattcattacagaaggtgtacaaatccgtctctcacccaactccggctttccagcaaagcactgagccattccatcacaacccaaaacattattaactccacattgtgcttggaacgggtaactacccaatgcaccattgatccttgatcgcacatccaccagtaacgacctcaaccataccacctccgcctcaagtgcagcctgcccttgcagcctcttcaccagctgctggttaatggcacgaagcctcttcacttcctcttccaagtgtgctgtatgagccttcttcttctgccggtatttgcggacagcctcacggttgcccaatggcttgcggcccttctttggcttggctttgtcacctccacaactatcatcatctgagctgaagacatgggtgtgggtgtggtagcatgtatgcgtgt

SEQ ID NO: 14415 - DNA, 340 bp, Oryza sativa
gaggggttaccatgcccttcttatataaccgggagatagggtttacaagtcggttaagatctaaactaactgggttacaatgataagcatcaatcaagggaatctgatatctagcctatcagatcagatccctatatatctgctaattgccttatggtagacttgcggtgcacgccgagcacctccgagcgctgccgtgcgccacgggtcctcaggtactgggtcatgccattcctgggggccggtccatgcaccttgttggggtaccggggttatactctcacagctagtcccaagcgccttgatcattgacaacacatcttgacatttcgagcagttg

SEQ ID NO: 14416 - DNA, 427 bp, Oryza sativa
  unsure (1)..(427): unsure at all n locations
gtacaaccacagtactcagcaagccacaccggcagatgcatgattaatgcaagggggtacaaggggtaataatataggggttaagttttgcagaaaacagcatttaaaagtcacttagttgcccaaagccattttataaagacgatcctagagttacacagtgttattaatcaaggacgtgaaccctcacgaacctgccttaacccaaggcctacgatgattcagaccgaactggcaacccgaccctgtgtcccagctcgtnccaagccaacccaggccaaccattccacattntagttgttaagcaaactttaagaattaaaacactaacttgggtacattgctaggcttgcccataaccgagggtgcggctattcgaataggttatactctgatcagaggtgtacatctttacccataagacaca

SEQ ID NO: 14417 - DNA, 438 bp, Oryza sativa
  unsure (1)..(438): unsure at all n locations
tactcagcttgagctcgctcgtaagctcgaagctttgctccgcttttttccctcgctggtgctcggccggctcaaaacaacctaagacgagccaactcgagctaaaaagaatcaaaccgccgctgattaggtggattcttctgctccaagaagttggcctatagattaaggattaaaagagagtagagaaatctattgcagaatatttgtcgcgtatggcaatcactaacatgcacgagctaccgataaatgactatctgcgagacgacatgctggtgaaagtcatagactctgactcgtggtatgcaaccatcgtcaacttcatggtcgcggggcatttacccccgggagaaaataagaagagggtgatctacaagagccgccggcacttgtgggatgcaccttacctgtacagagtctgtncagacagtctactac

SEQ ID NO: 14418 - DNA, 127 bp, Oryza sativa
tgtgcatgaataacaaactacttaaaaatttgggctgaggcgattaacactgcttgctatatttcaaatcgagttttcttgcgatctaaacttgcgaaaacttcttatgaacttccatttggacatc

SEQ ID NO: 14419 - DNA, 491 bp, Oryza sativa
  unsure (1)..(491): unsure at all n locations
agcttcatattactttagtatataatattatttatgtaaagaanattaaaggtgtgatgccgtgagggaagaattaagcaccgcgggttgaattttttccaacacttagctctgtttaacctgaaactaagagttgattatagaataattataatgtattgtgttatgtcatatttggattttgtactatttgttcgtccaggtgaaagaaatcattatgttataaatgtgggtataatattaacgaatatcaatagaacttttactaagacaagcatgctataagagagtttaaccctctttttttcccaattccatagtttgggttntcgtttgcatgctttccaagtttctaaatagtatctttnttaaacaacagtttagctttttagaagtcaattcatttgtttgtactctcaaataactatcatataaataagctattctaaatcctaagtagtacatgttnntttcatgcgagtcatggtgat

SEQ ID NO: 14420 - DNA, 203 bp, Oryza sativa
tgatccctcccgcgaccgaaataacatctgctcattacccgaacgtagccgggtcctataaaacaaagcttacgcctcccgcgcattctagtggtacacctccgtgtgtccccggcgtcatggcccgagcccgccgagaacgccggaagaacgcaccactgacgccatcacgccgcgtgctgtcgggacggtgtgcgacccga

SEQ ID NO: 14421 - DNA, 450 bp, Oryza sativa
  unsure (1)..(450): unsure at all n locations
agctngngtagatggatctctctggcaagtttttgtgagagattctagaattaccaaactttgataatggagacaaattttggtaatctttagattacttaccttgccaaaaaaattttagtaaacccaaaacttggtttgatttattttgggaacgaagtgaacagcccctatatttcacaacgaanaatgccagggagaaatcaacagatcaatcatatggtccaacagcagcacagcaatggaacatatgctcaacatcaaaccaagcaagtgcactaacaaaagcaagacaatgatatgaaagaatattcagtctgcttgaacgaagatgataacatcagtggtagctgagagtctatttacaaaggaacctgatcatcatcattatgtacaaaggatgaagaagccacaagcaaccaaggaagtctataaatttcagtttcagta

SEQ ID NO: 14422 - DNA, 428 bp, Oryza sativa
tcagatatggaaatcagcatggctattctaaaatcctaatacctctcttcaaagcttgccatgtacctcctctcagatctgtccaaggaagagactacagagtcaacaatggtcatgataaactaagatcaactaacttcatcgaattaatggaagttcatcggagataccattgtcgtactatgaacagtggcaaagtaaactttctttaatttttgggtgggatattggtaccttgtcctcctccaaaatctgacatgtaattaatcaaaatgcaagtaggagttctcactgtacacacagtgttagctcttgctaattggaacttcactactgcaaggcaagagcagggtctataactagtactactatgcataaaccttcagccctgggaggtacgaccatcacccgtcccatccatctcctct

SEQ ID NO: 14423 - DNA, 472 bp, Oryza sativa
taagctttccaaaccaagatacttctcttctttctcatagctcgtgccacattggataattatgagatacaacacattgtcaccactagaaatagaagaatgtttgggcaaggtaaacaccttgcacttgacaacccacaccacagaagagaagacgcttcacaccagctgcctgtcaaaggatagcatgaaactgaggttttgacagagttagtcaggaagatagagtatggaccaactatcatgtcatattgtcatcatatcattatggtcttgattgtagaatctaatagcctaaattggactttgttttgcctttagagtcactactggaatgacattaagtaaaatttgatcttgtacgttgaatagaacaacattagttctgattcctttgaaaccaaactaaattcgaatcgcctagaaaggggatgaggtaaaaatgctctggataaatgactcaagttcatgt

SEQ ID NO: 14424 - DNA, 442 bp, Oryza sativa
acactataaaactaagcttgtaaggtctgtaacaattaaagatcgatatatcttattatgccccttagtatacccaatttattagcaagatgccagcgcatacgtgcatggtgaaaggcctcagtttttttttaaacaaactggccctttgtttatactgcttacaatctattctccaatatatttgtggagaaaaaaactttatacaccttacaaaggttgccactttccttcaattcatttgtttatactggccttttgtttatactgcttaattactatttattatttgtactgcgcaccacttgcagtccaggttaccaaacattctcattcctggttcccagatgtacctataccttgtgttgtaaatcttatttgtgacttaatttaacaggaacgaccccgcattgcaaaattcctgctttttcctgtgatttct

SEQ ID NO: 14425 - DNA, 439 bp, Oryza sativa
  unsure (1)..(439): unsure at all n locations
agcttgggagtntggtgaggcggagatgaattgtgttgttangcgtggctcgtgcccgcgtcgtgctacctatcggattgcttagctcattgtcccgcgaagtgttgatgatttaattaacttcgtcaatcctgcctccattattttattttagtttggtgcttgcgaagtgtacagagagagatcgtttacgccaccgacgtgtatcttgatgcattgtgcgtgtgttcatgttgttggcaactgtcaatgcaatatatggtgcacattttgctaatatgatatccttactggatcaaactcaagttgtttaaatctctctgagaaaaatcactgcttgaacaatgaacggacatgttctactctgatccacagtttaagatcagacttcattaactgctattaccctatccagcattgctggtacttccttctcatt

SEQ ID NO: 14426 - DNA, 445 bp, Oryza sativa
tcggaagaaatgtatactaacatagaaagttttcgtaatgattgttcttctaaactagacattgctgtaatttaatatgattgtgcatggttgacaacttgatattatcaaatatttaccttattatgaaaatcatttgcacattacttcccagtctcaaggaaggttttccttttaaggaaacaaccttgttagttgttacttttataaatcggtgccaataaaagcattggttatcccagtaaaagataattctggccatttagattggttatggtaacaagtacatggtggcatactggcatatcaaacttgtaaaactgaaacagtttatggaagatttcatattagagtaacttctacatcgaaatgtcttatgaaggatttcatgtttagtaattacgttttgagtcaaaggttcacacatcgtcgtagtagaaagacc

SEQ ID NO: 14427 - DNA, 484 bp, Oryza sativa
  unsure (1)..(484): unsure at all n locations
agcttgtaaaggttcctgttatagcgttattttctatttaatttagctcgttcagggagcttgcaactcgatgttaatgggcgtttagtttctactctcttaatgccttaattgcgaatgcatgaatttcatatgaattaggaaacaattcaatcattgcaagaatcttaaaatgcgaatttgtaatttactctctttggttaatgtggttactagtagttaccacttacaacttcatggcttcatgcacaggtcgaagatgatggtgatatcctctcccttccagttgatttccagcagctatcgaatctgacctggattactgaagctctccaggaaaatccaaaagaagccttgctttccatgggagctgcagntcatctggttgatgtttctattcatggtttcctagaattaatgagcctgttacttttgtagtgctttcatgttttggccactatacctgatatgtcagttcttgata

SEQ ID NO: 14428 - DNA, 379 bp, Oryza sativa
  unsure (1)..(379): unsure at all n locations
tcttcttcttcttcttctccgcttgtagtagacttctatttgttgtaaacttggcgtcgcgatctccgcgcgctccgggtgcttcgcttcngaggtttgggaggatggcggaagcgtgaggtgaggtgagggagtgtgaaatcgcgggggggcaatgtccgtgctgggcgcggagggggcggcgatgggcttcctcccggccgcggagcacggcttcgcgcgctcggcggcgccgtctccgcttcgggaggaggaggatgtgctctactacgacccgaagctgccgccgttgcggatgcccacctccttcgccgcgttccctgggtccagcttcggcttcgactccgactcctttctcagcatgagctccacgccatca

SEQ ID NO: 14429 - DNA, 460 bp, Oryza sativa
agctttgtgtccgacagcgacaacatctatgttgatcagatggaggtggacgaagacaagagttggaatcacgtggagaatgaggaggtgaatgatcagcagcaaccagctgaccacaaggtggaccaaagtggtgatccggcagccagaaagatgaaggggaagatgaacgagagcagcatggtggtgatggagatgcaagatgctgacaagcaggctggtgtttggtactgcaacaagaatgatggcaagaaatggcactgccgaaacatcgtcgacgggcccaagaccctgtgtgactaccacctagcaaagagccgctcttactacacccgcactggtgaggcaggtgctgcagctagttccaagtcaggccgagcaaaggcaccagctattggcaagccaaagtccagttccaaacgaacttcagcaggtgagtcaagtgctcataacaactcta

SEQ ID NO: 14430 - DNA, 445 bp, Oryza sativa
  unsure (1)..(445): unsure at all n locations
tcagcttgcctatattgcttttattggtcaggtgctcattgactgcgacacaaaacaagtccgaccgagaccatggttaccttttgacgaaccgctcaactcaaaggtggagtcttgaagcttcgggatccgatctctaagggcatgttcaatctttctagccagctctctggcttcacgcagctggtctctgggtgcttcaaaggttccaaggtggggaactaatttttcaagagtcgcagtctttggctcattcctgagatggattctctgcacccacaaattatccgtatctaagcaaagtggctgacaggatgattgaagccgtatatagggagacttacatttacaaggcaagtagcttgggcgagtgtctttnttagcagacatacttcnttcgcttctttttggttatttattacgatcccccacggctacatttcgt

SEQ ID NO: 14431 - DNA, 345 bp, Oryza sativa
  unsure (1)..(345): unsure at all n locations
agcttgcggctaggcatgcccactcctatatatgtgtatgaaagacgcgccactcctacttggtccagtcctccttggtgagctcgtcgatctccttcccactcgtgatgggtgaacaagatgtctgtcgatgaatgacaatcatattaactgtagctgaagcatgatgaccatatataataacatacggactgtaggatactaggtatgcctctgtatgtggacccatcatatgatacttagcctctgtgattgactcgaacatggtgaatggaactgtcgcatacatgccaacgattaaccgaggttaaataacatcggtcgctctgngactatgtcttctca

SEQ ID NO: 14432 - DNA, 496 bp, Oryza sativa
  unsure (1)..(496): unsure at all n locations
atcctcagagtcacctgcngcatcaagcttgtaacctgacttggccgagctgaatgtgtgttcatcgttcacttcaatttagtttacttccaagtgcaatctgcctatctatctagctactactcctagattgttagaccagtgatcaagtagtcgatcaaactgttgatctgtttgaaatcctcatacttaaactggcaacttgtgcttgattttgctttccatgcatggacctagtcatgcatcactgatcgctaagtcaaaagatcaaaatctcgataccaagttaggaatattcttggagattgtacatatagaaaaatggagaagatatgaacaggtactgaatagtgatttctttgatcaatgtgcctggcaattaggaaggaaaaaggagtcaggctaacatgtcaaatggccatacatatattcagctcacaattaattaatttattacaagatactttactctgattnttccatgcatggacttcat

SEQ ID NO: 14433 - DNA, 337 bp, Oryza sativa
  unsure (1)..(337): unsure at all n locations
taccctggattctgaaacagctgtacatttggttgataaattttcactactttcagtaaagaagcanggccaatacatggccattgatctttaaacacaccttcatatacccttcctttatgctctttttatatctaaactactcctgtcctttgagattctttgtggctttgtgggtgaaggtttagaatctcaagaaattgtctntactgcacataaatatacctcataatgccaaaggtagatttagcgtatctatgtctaaagcaacagaagtcagagatngttangcctttaggggcattacccttggtaggcatgagacttataccatatc

SEQ ID NO: 14434 - DNA, 414 bp, Oryza sativa
  unsure (1)..(414): unsure at all n locations
gtcacctgcggcatgcaagcttgctgtggggcgcatacgctctatagctcgtttctttcggngatgacctctgtgcctcggtccaagaccaataacccgcgaagcttgccctcacgcacgccgaacacgcacttatcggagttcagctttatgcaggcggagcggatactctcgaatgcttccgctccacccgagagaaaagtctcttggctgcgcgtcttgacaaccaagtcatcaacataagcctcaacattgcatcctatctgactacccaatgaaatacgagtcctacgttgctgagtttaacctgcattctttaaccctgaaggcgttgtcgcatagcagtaagttcctatggagggaatgaacgcaggtttttcctcatcctccctactcatgctaatctgatgatca

SEQ ID NO: 14435 - DNA, 468 bp, Oryza sativa
  unsure (1)..(468): unsure at all n locations
atccttaagcaccgcggctgcagctgaaactttcgcaccggcctgatctgatattttcacaatcaggcgtcgctagggccgacgaaatcgaggtctggcaccgcgaagactggacctcctggctgatccacccacaagatttcagatctgaagaagggaacactggactcttcatagaggaccacagacgaagaataggaaggacacagaatgagactaactcgactacgagactaacccgactaaactactatacgaaggagacgcgattgagcctgacccctctccctcccgtcaccggcggcgagccaccggaatcaaggaggaagaggggccagagaagaggctnttttttctctgtctcgggcaagctaggaggttccagagagcactggagtactactggagttgagattgtaccacggagattgtgcacatgttgtgacgggtcattctagtcatcactag

SEQ ID NO: 14436 - DNA, 451 bp, Oryza sativa
  unsure (1)..(451): unsure at all n locations
ttataaccccttctncacttctcctaaaccctaatactctatcttgtatcatgagctttagccatgaaatgaacacatataaccctgaactgtacccatacccgaagttactgattgaaaggaaaaaaccttccttttttttcctgcgaacagattatttcctctgcaacaaaaaattctagaccacaatttcaagcccacactctcatgctagcaaccaatcgagatcaaaatcatacagagttgaatccaccaagcaactaaacaggaaaattcttttttctaacaaaaacaaaaaataacaaaattcccatcctcaaacacccaattcccatctctgccaccagaatttcaacctcgggcaaatagcacactaatcacgacgggcgggtgcatcctaatcgaacacacgggtcggggcacgagatatagagagaggggctcaccttgc

SEQ ID NO: 14437 - DNA, 489 bp, Oryza sativa
  unsure (1)..(489): unsure at all n locations
agcttcctttagtagaatgatttccttaaccgtatattcaggaatccgactattggcgacttgataactcccatcggctgattccgagatgctgcagccgataatgattctaagccgatgacgtctttgccgattaccaaatttcactgttaacaccctttgaatcacagggtagaaaaaacagaggaataggaaaaacacaggattctgacaggaattaaaatgtaaaacaaaggattgcaaaacacataaaaaaacaggaatggtcgtttgattggagcgcagtaaaaacgcangaatcggatgagagagatagactcaaaagaattnttccaagaggttggagctcttgctaaatttccttcaaaatccacatgcaatgtgccattccatangaatttcataggaattggaaagcttcaatcctttgaatcaaataaccaaatanggaaaatttctatantaattanatcctataaaatcctatat

SEQ ID NO: 14438 - DNA, 311 bp, Oryza sativa
  unsure (1)..(311): unsure at all n locations
tatataggataaatgaagccctgaagcttggaatataccctaacggttgtctctttatgaataagaacctatacgcaaaataaccgatggtctttgctgnggctcgcgtgtcgtcacgctttatgcagtcttttggcgcaccatacgcgatggacatctctggccttatactatcgtaaaaatcttatcatgttaagcgatggtcttgctttggagttcatagttctgtgctctatgatgtgcaatcagcttggtgctcatctatatataatcttttgctgctggattctgggtattggactaagttggaa

SEQ ID NO: 14439 - DNA, 333 bp, Oryza sativa
  unsure (1)..(333): unsure at all n locations
tggagccgctcctgtaggtgctcgccgccggccaatgcttcgtccaatatgggctcaacgcccacattcaagccctggcggaaaagcaaacagtccttgaagcatagtgggcacaacttactgctgaccgcgcgcaggttgaccaagggtgccgagccgtgtacgacatggtgaatgtgggacacaaaattgcgccagcccccactagcttaaatccatgcgcgcgaggaaacactggactctgtcatgcgggagactgatgaagagcggcaagcancactgattgcctcaagcgttctgtgcgaagtgcttggcgacatccgcttacagtac

SEQ ID NO: 14440 - DNA, 397 bp, Oryza sativa
agcttggagtgtgtgagtgaagtgaatatgttatatgtccattctaccctcccaccgccattagggagtcatctggactggccctgccaagccgcactatcaaacagctgtgggagtggatcgggcgaacccatgtatggtccaataaggccactattctgcctgatgctactcctcagtctaccatatctattcttttgagtggaatgaccatttgatgatgtgttgcgaagtattggcccacatcctgtatggataggatctcacctacactcaagtgtgacttacatcccagcttcagcggtttattaactgcaggcacatatgcaccaacactcgcggaatatgatagaaataaacctaatcactatggtggatacataatactttctgctat

SEQ ID NO: 14441 - DNA, 335 bp, Oryza sativa
atcatgctcccatgttccgcttgaccaacatctgtgccatgttcatcacgaatcaactcagctggagaacccataggtgttcacataggcttgcaattctccctgttgtacatcctccaaagaaccgtactatactctggttgatgcacctgagcaccttgcagagcacgctgacccagccatccccaactgatcgatatctgatcaatcatgcttatcgctaatcacatgcagctaatcataccaatatctacgagcactgcgtgcgatcaacacccaaagatgatagcatggccacacatgtagactcaaccttcatgatcagcacgctgtac

SEQ ID NO: 14442 - DNA, 427 bp, Oryza sativa
  unsure (1)..(427): unsure at all n locations
agctnggatcaagatctaagcaactctatttattatatcatatctcacaacagcttaggcttaaatcacgcagtgtgcaactcacatctctcaggttcccggataatggttggctaatcattatttaaaacttgagagagtacttaactatgtacagatacattagagatataaagcagagcatatattcatcatttcaatgtggagaactaggttatcttacctagcatggtaaaaactatcctatatttttggtattatctattgtgcaaatttttatgtttttgagttataaatgcaaatgcatgaattgaaacatgcaagaaaggaaatatgcacgataaatgcagatacaagtcacctttgcgggggagagacttctatccccaagctagctccttgctcatggtccagagtaagcattgaa

SEQ ID NO: 14443 - DNA, 433 bp, Oryza sativa
ctcagctggacacctgaccgtgcccgcaccggggatttttttctccatggggatcgacccacaagattgaaattgccgcggtatctggccgaggcaattccggtgggaaatcctcgcctaacggattatattcgtcgccatgccgatgattgtcagtcaaatttgtattgtcccatggttgcagatcaaatgcgacggaatgcgctgcatgatcaagaatgatttctatgcatgatgaaaaggctggactatggagacgggatgagagcagctcgagcgcaaatatgcagcatgatacaggaacgatccatatcgcgctcatttctatgactgaagtgattcactatgtcctggagaagctggcacggatctgttggtatcacatgctcgcatgctctctataaagaagcttatattgcatgccttgcagaca

SEQ ID NO: 14444 - DNA, 463 bp, Oryza sativa
agcttctgggaatcggcctggacgcatgggatgagattgaaggatgttgcgccgcttgtatacgcagcctccaagaaaaagaacagaacgcttcaacaggcttcgcaagcgaaccaatggcttcttgacttggacttgccagggactgcgagctggacgacagacctgattgatcaacttgtcggggtttggatcgccgttcaggctatacacctggtagagcacgaggaggacaatataacatggaagcttactaaccatggcgagtacacgacagcatcagcatataacgcacaacttcttggaaccaccgctactaacttcaataggctaatctggaaagcctgggcgccgtgtaagtgcaagaccttcgcctggctaatcatccaaaatagagtcaggacctctgacaggctggcgacaagagggtggccaaacggttccatttgccccttatgtcgtc

SEQ ID NO: 14445 - DNA, 351 bp, Oryza sativa
  unsure (1)..(351): unsure at all n locations
gttgatgtggatggtgaaaaatttatatatttattttgtnaattcaaatttgagcgcaaaacctattgtgaattattaaaaagaaaaaagatttaatggaatgggcccagtatgcactgttcacgaggcccaataagggccacaatgggaagaaaatatctttggaagcctctgcttcgtttctctggcgaatcctaccgtttttcccctctctcgcgtagctgcgctcaagaccgaaggggcgactgcgtgcgcccgcgccaaatccgccgtcttcacgccggcgaggccggttccctcgcggtaagcggcggtaaccgcgcggtacgagatggtaaccgcctgtgtcga

SEQ ID NO: 14446 - DNA, 376 bp, Oryza sativa
  unsure (1)..(376): unsure at all n locations
agcttacaaaagagaagagaaaagctactagtattctatcttcgaactcttccgaaggcttctggactcctgatttctactctattcctattccaccatctagatattactaaactaagggcccctttgaatcaaaggatttatgtaggaatttcataggattcaaatcctatagaaaattttcctatctggccctttgattcaaatgattgaagctttccaaatcctataaaattcctatagaatggcacattgcatgtgcgatttggaggaaacttttagcaagagcttcaacctcttggaaaatttcctttgagtctatctctctcatccgantcttgtgttntttctgcgctccaattaaacgaccattctt

SEQ ID NO: 14447 - DNA, 423 bp, Oryza sativa
  unsure (1)..(423): unsure at all n locations
ctaagcttgacaactctgccaagtactgtcgtgcatcttttctgtttaccacataanngncccaccaggcagaaacatgcccttgcaactgatgtgtaaaaaaaacaaccttcttctggtccgtgcattgcaaaaggttcagcttcttctcaatagcacggagccggtcgntggcctccattgggttggtggtgctcgagatagtgggtggcttgatgcggagaaagtctaacagtttggacaagtgggatggtggnggaccaaactgttggttctgttgcgcctgctgcaacatctgatggtaatggtgttgcatctgttgcatcatcattgtcatcatctgagtgaccattgcgttctcgggcgagggagatggactgctgctagatgcaccactcggaatgagctccatcggtctgctct

SEQ ID NO: 14448 - DNA, 464 bp, Oryza sativa
  unsure (1)..(464): unsure at all n locations
agcttgccaatgaagactnggatgagctgcttgtttgaaatgatgaatagaaccgttgaaatgatgaatagaccaatggttccggtactcattatcctgcataagaaataatcatagcttctatgaatctacacattgttttgagtgactgagcgaccacatgctcacttgcagtagcggatctaaaaaattntattgaccccgggcaagccactgacagatgactagtactacaaatgaaaatgaacttgtacaactctacggaccattttaccattgacacaagtaaaattaacagtacgagctaattggtgtaagagttaaaatcgatatgacgattattgtgtattatcaaagctgtacgcttgtatatgagctgtgatggcatatatagaatgcaaacatgtgatggcatgagccttaattatatgctntgctaattntctcaactaatcaaacattca

SEQ ID NO: 14449 - DNA, 384 bp, Oryza sativa
  unsure (1)..(384): unsure at all n locations
tcgatgcctcgggcagagaccaaaaacccgagaagcttgcccgcaggtacaccgaacacgcacttatcggggttcagttntatgcgggcggagcggagactctcaaaagtttccgctagatccgagagtaaggtctcttggttgcgcgtctttacaaccaagtcatcgacataagcctcaacattacgtcctatttggctacccaaagaaattcgagtagtacgttgaagagtaggacctgcattctttaacccgaagggcattgtcgtataaccaataagtcctatgggggtaatgaatgcagntntttcctcatcctccctagccatgcgaatctgatggtaaccagagtatgcatctaaaanacacaaaaggtcgcaccct

SEQ ID NO: 14450 - DNA, 454 bp, Oryza sativa
  unsure (1)..(454): unsure at all n locations
agcttcgatctttagctgcctcacgaaccctgtctgcgctaaaaaccgcccgcttcacgtaccctgctggcgccaaaaaccgcaccgtcttgatcttgatacacaactctcatccatatttcattcgtcactatgtccctaaaatcggccgaatccccatcgattcagatctgacaatttccagtccctagtgtcttcgctcaccgacgctatccagtggagacagagaagaagcccctccaatatagttttgcactgaaagacctacttgggatacttctccaggctactagtttttacattntgtttatgaacgtttgactaatatatcataacatctcaatcgatcatganaacaagatatcaattctacatgttacaccctttatttctctgaactacacgccgcaccttgcannaattagaaatacacctaagcctattaagtcaaata

SEQ ID NO: 14451 - DNA, 319 bp, Oryza sativa
gaccataaaactcagcttattagcaacatcacagaaaatgaggtttctcttttttttgggggaggaaattgattatgaagctgcgcagagacaccgagctcttgtatagttgacgtcttgtaatgggaggcaactacagcatccgcttctatttggtgagaatcccgttctgaccgacttcaacctttggtacttccgacgagatcacatcgtgataccgaacctcaattggatcatattgcgggcctacaggtaacagcggggtcgggatcatgacctgaggttcgttctgtgatactgcgttacctcttacttggca

SEQ ID NO: 14452 - DNA, 472 bp, Oryza sativa
  unsure (1)..(472): unsure at all n locations
gtcacctgcggcatgcaagctntatgcacgctaatgcaacgactaacgtttccataggttactagctggaccacatcggctngggactgacaaacgataggagttgatgaggatgacggactctctgactacatcacattctatgtactcataccgttgatgcaaaatatggatagttacgtatgaatcttctgacttgctaaggtgtgattaatgagaatgctctattgctatctactttctagaatgataggagagcctgtcgctcaattcaaagtcacggagacacagaatactaacgtcaacaaatctaccgagtgccaccatcatgtagcagaacacccgttcgaacacgaccatccgtctgtatatccatcttgggcatatggatatatttcaacccctgctcacgctggacctgtaactaatctgataattcttactcacacccaacgtaagcatccatccatga

SEQ ID NO: 14453 - DNA, 495 bp, Oryza sativa
  unsure (1)..(495): unsure at all n locations
agcttgagcagttccacagcaagggagacatttagatcggcgacgacagtgactcanagtgggttcttgagtccttccacccccctgagcttgatcctgaggagatttgcaacttggatgtggacaatctgattggctgtggaggcactggcaaagtttataggcttgaattgagcaaagggaggggtgttgtggccgtgaagcaactatggaagcgtgatgatgcaaaggtcatgagaactgagatcaacacacttgggaaaatacgccaccggaacatcctgaaactccatgcattcttgaccggtggggaatcaaactttctggtgtatgagtatgtggtaaatggcaatctctacgatgcaatccgccgtgagttcaaggctgggcagccggagctggactgggagaagcggtaccggattgcgtgtggaaccgcaaagggcatcatgtatcttcaccatgattgctccncggccataatccaccgtgaca

SEQ ID NO: 14454 - DNA, 402 bp, Oryza sativa
  unsure (1)..(402): unsure at all n locations
ctctggnaaaatattaaagtcagattcactttgtaaaagcatatttgtccctatgaattacgtatgggaatatgaaggttttcaaatccctttaattacgtatggaaataaacactgtagtccttgttgtacttttgcaagcagaaaactttctctgaacaacatacttatggaactcagaaaatgctgcaatcatccagtaggttttactttctgttttgttgatcagatgcagaacttggtctcttttctcttagatgtacgaattgcgtgtttttgcttttccgagtctctcattttgacagtgatttgtgtgcagtggttacagaaaatctgtagcatacgagaagcttaacattggctttaatgtatcagttngttaaactccattcttacaatcct

SEQ ID NO: 14455 - DNA, 403 bp, Oryza sativa
  unsure (1)..(403): unsure at all n locations
agaaagcagagacagaccaagaaggcccatggtctgaaactctgaactttaatctgaaacactcattaagaggctacctagcatccattttattaaggaagtctgataatgtatatnngttttaagggtagaggagtntattagcacagtgatgttaacatcttattctaattgcagaaaaattattagtgagaataggtgtggagattatgggtaccccatacccacacggcatggttatccgactagtcaaaggggatagcttatatatatggaatatgtaacagattatgacttgggtattacgtttccttgtatattacggaacggcctaaagtcctggtttgataagaatataaagtagagctagaanaccgataccgtattggataaaggttctatc

SEQ ID NO: 14456 - DNA, 298 bp, Oryza sativa
tataatagagaaaagaaaagctactagagccatatctgatttctttctgaaggcttcgggcacctgaagtctactctattcctattccaccagctagatactactaaacttaacttgagagaaatgagagagctattgcttgagttgtgtgagtgaagtgagaatgtgagctccttaaataggcaggtaatgacggttatggcggctggaaaggtcggtaataccctccaacagtcataaggaaagaatccacaccgtccatccaaaccctgcatccagcggctttacggcaggttcg

SEQ ID NO: 14457 - DNA, 491 bp, Oryza sativa
  unsure (1)..(491): unsure at all n locations
agtcacctgcggcatgcaagcttgtccctggatgatgcagtacaaacgtttcatttgatgcagctggttccgtcggcatggttgtcacttgttcatgcagcgaatcggtgaccttgattgaccttggaagattaaatagagaggccattgntgttgcgaagaagatgattgtgatccgataataatgtgccatatgtaaagcttaatctattttctgaaaaactgtctaatggtttggcgccttaatatttatttggcgcctttgtttccctggagggccacgctaattaggattaatcgctaactgcgtaatctggtaattgacggagagaataatcatgtaatctccgtttatggtggngccacacaaaaagaatcgacaaacggatgcccttcacatggtaccgaacacggatagaaacacaacaacggaacagtgaagccgcagccgagaagagtggaggaagatgagatgttggatgacatatggg

SEQ ID NO: 14458 - DNA, 432 bp, Oryza sativa
atatgccacttctagacttattttgttttcatgaatgaaaagattggccccacggaaaaaatgagaagaaaagatgagagagaaccacaacattgcttaagcagccaactggtatgagaaaggaaaaatagcccattattatagaagagaatggcatcagactaaaatgggtagatcgggagggtgaatatgatacctcacgcattgcactcggcctcactttaattttagccttctcaaagtcctcagtggtcactaacaagagcaagtcatctttcttgccactagatccattgttttctgtgtcattgctcctactggtgcacaggacatcatccactgacatttgtaactttgagagagaggatgctatcgagtttacttgataccccaaaggatcattaatctctctaatatcacgcttttctgcat

SEQ ID NO: 14459 - DNA, 490 bp, Oryza sativa
  unsure (1)..(490): unsure at all n locations
ttaagtcacctgcggcatgcaagcttgctaaaatacatacatgttgcatgcatgatgttgagagagagtantancagatagtttcaggagatttgtgaaacacaccgaagacacatattgaaacatatcattatcacgtatgagatattttattctaacggtttgaaacatatgtttttttttgacataatataatcatgtgatatcttattgtaaagatttaattgcaacgaatacaacggtgtgatcggatcgtagatcggataagtaatttaagaggaaaaaatatttaaaaagaggatgaaagaatgaaaagaaacagctaggcacatacattacagtgacatggttcgttcccacatgcgctcgtttagacgtccgatttttggtgtgatgccggacgtccgagccgtagcgctctttcgctgatagcggggtatgccaaaatangatgctccgggaggcactggaacatttcactcatgctgat

SEQ ID NO: 14460 - DNA, 448 bp, Oryza sativa
  unsure (1)..(448): unsure at all n locations
tactaagcttcaacggtgccatctgtaaactggcctggtaactggtgttgttttataattccgcatatggcaagctttggcccaagctccaccaaaatcaagagcgcaagctctcaacatatcttccaagaattgattgacccgctcggtctgaccatcagtttgtgggtgataggccgtgctgacatttaaatgggtgcccaattcttcctgcagcttctgctagaattttgaggtgaactgactccctcggtcagatacaatctttttgggtactccatgtangcacatgattctcgaaaggtaaagctccgccaaccttttgcccgtatatgtggtatgtactggtatgaagtgagcaaccttaatgagtcgatccacgactatccagatcgaatcgtgacccgatgatgtccggngcagttctcgtataaagtccattccaatc

SEQ ID NO: 14461 - DNA, 471 bp, Oryza sativa
  unsure (1)..(471): unsure at all n locations
agctggggcttgcttcgctgcctacagtagttctcgtaattcctctctcgttcanatcgtgacctttatagtctcagtacgccgctgaggcttgccgcaactagccgccctcgttgtttttcgtcacatcccttgtgtctccggcggtgtggcctggcgagaccagtcgtgggctttctcggtgaggtccaagctctcctctccttctatcaattcatcgcggcagcgctgtcctcgctccatcactccaagcgactatgctcatcgatcggcttatcatgaacaatgatgatgtgccatttggagcagcacgggtgtcgtaaaccaaattaanataccaaactaacatgtagtaagaaaacctgacaatagcatccatgcggacatatatagctaggaacacatgtttcatacaagntaatgtttagtcatgtaataggggtgcataatagacaaatagtcagttgatct

SEQ ID NO: 14462 - DNA, 455 bp, Oryza sativa
acggaccttaaaactcagctgagaaccttggctattcgattttagattttattttgtccataagctgcttttgcggccaaggtacttgcaccatctcttgtagttcttaaatagcttcttcatgactgtgtccagtgctcggtcatccaactgaaaatgtgaggaaaaagaaaagagtaaacaccagaatgacacaagcaccaccagaatgacacaagcaccgatatggacgttgagtaagagtgagaccttgggttgttggtcgggcttgggaatctgccttatatggacgttggcaagtaagagtatgaggtgttccctttggttggacacgttatctttctgcagagtgatagttgaattgcaaataagtgacagataggtgaagagaatgaaaataatggttaagttagtgggtgagcctgagggcggtgtgattacctgaaatccaaaca

SEQ ID NO: 14463 - DNA, 477 bp, Oryza sativa
  unsure (1)..(477): unsure at all n locations
agctnganatggtctactntagtaaaaaaagtcttagctgactaacaatcagtaactagcacatctgaaattagccagcactaccaaaattcgcggcagtaactagcacccaatcctcttccatggagggggaaggaaaacgaagtggtgtatcaacgcactcacggngtgagcagctcgaggcgaaacggcgagccgtcggtgacgcaggtgtacaccacggtgcccagcatgagagcgcccagcgccgcgaacaccgccctgtacacgcctatggatcccgccgccgccatggatgcgcccgctggccgccgcgcggtcgccgagggtatcaaacgaagtggtgtatcaaactaaactaccaaaaactcaccgcgagacgaaatggngaagcggnggaattcgtcggcggaagagtcgtgcgaaacagtacagaangggaaatttctcatcnggcgagtggacgggacgcggaca

SEQ ID NO: 14464 - DNA, 446 bp, Oryza sativa
  unsure (1)..(446): unsure at all n locations
tngatttccctattgataccttgctacttaatcaaagtattactgctgctgtgaagctcatgtctacaaatagattgcatgttcctagccactacagcttcgaatttgatgatcaatacctgctttcactgattgatcatcaaaaggacctctcttttatttattggcctgatccaacaatgactatttggcaaaagctaattaaggataccatttactatccccacaagtggtgttcttgatagcatggggttcttccgtggaagtgataattcaactatcatgtcatttgacttagggtctgggattaagagaagactaacacttgattntgatggtaacctcaggctgtatagtctaatgaatgatggaacatggtcagtgacatggatagcnattcctcagctctgcaatgtgcatagcttgtgtggcaggaatggaatatg

SEQ ID NO: 14465 - DNA, 468 bp, Oryza sativa
  unsure (1)..(468): unsure at all n locations
agctntaccggcagggtttttctggcctactgtcttgtccgacgccgacaaaattgtgcgcacgtgcgaaggttgccaattnttcgccagacaaattcatctaccagctcaagagttgcaaacaatcccgctgtcttggccgtttgcggtttgggggctcgacatggttggcccgtttaaaaaggcagtcggcggttacacgcatctctntgtggccattgataaattctccaagtggatcgaagctaaaccggttgtcacaatcacagcggacaatgctcgagacttcttcatcagcattgtgcataganttggagtgcccaatcggatcatcaccgataatggcacacaattcactggcggagtttttaaagactnttgtgaagactttggaattaagatttgctacgcttcagtggcacaccccatgagcaatggacaggtggagcgagccaatggcatgatact

SEQ ID NO: 14466 - DNA, 434 bp, Oryza sativa
  unsure (1)..(434): unsure at all n locations
cttagtggtatagnggtttagcccaagaggccattttgcttctgtaagtgtttttgcttttggtgtgaaggaatgattcatgctataagaaggaatttgtcttaaggtggagtttgttgagttgtgatccaaattcatttgcacttaataaagaccagcttctgccggagcgaagtggaagccttgccgaaagccccgtggtacggatcgtaataccttttagggtttcacctcatatatataactcttgtaagccgccgtgtggcgttgtaacctcaccccgatatagtgaagatattttgctggctggcgcccgtgttttttctctcctgctttgggagggttttccatattaaatctcgtgtcttttgtgatngatctatcgttatttatcgttcgtttgcctatctttttctaacattgattggattttt

SEQ ID NO: 14467 - DNA, 492 bp, Oryza sativa
  unsure (1)..(492): unsure at all n locations
agctngaggaccatggcttgagttctcacaatttgttgttagtttccaaatccaacgcatgaaagattgatcctcttccgttagtgattattgaatccagctcaaacaccaccttataaaggaactgtacactgataatgtgctcgtcaagattgccctgatgagagaagaaagaaagggctgggacagatggagagaacgttgcctcanagtgagaccaggtataaacttagccggtccaaaatgaaaactttctcttatccttagccaaacttgcaaaacaggtaaaaacaagtgatccaatgttcaatgcactctttnttaaaaatttaaaattttatttgaattnttttaattntgatatgtttatcatgtagcttatcaccttgagcggntgagccaacttaaaaccttgaaatttcacgagtggtgggaggagcgtgtagcacgcgaagaagtacccaagtataagttatgatacttacttcaact

SEQ ID NO: 14468 - DNA, 431 bp, Oryza sativa
tactgactctgcaacacattgcgtgctcacaatcaacacttttatgcgtaattgcacagaccaaaaaaactcaagtactacaattagaagattattattcaaggtgatggagattattaagaagggaagcaagcaagcagaccaatcaaaatgacatggagaaaccgttggtacggctctagtgcgcgcgggtcgcgatcggatggacgcccgcgtgatatggatgaaagatattgcgtccgtgtctcaccaccacctcgcacttgacgcgaagaaatcggcatcgaccagacgatgacacggcagtgttgcgacaacatacgatcctgtcatgttagccatattggatggatgggtgaagcaccctatcagaaacaagatatgttattcctttttttttctgaaacgttatatcatatactatcatccat

SEQ ID NO: 14469 - DNA, 489 bp, Oryza sativa
  unsure (1)..(489): unsure at all n locations
agcctgcaaacgctgcanatggttgatgcattattcgaaattctacgccatattggatcattgacacaattgagggctttcgctgttagcaaagttagaaaggaacattgtgtctatttgtgcaatgctatcatgaaaatgagtcatctttttcaactaaaaatcaagggaatagatgagaaggaaatcttacagcttgaagaacttcatatgcctcctgctctttcaacgctctcattaggaggacagctaagtgcaaattcattgcctcatcttgtcgtcttgtcaaataagagtagctgtaacatcactaggttaagcctcgccttttccaaactcagtgaggactcatttagctgtttactgaacttggatagtttgtgcgaacttcatctcttgaaagcttatgaangaaacaggctatacttccatgcaacatncgttccaaaactcaagcgcttattaatatggggatgctcctgtctgaac

SEQ ID NO: 14470 - DNA, 416 bp, Oryza sativa
tgacaagcagctggacaccggggctgagacaagagcatgattttagcatgataagagcaacaatggatttatggtcacaagagatgaagggagcagcgtctacagcggctgatgccttgtgctcctggttctatttgcccttaattttgcatccattaatgttcagcggcagcggcagcagcagcaagctacggcaactccacgggccatcacagacgcgtttgtattgttcaataaattaactgcaagacaacaaatgacttgacctgcttgttttgtttgtaccaaatggtcaatgatttagttaatccagcctgtctttgttttttttttgttctttccacaaacctgactcttccttcaatgcatgcctaacaagggtgatctcatcttgttcgcttgcatttggtaatact

SEQ ID NO: 14471 - DNA, 488 bp, Oryza sativa
  unsure (1)..(488): unsure at all n locations
agcttccaataggcgctcaagtactgcatccttgcgtgcccctgatccagccgctactccaaagcggcctaccccaactgtgcaacacacagaggtggagctgcttgaggctctagaagctgtctccgacaatcttcgtcgacacatttcgcatgctcgacgggcaaacagtcctcatcccctgcgcaactataggaggaagtatcgcaaggtgcagcgtctacaccaactcgttagctcgcgcatcgcccagagctccgtcccagaggaagactggtctcttgacacatctgtcctcatcaagaaggtgttcaagttcccaagcattctagagccaccttacgacttgttccctgacgaatgggcatgtgagccaactaagatcaaggagaaagtcagacgagccatcatgaaggagtattggaagcggcgtgatanggagcacctcgtcctttcaggctcaactatctccttcgactacaacacgt

SEQ ID NO: 14472 - DNA, 433 bp, Oryza sativa
  unsure (1)..(433): unsure at all n locations
tgccagattactggtcgaagtgaatggagtttatttgtgttcataaaatgattccgttatgtgatgatctgatccttctatgtgccatgagataaccttgggttgggtttggaaaggctttgtcacaaacctccgacaccggcttatttctggagtaagttcgtgttgtgtgggtaaagtatatccctctacagatgtgaagtgtttccaattgcgtagttnttgttgcctgtgctttgtgaaaagtattgtggattgagactcattaccagaatcaacctttgtggcagatggatgacctacgtggtcacgaatggatntgtgtgtntcgggatgtttgcggcatcatatactatgcttactgagtagaagaagatctgtgtgctatgggggcagtgagaagtccgagaaactgacaatggctcggtgagct

SEQ ID NO: 14473 - DNA, 408 bp, Oryza sativa
  unsure (1)..(408): unsure at all n locations
agcttgtgaacgcgatatcaagtgaataccgtccatggccaggaattcctgaacaaggaaggatacccagattaggaatatggctagcagaaagcagcctcgaagatggtcgagtgtaatcacttctctcactacggaaaggaagctgggccgaggcgaacaagacaagccgcttagcaagcaggaaaacaagtaggcgaaagaagaggtttaagttaatgagagcttgagaatctagttatttagtcaactttctcttcataagggaataaggcgggtgggtgaaaagcctataacaacatcaaaatggaaaaacaagagtctcagggacccaganaaaggattntttgacatgttntgtttcttactaggatgctntgaatattccacttctttctatccttccca

SEQ ID NO: 14474 - DNA, 423 bp, Oryza sativa
tctttggcaaactactttcttctacggagctaccttcgtctcactcttggaccgaatgctacctggcataacatccttacttaaatatcttccgctctccagacttcaacagtgccatcttccagtaggaagagaatcttttcatcctcccacccaaccaagtaggcttcttttctataagaaatgctgtcgatatttcctgctaaatcctgcttatccaataagtttcggatatctatatcctggagtaagaaggattcaccttctttttagtggtgttcctttataaaattttttaacgttagggcccccaatgaatgttttcactaacacttgtgataaactcatcatcaaaagtaaatcctcttgttctttgagccaatacacagctatccctaccggattattattttcaatcaactc

SEQ ID NO: 14475 - DNA, 480 bp, Oryza sativa
  unsure (1)..(480): unsure at all n locations
ctttactgttcaaaatagtgatatcctatccgtacacgtggcatatgttcgatggggtcccatataatttttttctcgattctctcgtgaaactaatggtgccggatcgccgtgcttgacaggatagttagccctatggctaattaaggtcaccaaaatgattatcaggtgatcaattaggcaattagcgtgtcttaagcaggcatgttggacacgaagtgtgtgtacgtgtactactgtgctntgatatgaaaagattgaatctttttgggttggggtcagtgtttaatcaccaaccggtggttagatgggagctggctaataccattagtgtacctgcacttgtaggccagcttgagattgcagtaaacgaaactcaaggcaagcttcgatgtttggaacttcagtgcatgaatgagttcatcttaactaaacgtggagcacatgttactacgtattcagacatgaacaattatcttc

SEQ ID NO: 14476 - DNA, 385 bp, Oryza sativa
gtttttttttcaaatttttatgccatatggggacaattatcatcctcttcaaaattcatgtttaaggcataaatgggtccaaaatggaaaaaggtttaaaaaacctgcccattgcagcaaacaaaaacacaattcctggtgatgtttcaactatggtaccaggaggcatcaagatgggtaaaatctgcccctatgtggttttttttttaatttacttaaaatagatttgcacaatctcaatatcagctccatgatcatgcaggaaccccagcactgacctcaagaggattatgtgacgaggactttgctaaggttgctgatttcttcgatgcagcagtgaacttggctttgaaggttaacgctgcagcaggtcttgtcaaatcct

SEQ ID NO: 14477 - DNA, 400 bp, Oryza sativa
  unsure (1)..(400): unsure at all n locations
caaagtgcagaaatcatgacccattaatgactttggaataaccgaataaatattgctttgactgcaccggtgcagaactcatgattatcaacttcttattgagtatatgactacactagtactctctgatattccaaagatcagcaaattaacaggtgttccaaataaatgatttgtcaaaangttctgtcaagctagacaagagntagtctggttgttcaaagttcagtgcttatgatcctttcataaatttggactaagatacgttttgactgcactggtacagaactcatgatctatgatccatttatgaacttcttactgagtatgtctacatgtcaatctccacaatttcaagtccatcaaattaacagatgttcaacatatgaatcatcaaaag

SEQ ID NO: 14478 - DNA, 429 bp, Oryza sativa
  unsure (1)..(429): unsure at all n locations
atgcccaactttattatcaagctctattttgcttatgctttcgattcagtaaagtgggaaagcctgcttataatactagcggtcagaggttcccggacaaattggatcggggtggattaacaagttgctcacctcctcaaaatctttggttctaattaatggaatcccagggagttggattaattgtcgaaggggccttcgtcaagagacccttcttctccataccttnttatcttggtagcagatgtgctccagcgactgcttgaaagaaatgcaagcttaagacatccaatataccatgatcgcccctacgcaactattcaatatgcagacgacacgctgattatttatagagcagaagaagatgatgtccgagccctaaaatcttccatcctcagtttctccacaagcaactggttgcatatcaac

SEQ ID NO: 14479 - DNA, 316 bp, Oryza sativa
  unsure (1)..(316): unsure at all n locations
atttgtatacaatacattctaactattaaactgaagacttaattttgtgggaatcatatatcatgctctgacttgaaaatggtgacttaacagaatcattaaagctatgtctcataaatctggatgcacttcggaccgtatcttacatgtnaacactttaagaaattgctactgtgaatgtaaattgctagagcgaacattctttcattagaaatcacgttaacacagagcacaccaactccatacaaagcagtcaatatagagcatgttggacttctatgtatgttctaactttaaactagcatatgtatgctta

SEQ ID NO: 14480 - DNA, 371 bp, Oryza sativa
actaagctgaacctttgagcccgcaaccaaagaagggattcttttttctcacaccgggcaaaggtggtcaaatccagccctaacttggggaaccctggcaacagtctggtttgttcaacaattaacatttcacctatttgttttgaaaaccatttggtcaatacactaaacccaaggagtctaccaagaccactttgttctttcaaattttaactcttatgctggattacccattctcatcgaaaagcatgacaacattttggctcaaagaggcacaaactgaattgacagttataaaccgatttagatacccttcacccaccctcgatcatcagtcagcgatgtagtctgatgtgtcggagctgcgcctg

SEQ ID NO: 14481 - DNA, 483 bp, Oryza sativa
  unsure (1)..(483): unsure at all n locations
agcttgtgaacanaataagcaagcacacgcgtcatcttaatgatccaatccaattacttagaatcaactcaactcaatagtgcagtagtagcaaatcagaaaacaacttcaactcggactggcagctgctgacgcaggacgaggcgcgcggccacgtccgcgagtacgccgacaacgccgccctctgggaccacgacttcgccgcctcgctgctcaagctcagcaagctgcccatgccggtggggagcaagggggagatcaggaacaagtgcggcgccatcaaccacagcaagagctaattcggccacttatgcagggggttacgtacatgcatgcagacgatgtggtcgtagccatatgttttcttgttatatctcatcgctctaaaatacagaaaaccttgtactcgaaaaaaacatcatatagtactatcaaatcagtctagatttatactactagatagctagtgtctaatcgagtact

SEQ ID NO: 14482 - DNA, 442 bp, Oryza sativa
  unsure (1)..(442): unsure at all n locations
taagcttaagtgaaggcangaaaagtgaagcacaaaagataaatcttttgctaagatgatcaacgagagggtcgacatgcacgtgaatgtgtgtggtccgttgttctgaatggctgcgtagatcgagcagaactaagcactattgtgtcctatactactatgtgtacgtaattaattaaaaattaaatcagctggctagctctcttgttcttggagatgtgtctctaagataagagcaggtacaataacaggctataagccagctataaccacatatcgatatcgagaagaaaaaataagagagagaagaaaacgggctacaaatttatagccggctgcaacacagactccaatacgttatgagtgtatgagaggtangaccggatattaatgatgtagaatatttttataggtaactattgtatgaatgggctatagatga

SEQ ID NO: 14483 - DNA, 492 bp, Oryza sativa
  unsure (1)..(492): unsure at all n locations
agcttaacacattgtagcgtgcgtatgtgttgtgtcctactgcggaggagacacaagcctaattaaggttccttaatctcttctaaacctttagagaaatcatggaaaatttgaagatacaataaaacacatgagcctttgagcttgtcagtgtacacctccattgaaaaagattagagctagaaagttgccaccatagctaacctcgtactctttatgtaatattacatattaactttccaatacattagcctcatacttgtccttttcttttattatacattctctctccgttttatattctaagtcatttgactttttttaagtcaaaattctttatgtataatcaaatttatagaacaattaacaacatttacaatactaaattagtttcattaaattttacattaaatattctaaatatatgtttggtttatattgaaaatattactatatttttcaataaacttggttcaagtaanaaaaataaaa

SEQ ID NO: 14484 - DNA, 400 bp, Oryza sativa
  unsure (1)..(400): unsure at all n locations
ataaaactcaactagtgtggggacattgctgtaccacacctacaggaaacttgtcttttagtacctgagaagaaaaataagccttgacatattcaaaagaattcaacattgctaaaacatcataaaaatacaaaattaccttgtccctgctcgtgggccactcaactgggcgtttatatccttcangaagtggaacaacacacgtaggaggctccacagggcaatgcctctcacggngctcataatgtttggtggttcgaagcttcttgatagccttctcattgtccaggcaaagtatgtaatctgttccaagcattgtattgcataacttccaactatatgtggtttcatcatctgaagaatttgatgctgcttgagattcttctcattctttgactct

SEQ ID NO: 14485 - DNA, 377 bp, Oryza sativa
  unsure (1)..(377): unsure at all n locations
agcttgccctgatgtacaccgaacacgtacttatcggtgatgagacctatgcaggcggcgcggacgctgtcacaagctatctctacagctgaatataacgtactctgtatgcgcgtctgtacgaccaagtcatcgacataaggctcaagattactacctatgtgggtacaccaagaaactcgagtagatcgttgaaaagtgcgagctgcattctgtaaccccaacggcatgggtcgataacaataagatcctatggaggggaggaacgcaatgtattactcatactggctagccatgcgaatgtgaaggnggccacagtatgcatctacataacacataaggtcgtactccgctgtgggtcgacaatatgattatgc

SEQ ID NO: 14486 - DNA, 311 bp, Oryza sativa
ggacctgcttgagatttaactcgccacttttcaagatcagaataccttaagtggtctatctcagattaatgacgatgaaaaactcactgggttggcaggagcagcgcgggggacttcgtcgttaatgctttcgctgcctgccactggaggcgaacgattacttggatgcgcctgcagatgatggcgatgaagatgaggctgatgaacacctcttaagcttaacatcaggtatagtcgcactgatccgatcttacacatgacaccctaccggatgagcagggctatatgacgttggtggagttctcttatct

SEQ ID NO: 14487 - DNA, 485 bp, Oryza sativa
  unsure (1)..(485): unsure at all n locations
agcttaactccaatcataaagtggcaaaagttgatacataatgtctntgtctctaaaaaaataacactgctagctgttacccttttaagtaagctaattagtcactatatcgccatgttttggcagaagaaagacatatgattagtagatattgatgtttcacctcatcattttcatgataggagaaaatctaaaaacctctagagattatattgntcattcgacgtccctctagtgtatatttggttcaactatatcctataggtggntttcttggagagtaattntacattccttaaggaggtatttangaggtataataaggtaccattttttctattgtaatttagtagctagganatatgatgtactaaattttacanttaaattttggtaccttatggtaccttctcaagaaccataaaattactctttcttgggaccttgggtcttgccactacctccattntcctacatttccacac

SEQ ID NO: 14488 - DNA, 445 bp, Oryza sativa
  unsure (1)..(445): unsure at all n locations
tgtgtnttactgttccattatccatgcagaaatgagatgtttaaanaggtgagcaaggaaaaaagaaaggcaggcagtgtggctccctctgcttttgttggtgagccaacaagagacaaaaacatggccacactttggagagtttgggagggtggtctctcacggcataaagtcctaaaaaaggagggaataagaggtgatacggttgggtttgacaccggctgggcagccaagaagcagccactagtcctcccagacctggccaggagggtcttcatcaagaggttgaccctgccacttggatgatgacacaatcagttccaacatttcgttcatagttgattataaactaaaatgcttattagacatataaattaattataggtaaaacttttatatatgtgggttcttcacgatctaaaagcaaacgctganaaaaattatg

SEQ ID NO: 14489 - DNA, 430 bp, Oryza sativa
  unsure (1)..(430): unsure at all n locations
agcttcatggatggtaatgcacgatattatcttatttttatggctgaagaagacatccattagactgcttttaggtgtcctggtgccatcggcctgtatgagtgggttgttgttgatggctattaaataccaaattcacacagtcaatacctgcataaatctgaaagtataaaacatccaacatagtgtgagggtttatttctaacaatanattctcaaccatcaaagttgagaagaaatatacataaaggagaggaagaattacattcatatccaagcctatggagtcttgggcccataagtccaacgaaatacatgtgggcccaatcactatgccactagattaaaggcctctctgccatgatcctggagaaaattcagggccaaatggcccagcaagggttcagccgaacccaaaactgggctgttc

SEQ ID NO: 14490 - DNA, 442 bp, Oryza sativa
  unsure (1)..(442): unsure at all n locations
tgagctgaattataagaggctctatcgtactatattgtattctanaataggaagagagtanagtagaagaagtcgaatgaattccggagttgtcggtaatcttctctcatttcttttattntgtttattactctaatttcaatataatattcttcctgagtaatttagatttatcttgtgagaattatctcttggttagttcctaaatagcatacgggattattgttcactataatcaactaaaatatagtgattgctttggtgagttataaacactaaagtagatattaattacttagacgtggtgtttaggtaattgttatccagtaattgctgcgtatcccacagtacgtttaaggtangtgtagaggtggtgacagccatcgagatcacttaagtcctccctgtccgagtacgtagtagagcaatatctgngaacaac

SEQ ID NO: 14491 - DNA, 471 bp, Oryza sativa
  unsure (1)..(471): unsure at all n locations
agcttcacanaatgcaccaatgttcagttagaaatgcatacctccttttagctaaagggaaagacacctttgaattttaaggagaaaagagagtttgttaccctataaaatcacgatcttaaaacagaaagataacagagaatcacaagaaagcgagatcagcgcaacggcatgtacaatggttgttaatagcggactcttggcgttgttaattaggaatattcgttgacatgaaagagcgaaagatgagagacaaaacatcggtgctatgggtaacaacagctcaacaacgactcttagcctatataatatggaaacatggttgcatgagggtgaaaaaatggaaagaatagtaataagaagaatatttttgagtaagatcattntcgtctcaactaatgtaaaaacatgggctctaaataatcttggtatttataaaagaactagaaaattgtctatgcgttgaacggg

SEQ ID NO: 14492 - DNA, 452 bp, Oryza sativa
  unsure (1)..(452): unsure at all n locations
cggaccttaaatctcagctntaggaacaatgccattgtaaagnttccatgtaacgcttgatcatggagaatgggtactatctattcattataagctcttagatcatggagattaggactaattgttatgtgccaagcttagattctgagataaggtgaagaaatatttttgggataacatagtctatcttatataaggcatctgttacagacagtgaggacagcattgtggaccaagcaagattgtggggacataacccgtgtgagtgcatactagattcccagtttgaaggaaagggcacacttttgtctaggtttccttcctgatataccttgattgtgttattttctgttgcttgaaagtgattggtgattagtgtgtangaccaattcaacatatcctattgcacctcacttgtattatcttattgacaagtataaacaaaccctgag

SEQ ID NO: 14493 - DNA, 482 bp, Oryza sativa
  unsure (1)..(482): unsure at all n locations
agcttaagacattgactctcgaggacgagagtttcattccacatatgagcatgaaagtttctttttcaaaatcccccaggattcatgctcacataaggaattagtgtcacgtcgctttgcgaggaccacaaccatcttccggttttcatttctaacatatttagaagaatgggtgtagatgcttatatttatcataaatactgcaaatctcgtatttgtggcactaatcttgcagagcgatgtccccatggtcaagcttgtgaccataaacaaagcactgccgggagatagcccagattactatggtaagttttctttctaataaaagcaagaaccagttnttatgataatatgcaccttcaggtattcttggtcgctaaccattttagggtgagaataagaacgagggtcatgcgatgcttaagaacacggtagctacatcaactgtacactntggtgaccatnggtattggaacacactc

SEQ ID NO: 14494 - DNA, 416 bp, Oryza sativa
  unsure (1)..(416): unsure at all n locations
actcagcttacaatctcacatgcatatgtaccatgccttgcattgtcttatttcaatctgctcatgggcctatccctttcatcacacatggaactcaacagtgtgatgcactcaccgatgctcacgaccctactcaaccgccaaaaacgtaatgattttcatttaggttcgaacccattcaacatcaatgatccaatttatggagggtttttcataagatttgaatcctatggaaagaatttgtatttgaccctttggaacaaattgaagcttttagaatggtgtgaaatattctttcaatggctccccaaactagggattttgagaacccaacctgatggggtttttttctgagttaaatctnctaattttatggagtgttttctatggttgctatacgggctatcctgtatctt

SEQ ID NO: 14495 - DNA, 442 bp, Oryza sativa
  unsure (1)..(442): unsure at all n locations
agcttatgttacgtntaactgcttcatgtnttcttgngcaactganagccaaaaactgatttggtcgaccagccaaggtcgtgacaaacaagacgtctttgtatatatcttgtgtgtntgcttaacctacttttagtgttctcctgcatatcttaattcaatcaaacttttcttgctttagtcaacttataatctagtaaatcggcaatgaggtgttagagacttagagttggttacctaagattgtgacatggaaaaactcttgtatggcttcgcctgngggcttaaataaagacaggacggcgtacaaaccaagcaagtcagccattgtacttgcttataagtattcggtattntgtttgccaggtagaagggtaatggttgtttggtacgtaaacctgaggattgaaaatgacgcgactggtcacggtgtcactataaa

SEQ ID NO: 14496 - DNA, 426 bp, Oryza sativa
  unsure (1)..(426): unsure at all n locations
cggaactataaaactcagcttgaggagtagcagnagtagtcctatataaaaccttgttaggaggccgatggtgatggccccaccgttttaaccttgattcatctcctagtttccactgatctccagcgctttttggatcgacggcgacgccgccctctccatcttcagagagagccctcttctccgtttcttcctactaggctactactactcctcctcggctcaaccctcccgtgccctcacccccacgcgcgccgacttctncccagaacgcgccgcggcgaagcgccgccgaagcagcccccactcctccgcgcgcggcggcggcggcgcagtctccagacgctttctcctccggggatctcggtatggctgactactgnggtttttttttcctttntcgcgaaatcctccnctgattaatct

SEQ ID NO: 14497 - DNA, 425 bp, Oryza sativa
  unsure (1)..(425): unsure at all n locations
agctttgagcttttgtcattntcagcttacctgngcaaccacaaaagcaccatttttcaatgaggcttcttgacatacaatgctcttcatttcacttggagcagcacgtgtggatttttcaattttgcggcacttctggaaagcacggatagtacgtaaataatgctatacaaataggaaatcaccgaaaaatcttagaagaatcatataatgagtggtaaaagtcagacatactctcttttccatccaaaggatatacgagcgcatttggcttataatctttgctccttgaggagttccaggctctaacaaaacctaaaaggtaatagctcttcttcagataacagtcataaaaatatccccaataagtacaagcatacacacacacacaaacacacaagagaagggtagtatataccanaaca

SEQ ID NO: 14498 - DNA, 353 bp, Oryza sativa
  unsure (1)..(353): unsure at all n locations
tcgggcgtctgaatttcgtcattgccggttggtgcccgacgtcngcttgccatctgtgtaggttgatggagtaagcatcctaantttctaactagctcctatggctntatcccattaagggagttgtgtcgatatgaactttgtttcgcaagcatggtggaataaactcatttacaacacaacaacaatagatatcataaataacatcacagagtttcacaaatggtacataaatcatgatgcaattgactgcatacatacgcagtccaaataaggttcatccaaacgatacatcaaaccaatcatcaaactactcgtcaatctaggtaagggaaggggtgtctcgcatacta

SEQ ID NO: 14499 - DNA, 418 bp, Oryza sativa
  unsure (1)..(418): unsure at all n locations
atctcctcccacttcggcattttgatgctatatccgcctgaccccaagtggtgatggtacttcttcttggcggcattttctttgtttctttccatcatcgcctgcccttgttgacctgtcttgtaagcaacgaactcgtcctagtgatcccttagcttcgggaatacgtcgaagttcggtgtctgccccttcaggatgtatntcccgtacagatctcccttgaggtctggaactggtctgccattntcttaagagtccactgtttcactatgttctccgtacccgcacggagcgtgaacgtctcgagcatttgggttcacagcatctctttctctgatttcgggacaaagctgtcattatccccgcgtgcccttgttctgcgctagtacaccttgctgacaggcacgttattcctcac

SEQ ID NO: 14500 - DNA, 210 bp, Oryza sativa
  unsure (1)..(210): unsure at all n locations
catgcacctcaattacactgtatgcccatgtaaatgtcccttttataagagcaaccatgtaaattcccctgtnaaacctaaacccaaatagggggggctttgaatagggttataaatagacccctanggccatgtaaatggtggattntggaagaaaaaatctcagnttaatacatttttactgctttcaaccactgttgagtaaccacg

SEQ ID NO: 14501 - DNA, 459 bp, Oryza sativa
  unsure (1)..(459): unsure at all n locations
agctttacctgtgaacagctggaaaattcatgtattatctcaacttanggaaagntgtgactgagggaggatgttagataatgttagttagtttgttatagagatagattagttctgttaccgcatgtactttcttgtatctatctctatatccaggattgtctcacgttgttgagattaatcctatcctttgtacacgccacggtagaggctctttctgcctatatcaacaaaggtgcggccccgtaaaggggttcaacgcttctcattccgttntacaatcctccttcttcctcctggtgttggaaattcgttgatcgagttgaaactctcatccttcatcatgtgctgcagaaactaacgcgtgcacagatgatggatgggtgtggtgtgacatgaaagtggatcaatgacacgccgcacacttangggagtgtgtcgtgtcttgacttcttcatg

SEQ ID NO: 14502 - DNA, 369 bp, Oryza sativa
tttcttttgggtcttgcttcgtttctggtgcaggttccttcttgacctggaaaatcaaaattgccattagtcactgtgagatgatgattcgctttatcaagcacccggtaatggagtttgcaggtttcatcacggaaaagttaaattatagttatccgttcctcttgggtcttaccttgttcttttctttctgaagtagctctctgacaggatgataagctgccgtcacgcaaatattctgaagaaaaaaaagtacagatttaatatttcagagagtgacgactgaataaatcttctttataataccaaaagtccaaaagcagtgtacagaccttcaagtcactgctggtgtatccttcagtcattttg

SEQ ID NO: 14503 - DNA, 389 bp, Oryza sativa
  unsure (1)..(389): unsure at all n locations
ctaatgatttacaacactatgaccacatggttaacctcgtgccgaaatagtaaaccttgttggtaaagaataaagaaagatgaacaggcatagcagaatacatcgtagaaaaaccaaaagctctatccggtactgcggtacacaacataggtacaatatttaaccatctcaaaaaaagagagcaaagtagaacataggcacaatatttaaccatctcaaanaaagagagaanagtagagtattgaacgaaatatgaatgagagaacacatcaaatctcaaatcataacacagcaacagaagggcaaatccaaaatcacacaacataccgaagaagaatgaagctcaccagaattccctcctcggattgatcgacggcgaagaatgaagc

SEQ ID NO: 14504 - DNA, 360 bp, Oryza sativa
tgaacatactttatgccccataagttttgaccttttgttctccatgatgattgttcatttgaaggataactttcagctggcatctaatggatgcataacacgtggcttttcattgaacttaatatcatgtgatggtatgcattactggaattttcacatcacgattgcggcatcaaatgtacaagagctcttcatgggatgaatggcgcatgtgcaataccagttttgagcatgacagtgaagttgttaagctaatatgcttgtatagcatgcaatcttaaatccctcaataacctcatgatgatatgaaagtgaattcagaactatccagatgtgacgttcgtggttgcctttgctctc

SEQ ID NO: 14505 - DNA, 477 bp, Oryza sativa
  unsure (1)..(477): unsure at all n locations
tgcaagctcggtagggggggttctgtatacaacttccacattaaaaaggaaaggaaaacatagaacaaaagggggcaattaagggcttaacttgttattcacattgtgacactgaaaatcatgctcagctcaaagacactccaaactgttcctctttggctagaaaacactgagctattagaaatattgttttcaaatatcttggagactatataatatatgcccaaattgctcccttcttttctgtttctttcccatctccttggcattgaggaacaaacatagcatagggctctccatccatacagggaggtttgcccttggtatggtagatcatgtactgtcaccccaacacctaacaacaattgagcacatctaacgattaagggatgattggcaccccattntttgataatgaaagctntattaanaactcagtcaaatacaccaagatgatacatttcaattgagcccact

SEQ ID NO: 14506 - DNA, 374 bp, Oryza sativa
  unsure (1)..(374): unsure at all n locations
agagagacatatggggtatggttggatatcgcaaaggtgtattttgtatgggctgcttaatatcacaattttgctggttttatggctttatacctttagattaagtgggatttgggtttttttggctaccatgtactctcctaactgaattccatggattctcatgattttgggcaaaaatttgttcaaatttaatttgaattccgaatccggtgaanagcctgaatattcaagaaagggataattaataggaaaaagtccaaattaccccatgaactattgcggtcgatcaaattaccccccgacanatagcagacatttttcactgtgaactattcaaatcggacaaataaccactcaagcactgttctatg

SEQ ID NO: 14507 - DNA, 392 bp, Oryza sativa
  unsure (1)..(392): unsure at all n locations
gcttgcctcanaatctcataatacaaccatatgttatcttatgataattggtcctactggtcacctcgctgctgaccagngcatgctaaatggagggtcaagttccgtacagaccatattataagccgcagaaaacaatatggaagaacctacaccagtagtctccgcatctccacaaccagaagataactctggattccagccgggatcaaccttatcagtcagaccaattggttgtaacaacagaaaggccaaaagttgtatctcataaattctagaatggttaaaacagtaattttagctccattgtgaaacttacctacacttccaagatgaaatcatctcgccattgtatctttaactaaaaacaaagggcggcgggggcggggggg

SEQ ID NO: 14508 - DNA, 420 bp, Oryza sativa
  unsure (1)..(420): unsure at all n locations
accgaaaatactaagcttgtgaggtcaatctncctgatgacgtcgagatctatggtcttattatcaccttcttcctcaggtagtagtagagcaattcctcgtgcgtcggatggaaccggaaacccggtggcacggtcaacggcgcgccattaggatgcattttttttttcactctgagaaatacccacaaaatcacaatgcatcaaaaaactcatgcatttagcaagtttacttaaccttaattcagtaaagaaacttacaagtccttatataagtttctaactggacaagataaagtgtatatgcatgcaaatctataccttggaaaggcacacaaacagcttcttttgcttgggttttctcagcttggaagcaacaggtagctaagctagagacaggatagaaagccaagatgggagt

SEQ ID NO: 14509 - DNA, 455 bp, Oryza sativa
  unsure (1)..(455): unsure at all n locations
agcttgcaaggtgtgtttcctggttctgtggtattgacaccacgaccttgttgcctcggagagtgtccttgtcggctcgtgattctcgtcggaaggacaagatttggccgtattaagatctttctcgggctcggacgtcgtcgatgttccgctctccacttctacgggaggatccttcgacatagagccgtctggggtcgtaaccacgacggtctgacttccggtcattgacggaccagttgagatcggcaccgnggtgtaaactacgaagacgattctcccgacttgagtccacaccagcattgttgaagttgatactcattggttgatgctgcggttgatgttgttgtccacgagacttgatggcatatgagtagagccttaagcaccaagtgcctctacctggcgcgctattatcgacgggagatacccgtagaccggatatagagggtatt

SEQ ID NO: 14510 - DNA, 439 bp, Oryza sativa
  unsure (1)..(439): unsure at all n locations
ataaaactaagcttcccttgtccagcctaatggctggcaagcaaggtttatgatttctctccgagtgtgagcggcgacgacggtgagccaaacccgcgccgtcgagctcgtactcccccacctcctccacgccaaagtcccaaacggngggggggcgctcgaaagagtcaaaaaatccgcagcatctccagtcgcgggtggtgcaggagaacggcgagatggggagcgtcgtctcctcgtctacggcgactgcagcacgcctcagggcgcgcttcaggctgttggcgcgctcctacgtcacccgcctgtcgtccctgacccggagtctccagcccagcgatggctggacgacgtggccaacttggtcatgacggcacagcaacgcctgggtgctggcggacggtccgccaccaccaagacctccggcgccgccactact

SEQ ID NO: 14511 - DNA, 484 bp, Oryza sativa
  unsure (1)..(484): unsure at all n locations
agcttaatagagatggacttctacactcttttggntntgaatcatttgagacatgcgaatcttgtttacttggcaaaatgacaaaggcacctttcacgggtcaaagtgaaagggcaagtgaactattgngactagtacatactgatatatgtggaccaatgagctcaactgccaaaggtggttttgggtactttattacctttaccgatgactttagtagatatggttatgtctacttaatgaggcataagtctgagtcctttgaaaagttcaagaaatntcagaatgaggtacaaaatcatttgggcaagacaaccaagtatctacgatctgattgtggtggagagtatttgagccttgaatttggcaatcatctaaagaagtgtggaattgctccacaattcactccgccaggaacgcctcaatggaatggngtgtctgaacggaggaatcgtacattgttggacatggtgcgatcaatgat

SEQ ID NO: 14512 - DNA, 451 bp, Oryza sativa
  unsure (1)..(451): unsure at all n locations
tctacaccggaagttggcttcccacagaaaatccattcttataaattcctactttagactatgctttcttctcctagaaaatcccttggcataaagaaaatgagaaaagaaggaaaaggcatggctattgaagaaagaaaaaaaagaaataaagcttccatatttatgcaaagaaaaaaaatggagaaagtatacgaaaaagggagagccatttctttattcatcattccacaaaatattttacttttccattttccaccacaaataaacacccttgatctaggagtatgactgatgatcttcttgagtccatatttttggctttgcaataaatatgatgtangtatatcactatttatccctaccgagctccatatatcagccttagaatagggattagctctggcacacttcgccttggtgagcatccacaagaaaatatatatctttg

SEQ ID NO: 14513 - DNA, 405 bp, Oryza sativa
agcttctcttgttccagaggttcgttattctgttcatatttgtaaattacatcaagcacaaatatgttagccgctataagtttgtaaataatgcttatgcaacataataaatacaatgtccctattttattctaagttgtctagaaagatctgaaatcttaaattgtctcgtaagtgaaaaagtggttgcatgtaagagaatataaagaaggaacaatggtagaaaattgatttcgctgacctgttctttttctgcattgattccaggcagctttgtttccccaatcccaattgactcctctgcttgcttctctttacgcatctcaccactggtagctcgtaaagtctcagctgaacaccaaaacttcatgatactcttggctaggattctagcaatcgatttct

SEQ ID NO: 14514 - DNA, 366 bp, Oryza sativa
  unsure (1)..(366): unsure at all n locations
tcttttgtgaatgtaaatgaagttgtcagggaccttttttctcttatnagtcaagaaactggtcccatggtgacatcttaaggccttcctgctgcggcatcccagcaaaaagcttctgttgttggtccgcctttcctcctcccttggctcaaacccatcaaggcacttgcatgctgggacagcatctgtgttgtcgcagtaactgttgggaccgcaatagccgtagatattgcagtcatgcacaggctccgagtacagggttgtccatgctgagatgttgctcttgcaacctaacatatttaccttgcctaggtaggttatcttcatcctgatcagcacactgaaggggccacgttgcattgccaa

SEQ ID NO: 14515 - DNA, 483 bp, Oryza sativa
  unsure (1)..(483): unsure at all n locations
agcttattgctcgaccattattgatgaattgttattaccttcgtcatgttggggtcatgcagttctgcacgctgctgaccttgtccaactacaaccaactgcatatcatgaaacttccccaatgcagttagtatgtggaaatcctccaagtatttcccatttgcgtaagttcggatgtgctgtatacataccgatctcaccatcaaatcgtactgctatggcccacacaggaaagtggggatctatgtgggattcacatctccgtcgatcataaagtatttagaacccttaacaggtgatctatttactgcccggttcgctgactctatctttgatgaggaacatttcccggcattagggggagacttcaagtacccgaaagaatgccaggaaattggatgggatgcctagggtattccagcctcagacccacgtattactaanatttgaactacagttcagaaaaatatacatttgcaaaga

SEQ ID NO: 14516 - DNA, 442 bp, Oryza sativa
tcggataatatcaaggattatcttagctctcctcctgttttgattcctccacagaggggaataccgttccgattgtatttatcggctggtgagaagtcaatcggctcggttctggttcaagagcttgaagggaaggagcgagttgtgttttatcttagtcgacggctcttggatgctgagactcggtattctcctgtagagagttatgcttgtgcctttatttttcgtgtacaaggttgaggcattatctattatctaatgagtgcactgttatatgcaaagccgatgtaatcaaatacatgctatcggctccgatattaaaggggcgagttggaaaatggatattttctttaaccgagtttgatcttcggtacgaatcaccgaaggcaattaagggacaagctatagccgatttcattggtgaacatcgtgataattcgat

SEQ ID NO: 14517 - DNA, 410 bp, Oryza sativa
  unsure (1)..(410): unsure at all n locations
agcttgcttcagatagagagtatcaagaatattctaaatccaatgcaggtggcctcccaaaatctatcacaaacagacagaggggatacggcattgcaaacctgcccatttctagcgattcgtatcatagaaatggcatcacgctacaatttagctgcagttatgatgggctaactagtgaccagaataaaatcatcactaacatgccacggataacctgaccgaggtgaacccaacccatcaaaaccctaatattctccgcccatggatctctccctcgccttanaacaaaatgcccctagttagtgacaaagagaaatggcaccactcaccgcaaatgcaggagacgccaagaagcatggcacggccaccatcggcaccgctaggatgggtgtcttcgcgccaacacc

SEQ ID NO: 14518 - DNA, 403 bp, Oryza sativa
  unsure (1)..(403): unsure at all n locations
tatagctgcaaaattcaaaaggctctgttcctaaaatgttggagttcctcccttgccaagctgtcgaaaaccatcgaaagttgcaataaagtgattctctttcttgataaattggaggaattgaggttgctatgtgtcccacaattgaaattcagattgcttgttaaggctcgtgttcaaaggttgctgaattggcaggaacaatattggaggcagagatttaaacaaaagctggttcttcttgggggagaaaataccaaattntttcatgctatggcaacagaaagtttcagaagaaatgctatttcttgtcttcaagattcagatggaaaccaaatttttgatcacgaggggaaagctgatattttctagaatgtttttaaggaanagaatgggagttcta

SEQ ID NO: 14519 - DNA, 476 bp, Oryza sativa
  unsure (1)..(476): unsure at all n locations
agcttacctgtgaacagctggatatttctgtacaatctcaacttanggaaagttgtgattgagggaggatgttagataatgttagttagtttgttatagagatagattagttctgttaccgcatgtactttcttgtatctatctctatatccaggattgtctcaggttgttgagattaatcctatcctttgtacacgccacggtagaggctctttctgcctatatcaacaaaggtgcggccccgtaaaggggttcaacgcttctcattccgttntacaatcctccttcttcctcctggngttggaaattcgttgatcgagttgaaactctcatccttcatcatgtgctgcagaaactaacgcgtgcacagatgatggatgggtgtggtgtgacatgaaagtggatcaatgacacgcggcacacttangggagtgtgtcgtgtcttgacttcttcatgcanaagtataccaaccctg

SEQ ID NO: 14520 - DNA, 443 bp, Oryza sativa
tgtccttttcagtcttactatccgaactatttgttccgttttcttgaattttggtcttttcttttggttcttgcttcgtttctggtgcagattccttcttgacctggagaatcaaaattgccattagtcactgtgagatgatgattcgctttatcaagcacccggtaatggagtttgcaggtttcatcagggaaaagttaaattatagttatccgttcctcttgggtcttaccttgttcttttctttctgaagtagctctctgacaggatgataagctgccgtcacgcaaatattctgaagaaaaaaaagtacagatttaatatttcagagagtgacgactgaataaatcttctttataataccaaaagtccaaaagcagtgtacagaccttcaagtcactgctggtgtatccttcagtcattttggcaagctccttgaaatc

SEQ ID NO: 14521 - DNA, 454 bp, Oryza sativa
  unsure (1)..(454): unsure at all n locations
agcttgacctccanattgaggaactcctcatatgccttagctgacacaggtaagagaaaggaatcctccaagggtatgcacggttctctcggtcatggtcgcgctggtttagtgtgatcctcaggtcatggggtactcggcttctgtgcccgtcgtcatgacctcggtcgtggtggtggcaatgctcgtgatggcgatcagtgttgcggtcgtgattgctgaatgatggatcttgacggcggcctctatcctctcggtgacgtaggcttgacattgtgtggcctctgctacgctcaggttctcggcgatccatggtttgacagtagatgactgccagtgggtgtccttggcatctcagtagtagattcctccgctcggcgagagcccccggctcctactgtcatggcgatgatcatggtgttaagtttgttcagcgtcggagtcttgtcctcaa

SEQ ID NO: 14522 - DNA, 436 bp, Oryza sativa
  unsure (1)..(436): unsure at all n locations
taccggcanggnnttttctggcctactgcagtgtccgactccgacaanaatgtgcgcacatgtgaaggttgccaatttttcgccagacaaattcatctaccagctcaagagttgcaaactatcccgctgtcttggcccgttgcgggttgggggctcgacatggttggcccgtttaaaaaggcaagtggctgttacacgcatctctttgtggccattgacaaattctccaagtggattgaggccaaaccggttgtcacaatcacagcagataatgctcgagacttcttcatcaacattgtgcatagatntggagtgcccaatcggataatcactgataatggcacacaattcactggcggagtttttaaagacttttgtgaggacttcggaattaagaattgctacgcctcagtggcacaccccatgagcaatggac

SEQ ID NO: 14523 - DNA, 469 bp, Oryza sativa
  unsure (1)..(469): unsure at all n locations
agcttcngcttatagcacaagctcctncatattttgtgcatctgtcacagatcttgtcaatttcatattgatgaatctttcaccacacttgctaccaatctctaatcttcagttggcatagttgaatactgtatcactagcaggttaacactgtatctatttgtactatgcaaatacaagaacagtgtgaagtttaacattttttatgattatttcaccacacttagttactaccaatctccaatctccaattccttagcattgtgtttatctgcacaatgcaaatacaagagactctgaacaatgtgaggtctgaacactctgaaccactgaaagcaatatactactatgctctcttatgcctctcttaatctatctttttagtcttaaagaaaactcgcctttactaccaatctctaatatccaattccataattgatcccncaaaataacactgtatttataatat

SEQ ID NO: 14524 - DNA, 434 bp, Oryza sativa
  unsure (1)..(434): unsure at all n locations
tggaatggcagctgcagctcactggccttgatcacaatgttttgtgattcaaaccnatggacctccagaggatccaacatacccttccttgtcacaatgatttgctttggctgctcttctacaagaagcgaccgaactaatgcagcaacctcttcagctgttttccacttggccagtttgccaagacgcttttgtccagcccatacacttgtgtggatgacctgcatattgcaatccatcttcattttaagccttcaaagttgcaacactccacagtaatgtcacaattatgactgtagctagaagagaatgaacataccttcagaaatagttgaccacgtcttggattgaaaataaaaatagcaccattgattggttagtggtcaattaccctcaaatgttgtgaatggactcgataactttggtcatcacaa

SEQ ID NO: 14525 - DNA, 490 bp, Oryza sativa
  unsure (1)..(490): unsure at all n locations
agcttctcctcatttcatgatgaactcactgatcctttccatgaacatcaccaggataactatcagcttaccctcctcggtccacctgccgacgaacccgtaggaagcatctttgcaagtggcatcaggcttcaacaacttctggcaactgtatcctagtgagtagcctacattgccgaaagcgctgtggaaataaaatggcgttatttctggttgcttgtaagcaaccaacaaagaaaaaaaaatgacaggtcgtagaattgatatgttcttgcaaatttaattatgctggttcagtggttcttagtgatcatactacgcaattccgatcttcagtgatgtacatttgatgtagccatagtttctgttatgggcagacaaaaaaaaaaggatgtgaacttgcctgattatctcaanaactatgctgaagatgttgaaatttagtggatcagaagaaattgacttccttttctgtatgcatgccacgaat

SEQ ID NO: 14526 - DNA, 398 bp, Oryza sativa
  unsure (1)..(398): unsure at all n locations
tttctgtacattaataaaantcttccagcgcatatgattcccattttaacaactaatgctgctctgttttcttgaaacagagattccatgatcatatttgtcaaccatgatttgtgataggattgtgaaaaaagctgtcaatggcactaatgctcttcacatagctcgtgcttgcttattcccactaattttctcccgaacggatatactaacaagagtcttcctatttggagcccggctatgcatatctgctagctgtacgattgtatacatatatgctccagagggtggctcagttctgctgcctcacatggctcagtagttcagtgtcactagataacacataatctgatttcatttcatcatcgtgacaacaaaatggaagatcagatgttaat

SEQ ID NO: 14527 - DNA, 489 bp, Oryza sativa
  unsure (1)..(489): unsure at all n locations
agcttaatgtcgacggagccttcaatacaacataatatgatgatggtggttccgttttcgatattataaaggggaaggtctcacgtatggcaggtgcagggaggctatcgtgaccttgattgttaaaatgcatgatagcaagcagttagaacttataatggcaattatagagtcgcataaataaaaatcgtagagttcctgtggagattatgggtattacatacccacacggcatggttatccgactattgtagagggtaacttatatttatgaaatatgtaacagatcatgacttgggtattacgttntcttgtatattacggaacggcataaagttctggtttaataatattgtaaattagatttaggaaaccgataccgattagttaagggttctattttgtaatcctgcccccatcctatataagttgggcaggaagccctctatggggcatatgagcacatatgatcatcagatctatactaca

SEQ ID NO: 14528 - DNA, 330 bp, Oryza sativa
  unsure (1)..(330): unsure at all n locations
tttagatgccgcgctacaagcctgagtacttggttggtgttgagggttttgtccaggagttgcgtacaatgtcctttgtcattggatttgggactgcccctntttatgctcagattcctcatgatcgtcatgaagagaagtgccgagtcaaagtcactttgaacagtaatagtgaagatatcccttcagtgatgttcgaagctggaggaagaaactacatccatgcatgtcaggaggtggcaaggatcgccatatgagagctccgtgatcgctacagtgatcagttggccgacactgagtatcgctaccatccttcgcaaccccagggaa

SEQ ID NO: 14529 - DNA, 411 bp, Oryza sativa
  unsure (1)..(411): unsure at all n locations
agcttgaagcctcatttgtgtggtatgggaaccactcaatctgcanaagttgaagagatgtcgttggttagtatctcaattaaagaagtaaatgtctaactagaagtgatattggaagtacttacatgttgaggctgcaagcagtccatctcattgacataatgcttgtatgccacatcccggtgagcatgtgcagtggcagtactctcaaaaaggtaggccactgtcttctccatgtctggctcattgtagggccaaggagtgaaactttgcctccacttaggccttccaaccggtagtcttaaccacatccacatctgaatcaatagcacacaaccactcatgttggatgatggtgcctgacgacaacaggcctcacagagctgtctatatgtccacgccaactgaaac

SEQ ID NO: 14530 - DNA, 418 bp, Oryza sativa
  unsure (1)..(418): unsure at all n locations
actttatttacttacctttntactttgattntctaactctattcaaattaatccaaaaacttatgctattaattggataaatgtcttaactccctcctttcacttgtctttagatgccgcgctacaagcctgagtacttgtttggggttgagggttttgtccaggagttgcgtacaatgtcctttgtcattggatttgggactgcccctttttatgcccagattcctcatgatcgtcatgaagagaagtgccgagtcaaagtcaccttgaacagtaatagtgaagatatcccctcagtgatgttcgaagctggaggaagaaactacatccatgcatgtcangaggtggcaaggatcgccatangagagctccgcgatcgttatagtgatcagttggccgacactgagtatcgctacca

SEQ ID NO: 14531 - DNA, 448 bp, Oryza sativa
  unsure (1)..(448): unsure at all n locations
agctntcttgccggttatcgtttttataaattaattaacacaattctcaatgtaacggtggtgctacttgtttacacttgcaggtatcaatgtgccaacgtcacagtcgctgctcaactacgtgctgcttggggtcgtgtacgggagcatactgctatacagaaggaagtctttgcaggttcagcaatctttgcattttcatatcaatttcacaatttttaggtttaatcgccgaatctttggagtatggcaattaaagaaatgttgggttggcaaaatgtttgagtgaaacttggtcaatggccttaccaaaaagctacccatcgtgagtgccgtatatagtgaaccagaggcatatctatgtttgggcatcaagaattcaagttcatttggttcagcagtacctctgttttaaaatatatgatgctgttggcatttggatatgatg

SEQ ID NO: 14532 - DNA, 320 bp, Oryza sativa
  unsure (1)..(320): unsure at all n locations
ttatgtgggcttaaccaagaaattcaagacatgcttgattggtcaaaatatacaatcttttctcaattggtacaacttgcttgccatgctgaaagtaaaatagaggaggacatgaagaagcacatgccttgtttttgtcttctattactaaccatttgcangaagtgcataatcattaaaaggaggagagagacatgaaagagccaccagtcccattgatcacacttcaagtccaggcacctccattatcttgagagggcatcaaaggtaaacttaatggtgctgaaattaataaaggtgagtgtgttggtaatgaaatg

SEQ ID NO: 14533 - DNA, 453 bp, Oryza sativa
  unsure (1)..(453): unsure at all n locations
agctngaagagaatgtcttatgatcagcttatattctgtttaagctgacggagattattgtgattgaatcntttgtatgcactattattcagaanatccaaactcctcttggttgcagtctcttgtagattgttggaattttgggttgtgtggacgtttcctgggaacaaaatcaggtgtttgatactccaaatgaatgcgaccgacaaattgagaatgcactactccgtattatctntntgtgtagctctgaatcaattgacagagtgagaatatcttctacactctntactgacatattgttgatcagacatggtctacaatatgtgaaaagtttcttactacatcagatcatttcttgaggatatatatgatgaaaagtagaaaaccactaactggttcagttgttcctgcaaatctatgaactngttcttgataatcttctcctcttat

SEQ ID NO: 14534 - DNA, 450 bp, Oryza sativa
  unsure (1)..(450): unsure at all n locations
tccttgaattgtggctgaacaacaagaagaaaggggctcttcattaaatccagaatacatatatgctgcatttctctccctctttttcttacaatccacaaactagctggagtgtgattagtgccactgccacctggctttttttttcagttcttgcaaaggtgaccttaaaatgaatggtagtgatggtgatgatgaggccccaaaaaacaagaagacagtcttgcttgccaattttctcaaccaactacagacaagaaagggagctccagaggacaggagtggaagataggggccaactttctttgtcaccactattcttaggagatgacctgttgccctcccattggctccagcacaagaaacttcaagaaaaatgaattaactaacttaaacctgagagctggtagaagttcactttagattccaacattnttgtttcagtactat

SEQ ID NO: 14535 - DNA, 490 bp, Oryza sativa
  unsure (1)..(490): unsure at all n locations
agcttcaggttctaaccatatatttctgaatatatntgtggttggnggtaaagagtcaagacaatctgttgcaagaaagtcactttctttttcgttcatccatgttntgtcaaatgcccacacataaagttntacggattgttccatagtcataataatttagaatttactaaggtttcattgacactaaacttcactagattttctcatcaataattgatcttatgcaagtatatggtgatctacagtagcatgggtttatctatgtatggattgtgaacattccgatggtatgcagtacgaatctttgctttatgtccatagaatgtggaaaagtttgtcaaaattgttctattgcatggtgaagccacattnttttaaaanaataattatgtgttagcattctggtagatcanaacaggcaaaagaggtgctgtagtactatgaagtgtcaagtaaaatcatttaagccatntaacatattacttga

SEQ ID NO: 14536 - DNA, 449 bp, Oryza sativa
  unsure (1)..(449): unsure at all n locations
ntagagaatgttcaacttttggaccatggctgatgaatttctactaaaacctgaaacaaatttaaaaatggtttgagtggcgtagctgtaattctctgggtaattcagaaaacaagaaatgcagcttgttcccaaaaatagaanaaaaaaatcttccaaaagatcctactatagatatatattctctgcttgtcattggattactttgtggacaaatttgcaggagaaaagtcaaagaaagctgttgtcggcggtactacgactaaaacagctgcactaatgtagagatcggtattataggtgctagaagtgttaaaaccgacacctatatacctttttccgtctccacggactaaaaaaaagatatctttaaacaattatcggcgttcggtttttagaaagcctgataccaatgtgcccttttttaaaaacccgacacctacaatata

SEQ ID NO: 14537 - DNA, 265 bp, Oryza sativa
  unsure (1)..(265): unsure at all n locations
atctccaaaacatggcgacgatacgacggaataagatcaccggagggtcctcaactcaacagcgagattctcttgatgtcccttaaccataaacataaaaatgtcctacccctaaacttactcaaaccgttcccggaggtccctcggcagtatatttgcccagctttactgaccgtacatcctagtcagcacaaaaaattaaagaagtatgtgggacccacatgacaantgcacatttttttcctctcttctcttcatcttctgt

SEQ ID NO: 14538 - DNA, 452 bp, Oryza sativa
  unsure (1)..(452): unsure at all n locations
agcttcaaagttatttaaacctctagccgaccccattatcacctcgggttatgcatgacgtaacatttcctctagatcgattttgtcctcaacagaaccatcgtcatgcaccatgtcttcaacttgtgtcggaaccttctcatttttaggcccctccacttgttcttcgccatgacgtgtccatatttcgtacttgtccataaatccacgagttactaagtgctccttcacattaaaagcatcatcgaagtcccaggctatttcattcttatagtcagctcatggacaaattatcttcctcatattgttcttctcagcgtgtgccttcgcaataccaataaatttagacacttcatttctatatggagataaaaacctcggccaatgatacatncattcccgactntccatatatctaanaaaatgaacataaaatatttgtacaactaata

SEQ ID NO: 14539 - DNA, 133 bp, Oryza sativa
tgaaaaatatacaaaactgttgagtagagaaccaaatttatttgcacttaataaaggcaagcttctgccgtagtggaacaaaggcccgttgcccggaggcttgggctcatgcacctgtggacgcccgggggtg

SEQ ID NO: 14540 - DNA, 407 bp, Oryza sativa
  unsure (1)..(407): unsure at all n locations
ttagctgacttcctcgccgagtggaccgagtgtctatttacatgccagaggaaaagatggaatattggactatgcattntgatgggtcgaagaggcttacaggcactggagctggggttgttttaatttccctgactggagaaagattgagctacgtattgtggatacattnttctgcgtcccataacgtggtggaatacgaggcgttgctccatggattaaggattgccgtctctttaggcattcgccgactaatcgtccgaggagattctcagttggtcgttaatcaagtcatgaaagaatggtcctgtctagatgacaatatgaccgcttatcgacaaaggtacgcaagttggaagataaattcgacggactcaagctcacccatgtcctccgacataataatg

SEQ ID NO: 14541 - DNA, 383 bp, Oryza sativa
  unsure (1)..(383): unsure at all n locations
agcttcgcagaaccctcattgatggcggcagtgcactcaatatcctcttcgccanaaccttggatgatatgcagatccctcgctccgagctgaaaccaagcaatgcgccttttcacggagtaatcccaggattatctgcaactccactcggccagatcactcttccggtcacttttggcactcgggaaaacttccgcacagagaatatcagctntgaagttgccgatttcgagacagcataccacgccatactcggacgcccggcgttagccaagttcatggccgtcccgcactacacgtacatgatgatgaagatgcctggtccccgaggagtcctatccctacggagcgacattaagcaagccgtcacatgcgacaaggag

SEQ ID NO: 14542 - DNA, 447 bp, Oryza sativa
tgtaacatcaagcgctttccatgcaggattcggtctttttccaaaaacttttggttcccggtcaacatcgcatgtgtgctcccatatctacaataaacaaaataacctaattaaaaatcctggagaatgagacaggatgtagatgattaaacgagtgtcttagagttcacaaaagaagacaaattaacctaatgtaactaggaaaagcaccaaagtacctcaatatcaaacatctcaagtgatggtgcagcttcaaggaggtttgttgtccataacaattcaaattcagaaaagatgctatgtatagatagcttccttagattgctgaatgcacggaagagttgttttccttctggctttatccatagctaaaacaagaaacattcacgtcaaaaaaaaaaagaaacattcacgacacatatgaaataagaaacatgagaattgatg

SEQ ID NO: 14543 - DNA, 436 bp, Oryza sativa
  unsure (1)..(436): unsure at all n locations
agcttgtggccctaagggcattcttgtctttcttaagagtntatctttntaattgagccaaaagtgttctctagtaaattatatagtgtcttttagctttgacacgtttttatgatgtccaccgataaattacataaatttcaggtgtcctgtagtaaaatttgccaacatactatttcctccgtttcatattacaagacttattaacatttatatgaatatgggcaatgttagaaagttttataacctgaaacggaggtagtatatccttagattagatgaatcttggtcacatatcctaatgcaattgttgtttacagggatttacgactattgtcagcttagtaatggttgcctggctaatctatgcgagatatacgaccgacgattcagagcttcatgaccncgcaaagctgtcatttttaattggtctctc

SEQ ID NO: 14544 - DNA, 424 bp, Oryza sativa
aagaaactcagctttgcattgcaaagcacgacctgctttatttttctggaggaagaacaagttagtatttaatttgaataccatgttcttaatactttccaacctcctgatttgaatgccatgtttcttaatgctttccattttgtaatcctttccagtgctggtgttggcccaagatgtccacttaagatggatcctgatcttgactatgaggttgatagtgatgatgaatgggaagaggcaattggtgatattgctcctttattctctttctttctggcaagaggtactcatgttgtttggcgcacaggaggatcctggtgagagcctttccgactgcgagaaggacaatgatgaagttatggaggaggattcctagatcacagattgaaagagcgaagatagcttttttgccccgatggta

SEQ ID NO: 14545 - DNA, 386 bp, Oryza sativa
  unsure (1)..(386): unsure at all n locations
atctctgagtcacctgcggctgcagcttagatcgannatcgtagaattgctgagatatataacctttgtaattatgatctttntattgtagatcttttacatgccaagatatatgttagaagtgttgagatcttctatgaaaaacaaaacccattttaaaattntaatttcggttggagataatttttatgtcaaaactgtataattngtttatatctactatacatctgattaattntntgtttgaagttatatagaggctcaaatatgcatttgaatttttgaactattagagttaaaagaaaacatgtgtttccttatatgccaaaaaagctatgcttagatagaagtaagatgctacgttagccatgcgtggagagagatat

SEQ ID NO: 14546 - DNA, 484 bp, Oryza sativa
  unsure (1)..(484): unsure at all n locations
tatcattgtacttccctatcttgactgtcaacatcaagttttcttcttgacattgtcagtcggnggctatcatcataataatggagtgtgattntttattaatttaatttgcttacttggtctatcattgccttgtttggtttttctacttagtctgcgaggactgaaagtttttaatagcttctttgggttttaggctcaacaaagcttgataaaagcttttaagaaatcaaagacttggctagaattatcaagcacagcataaatacaccagtattgtacaagttatgcctccatttgctacatttatactcagtcagaatcagtcttttcatcatcagagttattactacttggctgaaggtcggtattgcggaattggtctacaacgtcacttgcaatcttgtcagcccgcgtttgagcattgctgataagatcaagagcagtttcttcgcttgtcccgtctgcanagccatcaatggcg

SEQ ID NO: 14547 - DNA, 284 bp, Oryza sativa
  unsure (1)..(284): unsure at all n locations
tttcagtcgattagcagacttacanaagtatgcatagtgcatctttcgaagtatatgactcatctgaacaacttgcaaggatcctagttgaaactttgaaagtctgcactatgcggtatgcatatcactgaagtggaacgatacactacattctactcaccactccacaaacatgcccatcgatgtggtaggctgtaggaagatcagaacaaatcagatccaatctncgttgtcagattggctagctgtacagtactaacatcctnctaaaataacctcgctat

SEQ ID NO: 14548 - DNA, 462 bp, Oryza sativa
  unsure (1)..(462): unsure at all n locations
actaagctngacgatccatacagtatcactggtgcatgtactcgatctgggtctctatgtttatagaggaattagcgtgtcagttagtccctacgtcgatccgaacggtacagaataatttatcagacccggcacggaatttcgctgccacagatcatggcgcgcggaagcagacaacgagttagtaggtgccgtatgacgaattgagcatatgaatatttggagcatgcagcaatagcttggctgcaattgccaggctntatatgttccaccgatcgtgccatgtgcatgcagcgcaagcaagccgagccgattagccgaacggtacattccttgggcacgtacaggctgtcgcaacgcgcggccgctcggtgacaaacggattccgtcgggaggaacgcccgccgatggcaagcgcaccggagcgccccgccacgtatgtaagtgccagtagtgttaaac

SEQ ID NO: 14549 - DNA, 131 bp, Oryza sativa
  unsure (1)..(131): unsure at all n locations
cgccgatcacctctgcgacagactggtcangcaagcggaggaccaaanatcaggtctgaaactcaatcanacatctcaagatcaaccatccaaatcgactcgtgcaagatgaaattggtcctgagtgatga

SEQ ID NO: 14550 - DNA, 463 bp, Oryza sativa
  unsure (1)..(463): unsure at all n locations
tctcctcgtgtttcacatcgtcaagcggttaagcgaataatgatgtatttgaatcatacattngagtttggaatttggtattctatttcatcttctatatgcttaagtggatattccgatgctgattttggaggttgtagaattgataggaaaagtactagtggaacatgtcattttcttggtacatcattgattgcatggtcttttaagaaacaatctagtgttgctcaatcaactgctgaatctgaatatgttgctgctgctagttgttgttcacatattgtttggcttttatctactttgaaagattatggtcttacttttgagatagtacctttcttttgtgataatactagtgctatcaatattgctaagaatcatgttcaacactcacgcacaacgcacattgatattcgttttcactttttgagggatcatgttgagaagggagatgttgaattgc

SEQ ID NO: 14551 - DNA, 342 bp, Oryza sativa
  unsure (1)..(342): unsure at all n locations
cacatcataacggaagtggacgaagactgccgttctattgccccggcggaagccgccaagaactacgtacgtcacagcggttgggttgtgcgggataacgtgcttgtcagtacggtgtactggcgcagaaccagggcacgcggagatcatgagagctttgtcccagattcggagaaagagatgctgtggaccacaatgctcgagacattcacccttcctgcgggtacagaggacacagtgaaaaggtggactctaaagaanatggcagaacagtttcagagcttcaagggagatttgtaccagaaatatatcctgaatgggcagacaccgaacttcgacaca

SEQ ID NO: 14552 - DNA, 455 bp, Oryza sativa
  unsure (1)..(455): unsure at all n locations
acacacaaagctaccagggcaagcactccagactaatcctcttacttggccgntctcgngctgggggctagacatactcaggccattcccacgaggatagggctacaggttcctattcgtggcgatcgacaaattcactaagtggattgaagcgacacccacgggggaaatcaaggccgacaacgccatcaaattcatcaaagggatattttgcatattcggattgcctcaccgtatcataacggacaacggctcccagttcatcagtgccgatttccaggattactacatcangctgggagtcaagatctgcttcgcctcagtttctcaccctcagagcaatggataggtcgagagagcaaacggcatagtactacaaggaatcaagacccgcgtctacgacaggctcatgtcacatgacaagaagtgggtcgaagaactcncatcagtactat

SEQ ID NO: 14553 - DNA, 407 bp, Oryza sativa
  unsure (1)..(407): unsure at all n locations
ctgangcatgcaagctggctagggggggcgcatccgctctatagctcgtatcttctctgtgttggnctcgatgcctcgggcagagaccaataacccgagaagcttgcccgcaggtacaccgaacacgcactctatcgggttcagttttatgcgggcggagcggagactctcaaaagtttccgctagatccgagagtaaggtctcttggttgcgcgtctttacaaccaagtcatcgacataagcctcaacattacgtcctatttggctacccaaagaaattcgagtagtacgttgaatagtaggacctgcattctttaacccgaagggcattgtcatataacaataagttcctatggnggtaatgaatgcagttntttcctcatcctccctagccatgcgaatctgat

SEQ ID NO: 14554 - DNA, 480 bp, Oryza sativa
  unsure (1)..(480): unsure at all n locations
tgccagtcagaactcagcaccttaaacctaaaggcataacgatttaattntagcttccaaaggggtttgataatttatattttaaaagttntatacataaaattagaaatatttgcttcactggaaaacatattttctccacgaacacganaggccttcaatgaaaaactcaactattgcaataatcatgctggtgcagaagcacgtttagccaatatattgaacacacttagaatagggttttttttaaaaaaaccatgataccttatcatagtatcatcaaacttagaacatcgttcttgaacattttgaagtagaggtgatttataagctattggcattctgcatgatccctctagcataacaaaaccaacaatggttgtcaatgtgtggctcttagtttagcaaggcattgttntgagaaaatacccagtgcattaaacatgagttgatggatggcagtggcaattaaagtggact

SEQ ID NO: 14555 - DNA, 466 bp, Oryza sativa
  unsure (1)..(466): unsure at all n locations
tatattggcagcaaatccacatctaatttatggtgagctcattcctagcaaaatgtagcacaatatgggtgtgaaaacacaatataaggatctaaggtcggatcataataatattccttggtttaggaattatgatggtctgtgtgaccaaactactgagattatattacaacttaccaaggtagtgtacttaatttaggagaatatgattgataatgaggatacaatgcaatggtagagtagtactcaaggatcactatgcactgttgtgagttagttgatgacaagccttgtggcttcttgctgtagttgggaagcaaaatggagttgggagctgtcacgcccagaaattcccgaatagaattccaagcagaatgtgcattataatccccgtccaggaccagccggngtacacaaacgacaatgttgacatacagatccacgtcttacaaacatcgtaaagtct

SEQ ID NO: 14556 - DNA, 385 bp, Oryza sativa
  unsure (1)..(385): unsure at all n locations
atgaaaattaaagtaaactttagactgcacatgatanaccaacgagctgccgacaagccaaccaagaaaaggatatctggaaaaaaaaaaccaaacaactctatggctgagttcagcaagcagaggttgagaacacttaccttttagcacgcagaatccattattgatcatcacctaaacaaagggcgcagagacccatgatgacaaaacatttattgttctgaaattaattctcattgatccaagtgcttcgtctgttcgtgtcccacagattgtctcacgcgatacatcaatagaaagtaatcttgacttattgcatgcatatgcgcacaacacattcaataataaccatttattttttcacaaaaaacaaaagaatttagta

SEQ ID NO: 14557 - DNA, 479 bp, Oryza sativa
  unsure (1)..(479): unsure at all n locations
ntgattagtcaagcaaaacatggtcaatctagagagtacgtaattttaagaacgaccatatccttgtgagtactacacgagggaggggcaatatggaaggtaattccatgggcctagcttctacaccttccgttcaagaaaaaccccaaatttaatcctagctacgaaacttaacacacatgtactcacattcatagttaggattgattttttttaatgggatgggtggaatacctctttatcttgagaaaaaaaactaatggttaacttaaaacctctttgtcttgaaaaagaataatataactgttaacttaggatcatgagagtaaatataaaatagatcaaaataaaaatttaaggacatgtaaggatatgattaaggaggtaaagagaaactctangaggcgcacaaggaacnnttgcttattttttatnttggcttcactatnttactataacaactactctctcanttttca

SEQ ID NO: 14558 - DNA, 320 bp, Oryza sativa
ctgcactggtgaactacaagtcaaccctgtttaaaatcacgtgagtgggtaggggaatgcctcaacccaactactggtctcccaaatgcgtgagcgcacagttactggcatctagggtaagcactgttcgtgcgctggcgacggaccaatcagcaacttgatactaatataccaaaaacagggcaagcggcatgaacatggggtatcttatctcagaggaaagccgatacactagcctaagacgtatgtaagagtggggcaacacagagtgctaacacccttaaagggatctatgtaccctgctaagacggtacactcac

SEQ ID NO: 14559 - DNA, 474 bp, Oryza sativa
  unsure (1)..(474): unsure at all n locations
tctcaagctcaagcatttacttttctagttagagatcatcttcttggagctaatgtgggatctgcccaaggacccacaggtttaggtaaatatctaatgcgttccccaacgggagaggttatttttggaggggaaactatgcgtttttgggaccttcgtgctccatggttagaacctctaaggggccccaacggtttggacttgagtaggttgaaaaaagacatacaaccttggcaagaacgacgttcggcagaatatatgacccatgctcctttaggctctttaaattctgtgggtggcgtagctaccgagatcaatgcagttaattatgtttctcctagaagttggttagcgacttcccattntgttctangattcttcttttttgtgggccatttgtggcatgcaggaagagcccgggctgctgcagcacgatatgaanagggaatcgatcgtgatttggagcctgttctt

SEQ ID NO: 14560 - DNA, 293 bp, Oryza sativa
agcttagatgcatcgcaatacactcggaaacccttctctggatctggcacaatcataaagggtgctgatattatgtgactcttcaactcttgaaaactctgctcacattcttctgacaacttgtacttcacgtctttctgaagcaggcgtgtcatgggcttagcaatcttggaaaaattctctatgaacctccggtaatagcctgcaagacctatgaaactacgaatctctaaaactgtcttcgggtgtttccaatcggttacagattccgcattactagggtcaacgacaac

SEQ ID NO: 14561 - DNA, 412 bp, Oryza sativa
tcaacccgcaggtcacaagggttgatcttggctcaagcattcacctcaagctggatggcgcacggcaaaggtataatggaggtacgaatgatttcttagactttacccggtcttggcgtttggtgtaaaccaggattgctggatagccgccgtactatcaagaggggtctatgaagcgagcatgtggatgatcttgtgccatattagttcatatgtatgtaggtgtatcttgtggccttgtctagccaagtgtggtgagttttctcaagtcctaaacaaaaagagaagtgggcagatcctatatggttgggtagactcatgtggttatgttcggtggagtatctttcggagtgtgaaccctgtctccctgagaagagatgagtttcttggatggattgttcatggattggat

SEQ ID NO: 14562 - DNA, 407 bp, Oryza sativa
  unsure (1)..(407): unsure at all n locations
tgtttcttttaacgacgccatattgcaattgttatcattatgcacgcgccattgatgaacaagtgcattgtgtgctaatctacacctctttatcacgcaactctatacttctgccatatgaggtttatatatcgacgaataggccttttcaaggatatagcaaactcctcatatatgtcctcatgactaaatcatacaaatgcgacaatctttgttatttctatccaacatgtgtattgcatatgatcacctgtgcatgcttttgttactgtattggacacaatgtggtctgatatgcattagaccaagtcagcatggtcaatatataacattcctgttgatngcaacttcttcatcgcatggccactcatattagacgcgtgaatctgagctatgacaagtgcttt

SEQ ID NO: 14563 - DNA, 370 bp, Oryza sativa
  unsure (1)..(370): unsure at all n locations
agcttacaagaaaattcaccatacttttcacaattccatttcgcttctgagggcaaaatgcactactactaaaatgatcaggaaaattaatatttccccgatttcatggcatctgatccactacgcttaactgggttcacggaaccaacttggttacatgcaccctaacgtgaatggattaaccattaattaattactccctcagcttcccggcagtatccccttcattcaccaaaatctcgagaaatctcatggttgaggagttagcggtgagtagtaaattgcgggagccgataatgaaaggacagatacacatcacacaagtaggaaaaaaatgactaggctaagtagntaatgtctgtcattaatc

SEQ ID NO: 14564 - DNA, 456 bp, Oryza sativa
  unsure (1)..(456): unsure at all n locations
tgtgtggagtaggatgcagaaggcctaactaaatgagtattatacttggggctttcacgctgtgttgtgagaggacttgaagggtttgacttgatcatgtaccaccttganttttttaaagatgaggctgcaaagtttcccaaaagaaaattcactcagcactaaataaatatagataagatgttgcaactttgcaagcattgttggtcaagatccaacaaaaaagaacatgaacgtgagactattaaatgtctgaaaattaataaagttatgatgacttgatgagaccatacagatgagaaacaattttctgtaaatatgaacttcattgaatgtctattgagtattgatctgaggtttaatgcctattgagtattcagcacaatttcgttagagaagccaacaacacaagattcactaatgtcgtttcaatttgagtaaatagcatactatcat

SEQ ID NO: 14565 - DNA, 449 bp, Oryza sativa
tagccagatttcaatctcaagtgaagtggactataagactcataatgatataaatgcagagtcatacactctccatctagctatgcaagaaaataaaaggggtgataaagaggagtgtacctactatatgtggaagcagaagtttgtggtcaaaccagagtgcagagataagaaaagaatggaggtagataaatgggtgattaccttagcatttcctcatggacaacgactaagcagaggagcacggtcacctggtgtctatgcattcctgccaacagagatggttactaatttgcccttcattattcaagctgatttccttcttgcttcatcccgtgagtccatcctgcttgacagccaatggaatcgtggtatacttgattgcgtaccttatgcttttgtcagtgcatttgaagctcttttgaaatcatcaagcaatgccccatcat

SEQ ID NO: 14566 - DNA, 354 bp, Oryza sativa
  unsure (1)..(354): unsure at all n locations
tgcagctttgttctggttagacagctagtggtagctagtttaatagtatatggaggagaatggaaatagtgaaattccgagatgaggtgagagaaagttgggttaaacccttgtgttagtcttgcaaatcattgtgtagtttaattgtgtttggaagacttcttcttcgaattgacttgaaatgggcaaacggattggtttattntctattntctccttttgataattgattgaacggtaggaggtccacactgtgcgaatgggcaaacggattgatttcttttctattntcttttttgataatggatcttatcgtcgtgtccccggcgaggcangctgatggatttctattcg

SEQ ID NO: 14567 - DNA, 472 bp, Oryza sativa
  unsure (1)..(472): unsure at all n locations
tccaaattatnttatttatctcaatatagccattattaattttatttagatacattgacctaaccaagaaccttccattctgattaaagttccatctaaaacaatcagaagaatggttcaactggatatgtacaatagaagtacacaactcatgtcaaaaataagattctgaccaattgaagctctcctacaagaaacattaagttgaacagatctcataaacactagcaattgaaaaacctttccttcggacaatggcatataaagaaggatacttatctttaaaggctaagttacataaccatttatcttcccaaaatctagtttgttctccattattcacaatccaggaacccatgtctaagatagtacccttagctgtcatgagactagaccaaaaatgagagtcaccttacttcttatcaacttgagtaatagacttattatgaagatatttcctcctcaataagtc

SEQ ID NO: 14568 - DNA, 419 bp, Oryza sativa
  unsure (1)..(419): unsure at all n locations
gaagcnnnatacgaccggaagtgccgtacacctctcttctggcatcagacaggagagcgtcaactgttcgggacagaggtgttagcggaagcagaagagaaagtcagaaccatcacggaaaggttgagaattgcccagtctcgacagaagagctacgcggataaccgccgaagggagctcacttttgaagcaggggattacgtgtatcttcatgttactccgctccggggagtgcaccgttttcaaatcaaaggcaagttggcaccacgtttcgtgggaccctacaaaatcttggaacgaaggggagaagttgcttatcagctagaacttccatccaatatgatcggcgttcatgacgtgttccacgtgttccaactaaagaagtgcctaagagtacccgaagaacaggctgattcggg

SEQ ID NO: 14569 - DNA, 479 bp, Oryza sativa
  unsure (1)..(479): unsure at all n locations
ngaacaacaatggagcggttggacaagttgcataccaatgtggatctatctatgacatccctatgacaggtgtagcaaaagcatacgcaaataacgccttaaggtgcttaaggcagcaatcactccactatcaacaccacaagtattatagtgtgctctaagttattcgtatgtagatagaatgatatagatagttatgcaaatatcaatgttttgtttttgaaaaaaaaatgaaggttgatatttgttatcaatccaatggttataaaacattaatattattcaagtgactttcattgttcacatttcaatattttatttgctacatagtttaaaactcgataaggcaaattcacgtcaccttgggcactatctcagcgccaatgatgatggagttgagacactatangcttgtttggtatagctccaactcctaaatttagctcccgaagttaggtctggagtgcagttgtgcacaa

SEQ ID NO: 14570 - DNA, 488 bp, Oryza sativa
  unsure (1)..(488): unsure at all n locations
agcttncanataattaatcttatttctctactattattaagctaaccgtgaaagctagcctgcatgcatgccggtaccagtatggtccacaatgacttatganaaccggtactattagactgtatttattcccgagaaaaaaaactgtagtctttgttatactcatgtgtaatattgctggtgaaagtaattaaccactcccaagaaaaatgcatggcctgaccaagtaaatatttgacgagtctgcagagtgcatcatcagtgacaaagttaactatgctagaggatagtaagctcctggtgatgtccttgtcatgacccgttcacgaccggtactctccttcctaatggattcacatgtgtttctgacgtatatcatccgtccanattaaataagaacatccgtcttattaaaattataaanaataaaaaagtagtcggcataagatattatattatattatacataaaatatatatatacaatgt

SEQ ID NO: 14571 - DNA, 473 bp, Oryza sativa
  unsure (1)..(473): unsure at all n locations
tcatccaccatatgagctttcccatgcattttattgtttgaatctttttctaatgaatcaatctcaaatgtgaaatcatcagttttagcttcatccaccacatccacttttccatattctgcgccgcttgaagcatttgtaaaaaaatccacctcaaatatgccttcatcagcccaagattcatccaccacatctgctctcccatacattacattgtttgacgcattttctgatgaatccaccttaaaagtgacttcatcggaccgaggttcatacgctccatccgctggcccatacattacagtgcttgaagtatttcctaatgaatccacctcanatttaacttccccatatgttgaactgcttgtagcatttcctgacaaatccacctcgagtgtgtcttctatagccttagcttcatccatcacattaactgcctctatcattgaatngttcgacgcgagcgcagacag

SEQ ID NO: 14572 - DNA, 305 bp, Oryza sativa
tctctggtcgagcactgaagcgcggacatttagcagcagctgaagcactgcggaatccaaaccacaaagggaacatattctggccgctcatgtactaatcaccaacaacgagaccagtgaacttcatactacataccaaaggctctcaagcaaactataacacaccgggatgaactgatgcctctctctgagttttgcacctgcacatgatatactcagtttcaatgacaggattaactataacatataggaaacagctagcgatgagaatgaaccaacatactcaagccttattatgtatggag

SEQ ID NO: 14573 - DNA, 367 bp, Oryza sativa
  unsure (1)..(367): unsure at all n locations
catggaggggtaatttatatggtgggatcttgtgtggngcccaccttacaatagtctaattaattatttttctatgtgtttnttcccttcttctgatctaggagtaactaatggtgttaactgaataattaattgattagaggtttctgcaggtaggtcagtaaagaaaaggggttgccagttcggcgaatctgaatagatntctgattgctaatgccatcttgnggaaaatgctggccagagtctggcttaatgcagatcttcagagcaatagccctgcaaattcatttntcttttatatataatcatacggctacagntatgtctattagagctgtatgactatataatctggaatatatgagat

SEQ ID NO: 14574 - DNA, 481 bp, Oryza sativa
attattgaactcaagcaattacattaagttgatacaacatatatatcgaaaatactcgtgacatatgcataactagaatgcgaacaaatacgctcacacccacgagttctaaaataaaaatgatataagaaatgtaaggaaccatcaatccgtcgactagatcactacccataaacctagataaaacactccctcacctcctactctcaatggtggcacgtcgtgacaaccaaatcctgcaacctcggtttatgtaggataacctagttactgagctagatatgcttttttttttggtcatttactacatattgcatcaatggatctccttttgttcccctaataatttgaagatggtgaatcgaaaggaaaaaaagtgttccgagcacagcttcacctttatgaaaaatttgaaggataatgctaaggctacgcatagacactacgcatggcatgataaattgaatgccggaggatcacg

SEQ ID NO: 14575 - DNA, 402 bp, Oryza sativa
  unsure (1)..(402): unsure at all n locations
tattactggcatagattatctacatacataattatattgataaattaaatattttaataagaacttacaaataacttaaaacaagtaggcctgagtaatgaagtagtagaattcttttttaagaacacatactttttttaagtgtgaaataaataattcgttttaactatcaataacctggtgaataagcttaaaagtgggccttaagaattgcaatcataagcaaacaaaagttttcgagtgcacttgtcatgtgtcaccaaanaatattaaacgttgtgttcttttagttgttccatttaacgcagcacatatattcatttcacatagcctttgtggctttgtaacaagccgaaccatctctaatacttcatccgtttcacaatgtaagactgtctagca

SEQ ID NO: 14576 - DNA, 190 bp, Oryza sativa
gcatagtacgcgtgcaattgtgcttgctgctgctgtgcctgtgctgcagatacaccgtatccaccatagtagccctgtgtaaaaatcaattcgtgccacggtcaaatactgaatttgtccatgacaaaattaaagacgtgccgttgacaaacatttagttgtagtaaaagaaaaattcgagaaggaaata

SEQ ID NO: 14577 - DNA, 490 bp, Oryza sativa
  unsure (1)..(490): unsure at all n locations
cggacctataaaactcagcttngtttctcncaggtagcactatgataggtcactttgttcttcgagacatacacaaacacctcgacgttgcatccctcttaatagtatggcattcctaaactcaaatgtaaataagaagagaactataccattaggaatgcctttttttcatctttctttcattgtcttgagggacgccaatgccgatatcgtttcatcatatattcttcaaatgattgatgtggttacttgtagctttaaatggtctcgcacggtccatcatgacaaagccgtcactcacccttcaccactggatttggttcttcggcgccaagtcccttgcttgcccttcaccgccgcatggtctatcgcgaccgagcatcgcttgcccttcaccgtcttgccataatagccacttcgtatcacacatcttcaatatcttcactttgtcattcttggtattggtagatgtaatgatatcacttgagca

SEQ ID NO: 14578 - DNA, 354 bp, Oryza sativa
  unsure (1)..(354): unsure at all n locations
cggtatcgttacaaggtatactcaatcaaattgtactatccaaccgtacctgcacgtgtgctcatctttntactagcttattaagtcatgcatttacgcgaccataatatcccttagtgaagcatattaatattatttatagtaaccaactaaaataagtgtttgtagaacatactttgcaagaaacgtagttataacaataacatgtatattctcgattgtaatgtggccggntcacgtgtccgattataaactatgtactntatctgtccacaaatataattgatcctatgtacttcatctatccactntaacattgaaggtggaatattggtgtccaaaatcacacctatc

SEQ ID NO: 14579 - DNA, 405 bp, Oryza sativa
  unsure (1)..(405): unsure at all n locations
tcgctgtatcgagagatcaaccggtgacatgtgatcttgttatttatgacanccgtcgcatattacatagtagtaaataaattccatctgtccaattaaatgagaattagatgccatataattatatcccaccgcgttttgaccattgagaagcataattgggttattggtggccatgtccgaagaataggaacacactattttattgggttattggtggccatgtccgaataaaaggacaactatatgtgcgctgtttggtgcaacgtgttcacctcacagcaagacgtgctctacatgctccctggcatctatggtattagccgtcagggaatataatattccattattctagtaccattttgcgaattttctccttttctttcatcgacatgcgatcctgat

SEQ ID NO: 14580 - DNA, 309 bp, Oryza sativa
  unsure (1)..(309): unsure at all n locations
tgatgcttttcttgatatggttgccactcttgtctaaaaggaaaaactgatgttgggtttgatattattactgctaatactgatgttagagccaatacggttgggcttgagaaattgagatgattagtgtagatgctaattgaagacacaaatcatagaagacaactgaaatccatggggaaaaaatgggaaaaaaagggaaagaanaataagaaagaaatccccaaatccaagcatgcaccanattaagcgattcaatcaacgatgatttctctcagacacacgcagagcacttaccatcaacgaatc

SEQ ID NO: 14581 - DNA, 467 bp, Oryza sativa
  unsure (1)..(467): unsure at all n locations
tcaagacgagaggtggtgagtcacgcgtagcaaccggtcgtatntgctatctcacatanttttctccacgggcaacagtacatcgcctgtcttctcttcgcattggaagatatcgcatcttcgcgccatgtacatcagtacatgcagacgcaaacgttgaaaacacgacccacccttgcgtgtttttctacccgatcgaccttctgattttggctataaaacggccggtgcacactaaaccatgcaaccctcctgcagaactaatcttttagacactctgatcttgtactccagtttccagatacaccctgaattgattacgatgacgacgacgatgcctaaggtgacttcggttgttatggcagccgtggtaggcctggcgatggtgtctctggtcgctggcatctctggcactgcgactttctacacgcctccttacacgcgtatgttcagtattttttcttctc

SEQ ID NO: 14582 - DNA, 194 bp, Oryza sativa
aatgtcgtgtgggtaaagtgtaccccctctgcagagggtaacaaactgctcgaacagccgtgcccacggtcatgggcggatgtgaggtgattcctaacgtaattttgtttgactactgcttgtgaaattgctcgtgtgaaaaggggttcgatgtttgaaaaatctgcagctgatgggatcagctatgcccgggt

SEQ ID NO: 14583 - DNA, 456 bp, Oryza sativa
tgctcgggcagctggaggaggaagaagacatatatatatttgggtgggacttttgtcccggttggtgttaccaaccggggctaaagatccccgagatctttaaagatccccgagatctttagtcccggttggtattaccaaccgggactgaagttacgatctttagtagatcccgggggggcctgataggccctgacagcatttgaaccgggattaaagatgatctgactaaagatcaaatatgtccgctatcctttctattgcatctgagactattgtggaattcagccgaccaacgaatgatggtctctccaccagtggttttagctcttcatgtatgagaattcagcagacacacgttataccatattcggcagaagaaaatgttcatctctagttgatgcccagatcattcgtgatggagcatgggactctgaagacgtcttgagctcgatc

SEQ ID NO: 14584 - DNA, 388 bp, Oryza sativa
atactacgacgacagaacatctgaagcgcgcgagtagtatagaactactggtctcagcagtgtatatcatacaaacatttcttttacgaaagcgtaattttaaaaacgcatcacgagataacgagtacacccgggccggacattctgaatctacagaggtccggacgaatgctcgagtaacatctagcagtaacatatacccgacacccgatcattactgatcgagatgcacactatatctcgagtactatagcacgactgtcaaactgctgaacaatacgcttcgctacaaaactttctatataaaccaagctttatatgatcaattaaattcaaccataagagtcgcataattataactcatactatctcgtctgcatactattac

SEQ ID NO: 14585 - DNA, 316 bp, Oryza sativa
  unsure (1)..(316): unsure at all n locations
atataacttaggaagtcaaaccccaggagctcattntatctcagtctagatgacagcaagtttagcacactatatttctcactggattcatgcaaaagaggatttctcagtggctgcagacctgtcattngcttggattggtgccacatcaagactaagtttgggggtcaattgctgacagctgtaggtgttgatcccaatgattgtattctctcaattgcaatggctgctgtggaaggtgaatcttataacatatggtgctggntcctgcagacattgaaggatgaccttcggtattgaaatacttacccttgga

SEQ ID NO: 14586 - DNA, 471 bp, Oryza sativa
  unsure (1)..(471): unsure at all n locations
tattannggtgggcgaaagcatgcgattgccctctaacctatgtcttggaatattgntaaagatatccatacagagaaataacctcccaactaaacatgaacttatggaactgctacatgcggatttcctttctaaacgtgccaacgatgtgttcttgtatgagccagggatttcattgtcttgcacatggagtgatggaggtggacctcattccttggggcattgactgactccactagtcctgtcaagagcgtgcattattgatccatttacctgaagtcagtcagagtcaaggtctccttggttaaagtggctctcgctttctgtcgacccatcaatatgtactatgtgtgttntagagcttcacctacactgccactcataacacaagatgagacgactagttgcctcacaggagctattgctggttctgctgatttcgctgcagtgtctttcctgccttgcaattg

SEQ ID NO: 14587 - DNA, 300 bp, Oryza sativa
acatcatcaaacacatgtccatgacgggatcttttcgcctagcgacactcgaaggcgaggagttcgaccattcctggaacgccgcctccctcaagcgcttatatgtctagaatgggtggcaccaaaatcgccaacttgtaaaaatgtacatactgtcatgtaagcctttctgcactatgtaagcctttcggcaaggaaaaaaagagaaggaaaaactggatgtatggctattattcaccatggaggcccgaaccaatataaaatctctgtgtgctccacctttcttttattttctttatt

SEQ ID NO: 14588 - DNA, 472 bp, Oryza sativa
  unsure (1)..(472): unsure at all n locations
ttgataatntccctcanattcaaacgcttaggtgcatatatactagttgctntggtgaaactaaccggcgggtgaaactcttgctattctaacccccgccgagttagtccgttcttattccattgtgcagaatgaggaggtgattgtctcgtctgttcaaggggtccggctcttcatcaagtcatcatgacgagtctagtactcgttcatcagctattgtctcaatggaagacgccgaagctccgcgacgactcctgaacgacaccgatctcgaccttgtcggtgatcgggagagacaagcctactacatgctgagcgaccgggagtatgctaacacgcgagaatactctccggagctgctgaaaaagataggtatggatgttgaattttgtgctatntggaaagctngtggttggcagaannattgtgtagtagatgaagcctagtctcgnttgcttactntgcaatttct

SEQ ID NO: 14589 - DNA, 289 bp, Oryza sativa
  unsure (1)..(289): unsure at all n locations
tgcagcttttcttttgactggagaaacatgcagtacctaacttctcttacaggccctttcagaatcggttcaggagctaggccagtgactntgaagcctaccaaaactcctcataacaggcccgttctatgcaatctgggccgcgcccattcccctacagnccacgaatcggcctcgtgaggcccgccgtgacaaactgacacggtgacagtataatgggctcgcatccgacagacacagcgactcctccctctggttgttcccaccctccctctcgcacgcacggacg

SEQ ID NO: 14590 - DNA, 476 bp, Oryza sativa
  unsure (1)..(476): unsure at all n locations
actcagcttnagntatcaagaaaatgggtgtgttggatcctttatttcaacattctttccttggtaagctagggtaggtatttggtaaattacttttaaaattagctttgcttatcaaactagtctactttggctagaaaatccttatccatctaggagagttaaattggatatccatcatcaagctcctgaacgagcagccttgctttggtgggatatatagcttggtagctccctccgccgcctctcttctccctccggtggcggtggtggcgtcggcagccgccgattttttttttttacaatttttttcatggctattgctaactgaatcggattgtgtatggacgaaaaacggacgaaaattagatgtgacgaccggaaaaatacgaatatttatattagttatagaagtagagggaaatactatacaagccttggaccagataaacttgngctctgatatgcttgcattt

SEQ ID NO: 14591 - DNA, 443 bp, Oryza sativa
  unsure (1)..(443): unsure at all n locations
catgaagctcngcttatacaactgcggtacatccaccatccgtcttctatacacattcctgcacggcttgcttgcgatagataccacgcctgctcctatcaacacacattatttcataccgatgcacttgtgtgccttgagcaacaactctatgtctccgtgcctttntgattntatcttccatgtactttgtcactacgttgccaaacactatgttgttatcggccatggacggaccaattttcttgtatcgatccctanagtagtcttgcgtgccgtgaaggatgaattcaacaatagcaaccaatggaagtacccgaactcctcgcattacccagttgtacacctctgccaaaatggttgtcattatgccataccgagatccatcggtgtcgaacaatagagaccacttctccttaggctcattctcaatccactgactg

SEQ ID NO: 14592 - DNA, 488 bp, Oryza sativa
  unsure (1)..(488): unsure at all n locations
tatctttctcanacttcacatctttcaagcccacaactagatcacgttttgaaagtttgctcaattgattcatgccaacatgggctagcctcctatgccaaagccaacccaatgaagtttttgcaactaaacaagttttcaaatttgcttcactagaattgaaatcaaccaaataaagatttccatatctaaaacccttgaacacacaagacttgtcaagaaggctagaaacaataacttcttgcgggaagaaagcacatgacaagccaagatcacaaatttgagcaaccgaaagcaaattgaaatttagagatttaacaagagagacattatcaattgataaatcattggagatagaaattntacctaacccaattacatttcctttgctattgtctccaaaagtcactttctcttgttcattccctcctacttcanatgtggtgaatatagccctatcaccggtcatgtgttgagtgcatccacta

SEQ ID NO: 14593 - DNA, 264 bp, Oryza sativa
  unsure (1)..(264): unsure at all n locations
ggagaagtctcaacatataacatatttaaagcaatttagaaaggatcatagtcttctcgcanagaccagtgagatcatgttcaaaccactgtatgattacggtggcgtctacttcgcacagacgcgcgagcaggagaagtagcgcacactntttccgtgtcgacgcaaggctcacccactaattaagtaattagcgttaattgtcatcattagcattattntaaagaanaaccatatatacataatttagttacagcttttaaa

SEQ ID NO: 14594 - DNA, 465 bp, Oryza sativa
  unsure (1)..(465): unsure at all n locations
cacctaaattcccgtgacttgctgagactatttgtctcgcccttgctctatataaatatatatagttcctccgccttgaagagaagatgaagcgaagtgaagattanggtttcgtcctggttcccagccatcgcctgtggtgttgggtgttagttcgttggttccgctgctgctgctgttggtgtttcctcgtccgtgtcgtcggttgcattctcgggctgttctgagctgcaacctaagttaaggtaaataagtcctctattttaaggattgcaatgattcatatttgtcaccgtgcgtaccagcgctaagtcctaggactggtactgagatcgtggtttcgtaggaagcggttcgcgccgttttcctacgacacgctcctgtcaggtgccgttgtacggtagtaccggattgtggtgtgacaagaaatttccacaataacctataaagggtaaatgaccatct

SEQ ID NO: 14595 - DNA, 399 bp, Oryza sativa
  unsure (1)..(399): unsure at all n locations
ttactatagtaataggccctatcccagtctacttttcttgagaacttctctatccttcttctctgccaagcctagcttgccctatgggaataagaaaaccttgccttatcagtctctcgtgccaaaagagaaagttgtccttccctggaaaatcgagttctttnttgtttcgtagtagtagaattgctagaaaatataagatttcgttgtagaatcctaaaataaagtaagtactttttttaagtacataccaatctagttctggacctctacatatcagagtcaattntaatttttttttcaagatatttaatgcaatgaagaattaaagaacgattctccacagagatatgtacataagggggatccatatgatataatgctgntcggacctggagt

SEQ ID NO: 14596 - DNA, 461 bp, Oryza sativa
  unsure (1)..(461): unsure at all n locations
cattacggacctatgaatctcagcttgcactacgcgttatatattntattntcaactgcgcttataatggcacatccgctttctctgtatgtagattaaaaaaatacataccatattttttcccttgctttgctatttgaatgcttacctcagtgcaagagcagggaagaggtttgattgctaataaaatgagtggaagaaggccgtcatggaagagtttggggtccaaagccacaccttctttctcccataggaacagaggtcaggagctgccggcagggcgctgcttttaatctgactgatggctcaagataagttggagacgtacttgagatagataatttatgtatttcgctatttcgaatacctaaactcaagcggtgctaatttgctaatccaagccttatcaataataccaacacgccgtctgatccaagattagcaacctctctttctctcat

SEQ ID NO: 14597 - DNA, 424 bp, Oryza sativa
  unsure (1)..(424): unsure at all n locations
atcttatctttttaatctcaccattctaaagatcatcctangataagactgtagaacctgaatgcaatgtgcattatgaaatggctctaaatgtatcatatcagctaactgaattatgtctctccagcaaaaagatcccttattgaaaaccatataaggaactntagttctataataagaagcccaaatcagcctaacccaaggcaaatcctgtgcagtataaaaatttatgcaaatgtttaagaagtagagccacattatgaatgtacaagttcaatacacctagaccccatttgccttggacctgtaaaaatgccttctttcatatcgaaagtcttttactcatctgatcgacaatgccacgaaagcatatcgcaaagtcctgaatacacacactacttgatatatacatgatgtactggct

SEQ ID NO: 14598 - DNA, 464 bp, Oryza sativa
ctcgtgagatggtggagagctctttggtgttggtgacggttgttgttctgactcctcagatggtggggatgagctctccggagtatgtgatggtggggacttctcttctggaggtggagttgattttgccggagatggaggaacgtactcctcgtgagatggtggagagctctttggtgttggtgtcggtggtggttctgactccttagatggtggggatgagctctccggagtatgtgatggtggggacttcccttccggaggtggagagatctccggtgttagcgttggtggagactttgtctctggtggtggtggagacttttcaggtggtggtggtgaactaacatgagcttctggtggtggcgaggaagaattttctggtggtggtgagctaacatgagcttctggtggtggtgaggaagaattcactgtggatggtggagtgccttcatgacccgatg

SEQ ID NO: 14599 - DNA, 373 bp, Oryza sativa
  unsure (1)..(373): unsure at all n locations
accgcatcagtactatcatttaccccgatttaaacagngagattntgaagcctcgacatatagagtagacactatagtagtatgctctactgatcaaacctcacgctaatactgctatttcttccaaggtagtcctactagtacgcttattaccagactaatactaacgctgtcatgcttaattgctgcaggcaaacaagggatgggcctcacctgtcagtcagtacacggngtttccaccgtcactccaacctganagaaaaacanagcacaaactacacattccgtcaatgtcgaaaaagagaataaaaaagaacgcctggtgcaatgcggatcaaatcagcgaccttataattcccaatttgatgtacac

SEQ ID NO: 14600 - DNA, 480 bp, Oryza sativa
  unsure (1)..(480): unsure at all n locations
acctatanaaactcagcttaattaggtaatctgaataattacagtagatgttttttttccaacattggccctctctctttgccagcgtgtatgccattctctgtagtgagaatcgatcaatcttcctcaaattcactacttcttccttgttctctgcagcttcaggatcttacgtgtagatttattttgcttgtctaagacttccttaaagaattgaatgggtaggaaacgctcattctcaacgttaaggctgtgttcgtttgtgtgagatagggtgagaaaacacctcgttttccgtgcgcacgctttccaaattactaaacggcgtgtgttttgctaaaattttctataggagagctgctttaaaaaaccatattaatccattctcgaaatctagaatagtttatactcaattaatcatgcgctaatggctcacctcgttttgcgtatctggccaatctcntcaatcccatatctctc

SEQ ID NO: 14601 - DNA, 256 bp, Oryza sativa
  unsure (1)..(256): unsure at all n locations
gactggagagttggtggccgacgagagcagcgctggacgctggccactgtggcgcgtacacgtgttcctgttggtagagaaaccctcggcgacgtcgccggcaaccggcggggaaagagggtgtagagatgggttccaggcccaagggttcatatgctaactgccgcaccgccactactcaattttatcgacatttttgaaaaaatnagttataattcgcgatccactgtaacgaccaatcggaatatcgctcgaa

SEQ ID NO: 14602 - DNA, 474 bp, Oryza sativa
  unsure (1)..(474): unsure at all n locations
ggaacagcttcacacgctgatctttttagccctgttttatatattgtcanatttctcaagccaatgctgaagaagctgaagaaactccgtgtgctgtccctctgctntttcagcagttacacactaccaaagcacataggcgagttgaagcatctcagatacttgaatctggaaaggacgtccatttccaagttgccaaaatcttcgtgcatactataccacttgctagtactcaaaatgaacaaataggtgcccaaaacattgccaaagaaagcaaacaatctcatcagtttgaggcgcatcaacggccctttgaaagacgtatgtaatgtcgggatgcttacttctcttgaagatatgaaagaattccaagtgaagaaagagaacggatatgaaataggtcagctatgctgcctgaccaaacttcgaggacatctccatatcatgaatcttgagaatgtgcaatatacgaat

SEQ ID NO: 14603 - DNA, 307 bp, Oryza sativa
taaatgaaagagagagagtaaacttctctaactggagaagctatacacaaaagagcaattgtgagagagctatagatacctatgtgacatctattgaggggttactattaatagctattgctgagatgacatgtttataagagcacattatttccgttcggggctcttgccggcctcaattccaattcgctcggaggatttaacattgggctactgtttgcacccatatcaacacacactcacagccaagccactcatcttttccccattcccatcgtgtcatagcgacgaccaacacatctcgacg

SEQ ID NO: 14604 - DNA, 310 bp, Oryza sativa
gaatggcatcctgagatgacgacaggcgcccaaccggtgtacaaagctgtctagcggatgtcagccggattcatgtgtatatggagatagcccgaatatgcatcccaagctctcatcagatattacacacgcgtggcattatctacagggcgcatccttggaaaacggaaatctaacttcagacatgccttggtactgcctgtgacgtcgacgcacatgcgcgcatttgacactggatatgcctaccaatactggattacgaagtcattgaggatggtcgacatccttggatacccccgacttgatcaac

SEQ ID NO: 14605 - DNA, 466 bp, Oryza sativa
  unsure (1)..(466): unsure at all n locations
ntaagaatgggttcatacctcatgaggtgctatctgtgtattcttcgacgaggagcgacggtcttgcccatcgggaacaatcttgacaggaatgccggtgagcgcttattccgggtattcaccgttgcacggttgatgtacaaccactgttctgctctcccgaggagagagaacggcaacaggtggagtctgactcttctgacggtatacgtgctacagctttccaggaattcctgcaatcgaacacttgaatcctccttatgcttaccacagaatgggcaagcctgcaccatcgttaatttagctggacttcaaatcaaagtcaccgtttaccctgctgacttgggttccaactggcatgttaccagcatagggagcagcgaacttgcaaagggtcttctcatccatatcgtgcaattctggtggcacagaattggctggtctaggtgccaatagagtgaccttg

SEQ ID NO: 14606 - DNA, 296 bp, Oryza sativa
  unsure (1)..(296): unsure at all n locations
gtacgacgcagcacacatcacaccggactgggatcctctangtcaggtgactntagagtcactccacaccactggtcagataatcccacatctctccacaatccctgaattacttgcacccggacccaacatggatgcagccatggctgccccctctattctagcacgcgatggaaggcgcaaccatntaaacagaaaccagccggtggccggtgcttcatgcgcaccaccagagccggcgccgatctacnatctcaccagagtatcagatacaaaaaccagagtatcagactcga

SEQ ID NO: 14607 - DNA, 475 bp, Oryza sativa
  unsure (1)..(475): unsure at all n locations
ggcaacccattangaaggggaagtggtcaggaaaaacaatgtttactctatggtgtggcatatagactgtgttgaaatttgatctcctcaacttatcaatgttgaattattgttcaactttgtttatattgttcgttgaacttatcatcatatcactagtaatcatattacggtgttatgtggagtgtgatgatgtaagaatgaagttataaagtcatcttcatgcatagttaaatgtgtgattatgccagattgttgtttccgagatgaattttcgacttacaattaatatcggtagatttcgttcagacggtccagtttctgatatatcgatattatcgatatcgttactaattntgggtctatcgttccgattnttgtttcaagaaaaaaaaatgaaaataaaaatggtagagggtttntgggaccatttcatccctaatgttgctgctgtagggctactggatatcgaatc

SEQ ID NO: 14608 - DNA, 358 bp, Oryza sativa
tctctgagtcacctgaggctgcaagctgggatggtggagcgagacagccacatcgcctctgcgaagcttgaactcgtccaagaacgcctgctcgacgtcttgcggccccgtcgacggaggcgcccgcgcggcccatgaaacagccgcggtcttactccactcgcgcagctcctcatcaatggcgtacgaggtggggatgaagatggtgtcttcctccgggcgcgtggccgggtcgccgagctacgtcatcctggttgcccgcgttcttggcggtggcggcggaagctggagtggaaaggccgggcgattgctcgtctgcagctcgcgcacgcgatgacggtgaggcggactcttgcgt

SEQ ID NO: 14609 - DNA, 454 bp, Oryza sativa
  unsure (1)..(454): unsure at all n locations
tcacacttcagttcacccaatctgagccatcatttctcctcttctaattactcaaaccatcgaaatgcattgcagaaacctacggagagtggcggcgccctgccgcagaaggtggcggagtgggctaaagatcaggtagccgcaagccggacggcggcgaaggagaagcangagatcgtggaggtgcccgtggcatcatcagacaccaaaggggggaattccgggaggatgaaggcgacgcactcggtgagcattgtggccgagagcgtcgtcaaccagaagggccggtcgtcgaggagatcttcccacgacttcgacaacaatggcaactcgtacgcatccctgctcctcgaggacatccagaactaccaccagcagagcaccggctccgccgccgccccggcgccagcgttctcgctcccggcctgcgtgtccaaggcctgctccatcctcg

SEQ ID NO: 14610 - DNA, 407 bp, Oryza sativa
tctgtatgctattgatacaataaaaaccacgcttcaggtatggtaactgcatatggtattctcttaatgtgccattagatcattacgtgtctccaaaaatcgtgctccccaaactctttctaaccaatggttacatattgccacattgtccatcttgatctaattgctcttgaactaacaatgtactgagcttcctttcagtgcctacacctttcatcttatgaaaacactaaatgttcttatcacgattctcctagtaactcataagatcgtgattgtattttgtgcttttgtgagaaagctctctcttttctataggctgccaaatgtggaagtaaaattcaatggaaaggcttgtatgctgggttaggtggaaatattgctggtgttctaccgtgagtatatag

SEQ ID NO: 14611 - DNA, 365 bp, Oryza sativa
  unsure (1)..(365): unsure at all n locations
gcacactgatctattgtcaacacaggcttcatatatttctcgcanatatttaatgctgcagcatgcatgccagctatcataaacaagagagcgattacagcttgactagaagagctcctgttgcattatatgctgactgtaactgtgaaacttcctcaggtgcaatctggattctcttcattatagaaaatatcattccaaacgttgaggcatctggcataatgttgccttcctgcatttgttgcaccaattctgcacattctcttagcttgcccttggcgcacaaacatgccataacagcattgtatgaagcacagtccgatagtaagcctgaattctgcaagtcatgagcaaccctaactgac

SEQ ID NO: 14612 - DNA, 393 bp, Oryza sativa
  unsure (1)..(393): unsure at all n locations
gcttggcacaataacatctacagtttctctctagggacgtgggtgttgccagtgcaggggttggcgtttcacgggctctggctgatgtctaaagtgtgagcttggtgttgctntgctcgttntggcagtgcctccaataatgtcgtgattgccgtagagttggagctgctgggtcgctaggtggcaagctcggcaacgatgacacgtgccttgagatgtcaacgttgtgtgccgcttcttcagcatcttgacgtcgatgttcgccgttggattccgccattttcttctttttttttaagctgctagatattactcccgcttaatgaaatataattggcagttctcctgccggtttagtttcaaaaaataatatgatggaatgattcagtctca

SEQ ID NO: 14613 - DNA, 467 bp, Oryza sativa
actcaagctggactaaagtgggtaacataagcagcgacatatactgttgacaacgtgtgttcccggtcccatcgcctgcccggccggctgaacctcgtatgttgctactaccatcatctctcggggtgtgagatccctagacgcacggcggcgagctttccatcgatggaaaggaaacaacagatcgagcaaatccgcggggagtttgactgtttgagcgatgaggagcgtgctgaactagtcctgcaattcatttatcgatcagtccgtctctatcaaatggtgattgtgagaggagacctaacgcatgacagcaaattagccgttcgaaaagaataaaaaaagagaagagactgtacactagtacaaaacctgcgctggtgattagcgggtgactgggcgtcgtcgaccggcgaggcccacgagtccacgtgaatcctgcacgctaaccgcgcgcgacgtgcagc

SEQ ID NO: 14614 - DNA, 368 bp, Oryza sativa
  unsure (1)..(368): unsure at all n locations
cgaagatgatcaattgaaccacactctaagcaacgatttggaccacctcttttcctgttcctggcattattcatagctcgagcaattcggttagcaaccaaagccaaatcctcatcctcgatttgttcgagttgatcatcagatgtggcattaaaagcagcaagagaagagggcatagatgaagaagcatcaacaaccaaagaggaagaagaagaaaccatagcactcgatttagaatcaactntgcgagagagaacattcatctcatgaagtttcaatntagtataaagtgaatccaaagtcaaagtagacatattaacagaactctgaatagatgtaactttcatcttccacatagacatgtcgag

SEQ ID NO: 14615 - DNA, 474 bp, Oryza sativa
  unsure (1)..(474): unsure at all n locations
ttgccaagttggcgtgtctggagaacctaactctgtatatttattcagaacggcgtaatttccattctcaagtccaaggccatagtatctcagagacgacggcgacatccttgcagtttggaatagttctgaatccactgcattctggatcttctcaccactatgtattatcttactgtcatttggggcctggaataattttcctacattactaacgccccatcttgtttgacttgtaacataatatgatgagtccccaaggtttgtggaatccaattcgtacatagtattatccgaaactctgatagatctattactaccacagtctaccgcaaaggaataatctgcagtcatgacgtgcaaaattataatagtattagaatttcaagacccaatatatcagctgctatggttgaggaaaagtgagacatatacattntggagaaccacganaacatggagtatcttcctgga

SEQ ID NO: 14616 - DNA, 309 bp, Oryza sativa
  unsure (1)..(309): unsure at all n locations
ctcaacttgaagaatgtagtgccaagctagatcttgaaatgncaaagctagccaatcttccaagtgctgttgaagaacataaatctagattgagatcggctataaaaaatgtggctgacatgaccaagtccctcacagtcatctctggaaccgacgcccaagatatccaagccatcgaagaagtagatcaaattagacaacgagctatgtctgctatccagcgctacttgtctggatgattggtcttgtataagataacactattttgtaatcggctaagaatcttgatactccttttgtcattgaact

SEQ ID NO: 14617 - DNA, 475 bp, Oryza sativa
  unsure (1)..(475): unsure at all n locations
ttcagttgngagcagtgcagtacaaccagagtagtttgtattgtatgcanaggagacatgacttataccttacagccggcggctcagctaggttgcacatggcctgaaaaagacgacgtttttagccagaaaaagatgcataagccgtcatttacatagtaatatgtattatgtgcatgctattaagaaaaagtattcctttgttttcttactccctgagttctgttgcatgccaatctctggagggatgacatcaaactgtgcaagaacaaaataaccattaagcatgaaaaagtctttgataaggggttaagttgtctgaaattntattaagattgtcagggtctttntattagtcggngtaaagctactgaatttgggtaatgttggtaacaggccaaggtggttgaaatacttgcaacatacaaataanaaaatactacagctaactgatattgacaatgaanatacagga

SEQ ID NO: 14618 - DNA, 378 bp, Oryza sativa
  unsure (1)..(378): unsure at all n locations
catgtacgatggctttgtatgtgtttccaaaactaaatagcagctagcaaggatgggaaatgaagagctgtgatcgatgatgttgaactatatgcaaatgcatccaaaaactgcacaacaattagcccaatcagactttgtatcctctcggtaatttntgcatgttaccgagtgtcccgatcttatacttcggaaaaagtacgcacatcaacgatttgcaatcattntttagtgttatatcaaaaccctcgattactaatatacactgtcaaatcacttataagcatttctgagaagtatatttaaaaacttgtttacaaatgttgccctgtggctatntacaactatttctgagtggtatatatcattacataaata

SEQ ID NO: 14619 - DNA, 393 bp, Oryza sativa
  unsure (1)..(393): unsure at all n locations
ntgtcctcaccttgaactcacctgtgcttgatttttgtctgctcatgaaacatccaagcttaattatcaggaatactgtgctgcctcattacgtaactttacactgatggtgccatttcagaatttgaaagcctatataagtatatatacatgtatatatatatctatgacatatgagtntaagtccgcacatgccagacaaatatgtggtacttaatattgtagacaaatgttgaaattgcccaagtattgtttgaggatatgtagaaattggctaatggtaattcatatattcttcctgcgtcgttcttgcacagatgcccggtggaggtggtggggaggggtagcaaaattcttcttatcacactcacacattcttgtctcctgactcgc

SEQ ID NO: 14620 - DNA, 382 bp, Oryza sativa
  unsure (1)..(382): unsure at all n locations
gcttcattcctctctacatgtatatctttcataattatttatgtataatataaacatgaccataggggattacctcaagaaaggcgtaatattattgtgcattagacattgttgtgcttcaagccacagtgcccccacaaataattctctgtatgttttaaggtaacaaanatgaattcattattatttatggaagtaccaaatagtaactactaatgctagacaaactcattacttttacttgtatttgtagaaccattttntagcatagcttacatatntatntatcatgaaaatttcatggaaatattacaattaatgcaggtgggatgaaagtgcaatatgactgctcccagagtatattataggggtctatgcatac

SEQ ID NO: 14621 - DNA, 473 bp, Oryza sativa
  unsure (1)..(473): unsure at all n locations
tctctatgaatatctccagatcagttatattcatattatctcattcaacatctcacaagactccctcaggatataatgaactaaaacttgctgcatttacaggattcagcaaaaatcaatcgatacaagttactaggtatttacagcagtgttttgtttctaacacagtataaatatcccgaatcgcaccccttagcagtcatgaaataggaaaaatataattntggcctgcttcttttgtgaatccatttaatagatagtagcataattacaaagttatggtattctattatttccatcaagaggcaagtgcaaaattagccggaattttacaaaacctaaactgcgatatcataaacagagtcaggtattaattaaaaaatgaaatgccaaattggatttacgtcactagtagaagtagagcacaagtagactgcacaacaagtaactaagctacaaggcacatttaaacc

SEQ ID NO: 14622 - DNA, 355 bp, Oryza sativa
  unsure (1)..(355): unsure at all n locations
tcctttagtcacctgccgcatgcaagcttccttggacttttgagcactcttcattngntaatttaatttgattaattcagggcttccttcccgttacattacactgcattacattaaattacattacattacatggttgggaaaaaataattaaggaggaagaagaaattaaaggngggcatgcattgatgcagatcactttcagagggtttggccggctataaatatatatgcttagctaggctaacactcaagcctctctttgagaggcagcttatctgcttgctgctgctgcctgcattcttcttcagctagctagccgctgctgacctcttcctggtcggagctgcttgtg

SEQ ID NO: 14623 - DNA, 494 bp, Oryza sativa
  unsure (1)..(494): unsure at all n locations
ttaggacctatnaaactcaagctttgccatcaaagctntccccattaagtgcacaggcatttcttcgtgtcacctctacgacgaaagagggtgtggctgtgggtgtcacctctacccctccgaaagaaggcgtcactgttggttgctagcatcaggaggtagtagatgcaatgaggttgtggtttttccatccgattcaccttttgctgtacatggttatggttgttctttctctacatccaatctgggattcgttcgttaagcatcggttcgagagttgaggtgtgacctgtgggtgttaatattggtgcgagatatacctgttatagttgaccgtatgatcttccttttctcccactgcttggtattgattggtcaggcgaattgtagaatttcttccactattcaatattactacacagtaatttttccatctcgtggccttgtgtttatttgctgtgtgtcactatattcgtgttttgaaatctaacttc

SEQ ID NO: 14624 - DNA, 371 bp, Oryza sativa
  unsure (1)..(371): unsure at all n locations
atgacgggtggcgaaggggaaatgtccgaagtgaccttcaaccgccatcacggagtgatccagagcgtncacgccaaaacctgngatcaacggcgatcaccangggttcggccgaactatgccgaacctgggctgggcccctctggcctagcctttggcctggctcctcctctgatcctcctctatccattcttcgatgttttgggctgattctctggtgtttctacgaagttcacaacccatccttgtatggatacatatttctcctcactttagtctagaattccttccaacatcaaggtttatcacctgcatacatatatacaccaacactgtggaatatgtgagagtaagcactatcactatgttgg

SEQ ID NO: 14625 - DNA, 457 bp, Oryza sativa
aaatactaagctttcgatacctccattggcagtacccgctttttatcttttctcctcatgcactctaggcgcgcacgggttctagcagagagaggagttctggcgcacccgggtaaggaagactcacacatgcattaagttatagttatgctttagattctctcatggcagttctaccgatggcgacaccactgtagacacccgcctcgcggacctaccaatggctgccccaccgtagagcccctgcctcacacatcaagaaaccactatgcatggatactgccttcgctcagctatctactccgctaggtctatacccatactagaagtgcggttgtacggcggtgcgttcatgcttaacttcatggctcggcccttaattgaccacggacggcactagcgattttcggacaccacccatgtcctccatccggcccagtctaaaacagatggttta

SEQ ID NO: 14626 - DNA, 347 bp, Oryza sativa
  unsure (1)..(347): unsure at all n locations
tctctcggccggntggcttatatagtgcacccacaacggtcaaaactgagctgtggggcccactatctnttgcctcacagaaagaggcctgatcgttggcctggctcggctgaacccctggtaggcccaactggccccactnttggcgcgtgggttccaacggccagtgtggtcgtggtacaataaatttatattaacaattttatcntagttgctctgaaaattcatttgaaagaattcctcaaattcaaatcctaatgcaatttgaaattcaacgtgtgtgatgcaaaattgaatgatgaaataatatgggatacatacaattacctgtggcgaagcgcgtattt

SEQ ID NO: 14627 - DNA, 461 bp, Oryza sativa
  unsure (1)..(461): unsure at all n locations
ctattacggacctataaaactcagctnttatcctactgtatcttgtggaacttatttgtgtgcttgcactgngagaggcattaagactacaatatgaacgatatctagctatggtatttagataagaatttacaaagttttctaaagtctattactgatgtaatgatgtacgagtgtacgacgatatgtaaacacatatttatgctgtttaattagtttgcttaccgccccaacaataacctccaacttcaacaatagatttccgttctctttttagagcagcaaagatcagtttagcatcttcagctgccttcacctgaaatctcaattgaatatactgatcaatatcaactaattgactcctcgataatcgtcatcgaataagctatggaattggtgaaaacaattactggagagtgagccatgatccattgtgtaatgtntatacttggttctccatt

SEQ ID NO: 14628 - DNA, 473 bp, Oryza sativa
  unsure (1)..(473): unsure at all n locations
tcgagcggcggagagccggtgcctggacgggtgtggactttttattgcgctcctccgggcctaatgggccgtcctaactggccccactttgacgtgctcccttccggctcatcaaacccacgagtgtgaatcccacattggatcatatttttagcgagtactcggagaatgctacgcgtcggacgtacggcgcgaaacgaaaaatcggacgtctcgcgcgacagttcgatccatgcacaggtgcgccagccatccatcatgcatggattaaacaaattttagactattntttctcttaaaatatttatccaaaacatgatccgattacaccattaaattcattgcaattaaaattttaaaacaagtccacacatgaatataatccgataaaaaaaattagcttattattgaatgtatttactggtngcacgctgtgcgccaagtatatcggaattggttcattaagtagatcg

SEQ ID NO: 14629 - DNA, 337 bp, Oryza sativa
ggagctcgatccttagtcagtgtcatatatgtttcctttcaccgaatcaatctgagataaggcttatcccaagataatctgctagagcatttcttgtgacgctaccggaactaaaggttttccagaagttgggcacgccacaattcaatattttgcttagtgacagaagctgctggattctcagaacttgtatgtaacagtaatgttatgggccgcagcttttgcctattcttcaatcctcactatgaaagcagtgccaggcaatccggaccgctttgcaaatatctgcatctgaactgataatttcctgcgccgtttactagtaccgatagtgatc

SEQ ID NO: 14630 - DNA, 478 bp, Oryza sativa
  unsure (1)..(478): unsure at all n locations
tcacanaatcctaaataaaaaatgttcaatcatgaagtatgttatattcctggattgaaataaagcaaatcctaaatccaaaatcaactatgaattaaatcctactttcctaattccttcctaaatcctaaacataaaccatctacgggtagggcaaggcaaggaatgaggggaagagttaccttcgtcccttgggcttcgtctggagctccggacggcgccgctagctggtgctggcgcatacactggaggcgccgagacaggctagagagcgggcgccgcctgagctggcgcgtggaggggccgaagcagcgaggcggcgaccgcgcgacggggcgacaggcgggcgaagtcacctccctggtggcctcngcctggcggctggacagggaacgagatgagggtttaggaagtttttgggctttcctttttgttatttggccaatgggcctcanatagtgaggagaggaggatgggt

SEQ ID NO: 14631 - DNA, 389 bp, Oryza sativa
  unsure (1)..(389): unsure at all n locations
agcttaattgatgattcatctctaaaatggggaattaatctatatctgcatgacatgtaaacaatgataaacttttggagttattcggtctggagtaaaaacaaaggatttggattttgaaggattaatctctatgattntttttgtttgtaagagcctaagcctggactaaagattccctcttacatcttataattaagaatcataaaattaggttagtatatatactacatgacttactatgaataaatttgcagagtgctatataatttattagaacacatataaccccgaataatataattntataatatttatgcacaagtgaacaagctcatgcgagcatatctgttcgcttggtgggaaactgtgctggctgataacaacat

SEQ ID NO: 14632 - DNA, 460 bp, Oryza sativa
  unsure (1)..(460): unsure at all n locations
tcattagtgatatgcccaactgggaggtttggtcttttgctgaaaaggctgcttcaacacttgaggaagggcacgatgatggagatgacgcgaggcaaataagggaaaacttcaaagttgcatcttctaccttgtctggagaagctgtacctttatggctgccccaagctaagggctctcccacgacaacttggacaggtggcctctagcttgaaggagctccatgtaagaggtgcaaattgcttgaagacgatcgtggacttccctttcctctctgatttcttttcaattagtggatgtgaaagcctggagaggatctcattccttccccaagtgagaaagttgtacgtaggcgcttgcccaaatttgaggtgtgttgaggaattggacaatttggagcagctgggcctgcccaaagatatgcaggacatgtncttgcggtgggtacatgggcttaaag

SEQ ID NO: 14633 - DNA, 330 bp, Oryza sativa
  unsure (1)..(330): unsure at all n locations
atcaatggacaagatattgttcatgttctttacattgaattctctctggatgcattaattcagttgcagtttccatacatcattggaacctttcanttttcatttatatttaatatcacttttctaaaaacaatatatttcatgctgagatgttcatgtccttacctcatgattagtattgttacatatttgtacattattttgagttacagtagtgctaatgccaataggaaattgaaagagttagacatgagtttaataggtgtgctaatggagaggatatgagctaattcaatgtcattatctacaaatgtatcagacgcatgtgct

SEQ ID NO: 14634 - DNA, 455 bp, Oryza sativa
  unsure (1)..(455): unsure at all n locations
cactcagtaatgggataattttcagtactntcttcatcttttgatgngtacttaatctccttctattaatataacgccaagcaacctgtttggccgttcgaaaaaaataaataacttactagaaaaataaaaagaaaaagagaaagaaaaagaaaaggtaatagaacaaacaccaaactctctccaataaaatattaaatgatacttcctctatcccaaaatataaggcataaccttttatataaatatatattatgcttgggtaacgcccttggcgcgggattggagggttntgctcaatcccatgagcaaagtttttggcttcgctcgcaaccttcccctcatcggaagcgcctgcaagtctccttcgcttctcgtatatcatacttcgtttgtcatgctcacgtctcaccacttcctctttgctcggtgtagttntgccgctggagcgggct

SEQ ID NO: 14635 - DNA, 336 bp, Oryza sativa
  unsure (1)..(336): unsure at all n locations
atgaganaaaaactganaacattgttcgcgaacaagcaagtaaacaactttgcaatggtgcttgcctggtctttcctcaactaagataatgttcttttcaagttaattagctgtcgcaactcactagtagaagtgcctatagaatntaatcaaaacggcggctcacttatccttcctctgccccttcgcaactgcattctggaatcagcttgaaatcccgcagactatcaccagcgcgagcgacctccatgctctgcgcccaaatggccccgctccaacaaaacacttcaaggttttcttcttgctttgtctctggggattatggaaatcatcgta

SEQ ID NO: 14636 - DNA, 497 bp, Oryza sativa
ctataaatactaagcttggagagttatgaggaccaagccacccacgttcaccattgttgtttaacctatggatgctgaggataggttaaggattattgagaagaagctgacccttgttcgagtacgtgaagccgataaagtgatcttcgcagcaaaccaactagaaggaccagccggagactggtgggacacttacaaagaggcccgagaagaggatgctggagaaccaaactgggaggagttcactacggccttccgtgacaacttcgtgcctgctgccgtgatgcgaatgaagaagaatgagttcacgaggctacgacaagggaataccactatacaagagtacctgaaccgtttcactcaactagcgcgttacgcaactggagacctagccgatggggaggaaaagaatcgatagtttatcgaaggcctgaacgacgagctgcgtgggcccatgattggacaggaccatgatagtttccagagtctaatcaata

SEQ ID NO: 14637 - DNA, 388 bp, Oryza sativa
  unsure (1)..(388): unsure at all n locations
tgttatatctatactatgtctatgaatgccatttttactggcttttgattngaaaatgaatatgaaatgacttttaggagancgtttgccagaaactaatcgtaaaattctgaaatagtacgtagttagcaatcaggaaagcatgcaagttgtacttgtagatagagcagcatataacatttgacaacagagttggttaattttggtttctaatgaaaatcaatcaagacggcatttgatattcccttttctaatggttcctttttggaacctcaaaatgtgaaaccgtctatggtggagaactgaagaaaattggaaagattcaaacagtacgtcatcacacgtcgccaacgtctatatntccttcttctcgctcgcatatcttctt

SEQ ID NO: 14638 - DNA, 309 bp, Oryza sativa
tgccggcgtatgtataatgcttgacacctgaacggggatgggggatcacattctatctctcgcatctgactggaacgtgtgctgaggcgccatgcgaccgcggcaagagctggacaggtgctacacagaacgtactgatagatggctgcatggatctccaactaacgccaccatgcactatcatctgccaagcaagtttgcgatgggagcgcatgtcatcctcagacgatgtagtcattctccactctgtgatgtgagataactgattgcgagcctattgctctgtatgctactcatccatatctgttc

SEQ ID NO: 14639 - DNA, 317 bp, Oryza sativa
  unsure (1)..(317): unsure at all n locations
aatcaggtgagatcggctgaaaccccgatgctatctttattagtaatcaaagaaagagctagataacacgtttcaaaacaatacttaacagatcgaacctaaccgatgcagcattaagcgtgataagaaacataagatctaagcaaatcgatgaanactcattcaagatggtagatacaccgcatagtcttgcttgggatcgaagcctaaacctatcggctattntcaatgatagaggcttggccgatgaagttanatgatgagaccaatctagattatgcgggatatatgataactcgacgaattatatggacatg

SEQ ID NO: 14640 - DNA, 473 bp, Oryza sativa
  unsure (1)..(473): unsure at all n locations
tgatgattattcgacggtcgatagtgaaaagtccactgtgtttcagagtaaaagtataccaacgcatgtgtatgcatatgcaactgtgcgagcgagcagttatcaccttccgttttgcagagaggtagttaatttgtcagttaatttcttgaccggctctgcatcatcatgtctgaaactgaaccactttgtcctgacttctgactaactgaaagcgagcgtacgttacccccagatagagcatgcgccacgcgcagacaaaaaaacggcgaccgagagtcggcggccgcggttgagtcatgcatcaatgtatgattcagtccacctcccatctagctggtacagcagcacctcattaatcccttttttaagctaaagataacgggagggcaaaacttatgatctttattagtgaatatcgtaaaaacatggcatgacccanagaatattggtaattgctactcccttccgtt

SEQ ID NO: 14641 - DNA, 349 bp, Oryza sativa
tgtccttgaagacgcagatggacggctcaaggctatttttctttggacgatcagacggctcacctgtcggtctacgatgtgagggagcatttgactcttgacttgaccatgcggcatgcatggtcaaggaatacgactactatgcgaagtcacctatgaatatcgtgcacaagagccacactgcagtcatgagcgagggacatacacaggctttggatcatagtcgttctaggagcttcagtgaccacctcgcttcagacgggctcatgcgtatcttcagctaggtctgggaatatgatgcagctgcgaagtctaccgaagtggtgcctcgacccagtattggtatgct

SEQ ID NO: 14642 - DNA, 375 bp, Oryza sativa
  unsure (1)..(375): unsure at all n locations
gatatttgggcagtgtaatatcttattattagatggatcaaagtattagccgatatatcttagatttacctcattggctaagctataaatatatataatctctgtcttagagtacttctaaacactaagtgattatactgtctcggctcactgtccgatctatcccaatcgcttagtttagacatcattttagaaaaagattatatatcattgatatctgcaggcaatcaagtagatntaattctatcttggttagtattttattgccgatctggtcacatcacatcggcctgatatcatatgaaacatcatctgcaacacagccgatcggctatcatttgcggacttnaatgttcttctcttatttcttggtgg

SEQ ID NO: 14643 - DNA, 475 bp, Oryza sativa
  unsure (1)..(475): unsure at all n locations
tggacatcatcctanggatggatgggttggctaagcacatatgttcttatagatggggccgaanagtccatcaccttgcaaggacctggaggaaagcaagtccactttacctctaacacccctaccgcaagtcggtctatcctaacctgtgtacaagtcacctccttggagtcggtgcccatagtctatgaatatcccgacgtatttccagaagaattaacgagtatgccaccagaccgagagattgagttcgccatagaactggcaccacgcaccgcaccaattgcaaaaagaccctaccgaatggcagctaatgagttagcagaagctaaaagacaaatcgaagaattggagagtaaaggttatgtgcgacctagctcatccccttggggagccccaatgcttctggttaagaaaaaggatggctctgagagaatggttatcngctatagagccctatatgaagtacctgtaa

SEQ ID NO: 14644 - DNA, 458 bp, Oryza sativa
  unsure (1)..(458): unsure at all n locations
ntgagggagaacatgagggatattctttgtccatgctttgttttctaagatcagctggagttgggttacgaagaatgcctgaaagagcaggcacaacctgtgccgtggcgcgagacactgatggagatcagagatatgtggctaaggctcctcatttacgttgccggcaagtgccaggtaactattgtaattgttttttcggtgaaagtattgtaatgtttaactttgtgtgactgaaatgtacaatatcagaaggaacattgcgcatgccatgatagatgtagtttgcatttgtcagaatccaatattgtaagctaagctataaggctgtgtttgttactcanggttaccaacccttctccctcgtttttcgtgcgcacgctnttcaaacggctaaacggtatggttttttaaagaagtttctatacgaaagttgctgtaaaaatcaaattaatcta

SEQ ID NO: 14645 - DNA, 480 bp, Oryza sativa
  unsure (1)..(480): unsure at all n locations
ctcttaattacctattcaatctaagatccgatcacaccaatatattcggtgtaattaaatctttacaacaagatattgcttgattatattntgataaaagaanaacatgtgtttcaatcagttaatacttgttgtttcatgtgtgacagcaacatgtttcaacgtgtttcttcaccatgtttcataaaatatttaaatgttctagttgcttgatttntttgtttcaccatatatataacatgatgttttacttgttggtcaactgcaacatttgacccatccgttnttttcaatttanaaataatttacctaatgtactcatgatgttntactatatatgaatcacatggtgagagagtnaaacantctttcctattcgtgaaacatatttcatataggcgaacagcgtcaataaatatttcgactactagtgaacattccattactagtgcacacgtcacattaaatattcatataact

SEQ ID NO: 14646 - DNA, 431 bp, Oryza sativa
  unsure (1)..(431): unsure at all n locations
tnccaagatgctcgctccttcaagctcaccggtttttttatacttgccgagctcccgatcgtcaggcacaccgtgccgttcccactggcgagcagatagttcgccggcggcacggttaatgccgcgccgccgtcgaacgtgaacacgagttccggcgcatctccagccactgctttcgggaagcagaggtcgtaaggcttcngcggcgaagccaccggctgaacgccgacggcggccgtcagcgccttcttcagggccttgtacgcgccgtccgccaggtagctcgcccgcgagacggtgtcgagcaggacggtgctgccgctgctcgacgctgtctggagcggcgcgccgtcggtttttatccctgccagcttgaccatgtagtacgggttcgagccgttgtcggaagagccagctgatgtcttgatgac

SEQ ID NO: 14647 - DNA, 328 bp, Oryza sativa
  unsure (1)..(328): unsure at all n locations
ctgcagctgcagcactcttatgttgatacttctgtttggtgatgactcgcggactgaagaggagcacgctgctctcatgaaagaacttgagcggttttacagggagaagcttatggaattcaagcccccgaagttctatggtgaagaggggaattgcctcaagttaatacaaggacctctctgtctgtatgttagaaattggtatgtgctatggacatgaactcaatttatcttgattgtaattttttctataggttgtggagacaagtgactgngttgggtggctatgatcaggtactcattttgatgccttattgaataatatctg

SEQ ID NO: 14648 - DNA, 466 bp, Oryza sativa
  unsure (1)..(466): unsure at all n locations
ctaagcttaaccgaaattccaatactgataacatttattattttgttgagaatntgcctcactagacagtgaagaaaacagcaatgccatgacaaggaatgcagcaactggagacaacaccacaaagtccacagcagcatgctttaggccaaagtcaccttccccaatcatacaacccacgcccatatcccggtcccctattcattatctgcctttctagctacaagactataacatcactcaataactttagggccacagggacttcaaaatcatgtagatttgattacttcacgcctacaaattgttttagtttgagaaactgatgctttttttatgtttatgcattaacttttgggtctaccataatgaggtgaaaagagccatttgaaaatgctgcacatggacgcttgatattttggaagtgcataatgaaccaagtcttgcctcatataacattcttatg

SEQ ID NO: 14649 - DNA, 397 bp, Oryza sativa
  unsure (1)..(397): unsure at all n locations
gcttgagtcttctacatattctcctctggtntattngagttnttatacgatcatcaaatctagggggtgtccttccttagtcctataaatcttatattattgtgtggtatgtttttgataatgtngtgtatatgtgtcatacatccagatagtattgataaggaattggattgtgatgattaatactatctccattttacgctcgtaactttttgaaaacgtttgaccatttgccttattcattntttntacaaatatgaaatcatattttaaaatacaaaaacatttaagtcatgcttaaatttgatgataaatcaataaaataaatgaatagtatataaatatttttgaataatacaatggtcaaacatatctaaaaagtcaacgacgtcgtata

SEQ ID NO: 14650 - DNA, 463 bp, Oryza sativa
tcaccttggggagatctattcatccctctcctctaacgtttcttgcttgtgccgctataggcctagatgggggatgtgcctttcttttcatgtggtagtcttctagatctagatacttctgtgtgtgtgcgctcctctgtgcatattcggacagttccaaaatcctttctgaagttccgaaaattcctacccaaggtccaaaaattactgcttccgcttttcttaagtttttaaattggcctattcaccccccctctagacctaattgaccttttcagtctttacattctgatactatagggagcagtttccttcaactagttgtactactacttattttgagatgtagagaggactatgggtgtgtatagctccttttgtgtaaagtgtttgaagtatacataaacaacatctgaagtatttaactgtaatcttattacaaatataattattgagtccacct

SEQ ID NO: 14651 - DNA, 191 bp, Oryza sativa
  unsure (1)..(191): unsure at all n locations
actgtgtgtcatagtccgcggaagagatcgtactaccctaagtgagtgggttgcttcatgtgataagcttggtattgcagctgaacatggctattntatcaagtgcttaagatcatatgtatttttttcatatatatacaccattatgtaattntcccagtattcagaagcccgaacaccatgtgactgat

SEQ ID NO: 14652 - DNA, 256 bp, Oryza sativa
  unsure (1)..(256): unsure at all n locations
cccgataagactgaactctcgggcatcggtcatttgttcgggtgtgacatctgatagaccgaacaaacttcgaaagattcggtcatcgtgcaatactacccgaagaaaccgaggaccgaagaaaccaaatcaatacaatcactaagcagacaacgtgaccatcctatggaccaaaacagcccaacaacaaggtgaggcccanatccacgtcaatgacccaatccccatgaccccaccattccattgaccgaagcac

SEQ ID NO: 14653 - DNA, 478 bp, Oryza sativa
  unsure (1)..(478): unsure at all n locations
tccatataacaacattntaatggttggatttatacgatttatatgtttgcttgagaatactacttctacccaatcaattntattttaggtaagtaatgacattcatagtatttcctaaatattttatagtgtgcgctgttatgactgcgtgatatttggaaaattatcagccactggttcttttggcgaatgcgtctatttacgggtactcaagccctttttttgctcgttccaagtaaacacgggcttaccgccgtaaaattgggaattcctccatacatggccggccaataaacacgggcttctgctagtacactactagtagtagttntttttaaaaaaaaacccagcttttatatttagaanaaaaattattcagtttataaggaagatcgaacccgaaaaccatacaactgcacggtgggaaaccgactgaaacccaccgcacacaagatgcatgagacctagctacacaact

SEQ ID NO: 14654 - DNA, 358 bp, Oryza sativa
  unsure (1)..(358): unsure at all n locations
gctgtanacctgacttggccgagctgaaagagtgttcatcgttcacttcaatntagattacttccaagtgcaatctgcctatctatctagctactactcctagaatgntagaccagtgatcaagtagtcgatccaactgttgatctgtttgaaatcctcatacttaaactggcaacttgtgcttgattntgctttccatgcatggacctagtcatgcatcactgatcgctaagtcaaaagatcataatctcgataccaagctaggaatattcttggagattgtacatatagaanaatggagaagatatgaacaggtactgaatagtgatttctttgatcaatgtgcctggcaattaag

SEQ ID NO: 14655 - DNA, 473 bp, Oryza sativa
  unsure (1)..(473): unsure at all n locations
tcacctcatttganataggtggtttgagcagcccgccttttgttcattaaatgtggtagaagaatctgattctattgcataaagcgtctttacagaggtcctgcacttgcctaccctggattctgaaacagctgtagcatttggttgataatttttcactactttcagtaaaggaagcaggcacaatacatggccattgatctctcaaccacaccttcatatacccttcctttatgctctttttatatctaaactactcctgtcctttgagattctttgtggctntgtgggtgaaggtttagatcctcaagaaattgtctttactgcacataaatatacctcataatgccaaaggtagatttagcgtatctatgtctaaagcaccagagtccagagatgtttaggcctttatgggcattacccttggtaggcatgagacttataccatatctattcgataattgagtgagact

SEQ ID NO: 14656 - DNA, 397 bp, Oryza sativa
  unsure (1)..(397): unsure at all n locations
caccttatggtcaaaaggataaaagtagaatatttatgaataccataagatccaacaacattntcatctacttatacccattcgtaaatatattaagttgcttttttaaagcatgaattaacaatactttntaaatgtaattactcaactggtagcatcttacttgaaggcatcaagctgtaatgccaaagttatatataccatacagatgatgttatcgatccatttatagcccgcgaatattattattcatctgtttatgaacaaacctgtgtttgaaatgtgggcgttgttcctctttaattatattagtagtaccgcaaatgggtgtcaatatnttgaatggtctcctacagggtagaagactgatgtannaaatatcatgcatatttgacta

SEQ ID NO: 14657 - DNA, 485 bp, Oryza sativa
  unsure (1)..(485): unsure at all n locations
actcagcttctttagcaacgatntgtgtcccatttctgataaacgattatcaatacggtccatcataagttaatgactgtgtagataaccccttgctattggattgtgtttgctactactaatgaacagcccaacataagaggcagaaacaagataaaggcccagaccatttaggcctcatttggaagggccttaatccaggcccatccacatgtgatgggctgggattttgtgccttaatccaggcccattcacatgtgatgggctgggatttcgtcctatccaaacaaggcattaatttcgtactgtgcaacagagggatcagaaaacacacagaaggtgccttggaaacaagggttgcaagttgcaacactcaatatccagcaatctcgatctataattaattgagtacatataattgctaaagggcggttaagtaacatgctggatagacctaacaacagtgattgacagaaacacggtat

SEQ ID NO: 14658 - DNA, 215 bp, Oryza sativa
aacatgctattgctcaggacatggatcttacagaaaattatacaccaatccttgggttggtagactacatctaatgaaatcagaatcagcaacggacacattttactccataccgttaattgtgattgggactatttatagaagccaactccataatcgagtacatggccacttatttgagtcaaatagaacaggatacatttttttattgaggg

SEQ ID NO: 14659 - DNA, 475 bp, Oryza sativa
  unsure (1)..(475): unsure at all n locations
ngcttatgctctagtaatggcttcaagaaagctcattctttacttccaagcccacanaagcatagtaccctcgcagtaccctttgggcgaaatgcttcaaggaaaagaaatcacaaggcggctaagcaaatgggctgccgaactataacctttcgacctacactttgtcgctcgcaccgcaatcaagtcccaaatcctcgctgattgcgtggccgaatggacaccagcgtccgccccaaagcccgaaccagtcgaacaaccatgggtcacgcattccgatgggtcgtggtctcacaagggggcgggtgttgccatgatcctaacctcgccaggaggagtgccgatacattacgctgcaagattgtagtttagtacaaccaataacacagccgaatacgaagcagtattaatgggcctgagaaaggcgaaagcactangcgttcggcgtctgataatcagaacggactcanagctt

SEQ ID NO: 14660 - DNA, 397 bp, Oryza sativa
  unsure (1)..(397): unsure at all n locations
gcttgcagagtcagaggagaacagtgccactgctcacactctgacagggatgcagcanagtccagagagaattggatttgaacctgtgccagagttcacgttacagacatttcagaaatatgcagatgatttcagtaagcagtactttatgaaagatacatcgatggattcagtaccatcagcggaagatattgaaggtgagtactggcgcatcgttgaggttcccacagaagagatagaggtactgagcttctgttgactctcaacaaattatactgacgtgcttgcaatttatacctcagttgaactntganaattntatcaattcctaattntttggatatgtggctctggtctcggattatggccctgctggagagtttctaaataagttatg

SEQ ID NO: 14661 - DNA, 417 bp, Oryza sativa
accttaaaactagcttgtatggagccttagctgaagccagtttttttatttacatgcaggccatatgcaaaaacatatgttcgcggatggaccttttctaaagtctaagtcgaaaacatatttttgcgggtggaccttttctaaagtctaagttaccgcctcattttcctatcaacacttcgaaacttatcatccttatcctctctccatctcgctcacctccttatcctatcttcatctccctctcattatttctgagtcctctcctctctctcacctcctcttctttctctctcactggccgggcggcgagcagcgggtggcggcggcgggtgcggtctgcagcaagcagcggacaacttggccctgcgaaggccggcggccgactcgggcttccttgggtgcttggtaacggtc

SEQ ID NO: 14662 - DNA, 481 bp, Oryza sativa
actcagctatcgcgagcctgaagcagctcaccgcgcactcatttattttaataggacgcagaagatgctgcaagcaacagcaagaatattcgcaggctgtgagcacagtgagccaggcaggatcaggaaaaaaaaatcagataaacaggaggaaatttcagtacatgtgccaagttggacggacaaaaataaaagcagcagagaaaaactaattctgctgcatataattacgtggagataatctcacgccaagcagcaggccaactcatatactccacacatgctcaaagccaaaggggggcaacttgccaattagcccttcggattagtattaaactaatcaacggataagcacggatggtcagaggtgtaagagtaattaatagttgttgactcgcaaggatagcaatgctagctagggcatgcatatgagaacgacgtgcaacttatcgtggaatctatgcagggtatccagctcatg

SEQ ID NO: 14663 - DNA, 327 bp, Oryza sativa
  unsure (1)..(327): unsure at all n locations
catcaccttncttgctcacacgttcttgctgctgtcggtgatagtggcatatctcccaatgtgtacgtctcatattatttcaggaaagaagcaatctttcatacatggagtgaggagatatatgggttcgggatctcaggatcttacacaacgctgagtgcccaagttttttatattccagatccatctaagttaagggtgaanaagggtcgacgccaaactagacgcatcagaaatgatatggatgagtcaaaagcacgtgggaggactttacgctgcagcangtgtgatcttgcgcggcatacttacaagaaatgcccgaagaat

SEQ ID NO: 14664 - DNA, 491 bp, Oryza sativa
  unsure (1)..(491): unsure at all n locations
acactatnaatactcagcttattagctctacctgcagttagaagtgcaaactttttttattttgtttattaatgccatatatatgctaccacgtactactagcattagcagctggtacgtaccttcctgtgtttgaaggtaagcgttaagtgtttgtgttgcacacgtctatctgtcttcactttttccttgcttcttttgcactgtagtttccactatcatatactgctaatggaaattccatccaacacactgcatgctttctttaattttgacccttaattgatctctaattaatcaaaaccattagaagtaacgtgacgttggcagcatatatatatatacagccacgcacgcagctgtgcacacatcgatgctgacgatggcgtacgcnctagctaagttaactgactagtaggagtaggttgcacacttctaggaatgctaatacattcacccacgtacgcgcgcggtgtccgtacgtatgtaca

SEQ ID NO: 14665 - DNA, 329 bp, Oryza sativa
  unsure (1)..(329): unsure at all n locations
agctngagacatcagctctggtggacaagagaaatcactcttcatatgagcatgagaccttctctttcaaaatccctcatgattcatgctcatataaggaaaccccagactcctgttcgattagtactaccccctcgtgcgaggaccacaaccactctacgattctttnttccaacatgttagaaaagtggtcttggatccttttatttatcataaatactgcaaatctcgtatatgttttcacactaatcttacatgatgatgtcccacaggtcaagcttaagtgtcacgcgccgaatntctatccaaaattccaaacgcttacatgt

SEQ ID NO: 14666 - DNA, 366 bp, Oryza sativa
tcaaccctttgcacagttgtccattgctcagcgctcttgttataagattagtttcaggtactttggaccatatacagtgttggagcgtgttgggcaagtggcctatcggcttgatcttcctgccggaagtcaaattcatcctgtggtccatgtttccttacttaaagctgctgttaaacctgacactattgttagtcctgaactacccttgcagattacggatgattcagtgttgcttcagccagaagtggtattgcgcagaagtctcatcaaacgtggtaaagcagcagttccttatgggctaatccagtggacaggcgtgccagctgaactcgccacttgggagaatctacgtcacctgaagct

SEQ ID NO: 14667 - DNA, 357 bp, Oryza sativa
  unsure (1)..(357): unsure at all n locations
ccgcacctacatcggttccgcaaggtcgagctctaccccgtctaccggttcccctccgccaagtctcgctggaagtcgctgtcaccgtgaaggccgagtttgccgcctcggtttgatctccggccgagcctcctcgctgttgcggtcgtcgccggatcaccccgaggccgtcgtcggcatcgcagcaccaagccgaaagccgtncaccccttcgttgtcgccgaatgtcgccaaaaacaccgtcgccaccatggatagtatctcgccgccgtcccgatctcgtcgccggacatcttctgtcactggtcgtcgctgngtaagtgttggaagcatcgcccgtgcctcctctttctcctg

SEQ ID NO: 14668 - DNA, 468 bp, Oryza sativa
  unsure (1)..(468): unsure at all n locations
gggcgcacacganagaggacgagggcttcgaatgatactttcgcccnctacctggcgcgccagatgacggagcgtggggctcctcaccgggagaccgcgcaggcccccctttgccggttcggccgggggcgctaagtgagattcttcgccctcgatctgagaaacgtcagcgagcgagaaagtgcacaagacacaggcgacgtagacaggttcgggccgctgagaagcgtaataccctactcctgtgttttggtggatctgtgagtgaaggaatacagagagccggagagccagggagagttcaggctctccctcttctccttttttcttcttcttcttttctttttttcttcccctccttaggcctgngcctccttttntatgtggtcaggggtcaccacatgggcctctcgctgcctaagaaaggaaacatgctntttacaatgagggctagtctacagccggaag

SEQ ID NO: 14669 - DNA, 275 bp, Oryza sativa
cagcttggaacaaaacatgacagtgctctctaggtcgtggggtgacgagcacgtttggcgttcacgggcttggctgaagctaaaggtgagcttgggttgtttgctcgtttggcagtgcctcaataatgtcgtgattgccgatagtggagctgtgggtcctatgtggaagctcggcacaatgacacgagcctgtgagtcaacgtgcgtgccgttcttagaatctgacgtcgatgtcagcgtgatacgcatccttctttttttaactgcagaattac

SEQ ID NO: 14670 - DNA, 450 bp, Oryza sativa
  unsure (1)..(450): unsure at all n locations
nggactatagtgggtaacaaaagcagcgacatatactgttgacaacgtgtgtgcccggtcccatcgtctgcccggccggctgaacctcgtatgttgctactaccatcatctctcggcgtgtgagatccctatacgcacggcggcgagctttccatcgatggaaaggaaacaacagatcgagcaaatccgcggggagtttgactgtttgagcgatgaggagcgtgctgaactagtcctgcaattcatttatcgatcagtccgtctctatcaaatggtgattgtgagaggagacctaacgcatgacagcaaattatccgttcgaaaagagaaaaaaaagagaagagactggacactagtactaaacctgcgctggtgattaacgggtgactgggcgtcttcgaccggcgaggcccacgagtccacgtgaatccgccacgctaaccgcgcgcg

SEQ ID NO: 14671 - DNA, 303 bp, Oryza sativa
  unsure (1)..(303): unsure at all n locations
tacagggtaaactaagtatattatgcataacaagcgtttcgttcttgtagagtagataattggattttgattgagttattcttctaagggaaaaaggaataggacgattcaaaatccttttttcttcggactttcccaaacacaaaatacctccttgtattcgcactctcaaatgagagtggaagaaattcgactttcatataatatcttaatagaattccatgtaatgatcaatgcattctttggattctatattattcgcatgtctagaatcctaccaagagaatacnnccccattttatg

SEQ ID NO: 14672 - DNA, 474 bp, Oryza sativa
  unsure (1)..(474): unsure at all n locations
tatgccattttcaatccaatcgtggattntatgcctgtctacttgtactctntnttctattagcctttgtttggcaagctgctgtaagttttcgatgaaatctttactactctgtctgccaaattgaatcatgtattcattctaaaaaaattcgaaaaatggataagagccgagaagtcttatattatgaaccttcgattctaaaattcaaattcttctacattgaatgtatagctgcagcaataaatttggatcagcctttctactccctgcatctacgttgagcaggtatctttaggtaaccgcacaatacctaacctaatttattgataagagtgcttattataaatcaattcttgcaatttttttcaaaaattgatttttgcatttttaggtgtcaaaataaacaaaacccatcctagtggatttgtgtggtaaggaanaacgggtaatctattccttatnaaaaaatct

SEQ ID NO: 14673 - DNA, 436 bp, Oryza sativa
tcgcagaaccctcattgatggcggcagtgcactcaatattctattttccaagactctggatgatatagcagatgcctcgctccgagttaaaaccaagcaatgcgccttttcatggagtaattccaggattatccgcaactccactcgggcagaacactctaccggtcacttttggtactcgggaaaacttccgcacagagaatatcaactttgaagttgccgatttcgagacagcataccatgccatactcggacgcccggcgttagccaagttcatgggcgggccgcactacacatacatgaggatgaagatgcctggatcccgaggagtcctaaccctacagagcgacatcaagcaagctgtctcatgcgacatggagagttgcgacatggtccacacccgcgagatggcgtctgcccgatatgaaatccgact

SEQ ID NO: 14674 - DNA, 348 bp, Oryza sativa
  unsure (1)..(348): unsure at all n locations
tatatggatcgatcggtcaaggcttgtgctatgggtggttaatctcatgtcaatatcaatggagagagaagtgatttctttataacttacaggggtcatacacaatgagatcctctatctcctctgtgtgtgtaacctagtcaatgatgctnttgcagctattcttgatagtgctaagagatcatttgttcttatatgccttgttcctgatatcttcccaggaacgatcacctatttacaatatgctgacgacattgaaattttattcctttgatgctaacaaggattgcacaaaatctctttactgcttgagacatgcggatgaaattactacataaagtaggtttt

SEQ ID NO: 14675 - DNA, 464 bp, Oryza sativa
  unsure (1)..(464): unsure at all n locations
ctaagctntgcgaataaggtggaagatggcaatggaaagtctcgcttgtattatttttactctaccttcacagcgtgagaaatgccattagagataccaaccacatctgactaacctcatgatcaccaccctgacctgcttgacgaggaattgcaccaggatgaacatgaggatgaacaagaacagccagcatattttaccatccggacgaagaacatcagtaatatcgagggtgtgccttcggaacattccttttggaagtacctctttatgcccattcaaatacacttcaggtgaatagtttattccactaaagtttaaactcacatgctggtgtccagcctactgatgaaacattgcctagaaagtcaatgtggcagcaatttagcacaacaactacacccttattcagtatagagatacagtgttctcgttcttgcagagtaaataccacatacattact

SEQ ID NO: 14676 - DNA, 363 bp, Oryza sativa
  unsure (1)..(363): unsure at all n locations
attctatagaaatggcggcttcccgattcattcagaagagaagaactntgcaatcacgatagactaccactgccacacaacctccggagagcagcacgaccacgacgaggatgcatcggcatgtctagctcctgtcgtantaaaggattggggctgtggctaggtggacagcctcctgngtctccatgtgcatngtgttgctctttggccagatgaagagaatttcagtggccatgtgtggaggatcctggtgattctggctgatgaatntatcatgagatacacgagttcctgatgcctcctatgccaatagccatagcaactacgtcaatggatggattggcctcctctccatgaaacact

SEQ ID NO: 14677 - DNA, 497 bp, Oryza sativa
  unsure (1)..(497): unsure at all n locations
ctataaaactcagcttaattaaccgcatttattgacagatcagaatgagaacatctgttcatgcaattagtctgaaataagctattctttttgacctcccccttntgtaccaaggaggtgccttccagatgttgaaagttgaaactccacaagcatatataaagctgggattccatgatttggcatcctcccatttgtgcanccatttgtcaaaagcactcgctgtcaatgaaaagagggatagaacattgaacagtatccaccactagtccctaaccactatatccaaattcagagccaaaatgaatttccccccaaaaaattcatctcacctttatttttttcataaatcaaacacatatgcattnttttcctttcttatatatctttgngatacagccaccaactaccaatacacttgattgcatttgatgccacgggatggctgcacacaacatgagaagagccattagcacataattaagtgagtattaatt

SEQ ID NO: 14678 - DNA, 372 bp, Oryza sativa
  unsure (1)..(372): unsure at all n locations
taatcttacatcanaatcatataattattctaaggactctctcgatctccatataattagaatacacataacatatgattatttctttaataaaaaaaaagaacggcacggcaataaatatcacaatctttgttnttntaaatatatgacgtcgttaactctttgacaaatttttgaccattcgtcttattcacattttttttaaaatatatttttttaagttatgtttaaagtttatttcatgattgatcaagttacaataaaataaattataattacataaattttttgataaggtaaatgatcagaagtatcanaaagtaacaacgtcgtatattataaaaacggagagagtatgtcgcagggatcgtc

SEQ ID NO: 14679 - DNA, 427 bp, Oryza sativa
  unsure (1)..(427): unsure at all n locations
tcggcagtctcccacggggttcccgtaactggcgaactcaattgatgagatacgattgcctccctggcaccagattcgcacttttggaacctttcctctagactggagaggggggacggagaactcatcgacatttccacatactgttgtgacagacattgtattcacggtaatctgtagcgggtcgcctcccatttcctcaacaaggacgaggagattgtctttatgtgtcaggaagcctcgtggtatgtgatatcttcagaaatgcattgcgacgatgattttgttcctaaggttatagtgaatacacaagaactttgtgctgagaggcagaggctctacttacagtgattgagagggctgcccacttggagccttgaaggagacccaataccgtccgatgctctctncattgacccatacttcg

SEQ ID NO: 14680 - DNA, 262 bp, Oryza sativa
  unsure (1)..(262): unsure at all n locations
cacaacaatgaacctctgcagattgtttgtggctaccatgctcttgctctgccacctcgtggaggtgaacttgttttccacccccttgaacatctgcaacctgttaaatactcccggcctggattgctntattggggtaggagacacaatttcagacaatggttngacttcagtagaaaaaactgaggtgaatgtgtggtctttagagatcttgtttgaagcacaatgcccccagcttccctaaccatgaaattntattatt

SEQ ID NO: 14681 - DNA, 475 bp, Oryza sativa
  unsure (1)..(475): unsure at all n locations
ncgttgggagcttacccttgcactgacccacaagttatctattctcggagagttgccacaggcgaggtgctgngttgtgatgaggtatggaggttagtgaaaggctggctctcggacgatgatggcgagaaacatatggtcaatgcggaggacaatgcggngttagtggctgattgggttgtcggcaaggagattcaaggcaggtcatggcccgaagcactgcggttggaggtggatgaaatcagcacggagatatgtggggaggtcctggacgagttggttggggaggcattttcagaactagttgggtgtcattgaagctgaattttattttccctgcctgtggtgtccacctattgcttttatttccaatctggtggagaccaaggctcatgtgcactcccctgaggctcttactcttgtgtatattgccctcattactgctctgtatgctcaagatgttcccactccctct

SEQ ID NO: 14682 - DNA, 475 bp, Oryza sativa
  unsure (1)..(475): unsure at all n locations
tgacgaataattatagtgacgttttaataacaaaatatatttcttcttgtcatgagaattctcgtagagaaaataagatttgtcatgacagattgagagtttgagatcagacagcacatcgcattcataacaaacaccattatactactactattacattatagcgaatgatatgcatttcagacatatactgtagcacgtttaccacgagcctttcggtcgctcgataagcatcgatctggatacagtgagaaaatgaacatggacactttttcgacgaaacaatgattntctttggtgaccttagcccaaggaacttcttcaacgtgattnttttttccttttggcagggtatgtatacatatatatagattagtgagatgtgactgggaagagggccagcaagacaacagcaaattgcttaagggcattctcaatgtataaaatgcacgcagatcataagatgagacccacg

SEQ ID NO: 14683 - DNA, 361 bp, Oryza sativa
  unsure (1)..(361): unsure at all n locations
atctcttagtcacctgaggctgcagcttcgactaattctgtctacaactgaagaanatttatttaacatgagtagaacatatgacacttgtgtgaatctataccatgtttcataacgtttctttcagaattatgaaactcttattggtttgatgatatatcataatgttaagngaaactctctgaaagaaaacctatgctctgttcgttctggggagacaggggagattgattctcgttttccgcgtgtacgcttttcaaactactaaacggtgcgttttttgtaaaaattttataggaaagttgctttaaaaatcatattatccattttataattataatagtaatactcaattatcatg

SEQ ID NO: 14684 - DNA, 479 bp, Oryza sativa
  unsure (1)..(479): unsure at all n locations
ctaagcttaacttactaatggcccatggcatgaggggattcctagtctttngaagctgcgaatgactgccagcctcatcttttcgcttatacttatatttatcagttaaaatttgaacttttaactctaaatttggagttaattttagagtttcttaattaaagtttatttttcagcctttgcttttagattgctaagaacacgtatataaaaattttactcataaattatttttcgtttgcaaacatgtcgtttcgcttgttcctccgataagccaaacgatgggggtttgcgtgtcggatatttggaggtacacttcatcaatggaaaaaagaagaagagaatggttccagtttaactcttcgggtttgtttggttcagtgccataccaaaacatccgtagtgccaaaatccagacatgttntgttgttttggcactactaaatattatagtggtcccttttccaacagcgtgctga

SEQ ID NO: 14685 - DNA, 472 bp, Oryza sativa
  unsure (1)..(472): unsure at all n locations
agcttcactattacctaatgatgaataatggtgggttgtatctcacggattntatggncgngctcatgacaattaaagaccggttcacgagctactggtgtgaaacattaaccgtaccaaccacaagctagaatgcgcagcggctnntacctttgtatagcatgatttattgcggngcaccagactgtgaagtggcggagataagcccacggggaccgctggngagtccataccttggctaaagggggtgaatatgatccatgaaaggtgaacggtggtgagttgtgtatgtagagggtattgcacagctcctttcaaggtaccgnggtggtattgaggcgcatggcaacagtgttggggttgtgtcttgtggtacagaggtacatctgccggagataactatcnaataaccatactgtggtatgggcggatctaacatgttttcatattaggccacactactcattatata

SEQ ID NO: 14686 - DNA, 476 bp, Oryza sativa
  unsure (1)..(476): unsure at all n locations
ggatgaagcanagaccgantgataattatcggcatttgtttactatttcggntacacctatgcctaagaccggaattgttagtaatcctctccctgttagtcctattgatgttgacaaaaaaaagggaaaagtgttattattggggatcctcggcccaaaaatatgatcaaaaatgcgaaggccgaagatcataaagttgcaaaggatgagtcatctagtatccaaaggaccaaaaagccgaagctcacttttgagatgcttatggctaaatacaagaaaggattagccggtcaacgatttgataatcaaactagtgattcaaaaggaccaagatcatctcgtaggaagagatttggtcaaacatcaaagcaatcggagccatcaactataccaactccacacaaacctccggttgtgatgccatggtatccatatccaatgtcactatatggctattcttttatgtattgcatgc

SEQ ID NO: 14687 - DNA, 490 bp, Oryza sativa
  unsure (1)..(490): unsure at all n locations
agcnttgagtaatactcggtgctatgctttccattttatcgctctcaacaatatcaacgtaagcaactctgagtgcttcatttctgagaaagataataataaaacacatcttatacgcactgtagtactatgaaacacgcacaaaataaaaggagagcaaagagctccncagattctacaaagtggaggaaagtttcatttatcatgaaagcaagtaaagagtgcaaatatgtctaacatataaagtgaagagtacctttgcattagtagagctatgtctgcagcttctgggttcctctctgccttctgtaccccatatatttggcaagtaaccacatatgtaaatttcatatcacgctgagcacgtgcctcangagacagctcanaatgtatatcagccagaccaagacccagtgtagcaactgcagattaatatctagcaaggaaaacaacacagcagggtatttattacttcataaacaacattaat

SEQ ID NO: 14688 - DNA, 479 bp, Oryza sativa
  unsure (1)..(479): unsure at all n locations
tgtatgtatntgcacgggtgcagctggtaaaaccggatggttatactcccaagagttagaaatgagcagaactctgcactccgtgccaatcctctccaaaggcagcaaagttctgggaccaaccatattcaaaagtgaactctgaatacctcgtgcccttgtggatgatgccaatatgtccctgtcagctgaaaacagaacaccagatacaagaaggaaaaataaaagccaagggaaatcgatcatagtgggattcgaacccacgacttttagattcggaatctaacgcgatatccacttcgctatatgatcgttgttggcttgcatacacaattaaattttgatacataaaagccatctgcatccatgtcctagctttcaagaggcagaggaaacaactaacaaggccaatgcaaataagttctagctagcattagtaacatccaagaactgaagcanaatgtaataactatggataa

SEQ ID NO: 14689 - DNA, 313 bp, Oryza sativa
  unsure (1)..(313): unsure at all n locations
catgcggagctctaccccgttggcacttcaaggcttacgaacatagacgatattcgccactaacccctcctgcaaaaatcactttagaagatgacctctacatcttttcataagcgcctgctctcggctcagccgatctgggacaacactggcacactctaatcactcttctgccggtccttcgagctcattccactatgataatcggtgatggctggcgaacaaacttctggcttgatgtctggctgactgatanacctctctcgattgagttcccacgcctattctctcacaacacaactactcatcttac

SEQ ID NO: 14690 - DNA, 467 bp, Oryza sativa
  unsure (1)..(467): unsure at all n locations
ntatgttgngacttangcgaagaatattagactttcattatagaatatactctgatctagtgcagctgcaaaaatgttntcttcaagtgcaatggaacttatttatcgatgggaatgatccgaatgcaagtctgtaagcattagcaaagcctaatagtatcaatggtttgcaggattgaaggcaattatgaattatcataaaccactacatgaatatgcagtaaagtgagcttattagcttagcacttaaaaagtaaatcatccaattttcaacattgtagatgactgatgcattgcattcagagcattgcatattctccacatgtgattatgcaacatgagttggtctgatgtacctaacatgatatatgaattgcagtgcttccagagatgaatataccatgctgggaatctangagctacgtggtcattgcaatttctgagcttcatataactataaggtcatc

SEQ ID NO: 14691 - DNA, 214 bp, Oryza sativa
  unsure (1)..(214): unsure at all n locations
cacactgatatccaagtgctcaagaagagaacatcgtgacagcaagtctggaagatccnccactatttttacatactgcagcgcgagcctcttgagcatggtanaaccacgaaatattggatgtacctctattaatacaacagctatgaacacagactcaagagcagggtcatgcttatcatccaaagcatcaagtgagaagtggaaacatctt

SEQ ID NO: 14692 - DNA, 476 bp, Oryza sativa
  unsure (1)..(476): unsure at all n locations
taacgtcctanacgaagttcactaagttactgtgttctaatcttagttnggntgacgtatatatcattcataccatgctaaacaaagattgagctatggcaatttactgcccatatgcacatgatgctgaatttgtcagggatctgcaaataccatttcttggatgcatgtatatcctctataggttagtaaattgtcaagaaaaaaaaacatttccatacatttaagccgttttacaaaactgaaagttatggattgtggtctattttatactgcaaattagcagccttcctattctctggataaacaaccgacattatatttttttaaagaaattaaaaaaataaccaatagctgcattaaattactgcaactgttcaattnttntggtgttgctctgcactatcatgatcatcaagagttaaatcacagtgcagcactgcagctaatanaaacccctatgatcccaccttact

SEQ ID NO: 14693 - DNA, 271 bp, Oryza sativa
agcttaagacgtcgctacccatcataggagtgaccccgggacacacgtggtcgttcggtcatattgtgctcctggtcacctgtggtgatcctaccaacttccgcaccgaacggctcgactttgatgtggcggatctcaatctgccctacaacgcggtccttggcaagcccgcattggtgaagttcatggcggtcacccattacgcctaccttcagatgaagatgctgagcccctgcggccccatcaccattagtggcgatgtcaagatcgc

SEQ ID NO: 14694 - DNA, 475 bp, Oryza sativa
  unsure (1)..(475): unsure at all n locations
tgacaatctcattgtctgacaagtcaattgtgtcaaattgtttctatttgagagcaaagtaacaaaaagaagtgttaaacatgctggagaaagaagataataaaacaaaagctgggtcaaatactgaaatgagaatgagtattttttgggatatcaaatcagatcaaaatgaccatactagttatttaactatcaagtgattgacatgacaaaggaaaaccaagaaacatgtcattcataacaacagaaagtatgccgttaacatactaatgctttgaaattacatgggcacattgtacaactaanagacagctctatcagcaaaaaacactaaaagacagctctatcagcaaaaaacaatgtgtgggacttatttcctctaaacttccatagaagaaaaacatgcagaacctcaaaaaattgccaaanagaagagaagtgctaagctacctagcgtcagcatgtacagacaaat

SEQ ID NO: 14695 - DNA, 209 bp, Oryza sativa
  unsure (1)..(209): unsure at all n locations
tatggagaaaagagctgaagagagagaacgtgatggtgcgcgagcgtgagataactttatctgtgggttgtagcacgcttctttagacaaaagtgttgggcgtgagagagatgcctgttngcancagttgcaatatgggatcaatgctgcaattttgaagagagaatccactcacaccactgaggtttgccacttctacaatctaccac

SEQ ID NO: 14696 - DNA, 330 bp, Oryza sativa
  unsure (1)..(330): unsure at all n locations
agcttatcaagtctactttcaaatggatccagccacatgtccatatctgttctggagcggccgcaattgtcattttactcccgactattttctgtccatggtgctgcgtcacctcttttggcccaatgggctgtgtatccatgttgggcccattatgggcgcgtcctatggttggagcacgaccctatggtcgntcttcccctctttntatacctctaatcgccgccaagaacaagcgaggtttgatgatagagttagcttcttgctaccggctcgcagcgcgcgtgttggctaaaccgcccgtctgcctgtaatcggaaccccaccata

SEQ ID NO: 14697 - DNA, 480 bp, Oryza sativa
  unsure (1)..(480): unsure at all n locations
tcttttatgttcttataagaatcacaaagttccttatattattttattagctccacatttgagtctttcaaagagagaagagttntctctaaaatttaatttttcttcttctctttggcaatgtatttactagcctccctaagcatgtccaaaacttcatcatatgaaggctcatcaccatcatcatcatcatcatcatcaccattactactttcaatagtaatatcaagagaatctttatttacctcattcttaccatttgccattaagtaatgagatgatgtgaatggtgttgggagctcctcatcatctcttgaggaggtgaagtcttcacccgacatccgtccttatgtgcaaccattctcaacaagtgtgggcatttcatatttttctttaagctntacccacatagcatgtgcactcttgagaatgcatacttcactanaaatgtcatcactcanagcacanaatatagcatta

SEQ ID NO: 14698 - DNA, 485 bp, Oryza sativa
  unsure (1)..(485): unsure at all n locations
ctggtgggatattctgcttgtttaacattctaacatagagtcgtatcggagtattagccgatacatgctagatctatctgatcggctatgctataaacatatatagtcccattattagtttatatttcgatctaagtgatctatactgtctcggcatggcgaccgatttatcccaatcacttgatttaagtgtatatagatataagaactatatattggtaatatctacagccgatcgagtagatttagctctttattatctatttgtaactaccgatcgatttacatatgacatcggctcaaagataaatgatatgttatcggtacttagccgatcggctatcgtttatagggctaaccacggtttctttgtcttatctctgttgattgcggatcaatcaactggcacgctacataccgatggcgactntgacctgactgagtaagcgatctctagcctgtgttttctcacagccgtcagacgc

SEQ ID NO: 14699 - DNA, 483 bp, Oryza sativa
  unsure (1)..(483): unsure at all n locations
gcttaaagccatgaatccctnttatgcatatctggatgtggatcctgcttaacaaacatataggatgagtagtatctgatgtaaatataatactcgagaaaaattcaagcattttaaaatgtttataaatatgtatttcttttcttgttaattntgatttccccgagcagatgactcattacgtttaaacactttgcccgactagttatagccaccaagcactgggagtcggcctaagcacttcccaaacatgcatatgagtgacatgagttcgtcattaatggaacaaagtttcacggatcggagtttactactcgggtacttttgcaattattaagagcagaaaataaattatcttatctctatacttttgagttattccgaataatacttagcaccttgcgttactcggtctatccaacgagcccccgggtgctaggaattggcccnaggcaactatccatgacanaccaaacggaaagc

SEQ ID NO: 14700 - DNA, 399 bp, Oryza sativa
ccagcaactccatctctatatcaaggcgccaaacctacatataaatgacaaaaacgataaatttaagactgaaaaatctgggcgtgccacagttcacacatatttcatactacccatgtcaattggctggggtcttcattcacttcagttgacaatgtgtgacatcataaacatattgctgaactacaaccgacaattacttatgcccaatattgagcatgcaaagaccgcaacgcatacatgcacagacatcaattactgcaagtaaatacacagattgaaaagacatgatttattgaagtactccaacaccataatgtgcacggacataaattattctcaagcttctaagcaactcatgatactctacttaaacaaaagaaaaagatctgagcaata

SEQ ID NO: 14701 - DNA, 470 bp, Oryza sativa
  unsure (1)..(470): unsure at all n locations
tatctctatagtatntacataaaatatcctaatttattttactattgccttttcaggactcaatccatgtgtggcaatccatatgaagcacattaactcaacccgatgacgtgtatcgggtcactttgacggaatcagctcaatcggctaccttgtccgactcgaactctgccaatcccgaacgcagccgattcggacttcaaccgattcggactctgtttccggaacgatccatatcttggattccgcttcgattttatctttatcttcgatgccttaattacaaaatttggttgttaagactttgccgtttgtccgaccgttatcgcagcactttaaatactaaccgtcaccccgagaaacttcacaccgttacttctgttttcactgcttaagcaaactatgtctcatttctctccggcaatcccctcagtgcaaaaaggcgatcccaaggcgaatcaagctccgag

SEQ ID NO: 14702 - DNA, 476 bp, Oryza sativa
  unsure (1)..(476): unsure at all n locations
tgccgctgctgccgcanatcaactcaagctcctcgttctatcatgaaagagtaaagccccaaaatgggtacacagctaaacatgagagcaagcagactattatacgtgtaactaagccttcaaaatggaggtgtgcatgtaacttagccgtcatagagcgggttcgcttgtaaataggcccagaccagcgcctctttgttctacatggcatctcgattcttcactacacccaatctgtatcgactcccattaattacaccttttataggttacgagtgtggaaagagacttcttactttattccacgggttaagtaagcatgaacgtagataagagaggagtccttggcttgtgaacaagtgacttctttcttttcatattatatagaatagtcttctcttcatgcgtttccggctttttgcctttagcacgccatggaagcggtgcccctaaaagaaccgagttgaggagtcatt

SEQ ID NO: 14703 - DNA, 402 bp, Oryza sativa
  unsure (1)..(402): unsure at all n locations
ataataaatagtacatcattatatgtattcgcaataatatatataaaagatgacaggtacttcctttgcatagtggcattgaataatgagccatgctgtacattatgtctaaagctccattntgcatgactgttcattcacaagtatattctcatgttccattgaggggcaataaacatggcataaaaaaaaatcaaataatctaatgaaaattccttgcaaaaaaaaaaggcttatcaaagtcattctgtgaaatccaacctatgacaaanaaaatcataagcatgtntaccaagggaaaaattcaatctgaaaggatggaccggtaacaaantccaaaactatcatgtgcatngtgctngctagaaaatgataacagtactctcacatatggcatatata

SEQ ID NO: 14704 - DNA, 389 bp, Oryza sativa
gtcgaagcagatggagatggtgatgcatgcatatgcagctgcattgcatgtacctatcaccgggaggagatgagctgagctgagcttgcttggcttagcttaactatggcgccttcttgcccacggtgtgcttgttgttgtgcatccaaaccttgaggacatggcgcttgacgcagacctcctcgcataactgctgcacggcggcctcgtcgtgcttctggatgcgccacccgagccgctccgcgaaagcgagcatcttgtccttctgctcctgcgtgaactttgtgcggaaccgcttcttgccagagccggagccggaggggccggcggagccgatggacatgccgaccatggggccaatcaccatggggccgaccatcctcgacatg

SEQ ID NO: 14705 - DNA, 309 bp, Oryza sativa
  unsure (1)..(309): unsure at all n locations
agcgacgcggctgcagctgctacatggtcagtggaatcggagctgattctctctctgcttcagagagatgatgatcgagaccaaactcctccagagcacctctgaagtctgaaacctcactggctgttcctctcctctcctctgtcttgaagcttcgnttcttgaaggaaccanagtgagatggactgatggatgaagacagggcgagtgattaaaaataggttcttgtgccgtgacgaatgaatcgaacagtgcacagtctagcgagaggatatgaagaacacaggaggagaagatagcgatggggat

SEQ ID NO: 14706 - DNA, 480 bp, Oryza sativa
  unsure (1)..(480): unsure at all n locations
tcatggttataataagntntctcttcagatgtgaacacatgttgtttgcagctgggagctgtttccatgcttgctaatggtgggatttgcctcattagctcattcagactttctacattgccaacttactacaacatcggtacctgatcgcactctaaggtaaatttcagagcaatatacacactagcaatgtactgtagtgtaacatggcatatacagaactctagatttatcattactacatgtttagattgtgcacctttgcatactgataccaccttgaatagtattggtctctttttcttattctactttcgacatgtattacagggaacaaaacgatgttaccagtgcaagtagcagtactagcatgaatgaacccaaatttgggataatagagatactgccaattgtgctgcacaagggagtgctcaagactaactgcatagacagccgagaccgcacatacagagcccaatt

SEQ ID NO: 14707 - DNA, 452 bp, Oryza sativa
  unsure (1)..(452): unsure at all n locations
tatgtaattctcccacagcaccaacaatatttctagttgtctttggctcattgcaccaatactaagagaagacaaacctgatgaagatcataaattaactgtgctagatcctcgattgaatagatgtcatggtggggtggtggggatatgagaggaactccaggtttggagtttctcagccgagcaatgtatgcactgactnttttccctggaagttggcccccttcaccaggctttgccccttgtgcaatctttatctcaatttgttcagcatttactaaaaatgttggtgtaaccccaaagcgtccagatgcaacctgtaagaggatggtataagtgaaaactaactcaaagatactaatacactagaaaatggacgttatgtactcttgattaaggactactctagtaagtaaaggatgaaatagttaatctgcactaatatatagaat

SEQ ID NO: 14708 - DNA, 458 bp, Oryza sativa
  unsure (1)..(458): unsure at all n locations
tcngctgcaggtggagacaaaaggcccagatttctcatctccgcgctgtgttccangacggacgagagatgggtaccgagacgacgcgaggccgccgcacgcaacttgcgagagttgcgagagggggtggatgagatgaggaggaaacttcgcgcacgcgtgctccgttccgtacgcgggagcgcgtcacgcggccgtcaccctctctcgcggccgccgggcctgggccggtttgtaccgtagcgcggctgatatttttctggccccgtttttctccggctgcaacgaggaataattgtgcgaatgcttttataaaagggaggaaatatcaggggtctgttgcttgctagcttcngttacctgagcttgtttttgtggtcgaagagaaataaggaaggctggaatacttgcctgcctgcttgccaaaactgaaagtgacatgcatgcacgatattgtc

SEQ ID NO: 14709 - DNA, 303 bp, Oryza sativa
atggtttcaaagttgtaaaaactaacttgctcagaaacaaccaagttcaaagctaaatccgtaggaataccgatttcatttaaattaatttttggatccccaaccattatactcctaaatgcattgtcggatcttttgctgagaatgatgtctcttagccatttggttccatatgtatctggagatgtaaggtcttcaccatctgactttcttgagtataactgcaaaatgcacaaggatgttagcatatcaagcgatatctaccatgcaacataagctgtgagcgcaattgtcaacttaaac

SEQ ID NO: 14710 - DNA, 474 bp, Oryza sativa
  unsure (1)..(474): unsure at all n locations
tagttcanaatgtacaaaaattttgaacaaggttacttattacttatgagtcatacgagtaaggattatggaagctattgttgccactgcagctgaacacaactactgtgcaaggccatttcataagttagctacaataacaacacagataaaataagatcttagctttcatccttgccaataatatgcacagtggaggatcatgtgtgtacatgagcacattttgtcatacaacaatcttcaaaatagagctactacagaacatccgcaaacactagtgttccttgagaagtgctgatctactggagcttatgttgattgctttaaggtgtagggcatacagatataatgccagatttgccgtacatatagtatgcagtgtatntggctcagttggttgcttcctgaaactatcaattgtagtctttccaatagtcggtcagaatcatgcgccgatacttctctgtgattaaa

SEQ ID NO: 14711 - DNA, 456 bp, Oryza sativa
  unsure (1)..(456): unsure at all n locations
tacttgtcttatagtttaggcgctntatctgnctttggttttatcgcttgntgnttngnctggttcaataatacagcttatccgagtgagttttatggacctactgggccagaagcttctcaagctcaagcatttacttttctagttagagatcagcgtcttggagctaatgtgggatctgcccaaggacccacaggtttaggtaaatatctaatgcgttccccaacgggagaggttatttttggaggggaaactatgcgtttttgggaccttcgtgctccatggttagaacctctaaggggccccaacggtttggacttgagtaggttgaaaaaagacatacaaccttggcaagaacgacgttcggcagaatatatgacccatgctcctttaggctctctaaattctgtgggtggcgtagctaccgagatcaatgcagttaattatgtttctcct

SEQ ID NO: 14712 - DNA, 458 bp, Oryza sativa
  unsure (1)..(458): unsure at all n locations
tagagtcgcattatagttaggcagagcattnttcttatggttttcccctgcttttcccctgttttctgttttgtcaaccttatacttattttcctaaccccattatcttaatgaaattatgcaagggatctcctgctatctgggacacaaagtgataatcacagtagcaatgtgacagtaagaactgcaaataatgattataaacagtcagtatgattttaactatgaaaacaatgatgctacggagaggcataaattttagccaatttgtggtgaactgtgctttagaatttacaccagtacataactttttactgatattgactgatttataaattctcctattcatcttgaatttccaaagaccgcactctaccttatctagtacatatcaataataaggttaagagtaacaatttaatataatcaagaagtttaaaatacaagaaagagagaca

SEQ ID NO: 14713 - DNA, 431 bp, Oryza sativa
  unsure (1)..(431): unsure at all n locations
agctngcacgccgtcngattatacaggttcgggccgctatgaagtgtaataccctactcctgtggttaggattatggtagagttttacagaggtttcttcactccagagagcacactcgctttctttcttctgaagctcacgttttctgggagtcgtcccccaatctcagtgggcagggtcctccttttatagctcaaggggataccacatgcgccgnctntacctaccctncataggagggggatcccactccactttttttgggcttcaaaccgtgccttcntccggaagctaagcaacaaacggttctcgagtggaaaccggcgccgccccccgcctgacacgggggacagccctgtcattctctcataaatgaacgatgacttgcgacaacccttcctcgagtgacgctcggatgtgacgggtcata

SEQ ID NO: 14714 - DNA, 367 bp, Oryza sativa
  unsure (1)..(367): unsure at all n locations
ctcagcttgatagtctctcgcgtgagcctggtatcatgcttcctgtatggctctgncgggcagnttaggatagttggttgtgagtccttggagctatgattctcagtctggtttccttaattaatatctcatcacattgctgcgggaaattaagttgcataatatgtataaatcaaatacaatatgattattaaaactaaaacaaattgatacttatgaattttacatcactgcctacttgtatcgcgtgtttctgagagaataaaaagagatgatttgaaccaaagatctatccccataactataataattgggtgatgtggttagtgagaaagagagaaatacattactaatcttagggggatga

SEQ ID NO: 14715 - DNA, 434 bp, Oryza sativa
  unsure (1)..(434): unsure at all n locations
atcacaacccaggtctgtatgctcgagttcagataatgttcttttctgatgcaaccatcctgttttccccttatttcttcatatctatgattgcagnttagtgtgtatttattgataaaaaaaatacgggctaggaactttcttgtaagaacactgaaattaaaaaaaaaaattcaatggaaaaagtatactaaccgaagcatgctcactaatgactcagaaatcttagtctgtgtagtatggattgtagctaccaacaaactatcttatactgactcatgaatattagaagtaatcaaatcagaaattttacatggcagtagtgcatttacattgcttggnttcctttccatagttttgcaaccttccagttcttaatggaacttgcatactgacatngatgtctttgcagagagatatacgtctggtacatg

SEQ ID NO: 14716 - DNA, 464 bp, Oryza sativa
  unsure (1)..(464): unsure at all n locations
tctcgattaggctacgaactctggcagggagcttatgttcagttcaatccctgtgcagccatgcatgtggtgaccgtttcacccccccctcccgccctcctggttgtgactggcagcgtgcatgtctgccacgcaaattttgtgtggttgtattttatgtcctcgaatggactgatgctccgttgtgttttatctgaaaattccctcgtgtttcacagaaatacaacacgaaaaagagaaaattccgtttctagcggtagcggctcaagggatgtaagcgggtcgacccacgaacttacttatatgttaaataaagggtaatatgtgggttntcacgtattaacttggcttccacattgtagagaaacaagtggatctacccatatactcatntatatatcaaattggtatataagcgggtttgcggattgatctgcttgcattcctaggtagcgcttgtaaat

SEQ ID NO: 14717 - DNA, 477 bp, Oryza sativa
  unsure (1)..(477): unsure at all n locations
catgcaagcttcaatacaagagagacgagtaaattaaatattaatatattaataattaactattggataaataggctattaaattgacgaagctagtagttagttatattatattattaagggactaactagctgtcattcgacaaattttagtatagcttaactgtgtagattctttgtggtggaaccagcccacccaggtttaaatcctagaattgacatgggtgctcgtatttacgggctatttattctttcagtggtaggtaatatacccgtcaatagcgaggcacttacacgcatcaataacttaatgggcttcaacctaactggaccaaccaacggtgctcacacgggctaaaaaaattataacangcccatggtcaacttcttttttatcacaacttattacaatatatctatagtgtaattatattggaantataccataattatagtgaagtacactataatgataat

SEQ ID NO: 14718 - DNA, 471 bp, Oryza sativa
  unsure (1)..(471): unsure at all n locations
tatgtggtgaacataaagagaggagatagaaaagaagcttgctgtagatctgtagctagctgtagcacggactcctaaatgctacgtgtgtatgacaagtgggagcagtaattaatgatgtagtatatagtttgagttaactattgtataatttggctattagattatctataaataatttggagctagtagttggctatatactattaaaattcctctaagcggcaaaggccgtgttcgattattagtgttagaaactaaccctttgagcacgtaaaacgaaacggttcattaatgcataattaattaagtattagttatttcttaaaaatgagttaacatgattattctaataactttcatacatacatacgttataaaaaaaacgcaccgtttaaccgtttgaaagcacacatgtgatanatgagatagataatgaggaaaatacgataaagaatactttctccatat

SEQ ID NO: 14719 - DNA, 347 bp, Oryza sativa
  unsure (1)..(347): unsure at all n locations
gtcacctgcggcatgcagcttatacagatgctgcgatgttttttatgtgcacaacatgtgcgagacactcgtgcaggagctccttgcgtactgaacgctcatgcgcaccatatgactagggcttgagcctatgcttgtttcaaccgtgacactaactatattaagacgtgagagccatatatcactggcatcctcaacgcattattcttacgatacatcaccatgctcgtgacaattatatcaaattatttcggtatgatcaccgacgtattgccaaactgcaatatatggggcacattggtcntccctgagccattgatcaatctcacatattacattgtctaatt

SEQ ID NO: 14720 - DNA, 469 bp, Oryza sativa
ggcctaccgaaactagcctatgtttcagctcatttgactttcgcttagaacaacgagatagtctctgcactgctatctcttgaccatctaaaagagtttcctgcaagtgtgtgatttagtttgcacgtatatatttagaacttggtgtgaagaacatgataagggataccaattgtatgatcatacaatgtattaccggtgaaacatttttttcaagggagaaggtaaattcattaatgaaagaggacgagttattctcctaaactatcgtggttgacataattatttccactgacatcgctcaccctatacttgcaataccgaacaaattacccccctcagcccaattcagagcggagttatcctacgtgacaatccaatcagcattctattgtgtagaaatggtggaacccacttgccatacccgctcttgctctgttcctctcttccacatgacacacatgtcata

SEQ ID NO: 14721 - DNA, 484 bp, Oryza sativa
agcttgaatcgaagtgggaaggaccgttcctcatcaagcacaagtccaggacgggctcctttcgcctggcgacactggaaggcgaagagttcgaccattcctggaacgctgcctctctccagcgtttctatgtgtagaacgggtggcacccagatcgccaacatgtaaaaatgtacatattgttatgtaagcctttcggcactatgtaagcccttcgacacaaaaatgcacaaaatagacgaaaatgaaaaaaaagacaaaacaaatggatgtagggctattatccaccctggaggcccgaaccagtataaaatctttgtgtctctcgccttcttatatgtgtgactgataatctgaggaaaaaccctaacgcaaacgcctgatcagcgaatatgccaggggcgaaacaatctgccaagcaccgctcgccgacgttgaaccgaacatcttgttcgagaacaactactgacaccgtacattcatc

SEQ ID NO: 14722 - DNA, 459 bp, Oryza sativa
  unsure (1)..(459): unsure at all n locations
ntgntggttactntgaaatataaacatgtccttataaacttaattatcgngaaattcattagttgtttgttcccatcggaggtcgatacagcgaaaaagaagggggagggctaatgggcgggtgatcgtccacagcaatcgcccccgtccctccctctaacacgcacgttactttctttccctactgcaccgtaaatttcccaaaaaaaactagttacaaaaaaataaaaaaaatagaaaaatctaatacccttaaaaatatattcatgtgcataaactttacacttataaatatataccgtaaacttcgtacgtataaacttttatgtatagaaatattctatatagaaaatatttaaatccaaatctaaatttgaatcgggtatataaacttttaacctataaattntaggtgcgtaaactntagatgccataaacttaggtacatcttatcttaac

SEQ ID NO: 14723 - DNA, 420 bp, Oryza sativa
  unsure (1)..(420): unsure at all n locations
agcttctntacgcctcgagtcttgacaagattgtttctactgttcaccaagatagatatgttcaatggactgaacactttnttgtcatttccatctctacacaaaaggtgggtggccagcttgggtacttactggtgaatcctcagctgccagataagtttcacgttgataaatggtcattatcgaattgggttaaattttagccaattaggagtattcaacaaggcctcttttgggagtcaaagagtatttttttggaaaataaactaattcatgctaaattcttataaaattcttgcgtttcagaggatatctaaattgaactaactaanattattcaatgtaatcaaagtgggtctcacgaatcacgatannatcaaccgtagagtctcaactttcaagtgctgtgaaacagggagt

SEQ ID NO: 14724 - DNA, 434 bp, Oryza sativa
  unsure (1)..(434): unsure at all n locations
tgtataagttttcgcgttgagcctggttatcatgcttctatgtattgcttggccgggcagtttaggatagttggttgtgagtccttgtagctatgattttcagtccgttttccttaattaatatctcatcacattgctgcgggaaattaagttgcataatatgtataaatcaaatacaatatgattattaaaactaaaacaaattgatacttatgaattttaagtccaaaaataattgatattgcatgttttatgagagaagaaaaaagagatgatttgaaccaaagatctatcacccaataactataaataattggggtgatgtggcttagtgaganaagagagaaataacattaactaattcttagtggggatgaacatataggattctgcatcatttctccttgaagcacaatattatatattatataaaa

SEQ ID NO: 14725 - DNA, 398 bp, Oryza sativa
  unsure (1)..(398): unsure at all n locations
agcttatgnatatgatgcgaagactggtcgctttctcattttatctttctacacccttgtcacaggaacatgttgatataaaggttgagtaactcgtactgcctatttggactctaattcatctgatcagctgcattgcacgtatttgattnctgtgttaagaacacagaatattctcaatgggtatagttgaagtcaccgtcaccaacaagtggaacttctaaatctaaagttgcacctgtgctatgttatttggctggtgctacaagcacataaattaatgagcaatgtctggctgcttatgtgtgtgcaatttcgtgctatctgcctatctgggctcggtggtggaggcaaaagtattcttctctaccaggntaatttctattttaatcatgcta

SEQ ID NO: 14726 - DNA, 464 bp, Oryza sativa
  unsure (1)..(464): unsure at all n locations
aaggtgctctgantctgctacatggatttgtgtttatgctttaacaaagtagaattcatccagggctaccacaagacaatgatctttcaatgtccaatgcaaaaagtgaaaatgttcccatccaaggtcattcaattaccatatggtcattgatttctgtacatgaattatttactgcactccttaagttctgccctttcttgcttcttgatattatttgttcacatcattgtctcgctctattgatttctttttgcaaatgtttttggaaaaattattgccgtctccagtgcagcaatcatatctacaagttcatcagatttcgggatgagatgaatagcgccaggtaattaactacacctttatttaatagcttgatgtttcaagtgtgagaaaaacttggattttctgaanacaaagagctattacttactcaaagcattgtggttgatattgggattgat

SEQ ID NO: 14727 - DNA, 462 bp, Oryza sativa
  unsure (1)..(462): unsure at all n locations
ctgcagctggtgattctgcttgcgcaaattacaagttgtntaatcatttgtggattccccgcaaagaanaaaaaccccaatcatttggggattgtgattntgtgatgattaaacatgctgtatctatatttgtaatgctataaattgtatcttgcatctctaaatttcctgttctattgaacctatgttgtgcgctcatcatgtgcttcagcttgcgtattggttgatgaagatggagatcacnagttcatctcatacagtaaccaccatagggtcataattgatgtatggctttctgtttctgttgtgtttaaattttgaagcttatctttgttcgctgtaggcctcaatccatgcgggatgataatcagaattttcttttgcagatttgataattcatttgctttgaagaatggttaattgaatctgtcagatcttaagcactaatgcgtcatttataat

SEQ ID NO: 14728 - DNA, 470 bp, Oryza sativa
  unsure (1)..(470): unsure at all n locations
ngaaagtgcagaagaatccaaggaaagacttaaacttgttagtgcagaagaatcccagacccagcatcaaagcacaacttctgcaataaatgaaaaaaacatgccccctgttcatgaagaggctattgcacaggtaaccacataagttactggcttaatctgtaatcaaatttgttttctcattaccactatcaccaggtttgtcattattatttttttattacctgaccctactcttttgggtgataacttgaattatatagttatgagaagttcaatcatccttagattggttttttagactgacaaacaggtttgacaccacattgcaggtttccacaaatgactgcaatgatgttgcaactgcatcaaanactgatgaacttattactagcaacgtatcaagtatcaataacaccaacggttcatcagcaacaatatctgacagacatgatgcaaccgcagcatta

SEQ ID NO: 14729 - DNA, 452 bp, Oryza sativa
  unsure (1)..(452): unsure at all n locations
agcttcagagtcgccgcccttatctntatcgtcttcttagtctgtttgcttgctagttttcgtgtttaggtttgttgcttgtgggttagtcggcggtcgatatcatgtgtcagtggtatgactgcctcaattaggagttgcgtgcctctttttcagtgttttaatcaagattaagataattgcacttaaattcataagcaagattagtttctgagccccctggttttctttcttttctcatatttctacctatccccttcagatggagacaaggaatggttcacgcgactcgaacaacgctagtggcagcgaagagccgatcaatggagcacgtgccaacggtgcatctgacaacagtccgtcccccaccgccgagaacccaacaattgctcaggtgttggacaatcagactcagatgatgacaatgatgatgcaacagatgcagcaacagt

SEQ ID NO: 14730 - DNA, 436 bp, Oryza sativa
  unsure (1)..(436): unsure at all n locations
ngaaatgtacacattcagaatgaaaaataaatcacacataatatgtataggaattggaggcatcgagaacattgatctggccaataaagaagcttaagtaagaacaacctcagcatgttcttggtaaggttaattattatattttctgtttcactgcatatttcactgttttttcttctcaagtaaattgcattgtctctaccttgactttacttgcactggtggagaaaccatcttctgtcggttggtaaagatggtcggccaaaatacacaatagtcccggttgcaataaagatatctttaatcccagttcaaaaggttagagtagtttttttatctttagtcccggntagtattaccaaccggaacaaaatatctatttctagtcccggttggtaacaccaaccggaacaaaagatctctattatctttagtc

SEQ ID NO: 14731 - DNA, 479 bp, Oryza sativa
  unsure (1)..(479): unsure at all n locations
agctnggcatgatgatgaaattacttttacctacttactgtggtgatttctattgtatggcattaacttattattnttttcattccatttaatccttttttttgcaataattatgacatatcatgtcctgtcttgaaaatagtctcaatggacatgtctgaagctaaagttagatatagcaattttaattntatggcaaaaacagagacaataggatttcaacatgtttttaagaattctctatcagggaagtaatagtgggtttcctttagtatgtagcatcgtagctggttgaaattagatttcaagtattattttcttgtttaggttcggnggagggttctagtgcggcagatatcatacgtatatngtggacgtgagtacgacaagatgtatgctagaatgtcataaccagtgacctcactctcatgtcaagttctgctataagtgatgattcttcactaaatcgtatacacatc

SEQ ID NO: 14732 - DNA, 475 bp, Oryza sativa
  unsure (1)..(475): unsure at all n locations
actcagctgaccgttggtagcggcgggtgtgaaccaccctccatttttccccccaatcccttccgacgcgctctcgagctccccgcattccccgtctcccctccgcctgccccgggagctcctccggcgagatccgcctctgacagccaccctcccacggctgctcgtcgtcctcacctccggcgaccggctcaggtgaggccccgggctccatcacctccccacggtctggctctggctgccccccatgggggacaggcgggtgcctccatcggcggcgttcacgtcggcccattctccgccgccgcccgaaattttctttacttttatgtgctgcgccatggtggtggtacaggtgtgcgggttttggatcgtttgtgtgtttaacccccttcatcgtgagggaagaatcgatccgatctgctgccgtgagggaatcgcgaggggattattgactatnnntgtacctcgttag

SEQ ID NO: 14733 - DNA, 56 bp, Oryza sativa
ttataaagccctcacgttttatgatccaagttacagaaaatctgagggtttatgac

SEQ ID NO: 14734 - DNA, 465 bp, Oryza sativa
  unsure (1)..(465): unsure at all n locations
cttatgttgccatgtcttcatgaactatgtctctntcatgaattaaatttctccaaaaaatgcctgctaaatgtcagcttgcaatcttggacaggtgttgttaataatggacatttggatgtgctcactgaaaacccacatgctacagaaaactttcagacaaatcatcatggttctgagtgggttgagctatttgttagagagatgatgagtgcatcagacatagatgatgcgcgggctcgtgcctcaagagccctggaggcattggagaaatccataatggagcgagcaggaactgaagcagtgcataatttgcacaaggtgcaaccaacagcatatgcacgtttcatccatagtacttgtactcctaggcaaattaagcagntatgctttgctttcctgcangaaaatgtgatgctgaaggagcaactggcaatatatctgagagagaacgactgtctgaag

SEQ ID NO: 14735 - DNA, 338 bp, Oryza sativa
  unsure (1)..(338): unsure at all n locations
gcaagcttatcctattgaatgaaggtaacttctgtgtgtgctgtaccggtgtaaacaagatattatctntgtcccaacacccataactcccacacagtctgtagtcattccttattggggtgataaggcaccgatcatatctagctggtgctaaggaaaaccatgatatgcaatgttttacaaatcataacagaaacacacgaaggagtattatccaattattaaacaagaccttcaatttcatgtatattgaaattctttttgattactaattggcaaggcattttctgatccagcaaatcagaatgatctaatgattgtaccaaaagtacctactg

SEQ ID NO: 14736 - DNA, 372 bp, Oryza sativa
tgatctatgtcaccactgagacaggagcggctggagctgtatctataatgtcaaccacttggcgtccgttctacgcatggactatcgatctatcatatcgacgctattgtttactcggtatagctcgtacatacacctgtggacgttgcgtcactgaccgaagcgttactcttgctccatctggatgcagctgactccttcctcgggtccacacacatatctgggatatccatcacttgaacttcttatttataccacggtcggcgaatgaatgagatcaactatttcactatatttcttaccgggaacagggcctaccacatgaatagatcttttattgagacgatagctctcgtaagagagattactatc

SEQ ID NO: 14737 - DNA, 428 bp, Oryza sativa
  unsure (1)..(428): unsure at all n locations
agcttgctgatgcacacaagttgtcaccaaaatatttttcggccgtccgatgtcaaagggacggctagctggggccttgatgctgcaaaaaggcatgtcgccactgagcactagtagtttgggggtagctgtccatgctggccacaggggaggccacccggcagggcatgtgccacaccatctcagggttaatgcagccattttcccctaactgtcagtgtcttaatctncttttttgcttgcccaattgccgtgctccaaccacatttttttaggtcttctctgaacctaacagtacactcttaagttgcatgcacacagggtcagcattaggggctctgccagtactgcttgattggngtgccaccatggntngctcatgtggtggttggttttatcaacactgatcactgatctgtactaatact

SEQ ID NO: 14738 - DNA, 427 bp, Oryza sativa
ggaccttgaaactcagcttctccctgaatctgtagctgtagcatgcgacatttcttttattgtggactgatcaaagaagaagcagtacaagcttatactaaataattactctatgaaaaaccgatcaacgttgtccatgttgtgtcagagtactattctggactgaggtttctacgagctaattgagaggctgctgatcactaatcgtttaagtttggatatcatgaacgatctcatattggagattatccgtatatagcacggtaacttatcatacatacttgcaggttattcaaaaaaaagaacagagctattctcttaaactttctgaaaattcaaaaaaggaatgcatctgaatcttctattatctcatattcagatctgcacgataaacatggcgactattattaaatgttatctcttgtat

SEQ ID NO: 14739 - DNA, 437 bp, Oryza sativa
  unsure (1)..(437): unsure at all n locations
agctngttcatacaacaatttatcagatctcgcataactttataaggaatactntactagatacggagttttgtaactgaacagcagatgtgaatatattagatagatttcagtgtccaagaaatgaacttatttgttgtgatacatgaatgatgaagatcctaaggtcgaaaattttcaaatattcttttttaactgcccagagcagagcaagaaggaactgaactgaaagctgttgatctgctaccatttctagactttgntcgacggaacaatctgcagatggaattcttctctattggctcaaaccggtgtaagagactcacattatgaatctgaatcaaccgtaccactcatagaaacgtcaaacgctaattttatatttgttatctccagcaatattgtgaatgccagttctgcattttacagattggtca

SEQ ID NO: 14740 - DNA, 443 bp, Oryza sativa
  unsure (1)..(443): unsure at all n locations
ntagtgattatcccttatattttcagatattactttctttgcgtccacatgccatcctctgctaatatacaaaaaggcccctatggtttcgaggaatataacccgcagtccaacatgtgtctatgccacagattataaagagtccccatttttctcttgcattttcgctttagtcctttacctacatgtcagtgagtgaaatgtctcacactttagtacttacactttatcgaattcgcgaaagagatccctgtcttattcctgtacaggaagcaatacagggcagcggcttggccgagctcgccggcggcgattgactgcgatatacgcgtgttagagtttgtgtcgaatatgtgtaagtagtcggttataggttagaactatgaagtgtactacgtgtaggactagagtaagagtcggactctatcctaagatctctcata

SEQ ID NO: 14741 - DNA, 496 bp, Oryza sativa
  unsure (1)..(496): unsure at all n locations
agcttacccatgcaggttacccattctagcccatgctttgaaagctggtccaccaaaaaaatcatctaggtctctgtctgtaacattaaaactctgaaatagaactcagtcatcagcaagggattgaacacagcaaaaattgcattatgattccacagtggcatatatggaaaacaaaaacagtggcaatataaatgtcaaactgaagataacttctggatctgtaatggttaaagatgccagaatgatcacaaaacagcaatggtacagaatagtatgcagttaatgcaaattttttatcgactatcgtttgggaaaatggtcgataaaattatagaaggcagcacanaagactggcactcagcanagataatattccanatagtgacagacacggagaataaatagaagtattgattcgagctttctagaatgtaaagttcccttagataagcgagagagagagagagagaagatcacgcatcctattggactg

SEQ ID NO: 14742 - DNA, 478 bp, Oryza sativa
ggccgttcgccttgggaacgaccaccgggttcgccagtcactccggatggatgacttcacggatgaatccggcctccagaagtctcgccacctcctcgcggatgaaggcttgacgttccggggcctgccgccgcactttctgccggaccggccttgcgcccggccgcacggcgagacggtgctcaatcacctccctggggaccccgggcatgtccgctggtctccatgcgaagacatcagcgtttgcccgcaggaaggagacgagcgcgtcttcctatttgccatccagaagaccaccgatccgtgtggtcttggatgggccgtcgcccaaggcaacctccttgaccgggacctcgtcgcatgtggccatccgctgcctcggggcggtgggggcagaggggccaagcctctcgtcaccaccctcgggcttggacgcagcagcgaggcggtcggcgcgcttgctcatgcaagcgagcgc

SEQ ID NO: 14743 - DNA, 414 bp, Oryza sativa
  unsure (1)..(414): unsure at all n locations
agcttctgagcttctaatcaagtcctataccttatcactaggcccattggcgcttaggttgagaggttagcatccacatgctgagaaagtattttctacacctaggtgctatggcacttaggtatatgcatgcaatttaaacaattatataaaaagtttatataatttaataagataggccatgataattaagacactatacaaaaatgcaagtctaaattcgatcgatatatgaagaaacaaaaataacaaattttatctgcgttgtatgagtactattcaatgtctgatnttattattnttgtttctctaattggagattaacattagtcctgtatggttgtgtatagacttatatcatcacaatcgaatttactaattnttttataactatctaagtcgtatgcaaatgat

SEQ ID NO: 14744 - DNA, 462 bp, Oryza sativa
  unsure (1)..(462): unsure at all n locations
tgtctaaccctagcttgtataccagggattcttgtactttctaagcacagaagaatcatacacataggagtagggtattacgcttcatagcggcccgaacctgtataaacctcttttgtctcatcgtcttggaggagcctccgagatcaagatcacacacagtttcgctcactaaatcctcgaatctcacccgctgcccccggccgaactctcaaaggagggcctcacagcctcccgctagagagggtcatccctcgacagccctagtttggttgtactaggttcgctatccttgtagtattaggaggtaccacattcttttttaggttgattntttttatcggagtactaccatgacaaaccaactggatttgatgtaagcataacaagagaacaaaaaacgttntgaccctacttaggcccacacctcagcctccgtgccatgcatactcttgtcaaagc

SEQ ID NO: 14745 - DNA, 385 bp, Oryza sativa
  unsure (1)..(385): unsure at all n locations
agctgggcgccgtcgatagatggccatgtggttcgtcctacacggcacggnccgaccgacgcaccgggccgtgccgtgccagcccacgtgccgcgctcacggcccaggcacagnccaacacacctcgggccgtgccgggccggcccgaaggaatgacggcccatcgtgctttttctcagagtaagtctaatttttctccctcttactgggttgtgatatatgtatagctcanaaaagtctaatttacctccctcttctttgggctgtgatataaatagctaaaattaagtatatttaagggccctattctttggacagcgacatttatatgtctattnttagtccctaaactttgtgtgtcgggcctagcctggcagcccatcgt

SEQ ID NO: 14746 - DNA, 471 bp, Oryza sativa
  unsure (1)..(471): unsure at all n locations
ntattaaaactcagtcaaatacaccaagatgaatgtaataaggtgctctagcttgtgtttaaccaaagggcggattttaaccatcatctaaaaaacaagaactgtgggtgtggcatgtcaagaagctgcactctccttcctagcttgagctttagtgtcttttctcggatttgtgtagagttgccctgtcggcagtgactgtagtagtcaacggctacaataaactttgttgtagtttttccatgttgtggtttctttaatttctctcttaatataattttaccttcgccggaccagagaaaaagaagaaattacttcaatttggaacaacgattactgctgattatatagcatacaaatgcaagatatgaaagctactgtcgcatgtattactctnttcccagagagcactaattgactcgttgcatccacaagaggttntaccatccatatatagaagactgaacatgg

SEQ ID NO: 14747 - DNA, 491 bp, Oryza sativa
  unsure (1)..(491): unsure at all n locations
agcttatctgggagatggcttggtacgggtattatgtttgcttatgcaattacactatgtcatgacgatgatattagagtagtatttggtagtttagacgtggtgtctagattacgggatatcattatttggggttatatgctgcggatgagaggtgggccgctgatggtgacagctcagtacgggtattcctccgtgcctgtatatagtcctaagttaattccctagggagggtattcctacgtatttagacccgggtgtatggtcatgactggctgtcgtaaggaacttagcagtcagaggtggcttctcgaagtaccacgagggcatcggatagagggtattagctagtgtatcagttaactagaatgtatttatattatgtatactagaagtataggaatagattatctttctcttttctttccacttancttagataatatattatgagaatgagtagctaatgctttgtgtgcactctaaccttg

SEQ ID NO: 14748 - DNA, 480 bp, Oryza sativa
  unsure (1)..(480): unsure at all n locations
ntctcactgagagcagggcaganaatgtctgggacacatcgtatcacgtgttctgccggaatactctacatagtgccagatctctgcgccccttagctgctcttccaggacgcttaccttcagatgagaaggcaaggaatcgtccaccaggcgaaacacatacacctttctgttctcctgtgatgccagacaataatgattttagtcatagaagtatgactaccatggttttcatttgcagaggctcaaacaataattaaacatgcctaaattcattaacataaactactccattcgatctcaagccacaatgttcataaaaaactatagatttcactcaagtaccaccttggtgtccaggtaccattgctcatcctactcctagcaggatgcaatttgaagaaactgtgatattntcccctagtaaaggctggtaatgactgataacatccatcagaagtacanacaaaaattcctaag

SEQ ID NO: 14749 - DNA, 397 bp, Oryza sativa
agcttgccagcggcaaacggtggctcgtttgatggtgcgaccaaaagacaaaatgaagatcatgctattgcgattccattcctcttcttttcttggtcagtggacatcggagtaacgccggcggcgagtccgagcggcggctgtgcttatgctgctactgcatgttgagttggtgctcaattctaagtgaatgaaatgcatgaatgcaatcctatgggctcaagggtgctcaccgaaccttgaacgaggcgccggaaagtctggacagcggcagcggagaagaagatggtccggcgacggtgtagagctccgggaagacggcaacggctcgatccactcatcgaattgacatgcatgtgttttcatggggttagtgaggtcccagggatggtgtata

SEQ ID NO: 14750 - DNA, 463 bp, Oryza sativa
  unsure (1)..(463): unsure at all n locations
attgcttcatactctatagtgttccataatactctatgttttggacaggggtaaattcaaacttttatatcattaacgaacaataacattaaaagtacttagttcanagtcagtaaaacaacattacaaagtattataataaaagtaaaatatatttatttattatagatattataatagaaaattatagtttaatatgtattttgaagattatgtggttcanatcttaaagaattgtgaaaccggagagagtatgtattactctaattatattagaaggaataagtaccgacctcgctactttaaatgccttctccatgggaaatatctgatcatgctctaccccacaatacaagaacttgctgaaaggtgagacagtcagacaaagaccatttgataaaggtaaactggggaagtaaagcactcttgaattattcatcagctgctaatcgctatggaatac

SEQ ID NO: 14751 - DNA, 493 bp, Oryza sativa
  unsure (1)..(493): unsure at all n locations
ttaagtcacctgcggcatgcaagcttaggaaagtaaatcaataggttatcttattatcataactgctgcagntctcatctgtcttttaattcaagttcttgtactgtcatcaacaaatgatgcactataaccgccagccaggtcagggagatggttacagaagttttttgggcttgctgattctcaaaagtcactagcaagtccaggtcagtcaaaaaatgaaagtgacaagtcagatcctcttatcaatgaaaagaaagaaaagaggcataagtacttgatgctgcttgcaattcttgctgcatccattgcttaccaagctggtctgaacccacccggnggtttctggtcagaggacagtcgtgatggctacaaggctggcaacccgctccttaaggacatacactccagacgctatatggnngtctatgtttctaattccatctctttcatggcatctattgctgtaatcatgcttctgctgagtaaatct

SEQ ID NO: 14752 - DNA, 474 bp, Oryza sativa
  unsure (1)..(474): unsure at all n locations
tccaagcgcgctctcaccctctattccatctttcttattagtagttcctctagcctaccttgcataatatatattgaagcaaggagttgtaatataaaggtttgtaaggtgagaaaaacttgtttgtatctaccttcggggttcccgaaagggaaaaccgtatgtaagcctatttgcttaatatgaagtaattttctttaagtttccccgtttgtttgctctagataagcgtttatgctagggaccctataggagaaacctctcggttgttctcgtttttagcctgcatcttgcataggcgtctggagaaccagtatccgtagagaagtgttcccctcgggtggaactgcctgnggagacggtaaacgcttagctagttcaaatatgactagggatacctgaagttggttgcttaaataggcagataagtgaggcatacggctagtaccgagtaggactntaaaatttctaaat

SEQ ID NO: 14753 - DNA, 330 bp, Oryza sativa
agcttggctcaaccttatgtcgagcttgagcctatgccagcaagatcgcttgagctcggctcatcgacagccctacacacgatgtttaatgcaaatctaggttatgttgatatacgatatctgtctaatcgataatcagatctgttctgttaatgtgaatgctcatagcaagtgcccatataacatatttatatatagatttattgatatgaaaaaggagagggaaatataggtgtggagttttagctcttagtatatataaaagaaaaggtattaaaaggggaataaaaaccaaacaagggtatacaaaagtaaattatattggtggta

SEQ ID NO: 14754 - DNA, 463 bp, Oryza sativa
  unsure (1)..(463): unsure at all n locations
tcanatgtgccatacctcatctcaatgatcttttgttttgctctccaggcctttgcatagcttatggtgtacttgaatatgttctcgatgtgcctaataattgattttggttcaaagccaatgttaccaacaacactgctgtacatctcacttgccacataaactgaagtgatgtttcggtgatacttctccaccccttgtaagtagcacttgtgctcggtcacaatgctaactttccaataatcattccatttacccttatatgcatggacacgccacggacattcttccttcatgcacctcacttcatacacataatttgttgacttgaccaccctaaactctctctgcaatgaaactgcccaatgcttcaccgcctccttcatctcattcttatgagcataccttgcacccttaattatctcgttctccttatactcacacggtacatgatcaccctctg

SEQ ID NO: 14755 - DNA, 401 bp, Oryza sativa
agctttcacaaagccatcaataataatactgtatatgacaacatcgggaatatatcccctctttatcatgtccccaaagaatccccacaaatcatcagattcgttacccttgaagaggccattgatgataactttgtatgtgtaaaggttggggacaatgtcaaattggcgtacttcatccaagaaaagaaaggcttcactaatcagcccttctttcatgaagccgtcaactagaatagtgcatgtaatgatattggggtttatcttgttgtcaagcattagttcaaataaccccaatgcttctttaaggtatctatgtctacaaaatgcatatataagactagtgtaattgtaaacatctggaacaaaattattggtaaccatgtcaatccaaagaccat

SEQ ID NO: 14756 - DNA, 398 bp, Oryza sativa
ctaagctatgcccatggagatgggccattcaaggttgtggagtatatctctgacaatgcttacaagatagatcttcccggtgattacacagttagtaacacattcaatgtggttgatttgtcaccattctttggcacggaagaaacagattcgaggacgatttaaatatgaattttagaagttttgagctatttaaatgaatgtctagaattattaccgatttattacgcaataattatttattttcttaaaggaaaaataaggttattgcgtcaacagtgggacggttgtggatcgagtccaccaaatgcgggccccacgcatcagccaaaggggaggggcggtccaccgtggactaagtccatggcggcgatcggccacgcgggcacgcacccgat

SEQ ID NO: 14757 - DNA, 332 bp, Oryza sativa
  unsure (1)..(332): unsure at all n locations
tgcaagcttgcattaaacacctaagttcccgtgacttgctgattactatagtactcacccttgctctataaatatatatatagntcctccgccctgaagagaagataaagtgaagtgaagattanggtttcgtcctggtttccaaccgtcgcctgtggtgttgggtgttagtcccgtggttccgctgctgctgctgttgttggtggttcctcgtccgtgtcgtccgttgtattctcgggctgtctgagctgcaacctaagttaaggtaaataagtcctctatttatattaaggattgctatgattcatatttgtcaccgtgggtaccagcac

SEQ ID NO: 14758 - DNA, 479 bp, Oryza sativa
  unsure (1)..(479): unsure at all n locations
acctataaaactcaagcttntatatggatgtgaaaagtgcttttctaaatggtgaaattgccgaacttgtctttgntgaacaaccacccggttttgaagatcctaaaaatcctaaccatgtttacaaactctcaaaagctctctatggcttgaaacaagctcctagagcttgagagattttcttttatcatagggtttcaaaattggcaaagttgacacaactcttttcactaaaatcattggtgatgatttctttatgtgtcaaatttatgttgatgatatcatattcggttctactaatgaggtgttttgcaaggaatttggtgatatgatgtctanggaatttaagatgtccatgattggagagttgagcttcttccttggacttcaaatcaatcaactcaaggatgggacctttgtgagccaaaccaatcaaggacctactcaagagggttgtcttggaggatgcaaagcccatc

SEQ ID NO: 14759 - DNA, 387 bp, Oryza sativa
  unsure (1)..(387): unsure at all n locations
agctgttctgtcactgatcgtgatggtgatggtgttcttggtcgtgtctggcaccgcggcggcgcggccattggtgggacaggaatggaccggagaagacaccgccggcgacgactccgtcgtcgtcaggtttctccggcagctgtatctgcacaagcttgctggtccaggtcactcctgcaagacctacagcccaaacggtggatgctgataggatcgatggtgatttggtgaagatggcttggaagctagctagtagctaatttgtaacacagacatatatacagcaattctttttttctttttgctaatatatacaacagttcaatttgtagatttatttcgcttgtaactagagatattatttttccccggtgatnttttttc

SEQ ID NO: 14760 - DNA, 473 bp, Oryza sativa
  unsure (1)..(473): unsure at all n locations
tcctctttcctttacataatagaattcactnnttggagaagatatgttctggaagtgagacattcgcaatttcctgtatggattgaatgcaaaagatatatatgatttggcccaagtacaccaaaaccaatgtgcatggacacaaaaacaattgcaccatcatggaaaataagtaatgaatatttctatgcacataaattaacaaatgatctgaagtatataatgccaagttgccaacaagaacaaggaaaaacctattcattttctttcctttcccatcaagaagtggtacaagtgcaaacttctttgagaagtgccaagtaagtggaactggtcgtttgtgtgatgtcaccaactctgttttaccgtggatctgtgaaggaacagacttcataatagttccgcacatacaaaatagcaccaatacttataagaaataaagggagttccaaatgtatgggtacacaactttg

SEQ ID NO: 14761 - DNA, 199 bp, Oryza sativa
agcttaacacatttctcagctaaaaaacattctagatctatagcggccatggatgctatagcggagaccaaccagtataagggcccacactgggaacagctggttatttaaaggtgcagcttgcataacccccataatgtatacaaaggtggcgtcagccacaggatccacgaaattcaccatggatctgtatataccg

SEQ ID NO: 14762 - DNA, 446 bp, Oryza sativa
  unsure (1)..(446): unsure at all n locations
tggagatcactnnttgtgaaagaaattcttctacatatgttccttaaaacaaattgtttctgattggttaaaaactttatagtctttgtgtggtttctttcctctgtaattttgaaaacattttttgagttctataaaactacactgctgggcaaagtcctggcagtatttctagtcaaaaaaaaagttgtcttacctagcataataaagtctaacctatttttttggtattntctattttgcaatttttatgttgtttttagtttataagatgcaatgaaaataaaacatgcatttggaaagggaaacatgcaatgtgatacaagttacctcagcggngggagagacgtctcccaccaagcttgcctttcgctcagggtccttgataaggattgaacccctggaagcgaaagtacgcttgaaggtcgtcatgctgttgctgcatc

SEQ ID NO: 14763 - DNA, 452 bp, Oryza sativa
  unsure (1)..(452): unsure at all n locations
agcttgtgcacggtgagactacatagatatcaactactctacatcatattacattnttttccccattgccatcccaattacaggacttggctatttatgtctcctctccacactgttcaattggtcttctgaaagatatattccctaaagttaagtttagtgtcaatgtgccatattatctgcatccaatccagcttgccttggcaccaacagtttgaacatccttacctgttgctgggaccaagttgttcattacgaatttcagtaattactagtccagcctgatgacctatcacaaccctgcatcagtagattggttgcattacgcangtttcgcaatggagagaaagaacgtctggaatatcaacaaagaatgaagaccacattctgagatgtcaacatattactaaaattcatgttngcagtcaagcttatctttctttctttttttt

SEQ ID NO: 14764 - DNA, 473 bp, Oryza sativa
  unsure (1)..(473): unsure at all n locations
tgctgttagatggcgctcatactgttaaatctcatttttcattggtcaattaccaggtatctgcagctacacatatatttctgcaaatttgtggctgcacttctgttattgatggttattccttttctttttcctgattagtcatgtgcttgaaaattttcagttgaagcaaataagaactgcactcgctattgcttccctattaaagaggaccctggtcagtggaatttctattctttttctagtttgatttgaactccatgatggtagtgtgaatactacacacttactattcgtgattgtgaggtagtggacatgcagatcattaagtgtaaacatttagttgagattgatttaacctgcaattcgatttcttgaatgtgatctctntccatanactntctatatgttaaaaggttgaaatgattattaatatgttcttatcttttagatgttaagtttgtctttactga

SEQ ID NO: 14765 - DNA, 217 bp, Oryza sativa
aaataaatctcattataaagtcatgtataacattgaagaagcactatcaatctagcaactagcagttatcggagatagttgactagatgaagtatatattcgcctttatacagaataacacacgtgtctgtcaactctctttatgagtggaagagactgctcgtaccaacctattacatgtttactatggcatggatgacataaacaatgaagtctt

SEQ ID NO: 14766 - DNA, 458 bp, Oryza sativa
  unsure (1)..(458): unsure at all n locations
tggacttatcgtcatgcacaagctgacgattggcttggtttgtggctttgatgtccttgcgctcccgacgttcggctagtcttagcttatctttctccagctcgaattgaggctgctcaagatagacagctggggtaaggatatccgctaactcatctgggattagagcttggatctcatgtagccgagtcctaatcggtccacagcttaccaccaagctgtgcagggatgatgcctctacccgatgagagatatctctaagcgttttcttcacatcattggataacgtggctagggctttgctcgaagtatcatcttctgcctcactaagataatctctaacgtcaaaagagaagagatcggctgaaacctgcataaacaatntacgaagaatgagagctaagtacatatagcccatctaatttcttgcatcaatgtgaaacttactgtgatagcat

SEQ ID NO: 14767 - DNA, 364 bp, Oryza sativa
agcttggccggcacaagccaaccaattctgcttctgctgcttctgttgatgggtctgtatcatgtgagagtcctcggagcataactaatttggccaaattgaccgaaagcacagaaaataacaaacctcatgctactgccagaaagcctgctcaaagatcagtcacaaaaattccttcccaagcatctgccactgcaaagaccgagacaaaaccccttgtgacaaagcagaatacctcatacacaaaaccaaaagctccaagagccaaggtagagcaattgcaagacaactcggttgaaatccctcctgctgaaccttctggcccagaggggctcactgttgaacatggtgttgaggatgcaac

SEQ ID NO: 14768 - DNA, 454 bp, Oryza sativa
  unsure (1)..(454): unsure at all n locations
ngatggatatgctagtttggctatttaaattgtatgtttgtgatttgctttcaaagacgaccttaaacggtaagtcaaagaaagaacttagtacattnttattatgggttaaggttttccgattcatgatctatacaattttatttcaactcttatgggagttagaaagattatttcgagcttgaagtgtatcctacaaaaactcattaacacattttttcccgaaacaaaaacaataatttgtaaaagtatcttcataatcaatccgtggttccttttccttctcgtctatgttttatactcttatagcatcaganaaactttgacacttttaatttctttatattttactatcctatgtttcaaacctgccctcacgatttgagcttacgtgctataggaaaaggtaaggaaaaccaactaagaaaagcatcttgtccaaacataaaatctc

SEQ ID NO: 14769 - DNA, 329 bp, Oryza sativa
  unsure (1)..(329): unsure at all n locations
agcnttctcggttcttggtctctgcccgaggtatctatgccaaccccgagaagatacgagctatagagcagatgcgcccccccagcaagcttagggatgtgcaatgcgtcaccggttgcatggccgccctaagtcggttcatatcgaggctgggagagaagacgctacccttatttaagctcctcaaacgctccgggccgtttacttggacggaggaagctgaacgtgccctcactcagttgaaggcgtatctcagctctcccccagttctggtcgccccggagccaaatgaacccttgctactctacttagcggcgaccccgcaagtg

SEQ ID NO: 14770 - DNA, 437 bp, Oryza sativa
  unsure (1)..(437): unsure at all n locations
ttctcntttgagctagctagctatctagctagccggtctagctagcttgcagcagtcgacgtcgtagttggaatttacagatagatgcagcagcagctatagctaagcgtaatctagctacagtacagttagttgctatagtagtttcagtctagatcttgcagctatatagttcctcttgttcttgttgatgatgaagtgaggagagatgggatatgatcgagcatcatgcacgcacccggcagagacgggctctcttttgctgcctccaatctgtaggaattcgatgtcgtctttctaaattagccagtttgacagttgatatagcctcccatcatttgtttttttttcttatcagtcgcaatcaaaatttaaattttagaactacactttagagattatcttgagattttaattttattgtaattatttcagca

SEQ ID NO: 14771 - DNA, 505 bp, Oryza sativa
  unsure (1)..(505): unsure at all n locations
agctntgagcagaaaaaatgaattaatggaacgctggagtttagtgtcacaattgctctagttgactcgacacggtaataggtatcctcgcacaaggtgttctcaagtggttgacaagaaattgatcccaatctcagagattcctcccgcattatttgcccacttgcgagaaacttctctgcattagtttgagcttccacatcccccctgatgcagaaacgtgtataatgcacagtaataaaatgcaaaataggtcaagtaacgatgacaacaaaaggaggttatcgtgtcatctaaaatcagaaagatgacggataaatccacagcaagtgcctacaatagtcataggatctgaccaggtccaccatccaagaagaatttggcagttccatactananattcanacaattatttcagtnganacttattaccangatgatacaccagttacctctggttctggaanataccatcangaaccataagtcaattttataatanaaa

SEQ ID NO: 14772 - DNA, 475 bp, Oryza sativa
  unsure (1)..(475): unsure at all n locations
ttacgctgtgcactntgcattcagtacaatgagaattttagaatgtcacaaattaatcaaaggaatgatccattccaagtgcaaaatgcatcagaaagcagcttaagaaatagtattagacaaagtgttaaggatataagaactgaatgacattgaaatctatccagtgagacattgaaatctatccagtgagagagatgatgaactgaccaatctggcacacctgcagagatgcaacactgcatctgcatatgctctcatgtacaacaacctgaatctagtcaggaatcaaacaactgaatgctagtatcagtaaggctgacaaccatgagcagagatggtcaagaactactacattgccgttttctctcatcatcatagcagcttcttctacatagtaaaaggctttgcttctccctaatgatacactcgtgcaaaagcatttgtagagaagatgatgaagaggtcaagaaag

SEQ ID NO: 14773 - DNA, 437 bp, Oryza sativa
  unsure (1)..(437): unsure at all n locations
agcttctagcatcatacttatgcggtttcgtgatttactttaaagntctgcggagtgagagagacgattttcaacatcttgataagcctcaagagacttgaccgttctttatactggctgatttaagaaagaacacaagaagacataaacacaagtcgtcactcgtcagattcagattctttgatcagtagaataaatttgccacatttganatggtggattcaaagttatccacttcaggagtgttgcctgcataactgcatattcttaagacatacgatggagataactcagctacgatggagataacttagcttagcagcataatacacattaagtcattaatgcagagtcaattgcctaaattgatactaccttcttggaggtacctacgacttcatggacaaacagatctagaactagaacgatacatttac

SEQ ID NO: 14774 - DNA, 416 bp, Oryza sativa
  unsure (1)..(416): unsure at all n locations
tctctggcanatcacgggccactgattttagtttgctactctgctcagagaagagatgcacaaataatggccgcgtcgcttttgatatacacacgacacagccatgaagtagctgagatactagaaagggttcgcctcgactgaaatgatacggtatcaatctcaacaggccaaatagcttccagacgcattttcatctactgccgtccttcttcctcatcttcattgttntcatctggttgtgatgccagcttcacaatgtcttccacacggatcttcccatctgtagcatattaaaaaagacagaggaccagttatgaaacagcacatacaattgtgcatgcactatcatcagcagaacataaaaacatcatggaggacctttgtctttagagaggttgctgacaagctcttgg

SEQ ID NO: 14775 - DNA, 455 bp, Oryza sativa
  unsure (1)..(455): unsure at all n locations
gctnggacttaactacaacgaagctaatagtttgttgagctccgtcatgcttctaagaaataagattgtcgcccaccaagatgatccttatcaaaattacactggacccaaggttagataatttttatcatgtttaagattcccacattgtcttagtagcaaactgacttgaacagattattttttgctctattctaagtatactgcattctattttgttttaggagcaaattggcgtggctaaagccctcttggagaagcttgtgttagactccaagcctgcttacatgataaagctcatcgaagagatccgaaagcttaactggataggagagtcaccacttgttagaagtaagttataaagttgtacaacaatttaagtcaaagtaaaaaatgagtgcaagttangagtactgcctgttttaataattntaaaaataacagntatgtgttac

SEQ ID NO: 14776 - DNA, 438 bp, Oryza sativa
tgccaattatctgatgaatacactccaaccgtttatgctcccaatgtgttgcagttgaatcactaatactaccttttccataatgtgttgcagttgatcaagagaattactccccatgatcgattacaaggtgaaaaagaagttgatcttgaatggtatatgaggaaagcatgggcagaagctttcctgaaactgcagaactttgtgagggaatcaaagcttacttactaacacacctggtacataagtgttgtgatttgaagtctaaaacagttccactccactaaattaattcttgcagtaagcagaaaatctttgccttgcaacagttagttacaacagctagaaaccaaaaccactcctagcacttacaatacaagtcgtgttcttgtattgtataagctggtacattttctggttttttctggagataatttt

SEQ ID NO: 14777 - DNA, 402 bp, Oryza sativa
  unsure (1)..(402): unsure at all n locations
agcttagtacgggtgcatgtcatttgtgacaaatctacgtgttagggacccaatatctttttgcatgcttctaaaataggacttttgagggtctaaatttggatacctcttggagatgctctaacatattttcatgcaattaatctcactagtaatatgtccgtgctaaacgctacggtgtaactctatttatctttaataaatatcgccaatacctatattaaaagatggattttcacgtctttcttttacatatttgacagacaaaaaatatattntgtttgtctcattaattgaattcccctatttttaaagcactacaatgtgattcatgtcacatgagaactttatttccatgtagtaattaaataatttatttcacaatcatgtcgtgctttttat

SEQ ID NO: 14778 - DNA, 386 bp, Oryza sativa
  unsure (1)..(386): unsure at all n locations
tcttcgctgcacctcgntgcccgcgtgccctcttctgttcaacggagggttgactaccactagcctcctcctcctggttcccctccacatccctttccacgtgcccttgctagttctcctccgcatccctctccacgttcccttcctcgttcaagtactggtttggatccttgttcccctcttcttcattccagtactggctgcttccctccgcgattgtatcatacaatatctgttcctcatcgcggtcagccatctgttgatacaagaaacatctgctaagtcacgagacatttatgttttaacaatctaagtcatgtatgctaagtgtaaatgccgtatattagaaccctacacaaccttacgtgcgatgtttaggcttcgta

SEQ ID NO: 14779 - DNA, 429 bp, Oryza sativa
  unsure (1)..(429): unsure at all n locations
agctngcatatcatgatagtatgaagtaacagttctggtatcttggtttaaacattgtagtttgttgaacaaaatgtcagcataatacatgggaacataaacatctctgaaatatcgtttcaggtctttccaagattgtggtattctgttatgcctacaaagatgtttccaatcattagaagcatgtttaattaaaacactagaggcacacataaccttttgtttctccgataagacatgctnttgaaattcactatcaaccgctagctcccaattaatgtaagcacgaggatcatagtttccctcgaaataaggcagtgcagatttgatcttacctagaacatcatcacttacctcataatggtcatggtgatcccctctcatgtctcgacgaagaatgtcgatgtgagcacagctatccccaattat

SEQ ID NO: 14780 - DNA, 475 bp, Oryza sativa
  unsure (1)..(475): unsure at all n locations
ntagctntagtgggctgtgactatatagcaggtatagatgtgactatggccatttgagtgaaatcttgagttaattaaactatccataattacactagttaaaagtttgcgatagagaatgtttgagatatgagatctattaaatctaattgatggataaaatatacattntgacttagaacagactgtatatgctccctcagtaaaaaaaagtcctagttatgaatctaaacataaaattgggttagtcaatcgattcataaccatctttcgagcactatattaaaacctctttacttgcccgatcatatcttagatctgtaaattatgttatggtctacgttccactcatagcgatgtgcttgagtccaagggacagggggtcgtcttggtgccagagagaatgaatagatagggccccacgagtcgttaattggccgcttgggaattcacatgaaagggaaggacttattct

SEQ ID NO: 14781 - DNA, 91 bp, Oryza sativa
ctctgctgccgtcgtgctctcagacccggcaccgtctttttcttctttaaagagctacttacgcttcggtgtgcgttgctttacactgaca

SEQ ID NO: 14782 - DNA, 347 bp, Oryza sativa
agcttacggccatgtcagtgtgctagtccatcttggggtgtccctgagtgacacttcactagtgaggaagctattcgataccaaggtgatgatcggcagcacctgaagatgttcgaggagaacgcacgcgagaagagtatcaccatcggcatgagtgcggacatccaggtgctcctcactctgccactctggcccagtgggaggtgtgcttcaagaacagcatccacttactatcaacctgaaagaaaaaagctcctacagaaagtgggatccgtgaccaaggcagtcgagggcgtggcatggtccatgcaaagggtggtgtagcgaccaaccacgcaaagattatg

SEQ ID NO: 14783 - DNA, 471 bp, Oryza sativa
  unsure (1)..(471): unsure at all n locations
ggacctataaatctcagcttaggaagagatgggttctaagttgaactntagtactgtttatcatccgcagacagacggacaaactgaaagggtaaatcagattttggaagacatgttgagagcttgtgctttagacttcggtggaagttgggataagaatctaccttgtgcagaattttcgtacaacaacagttatcaagctagtcttcagatggctccttacgaagcactgtatggtcggaagtgccgcactccgcttctgtgggatcaaacgggagaacgtcaggttttcgggacggatatcctgagggaagcagaagaaaaggtgaaattcattcaagaaagattgcgtgtggctcagtctcgtcataagagttatgccgacaatcgccgccgagatttgagttttgaagaaggagattatgtgtaccttcgtgtcacgcctcttcgaggtgttcatcgttttcacac

SEQ ID NO: 14784 - DNA, 452 bp, Oryza sativa
  unsure (1)..(452): unsure at all n locations
agcttgtcgagctcttctcgtatggcctgtntccgatctggtgcaaatctncgcagnttttggtttactggcttggcgttgggtcgcaccatgattntgtgctcaatcacctccctggggacccccggcatgtcggacggttgccaagaaaatacgtccgcatttgcgcggaggaaggtgatgaacgcgagttcctatttctcgttcagtgatgccccgatcttgactgtcttgtcggggttggcactggagagtggaacaattttgattgcgccatctggtttcggcgtcttagttgttttgctcactttcttgggtggctcggctgtggccggtgggctgggcgtgtgctcnaccatgtcgaggttccgcttgtcgcattggaccgccagctntgtgttccctagaatangtgatggtcccttcngccccggcatcttgagtacctgata

SEQ ID NO: 14785 - DNA, 360 bp, Oryza sativa
ggaactaaaaactaagcttgggccaccaagaggacagggctcagttgtttttccttctctcctgagtgccagatgacagacatgggcttctatctgatgacgcgcagtcccctttggtgtttggcggcggcactggtgaggtctatagactgatctgtgaatgttccaagagaccaatgctacgacacggtcgatgtaacgaggtcgtccgctaaaagcgtagtcccttctcctgtgtatgcgggatctgagtgtgatcgaccacaaagatctggatagaaaatagttatgctctagaagccctttacttatctgcctctatagctcagactatatagcaaaccttaacatgtgtgggcc

SEQ ID NO: 14786 - DNA, 147 bp, Oryza sativa
  unsure (1)..(147): unsure at all n locations
ttaccacgccacctcgtgggataaatagcatcagcgaatctttctaaatancctagtgtttggcgatgtgcgcaccagaacatgattagaactaccaatggcgccccattctttcagacaaacctgcaataagtatactcttgacta

SEQ ID NO: 14787 - DNA, 448 bp, Oryza sativa
tgatcagttatctgatggcccgatcaaatccattatttatcgacttgaagctcgcaagattgaactcttggcacaacttcaagaatgcaacaccgagctggacatggaacataaaaagctagccgatctcccacaagctgtcgaagaacagaaggcaagactaaaatcggctatcaagaatgtcgcggatatgaccaagtccctaaaagtcatccctggaaccgatgctcaagatgcccaagccatcgaagaagtagaacaaattaggcaaagagctatatcggctatccaacgatacttgtctcagtgacattctgtaataaggcttagcacattttgtaatcggctaagatgattctgtaactagtcttgacaaaccttgtgccgattaatataactccatgctctttgcttaaaaattttccaaagttgcaacttgtgaatatat

SEQ ID NO: 14788 - DNA, 468 bp, Oryza sativa
  unsure (1)..(468): unsure at all n locations
agcttgtgagtgacctaagattgtcggtcagcatatctttgctgaagtgatgccgaatgctgcttactgatgatctttcaaaagggctgggtggcacgtcattgatagtcggcttatgccgtgccagtgggctctcgccagggtcactgttagctttccgcttcttctggtgaatggccttcgccgcaatcgtggcacgcttttgggtggctgtatgcggngtgatatccttgactaacttgagctgggacaacttctgagggatcgccacagccgtacgatagtcaactntgacagcagcactgccaagtctcgaggtgagcatctgcggggtgacatccttcaccaacttgacccagggcacctgccgagagatcggcacagcagtaccatggcttgcactggtggcaatgctagctggcttcccagtgaccatctggagggtggtgccctcactaactggagctg

SEQ ID NO: 14789 - DNA, 481 bp, Oryza sativa
  unsure (1)..(481): unsure at all n locations
tcctgaaatgccttatgcacctctgaaggcttgctgttactgataataatgtcccaatacctttctcactcacaatgttccctccactagcggtatatcttaaggttgggtagatgacccggcgggtgatcacatgatccaagaactcaatccctcttgtgatgtgctcaatctctaccatcgaattctcaggcctcaaaccaaacgtgctctcgcagaactccatcagttgtctccttatctcaactgcgtcctcccttggtcccctgatcccaataagaacatgggagccaaatctaagggaatccatcttccttgtcttctccttcccacttgatgggacaaactcangccaggcaggattatggcatccttcatcacccgcctccttccaaatcgaatcatggcttgacgggcggaagtactcatgaattctctcctcgagccaccaatccagttcgttaaggcacacattggcaag

SEQ ID NO: 14790 - DNA, 452 bp, Oryza sativa
  unsure (1)..(452): unsure at all n locations
agcttgagacgtcaaatatggggatatcgatttgtcatgggaaggtgcgcatgaggataagtgaggggttgcccatgtgaagcatcgtggaggtggtgacctttgcggtggtagcaattttgggacaattcaacctcaaaggcaaaacgacacattcggataggcaagctgatcatcaggattgctttctcatgtccataagtggagatgacgtacaagaaggacgaagccgataacaactacactagagccaacgagacgttgcagccaactaatgggatgtcctccacattccgatttatgaggcgtcaagagaaagggacatatttagaatgcttttacaatctatttgatgttccagcagttggaatatgaagtttcanggatgggaatgcaacgtttaatatgtctgacatctttaatttgggatttattaattatcttcatcttac

SEQ ID NO: 14791 - DNA, 450 bp, Oryza sativa
  unsure (1)..(450): unsure at all n locations
ttaactntngaaccactataagtgaaaatatattctttctccgtttcatattacaagactttctagcgtcatccatattcatatataactagattcattaacatctatataaatgtgggcaatgctaaaaagtcttataacctgaaacggagagagtattttttatcctaaaattactttctccttctataacgtctctttagttctctggcttacaagtgggcctgatcagctatggtagccactacagtacattgcatgctgctgcacggtcgattggttgatcagaggacccacgaaaagaaaaacaataagaggattttttttctctagaaattggttaattnttccgtaaccgaaaagactttgacttagaataggagggctaaaggcaacgtgtatccatgattgactatttcacgatggtgaatgctggagcctggagtacat

SEQ ID NO: 14792 - DNA, 424 bp, Oryza sativa
  unsure (1)..(424): unsure at all n locations
aagtnacctgaggcatgcaagctnaacaagaaatatgatgtcacttattcattacattttatagagagaaagacaggagatgtgatttcactacatgctgggacacattaataatcaaggtgatgaaactaaataaaaataacatttaaacaaatcaccatttccctgccgtctataaacttatcaattacttggcatgctaacatatcataaatttagctgacttacagggcagaaacgcctgttcttcttggcgtctcctcctccaacaacaaaagtatgctacgacgatgagcagcattgcagcaattgtaagcataacaatgtgtagaactatacctgtcttattccttttttctctgcaataaatactgttcgaccagatagcatctctgtagctacaactatgaccagaacctgaatg

SEQ ID NO: 14793 - DNA, 406 bp, Oryza sativa
gacacaagaaactcagcttatcttgacctctgataagcttgatacttttgtttatttccaaccgcactcagtaagccaccacagttacaatgcacatgatagggggtattcaacggatggctatggatcttttgcgcatagtaaagtttgtaattcttttcacaagcctatgacctatcatgactgatcaaattgttagaaccagtgttcatatctaagaacgacggttctgtccaccatccattgtgatcccaaagatagcctcccgccattgagtcgttatggatttctgaggacgaccaccttccctcctctcatgaagtggctccatcagcataaaaatcatcatgcaatattccatcccacacaaactaataatatagagtctagccaagtggaatacatg

SEQ ID NO: 14794 - DNA, 275 bp, Oryza sativa
  unsure (1)..(275): unsure at all n locations
atcctctgagtcacctgcggcatcaagcttctataactcctgcctcaatctatttctctantggtgaaaaagctgttcccaacagtntagcatgcggacagtggatgtgatangtcacgaatttatctttacttttaaaggtgtcttggttgataggtcgggaattattcctatttttaagatgtttagtttgagaataagtagcttgtgaaaaagcttgtgcccaccgtttagcatgtgaacattgggatgggatangacgggaaattcatttt

SEQ ID NO: 14795 - DNA, 499 bp, Oryza sativa
  unsure (1)..(499): unsure at all n locations
acggaccttaaaactcagcttngttaggttgtgttctgatgcaagatgggaaggtggttttctatgcatcttgtcagttacgtccgcatgagaactaccctactcatgatcttgagttagctgcagtggttcatgcgttgaagatttggcgtcattatcttttcggtactcgtacagaggtgtacacggatcacaagagtttgaagtatatctttacccagccgaatctgaacatgagacaacggagatggttggaattgattaaggattatgacatgggaattcataatcaccacggaaaggctaatgttgtagcagatgctctcagcaggaaaggctattgcaatgctacggaaggacaacagttgccatgggaattatgcaaggaatttgaaagactgaatttgggaattgtcagtagaggttnntgtgcaactttagaagcgaagcccactctcattgaccaggttagagaagctcanatcaatgatcctgatat

SEQ ID NO: 14796 - DNA, 439 bp, Oryza sativa
  unsure (1)..(439): unsure at all n locations
caagcttaaggggaaaggattttgctagtaataactctgatgccgattntatatcattntagattatgaaacaagatgttgaacaccaagatttggtctttaaataagttggttgcaacatcatggctggagggaggatccttgagcttcaaagcacctggttggaaacatttgctaccaagggacccagcttcaaccttcaaatggccaatcagttgccatgagtttatcattgaaaacaatgtgcagagcctttgttcattgtggntgcagacaagcatactgcctacactttgaacaggttcagacttgttcagatttgcagctgaagcagtgcaatgaatcagtgcaaatgtgcaatgcatcagtgctaacaggcactgtgctgcaacaggggaacacaacaagatccagtacnagtcatgtcatttggcttgat

SEQ ID NO: 14797 - DNA, 478 bp, Oryza sativa
  unsure (1)..(478): unsure at all n locations
acctataaaactcagcttggtggacttacagtttcaacgatttattttattgtgtctatcagtcagagcccatgctttactctgcacgtgctgctcgtcgcgattgctgctcgtcaaatcggagtcgatcagtcgactcctcgtcggcgtttgatgcgaagccaaatctcgcttaacaattgacgacgatgatgaagacggccggcggcccggatgggcctatttggtatgggattggtccaaatctaaaatttagatctagagttatgttcggataaagccgtagagcaatntaaatccaactctatctttctttctagtatattttgtgaaattatcttactcacgtctcgtattatcttaggtggagatgaaactgtctagttaggctctaactctantagaggtggagctgaaattgtgccaaatagacccttagtatatccatctctaaagtcttataccatttattataaaa

SEQ ID NO: 14798 - DNA, 419 bp, Oryza sativa
  unsure (1)..(419): unsure at all n locations
agcttccactcgctcatactttctgagttccacttctctgtgnnttgggngcttgtgtgctgatcagtagaatcgacaggtttctcaacaattttaaccattctgtggtcacaactgaaagattatcagcagatatacatttgctattctgacgccccatatatatataatcaaggaacacatgcgtaaaaagaaaatccaattttattgcaggctaaatgttcaattcagccacaacatgcacatgcagagggacagccagtagttgcacttgagcattagataacaaaggagtccagttacattcctccaaatgcaattgaaataagttcactttgggtccctgcctagtccgattttcatccnctcgtcacacaaccggatacgatgggtcccccaacttactaaaaccgttaaat

SEQ ID NO: 14799 - DNA, 475 bp, Oryza sativa
tcgattagactcatatgagtgctcattcatacgatggaccgggctgtgactgtgcgcactgctctgggtggagagcatatatattgatcgatcttatttatttttcatgagaaaatataacatttatttatggcaagacgttattcacgtcaactatggctgtgttagggagtagcactctaaacaaagccgcatttagcgcataattaattaagtattaactaaaataatttttaaaaatgattaatatgttttttaaaacaactttaatatagatttttataaaaaatacactatttaacggtttgaaaaacatatgcgtgaaaatcgaggaaagtgagttgggaaagtagagataagaatttaagcatatatctatcagtcaatgtggtactccctccgtcccaaaaaaacaaaccataccattgtgtttcgtgtccaacgtttgaccgtccgtcttaatttgaaaaattat

SEQ ID NO: 14800 - DNA, 384 bp, Oryza sativa
  unsure (1)..(384): unsure at all n locations
agcttcatntgcgttatttctgaacagattgctttcaagatgccggattatacccactttgtttcatattataagttgtttaacttttattctagtcgaacctaataaagcttggtcaaacttaataaagcttgactatgtttataaaaaagattagtaacatctaagatatcaattagtttcactaaatctaatagtgagtatattttgataatatattttttgttaaaaatattactatacttttctataaatttggtcacacttaaagaagtatgattaagataaaaattgaaccacatgatataaaacagagagagtcttagagtagcagcacaggtcatacaaagtggagaaggggacaattacacctatgcccccact

SEQ ID NO: 14801 - DNA, 408 bp, Oryza sativa
  unsure (1)..(408): unsure at all n locations
ttcaccccagggaanaccgnggtgcctatacctgttgtctatcggacggttgtgtacgccgtattttttgaggcagggctacggtttccctacaacgtgttattgccggagatacttcgcctcttccaggtggaacttccgcagctgagcccgtcggcgcttgttcggatcgctatcttcgactgggcttgccggatttccgggtttgagcccaacgccgagctctttggcgccatatttttcgccaccgtgaactcgaagacggtgattaccctggctggaacgaaaaaaacagtgttcgggagcgtgaacttcaacgttcgcccagagcggtccgatctctggccggtgaacgctgncatgtcgaagtgggaccgccattggatggtgaggtggttctaccacatc

SEQ ID NO: 14802 - DNA, 423 bp, Oryza sativa
  unsure (1)..(423): unsure at all n locations
agcttcctagttattgctactgcactattcctctgttaaatgcgcctaacttggtgtttcttgttcagtccgccgccacctccaccccaccatggngcttctccgcactcgcccagccccgctatttctccacaagagctaccacggtaaaattactgctctaattgccttgcctatctgctacctctgtccccaaatccaaatatgagggagtttggctctgcattcgcattgccaaaatcccttgtatttcttttcggggacggatgaaatcgattctgcatttgcatccacgattcctaactggatgagagaggcagtgacctgagaagctacctgtgatgctggaagttntaccccctcgttgagacttgagaaggatttaatggtttgtgctgaccagcaacattntgatgctttctg

SEQ ID NO: 14803 - DNA, 334 bp, Oryza sativa
tcgccgtcaacagctatgtacagtacattagacgggttgctcagtagtgcttgcctgtcaataccgggcgcttgcacagaacactggctcgcattcatcctgataactattgtcctgaaccgcgtatattgactcgtgcgtccgcttggctgaagcctttctgtcttattacagcctcagaagtctaatagagcctggggactatgtatacatacgtatatctgtatgtgagcttgtatggatagctgtatctaaatgtatgcatgtatgggcatacactctatctatgtctctactctatgcttatggatcactgtgacgagtgtcttgcata

SEQ ID NO: 14804 - DNA, 297 bp, Oryza sativa
  unsure (1)..(297): unsure at all n locations
cacctgaaccgctgaacgatgttgcgcataggagtcagccaattggaccaaacgtgacgcatttatacggtctgtgggtcaaatctgcgccgccgaaacagagggtgaatctgcccaatctacagtctctgtcgtggaccattgatgtgaccaatcctgcgggcgcacgcgcatcatccgatgatatctctacaagacgtccactacgcttcgactgacgcgagacaacagncttcctactgctcgcgcgaatactaacagagcctctcgatcgctttcatagatcacgagttggac

SEQ ID NO: 14805 - DNA, 313 bp, Oryza sativa
  unsure (1)..(313): unsure at all n locations
gtcacctgcggcatgcaagcttgtaggagctcgttaggctcgcgagccatactattcatgcggtcaggcctctcttattctcagtgggacgcgacgcacctatgggtggatgtgggcggcgagcgatcagcactacgttgctccacggcagcatcaactgccgcggcctcctccgtcagggactccggcacgacggcggcaagctcggcgctgatgtgccgccgcgcgtcgccgatggngcacatgctccacccagttgccatctcgacggcgatgaggccgtgcaccttggcgagctctgtttcgagcttct

SEQ ID NO: 14806 - DNA, 379 bp, Oryza sativa
tgccgttcgccttgggaacgaccaccgggttcgccagttcttcttgatggatgacctcacggatgaatccggcctccagaagtcgcgccacctcctcgcggatgaaggcttgacgttccggggcctgccgccgcactttctgccggaccggccttgcgcccggccgcacggcgagacggtgctcaatcacctccctggggaccccgggcatatccgccggtctccatgcgaagacgtcagcgtttgcccgcaggaaggagacgagcgcgtcttcctatttgccgtccagaagaccaccgatccgtgtggtcttggacgggccgtcgcccaaggcagcctccttgaccgggacctcgtcacctgtgatcatccgcttgct

SEQ ID NO: 14807 - DNA, 419 bp, Oryza sativa
agcttgctaatgggctggatgggaaagggctaaatggactgtgttctaattggaaaaagtacaccaaaggcccctcaacttgttatcgagttacaaaatcgtcccccgagcacaaaaccatatgtaacttacaaaatcggttactttatgttattccggggtttgacccccgttttattcgacgtggcgggtgagtcatcgtggaacccacgtggaccccacatgtgtagatgccacgtcatcttggactctctaccccttctcaccttactccttatccacttttctctcttagagcgaggaaccgccgtcggcatgatgagctggatatttgcaacacagagcatgcccggcgctctgattctgatgcgacccagctgataccacgctcagaacgcggcggcacactgcccgtcggg

SEQ ID NO: 14808 - DNA, 461 bp, Oryza sativa
  unsure (1)..(461): unsure at all n locations
aaactcagcttgaaggctataatccttaggtatatgataggattatattgaatggaaggaatgaggcatataggaaaaaaatcctaatgtttgaattcctacaataatcctataaaaatcctttaaaccgaatgagcccgaaagagagagagatgatgaagaanatgaggtgacatgaaagtcgctgacacgtggatcccatctactgacttagcgagctaaaccgtggtcgaactgtcatgtcagtagataccacttccaaaacgatcgaaggagatgattttcactactttccgaagacaaaaaaagcctttcgggagcggcgctatatccggttntgcagttgagggagacgatttacaggagcaagagatgagggagacgaaacagacttatntgcctctactagaacagcagcttatgcccaaacagcggagcgagaccagtcatggcggcgacac

SEQ ID NO: 14809 - DNA, 164 bp, Oryza sativa
aacggagtgagtgattagtacaaaattaattaattaagtattaactattataaacttaaaaatgtatttacttgatataaaaagtctcttgtaaatacagatcatttagcagtaaaaaagtgtgcttgataaatgcaattggacgcaacctaaagtatttatag

SEQ ID NO: 14810 - DNA, 469 bp, Oryza sativa
  unsure (1)..(469): unsure at all n locations
ggaccttagaaactcagcttttatactctcaagttaggtaggagtatcttttggtggaataggaatagagtagaaatcaggagtccagaagtcttcggaaaagttcgggtatggctctagtagcttttctcttatcttttgtaagctttgtacttttattagaatactcttctatatacatttatggtattgaaatactttccaagtatatgaatgcctactntacattatgttcatgttatactgaatatacggctagcttatctgggacatgctttggtgcgggtataatgtttgcttctgcaattactctatgtcttgacaatgatatcagagtggtatctggtagcttagacgtggcgtctagattacgggatatcattattcggtgttatatgctgcggatgagaggtgggccgctgatggtaacagctcagtatgggtattccttcgcgcctgtatataattc

SEQ ID NO: 14811 - DNA, 243 bp, Oryza sativa
aagagcacacgctctatttcgaaacggctacttagatcacgtttcatgaaatgctaaatgcttggttcatgcaaaagattttagttatatagaagttccattaaaaataaataaatctttttttaaaatataatacttaatactcgattaattatgcctaaatgggtgtctcattcagtgtgccccttaaaattcaagctaaatagagctccaaatgaagccttaaaacacgagatttttttt

SEQ ID NO: 14812 - DNA, 473 bp, Oryza sativa
  unsure (1)..(473): unsure at all n locations
tgcacgtggaccacctatcaagtcactagctttccccgactactggtgggagatggactctgtcaatgtgattgcaatcaaggtggccgagtctgatgtgggttaccctatcagggtatttggcactgtgctggccagggatgagtacgatttcaggtgtgtctatttgttcaggcgtgacaggaacaatccacagatcatcacctcgccggtatgttactgattcgttcctcctccttgctagattaatactatttattgttcaaatccatatgccattgccttttcaatccgctgtctgatattctacactataaatgacctgttaattangctcacattgttaagtgaaatgtggacggttgcatagttccataatggctggtgaaatgcctgatacgatagaaatcctgtttcctggccattaaaatccctactgccagatcttaaaccttgctgtcaatatcatatat

SEQ ID NO: 14813 - DNA, 380 bp, Oryza sativa
tggaacagttcacgcggaacgcctcaccaataggatgagaatggtggctgcgcggatggcggcgcatgatgcaatctgtggcacgcgcacgtgcaataggttaaagcatgcatcgggtggagatccgatattgttaaatcccaatgattagataatcagtataacatgtgttgcgatcggctacaaccaacttatatgtaatccttataagccgatgcaacgtccatataactcataggctgaaaccctgatgaaacccttattggcgatcaaaggcaatgtagctgttatgattctatacacgacttagtaggtcaaaactaattgatgcaacactaaatgtgaaaagaagcataaagtctaaacaatcaagcctttga

SEQ ID NO: 14814 - DNA, 353 bp, Oryza sativa
  unsure (1)..(353): unsure at all n locations
tatctcctacgatgccggaaaggataagccagtttatttctaccggtttgactatggcgacgacgactggtgtctcctctccttcatggttggtcggtcacaccaccgtggttgcgggtctacttattcaccgacgactaacttactctgtcaccgactggtgtcctctactacacggttgaatggtcacaccaccattgatgggcgttcacgtcttgacacaccggcgccttgtctgacccgactgggttatcaccactacgaccttcttgtgagacactgaatgtgatcttctcgcatcggtttgnatatgtgccgncaactcgagttaccggcatcatggctatgcaact

SEQ ID NO: 14815 - DNA, 401 bp, Oryza sativa
  unsure (1)..(401): unsure at all n locations
agcttgcgtncccaactcatcgatcctcactctacacatcttccttccatcgatcgatagatcagctaatccctcgcataaatcctcgatccggccggccggcggcttaattcctaggttntcctcctcttcagttcttcctcatctagtccgtccgtccgttgtcttcttccaagatcccagacgatgcaagcctcatcggcggcggcggcggcggcgtgctcggctatcaagccggcggcgcatcagcacaccgtgcaagtccaggaaggtaaccggccgccgccagctgacacacaactctnttatactggcttttngtagtcttgttctttgattacttcggtttgatttgaggattntctttaacttgggtgctgcagataagaggggatcggaat

SEQ ID NO: 14816 - DNA, 470 bp, Oryza sativa
  unsure (1)..(470): unsure at all n locations
ntctntggatattgcacagcttgttaagcaatgtctgtttgcggttgttggtgaattgccccaaacaatatcattttcccaattttcatgctcgagtggataaaaatcagggaaaactggagattgtacagcagtaggaatatctttatctttcatcggttgttcggaaaggcacgagtctttcagtcttaaggcaacatctgaagttgactcatcactgtcactctcaacaaaattatcgttcgtcttgatatgcttcaaagctgacaaattttgaatagtgctgcgtagaaatacctcctcgtcttcttcaacaatatctgtgaaatttgtaatctggagctctgaaagtaattatcaacaaacaaaagaagcatgataagactatagatatattagtaatctggagctctgaaatgtattgtccaggagcaatggccacaaaagctattaagccctataactggtca

SEQ ID NO: 14817 - DNA, 416 bp, Oryza sativa
  unsure (1)..(416): unsure at all n locations
agcttattggtcgcgccccttcatcatcatcaacaacatgcctagaaggaggctaaggaccccatgccggccagcaacctttccgacggcctcccctcttcttggttgccctttntggccatgagagctagatccagtgggtgccaccatacctcaaaagcatgaggcgaaggaggaggccacatgagtggtgccggccgccacccttgtagccaacatgcacctgngccagatccagcagtgaggagggtttaggcctctacatccattnttcgtggcttgctccaccgtcgtcatgcctacacatagctctctgtagctgagaggacgagaaggggaanaaagaaggacgaaggangagaggtggaggaagaggatgatgaaagcttggatagagaatactcccgtcccataat

SEQ ID NO: 14818 - DNA, 406 bp, Oryza sativa
  unsure (1)..(406): unsure at all n locations
aactgagattgagaggttatcttctggtagtatagtggagatagagtatgatgtgattaatgagaagcataggttcattataatgtttgttgctttgaagccttgtatatatggatttttgaatgggtgcaagccatatttaagcattgattcaactgtgttaacaggcaagtggagaggacaattggcttcagctattggtatagatggccacaattggatgttccctgtggcctatgctgtctttggatctgaaacaaaggaaaactgcgaatggttcatggtntgtttgaataaggcaattggatctccataaggcctagtactgtctactgatgcatgcaagggcatagatgctacagtgacaaaggtgttcaacaatggagtagagcatagagagtgcatg

SEQ ID NO: 14819 - DNA, 444 bp, Oryza sativa
  unsure (1)..(444): unsure at all n locations
agcttgatcagctctgatggcccaatcaaatctattattgatcggcttgaggctcgcaagattgagctcttggcacagcttgaagaacgcaatgtcgagctggatataaaacataaaaagctggccgatctcccaaaatccggtgaagaacagaagtcacgattaaaatcggctatcaagaatgttgctgagctgaccaagtctttgaaaatcatccctggaaccgatgctcaagacgcccaagccatttgagaagtagaacagattaggcaaagggcaatatcggctatccagcactatntgtctcagtgactctttgtataataggtcttagaaatttttgaattggctaagatactccagtactttactgtcttggacatcatctgtgccaattaatataacttctagattggctaaaaattttcatttggtttgatatat

SEQ ID NO: 14820 - DNA, 464 bp, Oryza sativa
ttctggccctggagtacataccggatgagattgtctgtatccaccccctgacgaaggagtgtagctgcctggtgaagataccggtgagaaagccattcctccaacatacggggagaactgagcatctgctgcagtgggggaagccctgatgtctggactcagcaagtaacttggcgacatcatcccttgatgatatggtgtcccaaagatgggcgagcatgctgatgtcatcatgccaaagtccaggcctttaacatagcttgggagttgaagctcgatggcctgcttcagcatctgatcgttcagatacagatcacagcctcctgtacctataagagcaagctggccaagcataatgttctcgctgacacctctcagggggtcagattcagcatatacagcagcatcaagcaagatgtccacagtctcttcaaaagaacatctcataagaggccctgtgtcat

SEQ ID NO: 14821 - DNA, 209 bp, Oryza sativa
  unsure (1)..(209): unsure at all n locations
agctnggcatacaaaagatgattccgctacttttttatctccagacggagaaggggctgatggtcttcctctgaatgtgggnatatcagaatgttttcgatgaaaaccacaacgaacgtattcgcgtattccacgaacactatgttcatcaagatcatgacaaaggcatgagcattggtctatccgaacgacataaacgcgaatacata

SEQ ID NO: 14822 - DNA, 424 bp, Oryza sativa
tgtataagtataatagatagatgtgcagagcttctacatacattgtaggacgcgtcgtttgttttggacgcgaaagagtatgcgacttatgttcataaatatatatgtttacatgcacagattaacagcgcagcgttttagggacttcgtatttatgtacactgtaaggcatcacatatatcacagattcacagcgaaataactatacttatatatattcatcatacagaatataaagagatgtgaaatgtcaaatctagtactacttgcgcacataatatatgtctccggatattaatcacagctgctctactggtctacagaggtatatatactggtatctatcagaccatcactagtgttatgcctggagaaatgattatattgagctacagcattatctcattacacactagcttgggta

SEQ ID NO: 14823 - DNA, 267 bp, Oryza sativa
tgatggatgcccgaacgcactgcactatgaatcatatcatatgtacgcagactgtgaaatcaccatgcgtgctctgaaggaacactcgttatttctttgatatgtacgacaacacttagataagcttctctcgaccaagcatgcatacgttattcttgacgactagagcattgaactatgcttatagccgatcattgaagcagagatatatgccaaggggtcatgtcacatgcaccatcagtattactggcctaactcactggcttg

SEQ ID NO: 14824 - DNA, 421 bp, Oryza sativa
agctttgaaggcaacaaccagtgaccgttgtttgtgttatcggggagattgtcgcgaccgggaaaaatgtctcttcccgaacgctagtgtattaatccccgtcccaggaaaagccggggtacaccatacaaacatgatataaaagacacatctttattacatcgataatatttacattattacaaaggcgcttcatgccggacaatcaaaaataaacagcagcggactagcgggcctacggctccatcttcacaggcgctcaactggggtataagccaggactccacctaagacatcttctccaacgcttctcttactgaagaggggaaagaattgagcagaatgagtacaaccacagtactcagcaggccacaccggagatgcacaattaatgcacaggagtacaacgggataataatat

SEQ ID NO: 14825 - DNA, 483 bp, Oryza sativa
  unsure (1)..(483): unsure at all n locations
taaataatattaatagtgtggactaatgttatgagattgtctactattaaaatctaaaaaggtagattaaaggtcctagagttataaagaaatgagtatgtctcatggtttcagtggatatctgtatccatcgaaagcctcgacaccatattcgtattcatatccaggaaaatatatctgtattcatatctgtatccggactatccgataattatccactctgaacggtatcagtattcttttcccccatagcagatggaaattatccgcttcgtttcatccctacccatgatttgcatcaagagtaaattacactagcggtacacaaactttagatggatgtaatgtagtacatgaactagtaaaacactcattttggtacatgaacttgccaggtccatgtgaaccaaggccaaagaacacacaaacaagactaatcctgctaatttaagtgtngattaggactgtacattaacatgtaag

SEQ ID NO: 14826 - DNA, 436 bp, Oryza sativa
  unsure (1)..(436): unsure at all n locations
ntagatttcgtcgcacatacgatgctatggntttatcagtcactggcgcaagtgaatcaagtgtagctagtagcttagctaggttggttgttgcacaggctgcagctgctttgttgcgtgcaacctggtggaccatgctagctagtgtgcatataatgcaatacaaccagcaacagatgcaaggctccaacgttgcattgctgcatgtatgtatgtatggacggtacgtgggcctgtcacatcggcagcatgcgtgcaatgtacaccggcaaccagccggcaatggcacgtccggttgggatgcacgctcacgcccgcaaaacctccttttcttttctcccaattacacgaaaggcacatagtacacgtgcataaaacatacccgtaaatgtgtacttttaatggaataatgttggtaagacccgctaaataatga

SEQ ID NO: 14827 - DNA, 417 bp, Oryza sativa
agcttacagggttggagacagcggtcgcctgcattgactctatccttgctgctcttgtgaggcattttgatgctctcaatgctggaggcaatggtgggggtaatgacgatgatattgacggagagtacgtcgaggataatttagaggatgaatatattgctgacactgaacaagatgatcgagatgctcaagatcgtcgacggctacacaacaatcgacgaggtatgggtggtcaccgccgacgccaggtacgcaacaatgatgatgctttttctaaaattaaatttaagattccttcttttgatggaaaatatgatcctgatgcgtacctctcttgggagatttgctgtgaccaaaaatttgcatgccatgagtttcctgagaacactagagttagagctgctacgagtgagttca

SEQ ID NO: 14828 - DNA, 458 bp, Oryza sativa
  unsure (1)..(458): unsure at all n locations
ngagctgaagaggctctggcgtactttactgtatattataatatgttgagagtaaggtagaagaagtcgtaggaattccgaagttgtcggtaatcctctcttatctcttgtactttgtttataactctgctttgatagaaatatcattctgagtaattaaggtttgcttagtgagaattacttcttgtttagttgctaattagcatacgggatcattgttcactatagtctatttatttatagtgattgctttagtgtttgatcggcactagagtagttattaattgcgtagacgcggtgtctgggtaattaatctccagtggttactgcgtatcccaaagtacgtttgaggtgggtgtagaggtggtgacagccctcaagagcacttaagtcctccctatccgggtatgtagtagagcgacatctgggaacagcgggttgccagtgcctgaagtatt

SEQ ID NO: 14829 - DNA, 432 bp, Oryza sativa
  unsure (1)..(432): unsure at all n locations
tcgctgcaatatattcaaaagagtaatagattcaacagtgtgttggacaaaaccaattttatgtattcacttaattttgtcaggaatataaatagggatgacaattgggcatggcgggcatcaatagtgaatacccatacccaagcttaattttgtccccgggaatattcattaccccacatgcatgaaaccttggtcagcccatccagatggtgtctgccatccagaatggaacataattattgaatattagtgcagcacacaggatggatcattcctttaaaattagctcagaatttagtgttgttttcaaactcagagaatngactaatggcaactcctaaagtggactgcacattcttaaaccatnctgannatnttatttgatcctggatgctgagatgtcaaacaactctagaagtagtacctgca

SEQ ID NO: 14830 - DNA, 443 bp, Oryza sativa
  unsure (1)..(443): unsure at all n locations
tcggagaagatgtcttaggtggagtctggcttatcttttttgatcgcctgcgaagatggagccgtaggcccgctagtccgctgctggttatttttgattgtcaagcctgaagtgcctttgtaataatgtaaatattatcgatataataaagatgtgccttttatatcatgtttgtttggagtaccccggcttttactgagacggcgattaatacactagcattctggaaaaggcaattttctcggtcgcggcagctgttgacatttggaccgtaaaggagttttctggttacagccgagtgtacgtgaacctacagggtcgcacgctcaatgggccagaataaggggattggatggagatccaatatgagcttaattcggatagggatccgagtgggagtcctacnggtcttggaggcccgagcgatacattctatatattca

SEQ ID NO: 14831 - DNA, 495 bp, Oryza sativa
  unsure (1)..(495): unsure at all n locations
agctntagctataccaattcataaatatatccagttttactccctttctttccttttctttcttttttaaaaagaaaaatagaatggagcaagtacaagcatgcacctatcgatatgtatataacttgcttcctgttcagtatcatatcgatcagctagttttatactatctcacactcactcacagtactataattcatcgagtcatacttatttaaaattagntcttaatattttagtcagaacanattaattagagggcactgtatgattaagtaaagcaaacatagggcatcaacaaaggctaatcttacgctatttggtccattcatatgattgcaaacggcgcgaataaaaattattccctgatgcgaacaataattattgacaaatatagtggaactgaagataaaacgatcgatcagctanggtagtgttcgtcttctccggaataattaatacctcgtttcattntttttntanaaaatatcactt

SEQ ID NO: 14832 - DNA, 471 bp, Oryza sativa
  unsure (1)..(471): unsure at all n locations
tcacttacttgccatgtctgattggcttaacctgaattttatgtgagcccggtccttaaaaggatgtataacaaccaaggagggaaaaaaaatcatgaaattattccatagcacgtctgatgtaaattaagtacacctacctgatagattcctaaaattttggcaagacaagtttggctcccagtgtcgagagaatgatacacatgcttaaagtaatcgggtgcgaattctatgaaggattcaaactctgtcttctttatttgcttgatgatgaacctgtcatccaatgtttttgcaaagaaagccttactttntccaccttgagcatcccacttcatgcaccggctcaaggaagtgatatatgcaagctcagatgggcagcatttcttccgaagggtgtaaaactgattggcatgtacacaaataaccgagtatttccctttgagagatgattttctattgacagatact

SEQ ID NO: 14833 - DNA, 326 bp, Oryza sativa
  unsure (1)..(326): unsure at all n locations
acctgagctgcaagcttgttcttctccaccacgacgactacttgttgtctatatcttgggctgccacaccaaatatgaggccttattattttactacaacacagtggtgttccaatcttcaatatttctactcggacattctcaacacatatcttcactcaaaccatgactactcgaccacaagaagctacagttctccactctatgttcagctgtttaccaactaaccacaaagtcangggctacaccaatacaagacatctaaaatttgacagatgttatctcaacatgaaacaatcaattaaccacccaatgagtcattttct

SEQ ID NO: 14834 - DNA, 460 bp, Oryza sativa
  unsure (1)..(460): unsure at all n locations
taacatgcaagtgtaccacatcatcatccactagcaattattatctagagtattttaaatcatatgcaagtataccacatcatcacccactaacaattattatctatagtattttaaatatcatgcaaacatgacatatcatttacaattttattgtatttttagaactcaatatgcaagcaatgtcaaatcattatctctacattgttttcacattatttaaagatatatgtctaccatttccatgatgtataacatgcattaatccacatatcccacagcaaagagcggggtatcaactatagtaaaattaatgctaaaggcttgcttggaaggcttgttcttggcccaaaatggcgattaaatatgagcctaaaagtttttccatcttaaattcagaaacattgcttggatgtgccatgtaaccactaaatttagattgatcttangcccattcaac

SEQ ID NO: 14835 - DNA, 373 bp, Oryza sativa
  unsure (1)..(373): unsure at all n locations
agcntgaacaccatattgtgctggtttcnctggcttatgcttaantatatttacctgtgtgaatcggtgncaaaccttatgctggctaacatcgaaggagcacaagggagcaattacagaaccaagttggacaacatcggtgtcaaaattgcaggatcctaaatggaatttcccttttcacgtactggactaatttaaattttttgaagaaaaacattaatccgtctgaatttgtttctcatatataaattccagtatgaccacatcttgtcgacgggaagcactcttacatcgaaacagatgaatcattcaaacaaccaacacaaaaaaattacagatcgaacagtttcaattcgactcgacaacaatcgca

SEQ ID NO: 14836 - DNA, 464 bp, Oryza sativa
  unsure (1)..(464): unsure at all n locations
tgatgcgaccaatatagttccaacaacagctattagtttttatgtggagcttcatggaggccaacctgagtgttgccccctcagctttggcagcaaacacatatatacttaacaagtatctagtaagaaaatttattttctgctcaattgattagcaagtgaagagggcagatgctttcttggaagtttggtgttcaaatcctgagaagtccattctttttcttcagtttaattgcttactaaatcattttcctcctatggatgacaaacatttttatcttaataaaatagctctcttaaaacctgttaatttacaataactntgatatgttgtcttttataacttgagtgatccttttccacctgtttaacagctatacttaggtataacatatattttttcttaacaaaaacatgcttggaaattattttacaatatgaatagcccttctacagaatctact

SEQ ID NO: 14837 - DNA, 393 bp, Oryza sativa
  unsure (1)..(393): unsure at all n locations
agctntcacaaacgatcgagccgcaatgtcttcttctataagcgtgtggctcgcctctcctctttcatggaataactgatataagtaatggagtttttgacagagcaatagcgagattgccacacggtaagatgagatcgtactgtatattgatcagcaggaacaggcaggagcccaggactcggtagattctgtattcttgacctcatgcatcagtggatcagcaaaagccctacatatccttatccacaggaagctgtgtgcggtggtcctagtggagattccgagccgattgtcagcgagatgtttcactgctgctgcatgcccncgagcatcagccatttcagccccgggccagccaaacaacacccactcgagaatnntttaaaaaaa

SEQ ID NO: 14838 - DNA, 472 bp, Oryza sativa
  unsure (1)..(472): unsure at all n locations
tgtgaaaaatgaaccaattgaattgcaaacccaaatgttagctgatgaaataggaatatgcctgcatttgttgaagtgttttggttcaagtacggtttgtaaaatggttgtcttcttttgctgtcattgacatgtaaactagtaatactgtccacggtaaatagtgggcgtgcaattcttagcactctagcagcactgaaccaaacataatatctgatttctttttctatcattgntccttttggttagatagtatattttattgagagtaaggatttattataatttggttagcctgacttacatttactttggaaaaaatgccttgaagttatttacttgaattntatggataatacttttattatattgttttcaacttgttggagatcatgtcttacntaattgatcgttctgtctatttcttctacaggctataatgaattatgacaaggcagtccaggtaaattgg

SEQ ID NO: 14839 - DNA, 450 bp, Oryza sativa
  unsure (1)..(450): unsure at all n locations
agcttggactccggtctcctcctcctcctgggtagggtggaagggagaanaatgcagatgcagatgcagatgcagtcgaggtctcgcattcgcgggcgcgacccgcccccggcctcctcgggaggacgataccgncgacgatcgccctccccgcgccgncaccaccgtgctccccccttcaaccccaacccgcacagagacagacgcacccccgaccgtcctcgtcggcaccaccatgaggacaagtctccttctcatgtgcatctcgcacccccacccgacgccctactcaccggcgncgccgaccgccgctgccgcgctgacgtgcttctcgaggccggccgtctcgaccgccgctacctcgtccccagagcgtatccccgacaccgtctcgcgccaggggatctctgcctgtgcaggaacatacgttacgacccagggccgcggaat

SEQ ID NO: 14840 - DNA, 477 bp, Oryza sativa
  unsure (1)..(477): unsure at all n locations
taaccgcagntcacggatatgaatgcaatcagtgtaactactattcttaagctaataaacatagacaaagtatatcaatgtaacaacaaatcaagggatagacacggacaaaaagtgtccttgatgatgatgcccacttcattggcctgcctgcccattttgttttgtcactgtgttaattgatgcaaaagttgcaaacataaatttattttttcaaggatagtgtgagaccctgtgagtgcttgaatagattcttggaccctagcttcttgttcttttctggatagaagaatcagaggctactaattagtgtaccttctggttgagtagcatttacagtgctaattaagtagtgttcagctcaacaagaattagctcctggtattataacaggggttntagctggtaaaatttaatggaatggtccagcttgtgtccatttatggttcaagactgtttgcctggtttgatcatgac

SEQ ID NO: 14841 - DNA, 474 bp, Oryza sativa
  unsure (1)..(474): unsure at all n locations
agcttcacaatntcacacaagggatntagttggtagcatctctcacactcccttcgagcaaatatttgtttcaggtacttatctcatttaacttaataagntgcttgattattgggacttgggagcaactcacacactcccttcgagcaaatatttgtttcaggtacaatactgtcgatgattctattctacaagaaatgtgaattatggaccattatactaccttggtaaatatttttgttccagtttgaagctgaaaaagttatttccggttgttctgattaacgtggttcaaattgattcttagaanatgaaaagtcttcagtaggtcctggtattctgtaacatgtangttctaattgatgcttagaanatgtggatttgggaattttgtatagcgagcggactgtcatcaatattaacgaanaccctgtgcatattaaaactgcttntatatgctcatggtgtgttctt

SEQ ID NO: 14842 - DNA, 471 bp, Oryza sativa
ggacctataaaactcagcttgcaatggcacccgacgttcgacttcatttatctatgttgaactgcgtggccggatcaagatgcgttatctgcccgccacttgaaataactctgactgtgtctatccattgtaccaattgacattttcttacatcctcctatgcacatccattttgggatagttaagctaatgataggactgaggagtgatgaaaagaataattgtaattaccacgaaatcatcgtcgacaatgattggacacacgaaacacctctgtcctgcagttcggtgccttacagaccttatgacctgactacggtcaccacaacgactctccggacgctcacgccacatggtgagtcctatgggatttacgtgccactctatagcctcagcagcaatgcgacggtcatgctcatccttccaccttacgtagaccgatcttgtatactacgtgggtaagcacgggat

SEQ ID NO: 14843 - DNA, 243 bp, Oryza sativa
ctggggagggccgttggtatcccaaactgctcagccacagtccgacaagttggtaattgttgggtgaaccaaacaaagttgggtagaagccggtctaagtgttgctacgtaaaccctccgtataagagggtagtatgaacctgtggccaccccatggggcgggaaggaagcccattggtgaaaaacccacaccttgggtatctgccttgaagagactagaaagaaaatatggatgtttatctc

SEQ ID NO: 14844 - DNA, 452 bp, Oryza sativa
agcttagctagtacatcagtgatcttcaagtgttctagcattggacattgccttatcttcaactgctgtatagcatgggtataactcaacaagctctctaaatcttctgtggttatacatacaacggccaaatcaagagtcttcaagcttgttatgccactaaaagttggtaaaggcctcaaattcataaagcaaagcttaagatgctctatagaggttggctctggagcaacaacattagaggatggaaagctgtatttgacatcacgaggatgagcataccatcgcggacttaggtcaatagtcagttcatttgcaccagatcggactgcacagtaaatccaacggtcaatatagtgtgcgtacttgtgaatcgtgaggttgcgcttcaacgtgaatgaattaatccctagatccagcgcggtgccttatgatggtgtaacacacctgac

SEQ ID NO: 14845 - DNA, 460 bp, Oryza sativa
  unsure (1)..(460): unsure at all n locations
actcagcttggcttatacaactgcaggtacatccaccatccgccttcatgacacattcctgcacggcttgcttgcgatagataccacgcctgctcctatcaacacacattatttcataccgatgcacttgtgtgccttgagcaacaactctatgtctccgtgcctttntgattttatcttccatgtactttgtcactacgttgccaaacactatgttgttatcggccatggacggaccaattttcttgtatcgatccctaaagtaagcttgcgtgccgtgaaggatgaattcaacaatagcaaccaatggaagtacccgaactcctcgcattacccagttgtacacctctgccaaattggttgtcattatgccataccgagatccatcggtgtcgaacaatagagcccacttctccttatgctcattctcaatccactgagagaaatttctgatggccga

SEQ ID NO: 14846 - DNA, 470 bp, Oryza sativa
  unsure (1)..(470): unsure at all n locations
tgagaaggagacttcagccaagagggaccttgaaatggtatattgattattatcttggatgggtttcttattgaaaaatacagttgatattgtgagtttcttagttgatcttttggctttcatgctattcaagaagctacctacttaaagcaaaagcttgaaaagtgtgaatctgatctggagaatacaaggaaatctagtgaattgagcttcactccattggttgcagcagacccttgtgatctagcaggctcaccgatgaaagaaatgtattatttctgaaactttatacttttagtctagcgagatatctaaagcaggcgctattagcatagctaagtaacactttctagagagcattgttcaaggctttttgatattaattgtgttttgctcattaaagcttatcttattgaatgatgttaacttctggttgtgctgtacnncgtgtaacatgatattatctttgt

SEQ ID NO: 14847 - DNA, 392 bp, Oryza sativa
  unsure (1)..(392): unsure at all n locations
agcttangcctgatggtacaatcgaaaagtacatggctatgcttgtggccaagggttatacccaaaaggaaggcgaggatttcttcgacacatattcaccagttgctcgcttgactacgattcgagtactacttgctctggcagcctctcatggtcttctcgtccatcagatggacgttaagacagctttcctaaacggagagctggaggaggagatctatatggatcaaccagacgggtatgtactagaaggtcangagggaatggtgtgtaaactattgaaatccttgtatggcctcaagcaagcacctaagcaatggcatgagaagtttgacaccacgcttacagctgcangcttttgtgtgaacgaagctgacanatgtgtatactat

SEQ ID NO: 14848 - DNA, 332 bp, Oryza sativa
tgcgcgacactgtagaatgctcatgcctgagattaactctgagaggctctcttagactatacagtgtactctactctggcgagagctgagtgcagagactcgaacaactgccggactatgtcgagaatgttctacacagcgtttattgcatctattactctgactacaagatcagattcctctcggagacttgagaattatcttgagagaattatctctggcgggatagctaaacaacatacgcgattatagatcgctatcatgcactaaaatatagagaacgctgtggcgagctatagacactgaactatatatgaactgcttatacgtgg

SEQ ID NO: 14849 - DNA, 464 bp, Oryza sativa
  unsure (1)..(464): unsure at all n locations
tcctttagtagatcaatttccttaaccgaatatagcatgaatccgacaactgacgacttgacaactctcatcggctaatctcaggacttcgaagccgatgctgactctaagccgatgactacttcgggcttgccaaatttcactgttaacacattggtaagtggtactaagcagtaacacatctcattgatgttccttatctcaggtagccctattatgctctacttcctcgtcaatgttgtccctcttacgctacctatgcacctcaatctgctgtttttttcccaaaccacatcactgccatttactacctccgttacgtaaaaaaccaacataatactggtgtgacacaccctagtactataaatctgaacaaatatctgtccagattcatagtagtagtactagaatatgtcacatccggtattagattcactttntatgggacagagggagtatatatc

SEQ ID NO: 14850 - DNA, 434 bp, Oryza sativa
  unsure (1)..(434): unsure at all n locations
agctntccncagccccttttcatcaatggactcctgacgtctactaaggagtgtggttcgttcgacaaattcctacctctatatctatctctgaggtgtttgggttntgcaaaactccatagatatgcagaagagaaatgctatccccactccgaccaagacagaacttttaccaaaagtttattgtgatctttttgttcaaataacaattaaggtgaagcagggtcaggaacaacgaatctctttatgataaacagatcccatttgcaagctcgttattacgggtagttcctacaaagaatcggactaatgacgtatacaatgcttgaattatcgacgtagatgctacatagtgggttctcatncttcagagactacgagtgtaataggagcatcccgtgacannaggatcaccctaagatgatcatctcatg

SEQ ID NO: 14851 - DNA, 400 bp, Oryza sativa
  unsure (1)..(400): unsure at all n locations
cgtcgagctgctgcatgaggcgacgtcgattcttttttttgttgcaaggaagagaagatgcgacgtctacatgaatgacaaaacgacaagccatcttatncttagagtgacctgtgagttcttcaccttgcttgctcagctggttagagctgcgtgctaatgacgtgataaaaatgtagatagtgaatagcgaaatagatgtcatttctcattgatctcaaggtccatttagtgtaatacatcaatcctcattctaaatgtatcaataaggatgattcattccctgtcaataatgtgagttgatcgctctaaacatggtgtgtaaaaaggattcatacacctgatgggtgcattgacaaggtcaaatcatgcgctctcgtaaaaaccttaatagactcat

SEQ ID NO: 14852 - DNA, 464 bp, Oryza sativa
  unsure (1)..(464): unsure at all n locations
agcttcatcctcctttctcacattgcatgaattattgtatatgggaaaattaatttctacttgacacagatttatacaaagttacttctaaactatcaaaagttacttcccactaacattaaagttacttttaaaaattattaaacttacttctaaagacctaaaactctgcaccgntcttataaatgattagttttattagttactccatcaatggtatgtacaatccatcatagggttgaatatctttgctgatactgcataaagaaaataacaaatgaatcaatataaaaagttacttctgaactatgtaaaagttacttcttagtaacaattatgttacttttaaaaattactaaacttacttctaaagcccaaagacttcagatgttatacacgattagttctcattagttaccctactaatattatgtacaatccatcacagacttcacctctctttc

SEQ ID NO: 14853 - DNA, 458 bp, Oryza sativa
tgagttgcctccaagagctaacacaaggtaagcatgcttatgttgggtgtagcttgcttccttgaaattgttatttgctggatttcgctcttgttttagactatagctttctggacttgttccactatattatgttcccattttcctatttaatgtattttctgtaaagtttattgagctttctgttatgcttttgacccagtgagtatatctcatatcaccatgatatatatatccaatgatgtatatatccatgtctaagggttatctcaatatttttttctgaaagaaaatcggtagttctgccttatcaattaagggggagaaagatagggacgactacagagttcagtttacaagttttgcaaagaagaaaaccaactaatactaactgttaacaaactaccctaattaaaaggaacggatgagaaggttctctggcacacatctgtttgaca

SEQ ID NO: 14854 - DNA, 462 bp, Oryza sativa
  unsure (1)..(462): unsure at all n locations
agcttaatatacttagatgcaataagatcttgatatatagggcagatttaacatgtcaataaaacacataaagcaaatgtagttaaatcaggtaagattggctaaaaccccgatgctaccctaatcggcaaccagaaggcaggctagagttgatattctaagcacgacttaatagatcaaactcaattgatgcagcattaagtatgaaaagaagaacaatatctagacaatcaagccgctagaagtttcatagagtggtagatatcttatataatctaaatcaacgtcgatgtctaacctaatcgggtgtcctctactgaaagatgttagccgattgtaggttagatagcgatattgccagagattatgtaagatatatgataactcgacgaattacataaacaagattagagtgtcatanaaatggaagcactaatcccgagaacgcangccgtcataaca

SEQ ID NO: 14855 - DNA, 467 bp, Oryza sativa
  unsure (1)..(467): unsure at all n locations
ntctttcgtgagctagctatgattgcttcctcttttcctctctgtttcggatgtcaacccaatctctgattcaagtccataagttcctttnttatagctcctgttgctcttctctggctaagatctcacttatatggccttttttttcttttatatattatatagtaagcttcaatagatagcgtagtaggtgctgtctctatttactntctttcttacgcctaggtgctaccttctttccagttccgtaagtcccatagagttattttttatctttgattcccaaacgctgcgcgcaagtcaagcttacagaattcctgccggggcgccttctttcttatgccagccaagtagcaatcagaaaaccaatcaatcttccttacactacgacaattcacttgaactaccaacatcatgagtgacccangccgggccgatatgcgtcatttctcctcatccttgtctct

SEQ ID NO: 14856 - DNA, 385 bp, Oryza sativa
  unsure (1)..(385): unsure at all n locations
agcttatctngtctacacttgacatgtttcaatcttactactagatcgcgttntgaaaggttgctcaattgattcatgccaacatgggctatgcttctatgccagagccaacccagagaagtttttgcaactagacaagatgtggagaattgcttcactagaattgaaaccaacccaattaagaattccatatctaacacctttgaacacataagactcgtcgagaaggctagaaacaataactgcttgcgggaagaaagcacatgacaagccatgatcactaatctgagcaatcgagagcaaatcgtaatttagagaattaacacgagagacattatcaattgacaaatcattggagatagcaatgttacctaacgcaattacc

SEQ ID NO: 14857 - DNA, 466 bp, Oryza sativa
  unsure (1)..(466): unsure at all n locations
tctgaagtgcaaaaagtgtagatatcaccatatatgttgttctgaaattgtgtggctctcacgcttttggatcaacttgggatgtcagcaaaagtatgacaccgaaagttactgcagacaaagattgattggtggcaactatggcctgctaaacaaagaaacattccaaccaaatcctgactattacaggtaactgatattcttgggctgttcttcagtangtaaaaggcaactttcatatgaacaatttcctttgtatgatagtgcaaacaaagaatttgatgcctctagcaaaagtttagaattatccttacacttggaaactagaagtagctacttaatggccaagataagaattggttccattgcatataatcctgcagaatcaagtgccaaacttgttgctttcatgacatttctccttacttttataaccctgcagcgctctactatggcatcgcctcat

SEQ ID NO: 14858 - DNA, 494 bp, Oryza sativa
  unsure (1)..(494): unsure at all n locations
agcttactgaggagttagattctatatatactgtccttcttgaagaagcctcanagatcataaaggcattaaacaaagcactagataactttgagatgacacagcttctttctggaccttatgacaaggaaggtgctgtgattaatattactgcaggtgctggtggcaccgatgcccaggtatgctttcactaattctcatgcttccttcttagctcacaatgtangaaagatgaattttgtcttagttntctaggatcttatgactngttcatttagtcttggtgtgcttgtagaaaatttagcttttattattgtcgatattatacttctagtaccaaatatgtaccactgtcataactntntcatacatgtcctatntctatctgttactggaaaagacgacctaacatcagctagaaaactagtgcaaatgtgaatgtatgatatgataatgaccttctttgatgatataatccatagtgacataactgg

SEQ ID NO: 14859 - DNA, 399 bp, Oryza sativa
  unsure (1)..(399): unsure at all n locations
tatctcttacgctccaggaatggatcattcttaacatcaccaccggctcgccgtcgtcgccgccgactggagtcttcacctatacggctggttggaaacaccaccgttgttgggcgtctacgtctttaccgactggccgcttcgtccaccgccgactggtgtcttcgcctatacggntggttggttacaccaccgctgttgggcgtctacgtcttcaccgaccggcttgccttcgtcgccgccgactggtgtctccgcctgcacggctggcctattatgccaccgttgttgggcgtctacgtcttcactgaccggccgcctcgtccgccgccgactggtgtttccgcctgcacggctggcctattatgccgccgttgttgggcgtctacgtcttcaccg

SEQ ID NO: 14860 - DNA, 356 bp, Oryza sativa
agcttgatctgtgcatcaactattattatcactctgttgcacactgttggaactgggactcaacactactccaatacgttgatatttcatcgaacaacttgtatgatcaggcttgcgatgcgataagacacatgtgcatccctcagagtcactaattcttctgataacgctcacatgggcattgtggaaccagagttgatgacgaaactatgcagtgtggacaatcataacctccatgggagcctctcctatgggaacatgacagttgctcgatctgctgtgctattgctccaactattaagtgagctgattttgcacacaattgtatcagcggaactctgacacctgagatattt

SEQ ID NO: 14861 - DNA, 258 bp, Oryza sativa
ctgaccaacgactacctgagacgatctgttacatatttcgtcagtgatgggagcaatctgtctcgtcttattctattgggcggcaaattaactggctatctgctattgaccatcagaaggatgacacacatagctaactgggagctgtatggcaaagccttcattggcgcgctgccaagcgcgcttggaaacatgaccgaattgtgagaactaaatctagccactgtcactttgtatgagcgcttaccactgccatat

SEQ ID NO: 14862 - DNA, 286 bp, Oryza sativa
  unsure (1)..(286): unsure at all n locations
agctnggccaagggcggcaaggtgtgcntacgctttgcaattgtcgagtttgatgagcaatcatccccaaggagaggttgtaccatgaaaagggtttcattcagtttctctggtgaagaaatttcagttacttctgagaaatcattgcacaggcctactgcatttgctgaactacctaacacaagggaatcatctgcggaagaaggaaagcaagaagtcggttgcgtggttcaaaaggctcggagcaagggggaagatgtttcacaagaacaagctgatgggctat

SEQ ID NO: 14863 - DNA, 477 bp, Oryza sativa
  unsure (1)..(477): unsure at all n locations
ntcgaaacgttagtgcgatgttatcttcatatgaagaattctttgaattaagcatggaatatgaactaacaccatgaagcaagcaatgagactctnttattcacatacaaaaatattctttccagggaatgcacacacaaaaaagaatttcagaacaatccattagtcacgattgcaatccaaatgttggctaagcataatcatgaatctttatgactgatggacgtcctctagtgataacagccaggaccgctccgtttatcttatttttcgtaattatttctgactcataaaaactggcacgtgaaagactactttgaaaaaaacttctaatgtatatccacagctcttcatgtatatacaaaatctcgaacataccctcataccttacatcagttacgattcattgtattttctatagtactactataaaagacgatagtggtgatggaactntgccaccgactcactgcacta

SEQ ID NO: 14864 - DNA, 456 bp, Oryza sativa
  unsure (1)..(456): unsure at all n locations
ttgcaattataaagcatgtgtaagcgctagcctggaattgactttgtttgctgccccgtgacatgcggaccccacacgtttacctataggaccgcggtagacctggtacaccgaaacggttcacgggtcgacggaagcggaccccgtgtgtcaaccgaggcgagtggtcgacaaacggacttcactatacaccacacgggttgcacacgtggaaaccacgcggctaccgagcggacacactaacacggacactacacggtcaccacccgcacacgtgaacgactaccgacaccggtacacgggtaccggggtcgactgccgcacaacgggtactgtgcgacactcgaaggacgagggcggtgaagcgagaggactganaccttaccaccactcgacgaggcgtgggaacgacaacgacgaacgggcgcggtggagacaaactggcacaacggagac

SEQ ID NO: 14865 - DNA, 366 bp, Oryza sativa
  unsure (1)..(366): unsure at all n locations
gcttggatgtttcttccttgatgaatgccaacttgaaggatacatgggctgattgcagctgagaaaatctccgtggacgattggtatatttcgtggttgatgtcttcgaatctgaagtcagtgggtgctcagttctgcagaatcttcataaaggaacgaaactcgagcctctttttgaaagccttcatagaagctgcagaaccaatctttgagcagttcagccgatagttntgccccggcatcagttggtgtagaagcgtattctccgtatgatgtgcatctncgatgagtacgctcttctncatcatcccctacaatcggctctagtcttgggaactcagcttctgataccgatggccgatctac

SEQ ID NO: 14866 - DNA, 475 bp, Oryza sativa
tatacacaatctagatgtgatgcacatcgaaaagaatatctgtgataacctacttggtacccttcttggcatacatgggaagtcaaaagacaatggtaatgcgaggctcgatcttgctgatttgaatattaaaccagaattgcagttgcagccaaatggagatgattatcacatgcctgaagctacatacacattgtctagggaaaacaagattaaattctgtaaatttctgaaagaaacaaagttaccagatagctatgctgcatatatcgaaagatgcataactgcagagggaaccagcttgcatgggcttaaaactcatgactgccacattctgttgcaaatgatattacctgctggtatgagacgtattctggatgatgatatatgtttagtgattgcccagcttgtgaaattttttatggaatagtgcttctcaacactcaacaaagatatcttggttcgaatgaagaca

SEQ ID NO: 14867 - DNA, 509 bp, Oryza sativa
  unsure (1)..(509): unsure at all n locations
accttgagtcacctgcggcatgcaagctntgaatattttttatgtaattntggtaattttatgtatataaatttatttcatggtttttttaattgttttaattntaaatatgtgcttcaaccttttatatacgaaaaaaaacatttcagttaaaattatttcagccaactgaaatctagacactcccaatcttagttaaaattattttcaatttgtgtagtcacttttcttcggctttgtctagaccagcaaaagatggttaaaaaaataaaagcaaaaacaaatacatgttttttttttgaacaaacatcaccatataggttgcaaattagagaggccaaatgtgtcttttccccttacatancttgtacggcgtgaacctaaatgttcatagtcttatcaacatattntccaactntgaccactagtccttgatattttctgaaacacaatcaaatataccaaccaaaccacctactacttctactggatatattaatacaaaacta

SEQ ID NO: 14868 - DNA, 468 bp, Oryza sativa
  unsure (1)..(468): unsure at all n locations
tgcatacttctctctcccttatgtatatataatttttttaagacttgcgagtacaatcttgtacttaacccggtgtctgcaatttcaggagaggattccggttatgagttatgcttcttgtgtggtcattgctctgctgagggtggcgagggcaatgagtgatctcttgcagcttggctcttgcccggttggtttgccctagtggggttgtggcaccaccgattttatcttttgcctatgaactctaattgagacttctgctgctatatttatgtgttgnatgttgggatcttggaccctattatgtgtcatgtacctgctgcactttaaccctattatggtacttgctatgtttattaattgcttgcgatgaaagtgtgaggctagtcgcattcctacggactagctaagcatgagtaacggggtttgatcgcttgagataatcggcgatagtgccttggatcgagt

SEQ ID NO: 14869 - DNA, 483 bp, Oryza sativa
  unsure (1)..(483): unsure at all n locations
agcttctaagagataagacaatatacttcatatattctctataaaaggcaaaacattcaacgcttaatcctccattaatttcatgggtccttctatcttggccattggatgatttcaatcgctttacatatgtatacgcacatgatagctaggccaccatattgaagaaaaaaaatcaaagcatgttatcttgtagaaaatcaaatcacttaaggtgtcaagtggggttatagtgattgttgcagggtgaccgtgttatatccaggattattagcaccgagtcgtacgagaatgccaaccatccaatcacaacactaaaagaacctagtatgagttacaaagagccacaacaacaagccaacaaggaaaggccatgataattaaattataatgatagaacgttctttaactgccatatatgtgcattattacttatatcacatcatttanaattaacatgcacacaatgatagcctagtaaat

SEQ ID NO: 14870 - DNA, 390 bp, Oryza sativa
tgacacagccagtgatgggagctaaattatttctaatctccaaggcgataatccaacgaatcgtagcctcgagggggtatctgaatctccaaccacttcaattcaacgcgtcggcatcgacatcttcgtgtagaggcgacctcacctacgcgcgcggcgcgcccctggccatgcagacgataaggtggtcgtcgacgcccgcgtcgctctgtttcttcttgctcatgtctctccttgtccatagctcgcatggcgcacgcccgtctccacgcgagcttcagggatggtttgcggcggcggcgggatcatcgtccgcggagaagcagttggtggatccacggatcatcgccgctggcgcagcaggccgtgtcgcggatgtcgtctcggcgc

SEQ ID NO: 14871 - DNA, 483 bp, Oryza sativa
  unsure (1)..(483): unsure at all n locations
agcttaacaatagcttcgttagagtggttttattttctcaagntacaacagntccatgtaccggattggagggcgatacagtctaaacatgtnggcataggatggattttagtttctggatccttggatcttggatgattaaatctatactcaatcccattacactccagtaagtcctattgtttgcataggatggctaaaactcataaattgatttcctttgtccaagaaaaggattattcaacttggaaccgcttaagaaagtattattaaattggaatcaacatgcccatgctgtgactttcatgctcactgtatncattgattgtaatctgcatactgatacaagttgatcatactggtgtgcattgcgtncanatgtccaattgaatcacacaatttgatgtggtggctcatctcgtcgattctcttgtattcttacttggcatatacggctatacggtgatgatttcttgaattatc

SEQ ID NO: 14872 - DNA, 487 bp, Oryza sativa
  unsure (1)..(487): unsure at all n locations
ggacattaaaactcagctttatcttttccatcacgatcaaagctgatatgattctttgtattacacatgaatatcagatgttaaaggacagtcctacaattgaatatcaaaccttttgtacagatacttgaattcaacagcaacaaatgcagtgtttttggtgcgccaaaacacattattggcaatcatatgcaaatagggggaccaatacggtggaagcatttcatagtaattatgattactaaaatgtccaataattcaagtgtgctcaaccaggtcaaagaaatatcaagtattatagcaccaaaagtccaaaactacgaagcagagaactgcatgatactgctgtactaatttgtgagttgtgaatttgtgactnttggctaattacgagagcaaatgctatgaggccttaaaatatccagtgtgggtgctatacccggactaatggcatcactagatgaacacatagcacctcagtttgtaa

SEQ ID NO: 14873 - DNA, 408 bp, Oryza sativa
  unsure (1)..(408): unsure at all n locations
agcttctgtataactcttgacctaagcgaaatatctttttgtatctcaattggtgaatatctttctctggtgcaggaaagctcaaagatctggggaattctgtgctcgggcgctttgggatgagcgtcgacaatttcaaagctgttaaagacccaaacacaggctcgtactccatttcgttccagcagtgacgacatggggtagtaacgagttgtttaaatgaatatggacaagtacacatgcagtcactggaaatcctggaatgctaatgtcatttggttcaaaaactttggcccttttgtatcaataggtntgttaccatcgcccgcagttaaatctgaagatggtgcatggacgtttgcagttatgttctgagagacgtggtttagatgagtgaactcgtattat

SEQ ID NO: 14874 - DNA, 472 bp, Oryza sativa
  unsure (1)..(472): unsure at all n locations
aagcttataagagttngtgccgcaacctcccccagcttcttgtctttctcgcatacggcaagctccaagcaaagagcaccagccataggcattgggcttgatgggcatctcagatatgaacttatatgcttcatctaagctcccagctcgaccatacgtatcaatgatacaggaatagtgctcctctttaggctcaataccatgggctatcttcatagagtagaaatacttgagtccttcatccactaatccagcatgactgcatgctgcgagcaggctgacaaatgcaatgtgatctggcctgataccactatagatcatcctatcgaaagcttggattgcttcccttccatgaccatgttgagcgaatacattgaataccgcattccaagcaatatctgctctggattctatctcattaaataactgcatggacaaacttataaggccacactttccatacatatacact

SEQ ID NO: 14875 - DNA, 439 bp, Oryza sativa
  unsure (1)..(439): unsure at all n locations
agcttctncatgtgtttctcatttatattacctctgcgacaatgccaaataaaagtgggattcaaatcattagaccgtgcctttttgcattaatgttatagactaaacattcatcaagattcacaatgtataagccattcatcatgggtgcatggaaatagaaaatgtcattataatagactgaacaaccattgtccacagatctaaaaccataaccctcttcttgcaaacaagaagcagagataacgttcttacacaaagctggaatgcaataacaattatttaattccaaaactaatcctgacggtaaagataatggcatagtgccgaccgcaatagcagcaactcttgctccattgcccacgcgaatgtccacttcgcctcttgctagctcctacttcttttcagccctgcaacgaattgatatgtgagcaactga

SEQ ID NO: 14876 - DNA, 476 bp, Oryza sativa
  unsure (1)..(476): unsure at all n locations
taaggagttagtangggataactttatagtaagatatgatttttgtaaaatgttagccttagagtgctctctggccgatggatcaagggtgtcttcaagctcaagacgaagagagcgttggattaagggtgtcttcaagctcaagacgaagagagtgaggaagcggggtacttaactacgatggcgactttccaataatggcggtaacaacggtgaactactcttcacaacggtgatggttggttgtgatggtaagttatagattagattttatgatgggaagggaagttaggaagagggggggagcttttccgggcttagagagatggtcatgtgagtggntggatcgacagtgagctataacaactggtgggtagtgaggctgcggngtggtgttggagatgtggtgatggaagataacaatgatggggctgtcatcggggcagagtgtggtggcacataaggtcttgctttgg

SEQ ID NO: 14877 - DNA, 484 bp, Oryza sativa
  unsure (1)..(484): unsure at all n locations
gctngatcagctatctgaaggcccgatcaagttctatattgatcggctcgaggctcggaagaatgagctcttggcactacttcaagaatgtaacgctgagctgtctttggagcaacaaaaattggctaacctaccaaaggctattgaagagcagaagttgaggctgaaatcggctatcaggaatattgccgatatgactaagtccctcaaagtcatccctggaaccgatgctcaagacgcccaagccatagaagaagtaaagcanattaggcaaagggctatatcggctattcagtaatatttgtctcaatgactatccatgtaatagggcttagaaaattcttgtaattggctaagaatatttggtacttcaccaactaagtaactgctttgataatcctttatngccgataacataacttctgannattgcctcaaaattcanaaatatcccactntgtatatatatatgccccccctaatt

SEQ ID NO: 14878 - DNA, 387 bp, Oryza sativa
actctgaggaactgaagctagctagcacacacatcgagatggacttctccttggatataagtgatgcatgcatgcatgcatagcctgacatgtacgtatagctggctggcttggctagcgaccgatgcaatgctgtgcgcgcgcagtagtacgtcgggctgtacctgcacgtggtcagtgctagtatgcacgcaatgatcatgcatgtgtatagacacatgcattgtgtactagtccatgcatatggagcaacgcaccgtttgctgccatgaaatgaaagcgcgagatatatatctaaacaatctcagccaatattctgctactaacctgatgcaatcataggtatatatatataaacgtacgatatgttcatcatttattctgaac

SEQ ID NO: 14879 - DNA, 493 bp, Oryza sativa
  unsure (1)..(493): unsure at all n locations
agcttgaatcaacaatcaaaattcatgttttcatatgatttataatgcaacatcttaacaagcacatatgttgaagaataaacactaaacacatatacctattgcatttatcactctttctcaaataacctttagcacaaaataaccaagagaatttttttaaccttttcttttcttgagcctttttgctcatatttttctcttttattacgggtacgtccctatcgtcaagactgtttccagngattcngctccaattattttgctcacatcgaatacgtcctcgtcgtcaagaccgtttccaaggattcggtattcattnttttcatattntntattctctttntcacaatgagcaattaaagctatttgaggaataacaattcaataaagcatatatatagagcatttataaatcaaaccatatgctagcatcaacattgcatantttcttaattcaagtagaaattaaatgtcatgcatcatctccctt

SEQ ID NO: 14880 - DNA, 496 bp, Oryza sativa
  unsure (1)..(496): unsure at all n locations
agcttgctgtagattcagaatcaattttctgtgtatcaactntcttgtacggcttgtttcagcactggtttacacggattagcaagttattatactgaacgagtatccttttaagggactgtgggtcttcctagttgttctcccaagtttggagaatatgtactctttttccagttgtcccatcaccgcccccccccccccccccaagattgtttctctctaaactgtnttgcatgtttgtttactttttctaatatattcaacaagtcttttgccacttttcgtttcaaaaaaaaaatatattgaccgagtaatttgtaangttgtatacccatttacacccactatataagtacatttatgagcataacttagttttcctagcatcaaatggtttttacgagagagtagaaattaacatttaggtagtagtttttttagaacaacattttacgtagtattagtagtaaaaaaaaagcatatattggtgatttac

SEQ ID NO: 14881 - DNA, 458 bp, Oryza sativa
  unsure (1)..(458): unsure at all n locations
ntatatttaaatagagtacatcagtatactaatttactatgtgggtataatttagcgtataaatttataaattaattgttntgatgcacaaatttatctagggctngcaaactaaaatcaaaaagcatgttataactaatttaactaagttgtgcggtttgtgtttntggctccatttttcataggagattagctcgttatagttttttttttccatgactgccgccttggcgcatggtaatactatgtactttcgaatttttttctcctatcaactaaaataccaaagctcctggttctttagaaaaaaaaaacatatactcaatcatagagtaagtcatgttgagcgtacatagaaaaagtatataaaacataaaggaatatgcaatagatacaaagtatggtagaacaaaataaataaataaataaacattatttacacataagatatgtctcat

SEQ ID NO: 14882 - DNA, 479 bp, Oryza sativa
  unsure (1)..(479): unsure at all n locations
ntgcatatatacatggcatacattatccaatcagcattttggttatagtacaacatatgatcatttgaacatgtgtgaatccttttaacctccttgcccagtagaaagaagtttccatgttcggttgattcagaattaaagaaagaagttttgctcgcttcagctatatattccaagagaaaagtaactntagagatatcatatcgatgcatggatagtcatgtgtggcatcattgctcgatgggcttcacatggagctagccatctgatcgattgccggcttgtggcgaattgtcgaaaacaaatcaagcagaggaaatctattttcatgcaattgttcaactcgatcgatcggcatctcgacgacgacaatccatcacatgaaaattaggaaggccggattagtagtaaaattattcagcacatttaactacttaatgctntctcatggtacatataaggatcaccagtgcatgaca

SEQ ID NO: 14883 - DNA, 492 bp, Oryza sativa
  unsure (1)..(492): unsure at all n locations
agcttngatagtatcaagcctgtttacctcacacattatgaaacaaattntcttaagtactccaaataaaacaatctttgaaaagatacagcacagtggaaactatgagcaccacattatagtccttccagttgttttggcatttcatgacgtaatacttgcaaacagattttatatagaatctctggtcctagatttatagtcatactcataaaaatagaactctattcactttaaaaaacattaacaagttaagttacaaactatatatattatattctatagaaataatatttattttgatataaaattaacaactcggacactaatcattagtttaaactatcagtcgcaacacatatgcatttctagaaataaaattgacgtcaacaattttatagtgcatcacaacattagatcaagacaatnggcattcttttcatntaagttctagatatttgtagactttatatcattaaataatatctacat

SEQ ID NO: 14884 - DNA, 485 bp, Oryza sativa
  unsure (1)..(485): unsure at all n locations
ntgnttatgctcacacatgtcaaggctaatgtttagctcttatctatggaaaactagattataaaagtttccacagcaatacgcagggcatcatctagtatatgaaatcctgctaacttctaacgagcttaagagtctattagcagatatgtcgttcactattgattgacaaatgtccaacataggaacagtactcacaagatatctgaatgctttctgctgacatagttgattgacaaatgtccaacataggatcagtactcaaaagatatctgaatgctttccgtcgacagagtcgtatcatgtttcacagtgatttgggagggttgataaataataaaagtagcacattcacttctctnttttttcaacgccattntcatccaccaatttgatacttttggtacatcatttagcccaaatgtgattagaattttttaatacatttcatacaatggtngacatataagttatgatcgaactgt

SEQ ID NO: 14885 - DNA, 350 bp, Oryza sativa
tgcaagctttggagaagatgtcttaggtggagtcctgtctttactctattgagcgcctgtgaagatggagccgtaggtccgctagtccgctgctgtttatttttgattgtcaggccttaagtgcctttgtaataatgtaaatatcatcgatgtaataaagatgtgtcttttatatcatgtttgtatggtgtaccccggctttttctgtgacggggattaatacactaacattctggaaaaggcaatattcccggtcgcgacatgtttcttgtattaacagatggctgaccgcgatgaggaacagatattgtacgatacaatcgcggagggaagcagccactactggaatg

SEQ ID NO: 14886 - DNA, 489 bp, Oryza sativa
  unsure (1)..(489): unsure at all n locations
tgaacactagcccgattcanaagtaaaggaaaagatcacttattataaaaaaatttaaactaaaaactacaaatcttttttagataatgaaaaaaaaccgagaaaactacagatctaggtcatacaaatcactaatctaaaccgagaataaaatctaaagcataagcactatcatgattttgaatcaaaaataaacacatcgaacataaaaaagcaccgaaataatcaccgaagaaactcacaaataatcagccaaaaaaaaacctcaagctggatcccgtacagatttagattgaacaaaacttatcacacctactcagattcagaaactgtcaccacaaaaatctctaacattacacatgaaaatttaactataaaacaaatcacggtgaaatcacaattagacacctatggattccagaacctacaccgattctataactaacacaacaaaaattccgcaatgcacaaatccccatagattaacat

SEQ ID NO: 14887 - DNA, 498 bp, Oryza sativa
  unsure (1)..(498): unsure at all n locations
ngcttaccccgtcatacagaanaggcttgnttctttcgtgtctccagactattgttcgactcatcagggtgtcgatcattgcttgggattaataatcatcaatggactatttcaacctccaaacatcttctcagttaaatatcttgatcaagaaaggggttaattgagatgttttttttaaatgtacctggaatcttgttgatgataagccttgccttttcggcgcgtttcaggttcagacgcgctattcttccagtattgaatctgttctcttcctgagaccacagatcactttgtttcagctatcttcaggtcgaagaagatattggtcaatgcattcaattcacatttgtagcaagttggcttaccaaattgtactcctcgagccatttctctttctcacacgccagcagccacttgttgatcttgtccatgaattctattctggactgctgctcctcttcgcttcgcgactgctcgcgatgctggcatgactca

SEQ ID NO: 14888 - DNA, 140 bp, Oryza sativa
tactaactacctatatcttcctttcgggtacacaaatatggtcaaccaactggcttcttacaggaacctaataatcctgcatgcatgcatgattttctgcatgcctgttggtgccctgcctgcaactacccatgacaatt

SEQ ID NO: 14889 - DNA, 302 bp, Oryza sativa
tgccgcatgcaagcttacattgctagaaccgtacgacacacataccttttttatattattactcataccggcctaacatataagcatttttaaatcctgacatggtcttcgagatgctaaattgaccaacgctatctataaaaagtcagatatcttatataataagacttatatattataataggtctgctaatgattaatctagtaactataattctactgaacaatctcatttctctctcctatctataatcacaattaaatatgtttgactcgtcgctatactataaaaatgcatataa

SEQ ID NO: 14890 - DNA, 481 bp, Oryza sativa
  unsure (1)..(481): unsure at all n locations
taacgagatggaggccagtggaaaatatattcttacctcacagaactcatattgaaagcacactcacatgtacacaatattcgcaggcattaggatttagttcatagtcatttatagccatttccatgtataggggtacagttctatctgcgcatgcggtgaggggtaaggtgtgtgtgcaggggtagtatggtgggcgagcgggctattatattggaggatatgtgaaagacccattatcttggttntatgtaaaaaagaacattttctttctaaaatgtaaagatcatttgtatccgatgaaacaatcgtatatttgtttttacctccaccactatatatatggccattgatcctattatgaccagtggataatgcagtcaaagaaagaatctcgaaagacataatgttgtagaatgtgttcctttgataccgataaagaatattcattggtgttactcctatcncaacaatcatcttt

SEQ ID NO: 14891 - DNA, 238 bp, Oryza sativa
aacctctggacagttgcttaccgctttctatcgcggcgatttaaacatcttatatacaattataccagtctctattatataattaaaggaatacaaccaggagcctgtccgttctctctcatggcctataaattctcacattaaacggagaaaaagaaagaacacacgccatctccaaataccatttataaataactgaaattcggaattcaaaaataaggaatattaaaagaggaga

SEQ ID NO: 14892 - DNA, 297 bp, Oryza sativa
tgatatgtaacctatctacactgatctatatttatactgctatgctactgataaccaggggctgttattaacgatgctccatggactgatagtcgtcactatatgtgttttctggtcctggtctcacaaagggagcatagcacacattccttttttaaagagaattttacacactactatattttatcgactatccaaacttatattatatggtggttatagattaattaacatgattgtacacactatgattaaattagattcaaacccttattacataattatctgactatatgt

SEQ ID NO: 14893 - DNA, 140 bp, Oryza sativa
tcaactctctctctatctctctctctacaagatgattgattattatttatccagagcaacgacttattaacagtttagctagttccatgatctgaattgttgatgcttccgaatggagaagaaatgacactggtcttttc

SEQ ID NO: 14894 - DNA, 330 bp, Oryza sativa
gagctatacgagcggatgcgcccgcctagcacacttacggatgtgcaatgcgcctctggatgcatggccggcctaaaaagtgtatatcaacgcggggagagaacgagctacccttgattaagctccacaaacagctggggccgatcacttggacggaggaagctgaaaatgccctctgcacaatgaacgcgcacctcagcactcctccggaatctagccccccggagccaaatgagtgcgtgctactgtactgagcggcgaccgcccaagtggatagagcgcgattagatcgggagcgcgatgaggacgatcctcatactgtgcacccct

SEQ ID NO: 14895 - DNA, 388 bp, Oryza sativa
  unsure (1)..(388): unsure at all n locations
agcttgtgctgtgtgcaagaggactaaaactggacacaccttgattcctgngttccttcagcctctacccatttttgaaacggcttggaacccatatcattaagggatttcatagaagtctntcagagcaaattcaagatcagtttcaaaaaaaaaaaaacttctataagctttatggggtgtcctttgtgactgagtgcagcgatagggatataatttctgaatactgagaatcaaatgcactggtggtggttggaccacatctggttgtgtcgcacctacggcgattctgcaacgaattattggttaatcatggatgtctcctttgctgctttgcaagagaatttttatgcaaaagatacagttgaactatcatgacaacaccact

SEQ ID NO: 14896 - DNA, 478 bp, Oryza sativa
  unsure (1)..(478): unsure at all n locations
tgcactctcaagaagtggtagatcccggtgcccatttatgacgtatgaactgtgtttctttgatccaatctccgtaaggtctctcatacgttgggatcctcgaactgtgtcatcctcaaaatcatttgatgccttatgtttcttccttgatgatgaagcatacctagtgcttgaagaggacacattctgtggctgtttatataatgttaaggcctgagacaaacctttagctgactcctcttcaatatcatacagatcccttgcagtgcgagacgaatttttattgagctcatttatgttattggactttgcacaatagctgttttgggattcaaataataggccactagtatcatgttcatcagtatcatcttcatttggaaagcgagccctctcaagttcaagagcatgcatgatagcatcttccctgcggacatactatccttcattgtangccctcttatgctggcgagcttga

SEQ ID NO: 14897 - DNA, 489 bp, Oryza sativa
  unsure (1)..(489): unsure at all n locations
agcttatcttctgtgtgttgtgtagntgaatgagttgnaattgggagcatacacagcatgcntttgtgcaagtctattttagatctctagaaaggagacgatccatttgacagaaaatcaaaagacagcatccaagaagacatggcttctactcttaaaactgataggggcacttaaggtttaaatggcatatatcatgtttcgaagagcctgacgttttatttctgggagttcagacttatgacttatgagagcattcttagctctgatcaagtatattctttgcatccgttttatatgcttactaactttactcttctagccttgaactctctcaaaacagaatgagcggactaaccttgaaatttgatcttgcaagacatttcaatgtctggaaattgacctaagtaaacatgttcagaggggtgaaaaggaagaagagagaaacagctggctgctgggttatgcaaatgaatctatagaatagta

SEQ ID NO: 14898 - DNA, 299 bp, Oryza sativa
  unsure (1)..(299): unsure at all n locations
ngaaaccacctgtatcgcctccgacgtgagttcaccattgcttccgtcgtatttgctagatctaagttgtgttgtagaggccataagggagcagtaggtctatgtgttttggtatcaccaacgagtggagcggaaggaactctaccatcctaccgcccggtggagttggtgctgccgaaatgacgctgtggggacagattgaaagagaagaggagctggacaactggcgttcgacgacagcaaccaaccagtgtccgatgatgctctatcagttaatgaataaagaggacataccctct

SEQ ID NO: 14899 - DNA, 394 bp, Oryza sativa
gaaggatcacatgctcatatggtatgctacaaacaagcttgtacacccaaaaaacaaataattcagaataaagccaaacatgaagatatacaaagaaaaaatgcactaattgggtaagataattgctccttagacaaacaagtacaagtatgctctggtgttaatattgagtagacttaagtgttaaaagaatcacattaatttaattaatattttgctaaactggcacagcataataacataacaataaagaagttctttacacaaacaattacttcaaaggaatactgaccacgaaatagcgagctgctgtcgaatgcagcattgttgatactctcctctgtgagcatagcaatacagtacaatccagcatgaggaatgtccattaacctgt

SEQ ID NO: 14900 - DNA, 447 bp, Oryza sativa
taaaggcgcacataacacatctagaacatatgattaccctactttcatccaatcatcataacaattcctaaagggtaaccagaagatggactgaattgcatgactactgttaaataatagtaagcctcactatcaatcatcaagctcacctggctgctgtgaccacacttcttcttgcggcagttgacagccctaaggtgcatgcgcgcatagcatctgtagataaataacaaggtccggcaaagttaaaatttgtttttttacagtccaagatacatacagaaatataaaacatgaccccttgtgagttatgtacagcatgataagttgcaaatagcatgtcaaataaaagcatgcacatacataggcaattgacaataagagaacatggaccacagacatgtaacgaaacacttgaatacaacagtatattggcaagtcagacaa

SEQ ID NO: 14901 - DNA, 414 bp, Oryza sativa
  unsure (1)..(414): unsure at all n locations
agctntgtgcanagcgagaggctcccatctgatggtctattcagtcaaagaaaaggccaaaatttaaattntcaaatntaattttgacattgattttgagatattttcaacgtaatttctttttcagcattgacttttaagtcaccgagaacacatatattaaagttttacctacaaatttatttttattctctaataagccgntttgacttattacgaaaaaagccaaataatgaggcccaaagactgcacctccatcttttgttagcttagcctagctagtccagctaaaaaagacaatgtatactccatatatcacgggttgttttgaattcagcttgatttgattntgattgatctcaatagaacatttgagaatcntgcttggatcggagggagaggggaggaggagga

SEQ ID NO: 14902 - DNA, 443 bp, Oryza sativa
  unsure (1)..(443): unsure at all n locations
tgtgctgcagccggntaagcttcagacctcgactttgtcgttcaagacctgcgaacgacagaagctggtgaatgatggctacatcatcgtcggcaacattggcgaccagtggaacgacattcgccgctcgccggatggttgccgcaccttttagttccccaaccccatgtactatgtcgactagctagctagctatccatggatatataccttgtttgtgtctgtttcatctactcgttttttgtcatgaatttgcatctagtaattaatctttgacgcgtgcatatgtttgatatgtttgttaatttttcgtgagatgaaaattgaatttgtaataacgcttggttggcagatggccattgattggtcaatgtactgtgttgagcaagcttgttgtattttacagaattataatggactgatggccaatatgatgtctgcac

SEQ ID NO: 14903 - DNA, 278 bp, Oryza sativa
  unsure (1)..(278): unsure at all n locations
accccctcgtgcctcctccctagtacgcttaagacgcgggcggtagctcaatggtttcaactttaattcttatccggatttatgggtgctggtgttatgttngaactttgaatcctcaacactcaattntctttccacttctttattcttccttacctcacgtgaagaagataccttcacaagatgagatagtgaattcagcatcctcagcatgtttcttttgcgctgccggcgaagatgatatgggggatgcctggtggtgggattagaagggaaga

SEQ ID NO: 14904 - DNA, 307 bp, Oryza sativa
  unsure (1)..(307): unsure at all n locations
tttcatcatcagaattgctactacttcgctgaaggacggcaattgctgaattgttctacaacgtcatttgcaatcttgacanccccattttgagcattgctgataagaacaagaacagcttcttcgctcgtcccgttcgcaaagccattaatggcgtcaatttcaatcctcgtgtacaaagattcggcattaccaatgcacgctacctccatacttcagctttatgatatcctgaatatacatctgagcactttaacttgtcaaaattatgtgcgttagtgcctcgaccactgtattgagaacatat

SEQ ID NO: 14905 - DNA, 466 bp, Oryza sativa
  unsure (1)..(466): unsure at all n locations
tcngacgatccctatgcctactatcatgacggagatgtttacgacggcgctcagtaagtcttagcacggtcgttgcctgtggcaatggcatgccgctgcctgaattccgctgccttatctattgctgcattttggatgtattccggaccgctcggtccgatgatttaatacaatgcctgcgggcttatgatgtaataattagcactagactctcgtgtatgtgcttttggtatttcagctatgaactcttgtgtacaagactacttgatccagtgaaatgtgactgtttacacgaatgattcctattataaaaacggtggtccacacctggactatatgaatctcttccaaaccatttggttcatacttgaccttatagacttataacacaatgcatgaacagtttcaactcgaccatcattgctggtgagaattacttttctgttggcacagtctatcacacctt

SEQ ID NO: 14906 - DNA, 485 bp, Oryza sativa
  unsure (1)..(485): unsure at all n locations
acctgcggcattgcaagcttatgcactccttcagagcagatgagatgtgataatntgtttttaagtgtctttctgctgtatcctctgatcttttcgaggcgtctctcagtgggtcaagaatgcataatttttttttctccatatcaaatgcgtatagagaatagtgcagtggttgaagtagtggaataaatatctgcaaattaatattgacattgcaaaagttagtggcctgaacatttgcacttgatgtanctgaattttcaagatgctgttaattatcaaaccaggtggcaactaggtacgtcatatggtatcanggagtcatctttgaatgaggggagatgatcctctgggttccactggtcatcaccagctgttgcaaacatctacagcgccatattgtgttaaaacacaccatatttaagaattaaaatagtctagagtaattggaagcacttactgcacaatcttgtttaagaaatgtc

SEQ ID NO: 14907 - DNA, 485 bp, Oryza sativa
  unsure (1)..(485): unsure at all n locations
tattgtagccatcggagagtgacaccaagaagcgtataaatgatgaaataagtccttgccacaagaatcaaccaatgttttcttaagaagagaacgcagctcagcaagttcggttgatgtgagcaaaattaaattcaaggcctacaagaaatttaacagttacggaatgtctacagttaaattaggcagtagtatagtgttgcaacagtgggggatacctgaaccatggtggatgcaaattcaaggtcaccttcggtctcaagaatagtagagaactctcgataaactntttcagcacccaaaagaatacaaagtcgacgaactatcaatgcgccacgtctgtataagtatgtcataaaccattgtttggtaagcaatttatgtaatagtgaactgtgtaaccctaaaagtaggactaataacaaagaaacatatactatgtaatcaacttttgagtggngaaatgtgcatacttctncagtaga

SEQ ID NO: 14908 - DNA, 241 bp, Oryza sativa
taccatcaggaccagaactgagaggacagtagatcaccacattacttcacctagccacttgctgactacattacttacctaacttaactgctcatcgattactattataaacaataaaacgaggttcatcactcaccatctctatgcctgtccatgttatctgtacaattacaatttctaatcttatgttcctttcgtagcgatatcacagacatgttgtcggaacttatattgacccgca

SEQ ID NO: 14909 - DNA, 257 bp, Oryza sativa
tgctgacttaccgatgcccgcggtaggagtctgatccggtacttgttttactggcctctcttactgaggcattgatacttctatgcggcatgaagtgaccctgatttggcttgtgacaggctatgtctgcaacctatgactcctgtccatgattggatgaagactgacatgcgaggggtgcgtgatcatctttgtgtacgttatctgactgatgtgacaaacgtgccctctgtcatgggcggaggtgatgtggaccc

SEQ ID NO: 14910 - DNA, 379 bp, Oryza sativa
ctgcagcttgaatcaaatggccgaggggcgacttgtccagtctatgttgtaatgacacgatgtgatgtgcgtttctcttaccatggtgaatacgaggagctactgcggatacaagaaactagattaaaacaattatatacaggtagctcacagatcagtacttaattacaaggctacatattatgggctaaaatatgaagaataccaacggacgaataacccatgaacggtgagacatacacattactacacagagttaataatacgacaaaacaacttagctatcaacgaataacacaattcacattcacgattttcactgctaatatcacaataattatatccattacatgacacaacaagtatttcgtacgacaca

SEQ ID NO: 14911 - DNA, 481 bp, Oryza sativa
  unsure (1)..(481): unsure at all n locations
cgtggctttaatacaatgtaaggaagaatatcattgatgcttatgtcttttctattaaacaacataagaatattatttatacttcagtaatcagtatcattgaacttctctagctcatatttttagcttgcctaanaaacctgatgactcgaagctcactgactggaaaacacctgatccggatgtattcacgacaaacaagagtaagccatgatggtgcaacgtgaatcctgaggatgcttattcttccaaggtgaagtttaaagaagaatgtgattgcaaatatgacggactctgggggcgattctgtgagacacgtgttgaatgcagctgtattaaccagtgctcacggcatggacattgccgtggtggtttctgtcaggtatctctcaaacaagttgatcggataatagtcatgagaatgtgttgacagactgatttgtgtttgctaccttcttaagctataatctaattgagtata

SEQ ID NO: 14912 - DNA, 471 bp, Oryza sativa
  unsure (1)..(471): unsure at all n locations
agcttnctttaatagattagttntcttaaccgaatatagcaagaatccgactattggcgacttgataattctcatcggccgattccaaaactctgaagccgatattgattntaggctgatgacgtcttcaaggcttaccaaatttcattgttaacacaggccccccctccaaaaaaaaaaaattggagtacgagagctcatgcttcaatattatcttcagtctagtcttaataactccaaaattgatcttacttactgtctgcattagatgagctaagctgtcgaactcgtggcaaaataatttatccttgataggtgttgatagcccttggaatgcaagatatgctagttgctcatcacttagactcanactataacatcggctgcggacattacgaaatctctgatatattccataaccgatcncttcttactgctcaaccgnattaagtctatatattacatattctt

SEQ ID NO: 14913 - DNA, 459 bp, Oryza sativa
  unsure (1)..(459): unsure at all n locations
ntcaggtggaacctgtttggcttcagttgatntggctgctgatggtactaangaaggttccagtcatcatgtgtatgttgaggatgtaaaaggtaactcangttccccttcaacacaggatgatgtttggttgcattcaagtgcgggcatcgacaatcaacctggcacacctggcaccagtaacaacaataaaaagctgaattataccactaaggtagatagtacctgcgacagtgaaacatctcaaaatggggctttagagacacaatttaaatcgcatgatgcatcaagcattcccatgaaaaaatcagttattttcaagagaaagagaaagccaagtagaaataatttttctcattctacggataaggatgatgaatttcangctgagttaagtgaaaaaacggcagattctccanatccaaagactgaagtaaataagtcagatggagatgagca

SEQ ID NO: 14914 - DNA, 503 bp, Oryza sativa
  unsure (1)..(503): unsure at all n locations
gcttagcagcagccctttcagccttcatattggccanaaccctcttataatctcttgggaataccttgacaaattntggaagaagagtatcacaattagagagtatatctctagcaacaacactcccagtgttaagtcgatgttgttctatcatcattatcaatgtggtaatgtcttcctcttcctccacatgatagagatcaactaactcatggttacagcggacgctgaatttcccatcaatatcataaacataagcaatgcctccactcatcccagcagcaaagtttcttcctgttttaccaaggataaccacagtacccnctgtcatgtactcacacccatgatcaccaattccttcaaccacagcttgagcacctgaattgcgcacgcaaaacctttctgcagccattccattgaaatatgcctctcctatagtagcaccatatagagccacattaccaaattacatattgtcttctggaataaatgtactatctctt

SEQ ID NO: 14915 - DNA, 464 bp, Oryza sativa
  unsure (1)..(464): unsure at all n locations
cggaccttaaaactcagctttccacaagtactcatgggctccagattccttctagatcagctgctatgtccgtttgaagttcatgctgtcaggaggcccgaatccgaatccaaaacgtgtagaactttatatcttgtcttctatggaccaaaagtgaagtggtgagatggaagtggacctggagaaggtcttggtttggtccccaatcaacttttttaatgtcacgcccggaagtttcccctttccgttgctttaaaaaaaatttgttaaataaatcgtccggagaaattgttctaattaacctagagttgaatccctaattaataaatgcaattaataattggaaatggcattgtgggatntttcttgggttccacatgtcacaattgattaacgggatntttagtggaattttcagagccctatatataattntaacccattaaaattcataaactgcaata

SEQ ID NO: 14916 - DNA, 507 bp, Oryza sativa
  unsure (1)..(507): unsure at all n locations
agcttcaggaccgaagcacataccaaggttntacatggagcacatgcgannagtttcagacatgcatctccgatcggcaaatccaaataatcaacgtagaaaggacttaaatttcggccataacagaagtgcatatgcacacaatgcggacgtactctgctgagttttcctaccaatgagctgctgagatggtcaatgtcactctcatcggctcacagcctgacacacataccagaagggactgcagcaacgatcacttcccttgtcgttgctagagaacggaagggagttgtacaggactggaatgcgatcagctaacatgaactggaccatactcagatcgacgcagttcaccttgaattccccatgaatcccattcttaacttaagggcatgctatcacttctcgtcgtcgaaccaccgccggtacgctgatttctcgtagaaatgaccanggttcgaatntngagtattgagcgatcagcgtgacttggaatattgagtgatc

SEQ ID NO: 14917 - DNA, 478 bp, Oryza sativa
tctcttatatttgtcttctcttgcagccaaaagattgtgatgacagggaatatattgaagatcctgatgaagttaaaccacaggtttgcaatttcatatttgttatacattgataatacaaataaagaacgttatgtaatcttttaccttaattttccagggctatgactctattcctaaagagattcctgatccaaaggacaaaaaggtttgcacttaagaattacgctgtaaatccagcttctaatattttcgcatttaattggcatatccgtttataatggacatagtgtcatatgttcttaatattatgagaagaacccgagtgcagacaaaggttccattttacctgttcaagcttgtttcattagaaacatcctatggcatgttagcattttctatctgctattagctatattgaacccagcatgacctcaatggctcttatggtggtgttgctaagttaataaatataaca

SEQ ID NO: 14918 - DNA, 447 bp, Oryza sativa
  unsure (1)..(447): unsure at all n locations
nntgcagcttgaaagttcctgtgttgagcttagttgaacatatattatgataatttcttcacttcagagcatgactttgtagacaaaaaattactaattccttgcaggttaccagatattgtttctatggcatgaaggagtcatttggatttacaccttcctggctcttatggcttaggttggctctagtcgtaaacaaatcataatatgtagcataaacttcagcgaattctcttaaaaatatgctgctgttacttccatactaattactttgcaggtacagcaccttcatagtatgccttcctgttggtacggntagtgaggttggcctaatctacattgttcttcctttcatgaaggtaacttaaataacttagaaaggaagatctctgcctccattttcataacaaatcttgttaaatgctcttcttttgcatgagcaatatc

SEQ ID NO: 14919 - DNA, 480 bp, Oryza sativa
  unsure (1)..(480): unsure at all n locations
tctccaggtttcatctanatataatgtattcctttctgaaaagatcacgacgaagttttttaatgttatttgtaccttgatgaaaattactcaaagcaatccaaatcttatgagcagtttgaagataagcaacacgatcataatccgaacgagaaataccactcaaaagaatgttgcgagctttgcaattttgttcaaaaacaattttttagcagcagtattaatagcttcaggaatcacataaggatgagaaacttttctccaaagatcataattctcagccataatgtaagattgcatcctactacaccaatgagaaaaatccgttccatcgaaaatatgaggcttagttgtaaacttattagaaatagccatggcaaaaactcaagatcggtaaagatcaaaaagagcaaacgtggctctgataccacttgtaggatcgaatcacaagaactaagccaaccagaggggggtgaatga

SEQ ID NO: 14920 - DNA, 307 bp, Oryza sativa
  unsure (1)..(307): unsure at all n locations
acttcaaccgatatgcccttatgcacggccatacataacatagaaatcacacgtggaaggggtgggcaattagctagagcagcangtgctgtagcgaaactgattgcaaaagaaagtaaatcggccactttaagattaccatctggggaggtccgtttggtatcccaaaactgcttatcaacagtcggacaagtgggtaatgttggggtgaaccaaaaaagtttgggtagagccgggtctaagtgttggctaggtaaacgccccgtagtaagaggggtagttatgaaccctgtggaccacccccatg

SEQ ID NO: 14921 - DNA, 401 bp, Oryza sativa
  unsure (1)..(401): unsure at all n locations
agcttctcgggttcttggtctctgnccgaggcatctttgtctaccccgagaagatacgagctatagagcggatgcgcccctctagcaagcttagggatgtgcagtgcgtcaccggctgcatggccgccctaagtcggttcatatcgaggctgggagagaaggcactacccctatttaagctcctcaaacgctccgggccgtttacctggacggaggaggctgagcgggccttcactcagttgaaggcgtacctcagttcttccccagtcctggtcgccccagagccagatgagctcgtgctactctacctggcggcaacctcgcatgtggtcagcgcggcgttggtcgtggagcgcgacgaggacaaccctcacttcgcgcatccccattctgtgtcgact

SEQ ID NO: 14922 - DNA, 469 bp, Oryza sativa
  unsure (1)..(469): unsure at all n locations
tgcacacggngacaatacctaactctgagatattgtttcacattcactctaaattaacatgataattctaaaataaattatagatgcagctgttaatttcattttaaagtgcaggagctgaaatctttcttccccaggtcaagaaagaacatgaaccttaatggtcaggcataatcccaatattctatattatgtttcacccatcagaggtcatgtggcggtctatgtgcctctaactattgcatcgattaatagttcaacatattcttttattgatccagtgtcaatctcatgcagtgatttttcttatgaatatacatatgctactctacatgattcagctcacaacacaaaaacaacgtgattacaaatttatttggtgaatattcagttgcatacattaagtgtcatgatatgtgtaaacatatgtgaataatgagttccattgcttctctataccatgctccac

SEQ ID NO: 14923 - DNA, 438 bp, Oryza sativa
  unsure (1)..(438): unsure at all n locations
acctgcggcatgcaagctngaagcatatttgccataaagctattgtattatttatggtataccgcgcttatatataagcggatcttataatgtctaaccccgctgggttttatgtagttctttttagtcaagagagaactttattaatgactaaatagagggttacattcttgatttaacaagtctaggattgatgcggcggcgcacagactccatatctcacacgacctagtactcgctgccatttgtgcttacacatgagcaaccctattagctttgctcttaatcttgtgcacttgcacccgttcgatacaacttagttggatttctattcattataatgaagtgcatatctcacacgttgcatcttgatttagacattacattcaaggctatacctcactcgatgtgtgttaccatatctttaggattaaagtt

SEQ ID NO: 14924 - DNA, 431 bp, Oryza sativa
  unsure (1)..(431): unsure at all n locations
tggaacaaagagatgctaanatctaagaaaattatcttttctatanaaataaaatctaagaacaaagagatgctacaaatcaaaagcaatgaagctagagagttaattggcatgcatcctttctaacgtaaacgagtgcttttcacgcaaatgcatgcccagaggaaactagcaacaggatgcaggtgcaaactgtgagtagttcataattactccctccgtcaaaaaaaaaaagagaaactctgggttttcgtgtccaactttaactgtgcgtcttatataaaattttttataattcgtattttcattattgttagatgataaaacatgattaatattttatgcgtgacttgtctttttaattttttntcataattttttcaaataagacgaacggtctaatgttggacacagaaaccagagtttgtctt

SEQ ID NO: 14925 - DNA, 483 bp, Oryza sativa
  unsure (1)..(483): unsure at all n locations
gcaagcttgacacacctccaccacccgaagcaaccattgttattatcgatccgcagcccgaagcaaccatcgccgctgctagaaaccagctgtgccttcgcccagtggtggatccatagtgtaagcattggtgtcagcggacaccaatgacttcttactaatctctttgctaatgcactctagaaacaagaattactctcttatatatatatattgacaccaccatatttcagtaatgatcccaatgactctattttctggatccgcccctgccttcgcctctcgtcgctgccactcggaggataggagtgggatgagggagaanggagagtanacaggacttanagaattgaggagactcagacaccactttttgtagaagtggtgttatattaaacttatgaagtggcaaaatctcttgaaaaattactaattcataacctttttctggtaatggctcaaacactcatactcatacattca

SEQ ID NO: 14926 - DNA, 406 bp, Oryza sativa
tatgaactcaagccgacaatggattctttgtcatattgttggatacggctcaatcggctaaccctgtccaactcggactctactaatcctgatcaaagccgattcggactcttgccgattcttgctctgtctcctaaaagaacttggatttagattctgcttcaatctgatctctatctttgatactcacattatgaaatttgggcgttaacacaagtcaagcccaaggggcatcgcctcaaagccaactgccgcaattcgacccaagcaccgcggtccaagcacccatgaccttcgcacaagccgtgccctctggctacggagcggtcccactaccaaatcaagtgtggaaccaagtcgagttctacccagctatggtgatgcaagctgctccgactgaccaaca

SEQ ID NO: 14927 - DNA, 473 bp, Oryza sativa
agcttccactgatgcttcagaatcagctattattgttgttggacgcgatctcgatctatatcgtactaaacttatacccataatggtagaagcactagtttgtaccaaggattggattgctggatgtataagaggtgatcaattgtgtcatttctcatttatatttttgtaaaaggcattcttggttttttattaatagtctaatatagctttcttctaaattttttagatcctaataaaatgggagttggttctattcttaatgatcttgaggttgcggagaccttggttgctagtatgacacttgacgagattgatgatatcggatgacattttattgctatatctggatgatacatatcgtagcctatcgtcaaagaattgatattgatgctcatatataggaaagcacacagcatgatatggaaatgaaattgtagttatcaatgatgtgagggctgttgtgtgtgctg

SEQ ID NO: 14928 - DNA, 366 bp, Oryza sativa
tacaacagcaagataaatacaaacctcccccaggttcaattctatccggcatgcatcatctcagaattttaattacacggtgctgaaagaagaactcagtgctcataattaaaacagtacaacgcatgcaagtatatactgtcaagaaagctcagttattttttcaacttaattaactgacaacgagatatatgcattgcatgcgtacccctttcatgaatctgaatagcgatggtgctggtgaccaacgcgcccaacatcgccaacatgatgaacatggtgagctacctgcggggcaccatgcacatgggcgtggcgcaggcgtcgacgacggcgagcaactacttcgccgcgctgcagatgttc

SEQ ID NO: 14929 - DNA, 422 bp, Oryza sativa
  unsure (1)..(422): unsure at all n locations
agcttgttctgctcccatttgaaaaggtacgaagggaaagatattaatgttcaagttgatatcaacttaattagaaaaaaatacacagaagtatggatcgaagaggcaattgctttcattttcatttgaaaggattactactataaagaaaaaacaacatagataaattctttgatttataatggccataatgagaggaacaagtttatatgaaaactgaagatgtcaattaagattaagatttttatatggagtttntcaaaggagcgattctaaccaagaatatattangaagaaagaattggaacgaaagtcaaagatgttgcttctacatgttgaagcttagaagttatgatcatgcagatntttgctaactctggattgagatttcagatagactttaactaatattttctccttat

SEQ ID NO: 14930 - DNA, 457 bp, Oryza sativa
  unsure (1)..(457): unsure at all n locations
ntaataacanagagaaaaggcactagttntttcagtgtgttttattacatttctatgtcaaaactctacaaaaaaaatcaaaagggattgtttgaagaaaaactctcattcgatcaaaacaattaattattcgtgaagattttacaataggaatacacactatgaaaagaaaattcaattttctccagccttcatgaaatacacttaacttttaacatttaaattgaaaatttgaactctgtcaaaagtgctgccagattttattttatttttgttgtttgtcttggtgtatttctatgtatcgctgtgtttctgcatgcctcttttcggttttcaagaaatattttgaatttccaaactgtcaaagcctgttgaagcgttaattaatagagaatggcatatataattaccgactattacgagtagtggcatatntagaagtcgcataaatgagaat

SEQ ID NO: 14931 - DNA, 462 bp, Oryza sativa
  unsure (1)..(462): unsure at all n locations
atgcaagctngctcctcaacgaattgtcatccatgcatccttaagctgttctatagcccgcgttgcaacagctccaactccaatgagtgcactaccacaaggtgtcaatgctcaatttcagccccagccaccagctgacaagacagaggccagtatctgcgttgtacctttataagttccaatacagcagctgagaaatcaagtacaagatgaagaacccgagtgtaagaaagttattgtttgttacaactgcagtgaagaagggcattactccaaaaactgtccccaaccaaggcaaaatcgaccttcacattaccgtcaatatacacgaagcagacattccaatcgtattgtggtcactggagcaaacgcacgacccgtaatgcctcgtgttaatcagaacccatatcataaacaatgcaccaatgctcctcctgctgcacctgacttggcaataaatat

SEQ ID NO: 14932 - DNA, 446 bp, Oryza sativa
  unsure (1)..(446): unsure at all n locations
tgactcctcaactcggatcttntatgggctccgcttccatggcgngctgaaggcaaaaagccagaaacgcacgaagagaagactattctatataatatgaaaagaaagaagtctctttccacactcgtaacctataaaaggtgtaattaatgggagtcgatacagaatgcgtgtagtgaagaatcgagatgccatgtagaacaaagaggcgctggtctgggcctatttacaagcgaacccgctctatgacggctaagttacatgcacacccccattttgaaggcttagttacacgtataatagtctgcttgctctcatgtttagctgtgtccccattttggggctttactctttcatgatggaacgacggagcttgagtgatttgcggcagcagcggcaagcttgtgtcgactgcagacaacttgaatccgttagcaacggtagtg

SEQ ID NO: 14933 - DNA, 142 bp, Oryza sativa
actaacttgttctagcgttttggatcttactatcccctctatatggggagatttgggctaaaccataatttggacaatatagagcgctctcaaccaccattctgaagccaatgatttacctgtctgcttgatcatataaggc

SEQ ID NO: 14934 - DNA, 484 bp, Oryza sativa
  unsure (1)..(484): unsure at all n locations
tctatagatgatatatagaaatggtagctagaattgtcacatgctaatggcactggaagaaaaaaaaatatgagtaaatttcacaaaactacatatactttgatcaaattaccacaaaactacaaattttgatgtatgacaaaactacagatttaacaataaatttatcacaaaattactcacaaaactatagatttagtaacaaagttatcacaaaactatagattttagagtttaaatccttagcactagtgttatgtttgagttataaacgtgtaagttttgtgattaaattgtcactaaaactacttgacaatnttattactaaatctatagttttacgatactccaacttaaatcttaaataggtaagtttttgagaaatttagtgttaaatctatagttttatgatatatcaccctaaatatgtagttntgtgataatctggtcaaaatatatgttgttttgataaatttactcaaag

SEQ ID NO: 14935 - DNA, 518 bp, Oryza sativa
  unsure (1)..(518): unsure at all n locations
ggatcttaagcaccgcggctgcagcttttgggatgataaaaaatgtgttctgtgacctnctgtgaggagatgataatgaatcaagaaccatggtggcgacaagctgacttgttcaaatcctgtccaatagaaaaataaaataaaaaagatgaggaaacacatatattctcaaactagtactacatagtacatactatctagaaagattgcattatgaaaataacatgcttcaaggcttcaagcattcaattcaacacacatatgcctatatggcgcgataataaattaataggtcaactcaacaagaactcaattgcaagttgccactgaaaaattatgcttggcgagatacatcttanagagatatgatatgcacatgtgtngattacctaaagctaaactgaaacatcgccaataataaccagtaacagtttactaaattatnaccgcttagtctagatatcatcagtagcaagcgtcatacgtctngatcttactcaanggaaatatcattcaag

SEQ ID NO: 14936 - DNA, 484 bp, Oryza sativa
  unsure (1)..(484): unsure at all n locations
ctggatccatttttccaattccctcagccaccttcaattatccaatcaaaatctcgntctctcctcccactgatcaaatatcttcctctcccatgaatcaaacttttcccctccctaatcaatttctttctttaacaccaaaaattaaatcgccattatgagctgaattcattttttttccaaacacccaatgacttgtcatctcctagctactcaccttcctcctccctcaaacggccacgttcctgctcaaccttgaagcagtgccatctcttccaattcctccctcccattaatcaattcctatacttaatgccaaaaactgaatctctatgataatttggatccgtttttctaattaccttgngctctccatctcccgatcatcatctacccttcttcttcctctggccagcagcaggccanaagcccncctgtccctcatattcccgcctgcagcgccgncagaacagaagtgcattct

SEQ ID NO: 14937 - DNA, 329 bp, Oryza sativa
  unsure (1)..(329): unsure at all n locations
gcttacaactaaccaaagcaagtatacaaggaattcttccttcctttacttatatgaggtggcaaacaccatatattttattttattatgtagtangcccatattgcaacatattaatactatacattgtgtaccataccaagtaccacaacaaagggtatctattcatgggttgcatgatgcatcttaaggtgtgcaggggaattaaacattggccttatgctaanggggtagtcaaggacgtataaatcttttggtaaatgtgtgagatatgcttctatgctcctcaagaaaaaacttgcacggatattaaaactcatgtgtggtct

SEQ ID NO: 14938 - DNA, 391 bp, Oryza sativa
tagctgtggccaacaaaaacctacttaacctcagcaattcaacttagctggagatggcagctgcatcaactctatggagtagagatgcaagcgggcagtgggaaatacacaatggcaatcagatctgctatgctgcctctgagattacctgctatacacaatgcgggatgctcgttaagcatagcatcacccagcagagggatccgtggcttccgatgcctcccatgtaaaatcaaagatgtttttgattattattctgtgatgaacaattggcatctgacattattggttttgatatttggagattattggcgaagtggtttttggagataattggatttgcaagtgaacaagagctgctgctgagttttggtccggtcagactgggctg

SEQ ID NO: 14939 - DNA, 369 bp, Oryza sativa
  unsure (1)..(369): unsure at all n locations
tatgtanagctacagcgcctgatcatgtgaagtttagttagtttaaagcagctagcgactgagattcctggcacacacaggttagtctgcagtgatgcttgtatttaagctataacgactgctcgaagaaatgatcttgccatacatagtttggtggcactaattccatactattgcgatattgtcggaactgcatatggctaacctaacaggtacactcactagccttaccgtgagaaatgctaatctacacagcacgttgaaatgttttgtactgagtgggatcagaccatagacttacaggataccatctgcgagatcttattggaacgaccagctcaccttagagaccacctgacgaattgtgag

SEQ ID NO: 14940 - DNA, 483 bp, Oryza sativa
  unsure (1)..(483): unsure at all n locations
agcttatcgttaaacttaaggagattgtattcaaattntagtttatgaaaattggtcataatctaccggctntccaccggatttcacgaaaaccgtcattccgccagagcccggatttcacgaaaaccgtcgttccgccagagcccgaaacggaaggccatctccgaatcgtaaatcctgatcggtattcgatcggctaccaaaccaatttctcgtgatatatgcccataccacataagatgtacatgcggttagaccaaatctccaaacccaaatcaccgatgatacgaaataatcataccaagaaaacataaatatgaatgaacgaacggtgaacaagatatggtatggaggacagagtaaactgctctgccacgatgatgtacctactgtcttctcgtacattaagcctagctcctgtttcgggcgccgcctcacctgatcggagacggagatggagacgacgacggtagacgcaaagtc

SEQ ID NO: 14941 - DNA, 453 bp, Oryza sativa
  unsure (1)..(453): unsure at all n locations
tcttatgaataattgcctcgtttgttagccaccattgttcagaggaataataatacttactatgacctacatacatttacatcggttgatgatcgaacaaagagtgtgctgcaaagagcatttttctcattgggtgcttgcatcaatgcttttgtgcattgtcgacctgttctatgcatagatggaacttttatgacaggtaaataccgaggtcagatattgacagcaattgggtgtgatgggaacaaccaggttctacctatggctnttgcatttgtagagagtgagaacactgaaagctggtactggttcctagagagagtgcacattgcagtggtgcgtatgaggcccaacgtttgccttatacatgatcgtcatgcgggtatgttgcgggctattgactacttgcagaacggttgggatgagaatggactttcagctaagtggcctgat

SEQ ID NO: 14942 - DNA, 490 bp, Oryza sativa
  unsure (1)..(490): unsure at all n locations
gcttcattctcaaatgaatatatcaaatctnggtactcacactataaggaatnttgatttttatgactgcaaaacatatttatgagtagacagtcatacatcattaaagagtggctaatctactgcgttcatcaaccaaattaaatcttgtatcacaatgatatgtaatttgtgttcatcaaccaaaataaatcttgtgtcaaattgatatataatttagcacatgttttacatgttattatttctcaatcngaatcattcttgtcttcctatctttaaccatcatctctagttntccttctcaaatcaacaggctcacaataaaaaattgtgcctcattcaatatatatagtatacattcatctataacattgagttctctggtcttctatctttaaccatcatctctagntttccttctcaaataaacaagctcaaataanaaatttgtgcctcattcaatatatagtatacattcatctataacaat

SEQ ID NO: 14943 - DNA, 419 bp, Oryza sativa
  unsure (1)..(419): unsure at all n locations
tcggttgccgctagctgcatgcgtcgtccccttctgaccgtcactacaagttatgtgtggcttatatgacacaggttataatgtcactatatcatctaatttatgacattttatttgaagcattntaacttaatgacaataaaaagttgtgtgtcacaataagtgtcatatagctagtctagtgtcatccagtgacaatatttactatgtcataagacctatttatgtgtcacaaattatttattgtattattttaaatatttttgtccatgtaggcaagccttattgccacatcagattttcttttctcattttcagatgggccaacctggtgctagcccaacagccgcttacccgaaatgggccaacccgtgcgctaggccgagcagccgcgcctaactcagcanaatggctaaaaa

SEQ ID NO: 14944 - DNA, 471 bp, Oryza sativa
  unsure (1)..(471): unsure at all n locations
ggctctcaacattnggaaagctgaaaaaataaattattagccatgtcccttccacaatcatgccaagagaatcaattggagagaaagtatatgataaagggagaatcatatcttcaattcatcattccacaaaatattttacttgtccattttccaccacaaataaagacccttgatctatgagtatgactgatgatcctcttgagaccatatctttggctttgcaatatatataatgcaggtatgttccgatttatccctaccaaactccacatattagccttagaatagggataagttctggcacattntgccttggtgaggatccaaagaaaatatacatcttcgagagacaagagagaaagtcaatatgaggagaagagctattttgcgaaaattcatataaatcccttgagtctggcagagaatcaagaaggactggtatcaagatcattccatctatcaattact

SEQ ID NO: 14945 - DNA, 423 bp, Oryza sativa
  unsure (1)..(423): unsure at all n locations
agctntaattattctttcttgtatgcgccacttgttcttcgtgcccaaccacttaaatggtgtctcaagtgggcaatcctatgactccaacgctccatgggggtgttccccttatttatgttgtgccattctttagggaccatttcatagaaaccgtcccgttgaagccaacctagttcaaagcggaagagaggtttccaaaatgggcatgtgaaccagatctaagaataataggtgaatgatctgaaatggcgtgtggtagtgcttggcatgttaccaaagggaatttttgtcccattcagtgttcattaacactctatccaacttctcataagttggattttcaagggtatttgcccaggtgaactgcctccccgatagatcaatttctctcanattgagactattgatcactttattaaa

SEQ ID NO: 14946 - DNA, 453 bp, Oryza sativa
  unsure (1)..(453): unsure at all n locations
tggctctggcgcagaagctatatatctctacattttctctcacacgttgacacaacaatcctttcgctctccacagccattgatgtgaccgtttgcccaccgatatgcctccccctcctcacctccccaattctaccgcgtgcatgttattctgctctttcaaacatcgctgcatgccccctctctattgctcctccctcctcgacgcagtgtaggagacggtgcagggaccagatctgatatccaaacctcggggctgctcagggttaccaccagatctagtccttgtagcgcttcctccactacgcggnggaggagaactgtttgcctaccgatgtctctcccacttgtatccccaaccctaccgtggggatgtccttttgctgtcccaaacatcgctgcatggcctctctctcttgctcntnncctctctcgacgcatggaggggatgca

SEQ ID NO: 14947 - DNA, 473 bp, Oryza sativa
  unsure (1)..(473): unsure at all n locations
gcttactaagatctttatcgtatgcaaagacttgttatcgatgtggatctgtctgtctgtctccctttgggcacttgtgatcagctattcaagttcagacactgcaaatactatgtagcacacagaacaatggtcatgcactcttttgtctctactactatcttttgatccttctaatcgatcttacgtgcactctcaacattgccttttatgccgttccgcatgagacgattgctacactgagagcttaactaagtttaaagtgtgttcactgcgcttttgtgccaaaanagcagctggaaaagcagcaacaactttgtcgtatgaattggatggaagtgggaaatataataaactacagggccacaaggttattcctcaatttcatcgtataatcagataggggtatatatactgcatcgacattgctattccctccgtttacaatgtagaacttctagcattgccacata

SEQ ID NO: 14948 - DNA, 417 bp, Oryza sativa
  unsure (1)..(417): unsure at all n locations
tgcggatgccgccgtcggtggccttcttcttctnctcactgtcatggtcgntgtatgaccaaccacagcagaggccacgtccttgcgcaccttgttctgatcttggataggtgtgactaccattatcagcagcagcagcacaggagcatttagagaatcccagccgtttgctggcagctttggcagtgtgggtgacattgaggaagaggttgcgggcgcaaccgccggcgtgctcatcggcggcgtggtaagtgccgtcgagctcgtcctggatgcggaagtagtcgagctcgtccagcacgtcgtcagcgtcgaacgccatgtctcgcagcttctggaggagctccttgagcgcanggctgcgtatgtctntgccctgcgcgttgtcgagcaccncctgcgcgtagagcagcttca

SEQ ID NO: 14949 - DNA, 362 bp, Oryza sativa
agcttcgctgttacatgtgagtataatctgacctctgtaaactatcttcgaacatatcacttggttcataactgggaatagctctcacgaacaagcaactcggaatcactttccactattctcttcatgctggtattatttagcattcaaagtatgcctttacacattcaaccctgacgtattctttattttagatatctcttatcaatcacctttcgacctacttcttttgccgataataaacaccttcgctgatatcttctatcaatcaccttttaaactttgtcaaccaagtactcttcactccgaaagtgtggatgcttctggtgacaatgagggtctttggcttgctgccttcagtg

SEQ ID NO: 14950 - DNA, 465 bp, Oryza sativa
  unsure (1)..(465): unsure at all n locations
ntaactactgaccaaggagcttctttcatgtcacatcaatttagtgagtttgtcgaatcttttagaattaaattgctgaatttgtcgccttattatgctcaagctaatggacaggccgaatctagcaacaaaattttgattaagcttataaaaaagaaggtagaggagcatccaagaaggtggcatgaggtgttgtcagaggctttatgggctcatcggatatctaagcatggtgcgactcaagtaacaccgtatgagctagtctatgggcaggaggccgtgttaactgtggaggttaatttacaagctcttagaatagccagacaaaatggttngtcggctgtagattatangaatttaatgatggacaggatagatgacgtcccagaggaaagatngaaggccttgagacatattgagaaagacaaattaagagtagctatggcttataataagaaggtgaga

SEQ ID NO: 14951 - DNA, 461 bp, Oryza sativa
  unsure (1)..(461): unsure at all n locations
agcttctatatttggatatcgctggttatctcgcttggtgcttcaggtggccattttctgcatttcgcgactgacgagttcgggtagtgtctcaatatggcattattagttggaattgtcatgctttcattatttttttcagtctgcattgtcagatatggactgatgttgcactttttttttttgctctgattnttcttcatcatttctcattttcgtcttgcctttgtgaactgatgctcatatgtttactctttcattgcagtctgatcgcttcgatcatcgcggtgattgccggagcttggttcgacctgcattgtagtcctcttgctgcttactttcgtaaagaatcaggactgcttgccttttgggttcaagctctggctagtaatcaacagaatggatgcgaaagacttggtggaaataggcatgaacgaggaggacattacaacaatgctgtt

SEQ ID NO: 14952 - DNA, 440 bp, Oryza sativa
  unsure (1)..(440): unsure at all n locations
gggcgcacacganagaatgcgagagcttagagaaacactcacagaagcccctacctggcgcgccagatgacggagcgtggggctcctcaccgggagaccgcgcaggcccccctttgccggttcggccgggggccctgtgtgagattctaagctcctagtctgtggaaagttcgcgagaatggaaaaaacacaagacacgggcgatgtatacaggttcgggccgctgagaagcgtaataccctactcctgtgttctggtggatctgtatatgaagaagctacaaagagctggaaagccagagagcccttactctagaaaccctcttctccctttcttttactctcctgggatctactctccagatcctctcccctccttttcttttcctctcctgggatctactctccagatcctctcccctccttttcttcttttcccct

SEQ ID NO: 14953 - DNA, 499 bp, Oryza sativa
  unsure (1)..(499): unsure at all n locations
agtcacctgaggcatgcaagcttagccgantagcctgaaagtctgtgcatagtgctgngtggcgttctttcattaagagcaggtacaatagcaggctataagccagctataaacatattttaaagagataaaagaaagagagaagagcagcgggctacagatctgtagccagctgcagtacgggctccaagatgtaatgtgtgtatgacaggtgggaccaagtattaatagtatagtaagtaactattgtatgaattggctattatattggctatagatgaattggagcctagagtgggctgcactattgaccttgctctaaagcggcaagctcttttcttccctctttttttccatatgatggaaaacacaagtcttttggaaaatcttgagctttgattgcacttagcagacaggaatggccggcaacaatatttggtgcatccaaaatggccggccaacacaaagatnnttttttgggtacattcaatacacagag

SEQ ID NO: 14954 - DNA, 475 bp, Oryza sativa
  unsure (1)..(475): unsure at all n locations
tgcactngattctagcagttttgttgggactgcatttcttgatgtttatgcaaagtgtaatatgataaaggatgcctgctgggttttcgagaatatgcctgagaaaacttcagttacatggagttcattatttgcaggatttgtgcagaatggtctccatgaagaggtattgtgtttatttcagagtacacacagggaaggaatgcaattgactgaattcactgtttcatctatcctcagcacatgtgcaagcttagcattgataattgaaggaacacaggtgcatgcagttattgttaagcatggttttcatatgaacctctttgtagcaacatctcttgtggatgtctatgcaaagtgtggtcagattgaaaaatcatatgaagtatttgctgatatggaagaaaagaatgttgtcttatggaatgcaatgattgctagtctttctaggcatgctcatatctgggaagcaatg

SEQ ID NO: 14955 - DNA, 426 bp, Oryza sativa
gtttatagtgtaagctattaatctcatccgcctgttaataggaccatgaaatttcaagacgaagcggaacccttccagacaccaccgactctttgtgtactctaatccagaaaaaaataaagtatattttttcagtgttccacaaccttgtggttctttgattatgcgctgatcggaagaatacgtaattcttaacactcgtggacctatacttctcttctttttagagaaaccacgagtggcatatattcgtagaccttaaatgggcccacaatataactgtgctttactatcccagattccctactggaccaggccacgagtcgtgaccctgcctaaatgggcctaatgagactacccctttaccgagcacggattcccacgctgtctgtctatcttcatctcattgtccaccagcactgcgct

SEQ ID NO: 14956 - DNA, 462 bp, Oryza sativa
  unsure (1)..(462): unsure at all n locations
cttgagtttagctgaacttcagtcactgaaggtggcggtataatcacggattcttgtggnggaaaagaaggtgagcgagttgggaggatctgtgatcgatctggagaagaaggtgagcttaattcaagctgggttggagaaatgtcaacgtgaggttcatcaacggactatgttcaagggagaatcaagccagtgagcgaaccacgtcctcaccgaggaagacctcaatggtaatttcccaaatcccttcctgtacactcctaaccaaggttggagaaatcctcagttcaattctgtgagcccgttcatccccgatagctcaaattatcagacgtttgatgctggaatggtcagtattggtggcaatgtttcacccatgtcctgtccgcagtttgatggagagaacccgcacatgtggagggataattgngaaatctattttgatgtctatggtgtgcatgt

SEQ ID NO: 14957 - DNA, 450 bp, Oryza sativa
ttagtgctgcacattgtctatatattatgtctttcacattattcgggctagcttattaaattaggtgttaacactcttatggaatatgaagaacatgggaagaactggagaagtcatggcgttgattgagcagttgtgtaactgagtccaccttacacaaccataaatatatgagactatgcaacatctccaaaatataaggaagagctgttagtacataatacttcgaagattaagttgtttgtttttgatggatgtgcgtggtaaaactcatgaagaagatggtcccatgttcacacattcatcttgatttgcatgtacaattcataattcctccgtgttataggatatcaatgaactccgttcaactattatcacgcatgatgacacaacattgctaatagacgacacttgtcgatggacaattgatgtgtgagtatttatgagaat

SEQ ID NO: 14958 - DNA, 405 bp, Oryza sativa
  unsure (1)..(405): unsure at all n locations
ctgagcttagctatatagtcacacccgagtgttctagtaagagcatgatcagaagtgtgaccttcctgtgccaggaaaggagaagttgaaacccagtgatataaaaccgtaacaaggcaagttataagaacatgccagcatgtaaacaagaagaaatcatttctcctcactgagaaatcagacatacctggccatgtcgaaatcccaacatgttcaagtactgcgtgagtcgtcaatgttccatctacttctacaatcctttctcctctctgagaccgctgggcagataaaagcgaggactcagattgtccttcattntcttaattgcctacatgagggaaaacatactctcagtcctgacattatgagacatgattcaacagaaagttatgcttgcatatccta

SEQ ID NO: 14959 - DNA, 405 bp, Oryza sativa
ttttgatgaataatttgaggttcactgtaagaaaactggaagtaaagtttttgattcttgtggtgattctgtgttgattatttctcgctatggaagagtgtttaaagctgattttgaaaatcctgtttcacctgtgataacatgtttggctgctaagtttgatcaagatgtgatgttttggcatcgtagacttggacatgttggttctgatcatctcactacgttaagaggtttggatcttgttcgtggtttgcctaaacttaagaaaaatattgatttggtttgcacaccgtgtcgtcatgctaagatggttgcttgttcacatgctcctattgtttctgtgatgacggatgcaccgggacagctattacatatggacactgtttgtccagctatagtgccatc

SEQ ID NO: 14960 - DNA, 500 bp, Oryza sativa
  unsure (1)..(500): unsure at all n locations
agctnttatgctccaggtaagcatatctcgtgttctctatacctgaatctaataccgagctaacggtgctgaacattaattngtaatcacaaaatcgatgccagtcactggttcaccccttctgtgcttgctcttttgaaagcaacatgagcaaatatagttacataagtagtatgtgttgtatacataacctacatatgtactagcttccaggatgctgaataagtaccgtgtgttgtacacataaactgcatatgccgttttcaggatgctaaataagtagtgtgtgttggacacataacctgcatatgtagctntcacgatgctgaatatgtagtgtgtactgtacacataacctttataggcagcttaaaggatgctgtcatgatgaataagtgtatattgtacgcataacttgcaaatagctgcttcaggtgctgaataagtagtgtgtgttgacacataacctgcatatgcagcttccgggatgctgaattctc

SEQ ID NO: 14961 - DNA, 428 bp, Oryza sativa
  unsure (1)..(428): unsure at all n locations
tgcagacatctgatcgatcgatgtctgcatgcttgttttcgatcgatgagctgaggtatgcagaaggaggcagctgctgggagcaatggagcccaccgccggccatggatcacagttgttactcgatcgatcctacagttaattagtagctagctgctatgcaatactagtaaggtaggtcgattgatcgatggatcgatggagatcggatgatggatcgggattggcgcctggcttttgtgttntgctagtactgcatcatctgtatcatgtacagtctcatgcatgcagcagccaaagcaatgaagctgcgaatagcagcagcgtatgctgttattatcagcagcagcatcagcttgagctgccatgatttcgacacgtgggccacgcattcaccgtacacgcccgctcgcattcatcatacatgc

SEQ ID NO: 14962 - DNA, 419 bp, Oryza sativa
  unsure (1)..(419): unsure at all n locations
agcttcctgtaagatctcctgacagagttgatactcgctcctataaagagcgagatataagaagactccgggacaggctgtctccagttaggcgcacggaatttcagggtaccaggcatagggaggcaggacaacatgaagagcagacccagcggagatcaagtgaacttgctttaggttccaggaatgcagatggccagcatttgacaaaggatgtgcctgactcacacaacttccctcatcgcaaaaactcgagggactccagtaaggccaatggaagtgttgagcctgaagcatcgcttgattntgagggcccaaagccccttagtgtcatcttacagcgganaagagaggcagcatgggccaatggcacatctgcctgtagccccaaacaagataaatctgccgaggtctcacac

SEQ ID NO: 14963 - DNA, 476 bp, Oryza sativa
  unsure (1)..(476): unsure at all n locations
actcagcttnccatccaactcgcagattgtgccaacaaaacatcttctgcggtcctgcctggtttatgttaagatggaaaagaagagtgaaaaggtacagctgaaattactgaacctccaaccataacttgtacaagctgtaagtaatcaggtctaatggtgtgtttgagaaggaggggattgaagagatacgtaaaacgaggtgagccattaacacatgattaattgagtattaattattttaaacttcaaaaatggattaatatgattatttaaagcaactttcatatagaaattttttgcaaaaaaacacatcgtttagtagttcgggaagcatgcacgcggaaaacaaaactatctttctctctttctcctgcgcttgaacgcagcctaagtgatgaaaaggaacaaaagggggactacatctctttgaaatanaacaacaacaatctatttgccgaanactatcaacttta

SEQ ID NO: 14964 - DNA, 433 bp, Oryza sativa
agctgtctagtacagtgtccagcacagaatgcacacacagttctgttaaacatgaccaattccttgatctgtcactaccacgtccatccaggaggcctccagccaagagtgtgtcatcaccaccagcatagaggaacaaacaatccctaagagataggaataaaaatcggagatatgggaagaattcgacccgagtgactcctacaatagaggtgagcaacaaagaaaaaatcaaacaggtgctgaaggcaataattccctgattcctggttcagagtcacgacaggtggtcagtgagaaagagcctgagccttctgaatgcagtgagtcatgtgcttctgtgcctaatctagaacaaacaggtacttcaaatgtggaggatggcactgctgtgtggatacattgatgatgcaatgaacaaaatagagatttt

SEQ ID NO: 14965 - DNA, 476 bp, Oryza sativa
  unsure (1)..(476): unsure at all n locations
tggggggtaggaggaggatctgtgacgacnatatgttttaccttcnaccggtcggagcancggcgaggtggcggcggcggcggcggcgtggaggagttcgggaggagagaaggttttcttatatccaggaaccctagaatggtggagtccataggcgcgctgagttgtaatgggccgtcacggccgataaggcccaactaagattttgagttcagatttctggcccagattttgctgagatttgacattgggaaatgagaattcgaattgaattgattttcaccgagatgaacgagagtgaggtagactgaagaaaatgcaagcaaatcatagcattttgtttgcctccctcttctgtgaacatctttatgcaacttctaattgcaattctaggttatttaaacggatttagcttgagggtctggcggtagaacattcacggatttagtttgcatatatgatctgcgatttcacct

SEQ ID NO: 14966 - DNA, 470 bp, Oryza sativa
tactcagcttgaagtttgaacctcctagctgaggaggatgttgtttgcagtttcaagcttcatcttgtccatcttacgtacactaatgcactctgtttctccattctgcacattggtcaacttctagtctgcagaaataattgggatattcaaactctgttcggaagggtagggaggcaatgttgtgcttaatatctattatcaccaaccattaaattcccgcatacataacgcatttcaccaacccatttgggttctcacgtatagccatctcgcattagtcattcttcagtacttagtagtattacgtatggtggaggaaacaaaaggtgtatcaagtgggatgacgtaaggctcgattacatttcatacatctttgatctttgaaactaattaaattaataatgagggtaatgcgttcaactaataacataatgctttaatggcccatttcgcctgtgtctctctct

SEQ ID NO: 14967 - DNA, 309 bp, Oryza sativa
  unsure (1)..(309): unsure at all n locations
agcttctggtagaatcacattctntatttttacactgatagtactccctctgtcccctaatataagggagtttgacattttgtttgcactgtttgaccatttgtcttattgaaaaaatattggagttatattttttttgactttattatcccgaatactttaagcacacactttttgtttttatatatgcacaatattgtngaataagacgagtgatcaaacagtgcatgcaaaatgtcataatcacttatattatgggatggagggagtagtatatttacagaggaacagagatttctatggaacttc

SEQ ID NO: 14968 - DNA, 462 bp, Oryza sativa
  unsure (1)..(462): unsure at all n locations
ntangtgtataaactctatatatatagaaatactatatatagaaaatatttgaattcaaattcaaatttgaatcgggtatgtaaacttttgacttataaactttggatctataaactttaggtgtataaattttagatgtatataaatactatatataaaaaatatttgaattcaaattcaatttttaattagatataatttaaattcaaatttgaaacgggtatataaacttttgacttataaactttaggtctataaacttttgatatatagaaatactatatataaaaaaaatatttgaattcaaattcaaatttgaatcggatatataaactttngacttataaacttttggtctctataccttaaatgtgtaaactcgaggtgtataaactttagtgtacaaatttactaanataggaaagtaatgtggtacccaagaaaggaaaccagatggaggg

SEQ ID NO: 14969 - DNA, 333 bp, Oryza sativa
  unsure (1)..(333): unsure at all n locations
aagaatctacttcaaccgatatgcccttaggcaccgccatacataacatagaaatcacacgtggaaggggtgggcaattagctagagcagcaggtgctgtatcgaaactgattgcaaaagaaggtaaatcggccactttaagattaccatctggggaggtccgtttggtatcccanaactgcttaacaacagtcggacaagtgggtaattgtggggtgaaccaccaaagtttgggtagaagccggtctaaatgttggctaggtaaaccgccccgtataagaggggtagttatgaaccctgtggaccaccctcatgggggcggtgaagggaaag

SEQ ID NO: 14970 - DNA, 437 bp, Oryza sativa
ttgatgcatgctaagctacaaagcccaatggtgtgcttagattctttgagctatggcattgctgggcccaattgtgctggatatgtgatgcgaactgatcataagatataaacctacccttaatttcgagctgtggtgtttcaattaaaagcactggttgatctgccagccggcaatccttggttgtcttgctgcgcctgtaggtgaaccatcagcaaacctttttgtgaagtgaagatagtatctttccgtagccttcgctagacttaaccaaagctaaaacaggattccttaactgatcaagaatacatttatgcccatattgagtcacaccatgagttatcacaaggatccttgtgccggctgcatgcctctctaccaatgtaaatattatattcctatacaatacctaatactcgataagtaaaaaaaagaca

SEQ ID NO: 14971 - DNA, 468 bp, Oryza sativa
tagactggaggaacaatccatattggtttccttaatggttctagcgtccaaagagtgggtgcacagatcgctggcaagcggctacatcctttgctgaacaaacatttcgaaggagatatcttgtctgccccaatgaaacaacgatttcgttgtatgtctaaccatttacaaaattcgctatgatttgcacaaaattactacccaaactgaataacattactatttttacagggcaatccaaggatgggtggatttactcgatggatcgacaatgtcactccatcatatcatggccagaagataacagagtcagaaacacaagtagagtatcaacgattgaacgaccacgagaatgcaatgcattctgaccgacctagaaagggccgataggttatcgcatgcttgattcgtcggaatcgacaaatttgtaccgcgtatcgatggcacttcttatctatcttatcatta

SEQ ID NO: 14972 - DNA, 465 bp, Oryza sativa
  unsure (1)..(465): unsure at all n locations
ttcttttttagtggatttatgttgggtctaaagatacgctgaacctccctcttaacctggacctagtcctaagagcaaagttaatagtatagccaactactagctacaattcatctataactaatctaataggtaattcatacaactagtgcttactatactattagtatatagtcccactgtcatatacacattatgtcttggagtccgtgctgcagcgggctacagaagctggtcttctctctcatactttatcttattaaaagatgtttggagctggctaatagtatgctattggacctgctctaagagcacccgcaatggtaaagtaaggtgctctctataanacatgtatatctcagtaatagattagattaatagtgaaccacctcaatagatntctacatgggatctatagctctctatccattggctggtttctctatagacctcaggttagagata

SEQ ID NO: 14973 - DNA, 475 bp, Oryza sativa
  unsure (1)..(475): unsure at all n locations
nggataaaagctttaagaaatcaaagatgtggctagaactatcaagcacagcatatatacaccagtattgtacaaattgagcctccatttgttacattcatactcagtcagaatcagtcctttcatcatcagagttattgttgctcggctgaaggtcgttgttgcggaattgctctacaacgtcacttgcaatcttgtcagccgcgttttgagcattgctgataagatcaagagcagcctcttcgcttgtcccgtcagcaaagccatcaatggcgtcaatttcaattctcgggtacaaggacttggtcatcgccaatgccatgctagctcccatacttctagctttcttgatgttcttgaaatatacatccggagcaactttcagcttgtcgaanatttcggttgcgtcgagtgcactcagaccactgttattgaggaacatagcttggacgagtggtgtagcgacattggcgac

SEQ ID NO: 14974 - DNA, 447 bp, Oryza sativa
  unsure (1)..(447): unsure at all n locations
agcttgacagggctcatcctttcgagaaagtatgctattctgttcanattggtatttaaaaatatgcttaaaatatgaataattggcgcaagtctgggcgtcagttcgttgtaaagaaattaaagtgcagtaaatgccttggttatcctctctccatcccaatataagtgcacttaatatccttatagtgatggtgtatgtcatatgtacttatatttagggtgcgtttagttcacgctaaaattaaatgtttgattgaaattagaacgatttgatgaacaagttaaaagtttgtttgtgcaggagagttttaatgtgatgaacaaattagaagtttgaaaacaaatttgaactacactcggcctcagatggagggagtattttagttttcanaacttcatcgtagacagaatgagtacccccatcctccacgaagtccaaaatctt

SEQ ID NO: 14975 - DNA, 318 bp, Oryza sativa
  unsure (1)..(318): unsure at all n locations
ctgatatgattctctctgctgncgccagaaccttatctatcggacatggcgccttatgaatgccttgcgaatcctccttgactctatggaggagaactaccgatgtcgtacctctcgtgtacgccaactccaaacactagaacagaacgctggagcaggcttcttagagctaaccaatggctctatgacttgtacctgccaaagactgctggctggacaacacaccctaatgaacaacttgtcggagactggaacgacgtgcaagctatacacctgcatgctcacgaggaggacattattacatggaagcttactacc

SEQ ID NO: 14976 - DNA, 315 bp, Oryza sativa
  unsure (1)..(315): unsure at all n locations
gctgccatagtctgtaggttaccctgacactatattgatttctgtttagcataattgatctataccgaaatcttggtataaagnggtatcggattactagccgatacacgttgggtttgcctgtcagctatgctgtgagcgtatataatccctgccttaaagtgttcatggactcaagtggtttatactatctcggcgcgctgaccgatctatcctaatcacttggttcaagagtacttcaaagcatagattatatattattgacatctacagccgacagagcacgtccaattattccttctccatatactacat

SEQ ID NO: 14977 - DNA, 406 bp, Oryza sativa
  unsure (1)..(406): unsure at all n locations
tcaatgacgtggaanaagttcagaactgatcgcgctggatatgcagtaatggctgtcaaagaagtgcaagccctccgcaaggagttcgacgctcaacaagcaggtagccatcaacaaccctttcgcaagaaaatcaagaaggatttgtactgcgcctttcacggacactcttcgcacacaaccgagcaatgtcgaaacattcgacagcaagataacactcaagctccaaggcagtagcaagtcaaggccgaagaggcgcctcatgaagcggctcttgaccaaccacgtaagccgaacagcgccaggatgcgcagcgaagagtgatccaagtcatcacaagatttgatcccccttcgcaatcgtcgaaacgcaagaaaaaaaatgcaacttcgagcagtgcacaaca

SEQ ID NO: 14978 - DNA, 330 bp, Oryza sativa
  unsure (1)..(330): unsure at all n locations
caaacctattcgaaagaccataagaaagaccctatctagactaattaatagtgccattaaatatatcttaattntacggcagtaccggaagttgaacggagtccatcggagctacctgatgagagatatgaatattggaagctcgaatgggagtttccagactatgaaatgatttatcacaattttctggaatgttacgaatggtttatggacattatagatataatattctcaaaaatattattgacattcactgatgtgtgggacctaaagaattgatttatggaattccggaataataatgaattgatctatggagaatgaaatgga

SEQ ID NO: 14979 - DNA, 482 bp, Oryza sativa
  unsure (1)..(482): unsure at all n locations
tgtatganacaccacgggtgtctcgctgtcaagggggttctttcttctaccactaaataaataattaacagtaaaatacgaccatccgtatcaagtttatgacttaagcccatgtgggttagttccaccacaataaacctaaccagttgagctacgctaaacgcaatacaaacgcaaacaattgctatatccttcttaaatatacttcctccgtctcaggaatatagtaaccagaaactagattggacatcacatagatacattgtgttatatggtgtttaatctagttctaatttgctatattctanaacggaggaattatctaactaatacatgatatgtcgcatctgatagctatattttacgatggagccagtatatgctcgtcacccttatcaattgtatgcatatgcgctcttataagcaacttcgaacgagtgagactaatagacttgaaattaacgaagtcactatatcacacg

SEQ ID NO: 14980 - DNA, 413 bp, Oryza sativa
acctgcggcatgcaagcttgtacttgaacacacatctctcccatctcttattcatttttatgaatatacaccctggagcatatataggactagtgtgtacacccttacagctagaaatttgttcatgcagatgtattctacaagttcaaagatagcacgggttgtttcagagaaaacctgatcacggacgcaaggggcctgctaagcctctacaacgcaacgcacctcgccatgcccccgcgaataagcggcgctcgacgacgccatcgcgttctcgagacggagcgtcaagatcttgcaaggtaagctgtgatctccgatggccgatcaagtctcccgcgccctctacatccctctctcacgggcgcccaagctgctggagacgatgcgctacatcaccgagtactagcggg

SEQ ID NO: 14981 - DNA, 270 bp, Oryza sativa
tccgccgcttctagttgggcgggcagggatcataatctgtttttctatttgattagggataccgcgaggagctaaattttggtgattacatcctgacaacataattggaaaatttaacaaaacttggcttaatgaagacaaaccataaaaccctgcgataaatatcatatcacgggatctgatatactccaaatttcagacagttcaatcccaaattttaaaccctgcatggggagggagggagccaaaagcggcgaagctcattctggg

SEQ ID NO: 14982 - DNA, 404 bp, Oryza sativa
  unsure (1)..(404): unsure at all n locations
agcttatctcttacgctccaggaatggatcagtcataacatcaccaccggctcgccgtcgtcgccgccgactggtgtctacgcctatacggttggttggtcacaacaccgctgttgttgggcgtctacctcttcaccgactggccgcctcgtccgccgccgactgctgtttccgcctgcacggctggcctattatgccgctgttattgggcgtctacctcttcactgactggccgcctcgttcgccgccgactggtgtttttgcctgcacggatggcctattaatgccgccgtgttgggcgtctacctcttcaccgactggccgtctcgtccgccgccgactggtgttatcgcctgcacggctggcctaattatgccgatgttgtgggcgtntacctcttcacc

SEQ ID NO: 14983 - DNA, 475 bp, Oryza sativa
  unsure (1)..(475): unsure at all n locations
ntcaccaagctctaaggttgagggaattaaatttgttggtggcgttatgcttgcaacaaaatgtgacattgctgaaatttcagatgatgatatttgctattccttactatgcaaacaagttatgttttctctagatgatattgctagttcgatacctcctgctgttaataaccttttgcaggagtatgaggatgtcttttcagctaagataccccgggattgccacctatgagagggatagagcatcaaattgatttgattctatgagcttcattgccaaaccgcgctgcttatcgaaccaacccgaaggagactaaggaaatgcagcagcaagtccaagatcttttggaccgtgggtatgtacgtcaaagccttattgatgaggacacaactagctcagattggaccaagactaccttatgtattaatcaaccaaacgtgcatatgttctacattagttgtactttgtatatat

SEQ ID NO: 14984 - DNA, 457 bp, Oryza sativa
  unsure (1)..(457): unsure at all n locations
agcttcacgcatagcangctggtagtanatgatggttatacttgttaagcaatgtgggtttgcagctggaacattcgttttaaatctgaaattgtactgcagctgaattatgaagtgcaaaactcaccctgtagccactgataatagatgtcggatggattttgtttctcacaagatcattgccccgctggtaaaaagaanaaaagagtgtcataaatgcatatttagaatggtaggcaaatacatagggaagaanagactgacacgaaagctccatttcattacctttagcaattctgcggctattatcacaacagatgtcgttccatctcccacctctctgtcttgaagctcagccaactcaacaagaacctaacaataacaggaccaataaacaactaagcacaaaacaacaaccaggtggagaaaggagatggcacctttaaagctgctgaca

SEQ ID NO: 14985 - DNA, 470 bp, Oryza sativa
tgccttaacgaggagcaataactcaagctcttggttcttctaccattcatctgttctagggctatcgcatttaagctgtactgtgtctcggcgctaggataaccaatgcgagtgtagtttcgtcgccgtgcattaagaactggtactactaatactacccaaatcttacaatgctcaagcacgtacgaattgaagactgcgactctctgctaggaggactcctccggtcgctgctatacggaagagggtggatacaactttgacgcttgacggtgaatagttacttgcaagcattagctagctaggggtgtactgctgcctgtatatataagacgacgcttggagagagtcgaccgtctactggccttagtgagcagcagtatgcaacgtatatgtacgtgcacgtacactcgccgtgttcgtcgtagagagagtatattaaatgcgttgacacgtgacacgctctgtac

SEQ ID NO: 14986 - DNA, 366 bp, Oryza sativa
agctcgtgcctgtgtgtgtggtgtggtgttatagtatattctatatccagactatacacatatcctaatgagataaaagatgagagagaagaggagcgggctacagatcttgagccagctgcagcataaacttcaaggcgctgtgtgtatatgacagatgagaccatatattaatagtatattaagcaattattgtatgaaacggctattaaattggttatagatgaattggatcttatagtgggctatactattaaacttgctcttaggaatccgattcgttgacctgcgcgcgagttcgtcctaaccgcttttggtgccgatgccaacgtgttgcgcgcacgtacgagcgagagccacaatatg

SEQ ID NO: 14987 - DNA, 391 bp, Oryza sativa
actcaagcttctagctgctggcatgaccagcattaccaatatatttaccatggctaccaaagcttccataactactcccataagaataaggtatttttggaggatagggatcattgcgtggtagagacctattaacacttccaacctacaaaaatttaaaatataggcatgtccgctagagtatggataaaccaaatgccatgaacataactcagttgcagcccgagagagtagttatcaattatgacctgaagagataggcctgcggctagccagtgtcctcctccaggattgtgttcaactgcgtgagcacgaccaattggctacaccacaaattcaacacagaatagatttaagtataaagagccacgtgaacacacaattaatgccc

SEQ ID NO: 14988 - DNA, 419 bp, Oryza sativa
acactatacaaactcgagcttaacaaatgcataacctctgttggtagatgtccatatatatcattattagagagatcaaggctaacctaagacgtcaagtctcctatccctggtgatatactttcaataaggatgttagaggagatgtcaagcatgcgcaagctcgtgaatcttcgtatcgaatttggcaaggctccagtgaaattggtgtaactcaaatgcaactccaataattatttccttgcagcacactgtgacgacaaaccgtcaatcaacattgtcatatctccagttatctccatgttggtgagatctagtatttccaaactgcatagattggtcagctctcctgccatcactagtcctttgtcagattgttgtatgaaacatcaaagacttggagagatgtcatgcttcct

SEQ ID NO: 14989 - DNA, 371 bp, Oryza sativa
ctgcagcttctgcaggagcggaaagcatattctattcttcttccgcgaagatcatgaagagttttctcgaagttgtacctaacccaatctgtcccgcaaagtacaatcgttagcttctagatcgcgtgttgctagcttgcgttgaagggcatggtttgcgctcttggtggcgatgccaccatactaagttgtatgcttaaacaacctcgatcatataatccactcacaacagatcaataggccgagggtctagtaccttatctttagcaacccctttctttcatctctcttacgttctggcagcagatggtcagtataaagagaaatacaacaccacggcgttgaaatcacagacaatggatcatcgaagc

SEQ ID NO: 14990 - DNA, 366 bp, Oryza sativa
agctatgccagacaggacctctggctttgctgatttagcgagaaattctcgttctggctatggtctcctacccccagcaagcattttggctggatgatagagaagatatatccgttacttcctcagtgatactacacgttgaaataaagaggttgtcttgcatttagcaattgattcgaagacaaagatatattgaagtaataatgctgcatattactacatcaatacacattctttattaatgtaaacaaaagcacaatctcgatgagggtacaatactttggtgaactgagcatggctttgattcctaaagagctttagcattagcttcaactgccgctagaactatctgcgggatataatgtg

SEQ ID NO: 14991 - DNA, 423 bp, Oryza sativa
taccggcaaggttatttctggcctactgtattgtccatctccgacaaaattgcgcgcacatgtgaaggttgcccatttttcaccagacatattcatctacccagtcaagcgttgcaaacaatcccgctgtcttggccgtttgggtatgggggctcgacatggtaggcccgttttaaaaggcagaccgcgggtacacccatctctttgtggccattgataaattatccaagtggattgaagctaaaccaggtgtcacaatcacagcagataatgctcgcgatttcttcatcaacattgtgcacagattctgagtacccaatcggatcatcactgataatggacacaattcaccggcggagttttcaaagactattgtgacgacttggaaataataattgctatgccccagtagcacacccaatg

SEQ ID NO: 14992 - DNA, 336 bp, Oryza sativa
  unsure (1)..(336): unsure at all n locations
agcttggagataaagatacaatcggaaaattgccgatgcttgctaatccaaagaagaanacattcagtcgtcctatgccgaagatcacgaagatttccaggtacgaatcatataacgatctttcttgtattgacgctcacttatcatgaaaacaatgctgataatataactcatacttgtaggaaaccatctgatatacaccctnttgggaaagactctgatccgactaacatggagacgagttccttcaaagaaactgggccgactgcagaggatcatccgagtgacaatcagccggcaaccgacaatgtagaatctagctatcaacctccgact

SEQ ID NO: 14993 - DNA, 232 bp, Oryza sativa
ctcttactccttggatacctgtgcataagcactattgcctgtaattgactgtgtctacaccaatcacatggggatcttctattctttacccaacatgaacaatgaggaataactccaccatcaactttattttttttatgattaaccgatgctctgatattaatatatcgagatattacagccgcgtgccatgcaaaaattatatcgatcttcacagacgagcccataaaca

SEQ ID NO: 14994 - DNA, 499 bp, Oryza sativa
  unsure (1)..(499): unsure at all n locations
agctngacgcgcgcccgtgcattgatgtgtgcatgcatcatatctatcatatgcacgcgcgccctagctgtagcctgtagctgccacagtgcctgatgcacactantactccccttagagcgagtttaatggtataacccactgccagctctaaatcatctataaccaatgtaatagccaattcatacaatagttgcttgctatactattaatacccggtaccacctgtcatacacacattgcgtcttggagcccgtgctgcagctggctacaaatctgtcgccagctactcttctctctcttcctttatctctttaaaatatgtntataactgacttatagcctgctattgtacctgctcttatttcaagtttgtacanaaaaaatgtattgctttcatcccaaaatataaacatccctgaacagcttcacacaaaataagaaagtactcactncgttttaggttataaaaatgtttaactttggtcacaatcaaact

SEQ ID NO: 14995 - DNA, 132 bp, Oryza sativa
cgagtcgatatctgctcatgggttcacgatagtggtccaactgctgaagttggtttgcaatcttgtatgaataaggtctttgaagcaatggagagcttcactgccgctcgtgcgaatgcatacagtgatctc

SEQ ID NO: 14996 - DNA, 525 bp, Oryza sativa
  unsure (1)..(525): unsure at all n locations
agcttgagaacgtcacanaatattgggtatcctatctatgtccatgtagtgagcagcctatttatgggctgagcccaattgcaagccgaattaaattaaggcttggcccatttgaggtgtagcactttgcaaaaacttttcggcccagctgcattatatccatttgcattaagatcaaataataagtgggccaagccaatttctaaagcccatataggcccaagcattatacgaaataacggcctagtaggcccatatatcacaaaggttatacaagaccagttaacatccaatataccacaagcccaataacatacatacatgcaggttcactgaccaaaactcagtgatcaaaacagggtcttatacaagtgcattgacaatagcnaaatatacaagtttggtgcatcacataaaccgatcttgttgagcanaggcactcttgaaaagncaactgcagtgggtggacctcttcatacttaatttgcttctgaaatacatgcagacagcttgtatatacaacat

SEQ ID NO: 14997 - DNA, 443 bp, Oryza sativa
  unsure (1)..(443): unsure at all n locations
tgggaaaggctgcaggaatacgtcaccacccgtcctcatcatgatatggccgagtggctcatcctgcagagtttcttcaacggattaaccccctcgtcctgngatcacctggatgctgctgctggagggacattcttctcaagaacagttatatgccaaccgattgagaagatgctctcaaataaggggtggagcaaggaacgactccaaacccgtcaatgcgacatgtacaccgtcaagtggacggaaatgctagccgctcagttggatctccttatgaggagactggacaacaatgagaaggacgccgagcagggtaccgttaatgccatggactctcacaagacatgtgaggtcgatggcaatactggtcactctggcacggattgtcggaaaacctgtgagaacgtcaagctcatgaacaacaacgggaatcgtccaca

SEQ ID NO: 14998 - DNA, 501 bp, Oryza sativa
  unsure (1)..(501): unsure at all n locations
cacatataatagaaaattattttacaaataaaccctcattctttagtaaggattcattagtcaatattgcactattcagggcatattcgaaatatatgacccaatatntattttttctaacaattaatatttaacatgtttgagaaaaaaaaatcgctacaaggagatacacattccctctaacaagacaggcatgatcacctgaatttttagaatgatttcataatgaattttctataggtttaatgatttcatacaaatttaaaattaaaataacctaaatgcttataaaccttagaaaatatgtgtatgacatataaagcatacgcaccaacggnaaataagcagaggataagggggtcatgcaacaatacatacagttataagatgatgactcatatggatgtaaagtntgcaatatatattaagccattcattatatatatatatcaagataatatcacttatgtgaccccacgtttttgtgagcaatatatatac

SEQ ID NO: 14999 - DNA, 443 bp, Oryza sativa
  unsure (1)..(443): unsure at all n locations
gtccaagatcatccaaatcggagttgacatgaatacgacgctaagtccgtttgaagtcagtattgtctctagaggccgaactggacttcgagttgtcactataacttgtggagatatgcacgaatccgatgaagtgacgtcgttatcactgatgaagacaatatttataccaaaattgtagagctcaatgagatctacaactntgttgttgacaactttattatttgagatcgtttaggtgtctaaatattcattacaaaataccatatttgtttttacaaaatattaaatcaacaacttaaacaccatccgatgtagacgtgctcgatatccaaattgtagaatttaatggatctaccacttctgtagttatgatatttggtattggaaatatttcaagtgtaaaacaaacattacaagatcaataggaggggcagttatat

SEQ ID NO: 15000 - DNA, 487 bp, Oryza sativa
  unsure (1)..(487): unsure at all n locations
acatggatctttattcttatatntatgccaaaaattatgtnttctattaggtaggtgatattaacataacacatgctgaatcttctcttactataaagtcataacccattaactcataaagcttaacatgtaaagatgccacatcatcatccactaacaagatgccacatcatcatccactaccaatcattaaatttaaacatcatgtaaacatgctatattatctatgagtttactatttataatntattanattctagagctcttataatgcaaacatgttaaatcatcatcccacataattcacaaaatatntcaatatatatctttattatntgttataatgcgctatntacctatagtagtcatcctcactaatgaggtaatggtatttatctcttctctctctcataagccatatcatatccattgtacttaaatgaataatctatagtagtccacagtatctttctcaataatctatatc

SEQ ID NO: 15001 - DNA, 370 bp, Oryza sativa
  unsure (1)..(370): unsure at all n locations
aatactattaagccaaaagctagggtggtggaacttctttggcttatatgaggtagatatatgacttcaccactaaattcaggacattaaatctaccggcttataaatcatataagccaataagttgaattaaaagtttaagggcccctttgaatcgcagggtagaaaaaacggaggaataggaaaaacatatgattctgacaggaattgaagtgtaaaacagaggattgcaaaacacaggaaaaacacaggaatggtcgtttgattggagcgcatgacaaacgcatgaatcggatgagagatagactcaaaggaaattttccaagaggttggagctcttgctaaattntctccaaaatctacatgcaat

SEQ ID NO: 15002 - DNA, 398 bp, Oryza sativa
tgtaagcgtcaattgtaacaaacaacatttgcaataatctatgctctggtagattttctgttctattgtttcacattatagccttcttactctcaattttgcgttaactaatgtgtactttcagtgggtaccaatggaaatccatatggtaagtcaacaataccaaacattatctaatgcatgtttcagtatatatatcacctttctagatgaatcccacatacaccatttcagtatcagctatgagctgaaactgtatggacgatgaagtctctctacaggatatatatagagttgatactataccatacagggtcttaatgccgatattttcatacatatatgcatggggctttcaattatatctgcatcattctgtaccaatatgtattgatccc

SEQ ID NO: 15003 - DNA, 452 bp, Oryza sativa
  unsure (1)..(452): unsure at all n locations
aaaaagagagagcacgattaagtctgttttaacctttagcaatctgaattacattcaaaatagcttaaaccaataatagagttcagatggaaaaaacttgggatattgatttgtttataaattttgagtgcgagcgccccttgtgtgagagatcaattntatttatttctttctttttttgtaaattgagtttctggcgacaaactaagaaactaccttgttgcgataacatatcattttccggacatgttttaagttaaaccttacaaaccttgagcataaatatctttttaaatgcttatgttggatgtatgaaaatcgtatgtttaaaatcgccttgaaaataactntaataatactatacttgtattgctttttatttttctttntggcagaaattagtggtcagccgcattttaaagaacatgtctatgttcataattcttgtcacc

SEQ ID NO: 15004 - DNA, 381 bp, Oryza sativa
  unsure (1)..(381): unsure at all n locations
agcttgataacatcatcataccattngccaacatgatgtgatcgatgtactagattaagttgtaaataagcatatattatcttgccatgtaatattagaaattccaggtcagctaattctgattaggcttgatattgtcatattacagggttttttaatctgggatttgaaaatgctagaatttttgtcgattcgtgtggagattgtatggaagttgtcctgatccagattaaagagaattgatgaaaattgtacccagattgatgaactgactaatagttgatgatgatgagtaaaagagaattggacgagtcatgcaggggcgaggtatccgtggtgaccaccagccacaggatggngccactcctcgagcgttggatc

SEQ ID NO: 15005 - DNA, 471 bp, Oryza sativa
  unsure (1)..(471): unsure at all n locations
tccctttcgtctganacctgtgtacacctcgcaatggcgtgactcgaagatacacaaaatcatccactgcgaattccaggtcacggcgacggttatctgcataacttttctgccgtgactgtgccacctttagattatcccgaatgattctgactttagcttcagcttctctcaggatatcagtcccgaacacttggctttccccaacttggtcccacaggagcggtgttcggcatttgcgcccgtacaacgcttcatatggtgccatttgtatgctggcttgatagctgttattgtaggagaactcggcataggggagactcttatcccaggtcttcccgaaatctagtacacatgcgcggagcatatcttctaggatttgatttagacgctcggtctgtccatctgtctgcgggtgataggcggtgctgaaattcaatcgagtacccaactcttcttgtgagcttcttc

SEQ ID NO: 15006 - DNA, 447 bp, Oryza sativa
  unsure (1)..(447): unsure at all n locations
gcttatncaatacaacanagaagttnacttacaactatgggagcatgctcaggtgtnctggctcgtcccgaggattcagctcgtcccgaggacacggngcaacctgaatatgatagcttgctggtaaaaagcacttaatcccacgaggccttagctctaattagggtcccgaggatgccccacgcaacccttggaagatcccgtgccggtaacaaacacttaatcccgtgaagcatgggtgtcctcatcatcggtcctcatggcctacctgtattggctacaccagctaacagatgggcccggngactatngggacaaagacttttaactcccctctccatttgtcaggtgtgcctgtcacatccgactagctagctttgagggataatgactagactaagcatatcaaattncgagttgttgccccactcttgcatgtatgcaact

SEQ ID NO: 15007 - DNA, 454 bp, Oryza sativa
  unsure (1)..(454): unsure at all n locations
tctggtgcagatgcagagtcgggcatggatctgtactgtgtcaccactgaagggaacactgcactccatgttgtggccacctgcggtgatggcccgggctacttgaggagtgcaggcgtcatctacagcaggtcccaacatctcatgttagtgcagaacaacaacggtgacacacctctgcactgcgctgtccgggctggccattccaaaatggttgatcatctaattgatctggttgaaactaaggacaactcccctagcagcgcgagactggaggaactcctgagaaaggaaaactgccgtaaggagacggcctttcatgatgccgtctgcattggaaataaggatataatcaccaaccttcttaaatattattcagaattggccggcttccttatggatgcaacaggtacttcaccgntgtacctagctgtcttgcatcaacaggtcgaca

SEQ ID NO: 15008 - DNA, 457 bp, Oryza sativa
gcttggatgtttcttcttgatgaatgccacatgattgatgcatgggctgattgcagctgagaaaatctccctggacgaatggtatatttcgtggttgatgtcttcgaatctgaagtccagtaggtgctcaagttctgccgaatcttcataaaggaaccaaactcgtgcgtgtttctgtaagccttcatagaagctaccgaaccaatctttgagcagttcagccggaagtattgccccacctactgttgggtagaggcgtactttccatatgatgtgcatcttccatgaatgagcttctcttctttcacaataatgatcggctccaggcttgggaatctatcttctgacacgggtggccgattgacaaccttcataactatcaggtttaactcaagttgtagcagacaccaaggtccacctgctgcgactactaaagcgacagctatcttagcctatg

SEQ ID NO: 15009 - DNA, 477 bp, Oryza sativa
  unsure (1)..(477): unsure at all n locations
tgcgcgaagccatcactagggcgtaagcgagcttttccatttcaatgtaccttgtcttcgctccttgcagtgcttcggagacgaagtagaccggttnttgtccaaactttgtttcttggacgagggcagcactgactgccaccggcgaagctgctaagtataatagcagttcgcttccttggggtgggcttatcagagctggcgggctttgcaagtattgctttagctcgtcgaatgctgcttggcactctggtgtccaattaaactttcctgcgccccggagggtcttgaagaagggcaaacctctttcggctgcctttgagaggaatcgtctgagtgccgcaattcggcctgcaagcttttgtacttcatgtacgcttctccgccgagaacttgaactgcttctccgccgaaaccgccgagcgatgctggtgctggggtaatggcttgggtangcaaccccattttggcatatgc

SEQ ID NO: 15010 - DNA, 147 bp, Oryza sativa
tgcccgcgcatatgctttctggacggtccctcgtcgccaattgccttgaaagggtttgcccgcgcggggagaacaccaatatacacccgattctccccaccgggcacctgtcgcgtgagcaagtggctgtactcaaagaccgacaca

SEQ ID NO: 15011 - DNA, 482 bp, Oryza sativa
  unsure (1)..(482): unsure at all n locations
tataaaactcagcttaacatccaaagaagaagaagaagaaaccaaaacactctacttagaatcaacttttcgagaaagaacattcatctcatgtgttttcaattttgtataaagcgaatccaaagtcaaagtagacatgtcaactgactcctgaatagatgtaactttcatctcccaaatagacatatcaagaccgttcaaaaagtgacgagaaatctcatattgtggataattagcaccataagaagaatcaatagatctaagatcactcaaaattttattaaacttagagagatagtcatccaaagcttctccaggtttcatctcaaatttaatatactcctttntgaaaatatcacgacgaagntctttaatgttatttgttccttgaagaaagttactcaaagcattccaaatttcataagcagttcgaaagtgcgcaacacgatcataatccgaacgagaaataccactcaaaagaa

SEQ ID NO: 15012 - DNA, 438 bp, Oryza sativa
  unsure (1)..(438): unsure at all n locations
agcatgtactggtgatgggagtaaagagctgcgattatcactaatcactcgaccccctgtgctgaaagctgattcagatgagactgacgtgatgggaatagtaagaatatcctcggccaactctgccacaattggatactttaattcattcatcctccaccactgaagtagattgaaactctttgcaggaatatcctcaacaggatcatctaagtacctctttaaatctgacttatgaagactagcagcattctttgatttcatatactcatganattggctagcagcagagaaatgactactagtagtgcccacagatgtactagtagaatgaatggnggcatcattttcctttgatgtgctctggagntcactntcatatgatgcatgcaaagaattcaatgtggattccacattttgtaagttcttangaagtac

SEQ ID NO: 15013 - DNA, 399 bp, Oryza sativa
  unsure (1)..(399): unsure at all n locations
tgaattatcatccaacgctcagagaatgctggtgacttctttntaagaaanaagtgactttcttattaaaaaaaagaaaaaagagagtttctccggtgcttggaaatgaagatgaaccgtgatccaacctaatctaatggtttacaatacaaggtacctataaaaaggtacttaaaaactaggccaggtattatcttatacattggttgaaaggttagatcggtaattttgtctatagtatcatattagatcggtataagaagttcagctgttcttcataaatctgttgtttgggatcatggagcagttctgtatggtgaatggcccctgaggcccggatgtattatgaagttcccgttatcgattacagggaacatacatagcgttagaggtggaaga

SEQ ID NO: 15014 - DNA, 318 bp, Oryza sativa
  unsure (1)..(318): unsure at all n locations
agcttgactntaagctcgcgagcctgtcgagccgatctctaataactcggcgagcctcaacgactggctcatgttctttctcctaagcatttactcccnctctctctctcttactacgtcaaattactggagtagcacaattgcacatgtactggcagggcaggagggagcactatgcatttgttgtcccatctcccaacaagagagtaggagtactagtgtgtagtattaggagtactagtgtgcggcttgcacagttgcactagtatacataggagcactagtatattacttttagncatctaatcatgcatcaca

SEQ ID NO: 15015 - DNA, 376 bp, Oryza sativa
ctggtagtactcatgtggcacattcttatgtgtacctgttagtgtgctcacactcagatgcgtatcaagcgcattcatcagccttgccatcccgaaatccgatacacgggcatcgaggttgatgtcaagaagcacattgctcgacttcatgttccggtgtatgatgtgtgggatgcagctgtggtggaggaatgctaagcccctggctgaaccaattgccattttttttcttgctgaccaatcaagcttcacactagccttggccttgtcatggagcacaacatccaggctgccgtgtttcatgtactcgtagacaaagagcctctcatctccaatcttgtcatatccaagcaatgggacaaggttgcggcgcttg

SEQ ID NO: 15016 - DNA, 469 bp, Oryza sativa
  unsure (1)..(469): unsure at all n locations
tcttccaagcatacggctntctagatgtatatgacgatctctatacagatggatcttatatgaatcgtatgatgaagtaccacatgagtggatatataggaaaggaatccaaatctgccgaatcgctcatgttatgatcttctacatcctaggtctccgcgttccgtcatctggcttatgttcttcatgtagcattcagatcgaatgactctatgaaattacgtcgatacttctacatattatgggtaacgtaggagacatccctattttcccccgggggtcttaattaccactgcttagctttcaattcgcctctgaccatcaaattaaatgtgaataacccgtcctcctctctttgaaacaaggggcgcttccggttctgtgcgtgcttcanacaattntgtcttctccatattaccatatctctagagtncaataatttctatgaggaactactgaactcaatcac

SEQ ID NO: 15017 - DNA, 289 bp, Oryza sativa
gcttatcctatggatagaaatacttgggactgaatgggagtgtatgtgtggatatatatacaagctagtcattgagttggttctagatagcatttatgggtttataacaacataacttttctactccctccatccccaaatataaggcacagtcactcttctctcatattctataatataagacgtgcatgcatgcatacattaactagcacatcttgatccaatagaattgatttgtattaaaacctataccatcaaaccccctatcacatgcttgcttgcataatgt

SEQ ID NO: 15018 - DNA, 473 bp, Oryza sativa
  unsure (1)..(473): unsure at all n locations
gtcactgggctaaagtgtgtgtcaacataaatggtgatataatntaattttttagaacgtataggggttcgagacatgggggtcccctctccccattgctgtttaatatggttagtgatgctctggcagttatgcttgacaaaactaaaggtaatggtgtcttgactgggttagtccctgaaatctttcctgggggtatcactcacctacaatatgctgatgatactgtggtgtttattccttttgatgaaaatcaaatcctagcaactaaatttatcttataatgtnttgaggatatggctagtatgaaaatcaatcaccataaaagcaaggcgttcactgtgggggttgaaaaagatgaaacatatnggagtgctcaaatgttgaactgccctgtaagngctttttccatgaaatacctatgctttncaattaagccagaaaaaaatcttaaccatgaatttgattttctg

SEQ ID NO: 15019 - DNA, 384 bp, Oryza sativa
ctttgagcaaaaagataaagatcggatagattcgaaccgcaattgctaaggtaatcactactatgccagcccacatcatgatcttcaccaacttggagttggttctctcgcgaaaatcgcgagttgcagagatgagaaccatgaacagcaagatcccgaataagaaaacagaaaccgacgaaaccacaagagtgaagactagtagagtctcgtcttttgtcattctttgctcctttctcactcaatgattcattcgaacttcccgaccaacaattctatatgtctattcataggggcctcgttgctaagtgctacaagatctaaagcactggaactcgtggttatggacccgaatcctttaatatggaacattgtcttttcaag

SEQ ID NO: 15020 - DNA, 385 bp, Oryza sativa
  unsure (1)..(385): unsure at all n locations
agctntacagacatctcgtcgatgaagcaactgctactgtggccgntcctgcctccatcttccatgaatcacatctgacagacgttcacatggcgacatgaacccccaaggtcattgatttatatgaagggcagcaacaaggagggaagggcgggtcgcaaacacatacccgcggccgtcgcatcactaccaccaccgacgcggagctagagaaggggtgaagcatattccgtatgcgctcgcccagcagcatgagcccttgtggtcatcgattaccgaggaggacggtgacagagagggggagggtgcgcgtcaagcattgcagctagtcactacgacactgtangggtggataccgagctggctaggctcggctcgttatgct

SEQ ID NO: 15021 - DNA, 476 bp, Oryza sativa
  unsure (1)..(476): unsure at all n locations
tgttcttnatacgaagacttctcaatgtacttgctcattccaagccattacaaccatccgtacctcaattttaatctcctaataaaaactttagatgtacatatcatatcctttatattctaaatcaatctattatccttatcctctatattatatttctctctccttcttgttacctatcccaagtctattttaatctccttcttgctatagtgttagaggatgccctaattggcctaccgagtctaggacaaatcgatacgtgttcaccctgactgggtccctcggagtgctcgttcggcatcatcttccttctcgtggcagcgcgtctctgggtgctgctgtagtttgcacataacgtgctcaaggtgtggcggcgtgattcagcatcaatagtacttatattcttgatcttggacggaggaagtattggtntgtgttatgaaatttgagaatnttgcatgtgccacttaaaa

SEQ ID NO: 15022 - DNA, 503 bp, Oryza sativa
  unsure (1)..(503): unsure at all n locations
agctntaatagcttangcagcgttcgcgctcactaaagtgctttctttttcttatcttntagacttccactatgaattatgtaacacccataaaagaactctccttgcatgagtntctntattatgaaatcaacatttatattgacaaacctgcttagcttcagttggacaatgatacgctgcagtaaggcatctcattgaaggacattggtggattctgcactgctgttctattacttaacttcagtagagaataatattgcccttttgcttgacttcatatggcgatatatttctcattntagatggacattcgtctaaattatctgtaccgcgatctttttctgaaaatattctctgcaaagagaggtcatctgaagcattgttataaacagntagtagcaaaaaaaatcatggacaggcgtaatggacgcagtagtgaaacatagtaggagttgatgtatgttgattgtattcaaacgtgttgactgacaggatgtcta

SEQ ID NO: 15023 - DNA, 457 bp, Oryza sativa
cggacctataaaactaagcttctccttgtaactagggagaatcagatcaagggcatatatatggatgagtcttcagtcatggcaattgcatatgtctataagttaaacttagtgccccgctattatcaaatttaatagcactagatatatttaatcttatacttcggtcgatgcaatgtattagtacacttacaaattataagcatttaagttcactggaatgtctgtcgagcttcttcactgttcacagaattcctcttagaatggaaaaccttattcagctgttctgtttgtacgtatctcttccatgtggagattctgagcgcttagcaggttcagataaatcttgtctttgaatgctggatctggaagatgtgttttatccattggcgtagaatggattatttacaagctgtggaaagccttgatggtgtctatgggtttcttgtttttgaat

SEQ ID NO: 15024 - DNA, 504 bp, Oryza sativa
  unsure (1)..(504): unsure at all n locations
gcaagctttntattagttccttcggccccgttcgatcaccacaactggagagcaaattttatggcacacaaaacgagaaacctcactagcacataattaattaagtattaactactataaatttagaagatagatttatttgctgtttttaagcaacttctatatagaaacttttntaagataacatagcatttaactatgtgaaaacgtgctaacggaaaacaagcaagttaaaatttgaagtngaagaagctagctaaatggcactggaggccatggaccacattagagtttgatccaaggctaaagctatagtagatacatatacgtaccaccatttgatccaaacccttgcatctagatggaccacctttcagcttagtagttccatcgcttggctttcaactactgccagaattaaatcttaaaattagaagtgagttggtttttntcatcacaattaatctccacattgactgttaatcataagaacacatagataat

SEQ ID NO: 15025 - DNA, 493 bp, Oryza sativa
cggacctataaaactaagctttcatcctttgccttcctacacctcttcgttcatgtgcctcaattctaccaacaaagcttcctacaaaagataaaatggctcataggcaagataaaacaatactaaaaattatgcacttggatcatgtaaaaattccagtgtgtattcagtgaatcattatgcaaaatattttcaattgcacactaagaaactaaactctggcccctctaatagttctcggattactatagtcttctgcagccacagcatggcagcagacctcattcaatatttacatttagaaaatagaaggtagcagccagcaggagtatattatctccattatatagttcatttccttacaacagagaacctgtaaccaacagataaagatcagcatctgatatttattaccccaaatagaatatttgagttctatctatcccaagggtaaaaggatattaattaataagtgaacatccagcgatggagc

SEQ ID NO: 15026 - DNA, 501 bp, Oryza sativa
  unsure (1)..(501): unsure at all n locations
agcttgttgaggacgagagtcaaatggaatgccttgttgattattgcactcgcgctatggtctggaatttcgaactggaacctcctctagtctactacctcaatggctggctgctgcagaggaatctggatgctggtgtgccaataacataactgtcctgctgcttctctatttgtttgccattctaacgtgaatgatgccttcctgaacttggcagcgtccacgatcatgagaagctgctctgccaagatctggcccaaataatgtcatactagtaacagttgaaaagtgagaagcctgaccaaagaaagattttctctctgtcgcattcttctctatatgtacatattttccccatattcatccagctagatatagccatgttcatttcatttattttcttcgttctgtgcgttatatacatacatatcacctcacagatgngaatgttccctcctatgaactgtggagagcaacacaatcttctttgtttcttgacaa

SEQ ID NO: 15027 - DNA, 443 bp, Oryza sativa
  unsure (1)..(443): unsure at all n locations
tggggcccaataggagcattctgggtaccattgtcagatcatactccgtgctcctagaccggaaaggctggaacaaggacgctacaatacctgacatgttaacagaaccctgtgaaccattaccccgtcagtttgatagcgataatgatgcagtctataattggcatgtgatagatgatgaaccactgcccaggaatactcgatcctcatcggaggacacaaggccatcacctacacaaaaaaggaagtcttccaaaccaaaacagagatcgcggaataaggccaaggctgattcttcgagtggtaacaatgctgaaaatggttcaagcggcggaaaggattagcacaatgtgatagatcgcatcanagtgcacgaagcagcagacggagcatatggccgagagagtatgaccgaattaccaatacccttccaccatatactc

SEQ ID NO: 15028 - DNA, 488 bp, Oryza sativa
tctcgatctgatgctgatggcggcattctccagtcggacaccattcctccccttctctatttcctactatactacgcttatctgataaaccgctgcaaggccatcatgatcaactttggtcacgtgaacccggtgaaggcatggtccctaagcccacagtacactctctccactctacgcaagcgaattctctatgtggaccaacaatgacacacatcatgtatgtgcattgtggatggcctcttattcatgtggtcacatacatatgatggccctatgttaccacaaagtttatgtaagagtatttgcttcactgtgttcatcttggagattctactctagtaccagatagtctggaattcttattctaacatactccctccatctacttttgatagtcatactttcaattctacaaaatttaattatgatacgcatatttccattcaacaacttatcatcttaatgacttcttggaattaatgcgt

SEQ ID NO: 15029 - DNA, 438 bp, Oryza sativa
actcagcttctcacttatcaaacctgtaacgaggtcactaatattttctttgtagactgatattcttgcaccctcttttgtaaccattctaaattagcctccttactcattatacaaatttatatggcttagtcgtgctatactagccggctttacagagatagatacaaatttgccatcggagatactaataaaatcgcagctagaaagatccctccccgataagcattggatattcccatggcgccactcaaaagtagcatcggccattgcaacctcggccgatgtatccgcttgaataatatcaacatcatcgccgtgccattgaattaaacattgatgcatggtagaaggcacacaacaattggcatgaattcaacaacgacccaaaataacatggtagttaccttgcacatcgacgatgaagaaagcggttgg

SEQ ID NO: 15030 - DNA, 485 bp, Oryza sativa
  unsure (1)..(485): unsure at all n locations
agctngaatacaaattagaaataactgaaatttgaaaattataaagtgtaatatgagaagaatagtcaatcgtagtacaaaatacgagattaattaaaattagaataataaattaattaattttgaaattagacaaatcaaaatatgagttcatgtatacaatttatcaaccactaaatttatcataaaaattaaaactattaaaacaacacacgattaatgaaaaaccgggataaaaattttataaattcttgaaagtgacaaataaaaatgagagtttgagaatgaatattatttacaaataacttacataggaaatagatgagataacaattcatatagactacaatacggaattaacttaaggtagaaatataaataaattaaattatgtgattagaaaaactaaaatgaggggtgagtgggaatataaattattaataacagataagatattttaatagaacatattacatctataacat

SEQ ID NO: 15031 - DNA, 442 bp, Oryza sativa
tggagaagaattcttaggtggagtcctggcttatacctcagttgagcgcctgtgaagatggagccgtaagcccgctagtccgctgctgtttatttttgattgtcaggccttaagtgcctttgtaataatgtaaatattatcgatataataaagatgtgtcttttatatcatgtttgtgtggtgtaccctggcttttactgggatggggattaatacactagcgttcgggaaaatgtatttttctcggtcgcgacaaatacaagtcaaggtgcgcctaattggttgccaccgattcagccgggcctgagagtttcgctgtggaatcagggaccgcagttcgacttcatcaacgctgctcatgcgccaaccgttcggcagcaagctccaactccaggcttctgaacaaaccaagcaccaatccaagcttgcatgatgtggcaca

SEQ ID NO: 15032 - DNA, 384 bp, Oryza sativa
  unsure (1)..(384): unsure at all n locations
agcttcacgaatcttcgagagaaccacgatcaactttnatccggtgaccgcaactatacgcaaacaattaaaaacctacacaagacccaaaataaagatcctatttagactaaataatagtgccattagatagatctcaattttatggaattactggaagtggaacgagatcattcggagttacggatcaagagatatgaattttggcaggtcaattggttttctggacaaggaaatgatttatcggaatttttctggaatacgagaaatggtttatggaatttatagaataatattcccaagaatattattgacatttcaatggcatttgggaccaagggaatgaattattggaatccctggattaagaggaaggatttatgg

SEQ ID NO: 15033 - DNA, 426 bp, Oryza sativa
  unsure (1)..(426): unsure at all n locations
tgctcntttcctggccatatctttttgcaagaactatgataattaattngtgttatgaggggattactagaggtttacaatgtcttttttgacctttcattctaaggaacgtactactgcaactgcatcaacaatccctctttaatatagtctatgtttagccctttttattcagcctattcatacgcagtttgtgccgggttcccgcagcaaaccgatcaaacccagggatacccccggtttagacgggttaatttggtttcagccgtttaatgggtttgaacgcgcgcgcgagggtttcttccagcgatagttaaaatcggccatcatgcccatcaatcaacatcacactatcgagcccttatttcattatatgggttagtatctcttaatgttggaatgctgccattctgtttctatactgac

SEQ ID NO: 15034 - DNA, 369 bp, Oryza sativa
  unsure (1)..(369): unsure at all n locations
agcttctatagaagatcctacacatattattacattgttggaatttactacaactnttagagatgcttttatacctacagctgtgatcaggatgaaaaagaatgaatttcgtagattgaggcaagggtttatgacagtacaagaatatttgattaaatttacacaacttgctcgatatgccgcctcggacattcaagatgaanaagaanagattgaaagatttatagaaggactacgtgatgaacttcgaggaccaatgattagtcaagatcatgaaaattttcaaagcctagtcaataaagtggttaggctagaaaatgatcgtagaatggtggaaggactccctaagagaagaatgaattacaatga

SEQ ID NO: 15035 - DNA, 148 bp, Oryza sativa
taaacatcgcagtggacaacagtgtttgctatggtgatagatcttacagtagggtttggaaaggggcctggcagccagcctattgatagcgaagatggtcacgcggcgatgtggaaaaagaactatatattttgggagttaccctatt

SEQ ID NO: 15036 - DNA, 361 bp, Oryza sativa
  unsure (1)..(361): unsure at all n locations
agcttatggattgcaaacggataactgatgctcggatgtcgctgctagccaatagatcatctatggttaacctcacattgcaggattgtcgcggttntaccgatgatggagtcagtgaggtcgtacgtgcacggaatttggattctctgattggtcaacgctgtcgcgtttcttggaaagctgtgaagggggctgccaaatctgttcgctatgatcgtaattgcccggtctatggccgtctaagtagatcgagcatgatatccactctggattaggtgcccctcaagaatttcaggtgcgctctcttagatcccctgttgaaatgtgtgagtacatgagtatgtgccaggtcacatcattg

SEQ ID NO: 15037 - DNA, 471 bp, Oryza sativa
  unsure (1)..(471): unsure at all n locations
tgtggggttntgttgacggtcgttacatataaatttttaccgtcaatataactaacataatggagaattagctatgcatacaatgcatatttgttttcaaataatatagttctacttgtacttggagaataacatgttgcaggaatttatcaaataaaataaagacaaagtggagaaaacctcactcctaagcaagcagatggataagggggcccacatgtcaggtgtaaccgtccggaaactgccttaactgtcaagaccgccatgaggacccacctgtcaaccaccctgctgaagctggaggcctgctgggccggcccacgttcggctgaaccatggcggtgccctgtcaagtcaggcctccacgtagatgtccaggattgcttatcaatgacgtttgtgacggtaaaatggatatttcgcatgccagtaaccgncataccgaccctattataggaggagctcattcac

SEQ ID NO: 15038 - DNA, 347 bp, Oryza sativa
  unsure (1)..(347): unsure at all n locations
atataacaactnttagcacttaggaattgttacaaaatatagcaacttcttcaccaacattccattcccaaccaatcacaaccctccaccattcactattcccacctacctccagcttttaaccaattacaacctcttcctatttaattctacacactttcttaataaccgggtctaactctagaactacttatattctgggatggagggagtaacaaaaagaataaatattacgcacgcagcattaaacctgctataattatgatctggtaatgttgtaattctggaggtgtntatcttggtctcaaataatatctacaggagcttatatgtatggtaccttgaca

SEQ ID NO: 15039 - DNA, 446 bp, Oryza sativa
  unsure (1)..(446): unsure at all n locations
tgtcattgtctttatgcattcatcacaaggacatacgactatagagagaaattaaagctccatactgtctatacatgcttgagggcaacattttcagttgtttcttttcttttctaaagttgacatgcacaccatggctttgctttttgtgcctttcataacctcaacaaataaaaattgcagtattttggtgcccctctttctttcatagttgggacaatcatgcatgctcttctcagtactagacatactctcatgtcttgtcgcttttacaaatgtgtttgcttgcaatggagtgtagtattaccatggagcagagaaggaccaaagccacataaacaccggagaatggtactagctttgacatgacttgatagagatgttgtatccgctttaatgcctacatacgangggatgtaatacaaactagtacagtaaatctggat

SEQ ID NO: 15040 - DNA, 333 bp, Oryza sativa
gcttgcattggatgaggtgtgctctctatagacattgtagttgttatatagacttgatctgttggaaaaggagcagtggatatggttacaaacaagcaccaatcctaatgtagtcaatgatcaattcgtcagaatgaggtgatttgatttcttgacaccctagtaaactcttatatcttgcgtaggaggatgtgtaaagcgtgcatacatgtcttatttatatcggctcacgtgtgtgtatacgtgctaagtatagaggcaaaacttgctatatgatacccaaaagattgcgacctttgctgtgagacatcccaagaatcgtgaatttatcct

SEQ ID NO: 15041 - DNA, 473 bp, Oryza sativa
tggctcctatagtagtaggggccactattgaacatgccacatttgtaatgcagccgtcggagactaggagtttgtggagtcacctcgccgtgatgttgatggcgcagctcaacttgcaccccttgatgcacggtggtgataatgggtcaatgcccatgggttctttcacaaccctatctatccctcatatatttttagttcaaaataaatagaaatttagcccaccccattttatacccatcaatattttgtaggctaaaatgatgggcactttagcatccctaaatgcacccgatgccaccatggacggttccgtttgaaagttcaagtgccattaatttggctttgacgattaatgacgaatcccattacatgagactaacattgttataagcatttctttatctactagtctcatatggatatgaaagtggaatatgtgagacgtgatttctcgactttatatgagttga

SEQ ID NO: 15042 - DNA, 412 bp, Oryza sativa
  unsure (1)..(412): unsure at all n locations
agctntgatcccggaagaacatgccgacgtcctcacttcagctgcttatcttgaacaatatcaattcaaactggagaaggccaagctgagattagccgaacgtcgggagcgcacggatattgaagccacaatccangccaatcggcaactcgtgcatgaagagaagtccaagcttgatcagctatctgagggcccgatcaagtctaatattgatcagcttgaagctcgtaagattgagctctnggcacaactccaagaatgcaatgctgatatgaccaagttcctaaaagtcatctctggaaccgatgctcaagatacccacgctattgaagaagtagaacacattatggcaagagctatatcggcgatctagcgctacttgtctcagtgatattctataataggatgtagt

SEQ ID NO: 15043 - DNA, 442 bp, Oryza sativa
  unsure (1)..(442): unsure at all n locations
tagcccagtctgtgagtccgggaaagcaatttctgcatatcgtatcataactgtgtaatttccattttcaagtccaagggccggaatacctcagagatgatggcgacacccttcctagttcaaacaactttgaatcaactacattgtttaaattttgggaactatatataatgttctttgcatctgtggcccggaagtagtgtcctacactgctgacaccccatcttgtttgaccagtaacataatatgttgcagctccaagatttgcaggatctgcttcataaatggtattatctgatcctctcgttgatgtattactaccacagtcaaccgcacaagaataatctacgatcacaaaattgtaacaatcattaaaattccttagctcatattattgnctctggttcaatgaagattgagaaatgtacattttggagatcca

SEQ ID NO: 15044 - DNA, 520 bp, Oryza sativa
  unsure (1)..(520): unsure at all n locations
agcttggacgacctatcttttggtgtgttatgactttctatcctattgcagagaggttcttacattgactaaaatatatttatgatgactaacattnagatttgtacatactgatcttgttgaaagatgctacaagaaaatatgtgcttgattggccaacaaggttcataataatcaaagggatagcaaaagggcttctttatcttcaccaagattcaagactgacaataattcatagagatctcanagcaagcaacatcttgttggacacagaaatgaaccccaaaatatcagactttggtattgcaaggagttttcatggtaatcagcatcaagcacacaccactcgagttgttggaacatagtacgtaataactagaaattagcccactagatagctctcaacactctaggttntattgactagctaaattcanactgtgagataatcctttgcaacgattgtgcattcattgctaatgaaatggttatacagcggtacatgtctcctgatatgtgt

SEQ ID NO: 15045 - DNA, 366 bp, Oryza sativa
tcgacgatgccatcgccggctgcgactacgccttcctcgttgtcgctccgatgaacttcaattcagagaatcctgaggtgaacagctaattaacatcactattgactctgatactctgtaactgatgtgctctactaatcttgatttcctttgtttttttttttttttgcgatgttgatggtggtggcagaaagatctggttgaagccgccgtcaatggaacgctcaacgcgatgagatcgtgcgcgaaagtatggacggtgaagcgcgtgatcataacatcgtctgacgcagcgatctccataaaggcgctgcaaggcgacgggtatgtgctggacgaagagtcctggtctgacctcgactacct

SEQ ID NO: 15046 - DNA, 388 bp, Oryza sativa
tactcagcttcaatggcataacttggccatttggactctgaattgttccgttcaagactctaatttttccttaagaagccaagaacccatttttgtgctttgtttctgcttgttatatggagtttagtagagtaaaagccgcttcttttccgttggtcgtgtagacgctgcagcttctgaagatccgctctttgtggaagttgaagccgacgtttgtgaaagcgagcaaggcaagtcacatcatccttgagcatattgaatctcagtttataaaattattttgatttaaattaatgcattaccgctgtatttaaattcccgcgttatcactgttttgtttagccatgcctatttatccttgtatgacattattattgctatttgtatt

SEQ ID NO: 15047 - DNA, 465 bp, Oryza sativa
  unsure (1)..(465): unsure at all n locations
agcttgcttgagaggggtatcgaaccggtcaccgcttattggccggatcgatcaaagatctggtagtatgctcacggcggaacgctcaacccagatgatggctccctggtcttcagcgatcagatacgcgaggctgcgcgtcgactaacgaacgcagtggaagcctcttctcagggcacgttccgacccgacagagagaaggacgagctgtcactcgccctgcagactcccgagcatccaggacgaacacgagggaaaggggtgattccttggaagaatggattctaggaggacatccacacgtacatgagtcggatgaggagcaagagagataccgaggcgaagattgcagatcttaagtacagggtatcgagctacgagctcancatgcaagaggaggtggcanggaaggttgatgaacgcatggtcgcacatcggtcccatgatccccagccgtacattcct

SEQ ID NO: 15048 - DNA, 443 bp, Oryza sativa
  unsure (1)..(443): unsure at all n locations
tnctgaccagatggattgcacgagcatgcattggtcggttgatgtgtggatgcatctagcgttcgtgctacaggagattaattggccaatcaatatatgcgagctgcatatatgcacggatatatgctaacatacacacacaagattttctatacccatatttttttgtgtggtactaaacagattaatctgttaattgatttattttgcatgtacccacaccaattgcctctgtcgccgctgctgggcgttcgcatcttcaccgaactgccgcctcgtctgcagccgactggtgtttccgcctacacggttgattggtcacaccaccgttgttgggcgtttacgtcttcaccgaccggccgcctcatctgccgccgactggtgtttcctgctacacggntggtcggtcacaccaccgttgttgggcatctacgtcttcaccg

SEQ ID NO: 15049 - DNA, 481 bp, Oryza sativa
  unsure (1)..(481): unsure at all n locations
tctcagtggggattatagagactctctcctgaaaataaaatattggatcctcatgagaatcaactacgttgcattggtagaatctatgtttcatatttaaggaagttatataagaccggtatctatagtttatcataaaagaatgaacttacaaagntggttatcttttctacatgtgcattatgttattagaggttgtaatcatctatgatgaatgactattctgaaaaagccgaagttaacgtcagtagagatggagataggaaaaaattggttggagcacagctacctatataggcatcagcaatacacgagctccaaacgaagagaagaacatacaagctgcgaatagcgatacaacctacagcttcaatgagtgatcccacacgtcacctacgcttaagtctgggttttttcacatacacagaaccttataggaacttctatttttttatttaccttgatagttttattagcctat

SEQ ID NO: 15050 - DNA, 445 bp, Oryza sativa
  unsure (1)..(445): unsure at all n locations
ntagtatgaatttcttcaatatagtattaccaacttttgttatcgtaatgttaactgaatgaaggcgattcattatacattgcacgcagagtctttggttggaaagaacaagcctagccaagtgctacttgctatcatcgagatcattaccgatagcatgggaagaccatcccctgaaatggagatggatctccttacccgattccaggtacgcgttccaacctactgtagcaatgtacaagataaatttaacgttagctcatttgtttgttccctttggaaagataggtatatatatatatatataggtacatatctcagcacacaaccttacgtgtcatatcatgccaccaactaacanatttactaaaaattctaaaaaaaattgacatattgaatacttcaatagattatacatcatgtaagcatcatcttcaattattta

SEQ ID NO: 15051 - DNA, 454 bp, Oryza sativa
  unsure (1)..(454): unsure at all n locations
gcttcagtaacatgcaggccaacatatatggcctatatctacaagtgcaatgtactattcttagggcttggttggcacacctcanacctctagattatggagtctataggttaaaatataatgatntaagcatctattcttcgtgatctanaatatgaacaagatggtgcggtgcaaagaattcttgcagctggagctccaccaaaaggcttctatcaaaataaactggtagcacacatgacagggtatcaactaattntaactntgaagtactgtcatctaaaaatactaattntaagttctgaagctaattaatatatttcctgttcatatataagaactcataagatgaagaatgcagaagaacatttagaataagatgctaattaatctgatctcttcatatatctctatggggcaacaggttcagttataaacatacacaattagttat

SEQ ID NO: 15052 - DNA, 413 bp, Oryza sativa
  unsure (1)..(413): unsure at all n locations
tacgggacanaacatacctcaatatacgaattaatttctctttattcttcttatagattactactagntcttgcagcgatttctttttgcaattcaacataggaagtttgcaaagcttacgggacaaaacatacctcaatattgtaattaatttcactctattcttcttatagattactactagttcttgcagcgatttctttttgcaattcaacatagaaagtttgtaattctacttgctttacttagttctattgttctacagaaatatgtagtagctatacgttgttgaaattaacaatgtcctttatcatataatctagattgtctgactgttttccttattatatcattggagtggtatcatactgtacatagtgattgtgatggcacggcgttctcttgtgtcccct

SEQ ID NO: 15053 - DNA, 296 bp, Oryza sativa
acattaatgcccacaatctataatctcttctcagctgatctggcgggtcataaaatgattatagatcacctggcattattataccgtatagtggcaaaatgactgcatgcactgatgctgctatagaacctaacacaagaactggcactgttggctgattaagataaaaaagccgcccaaatggcgtctttttaatggccttactgtctgagtggtcaacctcttgttgatcgcttgtcattccatcctcatgtatatcaacaggcaattctaacgggctcttgaaggaatacctg

SEQ ID NO: 15054 - DNA, 435 bp, Oryza sativa
  unsure (1)..(435): unsure at all n locations
tctagcatcatactcttgcgctctcgcgaccaactttattgttctgtgtgttgagagagacgagtttcaacatcttgataagcctcaagagacttgaccgctctttatactggcttatttaataaagagaaaaaaaagacataaacacatgtcgtcactcgtcagattcagattctttgatagtagaataaattntgtcacatttgaaatgttggattcaaagatatccacttcatgagtgatgcctgcataactgcatattcttaagaaatacgatggagataacttaactacgatggagataacttatcttagcagcataatacacattaagtcattaatgcagagtcaattgcctaaattgatactaccttcttggaggtacctacgactttattgtgcaaacagatctagaactataacgattcatttaca

SEQ ID NO: 15055 - DNA, 382 bp, Oryza sativa
  unsure (1)..(382): unsure at all n locations
tgcaatgtntgaccttagcttgttgacaagtttcacatctcataacatattgctggacatccttcttaagacccttccagctgaatagcccccttattctctgataagttgcatggattcctgagtgaccacccaagccactgtcatgaagagctaacatcactgcttgcttagcctccaagtgattacccagccaaatcttccccttatgcctaataattcctcgttgtaactgaaattccccaactccttcaggattcaaactgagctcagttaacaagggtttggcttcttcatccttctcatatacttcttgacaatttccagccattttgtacacacgtggatatagcttggctcttatcttcttcatttcttgaca

SEQ ID NO: 15056 - DNA, 455 bp, Oryza sativa
  unsure (1)..(455): unsure at all n locations
agcttcctgggctaaaagtagtatatctatactcctttaaaagaangtacgtgggggggcaatgaatctgtcaccccacctactcccattgtaaattttgcaagttaattcctgaacttcttaatattaaaaaatatcaaatctatatggatagccacattaaattagagtaagatgaatattccctatagcaaaaaagatgggtaacacattaatacgttttcttttatccgtagcagagcacatgcatttagctagtttcaatgaacattttgtagacaacttacacgttctaatggaaggaanaacgcacaagcactggaagatttactttcagcattcagggcgacagctctttcttgacaatcaacaacaggggaaccactagagccacctttggtaccagatgcagcctatagaaacatatgantacatttaaatgacagagagagtaa

SEQ ID NO: 15057 - DNA, 464 bp, Oryza sativa
  unsure (1)..(464): unsure at all n locations
tatggctaacaatatgctcggttntcggcagaatggatgcagcatgattgtgagccccagagaagacgaagttctgggaatcaacaagagagtacttgatttcctgaagtaaggatgttgaattgtagatcttcacatgaaaagtgaaagggattccaaggatagcataaggagggcactccatggtcacaacaagtggcggctcctcgatatgaacttcaggtaacctttctttcattataacacggctatcttgactctctccaatgcttgaatctcttgaccagctcangcaaatntcacctagaaaaaagcttggactaatagtatgtggattcactgaaaatattcctttgtattcttcactangagcaataactgcgtattcattggaaatcccactgatctgttgcactgagcagaagtgttttccatcatcattagacacaatagtcatcgtgtgt

SEQ ID NO: 15058 - DNA, 402 bp, Oryza sativa
  unsure (1)..(402): unsure at all n locations
agctntgcatcgaagtaactccggcgtcgaagctttcgttcatttctgaagagctgtgtattggttgtggtatttgcgttaaggtatgtttgctgctattatacatacgcatggaactaggatatgtctttgttctgtaatgtatgtttctcacttccgctatgatctttgttgcagaaatgcccgtttgatgccattgagattatcaaccttcctaaggatttggaaagagatactactcatcgctatggtccaaacaccttcaaattgcacaggtattgatgtttgatttgacgagctgtgttgatatgaacttttgcattnttttaatccaagtattactgtaatttaggtgaaaccataatctttggatagtactgatttagcacttgcagggtgccc

SEQ ID NO: 15059 - DNA, 413 bp, Oryza sativa
  unsure (1)..(413): unsure at all n locations
gcatgagaaatgaaactattcacacatttgttgtagagtgtcactatgcaaaatttctttggaaagctctacagtttactactgggttatatactcctcatagtatatctcataactttgagaattgtcttgtgggagttgataaaaaaatctaccaaacttattcttgttggagcatccgctatatgttgggctatatggttgtgtagaaatgatatggttnttgataaatcaccatctatgtcctatatacaagttcttttcaagacaacatactggctccggtcctatgctcaactactaaatggctccggtcctaggctcaactactataatgtgatgaagaaatcaagtcagtgatacttgctgtcgaaatcttgagtcatgggtatgcagctgttcgctactataat

SEQ ID NO: 15060 - DNA, 469 bp, Oryza sativa
  unsure (1)..(469): unsure at all n locations
agcttctcgttgtcctcctctccatttcccctctttaatcccgaagaatggtgcatcgaggaaggagatcggccgttgtcctcctcaactccggtcaccgtcgccatttgccgattccttcttctccggtgagtcccaatccgattccatgcattagtagcatccctgagatctcactaatctcatggacacacatgcacgccagattttggagtcgtttgagccgtcgccgttcacctggaggttcttgccgccgtcaagccattgaacaagccgccaacaccaactaagcttcgccatccctgtccaacagcacggtgagcacccaggaacccttagcaacgcatgcatgcacttcattcacctagaagcggcctctaaatcaacaagcgtcgtcaccccgaggaccgncgccgctcgcgccgccgtcgccatcgattccgaccaccacagctcgcaagataggtac

SEQ ID NO: 15061 - DNA, 447 bp, Oryza sativa
  unsure (1)..(447): unsure at all n locations
ttcgcttanggtccttgatagtgattgaaccctttttagcgaaagtacgcctaaaggtcagcatgctgttgntgcatcttgttgttgatgttggcgaactgagcatcagcagattgttgccattcttgcgtttgagctatgtgttccgcgaggtcatactggatctcccccgtctgcacatcaagggtgtccattctcctagtgatttcacccaagtcccaacgagaagaacttgagcgccattcatttggagattgaggcacaccacttgatctggagggttggttgttcccccagtggatgtcacgaggcgtatgccaccggtcctcactggcgcttgcccaggttgagactacgatgctatggcgtggagcttgggtccatccggttgcattccccagtggtgcccaacctgcctcatacatctgcacgagtgtcgaggatgat

SEQ ID NO: 15062 - DNA, 73 bp, Oryza sativa
actttatacagtcactaaataattaatttttcgaccgattcccgatcctacaacaaagactttaatattggct

SEQ ID NO: 15063 - DNA, 387 bp, Oryza sativa
tctagccctacaataacagatggatgatattccttcatactgcgggcaaacaatggtgcatcattccatcaatttgcagcaaccaggcttattatgaagaagatgcagaatactggtccggctgctcacaacagctacttggaatactcaagttcaagatggaaattggcacactccaagggattcagccaacataatctgataaaaaaagacgttataagtatgaataagaagctggcatatacttcggctagtagcattgcaacgcacacagtatgacaaggtaccacgcattgtttaagagctaagacaaagacaaaactgatgcatccaacgtaccatatagaaagcgaacagcagcagtcagatagctatgagaagagaact

SEQ ID NO: 15064 - DNA, 451 bp, Oryza sativa
  unsure (1)..(451): unsure at all n locations
agcttgagtgtgtgcgattcttgagctgcctctttctattatttaataagaacgcgcatatttttgggtatgtttcttggtttctactaacaatggcagggatacgcaagataattggggatagctgtgctcaacatcgacatcttcgtcgagacatgaggagggatcaacatgaccattatgaggtaagtgatgatgntctaggtaagatcaaatctgcactgccttaattcgagggaaactatgatcctcgtgcttacattaattgggagctagcggtcgatagtgaatttcaaaagcatgtcttgtcggagaaacaaaagggtatgtgtgcctctagtggtttaattaaacatgcttctaatgattggaaacatcttagtaggcataacaaaataccacaatcttggaaagacctgatactatatttcagagatgcttatgttcccat

SEQ ID NO: 15065 - DNA, 358 bp, Oryza sativa
  unsure (1)..(358): unsure at all n locations
atcagccaacaagtcagaagtgagagcacttaaatgctttcttgggaagggctgattcacttcaaaaagttgcaaaagggttggctgtctggggaagcaacaataaatgcacttgggggtggctgatgtggtgatgaaggtgctgctggttgtggaggacgaaatttggtggggttggaggaggatttcgnggngaatatggtggcgatggtggcagcgggatgaagataaatgaaaagatggtggaagtgtttgcggtgacgaattcgtgatcagaactcgaaactctataggactaaactactagaaccagcaactcaaccaatcgatgcaatcgaatactcaccaagcaaagact

SEQ ID NO: 15066 - DNA, 433 bp, Oryza sativa
  unsure (1)..(433): unsure at all n locations
ctttaccctgtgggctttctgtttcttataatgatgcctgccaccaaaacactctggattggtctctatataaaggagatcgatatgtggttcttaattttaaaaatattttggggggaaaaagactaatattgccctggcttgcaacattagatcacatgatcatgtgacatgggattgtgaagactcatatatatgaccttggttgtgaatgaacaagaagggtggtggtcatttattgcaacatatatgatggcattgtcactttgattctatttntaaccataccattttttttagcaaaattattaaaaaaatatctacgtttagtttggtgctaaatttggtcaatatataagaaatcatgctaaaaatttggcaatattaccatcttaccaaaactttggcattaccaaaacttggtaagggttat

SEQ ID NO: 15067 - DNA, 322 bp, Oryza sativa
  unsure (1)..(322): unsure at all n locations
cggcgacgacaatggctgcttccgatctggntgaccagcatagtgttcgtcgtcgtcgtctcgcaagtgtccactccattcgccaatcaccaagcagagtagcacaattaatgaagcggcgtgtcggcggcggtggcctcgtcatgccatcagcggggctgcagagcttcacctacatcgcactgctgccggtgtacgaccacatggttgtgccgctcgccaggcgcctcgctggcggtggccgcgacggcatcacgatgctccagcacgtcggtgctggcatggcaacagcctgcctcaccacggtcgtggcggcgctcgt

SEQ ID NO: 15068 - DNA, 395 bp, Oryza sativa
atcggattttatcatttgcgtattatatggacactcattgagtgtttattctttaatatctcacagagacatagatctcccatccgcacgtagctgtcgtgcacaaatcttttgcaaccttgagtgagctttctagattagtgcttgaatctgtaaaaccgcactttccaactctggtctcggtgtcgaagcatcagctcttggccattattgaatggaagatacgcatcatcatataagtgagttatttgctaggtatagaagagatagactgttagtattaatggttaaaacaataaatatatgtgctactatctttgctacttatacggcggaatattgtgtttgatctcatgccgacgttctgcaatggaatcacattaactaattaaata

SEQ ID NO: 15069 - DNA, 405 bp, Oryza sativa
agcttcttttaagtcacctatggccttgtttgtatccttctatctattaaatagccctctagaatcttgctatttaggagtattaaacgtagattaccgacgaaaccgatttcataacccctatgctattttgcgagacgaatctaatgatgtatattaatccatgattagcgactgattactgtagcatcactgatttcggagggctattaatagccctccggatccaaacagggcctatgataacatctgaagtgcatatgtagattttggatatgaactctacaattccgaggttagttataattttttaatgcacatacactacatggagtatcagttaataaatttattgaaccttacgtcctcatgatatgacatatttatcttatgtaatacatatat

SEQ ID NO: 15070 - DNA, 412 bp, Oryza sativa
  unsure (1)..(412): unsure at all n locations
tatggctcanatcggnnttgattgagctcgacttanacttgttgtcataatcaatcgggttgagctaagcatttagccgccagttgctcatttagcttgctagtacaaaagatcaccttatcttccttaatgagtggttattcttttgataatatccaaattattaattaatttatgtttactgagtttttgatagctagtgtttattattacgggaatataggtaaaacgataagtttataattataaaagcgattactatggtaccacaaacaatcctgatgagtgaacctgtgggcctagctgtggtaatccctaagctacaattcatacgctaactgttcttattggcccgatctttcggtgagttaaagataactatgatttgggagagaaaagtgtgacacgacta

SEQ ID NO: 15071 - DNA, 455 bp, Oryza sativa
agcttggcactgctctgatcgacatgtatgccaagtgtggtgacattgagagtgcacagagagtgttcgacagaatgccagagaaggatgtgcaaacttggagttcaatgattatcggactggccaatcacgggcttggccatgagtcgctcagcttgttctcgaagatgatatctgaagggatgaaaccgaatggggtcaccttcgtcggtgttcttatcgcgtgtactcatgttggccttgtgagcgaaggcaagaagtattttagatcaatgaatgaagttcatggtatagagccaacagttgagcactatggatgtatggttgatcttctggggcgttcaggccatgttgaggaggcaagacaactcatcaggagcatgacattcgaacccgacacaattatctggagagcactacttggggcctgtcgcatccataagaatgtggagatt

SEQ ID NO: 15072 - DNA, 382 bp, Oryza sativa
  unsure (1)..(382): unsure at all n locations
taagggcagaaaagagtccaacatatgcatctgttgctatccctaccaacacggctgatctgacgaagtgtgatgatgagctgggtggatggttactacacctgatcaccacacataccctggagataattggtgaagctgccattagcagcagaagcaaccgttttctgcttcgttgtgtgtaatacgtgatttacttattgatttacgcattttaagacaaatttatgatattaacctctccccacccacacttatgatattatggtaggtacattttaagacaattntacttatattaattttacgtttctaaattattgctttagaagntagtgatggtcaaagntccaaaacatcaatcgatgggttcctttgacat

SEQ ID NO: 15073 - DNA, 441 bp, Oryza sativa
  unsure (1)..(441): unsure at all n locations
agcttactatagacctaggagtatgacttattctctccacccgaggggtagtctacagacgggctattaccagataagactttgagtgaaacttgcttgcacaagacttgcaattcaaggcgtaatccattggtcaagttgtgagttagtgtagctcggaattctaggtggatattcaaccttaattggtctccatcgaaccgctggtatataaacagtacattggataaggcaaatctcagtgggattttgagatttggtgggggattgttggaattaatgaatgggccttagcccactcgaagattaattcttnggaaaatcacaaaagcccacctcatgggatggcatgcatgtggagtctagtaccaccttgcttattctaggagaagggggacctccttaaaagggaggatgccctcctagtcacttgaagcatgt

SEQ ID NO: 15074 - DNA, 387 bp, Oryza sativa
  unsure (1)..(387): unsure at all n locations
tntctctaatctattagtgacatcagatatcatatgttttatttatatattatgatcatcttaggaacatttatttatccctaaaaagatcatttatttataaaagtgcatctaattatgatcaagtataagtaaatagcccctatatgtatgttaagagaaattaactacttccactgttgaggaaaaatatatcaatatttacaacaccaaattatttttggtgaattcaaaattgaatatgttcttataatatgattgttctgtgttgaaaatattactatgttgtttataaactaattcaagtaatttcacattgacaaaatttaaaatgacttataatctgaaatagaacgagttggaagaaagtggatagatgtctagcat

SEQ ID NO: 15075 - DNA, 451 bp, Oryza sativa
  unsure (1)..(451): unsure at all n locations
agcttctcatgttttctatttgncatttgttttctctatgctngnccaagcttacacagttgaatttggagggctgtccaatgactgctgcctgattgtaagctatatctagactcgcaaccttgttaactaccggattgggattccacaattggtggtagagtgaactttttttaagcacctgattgcatctagagaacaccataaaaacacaaccttgtgtgtcatttccttttgtaagattggcttctctggtggtgttgaatttgagtcggtgtggcatatacggtgaaggctgtgaaaactttcaaggtaattgtaatgccaactgctgacaaactggaataatgccaacatacatgttttaagtaaattcaggtgagtagtaaatatgggggcattgaacgatgtttgcataanagctggaaggatgttttgtgagctttgtatg

SEQ ID NO: 15076 - DNA, 406 bp, Oryza sativa
  unsure (1)..(406): unsure at all n locations
ttcanaaccgnacgtaccatccaatgcatggtttattgtattattatccataaatgttctataagccctgttttgggatggttgcatcaaaataatggtgtgcctcccagcctgcacaaataccaaaagaaaaaaaaagattcaatgcatgcttcaagtaacaagaaagaatggtgcaatttgatgatactgcaaacatgccataactacagagtgttcaacaaattcctgaaaaggtaaatatttccagagtatccattacctgaaatatatcacgctagtactacaaaagcgaggagtcgctatactaaatagtaatatgatagcatggtcagcatcacaattatgtctaccagagagctntattatctaaagacagtgattccctgattatacaacaacccta

SEQ ID NO: 15077 - DNA, 389 bp, Oryza sativa
aatcgaccggtggattctcctcagagatcggcaacgcgtgctaatgtaacggatattcaccatgcctccgattgcactatgctactctgagccgatattcaagccttccatcatgattactcgtaggaacctggatcttttcagcagcttggagaggtgcaatcctgatatcttcggagaactgtgctgctctcatgaacagcaggcgtggaagcagctacgatatgatacactatgttctgctgtgcaggctggtatctcttcgaaaaatcaaatatggaccgaatcttgtgcatctcgttatctatggccgcgaatgttgccataccgatatgtacagggaagcgtcaaagccctgacggcgattggaacattcaccatcatgcaac

SEQ ID NO: 15078 - DNA, 397 bp, Oryza sativa
ggaccttaaaactcagcttctcatgagcgcgatgagagcgatttccttcagcatgctgtatgggagacgacggtgcgtgtttgattacacatcaagtgatactgcatgtccctctgctataagagcgtctgaattcactactttctagttgaacatgcactttcgcagtctcttgagagggcatatggctgcaagctgtgtattgtgccatgtactacaagacgggaggtattgaattaatcaacaatcgtgttcagtgcaacaaagataataagccctctgaatgaataacataatgttgatactctttacctgttaacggtgtgtatgatgatgcctactacaatgatctgacattgaatgagacgcattctcggactcattgatgcccaagcac

SEQ ID NO: 15079 - DNA, 435 bp, Oryza sativa
agcttaagttgatgaagaaaacttataaattttctttgtcttcaatggtacaaagtggggacctgagtccgtgacgactgggaaagcatggttaccgtagatgaatgggcataagcaccacggatgttaggatgcaattaccacccctaaatatcagttgcaagtaacaaacctacctagattgcaattcaaatattttgacaagtaatgaccgctctccctcggaaatagacgtttcaacctgccaaatgattgtgagcaaactttgagttaatgaacatttggtagcagtattgagaattctttgtacagactatgtacagactaatagaaaagaatgatatgtgggaaaaattttgacaccaagctaataagcttcttacctctgtatcaccatccatattaccaaggctatactgtggtgctggagaaaac

SEQ ID NO: 15080 - DNA, 156 bp, Oryza sativa
  unsure (1)..(156): unsure at all n locations
tagctctctctatcaaagctctatttacttttctctttatgaaaccactattacttaatggtggtaattngatccgggagcaagctgatgggcttctcgcgatcggtttgaatgaccattcattggcattatgggatttgagccacgtgtgttgca

SEQ ID NO: 15081 - DNA, 463 bp, Oryza sativa
  unsure (1)..(463): unsure at all n locations
agcttcaagagtttgggaatttgggagatatcacttaactctctctttttacgggtttagttctttagactagccctgtacatatttctgtcgctctgtatttttttctccatctctatcaatatacgaggcaaagcttttgccctcctttcaaaaaaaaacttttttttcgccgggccggctntgccaaccaaacattgtattaagaaggagaaaattctacttctactttttgaaccacgaccctacatgatgctcgccatttcttattttctgttactctagagaagtgggcgactgagcataagtggaaaatatgaaatggcgaccacttatgctaatcagagcagtcatgaactcaagaaacctgatggcgcagccctccaggcagtccatcctacagagccaccgaggcatgtttctccccttccattcttctccctgctagctgcacagcccatta

SEQ ID NO: 15082 - DNA, 380 bp, Oryza sativa
  unsure (1)..(380): unsure at all n locations
gacatctggaaaacgaaattacaagtttgttggataccccaattaccaggttacaccagtgtcacagaggtggtagattgcttattatcaattgttccctttgcaacggtaatttccttattgtactttgtattggtttcattctgctttattgcaagggaacaatcagtatctaaactgtccatgcacttttttcatgctatgtaggtctgatttattcttgtttcacttgcagataaaatttatcagcatgcttcacaggaggattccggcagaggctgaaattaatgttatttgtgcctctcctgngattgttcatacaaatgttgtgagttccgcttccccctgtccaatagttgccctgtgaaacatgctatttc

SEQ ID NO: 15083 - DNA, 353 bp, Oryza sativa
  unsure (1)..(353): unsure at all n locations
ttaagtcacctgaggcatgcaagcttatgcctanatgagatactaaatctgtgttctgacacagtgtgatctgtacactgctcgatagagaccgagagttgaatcatagcactacagctttgaattaattgctgcatcttagagaggattttactcctgattctcatacccttactcatagcttgtcaattcgagacagatgatattgtctagctggcattagcaatcattttcagtgagttggccatattaaatctacaagcgtaaagatgccgtcatgggcgacccanaaattttcagatctgactatatttgcttttggaatatcagtaccaattgcacagacaggggtt

SEQ ID NO: 15084 - DNA, 246 bp, Oryza sativa
aatacccaaggatccaacggcccatgtcgccatgcatgcatgtttctttgcagaagcagcccatagtagccgaagcccaataacttgaccggctgatcgccacagctgatgtgtgtcctcagaatagccgatcgaccagctcatccagttcatgatcagcaccgggttcacgattccgacgacaaccggtcaatatgcgcgacattacgacgtttcgatatggctcggaaataagtttcgattgga

SEQ ID NO: 15085 - DNA, 362 bp, Oryza sativa
taagcgtataaacgacgaagacgttcaatgttccaagagttgtcttcgagagtaccgtcttcgcgcttgagtcgataggaacctggccgggtgacttcagagatgataaatggcccttcccataaacgagataacttgtgccgatctcgtgtagcttgaattttcctcagaaccaagtcgtcgactagaaaggcacgggatcgaacattgcgattatgataacgtcgcagcccttgtgagtatcgagccgaccgaatcatagctgcttcgcggacttcttgcaatcagagcaagtcatccactcggtcctcttctgagcgatcttcatggaaatttcgaaagcgcatagactcgaattcaac

SEQ ID NO: 15086 - DNA, 315 bp, Oryza sativa
ttttccaaatggtgtccccaatctactggcgtgaaagtcctgctgcacaagtacaagaatgagggatgaatatagcacaaggatttctactattataatcattaaattaattttgcttgtaaaaatgcagatatctttgacaaatttcattttttaagaaacaaatacatcagatttttgtaatgctctctccaactatgtcagtaatagcttaattggattatttatataattttggacgatgcaggagaactgcgcttcatttcattaagaagaaagaaatatttacataggagggatcaaggagtccctcct

SEQ ID NO: 15087 - DNA, 493 bp, Oryza sativa
  unsure (1)..(493): unsure at all n locations
taacttctcttcatcgggtcgcttggagaagagcggcttacttactaatctacgatttgggagggaggaaaaaaaacgtaccagcgtatttacgataaaataaataaagcccaaaaccacgtgacactactacaaacgttcctaaaccgccatgtggcaatatctaatctcgccgtcgattttcacttaaattggtggatccgataatttagaccattagattagattagatgtattttatttaaaaagaaactaatagcttactgttggcagggaaaaaacataaatactccataagtacgtacgtactatgtagaaaacaataaagcttaacttctcttcatcggntcgtttggaaaagagcggcttacttacgaatctacgattcatgaaggaggaataaaacataccagcgtatctacgatatataaataaagcccaaanatatacgtatattcgtaccatcgaaaaatcaagaatagaaatttctact

SEQ ID NO: 15088 - DNA, 447 bp, Oryza sativa
agcttggagttcttcttttgcaggagctattttcatcatgcccttagaatttaagccctggcgtttgagaagagcttcgagaacattaatagaaaaaaggccataacattttatcaatggaaaagaaacagtgaattgacaagactgcatataataacctgcaacttttcctcttccatcctcagatgacaatttcaagtcaggtgtctgtggccactctttaaattttgacttgaacataactgtctcaaacccctcaattactttgattacatgtggttttgttcggctatcatcagagagcaatttctgcatacacaaacaaacattaagtatgacggcaaaatagttcgagatccagaattaatttgagatatattacatgtataaaattatgtgatatatttctccagacaaagttgatgtgcttttctgggtgatctggac

SEQ ID NO: 15089 - DNA, 124 bp, Oryza sativa
  unsure (1)..(124): unsure at all n locations
ngcttcgatctacacatgtgcgcgcgcatgtgttgtctgtttatgagctacgaagcggacgactgtggcggtgctgctcctccggctatcgcgcgcgtggagtgcgacatgcacgcgtgtcacc

SEQ ID NO: 15090 - DNA, 471 bp, Oryza sativa
  unsure (1)..(471): unsure at all n locations
ttaagncacctgcagctgcagcttgcacgtggcgcgtgtcttctcttttggattaagggccaacgaattttgttagagtgaattacactctgggctacattttattatttaattttcactttggaccacccttaaacacatctgttcactttggatcaaataaatttactattgttgcgattcggatcaccacgaacgattttttttcagcacaatcaacgacattaatcacatcagctctagtatacggccgaactcctctgtgtatggctcatatgtttaccgaaagggaagttagacatgacgagaaaaagttgttcatggtagttcaaatcgcaaccatgataaatttatccagtccaaattgaaaaagatagaaaacatggataataataggtggaccaaagttctatgataaaatctacacaacagtatcccgtcacaatgggataaggtctcatcaaccttatc

SEQ ID NO: 15091 - DNA, 486 bp, Oryza sativa
  unsure (1)..(486): unsure at all n locations
tncttttgagaaaagataagagccatattgttatgaaatttatcgttngnatcacagnacatctctttgaggccgaaacatgacaggttcgcatcatctgcctttgaggccaaaggcagagtttgccattgctttaatccacacccttcatccttcgatcaaccattacatggtttaggcccattccgtgagtaaactactatatagctatttaattgactaaacatgacataccatcggtacaagctcctagtctcacattgaacaattcagtcaaattgtaattaagtttctcacaaggaccaattcagtaaaaaaaaactactatcgatcgaaacacaagtntgatcattccaacagctttaatctgaggaatcaagggaaactagaagcagtaaagaattattctcaacaactatcacaaccaaatttaggagagagatcaccctgagtcagatcatgatgaatatctctcttaacnaagtc

SEQ ID NO: 15092 - DNA, 454 bp, Oryza sativa
  unsure (1)..(454): unsure at all n locations
agcttattattnttcgagtggcaccaattgtattttaagccatgagaccattgaggtcggaaattcataatcttttcttttcatgaaattaagcctccgtgcctcactgacagagtgacagctaatccggccattgttgacacaagttcctgaataaactcatcgtctagttcctcttttaaaaaatcaacaactgatggaattaccgattgaagatttgttttttggtcaacttgatcagttntctcaaacatatgtgcgtgctttgtgaacactaatcactcgtcacagcattagcatatactctttttggcataggcgcatagccttgctttatttctgtaagagataaaaaatggcattgatattgaattccaaggctattcatacaaaagtttcaaagttccaaggtcaaacatcaagtacagctttcttctagtagtaaattctgatg

SEQ ID NO: 15093 - DNA, 328 bp, Oryza sativa
  unsure (1)..(328): unsure at all n locations
tgagctagctcgtatagctcgtgagctctgttgtcatttgattaagcgaacaaggggaggagaggcgccgggggagcgactacatccacagcggcgtctggcgctggggaagagcggcgcgggcgacngcgtcggtcgttgcctcgctgggagagagcggtgcgggcagcagcgtccatggcggcgtcggtcgctgcctcgctgggggagagcggcgcggacggcgacatccactgtggcaccgggcgccgatgaagagcggcgcgagcgtcggcatccacggtggcgccgggcgccgaggaagatcggcgcgagcgtcggcatccac

SEQ ID NO: 15094 - DNA, 440 bp, Oryza sativa
  unsure (1)..(440): unsure at all n locations
gcagcgtgagatgaatatgaaacgacacgtcttttatgtctgtctacttgcactattcctttttatacatgttatagatcctctattacaatataaatattaatttgcaagccatgtggaaggacaacgatgatcattgcttccctgatttgaaaaaaatatttttggaacgcatatgatatatatataaatatttattggatgttccgcagtttgggcagcacaattttcaagtaaaagaagagccaaaaaatgaaagtagtgatgattatgaaatgaacaatcatcgctaaacaaagaaagagagatcaaacatgagatctacaaaaagatcaaacaaggtatgtataattgcgttcttacataacaanttcgaaaggtggttatagtagtacactaataatgattgtttataggaaccatacatttccgattctgat

SEQ ID NO: 15095 - DNA, 350 bp, Oryza sativa
gtgtgagttctggttgtgcgaagtctaattcttgtgtctcgcgatatctgctccaggagttgctgtggaccccgaaacagggaccgcgcggcccgattggaagctacccaagacagtcactcaaattcgcagtttcttgggtttggcacgatactaccggagattcatctagaacttctacaaaatctcgtcgacccatgacacagttgttgaaaaaagaagagaagtttgtgtggtgcccgcaatgcgagaaggcgttccaaactctctaagaaaagctggtttcctcgccagtgttaatgcttgcggatactctgtaggatctcatggtgtactgtgatgcttcgcgc

SEQ ID NO: 15096 - DNA, 280 bp, Oryza sativa
gaacgggacgaagcacacacaggcccactccccacaaccagaacaaaacacaccaaccatgaagaacacagaacaaacgaaacagcgagcatacacgcgaagcaacacaggcacacaggcaagagccagggcccctagcggcgaccggggcgagcacacagcggacgacggcaacagacggggcggcgccggctaacgacggggaggcgactgcggccaccaccgacaactaagggggggagaaggagcgaggaggaagaacggagggaggcaccaccca

SEQ ID NO: 15097 - DNA, 421 bp, Oryza sativa
tggagatccacattatgtcgaatcaaaaatttggaagcattttttttgtcaaatcatgggagagaagagttccgcacttgaattttcaattacgaaagagtgatcaagattacatgaccctagagtcggaaggttacagtgattgaagggggaagggggaaaaacgcctcctaattaaacaaagcccctgtttatgccagcttaagattctcatgaacaactggtcgcttctaaaaatctgaaaaaaaaatgggtttcctaccgttttggttatagttcacgtgatgggctggatatgcatgccaaatgaattattgtttagcaaaaaagaagcaagttgtctatcaaaagatagggcattggaggcacatatgtatgggtcatagcttcatcttctgtgtgacgaggtcacacatatgct

SEQ ID NO: 15098 - DNA, 429 bp, Oryza sativa
  unsure (1)..(429): unsure at all n locations
agcttgcctccatctcctaccacttctgcatctcgacgctatagccgcctgaccccaagtggtgatggtacttcttcttggcggcattttctttgtttctttccatcatcgcctgcccttgttgacctgtcttgtaagcaacgaactcgtcccagtgatcccttagcttcgagaatacgtcgaagtttggtgtctgccccttcangatgtatttccggtacagatctcccttgaaggtctggaactgttctgccattttcttaagagtccagtgtttcactatgttctctgtacccgcatggagcgtgaacgtctcgagcattgtggtccacagcatctctttctctgattccaggacaaagctgtcatcaccctcgcgtgcccttggtctgcccaacacacctttctgacatgcacgttattccttac

SEQ ID NO: 15099 - DNA, 275 bp, Oryza sativa
cttgatactcgcttggaaaactgagacttattttttttctaccacggcgcgcatggagcgcataccacatgagtgtcttagagcatgcgacaggcccagtgtctgtatataacagaggttagaaaatcagttgtttcggcttataacaaaactttgactgtcagccactctgacaatagacgatcatgcttcattccttacaaaaacgactatagctgccgatgttgctgtgtctacaagatctgcatcactgtggaagatatgtggaaacatca

SEQ ID NO: 15100 - DNA, 282 bp, Oryza sativa
taccctttaaaattttatttttccaatattatatatatttatttaaaaaaaatctaaagctttttaccacaccaccttcaagcactcgtacttaccaatggttgtttcacattattccaactggtgtgcaggggcggcactagaacaaaatgaagagaataagagatgtaccactcgcttaatttactctactttcgattaaagttacgctaataggaatgctttattttgaattgaggccgtgcatatatgggtgaaaatagatgaactatagcttaaaaa

SEQ ID NO: 15101 - DNA, 211 bp, Oryza sativa
  unsure (1)..(211): unsure at all n locations
agctagctncaaattgagagtgtgatatgtggtttcttatgctatgaaagtgtggcatgacacaatggccgtatcgaaccaaacacatacataagaaattgtggcataactaaagtgtggcgtattaaagagtggcaaacaaccaaacatcccccgagtccagatcggctgtccacatgtggtataccgcgcgtctcatcatggggaggaa

SEQ ID NO: 15102 - DNA, 182 bp, Oryza sativa
aaagacatatatatatatatatgggtgggactttaatcccgggtggtgttatgaaacggggctataagatcgccgggatctttaaccccggttggtaacaccaaccgggactacagtcacacccctatatatatatatgtgtcactttcctccaccagcccgagcaagcgtgagtattctat

SEQ ID NO: 15103 - DNA, 462 bp, Oryza sativa
  unsure (1)..(462): unsure at all n locations
agcttatggcgatcggtcacgtatagtggctgtcttctcgatgttagttnttgtcttgtagntgatgtgtaggagtcattaagatgtggttgtgtttttttcctttttccgattatacccttacaggatcgtaatcctataatgttatatcaatatggaatctcgtatcattggtgcaattcgttaaaaaaaaagaaatctgagttttaaggggtagattttaggcataatctgacaacttaacatttttcttattatgaaggctgcaaatcatttttttttaaaaaaacttttgtgtttttctactaactaggaattntgtgggctttagctagtctagctcanaagttatcgtgttatggataggagggccactgctatttntattttagattcgcccctgaacacaaaggagaaaatatgcagtgaaaaccacacatatatnggaacctaaaagctatt

SEQ ID NO: 15104 - DNA, 466 bp, Oryza sativa
  unsure (1)..(466): unsure at all n locations
tgcttctccgacacgggtgcttacgtcacaaggttcctttcacgattagctttctttcggcataagcttggttcgtggtaagtttttcaatcgtgtcttatcttgtccatattaaaacagatttcataacaaactttacattcggtcaacataatcatgaaatattatgtccatagaattatgaactactagtgcacaaaagccagtaaatcaccacgctgcaagccaagcgtggtgttaacaatcaggctactaagatagcaaaactatgaacagatgattatacatacatttcatggattcaacctgtcatactacaaacaattccacagaaaagcacaccacaccaagagaactacggatgcagcgactattntcggatgaattggacgttcatcgtatacgggttcttgctactcagcggttcatagaggcatatgcataacctaaatgcagctcactgcta

SEQ ID NO: 15105 - DNA, 386 bp, Oryza sativa
  unsure (1)..(386): unsure at all n locations
gaggaatgagaaagtacctataagccggtccgtctattgacaaaagtttccccggcataaccgtngaacacttgccccgaagccaaaattgaaataccgatcattatcgaaatctgctgcttgcggaggaccgcattcgccaggtgtcttcttcgaagtcctttatacaccaagtgggccagaagatagccaagacatcatggcaattgaccaagtggagccgggcgatgacccatgcgattggcgtacgcctttcgtcaaacacctcaaagagggatggctgncagatgacgaagccatggccaaaacagtgccaatcagagctgtgaattatatgcttatctctgggcaattgtaccgaacagggatgctgcagcctatgcttc

SEQ ID NO: 15106 - DNA, 458 bp, Oryza sativa
  unsure (1)..(458): unsure at all n locations
ntggagaagaagtcttaggtggagtcctggcttataccccagntgtgcgcctgtgaagatggagccgtaggcccgctagtccgctgctgtttatttttgtttgtcaggcctgaagtgcctttgtaataatgtaaatattatcgatataataaagatgtgtcttttatatcatgtttgtgtggtgtaccccggctcttcctgggacggngattaatacactatcgttcgggaaaaggcaattttcccggtcgcgacaaggtggtatcagagccatctcgattgtaggataagccaagtggataaaacctaaggacatattttataaataaaactatttgcgaaagttcctctgtttctccttcccctaatgctatttgcaaaaggtttactcttttctttcttcttcanatntcaactagtactagataatcangtcagtgaagaaaagacatcgtcag

SEQ ID NO: 15107 - DNA, 255 bp, Oryza sativa
ttacccctgacctccctgcggacggaacccgctgtgttgtatccatgtacatcgcttcttcacgtgtttccggatagtcatttccacaatgacccatgctgccgcagacctcgcacgttacatgtgagtccaatgccttaacagtgccctggggcttcttctcgtggtcgtccaaatgtttcatgaggaggtccagttttgcagcgagcatacttggctcctttatggtgtgcattcctcacttacgggtctgga

SEQ ID NO: 15108 - DNA, 494 bp, Oryza sativa
ttgggtactctaacttcttggtttaaggtgtaaaactgttcgttcttctataatggatgaagtctttgttgaaacgcacaaacgaaaaaatggagaaattattccagaggctgcagaaacagttgtatgctttcattttctaaaacagatttcatgtgaagaatactacttgctaatatgtttttccaacattatatgaaatgctaaaagaggctgcagaagttaacccagagttgaagaacaaaacaatccacgagggcgatttgtattcacgtgtttgtggaactaatgaaccaagaggccgtgttcgtgttttatgatagggaccaactcctcatgatgtgggcacaccaggaacacgtagcagaatgccaacaagacttcagctagaaatagaatctcatcgacagaccaaacaagaagttgtatgtctgaataaacgcatggacgacatgcatacaacgtctaacataatggagcatataggtatgtct

SEQ ID NO: 15109 - DNA, 360 bp, Oryza sativa
tgggggtgggattatttatatagagcaaagatgagtacgggagtactcaacaagccaatggaaaataggtgtttaatgcatgcttcaaggaaaggctgttagctatgcagtcgattattatttgaactttttttctcaaaacaaactaatgagtgcttctcgaacgacactgttgatgcagcgcgtctcgtccggtcggaatatgtgcaatgtttcagtccttataattgaatacaagggttgcacccggacaatagctttttatacggccacccgggccaacaacttttatactgccacccaggcctatctgatacccttcagctgcagattattgaatcagcgaacccctttccacaa

SEQ ID NO: 15110 - DNA, 385 bp, Oryza sativa
attttttttgttcgcacccaaaagatgtgcacagcagtcggcttagagcatatttataccctgcactcaaattgtagtgaccatatttcattgaactatataaaatttgtaaaattataatggtatggttccaattttcccaataaatataactggattggggagttgcatataactggtccggagagatgtgtggcccatcctgccatgcatgactgacgcggttgttgtcacgactacttcggctagtacaccacccgtcagtgctacgctgttagtgttatagcaagtatatagtaagctataaatctacctatatagataattatatggatgtgagagatagaaaaattctaatgtgattggctctcatgaagagctagct

SEQ ID NO: 15111 - DNA, 455 bp, Oryza sativa
  unsure (1)..(455): unsure at all n locations
agctntattcctggtatcaagaccatcttcttacaagaagtgatctcaagacacanaagctcattnttttctaatttacattntagtgacatatgtttgactataaattagccaatcacccatcacctaatgatgcgagaatctaagatattgagctcactcctaagctcgcaaaatcttttctcatctaaaggcttggtgaaaatgtcggctaattgggtctcggttctcacatgggtaaggcatatgtctcctttggtctcatgatctctcaaaaagtggtggcgaatatctatgtgtttggttcgagaatgttgaacgggattattggctattttgatggcactctcattgtcacataggagtgagatcttggtgaagttgtagccaaagtcttttagggtttgtttcatccaaaggagttgggcacaacaagaaccggcggcgacatattc

SEQ ID NO: 15112 - DNA, 481 bp, Oryza sativa
  unsure (1)..(481): unsure at all n locations
tatcctagagaagattcgaagcaggaaccttacacgactgatgaatacgctggagaggatgagaagctctcgatagtctcgcatgttaaaagtcccaatcccaacacaacagctgagctctccaagcgttgtctgtgttgcaagcatttcttgtgctctctcgtccagtgagtctgagctttgggcacactgaccaaaggcagagcggagagatgccggccgctccgtccaacggccgcctcttcaagttcctgccgccgcaccgccgtccgcatggcaccgacgtcgccgccgccgccgggtggaccgtcgccggcgtcgccaccgccagctaatgtagctgtgttgtgttcatctcactctgtgcgaactaaaacangtntaatactcgctccatccatataaagttgacaccatcgaattnttaaantatattaactggtcgctattaaaaatttaagaaatattaattcttttctat

SEQ ID NO: 15113 - DNA, 467 bp, Oryza sativa
  unsure (1)..(467): unsure at all n locations
cgcctgatgcatgcaagcttagaaatactgaaagaactccttgttttcttgtctgcttcatcttcttcagcaccttggggggggattatttttattcatgccggatgactactgcttgactcatcgataccagggaaaattggcgtctaatgcaggctctcaagaaatgctggcgtgcttgcaggcgattttatatgaactcctcttctcaaaaccactagatgagtgcttctcgaacgacacggttgaggcagtgcgtctcgtacggtcgcgagttgtgcactgtatcactctttagaattgaaaacaacgttggcacccggccaatagctatttaatcggccacccgggccatcaactctcaaaccgacacccgggcctatctgatgcctgcatctgcatatttntcaatgaaccaacccctttccacaacagcaatttcgcgagcagttgtcaaacataactac

SEQ ID NO: 15114 - DNA, 324 bp, Oryza sativa
aaaacttgccacgagattcgtcctgtgcatattcataccctgcaattaattagtagggaccatattatattgtactaaataagctttggaaaccatcatgtgatggttgcaatcttcccaacagaaataactggattggggagttgcaaatatactgtccggagagtcgtgtggcccatccgcccatgcatgactgacgcgggtgttgtcacgacgactccggctatatcaccacccgtcaatgctacgctgtgagagtatatcaagcataataggatctataatgcacctatatagaatatatatgatgcgaagataaaaaat

SEQ ID NO: 15115 - DNA, 421 bp, Oryza sativa
agctcgagacactgtcgccaagtctcctatcattctacaagttaacacatcccctggactaatcatggcatggtctttggtcatggtacaacccatccatacagcgctcacaaatagataacgccggcgtgatccactacaaccggaacatgaaaccattgcttgagattgaactgtctaagcacccgccatactggacaaagttcatcaactacgagcacacctatattcgcgggtgctagatcagtcaatacgctttttttcttgctagaacgaattcattctttcagcgacgaatagctagcgggacttggaaccaagcccccttgatagacttcgatgtacaagaacaacaagaattacattgcatgttcagacgttcttttggccagttgctactagctataaggatcctatgtat

SEQ ID NO: 15116 - DNA, 487 bp, Oryza sativa
  unsure (1)..(487): unsure at all n locations
ctggattttggggcacttcangcagatgcgctgttccatgtntttatttcacaaggatttgcagggtcccagctccacttgtaagtgtttttggtgttcatgctangtttgggcttccttggtaaatctgctgaatacctcgcgagggacaaagacaggatctgtccagttctttttttttacttgtgcaagacagaagattatgttatccctattacaaaacggaaaggattccaaatacacaaactacttgtgcgtaataacaatatttatccagtcaaggttcggagtcctgtgtcaaagtcggtgttggtacatatgataattactattatatctgtcttctgtatagactagatccgtgatgttctgttntgtgggtgtggcctcctttgtagcagcagcttatggagaacacgatggcggncaagcggagctggatggagcaccatcgtgtgctcaacgacgactccttctttcacatgga

SEQ ID NO: 15117 - DNA, 449 bp, Oryza sativa
  unsure (1)..(449): unsure at all n locations
ntcatctattgatgccatcatcatatatggttctgacttctacccactaaacgacttgaaggctcttcaaaagatcaagatagagtcacaatttgagcgtgtgagcatttttcgcttgtacactccttttacagttgaggagaagagtcttgttcttgcgaggcagggcattgttattgataacaacatacaagatctaaggactagtttaaaacattccttactcagatggggtgctgcatttctcttcagtagacttgatgaggtccagcaagatgaccatgcaagtaaaagttctgaaatggagagacactntattgatgaagtaatcgttgagttcttaacaaagttatccacaactgttgaagacagcactgaagtacacaggaagtccataagcaaagctaatatgagtggggaactatattcangaaatattactctgatgg

SEQ ID NO: 15118 - DNA, 412 bp, Oryza sativa
  unsure (1)..(412): unsure at all n locations
agcttgtatgcgtaggatatgttccccatcatgtaatgtcagagcatcactcaactcttggaacaactcaagagtctaactacaccaaaggatcctcccaaatttaatttatagtatcnggtggtatttgtattaaacaccatgtagtaaattagttcttgtcaagaattaccatgctattttccaagagaaaattaatgcaatatgtttcgtacatatgatcaaatgctttttttttccgaanaacatgtgggcaatacctcctctcctcacaaaaggaaattccacactctctatctgtatctagctaattattcatgatcatcttattaaatgacactcgcacacctgttgatataagtagtgttgactgttcatatgctctggtaagcattcatttaaaaaaaaaatc

SEQ ID NO: 15119 - DNA, 374 bp, Oryza sativa
  unsure (1)..(374): unsure at all n locations
tgcccgcaggtacaccgaacacacacttatcggtgtttgctntatgcgggcggagcggagactcccgaaagtttccgccagatccgaaagtaaagnttcttggttgcgcgtcttcacaaccaagtcatcgacataagcctcaatattacgtcctatttggctacccaaagaaattcgagtagtacgttgaaaagtaggacctgcattctttaacccgaagggcattgtcgtataacaataagttcctatgggggtaatgaatgcagttttttcctcatcctccctagccatgcgaatctgatggtaaccagagtatgcatctagaatacacaaaatgtcgcaccccgctgtggagtcgacaatctgatctatgc

SEQ ID NO: 15120 - DNA, 435 bp, Oryza sativa
  unsure (1)..(435): unsure at all n locations
agctttattatataagaatttagactgctattgttctgatatgaattaaaacacttaaaacagcaagcaaatccttattatgacagccatatcataggtacatgatatcgaccatcgactaacccacaagcgaacaaccctatacacacaaactaacaaacaactactaagcagtcgataaactatggaaagcgagcctaatgctcggaacggctcctgcggtaggtggagtcgaaggcgtcctcctgctcgtcgtccgatccctctgagcggctcctggagtactcctgctcataggtgtcaccgctgcctgcctctgagctggaactgctgatgatcacacgaccaccactgggagatgctggcaaccatcctccactgccacctgctggacccttgtangctgaatttggcacaaaggagagggcggactct

SEQ ID NO: 15121 - DNA, 474 bp, Oryza sativa
  unsure (1)..(474): unsure at all n locations
actaagcttctacacacttgcctctaaatgtcatgtaagctcatatgatgagctggatgatagatatgaaagaagagagaatgagccatctctcatgtaagaggtaatctctatacaaactataagagagatgataacaaagagaccaatgaattgataggaaacagataaaataaaattaatactccatccgtttcagaatataaacattnttagagttagacattattattaagaaaatagatacaattaaatagggaagggttgtgattggatgagaagtgaaggtatgtangaacattgaatggtggggagttgtgattggttgaaaagagaatgttggtgtagaagttgttatatttgggacaaattctagagactagaaattgttatattntangacgganggagtatgatgtggggcaagtgtgctaaaaggtaatttgttgtatctatattgcctcttaattaatg

SEQ ID NO: 15122 - DNA, 463 bp, Oryza sativa
  unsure (1)..(463): unsure at all n locations
acctgaggctgcaagctactattcattcccttcttccatatttttcttgttttggcatttaatacaggcaggagaatatcaactaaatgagtcagcatgatgtaacctcgatcactttgattaacaaaaaatagttgcacaagtataatactatgacaactttgtatataatgactggtactctaataacgtgaacaattatattatggtgaaagttagcttctaccacctatatatatgtacggattataaaatgatattntagattgtggaaaatatcaaattcaacatattattaacagcatttgtagtactattcacatagtacaaattatccctctctatagggattagaatccatcttcgtataacatcctccattcctccactcatcatacagtcatacatggaggggaaaagatcgatcaaatcacgtgatttctgatataccatntgcagtaca

SEQ ID NO: 15123 - DNA, 501 bp, Oryza sativa
  unsure (1)..(501): unsure at all n locations
aaaactcagcttaattaagacagttagatatggtgttggacaaacgtcttcttcatcccatctgtctgtgaccaagttgattgtgcataggtggacaatccactatggaaaatcattgtattagtaaaggaatataaagttttctgttattataccagatggcggaaacctttgtgtactagaaaaaccttttagttttcttgctggtagtattttcatagatattttaatgctgaactcatccttatttatattttttgtttacagggagagcaatggtttcaactgagaaacccagagatcaagccaatgtcattatacgttggccccaaaactgatcgtgctgaagtcctgaaacagaggctgaagactttaagacatggtgcatcagttatgtcaagcatggtgatacccaaggccaacggtgagaagtctatcaaccgtcatccagactatgaattcttcctatctcgngctaactgaatgggttgcatgatctca

SEQ ID NO: 15124 - DNA, 417 bp, Oryza sativa
  unsure (1)..(417): unsure at all n locations
ngctggctanggttcgagcgggtgcggcaactactctctcctattatgaccgntgnaggctcgcatggagtgtagtagtgaagcgctgcacaaagccatgagagcgcatggccacgacccccacagcgtggccgcgctattctcactcatgccagacgataactcttctgacaaagagcgtgtgcccagcttacgttacaaatctcgttctgccccactccgagccaagctgctagagaatcttctattatcatgggttgatcgaatgccacatatgtgcactgaccttatagcttgcgcatgtgatgatgggaagaaatgtggcattatacattaggtgatctgtagaagaaggatgtgccttggatcaatggatgcaacaagatagttagcacctatcagntgatgagacaatta

SEQ ID NO: 15125 - DNA, 316 bp, Oryza sativa
  unsure (1)..(316): unsure at all n locations
gttcctatcgttctggctatgaaggcccccggtaaatacgctgatttgtatgaagaggatgtgatattattggcttcaaaagttccaaccacttccctgatgtagcatggatatacaaacacaaaatcttctaacaaagaattacactggtaatggacagggacagcccacagataattntcctagattaacagtgtatgcagccatcattcatagaaaaggaagcaggaggggcaggtccatntattatcgtctgagatctgcatctccagttgattatttattcaagtatacagganacggaagagtaaaaaag

SEQ ID NO: 15126 - DNA, 497 bp, Oryza sativa
  unsure (1)..(497): unsure at all n locations
tcgattcgccgctatgatgatgtactcctccggccactttctatcaaaccagtccactgattcagtgattctctcaacaccggtggaaacgtggaagtgtgctcgatgctcgatgccctccttttccgccatctttttatcccaagagcatattttccgtgtcgcccttgccttaagagcagcatccactcttgcgctgccttctcttgttccaccctcttctctcattggccgagcagagctttgtaactgaagctgcagttgggtggtaggagatgaaagattgggcgccggcgatcatcgcgtctgcgctgttcgcgctgctgtgcccgggaggcatcctgcagatgccgggcaggaaccggccggtggacttcatgaacatgaagaccagctnggcgtccatcgtgggccatgccgtcatctacagcctgctgctcatgctgttccttgtcatcttggaagctcatctctacatctgatccgagtgtggtact

SEQ ID NO: 15127 - DNA, 432 bp, Oryza sativa
  unsure (1)..(432): unsure at all n locations
agcttctataatagctcatgcggatcgttgttttttactaatctgacagtactacggggaagtgataaccccttggtcatatcctatcccgccgccgcgtacttgaccttctgacgacgcgattaccttggtgctcgtggattgatccattgatgttggtaacgatgcatgtgagactattaagtagcattttcttacatttttctttcaaattctatacaagtattggaaacaaactattaataatgtctttattatataggttatttgaatagttacatgcatacagattgattctttactcgctggataacaaagtcatcatctataatcaacgtgatgtttntccgaaataatcatcctctactaaactgtctctatttttatttgagcaaatagtaaatgtgtatctgtaaatgctctatatgcatg

SEQ ID NO: 15128 - DNA, 335 bp, Oryza sativa
tgcggacaacgccatggcgagcgtggtcttgccaaggttcccgaacccgacaatggcgaggtacctctgctgggtgccatccttccctttggaaaaccactcctggagctcatcaatggcagcatccattcctacaggctccatggtgccaatcagccggggaagaggagctagacggtctctatgagcgttggctccgacgccgatgccgctgccgctgccgccaccaccaccattgccctggagttctccaccccgtacctggtgcggcgctcgctgacatgctgcgcccggagcttgaggttgccgatctcggctgcgatgcggcggcgctt

SEQ ID NO: 15129 - DNA, 385 bp, Oryza sativa
  unsure (1)..(385): unsure at all n locations
gtcagtccaatgtaatatttgctgttatcgtgtttagatcttcaacatttcactcttttgtttgtagctgtaggccattggcgcaactcaagtgtgcaatgtcatccttctcaactctatgtattttatcatgttactcctaccacccgaagattggcatacttcgagattacaccgtgcatccatgtatgagagacctacagtaccatttggtccctggcattacatgactggctcattgtcaatgggcatggtcctttgcccccacatgttgctgctgctttgcctactaagtgatgggctgttgagacttcccttttgcaggaacatacattggtccccccatctcttgctccatacagnttccacaatgtcttgttcattt

SEQ ID NO: 15130 - DNA, 391 bp, Oryza sativa
cggaccttaaaactcagcttgggctatcgtgtgtcggcagaggcgacaatctccacatccttagagggggcccgaaagtgtgcaagcgatggggccctattgacagtggagaagcagccccccctcccctaagccgcgcccagtaggtggcgagttctcgctatcgcgtcgttgccgttttcctcttccttggccgcgtcctcgccgccacttatgtcttccaactaccaccatcctcacttggtcctccatcccgttgcaatcgagatagagaggggaataatgtgagtgagaaaatgacatgtgggacctatggttagaatagagaatgtaatagacaggctggtggagtgaaatataaatttggctctccttcttttttttggcaagc

SEQ ID NO: 15131 - DNA, 167 bp, Oryza sativa
aaatgcaccagatagaaatctaagagcagtttggctctgcatacccactcgtggatatagaggccggatttccatccactacctaaaacaaaaatcaagagcagaagtctgcctgacgaaaccagctaaggtgatccagccccgcaactccttgctagcaacagcga

SEQ ID NO: 15132 - DNA, 404 bp, Oryza sativa
  unsure (1)..(404): unsure at all n locations
ggacactatgaatctcagcttatgagcaactgggtagaagaagaaacttctntctacaatgcggaggaggagagatgaatgaggatgatatagacgatagatgtgacggagaataagatgggaaggtggagaggatggacatggataaatgagaagatatgatggagcatcatcttgatgagcaagagaatgaatggatgaaggatgaacatatcgaggttagaaatgagacagatggaagtaaataactagtatcatgagatgaggaagattaagaagaccatgatgctgataatgatgaagatcagcatgatgattattatgatgatgaggatgacgatgttgactactattatgtataatataccatttttctttatgaatatctatatgatacaatccta

SEQ ID NO: 15133 - DNA, 246 bp, Oryza sativa
ccgggaattcatacaacccgtatcgggaggagaacgcggtcttagggatatcttcctcacggatacgttattggtgatatacggagcgaagatcaaccctggagaatatagcggcacctttaagctgagcgaacagatccttgatccgcggaagaaggtactcgttttgatgggacatcattgacagctctgcagtcaagcacatactctaggttagactttttctcccaaaatcacggagcaccc

SEQ ID NO: 15134 - DNA, 408 bp, Oryza sativa
ctataaaactcagcttctactcggaagagcgagatgagtgtcttctctttcttgacttccaacacccggttgagatatacactcttcctatcccccagccttgtcatctgagaattcttctctgaagataaggctcttggacccttgacctgcctcggttgaacaagcactgatcctaacccccagccatgaaggtggaaaatttatttctgattacacggcttggttaatacgcacggcgagaactcttacacgactagatcttacatgggctttcgtctctacaggatccgacaaggccttatcggctctgggcgtacccacccgaagtttccttatgttcctcggaggccttggtcagaccacagtaatggacatgaagataggtttcaacactatgtgtcattt

SEQ ID NO: 15135 - DNA, 259 bp, Oryza sativa
tggtcgtcgaggagcaccgccgcgccgtccaccaccagggaggtggacgcgttcgcgtacttgccgtactcggtgaggatggtctcgagccccttgtagacgcacggattcaaccagaagcggcttctcaccttcctcaggaaggcgagagccgcgcgggtcagctcttctcggttcgccagcgccggcggcgacgccatggccggctctctcggaacagagaagctaagcgcgcggtcgatctgtctgcgattctgct

SEQ ID NO: 15136 - DNA, 326 bp, Oryza sativa
tatctactctcttggaaggtaaaagaatcatgttaatgttgtctgttcagctgcagggattaattaagtggtaggagctagagctcaccgtcgctgccgtcagcgtcagcgctgacgtaccatgtggccgtgggcgggtgccactccgggtcgaccaccctgtgcgccgcaccagcctcgtcggagtcgaagacgaacgcggcggacaagagagacacgaagagcacggagcgtatcaacatgggagcagacgagctcgaggagaaggctgccatatcgaagagctaactgatcgaaacaactatcctgtcgctactgccgtcttg

SEQ ID NO: 15137 - DNA, 445 bp, Oryza sativa
  unsure (1)..(445): unsure at all n locations
agcttaagcacgcaatcgcttgttgtcgacattcttactccactgccaagatttgttagctaagtattcatatatgcacacagaaactaacagagatataaaattatgaaattcacattggctagccatttggaagtttcaatgtggagtatctagttttcttctggatgaatgcatcacaggggtagctntcatgattatngattttacaggatcattactgaagttccagagaacatatattntttatggcatctctttctattcgtattcctggtgtattatttgtgtactttctctttgctttttaagacattcaaggaaaacgtgtgagtatatatattntttcacatctagcagtagcatagtagagagtactcaatatggacattgttggcagcacaagtaacctgtctagcaataattcaattcagtacttctgggt

SEQ ID NO: 15138 - DNA, 317 bp, Oryza sativa
  unsure (1)..(317): unsure at all n locations
tcaacatcagncagnttatgaatgaagctntatgacgttttgtagcagngagggaactntctttcttgcttataaacagaactagcaatgcatgataatctaaattctaaagggacagtaactagcatggaaaatggcatggggaaaacatgataactcatacctcaagccaaagagggaagccaaacgatgcccttggaagaatctctgattntgttgcatcctcctttttgcttgactggccttcacacgtgatttcgaaagctgctttgcttgtctcacatatattggtaatccgatagacaatattttcttga

SEQ ID NO: 15139 - DNA, 374 bp, Oryza sativa
  unsure (1)..(374): unsure at all n locations
gcttgcttatggatttcgtcccgcaatnttttttgagctgcagtgtcatgcatgtcaacctcaatgccatcatagagaaggttctccttggaactgcaattattatgatctacacttcctgatatagcctcttcaagaaatttcaacctaactcccaattcacagactttggtcctcatcaaatgataatgttcatcaagccaaccttgaatgggttcctcctctatttctgctgtcagtttacgtaacacaaactttacagatccaaagctggtggtgccagacttaacctttcttgggttttctttgccgtcaggaaacagcataattttcttggcagcagagataagctttatggcacgaatcatatcttc

SEQ ID NO: 15140 - DNA, 311 bp, Oryza sativa
  unsure (1)..(311): unsure at all n locations
tcgctcatattntaagtagaattgaacttggttggcttatctccaactccaggaaaagtgaagctggagttggagctgtgccgaacaggctacattgtgctagaaataacaaggtttacttcgatataatcaaaccgcggcgaataaaaagaggaacctccagaaaaaaaaaacatagacacagcagaaagcaagttgggtacgcgtaccaatttccgctccaaaaccgagggaaagtagcacgcgttcacgggtgccgcgtagccggatgctgcccccatgtggatcacagncgttcgtaccgacacgcg

SEQ ID NO: 15141 - DNA, 459 bp, Oryza sativa
  unsure (1)..(459): unsure at all n locations
agcttgatcgcgccagcatcgcagganacttttgttgtagcctctcaacatcctccatttattatttctatctcttttataaataaacttttctgttgcgttgcacgtcagtaggtcagtaacacaaattttaccgagcgttctagatatatatacagggcgtcaagataaattcccttcaactttcagaaaagaaaaggagaaaccatcctttctccaaaagttccgtcattccctgaaccaaattcgcccatataattcgcggaaattgctatgatgttccccatttatagctcataagttcatgtgcttgttccaaaatgacctagtccactgatcaaggataagggtatgttgactaaccttttaactgaatntgatgcaacaaggacaagttcaagttttgaaaatgacatgacatctaacaatgtaatccctcagctggtatgagtcctttct

SEQ ID NO: 15142 - DNA, 491 bp, Oryza sativa
  unsure (1)..(491): unsure at all n locations
tctctcgcctccaaattcctgattntctcgcctttttagttgttgttttatgatggntcgatcttggccggccaagaagtacaagtttcttccggggattaacttggtcgcgagggggaggagttccgtggtggagccttcgccttcgtgatggcggacaccaaggcggaggcaaaggcggaaactatcggcggcggcggcggcggctcttgctcgttcagcgagcaggcgtttgntgagaagcttaacaagctcaacaacacggcgactaggatccagagtatcctttctttcggttgtttatntcttgtgcgctcgcaaatttggtagcgctcgtaccttatctgtctcgtggntntgattggattactgttccagatgaatagaaccctaaatngcnatgtggattagtacaactgacctaagatatctcctttgccgtccatatataggntctngcgcttgttgttggntagattcaccttctatgt

SEQ ID NO: 15143 - DNA, 466 bp, Oryza sativa
  unsure (1)..(466): unsure at all n locations
ttaagtcacctgacgctgcagcttaagcagaatttcacaccagatggttatcttcttaatggntcactgcaaatcaatttggttgagttggccaattgttcaacctgtatatgaacaacccagttcctacctagtgatagaatttagttgccaaagagtccggtagtgttagttctatttaaaacttgagctatgggggacgttggtgaagttgtaataattgccattgaaatccatctggttaggatttaagtgtatcgtgcaagtttgggactcttttctagattacatagctacgaaatttcatacctaaataagaatttaaactatatagggcagtggcagatctagaatgaaatagcatggggtctgaacaaactaataaaggtactcccccttcacattacatatagcanaaagaaaatagtgggagcttgtggacccccgttttatataggaatcattc

SEQ ID NO: 15144 - DNA, 438 bp, Oryza sativa
ctcagcttaagcctggcaggggaaagcatttgggcagctactacttatgttttttgaaacaatcattcatgcttgtctaccaatgagcacaacaactattaatctgtcttcttaactacaatagaggcaaattggtctacaactagagcacacaggttaagacataagaacaagaaaactgcactgggaactaagatttattgccttaatttgaaaagagattggcatattactgagcgatcatcaaccagggtggaagacaaattcagagagcaggcaaaccatgctgctcctgttcaattggaaatgtgtacagatagaaacagtagaattcagtgttgaaatctaacgcgcaataactatatcaaccttgacaaaccatacatgcaaaagatattgttatttgtttacaagccaagaattaacaggaacataatc

SEQ ID NO: 15145 - DNA, 235 bp, Oryza sativa
  unsure (1)..(235): unsure at all n locations
gtcttcacaaccaagtcatcaacataggcctcaacattacgtcctattggctacccaagaaattcgaggagtacgttgaaaagtaggacctgattctttacccgaaggcattgtgcataacaaaagtcatatgggggtatgaatgcagnttttcctcatcctccctaccatgcgaatctgaaataaccagagtttgctctagaaacacaaaaggcgcacccgggtggagcgacat

SEQ ID NO: 15146 - DNA, 314 bp, Oryza sativa
gcttgccgaacttcttcttgaagctctccagatccggcgtcattccgttcaaccgaaacgctgaagcatctaagctcccataggtaattttggtaattaatgaccagcgcttattgtggacttacccgcgctattgagataatatgttaaggtacggccacctcatgggtgcacatggatgactatccatggattaaaatttgatggcgccaagcgaagaaaagaaaacgggtaaactaagtgtttacgtttaaaattgatcgaggtgaagggcgatcaaatttgctagtttatttggtagtttcgcccgacta

SEQ ID NO: 15147 - DNA, 434 bp, Oryza sativa
  unsure (1)..(434): unsure at all n locations
taaaactcagcttgtatgataattngcctcgtttttagccaccattgcccataggtataataatacttactatgacctacatacatttacatcggttgaagatagaacaaagagtgtgctgcaaagagcctttttctcattgggtgcttgcatcaatgcttttgtgcattgtcgacctgttctatgcatagatggaacttttatgacaggtaaataccgaggtcagatattgacagcaattgggtgtgatgggaacaaccaggttctacctatggcttttgcatttgtagagagtgagaacactgaaagctggtactggntcctagagagagtgcacatngcagtggtgcgtatgatgcccaacgtttgccttatacatgatcgtcatgcgggtatgttgcgggctattgactacttgtagaaacggtgggatg

SEQ ID NO: 15148 - DNA, 289 bp, Oryza sativa
  unsure (1)..(289): unsure at all n locations
ctcgttcatcaaactgaccggtaaacagcttctcttaatggagagctggatgaggagatctatatgtatcaacctgatgggtttgtagttgaaggtcaagaaggcaaagtgtgcaaattgttgaagtctttgtatggtctgaaacaagctcctaagcaatggcatgagaaanttgacaaaacattgacatctgcaggctttgcagtcaatgaggcagataaatgtgtgtactatcgccatggtgggggtgagggagttatttgtgcttgtatgtgaaacatactgatat

SEQ ID NO: 15149 - DNA, 227 bp, Oryza sativa
ctagccataagaattaaagaaatatatcatggctttgcaactttcatgcacactttcaatcttgagtaaatatgtgtctttttactcaatgggtcccaccttaaggtcaagaagctaccatatacattgtagcatgtactatagataaaacaatataagaatgtgggtcccatcttatggctcaattgatctaaaacattgaggatgccctaaggtttacaaggtta

SEQ ID NO: 15150 - DNA, 376 bp, Oryza sativa
  unsure (1)..(376): unsure at all n locations
catcaagcttcattataattaattgattgtttatgtttaaatggacctcatacaggcataatgtccatntgaaaaagagtgcaacgaggggggaagtaaatataataaataaaaaaagaacagccatatagctgtaaaacagtgattgtgatctactaccgatataaatatgtacaaacgaaaagaagaaaattgtaaagttaatctgcaaatccctcccaagtgcacgaatttagcttttctgtggcttgagcacagatgcagaagcagaacaacaagcaatgctgtcaaggtaatcctgtgtcaaatagcagtgagccttatgattcaattccaggcttccagcatgggtttgctttccattcaatcatatctg

SEQ ID NO: 15151 - DNA, 456 bp, Oryza sativa
  unsure (1)..(456): unsure at all n locations
taagcttatatgacctttcagaccctactgggcatttgtcaagttataatatanaangagaaataggccgcgcatatggaaatataatggtgccctaatgctctatttaaacaacatagcccccttcgcctatgcacaatgaaaaaacagagtccattggataatgtgtgcgagaaactagtatttattctaccagcatgaatacaatggccttttatattccatgttgtcttgcaccacctttacccacaaccttctgctatggaaaaaagaataatccaagatatctacgactcgatttgtgcaaccagcatagctaactgatctgcgcaaaaacattatattcncaccgatactcatgtgttcaaacttccacacaacactaatgaatgaataatgagctcattcgctgaagagtaactggcatctggtacttcatcctccacatgaaaaaaa

SEQ ID NO: 15152 - DNA, 419 bp, Oryza sativa
  unsure (1)..(419): unsure at all n locations
agatatcaaacaaaaaagaatatactgtaattnttacacgtctacatatatctacccaaggctaaagatgtgatgacgaacaaatagtaagagaggatgcatacatccatacagctattgcttgcatgtaacaaggaagataaattaaggattatatatggattgatgtactgacattctttatcaaggtcaaagaaggcaatgttgtgggtgtgaaagcgagtaggaagagagcgaagaagcttgtggttatattcagtaaagcctctgcagcgaactatgtgaaggacctcgaccaccttctcttcccatgtcagcttccactcctggttcttcttatcaaccgtatccctcatctcgcacttgtccttcccattcttgtcactttctggcatagctggcttgtgttgtgtgctctc

SEQ ID NO: 15153 - DNA, 467 bp, Oryza sativa
  unsure (1)..(467): unsure at all n locations
cggatcttaagcgacgctgctgcagctattcacagcatatctttttttttaaaccttatttcaacagggaaaaacactgagcaagatgctatattgctcattgcacatcttgattaaagcttgatcaaaaagaaaatcaataatcctttccttccgagaggaatttacatagaaaaaacagattacgggcttacaaccgttttatctgcagtgtagagaatgaaataactaagacactgactgtaaaaaaaaaactatttcgagcctttcaacttggtaaaaggactttatttttacaatcttacctacttcattattctaaatgaaaacagtgggatttgagttatggattacggttcatgggggtaaacaccaccgcgagaatagccggacggtgacggctgctagggatgagagggggacttaggttanggaagactaattttgattcattgcttaattagaat

SEQ ID NO: 15154 - DNA, 336 bp, Oryza sativa
  unsure (1)..(336): unsure at all n locations
actcagctgcagaatgaaaattanggatagctcatagcacacatatgtatacctcattcatgatctattacttggggaaaagggatgtttccaaagcgatggatgtacttaatgagatgacaganaatggatgtgagcctactgtttcacttactctgcattgatccgcggtcacatggcaatgggtatggtttcagaggcttgngatgtcttccaacgcatgatactgaagggacctgtgccagactttgagacctactcaatgttcatgtcatgcctttgtaaggcacgtagatcaaaggatgtgttgcagcttattcatgacatgctgaatag

SEQ ID NO: 15155 - DNA, 275 bp, Oryza sativa
ttccatcttagtaggagagacttcactcaccacgtctctccttggaggtccacggctacgtgggtacttgcctagctaacatggtggtcgaggcatctagaggcacagcagatcacgcctgtcaggaggcagcatacctgatgatggccagactacgagagcgccacaactacatcttccacgacacggcgtaccggtttcaccctcgtcgagccagcagtgatgatgtcatgacctttcatccgacagccggcgagaacgacacacctttgtca

SEQ ID NO: 15156 - DNA, 137 bp, Oryza sativa
gcagatatcggatcactggatgtgcttcacgattctagctcttctccaactacagcgaacacacttttttctcctatgccagagaacccaaactctggtggagggccgaccaattatgtcccggcgtggggtggggg

SEQ ID NO: 15157 - DNA, 442 bp, Oryza sativa
  unsure (1)..(442): unsure at all n locations
agcttggaaccccgcgtatcatattttggccttgcaaggctgcttgtagataatgatgcccacgttaccactgttgtcgcgggtacttttggatacctaacaccaggtacttattctctattccacactgtgatgctttcaatcaaaacaaaagatcatgctgtcctgcataattactgctcccccttttgtattgtacagagtacagactaacagtagaagcttatgactgttaagcactttctccgtcctaaaatatagtaacctaatattcgattagacaccacctagtactaaatccagattcgtagtagtttgtactactttgtagtcaagctactggagataaatcgagacanatcatgctnttntnagacaacaccaatgctgcctgttaaatctgtgttgacaccttcatccgactgacatggtcattttaact

SEQ ID NO: 15158 - DNA, 302 bp, Oryza sativa
tctcaagaaggcgaagagcaaggcgggagacaagattaaagcaacccttgttgcggcgatcgacacgtgaaaagcggtccaacagcttgtaccaaccgagtgtgtgtgacctagtagaattgggctgggccacagtgagggagagaggtccatagctcatcgctataatagaccggcagggaagagaacgaatcgaacattgtagaaacaaatatttggaaatcaattcagatctctctctgttctattgcttgctctacctgttcttagctgttctttcccaaactctcaattctcttcct

SEQ ID NO: 15159 - DNA, 463 bp, Oryza sativa
  unsure (1)..(463): unsure at all n locations
agcttactactgtccaaaattgagtaagtttctatataagataataatgggnnaataagggcagaactactattaaaaggttgtcaacctaccagatctataataaacagtatattgtggatcctataagctcgctaaaccggggtgtacataaatgataacggcgcaactactcatcctttggttctgaatccttatattttgcattgtgttacagcttataaatacccagaatgtccaaaagaaacgaccataacttggtaaatgatacacatcgatgttccaacagtggttgctgaagaaacaactctcaatatacactagttaaccttacacctaaatgtttggaactttcagcgaaaactctaatattctttgcaccattacacaataatggaatcattcacattataaatgagtaaacaagctgactataggaaatcaagggcaagatactcaaaat

SEQ ID NO: 15160 - DNA, 355 bp, Oryza sativa
  unsure (1)..(355): unsure at all n locations
ccatttgcattcttctctcttncaccctctacagggtgaggatcacttatgaattgtggatgaaaaatttcacaaaagagcaggagcaggcacttcagctcctcaccttcctccgaaatctagaattctatgagtgccaccgtctgcagtcccttcccgaagggttgcatctcctttcttctatctgcacattaagcatcgtcggatgtcctgaaatcagatcgttgcccgaggagggcatcccagcttcactgaaaaaactactagcaatgcgttgcagcgtcgaccttgaggatcaactcangagattagaagaatcataccatgaattacaagtattctacatctgatcacc

SEQ ID NO: 15161 - DNA, 415 bp, Oryza sativa
tatatttatgaaaacctatgttaacacaaaatatgtgcatgcaaatgtgggcccaacaagcaccttggagtgggccccacatccaatgttttagtggaaaggtgttgctcaaaagatgggaagaaagaaagggttaaggtagagaggttgccctaagctagcaaagctatagctagcgcataagaggagcaagaaaaggagcagaggaatatataaaaaaaatgcatcattgcagttgcagtgcagctagccacacgatcgaatgatcgatcgaagaatacgatgcccctccaaatctgatcctgcatgcagctagcttagcttaatcagttactttttttttgtgttttggcaatgagcataattagttacttgcacgatttgatcggcgacagagttaatggctggtgctgat

SEQ ID NO: 15162 - DNA, 460 bp, Oryza sativa
actaagcttggttggattttgcgtgcttggagtaccaccagaatgttatttgtttcttttgcaaatcatgatatgcgaatgatcaatttgaatatgtggacgaacgcctttccccaatgtcactcattcctacgagtcacccgtttgcacgaaatgcacgtacgtcacgtgcacattgagatcgtcgctttcgatcccatgggtgatcagtacgatgtatgtggcaaattccaccaaataagcgaactgatcaggttatcacgcatgctgatacctatagagcaacacaacaggagtgcgacacggatgtggcatgaacccaaagatggctgtgggctacatacttacatatatgcatattattgggtgcgtgagtggcactactgcgaccacaataattgaatgacataccacttgttcgcatgatgtggcatcaatgacttttggcactgcactactt

SEQ ID NO: 15163 - DNA, 411 bp, Oryza sativa
  unsure (1)..(411): unsure at all n locations
tatgggtgggatgcaccctcagcaatgcatgaggccgcttttattgcgattgtgtattaccgacaccacaggccagggatggatgggttctttcactattttccaactcgtacaaatcaagcaactgccaattactatccaggtcttgagggaaacatgagagagattgacactccacagcttttcttagctggcctagtttgtgctatggatagatatctcgcgaatactatggctgagttgcgtagattgcaagctagagtggtcatgcttgatagacgaatagaacaacttgggcatcaagggcactntgataatgccattatttatgtgaatcatgaacttcagcctcttactgagaaccttgcctcctccgtggggcgttataaaacataacacttgagccacatg

SEQ ID NO: 15164 - DNA, 443 bp, Oryza sativa
  unsure (1)..(443): unsure at all n locations
tatcagccgccgctcngccgcctaaataaatatgatatgcttagattgtattggaatttggttagtggccatcactgggtcagagaacccctttctaatcggtatatccagtacaagaaaagcagtggacaattatctagcttacggtttaagcactgtcctgtaggaagctctttgcatccctgcacaagagacgttgaaggaaatacgaatctcaggatatttaacaagtcagctctgttggatcagagagaataatttgcattgttagtttgttactgtcccttgacatcaacttttcagtactagaatcatctttattactcttcctttntctaggatcggaaagaatagccccttttgtactggcacttgatcatctggtattctgattaatgctgatgtcccaccaaagtgagtctaatgatactgtcatttgcatg

SEQ ID NO: 15165 - DNA, 373 bp, Oryza sativa
catatcgaagctgggagagaaggcgctacccctaattaagctcctcaaacgctccgggccagttacctggacggaagaggctgagcgggccttcactcaattgaaagcgtacctcagatctcccccagacctggtcacctcggagccagatgaaccggtgctactctacctggcggcaaccccgcaggtggtcagcgcggcgatggtacgggagcgcgacgaggacaaccatcactccgcgcatccccaccctatgttgactcgacccacgagagagcaaggaggagaggcccccgagccgaacggcggcccgaggcccccgacggccggagctggccctccgcccgcttgtccgacggtgccaggcgccccc

SEQ ID NO: 15166 - DNA, 356 bp, Oryza sativa
  unsure (1)..(356): unsure at all n locations
tctaaagggaaaaatacaatgcatgaatgcctccttttgtaggtgagagaatatatatcgaacttggaaaataaaagacagaaatggtgacattctaaaacctgttagatgttgtcatggagcactgaatattaatcatggtaagaagaatcagctaccaaatctttctcatccaagctggccaatgtttccactctagttatgcatataaggattcatagagaagtttttgtttatgaactatggtaggacaacttggtgttgttatactaagaaactatggggttcangtaatttggagccgggagatacaggagagaagaacagagagcactctgccactattgcaatgcaat

SEQ ID NO: 15167 - DNA, 456 bp, Oryza sativa
  unsure (1)..(456): unsure at all n locations
agcttatagaatatgtnttataattagtgtatatttaatactctaaattagtgtccaaacatccgatgtgacagggacttaagaataagtccctggaaaccaaacagccactcagagctggggtctgtacgtgttgccgtgttgtaagcaaaattgttgctttccggcgtttccgcattgatttgcagctgccgccgctgcttctgcggatctactggcaccggtgcagatggctggagtagcctgtactagggtgttggggatagctgtagagaaatgcatgggaggcaaggctctgcaatctgtgccatcggttgcctcgggatgacaaataaaatgcgactagccattgcgtgcctagcctacctcctcccctctcgtcttccccacaagcccacatgagagggaccgcatctcatctcatgtccttgctcgtttttcagactttcaatcact

SEQ ID NO: 15168 - DNA, 394 bp, Oryza sativa
  unsure (1)..(394): unsure at all n locations
tagctctcagntaacttgtgatcaatggctcatctgcaaaggcgcagtggccgcagaagcagaacaagctgttcgagcaggcgctggcggtgtacgacaaggagacgcccgaccggtggcacaacatctgccgcgccgtcngcggcggcaagtcggcggaggacgtcaagcgctactacgagatgctggaggaggacatcaagcacatcgagtccggcaagggtccctttcccgcctaccagttgcccgccgncgccggctaccaagccgaaaggtatagtaattacatgattaatcatctgctccctccgtctcataatataagggattntgactntttttaactggttgactattcgtcnntattaaaaaaataanaatattatttatttta

SEQ ID NO: 15169 - DNA, 441 bp, Oryza sativa
  unsure (1)..(441): unsure at all n locations
tcctatgaaattcctattgtatgtctcattgcatgtagnatttggaggaaatttaaccagagctccaaactcttggaaaatttcctttgagtctatctctctcatccgattcctgcgtttttcctgcgctccaatcaaacgaccattcctgtgtttttcctgtgttttgcaatcctctgttttacacttcaattcctgtcagaatcctatgtttttcctattcctccgttttttctaccctgcgattcaaaggggcccttagtggttactgttgatcaaaatgggagtacaaccaattttgcagaaaaggcccttcaagatgaccaaattacactaagttccacatgagcttgcatgatttgagaaaagcaaaaaaggtcctcttttgtcttatgcccgcatcgaccatgacttggttgacgtgcttgatagcagacaaaa

SEQ ID NO: 15170 - DNA, 389 bp, Oryza sativa
  unsure (1)..(389): unsure at all n locations
ntacctcttcgtcggagatcgaaacccgatgcatcccttctcgaaagaaaaactcgtcgaaacaacgaatatagaaaagggtggcgatgcgccgaagtattgttgaactgtcgtcacttgattacaaggtattgggtcatatttatacccgaagtacataatatgtccttgctggacatgactcttatctctaacacaatttanagtacgaaaaagtcctttatgtggactcttatcaaacatatctctaaggaaacagaaaatgtcctaattaataaatacaattgtccttctttaggactccaatcctcgcatggcaatgactatgaagtgctttgactaatcctattgacaaatgtgggaccgcctttttcgagtctggtagcatc

SEQ ID NO: 15171 - DNA, 460 bp, Oryza sativa
  unsure (1)..(460): unsure at all n locations
gaatcatacgtactggtatttnttgttttgttacaggacgnattctcacttctatacagggaatgtattatatacacacacctaatgattattctaaagtaatgggcccaccaatttaaatggaaatcaacgatacatatagatctaatctaatggtataaaatagcgggtccaccaattaaatgaatatcgacggtgagattatatagtgccacgtgacggcatatgagcgtttataggaatcccacgtggctacttgagagcgtttgtangaaagttaatggactcttagtatataatagataatagatagatagatagataggaaaacaatcaaatatttatatattgcttaaatggaataatcgggattagggtgagtatatataaaatttctttgcaacgacatacggcaacaacatacatctatgtaatttcaccatctaaatatgcattttta

SEQ ID NO: 15172 - DNA, 283 bp, Oryza sativa
  unsure (1)..(283): unsure at all n locations
atgtgtttcctctgaacaactgatatcaaggcttggcgaatatgagatgctgcatacgatgaaaatgaatttctccaatataatacatatggaatcccctgggaatgaaagtgtcaaaaacacaaattccaaaatcacaaataagattctgaagtaataggagagtaggaattgttgttgaaagaaaaaagctcagtaaaactgcaaaaaaaatttgtaaatgttagcaatcatcttgccgaanaatgaatagcaatggctcatcttacaagcatataatgat

SEQ ID NO: 15173 - DNA, 324 bp, Oryza sativa
tttacttaccgcctctggtgccacttggtgtctatgatctttttccagccatgaacgagcagaaagaggtagacgacgatgaagaggtggtgcgagtaccacaatgcgttgaatccggcgaggtggccgagcgggaacaggatgcgcggcgcctcccgctttcgcagctgtcgcgtctccagcgtgaacgagaccaccatgagcaccaccatgacgatcccggtgaccccctcgacgccggcgaggaggccccggtacgtctgccgcgacgcgccgtatataccggacagcaacagctcgtactcctcccggctcgacccgatc

SEQ ID NO: 15174 - DNA, 372 bp, Oryza sativa
  unsure (1)..(372): unsure at all n locations
aagccacacaagaaacgagaatattcattanaatattattaattaagtaatatctttacaatttttttaaagtgtggtgctaggcacattaaaaacttcttactaacaaaaataaatctatattcaagcataatgtgacaccccagtgttcggaaaaagtttgctaagagaaaattagtacgcatttcattttcctttttaatatgattctttttatattatgtttcgagaaacttgcattcaataagttttgcaaagataaacaccatttataattcaagaaacgtgctcgcataatacaagtgaatgcctatgccataagatctagagaacgtagcttagagtagggcttggccactaacttcacaattg

SEQ ID NO: 15175 - DNA, 164 bp, Oryza sativa
cttggttggttcaactcaagggtgcactagggtattgttatctaatataaaccagattactataagctggattataataagttatgagcgttttctctagattattgggtttgaaaagctaatgtctataataccctaagctattgcggagtgggaggaggatg

SEQ ID NO: 15176 - DNA, 88 bp, Oryza sativa
ggtcaccccggaagcgacatgcaaattgggctggtggtctctctggtgtataaggaaattatcacccgactcccctgcgttaaaaaaa

SEQ ID NO: 15177 - DNA, 433 bp, Oryza sativa
agcttctaattctctagcggctgtgcttgtttgctctcgcggtgagagcactggagaaacgtgacgacctatttcaaatatagacgttgtgatgatttgtgactcgtgaacggcgttgtgtttcacggcttcgcgccaactacaggactactactgtatgtacagaggagaaaccaatagagcctgcgactttcacggaccggaccaaggttcttagactttatactctgatgagaggagcccatgttgtagcaaatattattgggctttgaaccaagatatgcgagttgccacgggccgtgacaccgggccacaacgagcacaagcccaaaccggtccgcctcggcataacagacacgctctcccgggtcccgaacatatcgatccccatctggatcgctcacgatccctcgccagccgccagccgccagcc

SEQ ID NO: 15178 - DNA, 356 bp, Oryza sativa
  unsure (1)..(356): unsure at all n locations
tcgcgcgatcaatcgatctggttggtcaagctaacccagacgagctatggccatgctcgggaagaagagaaggggatcgtcgtcngacaagctgccaccccacgccgaggacccgcgtgcggctccttncgcggcggatgccggtcttaccgccaccgacggtgggcaggaggtggccatgtcgcaattcgtcgcgcagctaggcatgtgcgaagcctccgctcgagtagcgaaagcattttgtaagttgaaccaatggatggatggctgacgaatttgatattttttcttctttctttgggtgcgtcttggcatggcagacgaggcggcgcggaataagctggacagcatgaacc

SEQ ID NO: 15179 - DNA, 461 bp, Oryza sativa
  unsure (1)..(461): unsure at all n locations
agcttgctgcaatttcagatatcagcatgctcctctggacgatgttgattcggggtatcttgattctccaggggcatgtactgagccatgatcgcaccaatctctgaatccatgtaactctggtttggcatgatggtaacacaaagtatgagttagccgtagattattgcaaacataagaagaactagataattacgtgatcattcggagatggattagaatagaaggatgagnttgttacccgtagccgatatttgtatacggcatatgctccaattccagccaaagcgaggccaaagaaaataacccaaaggaagccccagcccactgacgaagaagcaactttgcctgcacagtgattgcgaaaggcgtcacataaaacgttctaaagcgaatgaaattatgtgtgcatcatagttccactcctgttttgcatcatatcaacataacataacatacaa

SEQ ID NO: 15180 - DNA, 418 bp, Oryza sativa
  unsure (1)..(418): unsure at all n locations
actaagctgctgctaggtcagcagggcggaactactctctttcatgttgaccgcncgaccncgcatggtgtgtagaggtgacgctgtgcacatggccatgaaagcgcatggccacgacccccacagcgtggccgcgctattctcactcatgccgcacgatagcttttctgacatagagcgtgtgcccaggttaggttacaaatctcgttcggccccactccgagccaagctgctagagaatcttctattatcatgggttgatcgaatgccacatatgtgcactgaccttatagtctgcgcaagtgatgatgggaagaaatgtggcattatatattagtacattactcctattaggatgtgccttggatcaatggacgcaaccagataagtagctacagacacgtgatgagacaattag

SEQ ID NO: 15181 - DNA, 370 bp, Oryza sativa
aagcaccatatgcaatcttgtttcataaacaggagtctgtgtctgcaggggggcatccatgcagcatgtgatcccagccctcccttgcctccccaaccctaacaaccacatgcagctaaccatcccatgctcctgcagcagaacagtgaggagagtctccattaaaattgccctgaaaggaccatgcatcagctgccccactacctcaggctccccccacacttcatctcattctctttgtcctgagctgaaaaataaaagcttacacattcatcgtattcatatactccacccgttctaaaatataaggatgtctatgctctttagcaaatactaaaagtaagtctatagattcctgtttatgcacttt

SEQ ID NO: 15182 - DNA, 373 bp, Oryza sativa
  unsure (1)..(373): unsure at all n locations
aaaactcagcttatagacctcggtattgagaatgcgatatcgatgcatcctggcgtatnggcaatgtaatcagtcatattcttactaaactgcgagacagtggtttgtttgcaattgcaatatttttgtatggagctgcttaaactgtacattgtccttttagattggcaatatgtgactttatgcaagtatttgattgggcggatccaggaacaaaaagttggggggattcaacataccgagtacactggcataaacacatcatctcagtattaaactatgctaaaatgctattaagagacctttagcacctcttatcttatcaaccatggtgaaaaaattgaaggggggactcacgggggtatccatgggt

SEQ ID NO: 15183 - DNA, 454 bp, Oryza sativa
agctttgaaataaaaaaaatatattaaaatattttatataaatgaaattaaaaaataaaatattctcaaaattcatggcacaaggcgttacttgttacaactacaaaataactccacccctttccatccaaatgcaacggttaatttgagggttaattgctgatgatacactgtacatgcttgtgcagatcatgtgttcaatcgaataaggaatgtggtcggagaagaaagaaagaagcagctgttcatggctacctgccgtggagtatattggatagcggcgtagcgctacctcctctccaaataagcaacaaataatcaaggagatagttaagccaataatagcgtggattaattacgctcgcaattgatatgaccagcgatctgcagtccgaggaatatgggaagtagcgttaaaattcagtcgattttatactcaaaaggatagaagaaa

SEQ ID NO: 15184 - DNA, 418 bp, Oryza sativa
  unsure (1)..(418): unsure at all n locations
tgcagttncaagnngctctctgctctgctctttgtgttttttttgcagtttcggtcctcttggagatggaataggatcaaaggaaaggagtggtagttttccataagagtacctctaattactactccctccgccataaaaaacaaattaggattaaatgtgatctattctaatacaataaatctagacatatatactccttccgtcccaaaaaaaaaaaagccaatctaagagatgtcacaacaacgaatctagacaaacaacgaatctagacaaagagatgtgtagattcgttgtactaagagaaatcatatcccctcctaggttggttttctgggacggagggagtatgtccagatttactcgtttataatganttacatcatcaagtattatcgtgggtgtttatgggacggac

SEQ ID NO: 15185 - DNA, 458 bp, Oryza sativa
  unsure (1)..(458): unsure at all n locations
agcttgtgatttagttnttgatgcagcaagtcatggaataagcttcttaattgttggtaccaaaaaaagagcagcggatttagtagcatcagctgcaataagggctcgttgtcattatgttaataaaaagtggttcagtggtatgttaacgaattggtcgattactaaaactagactttctcaatttagagacttaagagcagaagaaaagatggaaaaattccaccatctcccaaaaagagatgtggcaatcttgaagagaaaattatctaccttgcaaagatatctcggcgggatcaaatatatgacgaggttgcctgacattgtgatcgtcctcgatcagcaaaaagagtatatagctcttcgggaatgtgccattttggggattcctactatttctttagccgatacaaattgtgacccagatctcgcgaatatatcgattccagccaacgatg

SEQ ID NO: 15186 - DNA, 476 bp, Oryza sativa
  unsure (1)..(476): unsure at all n locations
tctgataaaaaacgggtggttctagcgagattngtaatatgatgtcctttacgctntgccgagatgtaaagggccattntatgattccatttcttaataccatgaccaaaatgaactcccgcttctatcatctctttcaaattgatgttccaatatcttcttgtcattttttccacacttccttttgattttttcttttttttcatcctacctttccattacgaaatttctttcttttcgaagattaagaaagagccgaaatagcttgaaataaataataattgttccgatggaaccttctacatggtataagcataaccttaatgaattaactaaacttctttttaaattaaaataaaaatagaaaatctaacctcttagcgttctaagggcaaaaatctagtttatagtaaaaaatctgctttatgtatccttaaatcatataaatggggtaaatggtgattctgatgtctcat

SEQ ID NO: 15187 - DNA, 347 bp, Oryza sativa
  unsure (1)..(347): unsure at all n locations
tctaatatatccaaaatcagctcaaagatacaactgcgtttttttatttctttcttcttcttctttattcttcctcttggttttcttctttcttttctcctttgtttgggtgcggctttttttttctctttttttagcacctttctgcccttttttttcgtgtttctttaaaagaanagactcaaggacctcaatgtaaggtcatagggactcaaatgtaaatataaaatatacagggactcaagtgtaaaagtccaaagtcaaattaaaaattatataagaatggaatgcctgaattatacttgttccgtnctccaaacagatcttggaccgacaccaacaaaatt

SEQ ID NO: 15188 - DNA, 433 bp, Oryza sativa
cggaccttaaaactaagcttaccgcgcggaagcagcctccccacgtgccactctgtggttgttctcccggagccttttccgctcgcggcggcgtgtgcagcagcggcttcacccggatccctgtcagccaccacggcgaaccaacaaaaggtggcaacattctctcgacgggaaaaagtggtcgcggtggcggccgtgacggagtgatcgagaagagaagtaaattacgggcgtttttcccgtgctgggttgcctgaaccatctttcaccaagacgaaccataccgattggatgtatcctctttattactcttccatcgatcgccccaaccaccggcagagaatactcgcgcaggacccgacgacgatgcgatgaggtgatgaagcgtgtgttcttgggcaatggcgatcgacgagcgacacgatcgtctttg

SEQ ID NO: 15189 - DNA, 446 bp, Oryza sativa
  unsure (1)..(446): unsure at all n locations
agctntacaacactttcgtgggttggttcttttattggagcttaaatttcctgggtctctgaaaagaattcgaagcgataatagtggagagattaaaaatgcttcatttgaacaactttgcaattgaaagaggtcttgaacatgaattttcttctcctcgtgttcctcaaccaaatggtgttgttgaaaggaaaaatcgtgttttggttgagatggctagaacgatgttggatgaatataaaactcctagaaaattttgggctgaggcgattaacactgcttgttatatttcaaatcgagttttcttgcgatctaaacttggaaaaacttcttatgaacttcgatttggtcatcaacccanagtttcacatttgcgtgtttttggttgcaagtgctttgtcttgaaatctggaaatttggataagttggatgcacgctctaccgat

SEQ ID NO: 15190 - DNA, 246 bp, Oryza sativa
agtgaaactcggagaggatggcttcaacagaggtactatccttttcttctgcttcgaccctttgaatgcgctgcaggctatccatgtgaggcctactttcaattcttatttattgtgagtatgacggtctgcaggtgcccacatacttgcacgcatccgtgagaacagcaatttctttacgtcagagctcaagaagatggggtttgaggttctcggagacaatgactctccagttattgcaataat

SEQ ID NO: 15191 - DNA, 446 bp, Oryza sativa
  unsure (1)..(446): unsure at all n locations
agcttgctgatcttggtgagcgattgctacttatagggagcatatgtgtgtgattgggtgaaagagtgagatgtnnagagagagagagagagagagagagagagagagagacgtgcaagtcaatgagtgctgagtgctgatccgtatgaggatggcatccaagcgagggcgacattntgcgatgcttatattctatatatttctcttttcttctttggagggaaataatgatactatgaggagacatttgttggatcatggattcatgatgcactgctatgtacccgttggctgcagtagtgtgcagagatatatattagtttttcagaggggggcagaaataataattgaatcattccatagtacatgcatgataaaagtgttcatccagcagcctgtgatataattgatggccttaaggattgtntgcttatattagatctcag

SEQ ID NO: 15192 - DNA, 270 bp, Oryza sativa
  unsure (1)..(270): unsure at all n locations
tctccctgngactgcagcggaaagtgcaatgctggtttcacgtctaaaaagtgtgattacctaattacatccaacaagttacatttgcccagtctaaatatgcttctggtatatctttcagtgtaagggatctttcgttaattcttgatgcacttctgaaaacaagatccaactctgtcctgttggatatcatcaataagaatggcacatnttcttgcattctgcagctttttaccgtgaaatacaatcatctacaaataccttgctaat

SEQ ID NO: 15193 - DNA, 178 bp, Oryza sativa
gatgccgtattgcgtgacgatttctatactgatggagccacttcctgagaagcgggaatgaggacgccctcatagaaccatgacgactgaatggcgggaagctatccttgggatcacaatggaaggcggacagaaccgccattgtgaatatgaacactggcactaaagatggaccagt

SEQ ID NO: 15194 - DNA, 431 bp, Oryza sativa
  unsure (1)..(431): unsure at all n locations
tnncgtggtctcttatatatttatttggccggtcggtctatgtaactattaagntgatgtaagtctcttagtccctttcgtcttaaatgtgtttgctatatatgtccatgcttaagatgaaagtgtgaatctagtgcacatcttgggaattagattcacatgagttaagaatatttgagatgttgtagatctttagccattttgtcaagtctcctgattgtgtaacacatctggtcgccgctttcgagtgtgttgacgggcatatctcacgccgaagttgactggcaggctaaatgcccagcaatgtcttcaatattcttctctcgatgtgtcggatatttcattatgnttgttngatgacttgagtaattcacttcatctcttaaatataatgggaggtncggagagcctacgaaaactgccgccgcagc

SEQ ID NO: 15195 - DNA, 448 bp, Oryza sativa
atgttcgcccgaagaacttggctattatggtcactttatggaccagtgagatttgtaggtatctagtctgaggaatattattacaggtaacttaattctctacgctggtaattaactttattgtgtgtttttatgcgtgatcaatatgtgtgagtatgaatgccatgcttgccatttttaagatctagggaattgttgtgttcggtaatttctggtttcagtagggtctagagcttaattcagaagccatggctcgatgacagtgttatgccacataaagaatgaatccatctcaaaatacaccaatccgttacaaaaagattgaatcttgttggctacattgttcttgattagtgagacagtctgatgtgcagatgcacaataatgttctctcatttgaagaaaagaacaaatcatgtactttactcgctgggaaccattagttgag

SEQ ID NO: 15196 - DNA, 374 bp, Oryza sativa
  unsure (1)..(374): unsure at all n locations
tactcgaaggaatctcggagcanggatgttagtaactcatgttactggaccctgagctgaagctactagcccactgtggcccatccgattggaaatatgacaatacaaaagaacaagcatcagtcaaggagaggggatcgatcgatcagaagaaccggacggcggcggcggtggcgacctggatgccggtgggctccttgtcgatttcttatccaccattcctcctacctccatcctcttacttctagaaccccttctagaacttgtatcccttttcttcttcccattttctccaccaaacaaagagttgtactgaatatttgttgcaattttgcttagagaagtgggtctctaacaagggtctatggcattca

SEQ ID NO: 15197 - DNA, 412 bp, Oryza sativa
  unsure (1)..(412): unsure at all n locations
gaaaactaaaatggcctatatttatgtgaggaattgatccttctatgtggcatgaggtaacccaaactccgnttggaaaggctttggcgtgaacctctgacaccggccagtgtctggagtaagttcgtgtcttgtgggtaaagtggaaccctctgcagaggttaactaactgttccaacagccgtgcccacggtcatgggtggatgtgaggtggttcccgttgcgtatatttgtttgcctgtgctttgtgaaaagttgttgtggtgtgggaatcgtaaccagaatcagcctatgtggcagatggacgacctgagtggtcagaaacgaatctgtgtgattcgggatgtctgcaggcatcatagactatgcttcccgagtggaagcggattgttgtactgctgggcagctggac

SEQ ID NO: 15198 - DNA, 459 bp, Oryza sativa
  unsure (1)..(459): unsure at all n locations
ggatatgatgaccctgctatcgttcccacaactttatcttattaatggccagttcacaaagcattgcatgatgctgatcctcgagaggcangcagcgaaggaaacctgtgatagcttttgcttcgtccaccgtaattctcccccctgcgatgcagcgtaccccagcctcatcatggtaatacttcgtacttcggctgaaactctgtcaatttcacacttttgggtagtggaaatggattttaagctttgaaaagaatacaaaagctaatgatgttatttccttgctagtacagtagtactctaccaccttttagtttcatccatttttccctacacactactagtattttgtagtaatagttcagttntgtctactcttttgaccagcaagccagtggtcctgtgtgactatgctttgcacctttctattcaatctccgtgtctacacgctctgcacac

SEQ ID NO: 15199 - DNA, 285 bp, Oryza sativa
tcaatggatttgaacgtttacctccagggatcaaattaatttagcaccgtccggtacaaaataagggctatagttggctggatgcctgaaatgttcctggactgcgaaagacgcaacttcgttattcaagtttctcatcctactacataatttttgttttcacatacttcctaggacacaagcacacactacctaacctgcagaactaaactaccagtgccctgtatgtcctgtgtcctattggcagcacatgttgaacctcataagcttactagtgtatctgtt

SEQ ID NO: 15200 - DNA, 482 bp, Oryza sativa
  unsure (1)..(482): unsure at all n locations
cgcgactctataaacactcaagcttcagtgtgattgtggatgcttactgcgctgctggtatgttcggtgatgctatttcttggntcaagaggatggtggagtgggaagctgttgctgatgttgcatcatataataatttgatccggcatctcagtcttcaagggttggtaagtgaggccgagttgctatacaaggagatgggagaaagtggtcttatggcagacgaggaaacatatgtgctactgatgcaagggtgctttaaggttgatcgcatcgatgaaggcattaattactttgacggaatggctgagttggggttgaaacccgacgcaactgcctatcataagaatgttgatggcctaattggctttggtatgctggacaatgcccatgggtatctcgattagatgatggggatagatattatccaaacattgcaagctatgaagcactgctaaaagcgtacattggtgagctagttt

SEQ ID NO: 15201 - DNA, 407 bp, Oryza sativa
gttagccagcccctttaaatcctctccttttttcctcttcacttatacaggtagcatctcaaccctttttcctcttcactatatatatagctagctagaatcggcaagccttttcttatggtgctacctgctcatgaagtaagctcaggttcttcttcctatattagtctatatacagatagtgcatacgtacgtaataaaaagagccctgtagatggaaaggttctttttttttcagtcgtatggacatacgtcgtttcatgatcaatgccgtcaaaaaattattttttagaaaaatatactaaaatagattaatatgtgatatgttgctatataaaagtgcaagtaaatattcgactcatacaaccagaaacaaagacgataacaaatatcaaccatgaattata

SEQ ID NO: 15202 - DNA, 489 bp, Oryza sativa
  unsure (1)..(489): unsure at all n locations
tncattgcatttatatttngcatataagagcaaatcaatggatgaccataagtagcattaactactaggatgtgggagaaactcacaagtgcctaaaaacactagccattaattgagattatctcataaaaaggctatgatggtgcagctagctcaggagggatataagggagaagggaacatgaggtaggagatggctggccaacttggcgatggcaggttcattcttgtagatatcaagaaagagatgcacgaggtacataatgagatggaaaacgatgtgagagggccttacaaggtcaagaaaaaggccttacaaggtcaagaatattaattctagcacaaataaagcaccagaaaagatgtatggtggttggagaaggtnttagaagaagaaaagctcaatcggggtagcaccggttcgcatgctacgagaacatcacaatgcttacttgtacttgcatgtatatggacgattcgtactacttt

SEQ ID NO: 15203 - DNA, 356 bp, Oryza sativa
  unsure (1)..(356): unsure at all n locations
ctactcgatctctgtcccgatatctcatatatctactggtatcagttcattgtagatacatcacgaccgtaccgacttgctggatttggacgcttaagaaaaacaacactcgcctgtcaggtgtaccaaatgataaaaagccaattcgattgcacagcttttgtatctgtatcacggaatcctaatatcaataagatcttgagagacatactttcagaagttctttatacaagcaacccgatgtcagattatcagaaggatcacttctggaggatcaaggaaaatcttaatcaaccattggaagatcaccaactcatcaacatgattaaagaatatctaanaaataacaggtatga

SEQ ID NO: 15204 - DNA, 301 bp, Oryza sativa
  unsure (1)..(301): unsure at all n locations
actcagctttcaaacacatgctggtttgtgagagattttaactggctctaatttgctccttgaatggtcgnggctgcagcagggtgatccggcgaggaggcatattgaacggagaaagacgatgtgagtagcagatgcttccaggaagtgacggagccaggataaaattatagtggaggctcctcagcattttatgcattccaacaatcttagataaagtctattntagcctcattgcaatagatatatggatttaaattttagagggggtcttaattagagctctaatgatttattatgg

SEQ ID NO: 15205 - DNA, 454 bp, Oryza sativa
agcttgatcgcttcattgatatcatgtcttttcctgatccaaaccagaaccaaaaccatgatgctctggtcatcgaggatccacagattgaagaagtggaagccatggcacatcacccaacgcatacccatgatgttcagcgatggtcgacgtcaagcgttcgccctcgattccttaacattcctattgcctctgctccacttcccaccacattgaaagactatcatgacatggttgaagacctggtgaacaagcggctgaagcaaatctccatcgagcaaacaccccgaccaatggagagtgagcttgagaagccatatgaagcttggcatgatttagtacctttcctggcagggtggcacccacccaagttccgtcaattcaatggaaccggagatgcaagagaacatcttgcgtactttgaagctgcatgcggcgacactgccaacaaccc

SEQ ID NO: 15206 - DNA, 368 bp, Oryza sativa
  unsure (1)..(368): unsure at all n locations
ctagcggccgagcctgtctctcgattctgaacgctgtacacttaattcattggttatgcttgcttttcctcagatcttatggaaggcttcagatcatctgacctcttaaatgatgaatcaccattactgactcatgcaaagctatagctgacatgaagtttacatacgttgtatcatgccaacaatactgtatccagaaacgatctggtgatcaccgtgcacatgatattcttagactgatgacaacgtaagtgacaattcgagaattaagatgaaactctgaatgtangtatcagatcaagagttgcatgccaaactttcattagttcctcttcttgtattccaccactccatttcttggttttcgc

SEQ ID NO: 15207 - DNA, 478 bp, Oryza sativa
atccttagagtcacctgctgcatgcaagcttctgcttcagctatgtttcgatcattatgtgaaatctttgacgcacatatgcaattatgacagcaattatcattcgttgtatagattgacccacggcatatatatggtcacaatctgcagtgctactatgatgtctggtgccaaagccaggccggccagccttttttctactggtgagaagttgactgtgatttgtgtgcttgcatttgcaaactactccatgtcattggaataattaaactggttggatgtgtctgacaaaaagagattaatttgcaaatagaatgcattaagttcagtgttgcactgaatcacataaatttcagtaagtggtttgattgtgcagtgatttcagtaatgttctttttgcaaatgtaggcttgatattggggagggaaaagatgttgaccttcctgagtgccaagagctcagctgaagaagcaatgca

SEQ ID NO: 15208 - DNA, 329 bp, Oryza sativa
cagctactgaactccagcacaagatatggtgcttccacttcattgtgaacgagcatgaaaagagggatggaagtacatagacactatacacgaacacaacaacattgtgtacctatgttatatccagttgggctgtcccacgttagtgtacccttcaccaatatacagtttatactttggtttggctcactaatttttgggctgtctaagtacatgaaccaatgccattaaaatcaaaatgaaatcacatgtgatcaagattgatttaaagaaaacattggctatactcttgagattttctattgtaatatcatactatagatcatatt

SEQ ID NO: 15209 - DNA, 444 bp, Oryza sativa
  unsure (1)..(444): unsure at all n locations
agcttactaactgcagtagaatgctatccctatgtttcttctattngngatgcagttgttggttgtttcttcataaatgtgttttggttacctaggccttatccttggtttcaggtgttagatcacattggtgatgaaggattgaaaattgtagcctcatcctgtatacagctccaagagttgagagtatttcctgcgaatgcatatgccagagcaagcactgtgacagaggaagggctagttgccatatctgcaggctgtaacaagttacagtctgtgctctatttttgccaacggatgacaaactctgcactgattactgtcgcatagaactgcccacgattcacgtccttcagactgtgtgttcttgatccaggatcagcagacgctgtgacagggcagccattggatgagggttatggtgcaatcgtacagtcatgcaaa

SEQ ID NO: 15210 - DNA, 425 bp, Oryza sativa
  unsure (1)..(425): unsure at all n locations
taaccaaacaaaataaggtatattaaaggagaaatcaaaatctttggtgcttctcacctcatccactaagcagtaattgtcaagtataaacttgttgtcacaagattttccttattagtttcagagggaacatgagcttgattaatgccaattcttgtgatgagttcgttcgcccacgtgaccagtaataacctgcatatccacaaggtattctcgatgcattatgaaattacgttccaatgaaactaccttttcatcgtatagtttggatccaaacactgagaaaattgtgagcgtatacagttctagattcatcaactgtatagcaattatgcatntatcgccaaatcttcttctataatattatccagatgtaagataatataccatcatatcgtagatatattatactgtaacgtacctat

SEQ ID NO: 15211 - DNA, 450 bp, Oryza sativa
  unsure (1)..(450): unsure at all n locations
agcttctgtagatgagatgattaatntattttatattgttgtgacctatacttactgatttgttgttaattagtattgtactgctaaatgtgccatttaaattgctctgaggaataaaagcagctagcatgaaattgccatccttctaacttctagtttattntgcttgacaacagtggacggctcgtgatgctggagcagacttcattttgccaggctgctgcttacttggtagggtagggatcgtattcttcgtgccgtcttgctgttttgcaagctgactctttaggttttatattgttgccgccaccgttatgaaatcagatgatgaacacaaatgttgaaacaacctctaatttgtcatcagctgtcaacctatatgtggttgcttgctgattctggttcactcaagaaaacatctgttacttaacggntactaaatcatactgt

SEQ ID NO: 15212 - DNA, 363 bp, Oryza sativa
  unsure (1)..(363): unsure at all n locations
tggccgcccctccgntatcgccgtcgaccacctgagcttgctctacgccgtcaacccgagccgccgccgncttcttcttcgtcgccggccgccgtcgtgcatcgttttgtgtcggagtgggtaccaatgagttcgtctcgtcgcccgctacgcgatggtgccctccaatctctccgccgatgtctctagcgccgacgagctcgcgtgcccgagccggtcgccgtcgctgacgtcatgctgacgtcaaccctatggctgacgtcatcanggccagggctgacgtcatctctctctctttttactgttttcccgattttctaatagattaaaactttgaaaaatcatagctaaataaccgtagat

SEQ ID NO: 15213 - DNA, 261 bp, Oryza sativa
  unsure (1)..(261): unsure at all n locations
ttgtgcttcattcaataactctcctctctctctctctctatatatntatcaccaaacaaacgacaatggacaggacaaatcaccgccttcttgttttcttttaattagtgagacaccacccctcccaccccccaagacagataggtgtattagtccaccccatccgtcacactttctgtcaattaatcgcgggcactggttagctgagctgatcatgcatgcattctgctaaacaccatcaatacttcccttatctcttta

SEQ ID NO: 15214 - DNA, 436 bp, Oryza sativa
  unsure (1)..(436): unsure at all n locations
cgatgctatctgtgaaagnggccgatccattaaagaaagtctttttttttntatccttacactgaaaactgaaaagggtaactaactcatgcaaatggtaagcaaaagaaaaaccctttaaacaatgacgtgactgcctttggaagatgggcatccttactggtctgtagagccaaatatccatttttatgatgatgcactggtacttgaatactcattagatgacatgccatctcgaagagaacacaggtcagaatgggtgtctgctttcgttattacaatctcaatgctattccaaattacattatttcagttttgctccattattttgacattcataacatatatcagaaatcagcagaattaattgtgtagaaaatgtcaaattaatatctagaagcctagaacatggttcttacaattgcagcatatcatg

SEQ ID NO: 15215 - DNA, 449 bp, Oryza sativa
  unsure (1)..(449): unsure at all n locations
agcttgagctaaattataaaaggctctattgttctatatngnatactagaataggaagagagtagagtagaaggagtcggaagaattccggagttgtcggtaatcttctcctatttcttttattctgtttattactctgaattcaatataatattcttcttgagtaatttaaatttatcttgtgagaattacctcttggttagttcctaattagcatacaggattattggtcactataatcaactaaaatatagtgattgctttggtgagttataaacactaaagtagatattaattgcttagacgtggtgtttaggtaattattatccagtaattgctgcatatcccacagtacgttgagatgggtgtagaggtggtgacagccctcgagagcacttaagtcctccctgtccggatacgaagtagagcgacatctangaacagcgggg

SEQ ID NO: 15216 - DNA, 246 bp, Oryza sativa
actcagctttgtcctgctcatagataagcgccatactctttcatatcctccaatatttgattgagccgctcggtctgaccatcggtctgcagatggtaagctgtgctgaaaatcacccgaggtcccaattcctcttgcgatttctgccagaactttgaagtgaattggctccctcgatcagatactatcttgttgggtactccatgcagacacatgattctcgagagatagagctctgccaacctt

SEQ ID NO: 15217 - DNA, 410 bp, Oryza sativa
  unsure (1)..(410): unsure at all n locations
agcttttggtggagtaccgcgggaaaaatactccgaatttcacggccgcagtggcggaggtaaggtagggatattttcaaaaataaactcaaaaggaatatatgtttaactatcgcatttcttagctgaaatatcattgctaaccatcacaataaaaaaaattgtgctttttagtcaaagtccagcacgttatatactnttggattnttttttccttgtcccagcattgctcttgcgcgggcggctggcggcaaaacaccgccaccttcctcactctttcttgctgcatcgccaccgtcggaaaccgagcggccaaccaagaaggcggtggcaggcaaaacaagttaatgacgcttcttctcggcacgggaggtggagtggcatgcaccggtgggtagagtactcggcgc

SEQ ID NO: 15218 - DNA, 310 bp, Oryza sativa
  unsure (1)..(310): unsure at all n locations
tatatctattaattaggaataggtggttagtttccttctatctttatgaaagagtgtttaatatcctataaggactttatgttttctttcttgtccgacaaggacttgtatcaacccaagggtataaatatgtacacccggggtctatgtaatttatcgctacgatcaatacaattcggcgcatcgccaccccttttacttctactttntgttttacgttccggcggaacttggcacccgacgcggagctacaacagtttcgatctccggcgaaaggataagtcgaatgttccgtctgtccaggcaattg

SEQ ID NO: 15219 - DNA, 443 bp, Oryza sativa
atccttaagtcacctgcggcatgtcagcttcacaatcaatccctcgcacttctaattattctattctcactgagaaagatgctgcccgtttatttgcacctgctggtctcaataaacttaagtcggtcttttcttattctacggactgggaggtgacagattgtgttaagacgcaactcggtaagtatgttattcctgaaaggtgattctagatgctccaatcttgaatgacatatatggaaccaacattgaatacatatttgccatgctaaaatggtcgtgatgcctccatggatcttatggttgcatatgcatattttaactcgtgccatcctgaagctgctaccgcgtagtgacaactaaaacaaaccatgttcctttgtatgatgggactattactggcaacctatgggaatcccacgtggtatctagcacaaatgttt

SEQ ID NO: 15220 - DNA, 404 bp, Oryza sativa
cttaaaactcagcttcttattgtcttacatccaacaaaccaattttttgttcaaccctttctctatttctcaaaaatgccattgagtaggaaacctgctttaagcagtttttaggaggggggggggtcttcccactacctatttacctagatccttactcctccactcatgttcaattctcctcccctcaaccttgatgtcaccatactttatgactctaaccagctacctactcggtccctctcccccgctgtttcatatttctctcccctgtacttcacctcatctctctctctcacctcaaccatgacctctattgtcttctgctatctcccttacctatccttctccaccgcttggatccgcaattgttaaaacttcctcatccctccctatctctcccc

SEQ ID NO: 15221 - DNA, 434 bp, Oryza sativa
aactgcatgcatgcgagctcggagaccattcagatcctgtactgctctattctcatatatgttatccctttgaacacagcaaactccaatgggacagtaagcaatgatgctattgatttcccatatctgaagcacgttcacctgcatgagcttcccatcttgaaagggatatgtgaagcaaaaataatgtcagctcccatgctggatgccatcatgatcatgggctgctgtaatcttagacacctgcctgacgtccaatgattgcatgaaccaagacccatagtatactgtgagaaggattggtgggataacctattgtggcctcagaaagaatgtggctatgatcagtcattgctctacaagcggcagtcatcgcaatactataagaaggccttgcccataggctctattctcacgtcaaatctattcacata

SEQ ID NO: 15222 - DNA, 378 bp, Oryza sativa
  unsure (1)..(378): unsure at all n locations
cataactctgaaggatgagatagcgcgcctgattatgagaatgcttanttgaagggtctccccgctcctggaggagttcggatccgcaccacgcctcgcaagtcaacgactgcacccgtgcgcattcagcttgcacccaggaacccacctcctcccgcaggttctccagcaactcccgcagttcctgcagctacagctcctgttacagtgtcagatcccgcatacgctctctccttcgctccagcgttagccgccaggggtccagccagtggcaacggaggttggttgcctgctactcccagtggcagtcgcgaccacagcagcagtagctccagtggcttatatccaagcagtggcgagacgtatctgcagacccca

SEQ ID NO: 15223 - DNA, 464 bp, Oryza sativa
  unsure (1)..(464): unsure at all n locations
gcttgtgtgaacaagccggcgggcaacgcttattttcaacgcatagctaagctaagcttaagctgcgtgggcggacagttataatattataaatcggatcttgcgtggacatcgtcatcgctagcttctttctccatcttggccgcccgatggatcaatccgtctgtcgaatatgctttcttgttcaccgggatacggtggcgcgtgcgctcttatgcctctgcgtggtntatacgttcgtcgaccgaccgaactaacgtatgtgcatgccgatcctgtttagactctaaactttttctttaaacattcaactttttcgtcgcatagaacttttctatacatataanttttcaacatttccgtcatatcgttctaatttcttcaaacatttcaatttaatgtggaacataacacagccctaatataagccccttatgtttacaggagataaaatatattaagac

SEQ ID NO: 15224 - DNA, 389 bp, Oryza sativa
actcagcttggcacttggcataactcttcccttcctaaacccgaatcctcgttgtgaaacagtggcggcagtgtccgtgggccggccattcaactgtgacgacccgatctagtgtatgccacccaacccatttgcaacgtgtatgatgaggctatgcattgcacaatatgccatggtagagaggaggacaatggcggctgctgtagctcatcgtatggaggaggtgcggctgctcgacgtgtctaggatgcgacggtgaggaggacaacaggtcaggtcaacgatggcggtggtggctcgatgatcggaggaggcaacaacggcggcttatcgcggtgaggtgatggtggcggctctacatgtggaggaggtggcggcggctcggtggg

SEQ ID NO: 15225 - DNA, 500 bp, Oryza sativa
  unsure (1)..(500): unsure at all n locations
cgtcccggatccttaatcacctgctgcatgcagcttggatacaatagatgttcccgcaacttttccaacaccagacggagatggtgctgatggtcttcctctgattgtgagtatatcagaatgtcatcaatgaaaaccacaacaaacttatccaagtattccatgaacactttgttcatcaagttcatgaagaaggcaggtgcattggtcaaaccgaacgacatcaccgtgaattcatacagcccgtatcgcgtggtgaatgcggtcttcggaatatcttcttcacgaatacgtaattggtgatatccggaacggagatcaatcttggagaatacagtggcacctttaagctgatcgaacaaatcatcgatccggggaagagggtacttgttttttatggtgacttcattgagagctctgtagtcaacgcacatcctcttcgtcttgtctttcttctctacaaaaatcacatgagcaccccatggngaagtactcggacg

SEQ ID NO: 15226 - DNA, 431 bp, Oryza sativa
  unsure (1)..(431): unsure at all n locations
tgctttctcttcttttcctgttgtatcaacagttttaatctggccaaacaacaatggaaatgcatgctaacgggatgaattactatcaatgtatgttccctcacctctatatctctttttccttttcccatttcccccttaatcatgtaacattctaacttctcatttctatcaacaaaatggctataaggtagagctgctctaccttcttatgttaaaaataaaantcatttgagtacctgcaaaggacacacgaaatagtatcaaatttatattaacaagagagtcacatgtcgtcactattttccccttttgaccacttacacttgttcaatgatccgtgaatgtgcatatactatgcgtagctaaataaacccaactaatggagggtcaattcatttagttatcatgcaagaattgtaagttaacta

SEQ ID NO: 15227 - DNA, 239 bp, Oryza sativa
aagagcttttgtctcatgactgattaactattaactagtgtacatgggcaaaaatgatttatggaatatcttaacacaataatttttttttaccgaacataccatctatcaggttgaattcactatcatacacgggaagtatatttctaacttatttaatccgcaatgtgatggctcttttgggccggagcgagacagggaaacatggggaatagtggtatcgcttatccaaccccccc

SEQ ID NO: 15228 - DNA, 399 bp, Oryza sativa
tgcttgcttatgccctctttgtttagacttataagccaacttataagtcataaagtctaaaccaaaacaaacaagcagcttttttatttggcttttttaagccataagccactctaacactattaaggccttctttgtttaagcttataagccaacttctaagtcgaaaagtctaagcctaaacaaacaagcagcttttccgtttggcttttttgaagccataagccactctaacactattaagccaaaagctaggttgaagaagcttttttggcttatgtgaggtagatgtatgactcaactactaaacttaggacattaaatccaccggcttataaatcatttaagccaataagctgacttaatagtctatcccaataagcctaagcctaaacaaag

SEQ ID NO: 15229 - DNA, 490 bp, Oryza sativa
ctcgacccgtgatccttatagtcacctgctgcatgcaagcttgaatgactatgcgttaacactattctaatcctgctaaagtagcccgaattccttcaacgtacagctcgggtctgcatcgacatcgatctgtctgcctctccagtgaccgaaatccgagctattctcttctattgcatattattactgataagaaaaaaaaacacgttatgccatcaaactaatttcataggatgatgatgttataacaaaagatcatagtggctcctaccaagatgttgtcaacatgacagggaagataaaaaattactaccctatcttgctatatcaatatgagaggatgaggccactgcatctaatgaacacggggcggctaaaccctgtatattattatgtgacactatttgctacttcagtagtgctacaccacgcgccagaaaataatgcagaatataactggatgctgaatatgagtcaaatatgaatcaat

SEQ ID NO: 15230 - DNA, 361 bp, Oryza sativa
  unsure (1)..(361): unsure at all n locations
tggcatgaagagcatngctgagaaggagagtgattgtgttgaangaatgcctttctcgcggaaccggcatttcgttggaagggataaggagctaattgaaattgaaggaatgttcttctgttgcacagcggatatccaagatgttgattgcccgatgggttccgctgcgaatgacagatcgagtggtgtgtctgatgggtttgctgatgaggagagtgacacactgatgacatctaatgccaagtatatcattttggagatgcgcaagtgcaatgagccgacattggacgcctggattgatccaattatagagttatcatcgggtaaagggagatatcttcataagcatacatcacagcac

SEQ ID NO: 15231 - DNA, 471 bp, Oryza sativa
  unsure (1)..(471): unsure at all n locations
agactgatcggtaagatattaacttgcacttaccgatcgagagtctcctcccctcgcctctgttcgcgtgcgctgcacacttcacagcagcacggctcctctgacctggtgttgtgcagtgcctgtactcttcgtgaattgataccgtagagtagattagcttcctcctaatccttgacctacgggcgcgtgatggccaatcactgccgccgaattgattaattcggcaaccgacgctaaaacagtatattgatttcggtcatacagaggaccgaaattctctccccagcgaagtcgccacgctnnttttttttttgtcaacataagattacctaacaatttacggtgtaatcaactgaagttgcaaaatcgaaaatcaaaaccggctagcggaaccgatttataattaattcactttcacggaatcaagcgactaatgtacaagcaaattagtataaaggataaatatcg

SEQ ID NO: 15232 - DNA, 355 bp, Oryza sativa
tactcagctttgaatgttgccgagtgcagagggaatagcatctgattatgtgttatgggcaaaatcaagaatcttgacacgacgcaacctcccaagattagcggggatggggccagtgatgtttgcggcggcgaggtctatgacacggatgaaagagaggttaccgaggtgaggggtgagctctccttggaggggaacgctccggaggcgcaatccgacgaccacccgcggtcgccgccggctgcacgacacgccgacccagcggcacaaggacgcgttcctcgtccagcttgtggcaaggacgccgagcggatcggagagctgcgccttgaaagccagcagcgccgacaggtcg

SEQ ID NO: 15233 - DNA, 435 bp, Oryza sativa
ctcgtcccggatcttaagtcacctgatgctgcagcttcccttgatataatagcttatgtggtcccattcacattattggatcattgcagaatctgaccaaacttgacatggcatacaacatgctagaagcaaatgactggagctttgtctcatcactctcaaattgctccagattgactgaactgatgctggatgggaataatcttcaagggaacctaccaagttcgattggtaacctttcgagtagtcttgagtacttgtggctaagaaataaccaaatttcctggcttataccaccagggatcggcaaccttaagagtttgaatatgttgtacatggattacaattatttaactggtaatataccaccaacaattggatatttacacaacctcgtattcctgtcctttgcacaaaacagactgtctgggcaaa

SEQ ID NO: 15234 - DNA, 416 bp, Oryza sativa
  unsure (1)..(416): unsure at all n locations
tcttcttgaacacccacttgcaccccacaggtttacactcatanggtcgctctgtcacctcccaagtcccgttagcgataatggaatccatttcactacggacagcctccttccagtagtctgcatcaggagatgcatatgcttctgaaattgacttaagagtgtcatccacgatgtacacagtgaaatcatcaccaaaagacttatccgtcctttatctcttactccttcgaggagcttcactgacatcctcctcagagacaagttcatgtgtatgttcagtttgttctggtggtgtgattgaactgggaattatttcagagggttggttcgaaccactatgtatatccttcattgtgaaaaagctctcaaagaaggtagcatcatgacactccataattgtaccaacatgcatg

SEQ ID NO: 15235 - DNA, 464 bp, Oryza sativa
  unsure (1)..(464): unsure at all n locations
atcctcttagtcacctgctgcatgcaagcttctagctagtatttgtgcttcttcttgtgaatcgtattctgagaacaataagtcatttgcaatttgcttcctcatgtttgggatatattctggtctgatcatatctttcaagtgcatccttgggttccaccattccatacacttcatagcgtaaattccgcaatcatgccttgatgagacaaanacaaaaataaatcatttaagataaacaaaatcatgggaaaaaaagggaggaagtttggacaaaaaagacaatgatatgtaatttggggatgtttgttggggttgataggtagctacccattgttttggcgagtaatttgtgggtattggatatcaaatttactaaaggctgtctccacatctgagaattcttcccacattgcaatgaatcctggtatctgtgtataaacaagatgagcatgaataaaaaa

SEQ ID NO: 15236 - DNA, 424 bp, Oryza sativa
tcttatgataatttgcctcgtttgttagccaccattgtctataggaataataatacgtactatgacctacatacatttacatcggttgatgatcgaacaaagagtgtgctgcaaagagcctttttctcattgggtgcttgcatcaatgcttttgtgcattgtcgacctgttctatgcatagatggaacttttatgacaggtaaataccgatgtcagatattgacagcaattgggtgtgatgggaacaaccaagttctacctatggcttttgcatttgtagagagtgagaacactgacagctggtactggttcctatagagagtgcacattgcagtggtgcgtatgatgcccaaccgttgccttatacatgatcgtcatgcgggtatgttgcgggctattgactactcgcagaatggttgggatg

SEQ ID NO: 15237 - DNA, 364 bp, Oryza sativa
  unsure (1)..(364): unsure at all n locations
tgttgactgagaactatcaaaatgatgaaatntactctattctgaagtcagaatatctttcagatgtagagaatctataagactgaaaaaaggacataaatatgggctagtgttgttgttgttgttagtcaggcagcataaaaagggtgtgaattatagatacttatgtaccactgacgtagactgatcaacattttgggttacaaggaaattaatgattaaagtgcccttagcatagataattatgcaccactacgatagaccgatcaatcttttggttaggaaattaatgacctatagagctataggaatggcataatactcagagaaacaatacttgtaatggtaggtacaattgagttca

SEQ ID NO: 15238 - DNA, 400 bp, Oryza sativa
tagactggcgttgctcatggtccttgataatgattgaacccctgataacggaagtatgcttgaaggtcatcatgctattgctgcatcatgttgttgaatttggcgaactgagcatcagcagattgttgccattcttgcgtttgagctatgtgttccgtgaggttgtactggatctctctcgtctgcatatcaagggtgtccattctcctagtgatttcacccaagtcccaacgagaggaacttgagcgacattcacttggagatggaggcacaccacttgatctgggaggttgattgtccccccattggatgtcatgatgcgcatgccacatgtccacactggcacttacccaggttgagactctgatactgtgacgtggagcttgggtccatctgggtg

SEQ ID NO: 15239 - DNA, 370 bp, Oryza sativa
  unsure (1)..(370): unsure at all n locations
tgcattaaacacctaaattcccgtgacttgctgagtattgaagtactcacccttgctctatataaatatatatagttcctccgacctgaagctgaagataaagtgaagtgaagattanggtttcatcctggttcctatccgtcgcatgtggtgttgggtgttaatcacgtggtttcactgctgctgctgttgttggtgtttcctcgtccgcgtcatcgattgcattctcgggctattctgagctgcaacctaagttaaggtaaataagtcctctatttaaattaaggattgcaatgcttcattattgtcaccgtgggtaccaactctatgtcctangactggtaccgttatcgcggtctcgtatgaagcg

SEQ ID NO: 15240 - DNA, 427 bp, Oryza sativa
  unsure (1)..(427): unsure at all n locations
tgtgtgcatacaaagaatataaaacaaacatgtttggttcacaatgtanatgagaagttttaagtgtgtgctgtgctgatactatgaatattatatctatgaagttactgatttttgttgctatatatgttgaagagtattatgaatacctagcaacatgatatatatgccatgtttatggttcatcaattagagaatcttatcataccatggtgacccactataataaacatggtgtatgttgcaggtgtaaatcaacgtctgagaggaattgtgttcatgataatagcttcagagataagcattcattaaaattccaaccaaaacctgggcagtgattattgtttcaatgaacagtaagtaaatggataattctgtgtgctaaggtgctgtcgtgacattatatgtanactattcatatcagaat

SEQ ID NO: 15241 - DNA, 434 bp, Oryza sativa
  unsure (1)..(434): unsure at all n locations
aatttgtactgttgaacaacaggttccaaaagattaaataacatgctaaatttatttccttgcatcaagattaaataaaacaatattgtaaaacttttgctggtaaaatgagccattagtacagtaatagatgtacagtactaataacactggaatagaatttgaatgagaaccattaanagagattatgaagtgcatgtgccattagtttggtttaattaaaagagaaggggaggagaacagttctacttttccaataatttttagagggcttctatgggtaaccatttggcataacctatggtcaagggggctctgacaccaacttgtcacgccctgaatttctatccaaaattccaaacgcttacatgtgtgtgaatccctcgtccaggaatcatgcgatgcacacaataacaaattgataatatagtaca

SEQ ID NO: 15242 - DNA, 411 bp, Oryza sativa
tatatgcattctcattaatctttgctaacactttaaatggtccatcagctctatgcatcaatttagattttctcaaatcaggaaatcgttgttttcacaaacgcaaccaaaccaaatctccaggttcaaaattcaagccccttctacctttgtcacccgcaaacttatacttaacattcatgcgctcgatattttctttagttgtctcatacagttttaacattagctcagcacgttgcttagcatcaaaattcagtgtttcagaagttggcaaaggcatcaaatcaatcggagcacgaggcaacaaaccatacacaacctgaaatgggcacatctttgtagtagaatgcaaggaacgattataagcaaattcaatatgaggcatgcattcttcccacatcttaatatttt

SEQ ID NO: 15243 - DNA, 420 bp, Oryza sativa
  unsure (1)..(420): unsure at all n locations
ctgcagcttgaccctgggaacatgngctatcgttctatggccttgctgaaccagagatggtggatacagacttgcttctgtttatccaatgtaaaactgatgatgatgagttctctaactgcatagtatatcgcaataaggccggtgcttacataatgcactgtgtgcataacattgttttgttgctcaatcggaatattntgaaatattgcttgggtccggtcgtccggagactccggatatgttcacctgtttgaagtttcacacgtttggttggttcgtctcaactctccttcagactactgtaagttctcgacaaatgttcactgatataaaaaccatatacacaacccccctatgccaagcggttcatgccttcatggtttctgtgaatcatatgacgcagatatcctcatccca

SEQ ID NO: 15244 - DNA, 412 bp, Oryza sativa
  unsure (1)..(412): unsure at all n locations
ctgacttggtgcgatgaggctggtttatcgatgcctgccctgtctaatccaaagaaggagcttctttggtatatacccatggacaattcanggcatattgtccttgctctctacaatcctgacaaaaggggacatcctcttctggcattggaagctcattgacctgngtggcaaatgctcgatcaaacacatactgattttggtcttgacttccaaccaatggtagctgtgaaccaagcagcatgcttggaatggaccaagggtgtacccttgttaactctcttgaggctagtggtggatggagttgaaaacttgagttactggaggcatgcctgctgacattctttcctttttctctgttaaacatctgttacaaggattgangtgagagatgaaacatgccaggaaagaa

SEQ ID NO: 15245 - DNA, 497 bp, Oryza sativa
  unsure (1)..(497): unsure at all n locations
ctctaatcacctgctgcatgcaagcttggactgcactcacttctccagcgacactgttttatattgaccaccaatggattcttgcccttatatattgtttttgctgtggatatagcttgaagctctccaataagcgaatacaatactattttaaattcattgtatcctgcatctggattgtgattcatagttgttttttaccattgatgtaactcactgcctcacttttcccttggatactcttgtattcattatatcctgcatctagaaactagaatgcgacgcatggttttatattcttgatctaaatctgttttcttcctcacaggtacatccagatcacttgtgccacaactggtgagggtctgtacgatggcctggattggctgtccagcaacattgctagcaaggtacctcattatcattntagttctgtcatttctggagattattccgataatatgctagtaaaattgtttcctgttcaaagttctaat

SEQ ID NO: 15246 - DNA, 476 bp, Oryza sativa
gacaagtagcttaatatatatgcagatatggatcgcaaggcctctaccgtaatctatttgctctatacaaccttcttaatgtggccactctcttacatgtgtccattctctgaaatctatggtatattggtacaataatggctagtgctagcttatgaaaaagaggttttatcagaactaaaaaccagttaacattgataatacttgcagaaaatatctccaagtttttttttctaatttccaaatagtctagctttgtctagcatgaggctttggaactctctcctaaggtgtgttacactacaaaggttggtacagctgcattttaaagagaggtcgcattcagtaaagatcagaatatcgaagagcatgacacggcgggagcatgtacagtattgttggaaatatggtgtatattttaatccaaaatgttaagacaataattatggcatgaacaatgtggggtgatctaatga

SEQ ID NO: 15247 - DNA, 396 bp, Oryza sativa
agacgaagtcgccaatgtcgtttcaccacttgtccaagctatgttccttaatgacagtggtccgagtgcacttgacgcaaccgaaatctttgacaagctgagagtagcaccggatgtatacttcaagaatatcaagaaagctggaagtatgggagctagtatggcattggcgatgaccaaatccttgtacccgatgattgaaattgacgccattgatggctttgcagacgggacaagcgaagaagctgctcttgatcttatcagtaatgctcaaaatgcagctgacaagattgcaagtgatgttgtagagcaattccgcaacaacgaccttcagccgagcaataataactctgatgatgaaaagactgattctgactgagtgtaaatgtagcaaat

SEQ ID NO: 15248 - DNA, 401 bp, Oryza sativa
  unsure (1)..(401): unsure at all n locations
tactaagctagcaaggtgagttctggntgtccaaagtcaaattcttatgttacgtgatatctgctaaaggagttgctgtggaccccgaaacagtgaccgccgtcactgattggaagcatcccaagacagtcacccaaattcgcagcgttttgggtttggcaggatactaccggaggttcatcgaaaacttctccaaaatcgctcgacccatggcacagttgttgaagaaagaagagaaatttgtgtggagcccgcaatgcgagaaggcgtttcaaactctcaaggaaaagctggtttcctcgccggttntaatcttaccggatactcgcaaggacttcatggtgtactgtgacgcttcgcgccaaggattggggtgcgtgctcatgcatgaaggtcatgtg

SEQ ID NO: 15249 - DNA, 470 bp, Oryza sativa
  unsure (1)..(470): unsure at all n locations
agcttatctagtggaggannaacacaaattcctctctctttatttcatccacaatgtgagatcaactaggaataagatccctcgatacgatgatggttcctctacatttgagagttcttgtaaccttcaaattttccagtaccctggtcggtgttttaatcgtcgcacatgtcgtgatctaacagtggaggagtacaaggcctgcttcttgtatattcttactaatatttctgagatggacactttgtttgagtaagtattcatattaaaaaattgttgtaacttaataaattcctattattttccctaatccatccctacatatagacaatctgataaggaacaatggaagagcagaattgcacctagtgataagcaacgtcatgacttaagattaaatgggtggaaatattaccgtggaactaaacatgggccatatttctttgactggttcaagatacaagtaattc

SEQ ID NO: 15250 - DNA, 368 bp, Oryza sativa
  unsure (1)..(368): unsure at all n locations
ttatcaatgatatgcagattcctgtgtcttgtctgngccctgatgttgattgttgagaccataagggagggggccaaaaaagaaacggttaattggatctatgtcattgcaaatttggtcaattatgaaaaatgtcttttatatctgtgatacctgttacatgtcattcgaattttggaaactgaaactatgtcattgccagtgaatattttgtcaacctacgtctaaggtcatgctttcttactccctggacttatgtgtgtcactataattttgtaaaactgaagccatgtcattgtagctgaatattttgtcaacctccatctatgaacatactttcttcctccctggtcttcttcttcctttgc

SEQ ID NO: 15251 - DNA, 488 bp, Oryza sativa
gatccttaagtcacctgctgcatgcaagcttccccggcgccgtcgtatcgatcctgttctcccaccacggcgccatcgcatcgaccccggtgcggctgccgccgcaacgatgctgccgcatccatcccgccgtcccgcggtcgccgtctcatcgagacagccgcggtcccgtctcatcgaggccgctgtgcaatttaaagaagagatgttgaattgattcattagttacaaaagctacaaagcaaactacgcttctatctatctttcttttagtaagattatctttgtgtatttagatggagtaacaggctcagatagaattggccgccgagggaccgggcgactcgcgcgcatgatggagagtgcgtgcactcgcatcctccccatccttttctctccctcttttcctctcaacctctaaattctcccggttgaatgggtatcatgtactactatttgacatgtctcaatcatacaagacttgacac

SEQ ID NO: 15252 - DNA, 476 bp, Oryza sativa
  unsure (1)..(476): unsure at all n locations
agcttattgttgaagtattggaggaaaaagtaaaaagacatattngcaaatgaaaaataatttatgaataaaacttttatatacaatgttcttaacgatctgaaagcaaaggctaaaaataaggataaaaatttcaaaattaacttcagatttaagcttaaaaatttaaattgtgatcaataataagtataaatataggtgaaaaaatgaggatactatgggcctgtttgggggagcttaagattttaagaagcaactggttggtagtcagcttcttataatctggaaaagccgggtttcccagtttctggcttctagttcattttctaaattctacaactacagcttctcagaatctggactaaaagctagactgtttgtgggagcttctgattatatgagaaactgcaacagctataaactcctccaaacagaccatatatgtggctagagatgttgtaacctttctctcatat

SEQ ID NO: 15253 - DNA, 462 bp, Oryza sativa
  unsure (1)..(462): unsure at all n locations
taatgccttggtggatgaggtcaactctctgaagaaagaacttgaacacacccagggtctgcttgatgagtctcangtaagtcaagtgggaggtagaatattcagcaatagttttttttttcatgctcaattgaaattgctgcttactttcttttacaaattttaatatagatgaactgtgtgcaactggagaactgcttacacgaggcaagagaagaggcccgcacaaacaaatgttcagctgacagaagggctgttgagtatgatgccctgcgttcatctgctctgaggatacatggtctgtttgagagactaaataactgtgtcactgcaccaggcatgtctggttttgcggactcactgcgtgctttagctctctcattagcaaggtatcttactgctctcattcgcttanactcatgtgtagtcagttctgcatttcatttacaaaccacccacccc

SEQ ID NO: 15254 - DNA, 460 bp, Oryza sativa
  unsure (1)..(460): unsure at all n locations
ggatcttaagtcacctgcggctgaagcttttgaggataggagcattctgaaactttgacacggccggtcaggatttccctttggtcccagaagcatatctctaataacatcatctcgaggtgatcaaacacagcagggatcttcgtcattatgcacccttttgatagatactgcaaccagaaaaatgaatgatgagaaataccaacacagcataatcatgacaacatcatcataatgctgaaaataacaatgaatcaccgtcaagaaatagccgttgatgacaagtttttcgatgtcacttatgcttaccaatgcctgcttgatgtaacttttcccaccatgcacaactggaacagattggattcttgagcttttgcagagtgcatttgcagtctcaattangggatccaaatggaagctgtacttccatcacctctaaatttaagtcacgactcgaatg

SEQ ID NO: 15255 - DNA, 443 bp, Oryza sativa
  unsure (1)..(443): unsure at all n locations
ntatccacaacacagctgggtaaaagaaactgtgctatgtttgatatttctgatgaccgtggtttcactcacaaccgtagtagctgacagattgataggtcttgaggtcagatgcaattcaagaagttccacgtcaggcctattatcatgcttgctcaattacaataccatacttttatatttcaattagtaaggtgctaattctttgtttcgattctactgcaggatacatatgatcctatgttaagggaaatactttctgacagtccaacctctaggctattgtgtgttttcctatactgtgtgattgctccattgtcagaagaaaccatttaccgtggattcctcctaacagccctgtcatcctcaatgaaatggaaggatgccgtaattgtcagttcactcatgttcagcatagcacacttctccataaataattcatt

SEQ ID NO: 15256 - DNA, 473 bp, Oryza sativa
  unsure (1)..(473): unsure at all n locations
agctgtttcttgataacccatttgcatcctacatgcttgttcccatatggacgctcgacaacttcccaagtaccattagacataattgagtccatctcaccgcgtaccgcttctttcctttccaatagtcacatcaggagatgaatatgcctcttcaatggttcttggagtatcatccacaagatatacaatatagtcatctccaaaagactttgcagtcctttgtctcttactctttcgagttgccacaatgttatcctcctcaggattttcctcaagcgtttgatcaatgtgttctatcggcataaagtgctcaggggataaaataggttcttgactagaagtgctatgtgcattnttcacaggaaattcattctcaaaaaatgtggcatctctgaactcagtaattgtaccaacacgcatgtcgggtactccagaatttactattaagaacctatgtcccacactgtggg

SEQ ID NO: 15257 - DNA, 458 bp, Oryza sativa
  unsure (1)..(458): unsure at all n locations
tacacaaggaaaatataagcctagacacccagttttcttatcatggaaagcaacagctcagcactaagagttgggattaaaaattcaattcgcttttgaaattctataaaaaccttaaattactgaaggtatttcagttcatgaaaaatggtactccataagtgtatcttatggaatgattttacagatcagcanacaagagtattgtgtaagtattagtaacttagtatatgacataaagagagttgtattacccaaacaccacatgcatatgtacaagttttttagctttccacattaataactagatatcaaacgcaaggtccctctgggaagatatgatgctgtcatgaaaaaaaacaccgtaccattatgaatgaaaacatttgcatgctatccatgctgagcaaaacatgaatgaaaatangttggattacatatcttacattactggacat

SEQ ID NO: 15258 - DNA, 387 bp, Oryza sativa
  unsure (1)..(387): unsure at all n locations
agtctgccgagccaaacaagcacctgtgcgatttcatcatatctcctgttgtccaagagttacttaggaggctatacctcagcacaacatgggcctccaccttcttcccgaaaacaaggatattggttcccacagcaagggactccttatcatcaagcgtgaagcactctatgggaggcatggaagggatgttgaaccaacgctggcggcacggatcatagccatcccactcaagcacattgcaggagcagtagatcatgtgctcaacaatgcgagcctcccgccgcaatctatacagctgcccggacctcataatggagcataatgaccggttgaggcatgctatcataccataataagaccggtgggtatggagcangcatgtaa

SEQ ID NO: 15259 - DNA, 447 bp, Oryza sativa
  unsure (1)..(447): unsure at all n locations
tgatgaatttagttcccanatagactggtgcaagggtcttcatatgcttatccatgatcctagaaaagatttagataggtgtccatgaattatcatcaaggtcaattaattatcatcaggtcaattataaaacaacttatttttaaaagaacaaattatgtcctacttgcaacggtaaaattcacggtggtagaaatggcagatgaccttttcgctgccagtgacctctcctatgaagtccccttcagttatctccctatattcaccatgaccttgcctttntagcacttcacgcttctcgacctctttctgttatgcacaggaaaatgaataacttanaatgaagattatccacacaggttcacaaccttcaagggcaatgtgcagatcagtaccttcagagcagcaattctctacgcatgcaacttctcaagctctggatcctat

SEQ ID NO: 15260 - DNA, 421 bp, Oryza sativa
ttgtctggcaatgggccgtctctgtttttattgctgggggccgagctaaagcctgtccagccgctgtgcagatcactcagttcgtctgatgtggatcgaatgaagcaagtcacttcaacgtccctctaacgtacgtacttcctcggtcctccgtctttaaaaaaaacataattctagatttgtatctggagtgtgtcggccagattcaaatctagaaatagatttttttagggagaactacgtaaaggatctagttccagatcgatgacacttaatacatatatgtgaaccacgttacactcgggagatgccatggatataatataccatgatacatatagcacgttgaagcgctctgcgtaatttatcggcatattggagcgcacattaatgccagtttgactgtgattaatcatatcgc

SEQ ID NO: 15261 - DNA, 436 bp, Oryza sativa
  unsure (1)..(436): unsure at all n locations
tcttttctttctaacgacagtcatatttgctaatngctatgcatgatacattgtacattgaggaacaaatgcaaagtgtggaattctagccctttntatcatgaaactntatcctactgcattataagtattagatatagatgaatagtcatttacaaagttntaaaatacttaacatcttttttttcatgtataagttatagaaattgttcgatctctttttttttttaaaaaaaaagtgatattgcagataattacctgtccagtcttttgttactgcattgcacagtatgttttcagttaagtattntcgtaattntgcatcttcaatattcaacatacactgtgattggaaacttttcatctatggccatttatataggatgcggtaaactgagttttgaaaatgcattgtacccctatgtacatgcctctc

SEQ ID NO: 15262 - DNA, 417 bp, Oryza sativa
tgcatcttggtgactcatgtgtgatacctacatgataatagcaaataactgaaaatctaaatgatattctataacaaacaattattaaattatatatgctaaccaattcactgaaaaagcaatattaacgtgatgatgtagagctgggaattacttatacttcaccactactgccttttctattgagtcctctgtaataaatatgatatatactatcgatttaataccctaatacatatggttgggggataaatctattaaccttctaactgtatactaggacccatttgtgtttgcataaagtgagtacgaaaattgtagccacactatgaatggagtcagaactgacaactcaaccatccaagatccaacatatatataatgactcccttcagacataaatatgatctaagataa

SEQ ID NO: 15263 - DNA, 450 bp, Oryza sativa
  unsure (1)..(450): unsure at all n locations
tcaaagtgggctctgctgcgacagcattcatcatatgatttgtntggggcgcaaacatgtggtacctatccatatacagtatcacgaaccgttgaacttgtggataacgaatgttcaattgatttcatagacataaatatggggtgcccaattgatattgttgtcaacaaaggtgctggatcatcattgctaacaaaacctatgaggatcaaaagtattgtacaagcagcatccactgttactgaaaaacctttaactgttaatgtaatggtgcagtagctcaattatactctgttatgagctaattagcacttgacgacaaaagttctggtgatttcatccagatgtcgatctgccaatgcattgtcacatttatggtcaacaaggttgaactagaatcagagctttgaaaaccaaatatctacatgttatcgtacttttggaagaaac

SEQ ID NO: 15264 - DNA, 447 bp, Oryza sativa
  unsure (1)..(447): unsure at all n locations
gtcacctgctgcatgcaagcttgaagatgaatagtgccagtgaggcattctatactntcggctgggcttctacttccaaggactgattaaaggagggaaataaagcagacttcgggaaagagaggataagggctgcaggctgagaggagactgggccgagagtgagaggacttttcctaattcggcccgaataggaaaaggtgaactttaattactgttccaattaaattaatcactgaaatgatctttgaattgttaaaaatacttccaatgctcaaataatttcaagaaaaatcttgaaaatacttggacactcaaagtacttaacaaaattataatcagaccatttaatgattaatttaatatttaaacaattgctgaactgctctgtgtatgattaaaattaacaattgagctccgaaaaatccgagataattccagagagta

SEQ ID NO: 15265 - DNA, 339 bp, Oryza sativa
  unsure (1)..(339): unsure at all n locations
tgatgcaataaactctaatctctatatctcatatggntaattggntaatagagaatttctttgaatcataaagtcatgggttaaagtcttgattttgtcattctaattttaaattttctttccaaggtgagatgaaaaaaaaattagagggggagaggccaacgggcgatataaaaataaccattgcgccgagagagggagatggagaaaaaaccattgcgccgggagagggagaaagatcgagatgagggagagggagataaaaccaggagagggagagagatcgagatgatggagagggagaaaataccactgcgccaggagtgggagagagatcga

SEQ ID NO: 15266 - DNA, 374 bp, Oryza sativa
atcctcttagtcacctgctgctgcaagctttccctgaaagaacagcttatgtaggccgcttccatgatgtgtatctatgcataatgagtacaaacttgacatggctttctacatgcgaaaatcagatgactggaccattgtgacatcactctcaaattgcttcataatgactgaaccgatgctggacgggaatgaccttcatcggaacctacctagttatattggcaacctttcgatatgtcatgaatacttgtggataagacataaccaaacatcctggcccataccaccatggactcgggaccttacgatctgaatatgctgacacccatcacaatgatgtatctggttatataccacccacaagtggatat

SEQ ID NO: 15267 - DNA, 427 bp, Oryza sativa
tcgtcttgaacacacacttgcaccgaacaaggttacactcatatggtctctctgccacctccgcagtcccgctaacgataatggcacccatttgactaccgacaggcttcttgcgagtatctgcatcacgagatgcatatgcgtgtgaaatcgactcatgagtgtcatacacgatgtacacactgtaatcatcaccaaaagactgtagccgctctttatcgaattactcgcttcgacagagcttctactgacagttctactcagagacaatgttcatgtgtatgcatcagattgtgtgcggcggtgagatggaactgggaatgatttcatacggtcggctccaaccgccatgcatatccgtcactgggaataagccctctaagaacgtatcgtcacgacactgcataatcgttccaacatgcgtgtg

SEQ ID NO: 15268 - DNA, 412 bp, Oryza sativa
  unsure (1)..(412): unsure at all n locations
atcctcttagtcacctgctgcatgcatgcttgatggtcggcacatcatatcggaagttggtgaagatggacgtcctattgccccggccgatgccgccaagaactatgttcgtcacatcggttgggttgtgctggataacgtgcctgtcagtgcggtgtactggcgaagaacaagggcacgcggagatcatgagagctntgtcccagattcggagaaagagatgctgtggaccacaatgctcgatacattcacccttcctgcgggtacagaggacaaagtgaaaaggtggactctgaagaaaatggcagaacagtttcagagcttcaagggagatctgtaccaaaagtatatactgaatgggcagacaccgaacttcgacacattcccaaagctaatggatcactgggacgag

SEQ ID NO: 15269 - DNA, 479 bp, Oryza sativa
  unsure (1)..(479): unsure at all n locations
tagccgtgtcttacgcccttcatttcaaagaagaataattttcgaaacctaaatttctgtgtgcagcacaaacgcacttatttaatactcagtgcggatacagaattaatgtacatgaacacgaagtataagcgacgacgtatgacgacgaacaagaagaagcaaattaagccatctaccacatgcatacatgtaattatggggagaaagtaattaagcatataaaccgttcgttcttgcgttcattcgatcgggatcgatctagtattggtcggcggcgtgcttcttggcgtacttcttctcgtggtgctcgtggaatgcgaaccccgcggcgcccatcgcggtcaccgacgtcaccttcttcttcaccttgtgcccgtgcgcgttctccgtgtacttcttcgcctggtgcttctcgtgctgcaacgacgtaccacatataaattctnncgtaattatctcttaattaatcagctatg

SEQ ID NO: 15270 - DNA, 458 bp, Oryza sativa
  unsure (1)..(458): unsure at all n locations
agcttgttntcgcaattccgttaagtntgttttggctattccatctgtaatcaaaccgaatgagagcattggcacaggccatcacctcagttcctactgcaaacttgtcaaattcgaagacacccataggtccattccaaatgactgtctgtgttgtttccagggtagagctgaatgacgcgactgaatctggaccaatatccatacccatccaaccatcatgaatagcagatgctggaacaacctgtagaacaattcatagtcaaggtcatgtccagtatatcacttcaccaaactttgagctgctctatatcaagttatcgactagacaatatctatgataatcatcatcagtgattacaaaagaataaaacataacagacctggctggtagcatcatgagcatacttatcagcaatgataacgtcagatggccacagaatggagacacccttttc

SEQ ID NO: 15271 - DNA, 479 bp, Oryza sativa
  unsure (1)..(479): unsure at all n locations
tagcttgattagcagcatattcaagtcattcattatccatcatcacatcggtttcagagagaagtgtacaacaagattattttctgtgaagaaaatagttaccattcgtggaagcctagaaggcaatgttcataataggattataccaaaaggctaaaaaggaatattaagtgagaacttgttgactcatatttgacagactaaaaagaaaatgcatactttcagagcagacacctatgcatgaccaactattttatatataaaaaagaacatgccaatagaaggtctaaaaaaaaccactgcattggctcctcgaaaaacactaaagtaactatgtctgcataattatcgggagtgaatctgacaatgtgtgtatcaggatctatcatgcatctctaatagcaatatgattntcatgtgcactgttcatagtgtaattgaggggcccatttgaattaacaactacaattaacagcagt

SEQ ID NO: 15272 - DNA, 464 bp, Oryza sativa
atcctcttagtcacctgatgcatgcaagcttatacaacagtgtaagcttcaattctccctctgatattccagccataattagagaagaattctaagaccctcatctctaacaccttgcaataatttttcaacatgttgccatcctcttccttaagcaacaaagaccaaagtcttgcccagtgtgtccctctgaaaattacctgcataaaagagtaagtacatggtccattaaaaaccacatcattcctatttaaccacaccgtccagcacaacgccgctatgcccacataaacttgattttttatcctaatgttaacaccacttatccaactaccaagtaaatgagacatattgtgcggtgggcagatgccaaaagtgaaatgtactgcgctccacacatatcttaccatggggcaatcaaagaagaagtattgtattgtctcatgagacctacaaaagcaaca

SEQ ID NO: 15273 - DNA, 318 bp, Oryza sativa
caaatcctgaatcgtcgattccacttgaaggcgccattcttcgactactgcatacagattcgtcacagatgctgcgtctccacttgcttgtcgttcaacgacttcaacgaatcctgtatgtcgccgtaaattttgccgaagacgacgttctgcttctccatgggctcaacctgcgattgcaaatgggacgtgtaccttggcttctccaggatcgatgctctgataccaaatgtcacgaactcagatttgagtcacaacgaaacttctcctgtgactcgaattggaacggaaaagaagctggctggaggaagaagaaga

SEQ ID NO: 15274 - DNA, 374 bp, Oryza sativa
agcttctcatgagaaatggtgagtctctcatttatggtcttaactcctcatacaagacctccaaagaagcatgatacttctttatagccctgaacttgacaatcatcttctcactataagcatggagctcctcaaacatactcacaagctcatcatatgaaacatgatcacaatcatcatcactctcactatcactaacagatgttaccttataggaaccctttgccatgagaccaagtggagcgataagtgatggagcctccttgatggcaacaacggtcatcttcttcttcttggagcttgcatcatcaccaccttcttcctcagacccggatgaggcggagctctcctcatttgagtcccattccccgatg

SEQ ID NO: 15275 - DNA, 410 bp, Oryza sativa
  unsure (1)..(410): unsure at all n locations
tcgcacatggtgacctgtaacccgtggtccgaattctgtctttttaacacaaagtcagagagacgcgagtccctaacatgtggacctacacttatatgctcacaagtcagcgacacacgttcctctaacttacgttaaaggagcctcgtaccccttgcctacttcaattgagagaaccaactagtaacttctatgttatttattcaaatgtaaaggtaaattaatctgggtgaactattatagaccacagatttatgggttcagctacatatttctatgagggtgtttagtaacttggcctagagttntattttctaactacatatccgatattcttatcatatattgatctccctaagctatactcatgcactcgcatagcctatactcgatccaatgcatagtaaagc

SEQ ID NO: 15276 - DNA, 398 bp, Oryza sativa
  unsure (1)..(398): unsure at all n locations
ctcgacccggatccttaatcacctgctgcatgcaagcttatgtggccctattggaaaatactgcttctcgtgcagttnttgtatggttatgtatcaccaaacgtgttaaggtgttgatccacgcacgtttacgtatagattaactcaatttcgtttaactatcattggaattaaaaaaaaagaacctgtgcgtctttaaattaagaaacacgataagcagacatgataaggaacagctgctcctcatcacatagaagttagagaacaacacgagaccaactttacataaacaactacagtatcaagggccagatcacattaacaaaaaaaaaaaaaaaaccttatcgatacactgcacctgcaagagacaccactgctgctntactaattcttcctgt

SEQ ID NO: 15277 - DNA, 392 bp, Oryza sativa
  unsure (1)..(392): unsure at all n locations
tcanatgtgtatgtccggtatctctattctcgcccctgttcgtttctgtgaagtaaatctggaggttaaattcccgtcaaaaaaatctggaggttaaaacacgacaagaggatatgacaaatgttaataatgcatcaaataatccaaatggcatgtagcctaaccccaagaatgtttttagaacacgatgctttacatatgtctagaacacgaatcattaaaataacgtctatccatgtcaaccatgaaacaaaacgaggcaacaatcacatgatatgatccttatagccacacgccaccactaatttgcaagatcgtgatggaaaccggtgtaaatatgcagggagtggagagttcctaacggtttgacgaagtgaatcgaactatacatg

SEQ ID NO: 15278 - DNA, 389 bp, Oryza sativa
tctcgtacccgtgatcctcttagtcacctgcggctgcagcttggaagattcccagccaaatgggatcagaccgaggatgtgattgttactaacatcgaggagttccagactgtggcacttggataatgctctgggcaacctcccttcaatctgggtgctgctcaaatacataatcacaagctcacatccttctttaatgcacttatgcaacatcccagtgaattgactccccctcagattcagtacccttaagcttgtgccttctaccagacaagatggaacgataccactgaagttgttatcagataagtacaggaattggagattgttcatactacaaacggaaacgggtacataaccttttaggttggttttggacaatacaatat

SEQ ID NO: 15279 - DNA, 404 bp, Oryza sativa
tatctccggccgtgaggccaaagataaccaaatctctttcgtcatcagacaagactccaaatccttggctgttacgagtaatctggatgaagtctatatattgctggtcatgcctgtgcatcgactatgcaataccgcgcctcatgcgtttaactacatcgcatgtatatatccattgtcgattctttagccgccggaattaagacgcttcttgatcatcctgtactttttcatcacgcaaccatctctagatggccagtgaagacagatcatgcactggtgcacgcgaacgtggcgccagcgaccggtgcggacgatagcgtgtcccgcgatacggtctgataacggtggacaagcgagtaacatgggacatgcgctcggcatgatatagacacactgtcgaa

SEQ ID NO: 15280 - DNA, 397 bp, Oryza sativa
agcttgtgacccattccccattatgactgtttttccccgtgcgacctgataagaagaaaacaatgagatgtcagcacaaacatgtacattggccccagtatcaacccacaaattagtagattgattaactgaaaaaacagtaggtaaattaccatacccgcttccatctccagtgttgccaatggtcacattatcagacttataagtctgccctgcaggtgccttcatccccttgcgttgtggacacttcctagccagatgaccaacttggccacacacaaagcaagtcctctcatcctgattaggattgttgttgttcttcttctgcttcttgaagttggtggtctgctgagctttgtatttacccttgctcttgttctgggccttgtgcacaaca

SEQ ID NO: 15281 - DNA, 374 bp, Oryza sativa
  unsure (1)..(374): unsure at all n locations
ngatggtcggcacatcataacggaagtggaagaagatggacgtcctantgccccggccgataccgccaagaactatgtacgtcacatcggttgggttgtgcgggataacgtgcctgtcattactgtgtactggcgtaaaacaatggcacgcggagatcatgagagctttgtcccagattctgagaaagagatgctgtggaccacaatgctcgagacattcacccttcctgcgggtacagaggacaaagtgaaaaggtggactctgaagaaaatggcagaacagtttcagagcttctagggagatctgtaccagaagtatatactgaaggggcagacaccgaacttcgacacattcccatagctaatggatcact

SEQ ID NO: 15282 - DNA, 407 bp, Oryza sativa
  unsure (1)..(407): unsure at all n locations
aatcttagtgcaggagcagaatttgttcagccatataaaatgtatggacaacaacttgtggtttccatgcatccatccgttcctgacccaaacttctttcagttctttcagcatccctctttactttcatatgctggtataaatcaatacaatacaatgggaccaagggttagtggtggtgggaatcctgctgatagttntgatccccaaaatgtattatcccagcctgcgtatccatctgatcaaaggcttcaacttccaagaactggaatttataactctcctgcagccagaagatgaggggccgctccaaattatcaatgcatgacaccatatgttggagcaccaatgacttacccaacaagcccaagtgttcatggacagactttcactggagtatttttctc

SEQ ID NO: 15283 - DNA, 483 bp, Oryza sativa
  unsure (1)..(483): unsure at all n locations
ctttctatttttatantaaaaaaaaagaagaaattgttgttccttcttaggactttatccatctaaggctaacaaaatatattgatggtctcagccttgatactatgggtctgaattgttccaagggcctaaaatgtttggtcaaccaatgttccaaaacacgtgtacatctacttgccacaaaactaaatgatgtttcagtgatactttcaccccttgaagtacacttgtgtcggcacaatgcaaatttccaataatcattccattcacccttatatgcatggacacaccacggacaatctttcttcatgcaacctacttaatacacataatttgttgacttgaccaccctaaactctctctgcaaggaaactgcccaatgattcaacgcctccttcatctcattcttataagcataccttgcaccgtcaattacctcgttctccttatactcacagggtacatgatcaccctctgtataac

SEQ ID NO: 15284 - DNA, 401 bp, Oryza sativa
atcctcagagtcacctgctggctgcaagcttcacctgcgttctgctcactcggaccttttgttgcggcttcgggcgcaacggctgcgactgtcgcgccctccacgccgtcgggatttcccgcctcctcctccgccgcagccgccgccgcggtctccatcctggccaccgacctcgtgctctgcttcgtcatacgcggcggcgtggggtggagacggatattccgctattcgctttggagtcagtggggaattcaacctcgcttggcgttgccgccttcgttgccgccctattaatatgcggcggcggcggcggcgcgtgcgtctcgttgattgccttgctctccatcggcgacgcctgcagctcacgctgccgcgcagcgcagcgctcgccttcgtatctc

SEQ ID NO: 15285 - DNA, 426 bp, Oryza sativa
tcagcattagctaaggtgtcagctgattgctgagtctttattacaccggcattagtccatcatcactgactcaattgtctactaatgatgcttgttagtttgtagtaataggcccatctctgaaagcctgaaagcaagtgtcacctacagagcataatatggccactgaaggcttaccttcagttctttaattaatccagatggaagttgtcagtggagaggtaattaaacctcactgcctagtagatgaataaaggattagaaattagtggcagatttctctgcataattgtaagcatgatgcttacaaagatttgtgtagaagtgggtgcatggtgtggtgtggatttctcaatagaatgctgatggccttattatggcttgagacagaaggaacatacatgccatggctcatcatactggtaa

SEQ ID NO: 15286 - DNA, 431 bp, Oryza sativa
agcttattagtcccattatttctttcaatcttctatttgtcgcgacctttacagaaccaatgatgcatattgctttctgtgtggaacaagaatcctcctttgcatggattgtacttctcatttgcacattgacctttgcacttatattattctcatgttttccttcaacacctataagttttatcctaagtatatcatttgcccatacatttgacctgctaaaaacctatatatatatattctggatgagaaatccttttaaaagctgttctagctaggatgagtttaatgcatatatatgaaaccagccacacacatgatcaacctaacatttgacaatgctagcaagattatattatcgagatgtcgaattcaatcgttagcaatatgaatattagtgcctgtgtggtctgaatatgatagactatctc

SEQ ID NO: 15287 - DNA, 380 bp, Oryza sativa
  unsure (1)..(380): unsure at all n locations
tggattangtagtgctctgatgcactatgtgaatgtggttgcctatgcatctcgtcagatacgtccgcatgataagaactaccctactcatgatcttgaattaaccgcagtggttcatgcgttgaagatttggcgtcactacctctttggtactcgtacggaggtgtacacggatgacaagagtttgaatgatatcttcacccagccagatctgaacatgaggcagcagacatggttggaactgattaaggattatgacatgggaatttattatcacccaggacaggctaacgttgtagcagatgctcttatcaggaaaggctattgctatgctacggaaggacgacagttgccgcgggaattatgcaaggaatatgaaa

SEQ ID NO: 15288 - DNA, 430 bp, Oryza sativa
agtcacctgctgcatgcaagcttaatagcatcagatgttgctatatcttgtttgtcatgagatatagcaagtatgatgcagtttggctacaaaagataatacaaaaatgtcactgcatatggtacacacaaatgcacacttcatagtctcctgcaatgttgttaagatatggtcatcttggagctttaattcgcagtataacgtaatgcaacatacaaaataaagcactagtgaatataggaattaatttcaacaaaggaaaggcacaatataatcagcaccacatatgtacttccgttggatgtagaggctgggtttaatccattttctaaaaaaatagccccatattggagtacttttgtctaaccctgtaaaatatattatagccaactagcccacttggaaaagaatggctgtaagaaatatgcta

SEQ ID NO: 15289 - DNA, 449 bp, Oryza sativa
  unsure (1)..(449): unsure at all n locations
ctaagcttcttatagttgnttgctatgtgaactntcaatgatgtattcagctttatgttgcacgcatcatattttacaaagcagtcggtatatcactcggatcatgttattcaaggattcacgccgcatatgctatatattaatattaagtcacttggttgactacaattatcaaaaccactcaattggtgcatctattaagtacatctattcgatgcatctgactttatttttcaaccctccacaatcttcatatttggtaaaagtattcggaagatcatggcgaagatgatcgaagcactcggctttggagtaatctagttcgagagaaattatctttccgactgtgaatgtctcatgggctactgtggagaatatgggtaccccatacacacacggcatggntatccgactaattataggggataacttatatctatgtaatatgt

SEQ ID NO: 15290 - DNA, 507 bp, Oryza sativa
atcctcttagtcacctgatgcatgcaagcttcgtcaactccataaaataaatcatacatggataccacgtgattggaggaagctccacgcagaatatgttaaccaatacaatagaatttggcaaagcatggttgatgaggagcaacattttgaccaggcaagtttgccacaatatcgtcattggtttcaacagtatgggatgtacactgtttttttggatgctcggtccgctcaaggtttgtgggatcccatcccttatccactggataacttcgattggaccggttacatgcccagtggtccacctctctcccgattggtatactaacatttctttacttgttcttttttacttgcaataattcacttaataacacttcttttttcttaaaatgctaatttaggctctacgttctatcaaacaagttgcgtggagaattaaatgtgctatgagtagaggatggagaaagatgggcaagattcttatctgtacatgttacaataacg

SEQ ID NO: 15291 - DNA, 491 bp, Oryza sativa
  unsure (1)..(491): unsure at all n locations
acttgatgctcatatataaagttactatgatttccccaaatgcatgttccctagccattggatctcaacgtaagaactcaccgatgtctgactgtgcgacctgaacttcagaaagcatgccaaattgaggtctctatggttggaggggcgacgacgtacagatccaacgtcacaataagtgcactatagttgcatgaagacaagatgagcggagcataattattgagatagcggagcanaattgtattatgacattaatctattaatggtttgcatatactctattttggaaagctttacacatgttatgttcaagcaaatactntagtctagatttctacaaaaaaaatgacgttttattgtacataaaaactactgccattggtcaaaatatatatattttttgaaaattcttacaataaacataagttaattntgaacgttgtattatnttatgcaagtgtaggatatgcaatgactagtaagtttat

SEQ ID NO: 15292 - DNA, 469 bp, Oryza sativa
agcttgcatatacaccatatggttaaatacatttttatccctgatgcctacacactacatatttgcatgtatggcaaataggtgcatgaagacaggtaatccaccaatgacaggtgattgagtcaatttcgaagagaatcaagctcccaaaggaatatattaaccacagctgtacaaataacgcatagattcatgagccacagcaaaatagcactcggcttgattaaaagaattaagaattacacgccttataaatataggattatctattccatgatagtcttgtgtgtctttcttcagaataatggtactacactgaaatagaaaggaaaggaaagcatcttgattctactctaattccgatgctatgtttaaaagagggcatgattatctaccattccagcaacttcttgctatgacatgctaaaacacttaataataccttcacagagtagaaattataaatata

SEQ ID NO: 15293 - DNA, 445 bp, Oryza sativa
  unsure (1)..(445): unsure at all n locations
tacgctggtcatccgagccagattcggtggtgttcttgtcgaatgatgtgctttggagatcatgaaaatgatttccgcaagcccagtacctgagatgtcctggttttccgaaattgattggaataatctgttgtcagtgtataactttggaaacacggtgattattcactagtcttgtgtttctgtttcgcctgacaaaacccggacaaaacagctaatctggtgttgttgctccatagtccacataaaacacaaaccttggcatgttcagagtatttcttgccacttcagtctcgagaaatactattcccatcttgatacacacatcctcaatagtacatgatattttggatttgcatcatagccaacagctctatactactatcgtcactaatgatgatgaattcngctttgcttganatatgaactccaataagttcaactc

SEQ ID NO: 15294 - DNA, 483 bp, Oryza sativa
  unsure (1)..(483): unsure at all n locations
atcctcttagtcacctgctgcatgcaagcttccctggatctgagaagtttctctttcacggtattgggatcgtttgatcgatttccttgatcgctacttatggacgtgcgctcaaaggatacaaacagggattcgcaaacaaaaaggggaattcgtagtcactctttcctgtcgcgtaaaaaaaaggctttacgcgagagcaatagaggttgggatacatctatctcttatgagcaacctcttttggattcttaacaccacccttgcagtaggatactgtctgctntgggttctttattatattatctccttcgagggatttttatgatcgttcangctatatttagtctaatttggcttttactgtctccttttctcaaggaagtggttaaggacctcagaagatagaggagagcgccatgcgcatatttccggaatacttctacggtgaatgctcattgaatgcgcattctncgtattatg

SEQ ID NO: 15295 - DNA, 421 bp, Oryza sativa
tcctcaatacagaagcgtacagtataatcttgagtgcttggatttgcgacttgctctgtggagcgcaacatgctccgatgtacttaccgtgatactcttccatctttatggtttccaatatcttccctctgaattggtgaattgggtctgtgttgcaaatatttcttggagaaggcagctgctgcaaactttacaaacaagaaggacagtcacttcaagtattcatcagaaaggttaagggcatatgacagccatgcacaattatcagtacacatgttatttctctataccagcttcagggaagctgtgccattgttaacccaaatttcaagcaaggtctgcatggaaattgtgctgcagaccacagtgacagtggcacatgatagtctgcacacaaatccattggtgcatttctctatca

SEQ ID NO: 15296 - DNA, 495 bp, Oryza sativa
atcctcttagtcacctgctgcatgcaagcttggaatctctattatggctttcttaattatacaaataaatttatcctctaatctgattaaacaaatgtcgctcttatttgacaaatgacaagtttactacctgtaatatgaaaaagaatgcatgtacaacttttatgtgaaacatcagatgggaaaacgttcaatataccaagaaaactatccggtcgttcagcttggacggttctgaaccgttcaacgacgtctagtcttcgacgcaagcgatcgatgtatgtcatcagtgaccgaagatgcacgagctatcatggctgatgtacattccaattaaccagcacctaatctagcaattaattattcatccacatgttaaatcttctgaaaaacgggtttctgtaatactactccgtaactaatagttgagctaagacaattcactattatatcgggaccccagcaacgtctataatctggaaaaaagatgttctt

SEQ ID NO: 15297 - DNA, 179 bp, Oryza sativa
  unsure (1)..(179): unsure at all n locations
gctttccaaccgtcgcaatcgcagtcgcaggattcacgccacgccacgccacgccacgcgtgtgtgtggttcactcgatagctcgctccactcgaagaccgaggctgtcaccaccaccaccaccactcgagttccgcacgataccaaccctttctcctcgattcgncgccggtagctgc

SEQ ID NO: 15298 - DNA, 408 bp, Oryza sativa
  unsure (1)..(408): unsure at all n locations
agactgatggtctcatccctccangcctctgctatatcgcaagtctgcgttatctttttctcaatgcatacaacctttccggcgaacttccgctatctctgtacaatatgtcgtcgctgatgatgctccaggttggcaataacatgctgcatggcagcatcccttctgacattggtcgcatgcttcccggtatacaagtggttggattggatgttaaccggtttacaggagtcatccctcattctctctccaatctttcaacactcacggatctgtacctctcagacaacaaattcaccggatttgtgcctcccaacttggggaggttgcaatatcttcagtatttgtatttggtatgaaatcaacttgatgcagataacaccaatggctgggaatatccacttcact

SEQ ID NO: 15299 - DNA, 452 bp, Oryza sativa
tcacgcccaagatgaccgatacgacgatgccatttcttgtgggtgcggcgaggaaggcatgagtgctggtggctggtgggtataacgggtaaaggtcgccagaactattgcacctggcgatcacgttcctggtttccaaatccttcacagaaagaccaaacggatcaaactcaatagaggctcaagtgaaagtgtgggaatgattgattgtattccacaagtgtcaagggattacatatatgggcagctggggtggcactcatgcccaccgcacgggcccaattacatccacaatcaatgcctaattacattagtctaacatgttcagctgagcagagatttgcttgcactactgttcgccttggtcttcgtcataatggttgataattatgctgtgtaagggcattctgatataattcgatgatacgtggcattatgctttgagatggcac

SEQ ID NO: 15300 - DNA, 475 bp, Oryza sativa
gagctgcagctgccaacatacagaatttctttatcgatgctcgtaaaaaaggaagataacacaccgacctgacgttgccaatatattgttgcggatgcatatctcaatagccaagtccataagcagcatcagtatcactgctgaagttatatgggccacaacatgaagataaaccagcaaggcacgatttctacgcgatatgttttgtggggtgcaaaagaataaagataccattggatagagttacaacaccagccagggatacataggaatgctccagaatctcaaaaacaacattgcacactgcagtgaataaactattgacacggtcagcccaagagtcttcacgcaagatacgataggaatcacactgaatataatatatactgatgtcaggccacaaaagaacagtatttgagatacttctagcactgctctaatataaatttgatactctagtgcacaaagttgaaat

SEQ ID NO: 15301 - DNA, 434 bp, Oryza sativa
agcttccgagaaacctacgagaatttctactgttgacgcccagagcagataatgtcttgtcagattctatgagccgaacgaccatgtgagacctagtcatgtaagagttctcaaaaggtgtattaactaagccgtgtaatcggaaattgatttttccaacttcacggctaggggctaggtaaattgcattttcagctatgcaggttacgggtcatcgagccttcccctccgagaacaggtttccccgaggacaaggcttatggctagggagagtacctcactcgacaacgggccaaaggcagcctgtaaaaagagtagtactcgctcacaacacaacctgtttaagcatttactagatagatttctactttgattacaagttcttaatagagataacaatgtattataaacccccttttagatatctttctata

SEQ ID NO: 15302 - DNA, 444 bp, Oryza sativa
  unsure (1)..(444): unsure at all n locations
tcgacacgctagatccgggagtcttcagcttcttctgctccggatccgcagccatgaactctgctggcggcggcaaacagcgggactcaaagggagagtggcgagcgtcatgtatgcgatcggcgacggcagttgcgagatggcgatgcatttctctcttccttgtttttttcatttttttcttttctttttctatccggttgaccggataatcccgacgattaatttataatagtgtaatttaatgtttggcacaattttttgggacttcctagtttggcgaattttttcgtcattgaaatttgtgcatctccaagaagtcagtagcactgcatgtaatatgttgttatcctctccaatacgaagaaactatactcaatattccgaanacttcatcttggacttagttaatactcaatttaatacccatggaggtaaactcac

SEQ ID NO: 15303 - DNA, 424 bp, Oryza sativa
atcctcttagtcacctgctgcatgcaatcttgactgatgcccatttagccgtcttgtcttttcatggtatgatccctccaattatggagaaattctcatctgaggattctgaaaacttgtcccatcttatacagaaagtgaccttgcatgaacaaaggtttgtggaggctatgaagaattccaggaagggtaatcatgtatgtccttatatatatggatcggatgatgaagatgatgattctgagatagatgcagccgaatgggtaagaagtaaaatagttacaccatgccaatgggtaaagagttctgaaaagaggaaaggtatgactctgatatcactaatgccgacaagaattttgacttgctactccgagagaagcagattcaacttcctgctggtcacacaattccctgctgaataatt

SEQ ID NO: 15304 - DNA, 395 bp, Oryza sativa
tatgttgatgatgtagtcgtcaagaccaagcagtttgttgttctgatcgcggatttagaagaaacttttacaagcattcgtgctttcaagatgaaactaaacccggaaaagtacatcttcggagtgccgtcagggaagttgctcggatttatggtatctcaaagaggcatacaggccaacccggagaaagtcaacgccatcctcaacatgaaaccgccaagctcccaaaaagacgtccaaaagctgactggttgcatggcggcactcagccggttcgtctcacgactcagctagcggtggatgcccttcttcaagctgctgaagaagactgacaattttcagtggggacccgaagcacaaaaagcctttaaagacttcaagagacttctcactac

SEQ ID NO: 15305 - DNA, 455 bp, Oryza sativa
  unsure (1)..(455): unsure at all n locations
tcgtacccgtgatcctcttagtcacctgctgcatgcaagcttccattatctataaaaaaaactttagatcacacttttcacactggctggtatgtgattatctattccatggaacttacttacacttcaatatccatctaataactaacctataaaagccagtaatagggaatggaagtagaaggtgaaattcaagaaaaaactgtatgcagcaggaaaataatagtggtactggaatgtatcatttctgtactacttatatgagttggtggtgatgggttgtgctctacacccccaatccttcaatcaacctttggtgaaacaatcagcatagacgtgtgtcattttactcatttgtacttctattgaaccaatatatagatgatttaattatgttcatatgtatgtnggtgtcaagtgatccaagttaaatattntaaatgtggggatttttt

SEQ ID NO: 15306 - DNA, 412 bp, Oryza sativa
  unsure (1)..(412): unsure at all n locations
acagtgctatgttctgaatacttcttttcaacatattattgctgatctggttactgtactgatatgcgttattcattatttttcaaccaccctcagaatgtggcaatgtgcagataaaaattgacatatcgggccattaatatttttcataaatatagcataagtaccaccggattaccatcacaggaataacaaatgatgtgtggtcaacttatggttttttgtgggtaaaatgagcatggatactgtgggaaatttgcatagggaagttgaaaaggacaaatatgtgaacaaagctttggtganatgctagatatttataagcagatagaatagcgttaatgatggcgtntcataccaactggtcagcaacacaaataaagatgtcttgttttttgactacataataaac

SEQ ID NO: 15307 - DNA, 465 bp, Oryza sativa
  unsure (1)..(465): unsure at all n locations
ctcgtacccgngatcctcttagtcacctgctgcatgcaagcttgaaacttgtgatgaatgcaaaatactgttgagaaaaaggtttgtgttttcatactatagacgtgctctccttgagaaatgggaacatctaaaacaaggtgacaaaactgttagggagtactttcatgattttaaaatttgtatcacttatagtggtttacaagaatctaatgagaacacaatgactatatttttcagagggcttaatttcaatattcaggctgtgcttgttaatgtgacatataatcatatatgccaattgttcatgcttgcttgcattgttgagcgcataattttggataatccaacggagcaacaagatatgcttgtgcctcctatcactgatgttttgcaggaagttcaaaatatgtctccaaatgagaagaaacgatatgttgagatgtaactccatcactcgcgaat

SEQ ID NO: 15308 - DNA, 345 bp, Oryza sativa
actaagcttatataggtctctccttctacatctctcttacatgtggtaccaagcctgttggcggtatggcatgagacgcttctaccaaaatctgccgaaggctatgtgaggagtggggatccaagcccgaaacatcaaagttagtcggggcgaatccccctcatggcgaagactatggagcaaggatggcacgagaggcgaatgatcgtgcgggtgctctgccaagtcggaggcctcttgggcgaaggatgcaaggtgaagagtacatgccatagggagacgacttcgccaaagcaagctcgcccccgcgagggccgaataagccttttccggcccatcaagcct

SEQ ID NO: 15309 - DNA, 459 bp, Oryza sativa
  unsure (1)..(459): unsure at all n locations
agcttcactagttggtgatagctntcttatatatgttaattactatactatntaccgttaaaatcaagttctggccagattgaatttggccggtatgcatgcgtatgtatatgcatgctgaggatgaggatgaattctagctagctagctagctgctggaaaacaagttggtgtgtggatagctgctgtttacacgtaactacgtcattctgatctgtgtcgacagttgtaatttctacttgatcgatgctacctggcttaattagttaccatcaatccttcataccgtagttgtagtttacatataaattatgaagcaatgtagtttaatatgataaagctagtttagttttattatatgttgaatcaccatangtgtggtagactgatgagcagtgccttaattggatagtagtaccgaactatcacactgactacgtaacgtgatatgatctatat

SEQ ID NO: 15310 - DNA, 389 bp, Oryza sativa
  unsure (1)..(389): unsure at all n locations
taaagccatgaatcccttttatgcatatctttatcttgttcctgcagaacaaacatatcggatgagtagtatctgatataaatataatactcgagaaaaaatcaagtattttaaaatatttataaatatgtatttctcctcttatcaattgtgatttccccgagcagatgactctgtacatttaaacactctgtccgactagtcatagcccacaagcatcgggagtcggcctatgcatttcccaaacatgcatatgagtgatatgagttcgtcattaatggaacaaagtttcacggatcagaatttactactcgggtacttttgcaattattaagagcagaanataaatntatctcgtctctatgcttttggattattccgaataatac

SEQ ID NO: 15311 - DNA, 423 bp, Oryza sativa
  unsure (1)..(423): unsure at all n locations
atcctcttagtcacctgctgcatgcaagcttgtntgtgcttcctttcatggttgttttccattccacatatggcaagtcaagaacccaaatgactacttcacaggaaggtgatttcatccttctgtatccagaatcttgtagtggctatatgcaaaccatgaagtttatttttatacgcataaaggtgtcggtcttatgacatttctatatatccatccgcacagaaaacactttattcatcattacccccaaatgtctgtaaaataaaatcatttacattggatattcatgattgtgataatctaacaagttgatgtagtagacttggaaatgtagaatttgtcatatgtcgggatgcaaatggagaactccatgcttttcacaacgtgtgtcgccatcacgcctcactccttgcatgtgga

SEQ ID NO: 15312 - DNA, 462 bp, Oryza sativa
  unsure (1)..(462): unsure at all n locations
gaatgtagattgtgaagttctcctttcctgcgttctgtcatatacacttttatcatggcaccgcgcaacaggtcttcagctagaaggcctctctggattgtcatcttgattgcttttgtctgtgcaatatgcattggagcctatctttatacaccccatcattacacaccttgttacttggtgtcatcaaattcctgtagttctcggcctcctccagaacctgctagggtttacactgatgatgagattgctgctcgtattgtcataagagatatcattttggcacagccagttcagtcaaagaatccaaaaattgctttcatgttcttgacacccagttcattgccattcgagaagctttgggaaaagttcttcatggtatgatatttacgctattgtaataaagatcttaatggcactntttactcattgatgattaatcntgcattatgtaataattat

SEQ ID NO: 15313 - DNA, 441 bp, Oryza sativa
gtcacctgctgcatgcaagcttcggatggagcgccgcaccgtactgttccttcgacgacgtcgacgattatgactccgtcttcgccgccgtccaccacccggggggagtgcgtgtacatccctaccatacgtcggcaggggtggtgaatgggaagctccacacccgcaatgccgcgacgacgtattactaccacgtcagttcgaacaactccatccatgatgtcagtacttggttcgagcgagctgcgcgatgcagttcttggaattttccgcgattttcccccgtctttgtttgttttttggggagaagtttcgaagggtttggggaagctagcttacgcacgattgatggtttctccccgtcaaattttacctgaactgtggaaacgaatcatctggttctcctcatagtttccggtgattggtttgattcttgtttct

SEQ ID NO: 15314 - DNA, 155 bp, Oryza sativa
  unsure (1)..(155): unsure at all n locations
tggaagtgtgtgttgaagtgagtgagatgaggtccttatatatgggtatgtatgacggntggcaaaggggaaatgtccgaaatgccctccaaccgccatcatggatgcatctgggacgtccacgtcaaaccccacatccaacggtggtgatagtg

SEQ ID NO: 15315 - DNA, 489 bp, Oryza sativa
atccttaagtcacctgctgcatgcaagcttataaacatgttctaattatatcgttttttgtttataggattccaaacataatggtctgaatttcagacgtgtcttcctctgactgttctatttcctatttttatagacatctctataccccacgtctccagactccagttacttattccgagggagcgaaaaattccactagacatatttccatcgttgcataaacacctatacccggttcccaattggtaccaacaagggtcctgtacttctgggtggtaaactatggagcggcaaaaagttgggcactcctggcaacaaaatctaacctctcattaattcccctcaatagaaaacaatctaaccactcatgggcagaaatatttatttttatatacatactctcaaatgatttatgtgaaaatttaattaaaaagtttcacataaaaagatctgaaatgatccttcaaagtcatttcactactacat

SEQ ID NO: 15316 - DNA, 448 bp, Oryza sativa
  unsure (1)..(448): unsure at all n locations
ngtccttttttctcatggaacaagcagctggctgactattctgttaagatcggttgtcaaagcttacattcctgtctacgatggaaggacatatgtatgtaatacaatgtcattgttgttctatatgaatgtgtgttgatattgaatcagtgatcttagcaaagcttatccaatcttttatgtcaacgtatatatatttgcactattgtcatgctctgccttttttgtgttaacgtatctatgcactcagtactttttttttccttccatatacggagagagcttaattcccggtttgctacctaaagttggcatggaatttacaaatcctggatgaagcttgtgcattttggctntgctacagtgggcaaaaaggctgaggtcagaataaggtattcaaacaaaatgccatccgatggcaaggttacatcatgtatatttgtgtgtg

SEQ ID NO: 15317 - DNA, 412 bp, Oryza sativa
gggaaccataattcactttcttcatgttaaaaagaagaaggggttgcttcccactggtgttcaaaatcgaagctgtattatattagatgacaacacttccaatatcacgaccactaatattatgaaatatggtctctataaaaatgggtgtaccggtcagaacatcacatataacaagaaaacaaaccttataaaacagagaagtgtatcagtaaaccgctttaccgaagatggatatttcctgggagaagaggtggcactctttgcagctattcttattggtgcttgcgaggacaacatcacgggcaccggacatattatcaactctctctatgggggccctggatttaatcttgacagcttctattattgtaccggcattatactgggcagttggtacatcaccaaaaaa

SEQ ID NO: 15318 - DNA, 443 bp, Oryza sativa
  unsure (1)..(443): unsure at all n locations
ntaacaagagcttaaaattagcttaattgtaagctgaagctgtgacaaattaaagcacgatcttgtgaagggtgcacattatatgttacactttcaccttcatttgcgtgattgcttccacgagcacgtctcctagctcgtaagcatggccaacactacaagtcaagcactaatggacctgatgaattagtggtaactacaatgttatgtctagctcttagttaattgtctgatcaagaccgtagagtgattcaacgtacggcatgcacagtattcgatcagggcgcccattttttacttgcaccgcangccaaacatcgattaatatacgcttaccaaattgggtatatatagcaaagttagattagctcgtgcagctaactaaaacggtcaaatgtcgatcgttcgaagaaatactcagcgtgttcacatattatgcacat

SEQ ID NO: 15319 - DNA, 487 bp, Oryza sativa
atcctcttagtcacctgctgcatgcaagcttctcatagccggtttcatcagttatgttctccatctagagtggcaagccaacccagtcatggtacggaaggccaacggaaagtggagaatatgtgtcgatttcaccgacctcaacatggcgtgtcccaaggatcactttcctcttcctcgaatagaccaactggtggacttaacagccggttgcgagttgttgaacttcctcgacgcttactccggttacgaccaaataagcatatcaaaagatgacgaggagaagacagcattcatcacgccgttcggggtattctgctacgttaagatgccgttcggactaataaccgcaggaaacactttccatcgcacggtccaatgtgcacttatcgaccagctcggaaacaatgtcgaggcctacgttgatgacattgttgtcaagaccaagacaagcgactcattgattgacgatctgcgtgaaacgttc

SEQ ID NO: 15320 - DNA, 389 bp, Oryza sativa
  unsure (1)..(389): unsure at all n locations
tcaaaacactatgccggactctcctaaagagcatgcaaatcctttggcaatggtgtctattgtctttgggagggaatntactgaatctcagcttgaacaatgcttcactcatcaatttaagtggaattggcaatggaaagcaaaagctatgcccaatgggactnttcaaatgatgttcccaaacaagataaaatttgaagagctatccaactctgactacttcaatgttaaagggactgatgttcaagtcaatgtgaaagaatggacacaagagtctgatgcagtggggaagatgcatactgcttgggtgaaggtgtctggcattcctgatgctatgagaggttaccangccctatatgaagtgggatctaacttgggaacagtatgga

SEQ ID NO: 15321 - DNA, 461 bp, Oryza sativa
  unsure (1)..(461): unsure at all n locations
tatcanacttactaaatattggtcaacagagaatcaatatgagttgttatatgaacgacggaagtgttatactagatcaccatagaagtttgttgaatctctctcttatacctattggaaataaagatttgttatatgacccatgtcataaatgtagttagtatatggcatggatgagagtccacatgctatatactatgagtaaaaaaagttaaatatcccctcggaagttgatgatgagaacaaccactatcgcatcaatcttttgtcggtggccgccgccccccgacagtgaacttttatgatgctggttgtgccgtattaaattgcacatgtgtactgtgtactgcaacgggtaagccatcgctaacagcatcattgcaattttggatcggtgtgcacagcccagtgaatctttatactgcaacctgtttctcgaacagatcaaatcattcttctac

SEQ ID NO: 15322 - DNA, 432 bp, Oryza sativa
  unsure (1)..(432): unsure at all n locations
tgtgcatccactactttctctttcaatgcatgtcacttagatccttaccccttgcctcgcttatatcacattgtcgactccacagcatttttctacctcttgtgttctctagatgcatatgccggtctccatcaaattcgcactgggtatggatatatgatgaaaataaccgtgttaattactccctaagaacttattgtattcaacatcgccctttgggttaaagattgcaggttctacctttcaacgtactacgtcaattnttttgggtagccaaatatgacataatgttgacgcctatgtctatgacttggttgtatatacgctcaaccacgaaacggtgctttcatgattaacggatactttgagagcctccgctccgcccgcaaaaactgaacccaatattgtggtttgggacctgggcaagcttct

SEQ ID NO: 15323 - DNA, 240 bp, Oryza sativa
gatatgctagagtgcgcgtcgatatgtgaagcagacggcgttaagaatatgacatgcatctatttttattcgacatatatagaatgtggtgcttaccatattgtttgatacaggtattatgacaaaaatgccgactttgcggtgacgatcggttgtcagtgtaaccatttctgtagtcatatacatattatttaacagttccatttgtagcccaatcgatgatcatgcccatacggctcg

SEQ ID NO: 15324 - DNA, 303 bp, Oryza sativa
cttgctaccaccctcatccagcatattcttcatactccaattcggagccggaaaatacataatatctgggccagaaaccacattcacagccaagctcttggcatccatgttgaactcaaggatgcagttctccacgagcagccagtatataacattcccaacaagaacaggaggcttcatgtcaatggcagaaatcttttcccacgagatggattcatcaagatgtctaagccctaatcccaaatccaaatcgtgggggatcaccgtcctcccacagaccacctcgccccattctccggaaag

SEQ ID NO: 15325 - DNA, 400 bp, Oryza sativa
  unsure (1)..(400): unsure at all n locations
actaagcttgagccgtgcgtattttacccgatacttttatatgtattgactgtgttgngtatattctttatgcttcttcatgaagttgtacttttgtcccggagttgctttactttccgattgtctatgtacatttgagtagtattatttgataggtcaagtttatttccagatatgtacatactttaaaatgactatataacttcttgtaagtgacataatgtgatcacacatgttcttcatttgagttagatgttttatgacgtgcaatctgggggatttggcctctggtggatcatatgactgtttttctaatattgaaggaaatgcagtattctggggtatttggcatggattccagggattcatcgctcatctagtcacgtgttcattggcatat

SEQ ID NO: 15326 - DNA, 397 bp, Oryza sativa
  unsure (1)..(397): unsure at all n locations
agctngccacggactaccggaagggtgatgtgtgggttcttacacaaaccaccagatcttacccactatttattctttgcaggaggtccaagtgcggccatctatgtaagggctggaaaagagagatttttaagatatgctcagcgcaggatatatcatatacacccatcatgcgcatatttgtcagaaatgtctgcatggaattcctatctatgtgggggaacactccgttgaatgtacgagcatagttttcataggcatgaaactacacaggttcaatgcgctaactgatcacagtgatctccacaaagtctaattcattcattcattcatccattgcgggatggtgcttcagaaagtctaatcgattcatccatgcattgcgatgcatatgacg

SEQ ID NO: 15327 - DNA, 312 bp, Oryza sativa
  unsure (1)..(312): unsure at all n locations
tatctcttacgctccangaatggatcagtcagaacatttccaccggctcgcctcgaccgctgccgactggtgtttccgcctgcacagctggcctttatgccgccgctgttgggcgtatacatcttcaccgaccggattgccttcgtctccaccgactggtgtcctcgcctgcacggctgggctattatgccgccgttgttgggcgcctacgtcttcaccgacacggttgccttcgtcgtcaccgactggtgtgctcgcctgcacagctggcctttatgccgccgtttgtgggcgtctacatcttcaccgact

SEQ ID NO: 15328 - DNA, 478 bp, Oryza sativa
  unsure (1)..(478): unsure at all n locations
atcctcttagtcacctgctgcatgcaagctttacatctccaaatagtctctttacttgttggattcttagctcacttgtcctggtagtgtggcaaatgatntgtgccttccctgtgtggaccattcatgacctctgtccatatactagctagtacagtataatttatgaattgataccttgtaatccaattggaatggcatctatcatactatatcaaatactccctccgttttataatgtttgacaccgttgactttttagcacgtgtttgaccgttcgtcttattaaaaanaattgtgaaatatgtaaaactatatgtgtacatgaaagtatatttaacaatgaatcaaatgatatgaaaagaataaataattatgtaaataagacgaatgggtaaacacgtattaaatagtcaacggtgtcatatattctgaaatgganggagtattatgatataataacaactggcatgattat

SEQ ID NO: 15329 - DNA, 425 bp, Oryza sativa
  unsure (1)..(425): unsure at all n locations
cactttcgagatttgaatcttcgattgaaccttgaatttcctggttctttgaaaagaattcgaagtgataatggtggtgagtttaaaaatgcttcttttgaacaattgtgcaatgaaagaggtcttggacatgaattttcttctcctcgtgttcctcaacaaaacagtgttgatgagaagaaaaatcgtgttttttgtgaaatggctagaatgatgttggatgaatataaaactcctagaaaatattgggctgaggcgattaacactgcatgctatatttcanatatggttttcttgagatcaaaactgtttatgaacttcgatttggacgtcaatgcaaagtttcacatttgcatgtttatggctgcaagtgctttctcttgaaatctggacattggataagttngnggacaatctatcgatgg

SEQ ID NO: 15330 - DNA, 459 bp, Oryza sativa
  unsure (1)..(459): unsure at all n locations
agctngcagcatctcatttctgggcattcttctagacaaagttggaacatcactttttgcagcagatctattttcttgtgatacaggaaaaagacttgtacttacaattaaagttacactgaagatctcttctactttaagagtgtagcgactttgcttcatggtgatgtctttggtctttcagttgatggccaacttaagtgtgagaaatggattcgtgacgacgacaagaagtctgaggaatcgaagatgaagtggcgggtaaagcgtctaattggtaggccaaaggatgtgcacatcagttggccataccccttctcataatgcaagctgtttgttttgactctaacagcttggttggaaggttaccatgtcaatgttgatgggcggcatgttacttccttttcttatcgcactgtatgttgttcttatagcatcanaaatcattcagttgcatga

SEQ ID NO: 15331 - DNA, 482 bp, Oryza sativa
  unsure (1)..(482): unsure at all n locations
ctaagctttattngtttgcagatgcagttgtagcataattcccttccaacgaattaaatcacatacctcaattattcaaaaaaaaagtatgttaaaattctcttaaatttgcttgagtcgtgagttgtgacaatgattntacctaagccttgctatgccacattgccattagcatcttcaaggattcgttgaaaagttaatggcatccagtaaataaaggacaatatttatgcctgaaatttcagatcatcaagtctgtgaaatgctgcaaggaatctctgctcttgtgtgcatccatcacagctcagccagtcgatcgaactgaactntgcagcatgtttggctgtggttagatctatggatgaaaagttctaacatatctcacattggatatacggacacacatcttgagtattaaacatagatagactaataattgcgtctgtatactgcgagatgaattattaagcataattaatcca

SEQ ID NO: 15332 - DNA, 456 bp, Oryza sativa
  unsure (1)..(456): unsure at all n locations
tctagtattgagaagcacagtgccatgtggcatgatgagtttgtttcagcacttgacaacttcaagagggacatgattganttgcgtgcaaaaagaacatgtgatatgatttctgacataagcaatgtgctatctgacagcaacactgcagtgggcatttccgaggctgtttcaaacccaccaagcactgtgttggcagctgatgttgtttcaaacacaccaagcactgagggggtagctgatgccgtttcaaaaccatcaagcattgagggggcagctgatgctacagattttgatggaccaagccaagaagcttctggcggttctgtgccaagcagcccagctattgatgattatatttttgcttcccactctgatatctcaaatctagatgatgcatgtgatgcaccgtcattcagactcttcaatgaatctgatcctgattcattagtactc

SEQ ID NO: 15333 - DNA, 362 bp, Oryza sativa
tgggctgggtgaagacggtcaataactgctgggcatttgtcctggcttgcctctccgcttcgtatgcttgctgctgctcttgcatctggcgaagcgtatcttgcaacttggtcatgttctgacgcatagcccccatgtcagcttcggcttgagcttcaagtttggcgttggcttgcgagatggtgattgttgtcgaagttgtagcttgttgcgaagaggcggcagcttgagacgcccccaatatttgagacgaaaggattacgtccctgatctggagcgtttccaccgcggacgctgccttcgccccctcttggtctgtcgaagtagtcggtgccgaatgtgggagagatggcgccgccgtc

SEQ ID NO: 15334 - DNA, 318 bp, Oryza sativa
ccgcatcaatactgcgtctccgaccctggggccggctcccgcgaccaccgagatctaatccttgctcgctgacgactatgattgaccgcctcacttgccgattatcttatgcatgtctatgcactgtgaaaacaacggctgaaacactatcaaggagtatgagagtgactatgcttgcatgcatgacacatgaaaaccacgctgtgtacctacgcacgttgttcgagcgatctgtgtatatagatcaatgacatgacatacacgatctgctttgtgggagagataacgctggactatgcattacatgatctgatctat

SEQ ID NO: 15335 - DNA, 464 bp, Oryza sativa
  unsure (1)..(464): unsure at all n locations
tcttaagtcacctgcngcatgcagctatcagtatattcctagcaggatctttgggtctgccatgattataccaaattgtttgcaccaagtcatataggccctcatgctccacccagtaactctcaaatataaaggtatgtgctttaagtatatttatcacaatatgcaccacacaaaggatatgatccgaataactattcttgacaatggctttaccattgtgttaaggtaggaaagagtccaattcatgggagagttcaatagatacaacaaaggttgatgttgcatgtaacttcangtgtaagccatacctttaattggaagttcaaaaaacccacagagctaatgacctcattaaaaggaaaaatatcattcatgtcaactctatgtctatttctgttcaaaacacaacattataagatgatctaagtctgcaacaagaaattgtacaatcttgtcacatt

SEQ ID NO: 15336 - DNA, 456 bp, Oryza sativa
  unsure (1)..(456): unsure at all n locations
aggacacttaaaactaagctaacaacacctcaatcggtgagctgtaccttttactcccaaagtttgcatcattctgttcagcttgttcatgatacaagtatgattgaatagcttctctttctcctatcacatttggtacaaagctcacggttgctacgacatagtccaatacaaaaaaaaaaaaagttgcactgattttgcttggaaatgtatcgaactgtgacaagttttagtccataaattttagaataaaaaaaatttgcacttagtgataaagttgtggacaatttaagtacttggttggttggctggttgaacaatatgttaatggttgtaacttctggaaaaataaaatgtattcttaattccttgcgttcgtcgagggaaattaatgtgcaacgaatgttgaaagggaaagatatatgcccatcattngcagtggtactggaatatact

SEQ ID NO: 15337 - DNA, 359 bp, Oryza sativa
gtcacctgcggcatgcaagcttaataaaatgcacaaaaatgagaagatgatgatcttagcctaaacgggaagtgatcactatagaactaaccttcacaacactacatcgcaccggcgagcggtgccagtgaacgccgcctccatcccgttcttcccgcggaatgcgacgggcacgccgtcgcacatgaccctcatgaccctccggcgcgtgcgccatgcaccgcgatcgaagacggcgacggcggcgagcctgacctggacctccatggtaccaacacccccgcccttgatcggcgcggcgtcgtcgggacccacgtatgcgccatccacctcgatgcggaaggcgagcgtggtggtgt

SEQ ID NO: 15338 - DNA, 476 bp, Oryza sativa
  unsure (1)..(476): unsure at all n locations
tcaatntgactttcccaaataaatgaaaacagttttcctattaaactaactaatcggattgttcttctggtatgcaacaaaattatactagaaattaactagaggtcaagaataagtagtatagctcaacagttcaacaacacttatattctataattcgctgccaacctcaattttttttatataatggaaatggactacatctgcgacctctgccagtatgcagacagccaaaaagtgtaaaagtgaacagaacagagcttanaaaggacgagatgggacaatcccccaacttctatcaataatatgatctatactaaagtaatgtttctaatatcacgtagatcacaaaattatgtatgtactacgccatccaaactagaataaaaattccctggctaccaattccttgggtactnggctggcgacctcaatgggtcatgtagttcagtaattacaagtaatggatctctatg

SEQ ID NO: 15339 - DNA, 421 bp, Oryza sativa
  unsure (1)..(421): unsure at all n locations
cacctgctgcatgcaagcttgtcgcatganaaccactactttctctgtcctttcttctaccccgaccccactgagttcatcatcggtgagaccaataggattccttttagactgtccaatccatatctatgtcattggaagaacacctttaaatcttggccgtctctataaaaaacatcacccgagaaaagttggattacatggttcaagcgcatgtcngctagcaaaagagttcactgggatgaaatcggaatcggccaagcacttgacctaaccatatcaaactcagccaatgatgaacctctaatggcagctgcctcttacttctggtccaacaccatcaacgccttcttattcaaccaatgaccgatgaccctaactctcatagacatcattatgatcatgggtctggatgtcacct

SEQ ID NO: 15340 - DNA, 480 bp, Oryza sativa
  unsure (1)..(480): unsure at all n locations
gctggtagatgagacacggcacgcgaagagaaagcttctcttcctctccctnctnctatattnctcaataccggcgacctcttcttcttccccaacgacagcagcggcgcttctcccctccccttctgcgtcgctacgtccccgtcgccaacatcttgccagacgctgtgtcgccattaacgtcgccggcctttctccgatcctctctctcccttcccggaggggcgcgggacaaaagattgtgggcccaaagctgcaaatctgatcatgaacctgtagcttattttggctccctattatggcatccacaatgtgcaaaaaaaaaaaaaaagtggatagtaagaagtcctattacctgggtcaccattgggggagtagctagtaaaatgggtagtagtatcatccggtagtagtgctactaccaggcaataaggaataaacaaatattaagactctctcatctctcattacctctcttct

SEQ ID NO: 15341 - DNA, 416 bp, Oryza sativa
  unsure (1)..(416): unsure at all n locations
acctcgaaagctgttattttaatgaccatatggtggatagttgcttgtggaacaaaatggatagaaattgtgtaaaaaatgtgggttgaagctttgggtaaactgagattggggaaaattattggggaattgttggggaggggagttgtggctagtcttttctgcatggtttggagagtcttgactaacaagatctatgaatttttggttggatgaatccatctcctgatgaaatgaagagatacaaactgatatctcttgttggtctgttntataggagcatatagaatgagagccaacacccatcaccaaatgctacttcaactgacacttgctctgctgctcacgcaccagcaccaactgctgtatattttatattcatttatacacagtgaactcaaaaattactgtattta

SEQ ID NO: 15342 - DNA, 425 bp, Oryza sativa
  unsure (1)..(425): unsure at all n locations
tgtgcctgcgcccattccattaagaggactcatttttttaaagttcatgtcaaaaggggcaaacttcatgttaagctcgtactcgccctcctttnttttaactgaatatgtgaaaattcattcaaaacacaaagtcatgttaaaatagcggcataatcacaaagtccttagcaaagtatgggcaaatatgcaagtgcacagatgtctttgacaccattaaatccttttaatggatgagagaaaacacaagcttccgttgaaaagaaatgagggcaaaaaaaccattggagttcaaaaaaaaaaaaggagggtaagaattgtgatggctactctgatgttcccccgttcgacccttatgtaatcctcattttaccttactgccaataaaaagcaccggacagtntctgtgtgcccagatctgttga

SEQ ID NO: 15343 - DNA, 454 bp, Oryza sativa
  unsure (1)..(454): unsure at all n locations
ggatcttaagtcacctgctgcatgcaagctnggagcgtatgttcaagttagtgaagtgagatctttatataggggcaggtatgacggttgcacgatgcgaattgtcagttntgccctccaaccgccatcatgagctcatccggaccgtccacgccaaaacgtggatcgaacggttgtggaagtggttcggccgaacccatgtctggcccaacatgccccaactttggcctatggctccttctctgtctcctctatccatttctgcgaatgaaggcccttggagtctttntgagtgtagttcctaacccactctttgtatgaataggatgtcacattcacttaagtctattgttggtccaactttgacagtttattacctgcatacaaatatacaccaacactcatggaatatgtcagaattaaccctatcactatgttggatgttttatttctt

SEQ ID NO: 15344 - DNA, 352 bp, Oryza sativa
taataaacaacaagtgcatgagctcatcatattcgtatatcatattatcacgcgagtattcttagaaaaatacaaaatatgatgctcgagattacagtggggtaatatacaccaattccatactttcatcaagtgaccaattcaaggaacttataaatcaagttggctcattttcttttcctagatcctagctagtcagtaatcttcaagccattgattgaaatattaaacttgtgtgctctaaatgaacatgaagcatattgcttcctatcttccaagtcagttacatatgaaagagatattacactatatgaaatattagcagtcacataggatatgaagtgattctatg

SEQ ID NO: 15345 - DNA, 442 bp, Oryza sativa
agcttaaagctattaatggctggtcttgctttattttacagaactccttgagctggtaaaggatctgttgccagaggggaacaatttacctcatacgacatatgaagcgaagcatgtattatgtccgttgggcctggaggtcataagaattcatgcatgtccaaacgactgcattgtgtattacaaggaatacgctgacttggatgtctgccctatctgtggtggatcaagatacaaacgagcaaagagtgaaggtgaaggaagtaagtcaaagaggggaggcccagcaaaggtggtgtggtatctcccaattgcggagtgcatgaagagaatgtttgcgaacaaggaacaagctaatctcgtgcgctggcatgccgaataacggaaagtcgatactatgctgatgcacccagcagattcattgcagtgaaggacaatcgat

SEQ ID NO: 15346 - DNA, 371 bp, Oryza sativa
tgacaccatcttcgaatctcgaaagcgctcactctatatcgctcacggagatgctatccaccaattgtcaccaagtttacacgcatcccgcggtgtcagaacatccatgacgccaatactgagacaacaattaacactaatctaaaccctcctgaccatccatgaaaagctagaggggaacagaaatccggaatcctacccatttcgcacaccgtacagcaccagaaacataaacgagccgccacatataaccccccgcccgccgcgccgtacagccgggcacgccggcggcggatcacgcgcacgcgcatgcataatccgccggagaagcgcggtggtagagaagatgggaggggatggtgtcggctgat

SEQ ID NO: 15347 - DNA, 471 bp, Oryza sativa
gggatccttagagtcacctgatgctgcaagcttagaacactggctgttcatttctttaacattattgggtcgtctgatgatgatgaactcgctgttctgataattggttcctgcagacatgctctatgaacataaaggatagctgaacaagtcttccaaaaacatcatccttggtatcagaatatctaatccagccagatagacacctcagtcaccaaaatccacagatcacctaatagaatagtttaaatgatgtgtgtgaaatgcctgcaaacataagccactaattcaataagcatgaatgggcaattttaagaaacataccatgataatccggatttcggaaagggcttgattttaatttcatggagagggctaatgttcgcaatcaatatcctcacaatgatgtgcacccttttatcgccctgagggtagacgatttcaatctctgtaagttgttcacaatgaaac

SEQ ID NO: 15348 - DNA, 482 bp, Oryza sativa
  unsure (1)..(482): unsure at all n locations
tagactggaggaacaatccattatggttacctaaatggtccgagcgtccaaagtgtgggtgcagagatcgctggcaggtggctacatcctttgctgaacaaacatttcgaaggagatattttgtctgccccaatgtagacaacgatttcgttgtatgtctaaccatttacaaaatccgctatgatttgcacaaaattactacccaaactgaataacattactatttttacagggcaatccaaggatgggtggatttactcgatggatcgacaatgtcactccatcatatcatggccagaagataacagagtcagaaacacaagtagagtatcaacgattgaaggaccacgagaatgcaatgcattctgaccgacctataatgtgccgataggttaccgcatgcttgattcgtctggatcgacaaatntgtaccgtgtatcgatggcacttcttatctatcttatcattacaatgtgtaatat

SEQ ID NO: 15349 - DNA, 469 bp, Oryza sativa
  unsure (1)..(469): unsure at all n locations
agctnttggatgctntagtgagtcaattcattatgtgtaaatttcacatgatttttctcagaacaatatttgagcatacattgtggattgtgcacatgcatgatacctatgcactgggtactgttttaatttcttaaaaaaatagaacctgtagcttatactgtttttcaaactatgcacatccatagttcatgttacgatgcanttttgtcgcanaaagtgtgataaaatgaaagctcttggttggtttagtgattcactccaatatgtgtgaatttcacatgaattttgncaggttatattatatttgagcatacattgtggtttttgctcatggtggagacctatgcattgagtaactgtgtagtttcttaataaaaaatggtgcctgcagcttatacttctgtcacctatactttcctgcaacgtatacttgttttcatactatgcacatncataattcatatta

SEQ ID NO: 15350 - DNA, 155 bp, Oryza sativa
cacttgcggacgcgctatggtggacagctattgtggcatccgaggcgggaaaggtcatccactgcgtgtgagtaacccatctatttaatatccgctccggtattgtgacccggcatgttttacctggggacctaattttacatgggggagggaat

SEQ ID NO: 15351 - DNA, 402 bp, Oryza sativa
  unsure (1)..(402): unsure at all n locations
agcttgccaggtactactgataggtaaatgtatgggttctaaaacaaatcagcagatataacccactagttattctttgcagcatgtccaggtgcgtccaactatgtaaggtcttgaaaagagtgattgttaagatttgctcagtgcagtatatattttatacacccagcatgctaatatttgtcaaaaatgtctgcatggaattcctatctatgttggggaacattcgtttgaatttcgcagcaaagttttcatagcctgaaaactacgcgggttcaattcgttaatttatcagattgttctccagaaagtctaattcattcattcatccatccattgcgggattgttctccagaaagtctaattcattcatccatgcattgcgatgcanataacgcgaac

SEQ ID NO: 15352 - DNA, 280 bp, Oryza sativa
  unsure (1)..(280): unsure at all n locations
tatctcttacgctccangaatggatctttcataacatctccaccggctcgcctcgaccgctgccgactggtgtttccgcctgcacggctggcctttatgccgccgttgttgggcgtctacatcttcaccgaccggctttgcttcgtcgccaccgactggtgtcctcgcctgcacggctggcctattatgccgccgttgttgggcgcctacgtcttcaccgaccggcttgccttcgtcgtcgccgactggtgtcctcgcctgcacggctggcctttatgcc

SEQ ID NO: 15353 - DNA, 425 bp, Oryza sativa
gtttattgaaatgaaggaagtaacatatgataaattttctgcttcctattggccgcattttaactctgaactgacaaagaaacttgatgcgtccactgtcttcactgaaataatttctcatataaagggtggatatcaagcgaacaaaccttttggtggcaaacttgaaaggcttgattatttaaagctttctgagaagagattttcgtctctgaacagtcagatgagagaaagggtatatgatatttttcttgattacgaaagtatgaaatgcacagccagggaatttgacttgtcagattttgttaacagtcttcacagaaaccttctttctgagggctacaatggtgatattgtggattgatttacatagatgaggtgcaggatcttacaatgacacagatagcactgctcaagtatgtctg

SEQ ID NO: 15354 - DNA, 432 bp, Oryza sativa
  unsure (1)..(432): unsure at all n locations
agacatgagacgcagaaatccttaggacgctaatagattntcttggtagtgctgtgatagntatgtcaacgcgctttggatatggaacttatatttattcgtatcaaaggataacggatgttacgtcagcttgttctgccacatcaaatgtatgtttatgtagtacatctgttatcactgagtagttctcacttatcgcgtctctttattaatcagaagactgttttttcccaccctgtctctttcacggatcttagtcatggtggatgccaaattcagagtcgaacatcaattttgggtttctttttctcaggtgtcatgtaattgcacgaacacagatgtggctttgcatactaatgaacctggcaattgcttggttagcatttcagcgttcctcaactactgggtcatatatgcctattacattcaatc

SEQ ID NO: 15355 - DNA, 417 bp, Oryza sativa
gtagacctcgagtacaacaagcttcttgcctgtgtctttcttcagctgattaacaaagtactgaataaggcttcttatctccaccgaatgatgcttcttgcacctgttaaaatgtattggttcaaaaaagagttcatcagcagtgatggcatgcttgcacaacaataaaaacataataatcctattactgagaaaggaaagacataatgtgtgaaaatgcagaatgtatagttcaggagttaatacatacaggtgcccccagaatgatgcatgacactgaagccaatcagatagattaagaccatcatctttaagtttctcacgggcaccttgagccaagcgttcaattacaatatattgcatgatgtcaaactccagctgcaacaaagcatacaagaaaatgctatatacagaacc

SEQ ID NO: 15356 - DNA, 436 bp, Oryza sativa
  unsure (1)..(436): unsure at all n locations
atacactcaaaggacgcatatttgtttagttngtttcttanagcattcaatttattcatataattaagtatataatcagtagcagtaatctgcctaataatccaaatcaaacatagctcaagtccaaactctacagctttgagttttctctacgctggagcaataccaaacatgtcaatagatagataaagatatgttcgattgatgaataacattgccaaacctcatattacataaggtgaagctctatgcaaagtgttgcaaaaaattgtgtctttgaaatatgccgatgaaaaatatatctacccataacaatggcatcaactaaacaactgcaaaacaaccacctaatgttgggatttggcaagttgaatgcatcatccaaccataacatatgtctccctccgaaaagaaataatacttacatcatactaac

SEQ ID NO: 15357 - DNA, 456 bp, Oryza sativa
tcaaaattacttcaaaaaagaagggaggtcatgccgaaatttctattgaatttattttggtgattacatacaaatcggatgtgcctaaaaagtttgcaacttcatcctccaatgtttttctgtgtcatactacatttgcacctatgttttgcacacttttttttgtctccaaaatttagttgtaagttgatgagagagaaaatgtgtgtggggaagaaagaatatatagaaatttagttcatttgctaaacaaggttttataaaatagttgagaaagaaaactctagtgaaagttaatcttatataatagataacaaactataatgaaaattaaaagaagttaaacacattataattagtttataaacttacaaatagtgtgtaagaattattcggtgtaatatttatgattcttgatgaataagatatcttatattattgatgactgcattattg

SEQ ID NO: 15358 - DNA, 345 bp, Oryza sativa
aatttgtaattgtgaatgactggtttcaaaagaaagttataaaatcaacatactaaatttattttattgcagcaagattaaataaaacaatattgtaaaacttttgctgataaatgagccattagtacagtaatagatgtacagtactaataacactgtaataaactgtcgaatgagaaccattaaaagagaatttaaaaaaaaatgcatgtgccattagtttggtttaattaaaagagaaaaggaagagaacagttctacttttccaatatttttcagagggcttccatgggtaaccatttggcataacctatggtcaaagaggctctgataccaacttgtcac

SEQ ID NO: 15359 - DNA, 455 bp, Oryza sativa
tatgtttatataactctatagtactatcgattctggttctctggtgatcatcttatctcttgacatagcatgtgcattcttggttaagatctaatgcgtgcattatctttctattaatagagattctgacagtctctcactactggagaaccgatctttcatcgtggtacctaaaatcacaaatatcttagctagattaagaaccggtactaaagatgctttattaccggttctgaaaatccaagtccctataaacactatccatgtccctataaacacttttagtaacactaaccagtcctaaaaatacatctttagtaccggtccaagtccctagataatattgtaaatcctggttggtattaccaaccagtactaaagatgtctgccgggctagttcaataagaaagtatctctgttcaagtcaaacgtatgtataaggtgggatgataatg

SEQ ID NO: 15360 - DNA, 502 bp, Oryza sativa
  unsure (1)..(502): unsure at all n locations
gatcttaagtcacctgcggcatgcaagcnttgcacatatggaatacttagatatgttcatgatgcaagatgtttaaaatattccataaaattattatcaagaatattttaattttactattggttcttatctacctgaaattgtcactgattttctatccaaaaaaataaatgcactcactgtcactgggcttgaaatatgcacattattgaacaaggtaatatgatgtgtcggatacttttacacttcatactcttcgtcttgtgttttcccaattataagaaattggcgttacctagaactcgagccatccaatgctaagaaaggtttaaactgaagtttaccgttttgtgttaaactcttcaccgtaaatgtaaactatttccattatctgaaaaagaagtgaaactcttcatccccttttacataactgaagtatgacatctgttcttgtctgtatatttacacaatatttttgcatctcttgaattatggcataatc

SEQ ID NO: 15361 - DNA, 483 bp, Oryza sativa
tcttcgctgcacctacgtgcccgcgtgccctctgctgtccaactgatggatgactaccactagcctcctgctcctggttcccctccacatgcctttccacgtgcccctgctggttcccctccgcatccctctccacagtttcttcctcgttcaaataccggtttggatcctcgttaccctcttcttcattccagtactggctgcttacctccgcgattgtatcgtacaatatctgttgctcatcgcggtcagacatctgttgatacaagaaacatctgctaagtcacgagacatttatgttttaacaatctaagtcatgtatgctaagggttaatgacgtacattataaccctacacaaccttacgtgctatatctaattacaactcgtgatataatctatgtctaagcgacgtatattattacaacctatctatttaactattgtgtactacgtcgattacacataaataatcttatattaa

SEQ ID NO: 15362 - DNA, 444 bp, Oryza sativa
  unsure (1)..(444): unsure at all n locations
ttacatcattatatggtggtttcattcatatcttacttttggaactcgataatatctgataaatatctgcgactcttgtgtacctacgacgtgttgtcatatctaaaaacctttatggatcatcaaattgtccaaactactaaagtcgcttttagttagattaaatcaacatcaagagaaaaaaaatatatggattttgttgggttagttgcaattagctcttcgttatacacatctagaccctttatatgaatcttggtgattaaagacaacatagattatttagaccaatcatnatttctaagtgtgcaatgagaagtatgccctcagtaggtgaatatgttaccatgaattgtccataaagagaattataatgtgttcttcgatgaacaaagataaaacaatgacttaattgatactatttggccaacaatgagtgataat

SEQ ID NO: 15363 - DNA, 443 bp, Oryza sativa
cttctccctgactttttcttttttgtcagaaagaagtactatactactactccagcttaacactttcagataagcatcattagcactttccagcatgcataattaccttgttattaactgataacaagctaacgataccggattactggtactaccaattattggatgcttttcaaaaaagagttgttggtatgggccaagccatatgatgcaaatgttgttgtacacttgtactggcattacatacagtactctacatgtacaaacctgtctctttctttataaagtcaatggacgaatacatactgttgttctttgtgcctctaccccctgtgccggctatatctcttgtttattctactttgtttgctggtacctcaacagatgcccacatgcatatcaaaaataattgggagcccatttatgatgttccatgccttgca

SEQ ID NO: 15364 - DNA, 408 bp, Oryza sativa
  unsure (1)..(408): unsure at all n locations
gctggtggagcattctaagagaatgtgattcaggcttgttgcacgcttgatgcatcaacctctaaacacagaggcatctttagtattcccaataattgtgcatatgtcaaaagtcagatcctagttagattagtatacacaattcctattagacagattttctgcaataaagcacaatatcatgtagatatatacatatgatatgtacaacactacaatctttgcaagccagcaggtgcctcatgtatcacatctgcgtgcaagtcagtgcaatgcctgatgcanatataatctataacgacagaactcataanagtatttaaagtggcaatgcatcaacacatataagctatgaacaataggcgagagcaatatataatatagtacctgaagcttcgcaaatctttg

SEQ ID NO: 15365 - DNA, 359 bp, Oryza sativa
  unsure (1)..(359): unsure at all n locations
tactctacttggtcgcgacccccctgtagtgagtgccgccctattagtcgagcgcgaagaaagcggaccggatgcccctttaactctcgatggccctgtgcccgaagcccccagtcccatgatgaccccgatgcccncgtgggatgaggggaggctttggcgagtggtcccgatgcctatgatcccaacatgactcgagacccccccccgaggcccctgagcaagggcgccccatatcatttggccctaacaacactgaccgtgcccgccgaaaggtgcagcggcccgtctactttgtcagcgatgcactccgagatgcgaaaacccgatacccacaggcccagaatatgacttatgca

SEQ ID NO: 15366 - DNA, 335 bp, Oryza sativa
  unsure (1)..(335): unsure at all n locations
ntgccgatgatggtccgtgcagcagcatgattaccacttataccataatgtatatctgtcaacaattgtctcccttcctccaaagatacacagcgctgcagtattcctgatggacttttcttgtacagttcagcttcgtgaataatgtaaagtctgctgcgcctggaaatacgctcggcttcatttatgtcttgaaggaattcttgtttggtcaaaaattttatgagaggttctctctagtcggcttcaagcatgcttatgccttgagtatacatggcttcaactgcttcttttctgggcacagctggttcataaagatgctcaacgaacacatc

SEQ ID NO: 15367 - DNA, 474 bp, Oryza sativa
  unsure (1)..(474): unsure at all n locations
agctttgctccaataaagaccacatgtatttgtcgattgctccccaccacttgtctaatgccatatgcgtgaacgcggcaaggggaatgtcggngagttggcgccggagccaaaaaggggcaaggctgcgacgttgatgccggtgagcaaagcggggaatgtcgtgagggcgctagcccaatttgagctatgcatgccattggtggaggacaatgtgttaaccgtgatgggtattgcttgccgagagctacataagcaatacatggagctaagcaatgccaagcggaaaatgagggagtcatccatagttggacatcacgaccaccagccgttcctatcgtcgcctgcctatataactataggcgttgatgacctcttcgaccttttcaggatacagaagttggacactggtcttctaaaatgctactccttgtaagtgcataccttctatactcgtgatatgattggactata

SEQ ID NO: 15368 - DNA, 450 bp, Oryza sativa
tcaaagatggaccttaacattaaggtgtgccataagataataacatatgatccttttattgattcacagttcacaccagttcattgggtgatgaacccgatgggtacctaaattcgatgtcacaacctttaactgttgtagagttggtactaacttatgtcacttgcattatgccccacccttactgtcatcgttgcacatacattgagcttgcccttatagaataaactatgtggccatccaccataatggtttggcaagttactactacccgttctaaaataagcttatttttcatctaacccacacattctagtataaaagtggaaaaataatactcttcgctttatcaattcccctcactttaaccaattccaatgcatgtgtcccatacttttcacaaaccccaatgtaatgatttctaaaaaatgaacttattttgagataaat

SEQ ID NO: 15369 - DNA, 365 bp, Oryza sativa
tgatctcgatagatcaaattgttagcgacgatgtattgatctattcaagggacgtactctggtcgggtcatatctcccatggccaaagtcgtttaagtatcctcgtcgaaaaaaatcctcggcgacgaagcttaagatgacgatgatcccgatccatcggagaacgcacttcggttgggtcggatccccctatagccaaattgtttgttgtcggacaatccgtcttcttgaacccatctcgtcgaaaccttgaagcatcaaaatcccctactaggcgcaccattgtcgatgttttagatcacgactatggtgtttgcatagtatggagatcattggtaccagggtatatgcgagattgagataaa

SEQ ID NO: 15370 - DNA, 458 bp, Oryza sativa
  unsure (1)..(458): unsure at all n locations
ggatcttaagtcacgcggctgcagcttggcctttggtnntaatttttgactgtggtctcggagaatagaccagagttattctcttttgaagacacattttccctgaccgtgatgcacacggttaatttggaccgtgtcttctccgatcattccttggctagtcttcgttgtctcaggattgctttggaccgtacattgaatcttacttaacctgcgcaacactgctgtgacatatacagacaggtaagttgatcgcttatgaggaaatccagaaaagcgacatgtgtgttcagcaatcagcacacaataatataaagttataaacatatgttgatatatgtcatttgaccacatactaaccctgttgtgatgatatctctctgtctagacagtgtatatattgtcttcagcctccatccagacatattcagtctcacagacgaagtgatggagataga

SEQ ID NO: 15371 - DNA, 397 bp, Oryza sativa
  unsure (1)..(397): unsure at all n locations
gttgtgtaaccagctgctcagcacaagatgttctttnctgtgctgtaagataaattaaagtatcatggctttgcccgtgcacttgctactacatgctgtgcctgcttaacattatggttgagtttactctttcttcatagaaatcgaaatgtgctgcctgcctgtcaagctcaccaaccgttcaatggaccactgaacaaacatgcttacaaaaatcattatcttaagctgaaacaggtaatagtactgtactaatcttctgcagaaattgcagtagatcagtgccttaatgaacatcaggagcatcgtgagatccgtactgttcagatgcccatatgacggtgaccgtatgcacggccacctatcctgtcccaatatcgagttcanagtacgggag

SEQ ID NO: 15372 - DNA, 432 bp, Oryza sativa
  unsure (1)..(432): unsure at all n locations
agcttttgctggggatattatatttggtntaatatctttatataaagtagtatcggagtattagccgatacatgctagatctatctgatcggctatgctataaacatatataatcatgttattaatatatatttcgatctaagtgatttatactgtctcggcatggtgaccgatctatcccaatcacttgatttaagtatatattaatataaaaactatatatcgttaatatctacagccgatcgaatagatttagctccttaatatctatttataaccgccgatcgattcatatatgacatcggctcaaagataaatgatatgtcatcagcaccttaccgatcgactatcatttatagaattaaccacgaattctttgtctctatttcttgttgattacaggatcatatcaactggcacgctcatacattc

SEQ ID NO: 15373 - DNA, 402 bp, Oryza sativa
  unsure (1)..(402): unsure at all n locations
ttggccaaaaacacttcgaccattatgttaatatatcttcctaaaatggtgagaaaatatggtattagagaaatttaaatttggtccaccttgcaagataattcttgaacaaataataagtacatgcaaacatattgttgaaaaaaaataagcaaaacttatcccatatttgtaaatatgtgaattgcaaaaaaattaatactgaaaaatattggttgaactntaaacgttttanaaaaacaaaatttaaattgtgaaataatattaaccgaatttattttaataacaaatcttaaaaataaaaataataagattaatgaatgtcgtaaattaaagaaccgtgaaaatagaatttaatgaatttatttgaacaaccgtcagtaaatggttggttgattttac

SEQ ID NO: 15374 - DNA, 427 bp, Oryza sativa
taacaacggcttaacatcgactctttcgtttataatttgaaacttgttgcatgaggattgattttagatatgataagatagattcaaataaactgttttggtgcattaatgtcaaaaccttctgtcgtcttatctattgtaagagatagtatctgaatagagcctgtatcagactctatctggtgattggtactattatttggggcatgccatttgtcaagtaatccctgtgaaatttcctccctcgcccaactctagtaccatatcccctacaatttgtcctgttatatcattactcaccagttcataacaactactatcttcttatgggagccaggttctgaatgctcacacttccaaagaacaatttaaggtattcctgtagatgctgatatgcatctaatattgaattgtgggatgattatga

SEQ ID NO: 15375 - DNA, 450 bp, Oryza sativa
  unsure (1)..(450): unsure at all n locations
agcttaaaagtaaattacatatattatatagatttatcttataacataaaagaaagtaactctaattaatgtcttttttcattgaacaaattatcatatatataatttatttttagatttgattaaaatacttcctatatattcataatgctctgaggtgattgcttttattattagttttagttaattccataatttgcgctgattaatttaatttctagatagagtaatgtttttatctctataccggatttacttcaaatgacatgccaaagttacattcgttttgttctaagttacttctataatatatgtaaattattnttaggctttactgaatttacttttatatatctaagaagtaacttagtgatatctaatagtaatttagacatatcataaaagtaattgtgattttttaaaatatatgattgaaatcttgtgaagatt

SEQ ID NO: 15376 - DNA, 458 bp, Oryza sativa
  unsure (1)..(458): unsure at all n locations
ctcttacaagttcttaccaaagcaagtggaatggtgacatacaccgactcaaccaagcaccccaccggagtttggatgtatcgatgccttggcaaacacatgctgtacggctgtaatcaaatctgtagagctctgggtaggcttaaatatgtagcaaaggaatagaaaatgctcaatctagagaataaaaagttgaatgatcattcaaagtcaagtaccgtgcttgtcctangctagaatgtactagagacgcgagcctattacacatacgaacgacatgatagcacaactcaagcacaactctgatacatgaaaatggtctaaaaatacaactgattntctttntttttattacttctttgattctttcttttatttcttttctttttctttatcttttntttggtgcggactttntattgntnttgatgcacctttctgcttttctcactttttta

SEQ ID NO: 15377 - DNA, 351 bp, Oryza sativa
agcttctcgccgcgcgcgcggtgcggtccatctagcttcttgaacgaacgcgctaagttcatctaaggtcccttaatttgtcgacgaatccgattttcgttcttcaaccaaaatataccattacaactggtccctcaactgtcaaaaccagtgcatatgatgtccctcaacggtttggatgggggtatttggatgatgtgggattagacatggcacttacgtggcaatgggagctgtaaaaataataaatctcgtgggacccacatatcagtttcacccaaaaattatatttaaaaaggtggggcccacgtgggccccacctgtcatgtctcagactgctcttttttctca

SEQ ID NO: 15378 - DNA, 455 bp, Oryza sativa
  unsure (1)..(455): unsure at all n locations
cgctgaagcatggaaaggtatactggtatatctccctatttgattctactgcatntttttttgcttggttctgttctttcaacaagttaattctggtgattattgtttgcccccaattgcaggaagcagtgaagcatagagatatggcactgcatgctgtgcttgatggattgctagaggcatctaccactgagaaattgataaaatgcctgacgtgagtgatgtttatagcttatgtagaattggcgagaatgattgggtgaaaatcttacatgaggattgagaaaattgggaataatacagtctgttagaacagtaaatctgattgatatctgatttcacttaattatagaattgtatgatcaagtttctatacttgtaaataacattgcaccatgtaattgatagttcattttcacctctctgtgcagtacttactcttgactacaatctga

SEQ ID NO: 15379 - DNA, 418 bp, Oryza sativa
agcttcggctccactcacacagcagctcaactgttgtttaagctattcatcttctccttctggatcatttttcttcaactgagacttgattgattattgcaaggtgaatacatggaatactccgcaagccacacaacaaatatgcaagtgcacacggattccaaatgatggcataatatatgctcatttgcaaaaacagcatttatcaaacatttaagagtagtaaataagttgagtaattaatcatcaatattaatcaacactgaataacacacccatgctgtatgcccaaccaaacctgtacatacaaccccggtcgtacagatcaaacctctataccatgaatttaccattccaaaccaggagtcaaattaattatcacattattatcattaatgagtagtgtgggactaatcac

SEQ ID NO: 15380 - DNA, 417 bp, Oryza sativa
tgactctaaccaagaagctccaatccttgatagaaagtttattcatatagccacacaaaggaatactgtgcagcaatgttcatacgtaaacatttctcctctttatacaccaccatgatgttttattgaaatgacaaaattagcatttgcagctacacacagttttgttggtttgggcacatagattggagattcaacaacataaacaggaataaagatcgatatgaatatggaatgttcaggatgatatacatcacatttatcacattggtgccggatcagtgattcttactaactccttgatcatcccaatagccatatgtataaaacaaatgcagtttctagtttcagacaattaaaaaattatgataaattagctctgagtatatggctacatatatctacttttgcttatgc

SEQ ID NO: 15381 - DNA, 436 bp, Oryza sativa
gcaagcttcggagagttcaggtatagtcttaacttttccttttctcttttctaagacttccttttcgggaatataatattcttctttttatacaagcgtagtactctattccaattatagaatatgagtgctatgcttagtctatttatatttagtataatctcattgggtaaaccttctgggatctgcatagatgccggaataatggttgtttaccgggccatacgtcatcccaggctattccgatggctatggttccggaacacatatgctctgcaccgattgcaagggctgcagagtaataagtaatagcttaagcatgggggttatgctaagacttatcggtattttggagtatattcgccgggagaacaacggggcggtgatggtgacagctcaatatgggaatctttcacgcagtttatattcctacata

SEQ ID NO: 15382 - DNA, 148 bp, Oryza sativa
tggtatacagttgacatgtactacctggaacacgcatccggtacaaagaatcatcgccctcacatgccggctatagcgctacctgccatctgcgagaacaatcaacccgcatgagcttcgatatctgaaagctgcgctctcccccagc

SEQ ID NO: 15383 - DNA, 434 bp, Oryza sativa
agcttactatctcctactgttcatgccgaatctatgaggaaaatactgtgtattgatattgagaagaataaagaggagaggaaacagaaagatcgggatgagaaggtactatgccataagtttttattgttgctacatttttgttcatggtacaagtagaatcattttacccttcctctcacctttttttccaggataagcatgaaataacagaagaatattgaatgaactgcatccaatgtgtcatggggccaaaaagaactgttgtcacatttcctgataagatgggccgtcctatcatatttgactccaagcctatcatgttacatatagtaccccatctgtgcatcttttaagtttgtccaagtttacgtcaagcatagaatccatgtattgatccattttgaagttatgcatgtacattcaactccatt

SEQ ID NO: 15384 - DNA, 447 bp, Oryza sativa
  unsure (1)..(447): unsure at all n locations
agcttgcatatcatgatagtatgaatttacttttctggtatctngctttaaacattgcagtttgttgaacaaaatgtcagcataatacatgggaacataaacatctctgaaatatcgtttcatgtctttccaagattgcggtattttgttatgcctacaaagatgtttccaatcattataagcatgtttaattaaaacactagatgcacacataaccttttgtttctccgacaagacatgattttgaaattcactatcaaccgctagctcccaattaatgtaagcacgaggatcataatttccctcgaaataaggcagtgcagatttgatcttacctagaacatcatcacttacctcataatggtcatgttgatccctcctcatgtctcgacgaatatgtcgatgttgagcacagctatccccaattatcttgcgtatccctgcaat

SEQ ID NO: 15385 - DNA, 370 bp, Oryza sativa
gcagtcggcttagaggaagccttgttccgcaccaaaacgaaagaatgtgtggagggaaaagccatagacgcccgctccatcactttcagagacaggtggaaaatccgcgaactaaattggaaggaggtacagtcttgctcgtcggactttaaatgacgccaccttcgccaacaggtaaattgctatgtatctgcatttttgctttcaataatttgaatttttgcatcatcacatgtttgaatttcaaaattgcatttagcatttttgaattgtgaggaaattcttcaaatgaattatttagagcaaaccaaaataaaattgtcaacgaaaattcactgtgccacgaccacactgaccgttggaatccaac

SEQ ID NO: 15386 - DNA, 461 bp, Oryza sativa
  unsure (1)..(461): unsure at all n locations
agcttaanagatcttgaatattccatgtactctcttatgttaatactataagtcaagtcgaaacctatcaggttccatagtgaaatatatgctcactactttacttattttgctataacagataaaaaggggcattgtttatgctgttaatttgctatggacacagaagtttcttgtcatcaaagaaacttttgataatatttacagatatacatgttccatttcaagtcactataagaaatgaattttaccaaagattnttgccaacaattaaaggtaaaaggtaaaaaggttgtgcaccttcaacaaagagcattcttgattagtctttattattctccaacatatcaatgttcacataagtagctccatgtatgaccttcggagaaaacagagctcagttacatacaaggatgttatgctacatactagtgcacttaatattcacaatacttacttca

SEQ ID NO: 15387 - DNA, 395 bp, Oryza sativa
tctccaccatctcgctgctagccaagttgttgcagcttcctccatcaatgatcatgcggcaacaacgctctttgacgacacactttgtttggaacaacgtgtgtcgctgattttgctccgccttctccatttgtgcgctaatgacatgctgcataatgaggctctcatagtgatccgcatatgcagccccaatgtgctcttccggtggctcattatctgcatggtcagccgcaagcaaagcaagtgtatcatcatcgaaatcaatagcagaggagtactcaccactcgttttgactaccaaaactcgcttgctatggcagtcacgctgcacatgcccaaagcccttgcaacggtggcactgaacatctctcattctgcctgtggatgccattgaa

SEQ ID NO: 15388 - DNA, 446 bp, Oryza sativa
  unsure (1)..(446): unsure at all n locations
ttatagtcacctgctgcatgcaagctgaggcttgacttgacttgacttctgttcatacatgangcaggcggngcggcctcttggtgtttcaactaaaagaatnggagaggcacggaggataatattgataaaccagtttccaaataaatgccagaggaagagaggagacatttcacaactatgtgtttcataaaacttgtccttatgatatgaccatttggctcaacctacagtcaagttggctctaataccactttgtaacgcctagataattatcccaaatttccagactattttgtgtattaaatccctgtccatgaccaaccatggtacataaacgataagtaataaacagtctccaacgtatatatatcgtaaatacttacagaagaggcactgtatcctcaccccgtaagagaacgacagctgcggaataaggcgatcct

SEQ ID NO: 15389 - DNA, 433 bp, Oryza sativa
tgcctccatatacctccactacagaatcgcgactctatatccgactgaccacaagtgaggatggtacttcttcttggcggcattttctttgtatctttccatcatcgactgccctcgaagacctgtcttgtaagcaacaaactcgacctactgatcccttaacttcaggaatacgtcaaagttcggagtctgccccttcaagacgtattaccggtacagatctcccttgaaagtctggaactgctctgccattttcttaagagtacactgtcacactatgttctccgtacccgcaaggagcgtgaacgtctcgagcattgtggcacacagcatctctttctccgatttccggacaaaactgcaatatcgccacgtgaccttgtctgcgcaatacaacctgctgatagcacgctatcctcacaaccaacacgtg

SEQ ID NO: 15390 - DNA, 455 bp, Oryza sativa
  unsure (1)..(455): unsure at all n locations
agcttcacgaatcttcgagataacctcgattctacgaaatctcgtaaccgcaactatacgctatctatttatatccttcacatgacccaatatgaagatcctatttatactaaataatagcgccattagatagatctcaattttatggaattactggatgtggaacgaaatcattcggagttactgatcaagagatatgaatnttggcacgtcaattggttttctggacaaggaaatgatttatcggaatttttctggaatacgagaaatggtttatggaattgatagaataatattcccaagaatattattgacatttcaatggcatttgggaccaagggaatgaattattggaatccctggattaagaggaatgatctatggaattcggaataagaattgattatggaacaagggaaaaatgacttattgagcgttctggattaaagaaatga

SEQ ID NO: 15391 - DNA, 371 bp, Oryza sativa
tgctctcttcctggccatatcgttttgcaagatctattataattatattgtgcaatgaggggattactataagtttacaatgtcttttttgaccattcattctaatgaacgtactactgcaactgcatcaacaatccctctctaatataatctatgtttagccctgtttattcatcctattcatacacaatatgtgccgggttccctgagtataccgatcttacccatggatacccgcggtttatacggtttaatttggtttcaacccgttatcggagttgaacgcgcgcgcgagggtttctttcatcgatagttaatatcggccatcatgctcatcaatcaacatcacactatcaagcccttatttcatt

SEQ ID NO: 15392 - DNA, 456 bp, Oryza sativa
agacttgagtccgtccggactatctatcgcctatcacccaaagctttcgctttccttatgcccattcactctgcttcatattctattgtgttgttggttgtgtcgaactacagtcttgctgtgtaacgaattggaacgccccctgtcgaagtcacgattgcggcgatgcccgtccctttgtgagaccactaaccgtcggagtgcatgacccatggttgttcgaccggttcatgctctgggacagtcagcgaggacttgtgacttgatcgtggtgcgggcgacaaagtgtatgccgaaaggtgacagctcatcagtccatttccttatgcgccccgtagtttcttttcctcgatgatactggcgaaggtaccacgatttgtgggcttggaaatagtgtttgagctttgatgaatccatcaccagggtgtaagcaagtttttccatttcaatgtatct

SEQ ID NO: 15393 - DNA, 260 bp, Oryza sativa
tgcactcacccttggatgtggcttgaatgtaacttataaccttcttcttagagacactggtccttcttttatacatacatatggggaggccacctcgcacgagttggtacgattaatctaacaatatggtacaatatgaatgttccatttccatatgaatctaatcccactcccagaaagcaaccgtaaatatcaaagagcatggttgataaggatattgaacatagttcacaggaaacatagatcttgctgatagaaac

SEQ ID NO: 15394 - DNA, 476 bp, Oryza sativa
atcctcttagtcacctgctgcatgcaagcttcggcttatacatctgcttgtacattcaccatccgccttcaatacacattcctgcacggtttgcttgcgatatataccacgcctgctcctatcaacacacattatttcataccgatgcacttgtgtgccttgagcaacaactcgatgtctccgtgcctttttgattttatcttccatgtactttgtcactacgttgccaaacactatgttgttatcggccatggacggacttattttcttgtatcgatccctaaagtacgctggcgtgccgtgaaggatgaattcaacaatatcaaccaatggaagtacccgaactcctcgcattacccagttgtacacctctgccaaatttggtgtcattatgccataccgagatccatcggtgtcgaacaatagagaccacttctccttaggctcattctcaatccactgagtgaaattctgat

SEQ ID NO: 15395 - DNA, 400 bp, Oryza sativa
tcacgtgtgatgcataccacatgactgagccacatcctgaatgttaaatgtgcatctggctgtgttgctgttatcctcttactgacctaaatctaataccttctgatgccaatctgatcatgaataaatatcaggaagagggattattctttgtatagaaaaggcactggctgattcacgagtagcaagggaagaaatcaactatgtcaatgctcacgcaacgtctacacagtcaggtgatttgaaggagtatgaagctattgtccgctgctttggccagaaccctcaagtatacgtgctatcataatggttgtagtgaatttatgaattaaaccaagtaaaaaaaatggtgtgcgtgcagctaatggtgaactcaacaaaatcaatgactggacatcta

SEQ ID NO: 15396 - DNA, 400 bp, Oryza sativa
  unsure (1)..(400): unsure at all n locations
atatgatagatgagaggggatccactgatgcatggctcttacagctcatcaaaatctttataacctgcgagtaagtttattgctggtttaatacactaactatgtggtgttcttttctcctaaagataaaaatgaaaaataagatttagtgttttacgtaaaacgaagnggtattaacatatgattaaatgaattttaattactacaaacctaaaaaatagattaatatgatattttagagcaactttcatatagaaaggtttcgcacgaaacgcaccatttagtattttgtaaaacgtgccacgaatatccaaaatgttatccacgtcttatagtcttattatatatataggaaaacagataatcgagatcattggtattattatattccagatgtgtg

SEQ ID NO: 15397 - DNA, 419 bp, Oryza sativa
tggcttagatagacttagtgtctcagagtgcacgatgcatgggtacattcctcaacaactcacaattttagtagcaagtgatttctttttcatttgatatgccaaatggtttcatctctttcaccgatactgcttgttttgatccttgctcttgccaaaagatttactattttgcattaattagtcggtgctaaaatattttcagataccggcctgccagcattatgtttatctagtagtagcgaaaggcagcttcttctgcagtatatcttccataactcgaatatttacttgtcactcgcaagctggtgtggcgcttctttgtggctgatgtaccatactcttatgtcttaccataccgtctgtcatggactcaaggaatcatggtaaagctctatgcgtctgcgtgctgtaacaac

SEQ ID NO: 15398 - DNA, 450 bp, Oryza sativa
  unsure (1)..(450): unsure at all n locations
agcttcccgctcaccgactagccctgctttcgtctgatctgctgctccttgatcgagttccacagcttcgtgatggcgtccctctgctgcgtcgtgaaccggttcatgttgtcgtaggcgtgcttcgcaaagatgtcaatggcggtctgtgtcctgataacataaaaaaggagaattagaacacaaaattgttgaatatgtgttgataacataaaaaaaaggagaatttagaataggaaattgtagtgtatgtgccgctaacagcataaccacatgatgttctatctcaagagaactcaccacggaatcctatagcgccgagcagctatttctagacatttcaggagaggcttctcgtgtgactncagaaatctctttgattcatcctcatctgctttcctatntagagcggcgaccgtcttctctcgagccttntcagacttctttgac

SEQ ID NO: 15399 - DNA, 359 bp, Oryza sativa
  unsure (1)..(359): unsure at all n locations
gcaagcttttggacgatcggcctcctgaatttttatgaagatgtcatacttttggggcgtcctcacggcagaaaccaatgatatgaccacaccccccggccgcggcaggggcgggcaatcagaatgagatcgcgagcggtcgctccggaaagcgacggcacggccacctcattccttttgctttgccgagttttctatgcctaggccgngagcattgccgtgccgcggtgcatgcggtttgaataatggcacaacggtgcgctcgcgctcgcgcaagctgcttggtccgtcactgaccaagccgcgcgccagctgcgtgcaatccggccgtcgcggtcgtcgcggcttggcgttagtcg

SEQ ID NO: 15400 - DNA, 454 bp, Oryza sativa
  unsure (1)..(454): unsure at all n locations
cagcttcacgtttgtaagttagttctcagtttattattattgactcgggagactgtttaatttattccatcggatatgtggttataaagaggagatataacgtgtaactgcatttggatttggatttgattgtatcttaatccatcacgccgtgctgttccgttaacttctggatgagataatgggagacccaatttggaaaaaagtctctttaattaatgtggcggttgagatgggagggacttaacataattctctaagcgagggactatatattttttttcgtgagagggactaaaaaatactccctcattcactaaatgtttgacaccgttaaattttttaaacatgtttggccgttcgttgtattcanaaactttcgtgatatgtgtacaactatatgtatacataaaagtaatttaacaatacatcaatgtagaaaagaattacaata

SEQ ID NO: 15401 - DNA, 432 bp, Oryza sativa
  unsure (1)..(432): unsure at all n locations
agcttgggcagtacgagagctcatcgtggtttattaaagctctaaggtttgtcagcttcaagataagacaatgttgctataagccagtgtttcatttcatgctctactgcgtgcggtgcatgatgcgatggccaaccatttgctgcccatgctatgtggtgtgctcttcgctctgcaactgggtgttcaaattgcagcctagttggcagttgctcccaggcccttagtgggtgatatactccgccctctacaaggtgtttggcctgcagtacattcaacaggtgctgacagacatgttgggcattagcactgcaagctccattcagctgcccattgaagtgaagagtaccgtgattgatgccctcgttgggatcctcatgcccaggcccaaccatgacagtgtcgtgtngtccagtggatcaacatcgctag

SEQ ID NO: 15402 - DNA, 440 bp, Oryza sativa
  unsure (1)..(440): unsure at all n locations
ttgatactaagctagcatcttagctntgcctcactgagaagaacctcttttgttctgcccactgcatacgctcagntcctttgcatatgaaagggggatgttgcagaccctgcacaaagaactacagtcaatcagtggcaaaagaaacaactatacaaaatatgttgattatggtaaaaaaatatttagtgaatatttagacagatagaagagttagagctggggtataaatatcatttcccaccaatcccaaacctgttatccaaacatgcgttagattattagattntaaagtttaaactaggaatcagacaaggtgaacattggtctgtaccaagttcggagaagttaacatgttctaaaagttagtagctgatgctggacatgtcaccctgcctagaagtaattatgtggcctcacaagtagaggcatatgtgctt

SEQ ID NO: 15403 - DNA, 454 bp, Oryza sativa
  unsure (1)..(454): unsure at all n locations
agcttagttctttgccttataagcattgcaagttctgcctcatgccactagctataattttccactatacttgttttatgatgtcctcattgtgctagcttgcattttctctcaatgacaatgccagatttatacgtaaagctgcaggataaccacatataaggaaactctgaaatctgaacacttgataatctacacagacaaaccacagatatttcaggtgtgttgaagaaagaactgcttgaaaatcacaaattaagttaatttacgagattgtttgaaatcagaaaatgatagaggaatcggccttaaaggtatcactacgacgtcatgtatctaggtttnccaagaccagaatacttcanaatggaaactgctaaactacaaatatatgatactaagtaaccatggtccaacaacagagtaatgctgctccatgaaacagcgttagaat

SEQ ID NO: 15404 - DNA, 439 bp, Oryza sativa
  unsure (1)..(439): unsure at all n locations
tttctaatatgtaccaaatagtagattatcatctcagttccaatgtattccacgaaagcctaatggaaatccaccattttctaggtaatatcacgggcactgttttccattctctatgtaaaagcagagtatattattaggttcaacctgccaccagaaagaagagagataggtcagcacaacgcanaaatatgcaacgccctcatagaacttgcatcacagacagtaccttcttcgctgaaggcaaaaacagccccaagcatgtcatcgntatccccatcttcctcgggcttctctctctcgcagtggctgctgctgctgtcagcatcagtaacagcttcagttaactcacggcagtcatcgagttctgattatttacaatagccctcttggaatactgggaaaactcactgagttgtgagaatagatgcttcattct

SEQ ID NO: 15405 - DNA, 451 bp, Oryza sativa
  unsure (1)..(451): unsure at all n locations
agcttaaagctagtaatggctggtcttttttagttttacagaactccttgagctgttaaaggatctagtgccagaggggaacaatttaccttagacgacatatgaagcgaagcaagtattatgtccgttgggcctggaggtcaaaagaattcatgcatgtccgaacgactgcattttgtattacaaggaatacgctgacttggatgtctgccctatctgtggggcatcaaggtacaaacgagcaaagagtgaaggtgaaggaagtaagtcaaagaggggaggcccagcaaaggtggtgtggtatctcccaattgcggagcgcatgaagagaatgtttgcgaacaaggaacaagctaagcttgtgcgctggcatgccgaagaacggaaagtcgatactatgctgangcacccagcagattcagtacagtggaggacaatcgataggatttac

SEQ ID NO: 15406 - DNA, 373 bp, Oryza sativa
  unsure (1)..(373): unsure at all n locations
ctgcattacataacattgtgtctatgtcgattttgtgcgtcacaaaccatctgcatgcaccatgtcttcaacttgtgtcggaactacattntcaggctcggtcacttgttcttcgccatgacgtgtccatatttcgtacttggccataaatccgtgagttaccaagtgcttcttcactttaaaagcatcgtcaaagtcccaggctatnttattcttacagtcagcacacggacaaattatcttcctcatattgttcttctcagcgtgaaccttggcaataccaataaatttagccacttcgtttctatatggagacaaaaacctcggccaatgatacatccattctccgacttctatatctctaataaataca

SEQ ID NO: 15407 - DNA, 438 bp, Oryza sativa
  unsure (1)..(438): unsure at all n locations
agcttctagtccacatcgatcttttcttcataatatattntattcaatccatccttactctctccgttctaaaatacaaatacaagaacctaaaatcggttctaaaatacaaatacaagaacctaaaatcggatagaacaattctctgtctaggaaatgtctcgtccagttctagattcttatattntaagacggaggaaatataatttatcttaaaatataatgacgtctcgatcaatgttatcttttcaaccaaacataacttttcaccattcgattttctcgtaggcttctacttatcgaccactcacaatattttcttattgaattntaaatattttattaatactcgtgtcaacgctaaaagtttatattatagcacgatggaggtagtacttgacttcaagtccatggtggaaactcttgcagaaaataata

SEQ ID NO: 15408 - DNA, 413 bp, Oryza sativa
  unsure (1)..(413): unsure at all n locations
ggacaagttaagagcaatccttattcttcaaacctgaggcctgcaaatcaaatggccccacgtcaattatccagccgccatgacagtatatatacttgttgaaagcgcattgggtcaatattatggtgattggagaatgcaatatgtaattaatgacagtacttatcacttactcatatatatctcgtgtgtcctgtgaagcaaacaaaacaatatttgctatgtcaattaagatctatcattatgttgattattactgccacgacggtgaaaggaagctctctctnttcatgtgctcacggtaaatttgggttactctctgacagataagttaagttgaccctaacagatcaattattggcgaataatacgtacatacgatagcatgtagtggtgaaaacagatcccattca

SEQ ID NO: 15409 - DNA, 439 bp, Oryza sativa
  unsure (1)..(439): unsure at all n locations
gctcactacacgcagctcgcttgtgtatggagccgncgctcctctccgctgcgcaccggccggcgagccttccttggcatgcaaccgcggngcctgcgcaccgcgccttcctgctcgctggccgcggggacgccgcaccttcctgtgcgcctgcccgccggtcgatgccaccgcaatgccgtcgttccactctgccaagccttcctgttcacgcctgactccgcccggcccggcctccctgcctgcgcccgactctggcgctgctctccaccgctccttcctgccttaccgctccttcctgcctcgcgctgaccgtgagtcgccgccgccgcttgctaagagctatggatttcgatttggcatagtgacggatgggcgacaagactcctgcttctttcatttgaccaagggtagaatggtgttcacaaatgataaaaat

SEQ ID NO: 15410 - DNA, 434 bp, Oryza sativa
  unsure (1)..(434): unsure at all n locations
gacaactgacgacttgacaactctcatcggctaatctcaagacttccaaaccgatgctgactcttagccgatgactacttctggctttccaaattccactgttaacagtcatgtatcaagtcatggatgaagaaacgcccaaggaaatttgggacatgttggcaagcctcgatatgttcaagtcgctgacgagtaagttgtatctcaaacaatagctgtatggtttgcagatgcaagaggagtcagatcttangaagcacgtggacgtcttcaatcagttggttgtggatctaagtaagttagatgtgaaactggatgatgaagacaaagccataattcttctgtgctcgctttcaccgtcgaatgaacatgtggtgactaccctgatgcacggcaaggatactatcacaactgatgagataattcgtcgctgc

SEQ ID NO: 15411 - DNA, 409 bp, Oryza sativa
  unsure (1)..(409): unsure at all n locations
agcttctagagtcacagtttggtgctttttatggagcatttactngaagagtcttctttcgtgtattctcttccatccatccagagctgcccaccttctggagagcaaaatagtattcctataaacatctgtactctctacacaggcagaaagtatgttttgcttcctgcgatttgtaatgtacataattaccattgcacctttattttgtataatttttttatatgtattttaatgttcctaaattaagctatataatctctttctaaatttttatttctattgtagcatgaattactccgcattctttatccactatttttccactgcttcatggatttagtggcagagggacatacacaggaaggtaatgctagtaggtggatatgataatgaatcttctgtcagt

SEQ ID NO: 15412 - DNA, 404 bp, Oryza sativa
actaagctaacttctataatatttgggtgagaaatttgctttgttgtgaacaatgtgctgttcaagaacatcaagggcacaagtgcatcataagaggccatcatgctgcattgcagcagcagtgtaccttgccatggcataaccttggagaatgtcaatctcactgtcaacggaggtagcacttatgccaagagcacctgccagaacgcagaatggaagaaatcctggagtgtcagtccacagccatgtggtttcaggaactgacatgaaacatgaacatccatgtggcttcaggaattgatctgaaacatgaacatccttggaccttcgaagatgtacagatatatgagtattttacatcctggagctagagagacaggcgtatatatatcaaagaacatgtc

SEQ ID NO: 15413 - DNA, 442 bp, Oryza sativa
  unsure (1)..(442): unsure at all n locations
agcttggagctgctgggcaaaatttgattaatcacaagcagtacaagccccgtcttcagcttggagctccctgtgctcctaagacggcgccctcttctcatcctggagctagctcaagctcagcacctcctcctcctcctcctcctcatgggtatgatccaaatgctttcttccattctcagtatgcctactttggaatgcaaccaaacgaatacttcaacccggtacttggggctattaataccctaagtgaaagcatttaacgcttgtctaccgggcatgaagcattacatgaggatgttcgtggcttgcgcacggatgttggagacttgaatgcttccatggggagattgcacactagagtgggtacattggattctcgagtccaaatgttggagagctcccaagcattngtgtatcatcgtcgtcgtgatgctcctca

SEQ ID NO: 15414 - DNA, 476 bp, Oryza sativa
  unsure (1)..(476): unsure at all n locations
gcttcgttggattttctgtagtcgcaaccttcctatatatttcaaaggattgaaagcatcatctcactattgcatccagaattaaagttatcttgttaacagtgctgtttttggattttgtatataacatttgttttaatcttcagtaccttttgtgagattttntttactgagtctaatcctatgatgtcacatatgttaagagcctgaaaggtggaaaggagatgaagatggatgttctagtgatggaaaatcttctgtttgaacgtcatgtgacaagattgtatgatttaaagggatctacaagatcaagatataaccccgactcaaatggtagcaataaagtacttcttgatcagaacttacttgaagctatgccaaccttccccattttttgttngaaacacgcaaagctgctgctagagagagccgttggatgatactgcttccttgctgtgagtataatcggctttact

SEQ ID NO: 15415 - DNA, 453 bp, Oryza sativa
agcttaccacattgccaaagtgactgtctatagtttcaaccaaaagatgaatgaattcaaggatagctaactcattctgccaaaacagacacagttcaaacatattcagttacaaggacgaaagcaagaaaatggatgtgacgatggttagaactcttgtgtatagctacaacataatctactcatcacaaaatttgaaatgcaagtgcccatctctcttgtaagttgaaaaatgaaaacaataacggtttggagggagaatcctctttcttagatacataaattgtttgagtagaaacatattagatgagaaaatgaacgatcaccaattgcaacaaaattcatagataagccaggtggttaacaactaaccaaagggagcaggctcaataaagagacattgtaaaaaattaatccctacaaaatgggaccatactagaatataatctactg

SEQ ID NO: 15416 - DNA, 426 bp, Oryza sativa
  unsure (1)..(426): unsure at all n locations
ngacctgngaaatggatgattacaggggatttcaattttattgcctcagctgtagacaagaacaatgctagaaacaatcgctgattaatgaatacttcgcagcaagaaaggagatgtatttatttggaagaagatatatttggagcaatgagcaacagcgaccaaccttggtgaagctggacaggctgntttgtgacgacacagtgngaagaagtcttttcaaatgtgcaggggaatggactacggaatggggggtgcaatgtgcaaacgacgatgaccgcacgaattttgctgatgtgcagatggacgtctatggtcaggcctcatttggntgggctttctggagctacaagaataatattattataataataataataattacactaactggagcatgaaggatatgatcgacaaacatataat

SEQ ID NO: 15417 - DNA, 370 bp, Oryza sativa
agcttgagctgttgcagcatggttttcatctgcgccttgcgcggctcgtccagcggcgaggcgggcggcagcacgtgcgtggagacaggacgaccgcagagcacgatcgcctctttaatcacgttcacaaacggcgtatccagctgatacatctgcggaatttgcagcaaggtctgatgatacccggccgctttcgccacgtccccgtcgcgccaggctttcagaagattcaccgacacctgcggagcaaagttgccgctcgccgatatcgccccgtcgccgccgagcagcagggtattgaacagatgatcgtcgtagccgcagagcacggtgaagtgcggatgggcacctttgacggtatggatcatgc

SEQ ID NO: 15418 - DNA, 447 bp, Oryza sativa
agcttcagcatggctaccaccaggggcattggtttctccacctcaacttcctgtgcttaagtcatcttcaccaagatcctcacgctgacctctcctaccatgttgccgccacctagcactagcgcctgactaccccgccaccccgacaccttctccaccgacggcgcactgaaggacctatcctactaggaccttgctcttccccaacctctacacaagccgagagtcggcgttaggccgctggtgctgccctgcaaccatccccaagccttgccgatgggaccctgccccttgcacgccggcccaactactcttctacatcatccgcatctttggtgtcctcccccgacctctgtgctcaggacgccaccatgcaacctccgctggctaaggagaaggggcgttctccttgatccgtagtccctcgatagcttcgccgctctacgc

SEQ ID NO: 15419 - DNA, 285 bp, Oryza sativa
caggaccaggcagggttcatgaactacattttgagacatacagacccacgtcttacaaatatatgaatgagttctaatgcagcgggaaagattaaagcgagctaaaccgggaagcttgtcttcatcagctggcgactccactccacacgcaataccttgacggcagctacgaaaccaacctctctgagaccggtcaactgagaagaacttctactctggtgtgggggaaaagagagcaagactgagtactatccactgtactcagcaagttattccggaagagga

SEQ ID NO: 15420 - DNA, 446 bp, Oryza sativa
  unsure (1)..(446): unsure at all n locations
agctttgttaccgggttctttgctggatgttgtcataaacacacaagaagcaaaacatgctatcctggaaacagtcaagtccaatctagctaaggctcangctcgcatgaaatattttgctgatcaacatcgccaaaaacgcacattggaggttgtgatatggtttaccttaaaatgcaaccttatcggcataattctttgggtcttcattcttctcttaaactccattctaagtattatggaccatttcgagttctggatcgtgttggtcaggtcgcttacaagttatagctgcctgcaagtagtcaaatccatccagtcttccacattagccaactcanaaaacatctgggctctcatgctattcctgaacaaggtcttcctctaattgacgatgaanngcagaatttatctgaaccagtagcagttctggagcgtcgcttaat

SEQ ID NO: 15421 - DNA, 405 bp, Oryza sativa
  unsure (1)..(405): unsure at all n locations
taaatattaaataaagggtgatacatgtattttcatgtgatgggcaaaattgtctttttgatgtgatttgtctcgaaaataataaaataatagctacagtgtttcctagtaaactacgagtaagttttttacagtgctctatagttgtttcaattttttgaggtgtccaacaattaataccacaaactttaagtgttaattatgtaacaaaattttccataccaaaatatcttatgagtatattgcgcttacggccacctcttattatcacaggttcattttggaccaccctttaacacattttntcactntgggctaggttactttacctttctttcactttggaccagcccatgaacattttaggaatatataaatgactttttcaattttagacacattatc

SEQ ID NO: 15422 - DNA, 388 bp, Oryza sativa
agcttcatgtcagtatctcctgtaagcattatcttcctgcttcaagattcagaaagggtatctctgtattcctttaggttaaagaattcagaaatgtagtaggtcgcccacgcgtgggcgactcggggggaaacctagcaccgccgctggcactctcttctcctctccctcccctcggagctaccggagaaccgagcggtcagctgggacggcggcggcaaggccaaacgtcgacggcgctatgtgcatggaaggcgggccggcgcgcggagcataggttgaagacacggcgtggaggcggcagattcagcgccgccgcggctggatccggccttcccatgggtggatctggatctggccggagcaagccgttctcgtgcagagacga

SEQ ID NO: 15423 - DNA, 343 bp, Oryza sativa
tgccgttcgccttgggaacgacgaccgggttcgccagtctctctcggattgatgacctcacggatgaatccggcctccagaagtcgcgccacctcctcgcggatgaaggcttgacgttccggggcctgccgccgcactttctgccggaccggccttgcgcccggccgcacggcgagacggtgctcaatcacctccctggggaccccgggcatgttcgccggtctccaggcgaaaacgtcggcgtttgcccgcacgaaggagactagtgcgcctgtctatttgtcgttcagaagaccaccgattcgtgtggtcttggacgggccgtcgcccagagcaacctcct

SEQ ID NO: 15424 - DNA, 443 bp, Oryza sativa
  unsure (1)..(443): unsure at all n locations
agcttctagagtcacagtttggtgcttcatatgtatcatttacttgaagagtcttctttcgtgtattctcttccatccatccagtgctgcccaccttctggagagcaaaataatattcctataaacatctgtacttcctacacaggcagaaagtatgttttgcttcctgcgatttgtaatgtacataattaccattgcacctttattttgtataatttttttatatgtattttaatgttcctaaattaagctatataatctctttctaaatttttatttctattgtagcatgaattactccgcattctttatccactatttttccactgcttcatggatttagtggcagagggacatacacaggaaggtaatgctagtaggtggatatgataatgaatcttctgtcagnntttttttttttttgctntctatcnagttattcg

SEQ ID NO: 15425 - DNA, 424 bp, Oryza sativa
  unsure (1)..(424): unsure at all n locations
ttaacttcatatatataatttggttgcagaaatctgcattggttgtgagcaatgtgctgntcaagaacatcangggcacaagtgcatcagaggaggccatcatgctgcattgcagcagcagtgtaccttgccatggcataaccttggagaatgtcaatctcactgtcaagggaggtagcagtaatgccaagagcacctgccagaacgcagaatggaagaaatccgggagtgtcagtccacagccatgtggtttcaggaactgacatgaaacatgaacatccatgtggtttcaggaattgatctgaaacatgaacatccttggaccttggaagatgtagagaagtangagtattntacatcgtggagctagagagacaggtgtatatattcagaagaacatgtacaggaggaatacatgacatgt

SEQ ID NO: 15426 - DNA, 462 bp, Oryza sativa
  unsure (1)..(462): unsure at all n locations
cagcttcagttggtatttgcgggcacctaagttctttatcacgcgtcccaactgatagggaatcccgtttcctgaacttattgaccaaagtggtgcgggagtggttggaagcattggagcttgatggcaggatggaagcatgaccatggacaagaaccaagcggtggaggagaacaaatgatacatcaatcttggtttttttccccatgcagatcaattcaatccactaaatttgcggaaaatttactttatttctatcaaacaatacaatccactaaatctttgaagatttaatttgcttcctaatgaacgatactaatcacatggagctaactattctcgactcacagaanataccatatttgactagttatttccccactgctatcgtttacgaataatttattntatatcttgcatctctcttaatcaacggtatacattatcctatctctttagtat

SEQ ID NO: 15427 - DNA, 420 bp, Oryza sativa
actaagctcccttaacctgtgacagagacaagccgaatcctatcatactgcaaaacgtgatccggacaacctcggggagggagctggaggtgctccgtcttctcatcgagcacaaccctcgtctccgcgaagcagccgcaagggagttggagcagcgccgatcgtcgtagcgacttgcgagaagccatcgatttgggggagagaaaatcgttgggggcgtagagaatcgctcaactccttgccgatcggccgattcgggcggcggggaaattgggagagaaaagccccggaataaatgaaaggacgtatttgcaaacgaaaaataatttatgaataagaatttcgatatgtgttcttagtgatctaaaagtaatgctgaaaataaacttcgatgaaagaccatttaatcagctcttaatt

SEQ ID NO: 15428 - DNA, 455 bp, Oryza sativa
  unsure (1)..(455): unsure at all n locations
agctngacgacaccatgtagcatcttgtttattcccatagcggacctacagcgggcagacagtaacgccgtctttctctgcacgatcatgtggtggaaaccacaacttggggaataactcagaaattacttcagcaccggtgtaccgagaccctctctacagcacgccactgcctgaaatcaagccgtccctgtgatccaaagaatgagaggagagagaggaagttgggcggaaggactgcaacagtgacatgtcatgctattgctatggatgcttacctgtttacctaacatgtttaatcaaatgtttcttaggtctccctcactgctagtgacaacatagcctcagatcgacaaagcatttaactaggtgtagtagatagataactaatagaatcttctcgcaacaaatctatatatgctaagtgatcgctactgcagaggtggtactgaact

SEQ ID NO: 15429 - DNA, 243 bp, Oryza sativa
actgtccgtatcgagttgttgcgcggatcaatttaccgtgctagcaccgtgaaggcatacttatgtgttttcggtagagatagagataaactgttgctagattagagtttgtattctgcacagacgggaggagtagtatatgcgttgccgtatatgtacgcgcacagaccggagcacacctcgctatatattatgtgcatggtcgattggaacgggaccaatcgaacataatcactctactta

SEQ ID NO: 15430 - DNA, 378 bp, Oryza sativa
agcttatgcagatatgctggagatggatttaatatattggaagagaaatacgcgcgggccttatcagacggcttttggctctaacattctctatgaggagggtcaaagagactctgttcttttatttcacattgatcgacctttgggtgatatatatcctaacttcatgtactccatacgcacaacaaataaggacatccatatatgcgggactatttctttacttttagtttttactattttttactatgattactggtcactggtcagaccagggtaaaggcatatatttgcatagtataaacctattagatatactcaacttaatgtatgcaagggtaaaggaatggaacagatctgattatgaataggatatcc

SEQ ID NO: 15431 - DNA, 395 bp, Oryza sativa
  unsure (1)..(395): unsure at all n locations
ngccattggtgccaagagtagcttgccatccctcaccttgactgatgtgaatcttggaaaggattcctcttctagtgtaaatgaagaattgaggctactgctgtcacagctctcggctttcagaggactcgaggctccatgggtcgacccacgccctagcccacgtgcgtatgggcgtggtgatgatttgatagtgcagaacatcacgaacagaatttcaattgagagaaatgcatctggtttggagtcactggagggtatcactgtaagtgagatggaaggtgaaagtgccactgaacggttgagacgacagattgatcttgaccgaaaatctatacacctccttctgcaggaacttgaagaagaaaagaacgcttcagcgattgctgcaagtc

SEQ ID NO: 15432 - DNA, 456 bp, Oryza sativa
agcttatccctataaacacgtttataatattgggttggtaatatcttaatattaacaaagttactattgatatctcatgatcacatcaaccattaaaaattaattaactgtaagctagtggatggttgatctcctccagaaacgcagcatcaatagtcactcggatgcctcttttgcgctcaagatcttgagacggcgaaccacattctcctcgactgcgtgtttgctcagcaggtctggctccgtgtactgtcgtcttctggatgggttgccctctctccctcgtggcagctggttctaggactggtggccgtcctccagggcctatttacctgagcatctccgcgctagcttcgactccctggtgctccttgtctcttggcagctgtggaatgaacggaactctaaagtttcgaactttgcactatttcagtcaccgtggttctggagtccatc

SEQ ID NO: 15433 - DNA, 455 bp, Oryza sativa
  unsure (1)..(455): unsure at all n locations
ntggtatgcccaacgagtaacacagttctgcttgtatttcacagcgtcataaattgaagataggtagaaacaagagcaggcaacagcttattcagtagaaaatattatgcatgtttaacatacattgctaaaagtagaacaaattaaggtttaatccatgctcattnttttttgaaaggaatcaatccatgttcaattatcttcactaaagggactgaacaataacctgagcttcatttgttttcccaagtcctaaaaaagtactaaatatatgaaaatcgcaaggatttcagtccaattgtcatccgaatcatgtaactntcaggcctaatatcacatctcatagtgttaacaaaacaatagcgataaattaggggcagtatttcaatcactaactggcggagccaccataacccacagaatcttctgaaacagctctagaaacagtgaatcaa

SEQ ID NO: 15434 - DNA, 445 bp, Oryza sativa
  unsure (1)..(445): unsure at all n locations
agcttagtcatatctatgaggctaataatgatgttaatcacaccttacacatcattccggattcgagacaagtcaacgctgatgagttgcaacctggtgtctgctatctgcagataactgctgttgatcctgtaatggaggatgaggacctatggagtataaaggaaaggattttctctttatctactggtactgtccgggcccgtgtgttcgaccgttntctttttgatacaccattcacaaagaatggaaaaacacaaggtggccttgaagatcagtggaagaggcgcacagtactccagacagagggttcctttcctgctttggtgaatcgtctgttagtgatcaaatcagaatctctagagttttctcctgttgagaatgcgattggaatgatcgatacaaggacagctgccttgcgaaatgaactataagaaccacgcag

SEQ ID NO: 15435 - DNA, 473 bp, Oryza sativa
  unsure (1)..(473): unsure at all n locations
attggatccggncgatgttagggaaactggtgctattgttaattgcatagcgngagcctgaggtgctcacagccgattgcgatgcccgaacttgatctgacgtcgtgtaactgttcaatgagcctgtgtgcaaatgcaatgttgcaacgacaccagcttttatggggaaaatatagcgtggaaatctgaaaaccactttgggataacaaaaactagacgtataagatttgttctntgcataagatcacatggatagaatagtcgtttactagctatttgtaggacatcatcgcctcaccagctgttaaacataaacatatggtgtgcttagatccangataaaaagttgtggcttgtcatatcggatgtatgtatatttaaagtattaaacataaactaataacanaacgcttttaaatattatacatagactaattataatacacacttatagtttaaacataaactaataa

SEQ ID NO: 15436 - DNA, 326 bp, Oryza sativa
atctatttactacaatctcgtgcatactttaatacccacaaatctcatactctacaaataccggtgtcgggtcccgtcgacacctaccaattgtcccttacttattctgagaatttcggaattttgcacgacttcataaatagtggtctgaacgaggtactaaaacttggaacaatgaagaatgaaattggtataggaactaccatttcaattcctcttagaatgaaaaaaaagaaataatgacactcgagctctaactcaccttctctgcaatggttctttagtggatagaaataatgacactcgagctctaactcaccctatat

SEQ ID NO: 15437 - DNA, 413 bp, Oryza sativa
  unsure (1)..(413): unsure at all n locations
cgatacctctcatattgacggacacttaatttgtttctattatcctaaatacatctcatgtggaaaatgcacacatttggttcttcaaggctgctttccaggatgctgttgcaacacttctcaaagggattccaatcgtgcggaatctgacattgcatgtttgtttccaacaaatagaggtttgctcttggaaaatcgttgaattaagctgcaattttaatgtatctaccatcatctagttgatggcatatanttttttttcttttttgttttacaggcacgatggctgttggataaccgacacagctnttccaatcttaggcatctgcagttgntaatgaacttaaaaactgaagatgccaacaagatacattacgcggtttccttaattanggcagctncattcattgaaa

SEQ ID NO: 15438 - DNA, 430 bp, Oryza sativa
  unsure (1)..(430): unsure at all n locations
agcttatatgcagagaacgaaaagtaatgttactctntatgcatggctcaaacgcagaatactagtactagaactcatatactccactctctctgctgcttttgcttggtcccttatccagtcgtgtcagcatatatagtgacatggcagtgcgtgtcagcatcacgtttttcacgctagccgggtgtagtgtcatcgcaagatctggtcccttcaattccatcaccgccacgtggcgatctaagatcgagtcgatgatcagtggattagagcaagttttttagtatagcccactgctaactttaaatcatctatagtcaatgtaatagccaattcatacaatagttgcttactatactattaatacctggtcccacatatcatacacacattacgtcttgaagtccgtgctgcagctggctatagatct

SEQ ID NO: 15439 - DNA, 487 bp, Oryza sativa
  unsure (1)..(487): unsure at all n locations
tagaatactaagcttcttctggccactctcttgtggagtagctgaagtttatttctaganaatacgctaactggaaatccaaggtccttcatcttattgaagacttgctctgcttttttcacattggctatagccacacagttagccaatagagtcctgtatacaatctcacccctatgagatgcacgaacattctcaatgtacttttcagctttgtaaatactgtgggtnttagctaccaaatccacgcgtgaagcataatcacgttctccaagatcaattagtttggattgttcaacatactccagaagctgcagaaaatgaagttaatatcttctgagttagaaaacacacagaccgagggtaataattacagtgaagaaagcttaagtgtttagatatgacgttgttcacatgagaaaaagttacgtgaacaagttccatcgaaggtaacaccgtgtgtagcttccaattaccaaagaatagt

SEQ ID NO: 15440 - DNA, 445 bp, Oryza sativa
atcctctgagtcacctgcggctgcaagctttatttcttcccttttttttatatcctgcctttcctcccctttttttttctttttttcatcttctttttgccacgaacttttccagcagaagaaagcatagtctaatataggagtttatttaaatggaattttttctatggaaagccgacttccagtgtagaagcttagcttaattatatatgtggaaaaagatggaaatggcaatgaccccttgatcatgagagtatgaaagatatctaacacaagtcacataaatttgacaaagcttaatacaatgtcaagcaactatatgcataataaagttgatcagtaatgtacttgcatatggccttggtaagtataagaatgaagtaaatggaggatcgaggtttaaaacaatttattttgaaacatattccaagagtcataacacgag

SEQ ID NO: 15441 - DNA, 460 bp, Oryza sativa
  unsure (1)..(460): unsure at all n locations
gacggtcattttcgatcaatttctatcgtcaatatcactaatacaggagagaattagtgatgcttgcaatgcataaatatgttagagtaataatattccactagtattaggtctactaacctttttgcagagaatgatcataaagtgaaggagaatcgacatcaacgcccacgataaatcaatcggacgatgtcgagaaccagacttgtgtatgaatgggccaagaactcagaattgacacgataaactgggccaaaattcacaaatccgtagagaagaacaacagaggaggctgccagctgaaattgggctagattgggtcagcccatggttcggctgaaccatggggttcggncgaacccttctcagcgccatccgatccanggctttgcctggatggtgtggattatcccccaatgacngntggagggtattttcgatcatttcaacccgcacaacc

SEQ ID NO: 15442 - DNA, 458 bp, Oryza sativa
  unsure (1)..(458): unsure at all n locations
agcttcagctcanatataaggacatgatcttattgtttaaattaaggataaaatcgtaattggagcaggggaagccaccgatattatgcacatgtaagtgagctttcaatagaaaattaatgggattagatatatgccactggtttcctatatctttgagcgtgtgttagggatgtattcattagtgtatgaatgtggtgttgtgtgcagtggtgtgtgtaaacatatttgtatgtcgttcaattgttaaaaaaaagtaacaggagtagaaaataagggtaagaatgcaaacaagaaagctatttttttttggatggatcgacgacttgaacatgtgtgctagattgtactacctctgttttctagtagatgacgtcgttgatttttgaaacacgttcgaccatattgaaaacatntatgtaactatcttttacttatcgcgagttgtttatcccttg

SEQ ID NO: 15443 - DNA, 393 bp, Oryza sativa
  unsure (1)..(393): unsure at all n locations
aagctaagaacaaaagcgtttgncaacctttcccattgtattatctttctcaagcaaaacagttttaagcctatcatactatgctctaggtgcttgtttcaaaccttacaaagctttagacaatntaaaaacatggttggaaaaatcaggattttcaaaacccggtggttgtttgacataaacattctcatgtataaaaccatttatgaaagcacttttcacatccatttgatacaatttaaaaccttttgaagcagcaaaagccaacaaaagtctaattgcctcaattctagcaacaggagcaaaagtttcatcaaaatctaaaccctctacctatgtaaaaccttgagcaacaagtctagcattatttctcacaatcaaaccatcctcatt

SEQ ID NO: 15444 - DNA, 432 bp, Oryza sativa
agctttatatagatgaagtgttactgctatgtattatatgagagtaccttgcttgtctggcaatcgacgaaagaaattctcaacgatcgatggtgtattattcttcttccgaaaccttgggtgcctcattatgtaaaatcctgcgattcccacaagaaccttctttggtacaaaatacacaacaatcgataccatgacaatgatgaactgaaagattgcagttgctctaggatccctccaacataacaatgattggatcctctccccctgagttgctacatcacccacaactgtttgaaccctgccggcaacgctcctcagtctatcgtacctcattcttaccaggtcaatactacaacttgattcgacactatcaaactcctcatcaatctcatctggatgtacactgcctaaacaagatactttatgatc

SEQ ID NO: 15445 - DNA, 441 bp, Oryza sativa
  unsure (1)..(441): unsure at all n locations
ntcttacgctggatgcggtgtgcacgagtgtcttctctcttctcgacttcgatcagtcacttgagttatacactctccctagcccccagccttgtcatcggagaattcttctcgggagataaggctcttggactctcgacttgccttagttgaataagcactaatcctagcccctagtcgtgaagttggaaaaatccatttccgattacacggcttggttaatatgcacggcgagaactcttacacgaccatatcttacatggtctttcgtctctgaaggatccgacaaggccttatcagctctgggtgtccccagccgaagttcccttatgttccttggaggccttgtcaagacggcgtaaagggacatgaggataggtttcaacgctatgtgtcgtccgggtaatggatcatcgggaaggggcactgtgantgaaatct

SEQ ID NO: 15446 - DNA, 407 bp, Oryza sativa
  unsure (1)..(407): unsure at all n locations
agcttagttcttcagattattttctttattttattntttttctttctcttttttgctcgggaggaacacaatcaacaaattagcaagaaacagcagaacacaagcaatgcagatgccagcatttttattgcaatgaccaggcttaaatttcaagggtgaaaagggaaatcataatcaatccaaagagcaccaaatccctctctgtatggaatcattaactagcaagcaaaagcccgcaggtgagggacactagaagcccgcagccttcaaacgaggggaccttgagctcgaggagcttgccatggatggtgggagctcactagatgcgggatngaaaatggtgagtttggagaactagaacaggggagggacagcatgatagagaatggagagagagaggggggggg

SEQ ID NO: 15447 - DNA, 469 bp, Oryza sativa
  unsure (1)..(469): unsure at all n locations
ttcttaaattcatgtacctcaatatgtgaagcagntttcatctctgtgttcacttaaaagttaaaagtacattttgtggtatgatagtaccaagggtgaggaattttgagagacaaattactactgtaatgccaatctggaaaacatttgcatcgcagtaagttatgtctggcatagacataagcttactttcaaaaatattcaactgatgtcactgtttggaacgcatgagtctcttaagaatatcgtacgaatttgtacacaccagacaggatgtcatatttttaattcttgtaggatttttgtattccaaacacatccaagaaagcagatctcatctagtaatcatggtaataactagctccattttcttatgaacatggcatgntgatatttctcanacttattgtatatactagtattggacttaggttctataacgattgtctgatggtgtagatttcttact

SEQ ID NO: 15448 - DNA, 461 bp, Oryza sativa
  unsure (1)..(461): unsure at all n locations
agctttatcgtgctcatagtggaccaataaagtttaacactctatgtattagacccaaatccacttatgccagaatataaaaataacccaaacatgagatacaccagaaaactgataactatttgtgaccactttaacaaagctatgaggaaggcatgccctggctctaggtggaatgaagacatcaacttgtggaggcaagtatttgtcaataatccggttttcgacaggtaagttatcttctaaaaactcgttcaaaccaataaatttaattctgtagtgcaagggtagctaactatcaaatttccttaagagtttatcgggttttagtgttcatctcttcatgtgtacatggaaaaataaagaaccacattngtcggctattaatgtaagtcgtgatagggcattgatatacatataatacatttatttatannttaccaatattaactttatataaa

SEQ ID NO: 15449 - DNA, 425 bp, Oryza sativa
tcctttagtagatcaatttccttaaccgaatatagcaataattcgacaactgacgacttgataactctcatcggctaatctcaggacttcaaagccgatgctggctctaagccaatgactagtccgggcttaccaaatttcactgttaacagagtcatgccaagctagtgacgagatgagcgagctaatgagtcacgagctttttgtctagccctaattatgagtaatgactttataaaatattaacaaagcaactgagaaataaattaatgatagatcaatatatgtataacctatgaagataagttgagatttagtagcactcgaagagttgatgtcttgttccaacttaaattaaaagcagacatgatgttctagtcattggatggtacatcatataatgttttggcagaaaatcaactaac

SEQ ID NO: 15450 - DNA, 322 bp, Oryza sativa
agctgcagctgcgccatgagcacacttttttttctgacacagctacaacaatatagatgcctttcttaacattggatttgcgggatactctggtataccctcaactgaacagacacctgcaaataaataaaacagttacaggattgaacaatgcaaccattgatgcaacagacgcgatggaaggcggatgttcacattgcttggttcaaagccgatgcattttactgaaggaaagtgagctcatggggacttacttattaggataaaaggcatatgtctgaatactaatactgtatctacataatgccaagaatctgacatt

SEQ ID NO: 15451 - DNA, 358 bp, Oryza sativa
cttaaaactaagctgctcattcgacattacaacatttgcaatgtgggttcctatttgcaaggggtcacctggaggctgacagagataattatccccaattgccagtgggcagacacctcatatagttacaatacaaaggattgatcttcttgtcagtatttgaattatctcttacaaaagagaaagagacatgcctttctcccatcaaaatcagcctaattgtgtagtgtagaataccactatgcatgtctaactatgtcccttgtgattgtcgcatataggagagggacatctgaaatggatggtggcctagttaagcaattggtagtacactagtaccagtcatttttataaagat

SEQ ID NO: 15452 - DNA, 456 bp, Oryza sativa
  unsure (1)..(456): unsure at all n locations
tgtacagttggggaaggggttntttgagagaatatattatatctacttcaaccgatatgcccttatgcacggccatacataacatagaaatcacacgtggaaggggtgggcaattagctagagcagcaggtgctgtagcgaaactgattgcaaaagaaggtaaatcggccactttaagattaccatctggggaggtccgtttggtatcccaaaactgcttatcaacagtcggacaagtgggtaatgttggggtgaaccaaaaaagtttgggtagagccgggtctaagtgttggctacgtaaacgccccgtagtaagaggggtagttatgaaccctgtggaccacccccatggtggcggtgaagggaaagccctcattggtagaaaaaaacccacaaccccttgtggttatcctgcgcttggaagaaaactanngaaaggaanaatatagtgatagt

SEQ ID NO: 15453 - DNA, 391 bp, Oryza sativa
agcttataggtggttagtagcttactacttaacttattctaatatgctatttacgtggaagcccatgaagcaagcccctaggatcgatggaggcgcattggggttcccgtggcatgctctcctagggagtaggggtacgcgagccccctttgcctacctattgtgtccgtcattaagttttcttatagtagattattcttgtgctgtaagaaaaaaacattttcatgccaactgagaatttaagaccctagtttaatttgagcaaatatgcaagtgcctttttttatggtcaaaacaattacccttggctgcaatataattatctattggtgcaattaccagtgacagcaaacaagacaaagaggtggataagaattgtgagtacattcag

SEQ ID NO: 15454 - DNA, 348 bp, Oryza sativa
actaactcaacatgctctgagtgaggacatttttttttggttaagaaagtaagacactgtttgatcaagtaaaaggggactatttctaattgatgtgatacgtctctggtagtatgatgcattctgcggaataaaaattttgtctcaacttgactgaagactggtgagttctatgttgggctaagataccgaaagacaagtatgcttggattctaaagctatttaataaggtgaaaatcattgacttgcaggtcactgtcttatcaagcgaaagtgggctacatgctaaacaatgactcatgatgaataagcttgcgcacgtgagctcagcctagtggcacactgctg

SEQ ID NO: 15455 - DNA, 442 bp, Oryza sativa
  unsure (1)..(442): unsure at all n locations
agcttgccatattaccgatcgaagttgtttgattttgatttgngcacgcctaaaatggcctatggttatgtgagggattgatccttctatgtggcatgaagtaaccctgggtcggctagggaaatgctttgtcgcgaacctctgacaccggccagtgtctggagtgagttcgtgtcttgtgggtaaagtgtacccctctgcagaggttaactaactgttcgaacagccgtgcccacggtcatgggcggatgtgaggtggttcccgttgcgtagatttgtttgcctgtgctttgtaaaaagttgttgtggagtgggaatcgtaaccagaatcagcctatgtggcagatggatgacctgagtgatcagaaacgaatctgtgtgattcgggatgtctgcgggcatcatagactacgctctccgagtggaagcagattgttgtgct

SEQ ID NO: 15456 - DNA, 358 bp, Oryza sativa
  unsure (1)..(358): unsure at all n locations
ntcgctaggaacnctctgcaaccgtaccaccgttgttctgtgnccaatttgaaaccaccatccaaacatcggtagcacatggccttcgccacacccgaccgacgcccctccactggtcggcttccaatcctgccatcaacaagactaccacatcaccccgtcaccagcgcgctgacccatgccgtcttcaccacaccgatcgccgaccttctctgtgaatccaatctatgggagctcggacaaggaacaacattgtctcgataacctgattcttccttatagaccgaccaccgtctccaccctgtctaaaagctccccacaaataaggggaggagctcccctaacacggcagtagcct

SEQ ID NO: 15457 - DNA, 445 bp, Oryza sativa
  unsure (1)..(445): unsure at all n locations
agctntccatgaagtacttgcacgcccttatcgtagttcgcatgaagtcgtggcggccgtcagaagttggcgctgccctgcagtccgaatccaccccgcgcgaatcctcttccctttggatcctctccatcgttcctgagtaaaacacgagtgcacgcgtctccgaggtataaagacgaggaatatgaactcaagaaagaactcacctgataatttagttgacgtgcacgagcgcgggtaataggaccatcatgctgtatatggggggacgtggatgtatcgatggtgttgatgtcctcatcagtgcattcgtgtcaaaatatcacttcgtgattcgctgcggcgaactttgtcaattactaccaatattggcataggtggttgcgatgttttcaccggaatgaaaagtcaaaaagccccaacatgattttggacatatggagtg

SEQ ID NO: 15458 - DNA, 471 bp, Oryza sativa
  unsure (1)..(471): unsure at all n locations
tgcnaggaatcagataacaaattgtatggctgtgactgtttgttaacatcccatggtaacattatcaaacaatgcaatatttaaagaaaacaatacagcatttgcaataagggatcaatatgttcaagtgacaagcatgatttgccttgctctgcggctagagggacttccgcgactatctcaaagtacaccggaacgttgggacagtcggaatctacggaacatataaagcatacaatgcaaacaggctataagactactgaaatagataacaaaaccatttttaatggattcttcgcattnttcttgatttactgagacttgaatgggcttaaacagagcacagatgaattttctatgaattttagaagattcactatgttgttactataactgangaacccttaattaatttattgcacaattaattaacccccggtgacgtcagcaaggggcagcgccgacaagctg

SEQ ID NO: 15459 - DNA, 370 bp, Oryza sativa
agcttcttgaaatccgggctcgaacagttattcacaatcgcaactatacgcaactatacacaaccaattaaagacctatacaagaccaaaagaaagatcctatttaggcttcgttcgtatgtgcgagtcctgatccggttcatgttccgtgcactggaagcgtggtcccgcacacagtaccagaaggacggcttgtgaggcgacgttaacgtcgttaacggatgtgagaagttgccgttgcgcctcggcttttccgtcagagtcagggcatccaatgctctcgatccctctttcttcctcctctcgctgttgctatcttgcttccgcggtcgtcgatgcgacgcaggcctagcggagaaatcgattccct

SEQ ID NO: 15460 - DNA, 460 bp, Oryza sativa
  unsure (1)..(460): unsure at all n locations
gttagcaatgaggcaggcgcatgttcacttctaacatggcgaacagaggtggacgtggtggtggtggctcacggtgtggtggcgcaaaccctgagcgaggacgcggcgcaactcgtgggcgcagcgccgcaccaggtcgtggacgcggcaacaaccagcagcagcgcagctatgacaatcgtccattgtgccaagtctgctataaacgcggacatgttgcagcggactgttggcatcgatttgatgaagatttcgtccccgacgacaagctagttgctgctgccatccacacccatgcacgggactccaactggtatgttgacaccggcgccaccgaccacatcacctcggaactggagaaactcaccgctcgagacgtctacaaaggacatgatcaaatccacacggcgagtggtcatgtatggagataaacatattggtcattaatagntatacccta

SEQ ID NO: 15461 - DNA, 416 bp, Oryza sativa
  unsure (1)..(416): unsure at all n locations
agcttaagaaatacccaaagtgtgttaactttacttgtgtaaatctatttcaaaagagtttaatgtaccaaaatgcacaaagggtcctacttagctaaaaactacatcgagggacattatcaatgtttccttgtcttggtatattgcaatggtctatgaaccaattttccacgtttcagtctacaaaacgaagtcctcttgaagtcatatacctgatatatataaaaaattgattttgttttttatactatgttctgaacgttttacattcttatctttctgttggttatttgcttgcaggctgaaaaggctagggacagagtatttgaagaaaggattccgacacagtcagtctaaccacattgactannagtttgtggattcaatcttcaaattttcctgtacagacatgtttt

SEQ ID NO: 15462 - DNA, 391 bp, Oryza sativa
tgtgacttgatcgaagatcgtggctggaacgatatgttcttagacatcaactctaaggcccacttcgcaatccgtccatttgcttcgcgattgtgaagtatatctccgagtggaaacgatgtgaccaccgtgaccgagttactttgaaagtagtgagataatttcctaacgggaattaagacaccatataataacttttgaacctgaggatatcttgtcttggagtcggctaaaacttcgctaacaaaataaattggacgttggactttgtgaatatggccttcctcttcacgctcgacaaccaggaccgtactcacaacctgtgaggtcgccgacacatataacagtagcggctctttgggatgtggcgagggcaaaactggtggagtgg

SEQ ID NO: 15463 - DNA, 340 bp, Oryza sativa
  unsure (1)..(340): unsure at all n locations
tggaggtctcccgacgtggctgatcccacgggctgtgtgattctttttattcatggtgtgcgggtaaagtgtaccctctctgcacaggttaacaaactgttcgagcagtcgtgcgcacggtcatgggcggatgttaggtgattcctancgtagttttgtttgactactgcttgtgaaattgctgatgtgaaatagggttccttgtttgaaaaatcaatagctgactggatcaactatgcccaggtggccgattgataagatgttggcccgggtggccgtctgaatagcttttggccgggtgccaatcttgtttcaattctatagactgatacattgcaca

SEQ ID NO: 15464 - DNA, 444 bp, Oryza sativa
  unsure (1)..(444): unsure at all n locations
agctagnagccttttctgcattntctgtgatctaattgtcaccaccattacctctgttgattctagagcagtccactataccaccaatgccgtgctgtttcttgctaaaacaaatagtcttactagtgttccacgaatcaataattttgaagagtgaactttgtgctgcatctctcccagcctcttggaccacctcatgattntcatcatcagaaaattcatcatctgaacaggtaggaggatgatgccggactgctttatcattntgtcgatatggtttaccactgtcagatactggaccaagctctttctccaaaaagtcatcactcttactntgattctcattgctcttgcagctggcctgacccttcccattntttgtangtaaaacatggaccgacgttctagacagaagtgggcttctgtcatcgacatgtttacgct

SEQ ID NO: 15465 - DNA, 402 bp, Oryza sativa
  unsure (1)..(402): unsure at all n locations
ntaggctccattaccccatgattagtttaacactaatgtccttttgaagctttcggctgtaatgtaatgtaaatgtggtgtggtggtgttgggtggtgtgggaatgaatgaaaagacacacaaatgctacacaaatgccaaggagaaaaaaggggatctttatgtgcggttgcagcatgggcgattgtgcatgcagaagctatgccatcatgctcccaatcctgaccttctgatgagaccatgtgatgtgatcacctgtttctttccttctctgcattttattagccatggattagaggagagtagaaagatcacctgttaattgaatacttctacatttgtggcaagaatgcactaaaatactatntctgaatatttctctccctctctctcttaaagttt

SEQ ID NO: 15466 - DNA, 453 bp, Oryza sativa
agcttatggagtctacattcagatgattttgatcccacatcaaaattctgaataagttgtcaggaatctgcaaaacaagccacataactcatccaatccgagtctgatttgggccttccgtcttataattgtatcgtggctaagctcaagggatggaaatcctaggctaaccctatgataaccctagtcatatatattcagttggtgtcatagtttcgagttggttttgcttagattatttctgttattacagtttcgccgttactttggtttgtggaactccaacaaatgcaatagtgttgcaattattcttgcttgtgttctttgatttgcatgtggagattagccttctcggcgagatcaattgggcagtgcacagttgataaccataggagacatggtgttgcaattgtagggtttggatcgtgttgatcggaagtcggaccatgtgtg

SEQ ID NO: 15467 - DNA, 498 bp, Oryza sativa
  unsure (1)..(498): unsure at all n locations
aactcaagcctttccttctccacgagaccctattaagtattaatacacatcgtaagtttattttagattntattaacgcggaaatcccataattntactacacacactgtctctaggatagtcatttatctatattctctcttttctagatatttagaatatagataaaggactatcctagctatattaagtgagagttagtggttaattggcggataagattgaataaaatttgagttgattaatgtggcaacctataatagctgtaaatccgcacagcctagcccggcagacccacttattacacatagcaatctacttatacttttgtgctcgtttcatgtaaaagggttaactcagaagttgtatggttagagcgacaaggttttataagttggttntactcttgctcaactcataagatagtaccacataagtgtacatgacactcatangccacattctaattgggctcagagtgtcacacatatagtacac

SEQ ID NO: 15468 - DNA, 461 bp, Oryza sativa
  unsure (1)..(461): unsure at all n locations
agctngacatggaataaatctcgatacagtcttttntatatttctcaagagttgagagttcctaacaaacataaaatatcagaattccgttacaggatcaaaacaccatgcctttccaatgaaggccatcgccaaattttattagcagcttgataattagtcatgcttcagcagctgcgtgttctcaagtctcaaccgatttctatatatcatttcgattntattttctacatcaaagagcttttaggtgtcaacatatgacagtatggattcaaaaccttaattaagagccacccatccctgattagaagagctccaggagcattaaattagcagagatatcatacccaaaaagcagataaactcctgaatcgtgaattactattattgtcgtaaaagagatcacagtgccaactgacaggtagtcattcatagtgaaaccaaacaaaccataatttcta

SEQ ID NO: 15469 - DNA, 485 bp, Oryza sativa
cttaaatctaagcttctctaacatcctgtccgtctcatcaactacctgaaatgtcatatattaagtagaaattaaaggcactaaaaagatggaaaagaagactcttagtgctaaaatcaaagtgcatatccaagcataaactgctggtctggtcaatccaataattatgtgaaaccaacataagggtaaatatattaataaactatcttccttattccaagctgtcctggaataatcatgttcttgctattgctgattgaacaaaagaacaaacaagttatcttatgaaaagtaagcaagcggggaagattaagggggtggaatataactcaagaggacacatagattgttcccatcaacctaccaggtattgaagatgctccaggctgaaacctgttgtcatgctgatatgatccatcagtcttccaggagttgccacccatatatcgaacttagactgtggttacatatggatataatattca

SEQ ID NO: 15470 - DNA, 461 bp, Oryza sativa
  unsure (1)..(461): unsure at all n locations
agcttagctacgattatctcccttttcatctgcaacaatggtttacatattgtgctatgttccctgaagaccataaatttgctagtgatgagataattcacttatggataggactagacatcctacattcacaggatcaaaacaagaaaattgaagacattggattgagccgattgaatgatttggttagctatggattttttgaaaaacatgtagaagatgggtcttcatactacgttatgcatgacctactacatgagttagcattgaaggtttcatcgtatgaatgtcttaccatatgtagttcaaatgtcaaatctatacaaattctaccatctataagacacttatctattgtggttgatgacatggacgtanatgatagagtgacttttgaaaacatcaagaaggatttcatcacattaagtaagagactagatgttgganaactgcactcattg

SEQ ID NO: 15471 - DNA, 352 bp, Oryza sativa
  unsure (1)..(352): unsure at all n locations
aacgacgaccgggttcgccagtcactccggatggatgacctcacgtatgaatccggcctccagaagtcgcgccacctcctcgcggatgaaggcttgacgttccggggcctgccgccacactttctgccggaccggccttgcgcccggccgcacggcgagacggtgctcaatcacctccctggggaccccgggcatgtccgccggtctccaggcgaagacgtcggcatttgcccgcaggaaggagacgagcgcgtcttcctatntatcgtccagaagaccaccgattcgtgtggtcttggacgggccgtcgcccagggcaacctccttgaccgggacctcgtcgcacgtgacc

SEQ ID NO: 15472 - DNA, 380 bp, Oryza sativa
agcttaaaggcacatgccacctttgcatctgggcccaccgaaatgaggttcttgtgtccaaagaaggccaccggttcttgggagaaaaagtatggcgtgtgaggatggaaacagcactgtggagcaagtggcatcggagtgagccgcgccggcggtcgtgggggacaggcagggcgtgtcgccgccgcaccacccggagctcggcagccgttctgaggtcgtcccgtaccgccagatctgcatcgccggcctggggaggagagcagcgcagcagcgaccacagcagcggcgacgaagccacggccacggtcatcctcgcgccgcacccggacgagccgtcgccactggacgccgtcgtcgagactcatcgctgccacgct

SEQ ID NO: 15473 - DNA, 487 bp, Oryza sativa
  unsure (1)..(487): unsure at all n locations
tcgcatgacgatgacgatgaaggcaaagaaagatgaatataaaaggaaggggttgtgaagtgggagcaaggaagggcagctggcgcgcgagtggggattgctagctaagagcatctccaacagcctcactattccactctccattctagccaaaaaaacaccctccaacaacctctncaaccgaatgactaagtcatctagctggctaaaaccttccctccactagccaaatttggccagccaaaagtgactagccaaccatgggccccacacattcctgctccctatcttcactctcgcatcatccatcgtccttcgcgtcgtctgcctcacgccatcgcatcatccatcgtcctccgcgctgtcggcctcgcgccatccatccaccgatgcctgccgcggccgcagccgccactgccggtggtgacggcgctgcgcctgcccaaaagacgcccccgagcccaccactggcttcttcgtcgcaccg

SEQ ID NO: 15474 - DNA, 455 bp, Oryza sativa
agcttgattctttttttctgaaagttgtttatttcctacaaagtgcgattcttcaccattcaggtccatggttcacatgcctgttgattttttttctagaaacacagtacaaacgcaggcacccatttctttttgagaaacacagtataaacgcaggcactcataacgtacacacactcacccctataaacacacacacgcataccatacccctatgagcacctcccctatgaacgcacacacgcacaccatacatctatgagcacctccggaagactggccggctagaaatacagtacaaacacatgcactcatttctttttgagaaacacacacgcacaccatacccctatgagcacctccggaagactggccggctagaaatacagtacaaacacaagcactcatttctttttgagaaacacagtacaaatgcatgcactcacaacgtacgc

SEQ ID NO: 15475 - DNA, 224 bp, Oryza sativa
accctactcctgagtttgggaatatggatgtggtttacaaaagaattcttcactctagaaagcgcactcgcttactctcttctggagatcaggttttctcggcgtgccccccgtctcaacgggcaaggttctccttttatagctcaaggggataccacatgcgccgcctctacctaccctttctcggagggggatgccaatccacttttcctcgtgctttaaat

SEQ ID NO: 15476 - DNA, 435 bp, Oryza sativa
  unsure (1)..(435): unsure at all n locations
agcttgatgaggtcgtcgaacatgatcttatccgggatggaatgccttgacaggaactccatcacttggctctccgggatggttgcagttgacagcatcctgtcgttgggcatcaagaaggtggtgttgtgtgggatcttctcctgcaccatcctgatgagcatgacgaaggtgaagtagcgggctcgctgcatctcctgtgcagtggaggcgatgtcgccattgcccaccaccgccgatggggaaggcgtagcagcgacgttggagcctgacactacgagggcaatgagcatgctagcagcaaggaaggaagccatggngggtaagtggtagcaagaggtacgagctcagatcttgtattgtattactagctccttgctgccatcaagctgccatgctttattctntgtaagaaatgtgggggtggagatggat

SEQ ID NO: 15477 - DNA, 468 bp, Oryza sativa
  unsure (1)..(468): unsure at all n locations
tganattcanaantgcttcggatataatatgcagcggttattaaatctcanaataataaacaagaacttgcgtacgttaagcacagtatgtagttgaaattcaaataatctaggtgttatttaattacggaataatcatgacaatactctaactacatataaaaataactaatatatcttgtcgcaagccataagtaaattaaagtttagagaatttcttttcgctcaagcacaactttattaggttcaataatatattatttttgtgctacgccaatatataatatagatcattggaataactacaaatattttttcaagaaaactgcagtacttacaatttcagcaggcactaccagggaacggaagtctaccgtgtgcctaaataactcggtaacagggctaataatgaagtattggtaccatgcatggaagttccaagatnttaattatcttgtaaaattcttt

SEQ ID NO: 15478 - DNA, 454 bp, Oryza sativa
  unsure (1)..(454): unsure at all n locations
agcttgttttataaggtaagtaatgactgttgtataaagggaaatgtccgaagtgccctccaatcatcatcaaggagtgatccggagcatccatgccaaacctcacatcaaacggtggaaaggatggtttggccaaaccctagctaggtcgtcctggcctggccttcggcccatctctccctctaagcctgctttatccaattctcgaagttttgggactatcctgtatagattcaattaagtttaagaaccaactcttatatggataggactctccttcacttttagtctggatttcctccaaacttctgggtttatcacctgcatacaaatatacaccaacacttgtgaaatatattagaaataaatcctatcactatgttggatgtcttgttatttgaattntatgcagatgttggcggtataaaatgagtacttaacagccgccaacact

SEQ ID NO: 15479 - DNA, 458 bp, Oryza sativa
  unsure (1)..(458): unsure at all n locations
tcaacgttctgctcccgagagacatgcttcanaatcattattcgaaaactattcatcaattcccagcatttctcgttgtagatcatcaacgcatcatttttgcattcgtattcccctgccaattgactgatcaccaacaaagaatcccccattatctccacggcgtgggcttcaacttccataagcaactgcaaccccttgagaactgcttcgtacttagcttgattgttagttgcataaggttttgttgatgctttttttttgccaacacaagatcacctaatgatttgcggtgcattaaacagagtcgccaaaatcaataaatcaaaattggctagtgaaaccgatttcgagattaattcgctttcgtggaatcacacgactaatttacgagcacaatagtaaagaagataatatcgtacttacgtgacgacgaacgactagtttccgagcaaact

SEQ ID NO: 15480 - DNA, 400 bp, Oryza sativa
  unsure (1)..(400): unsure at all n locations
agcttaatgtgcattgaaccatgacactctttttaactaatagccattggatctctctcatgcttgatacataattaaacatctaagtgtcatgttgtattgttatttcatatcaactactatagaactaataataaccatttagatatctatatcaatatatcctatatagttggaaataatcattggattcctctcatgatttgatacataaccatccatgtgccatatacaattngcaatttatatcaattactatagagctcaaaatattttacatctagacaatacaagcctgcgattacacattnttcttcgagcaaactntgaaatatttctaaattccttgctgcaacgcgcggggtatccactaatagtatctatttgtacaccacgtctc

SEQ ID NO: 15481 - DNA, 367 bp, Oryza sativa
ctcaagctcttaattatgaatattcttttaacaactcgcaccagactatgctaagttcacattgataaatcacgaaaaaaaatacatgattacaagtgtggaatgtcgtaatcaggagaacaaagaaaacattaccactacccacacaccgacaacaccaacacagaccccggagaaggctagcaccatgccggccggcgctatgccaacaaaggacgtatagccgggatctcccaaaacccaacccttacaaccgacacagaaccctactctatctatgtctttgggattgagggagagaaggtgataaagaagagtggaaccgctttccccctacgtcatgcaacgtggcctagtagcgtaagct

SEQ ID NO: 15482 - DNA, 372 bp, Oryza sativa
  unsure (1)..(372): unsure at all n locations
agctntattcctttaccgatgacctttgtcaaccctcttagatatgtcaaaaagacttgaaggctccctggaaactctggtgacaagttgcggatccatccaggatagattcaacgaaatccatgacaaaattccagatgagctagccgatgtctttactccagcagtctatcttgaacagcatcggctcaagcttgaaaaggctaaaaacagaatggccgatcgtctcgagagaagggatctggaagccactatccaagccaacagggtatccattaatgaagaaaaagctaaacttgatgaactggagggcggtctagattctattcaaaccaacatcgatcggctgaacgcttcgtagatagatctttt

SEQ ID NO: 15483 - DNA, 454 bp, Oryza sativa
agcttgggacttgatcgaagttcacggcttgaacgatatatccaaagacatcagttctaaggcctattttgtgatccgcccgtttgcttcacgattatgaagtatatcgctgagtggaaacgatgtgaccaccatgaccgagtgaccttggaagtagtgagataatttcctgacggtaattagaacaccatataacagcttctgaacttgaggatatctcgtcttggagtcggccaaaacctcgctgacaaagtagattggtcgctggactttctgaacatggccttcttcttcacgctcgataaccagaactgtgctcacgacttgagaagttgccgatacgtacagtaatagcggctcttgtgggtgtggtgaggccagaactggtggagtagtgagaagtttcttgaagtcttcaaaggctttctgtgcttcgggtccccactggaaattg

SEQ ID NO: 15484 - DNA, 417 bp, Oryza sativa
  unsure (1)..(417): unsure at all n locations
taaattntcttttaccctgctgctattaattgatattaataacccaatggtccctgcacgaatggagaagcgacattagccattgatgactgatcaggagctagcgctatacatctattatattattaaaacagcctttaaagaaagcaccatgttcattgtgggggctagaaatttccacattaatagagaaaaagaaaaaagagtccaagtagaaatacaatctaaaattagctaaaattcggaattaaaagaaagcaatattgaaagaagagtccatatatgaacttaatatgagattaacaaaattcagaataaaaataaaataaaatccaaaattaggcaaagtataaataactaaaattggtgataaaaattaaagactattgaaagaaaagaccatcctaaacacatgac

SEQ ID NO: 15485 - DNA, 434 bp, Oryza sativa
caagcttgcacaaaatggggaaccagaagaagcccttaaccttttccgtgaaatgtgtatggaaggagtaaagtacagtaatgtgaccatatcttctgtgctatcagcttgtgcaagcttaccagctatatattacggaaaggagattcatggtgtcgtcataaagggccccataagagcagacttgtttgctgagagtgctcttatagatatgtatggcaaatgtggtaacttagaatgggctcatcgtgtttttgagtccatgcctgagaaaaatgaagtctcatggaatagcataattgcttcctatggggcttatggccttgttaaagagtcagtaagtttattacgccatatgcaagaggagggattcaaggcagatcatgtaacgttcctcgctttggtttctgcttgtgctcatgctggacaagttc

SEQ ID NO: 15486 - DNA, 449 bp, Oryza sativa
agctaggtggtccaatagagagatgcttaacagtaagcctacattcatctcattttccccttgcaagagatttcaaggtattacgattactgaatggcaaaagtgccaactagttcctcttacactttgtcatcatggaaccaccatctggtctccttcggcgacctcccattgcggcaattcctaacatagcggtcattgtcttgagggcgttgctgcaaacaccacattatagcaagataccttttaatgtttttggtcagcgaaagaaaatgggaagggtgttagttatatataataacctttgctggtgaacttgacaacattgacaaaatgctgatgcagaccgaactgacagtcattgcaggtgaccaagaatcatacagtatatctgcagatatatgaccagcagcaagctggtattcttaatggccattatatttatgcat

SEQ ID NO: 15487 - DNA, 438 bp, Oryza sativa
tacggggtggtactgccttggtaggacttctatttaaaatataaattgcagtattaactgcttcagcccagaaagatttaggcatacctttgtcttggagcatagaattggccatatcattgatcgtccgatttttccgttctgcaactccattttgttgagcactatagcctgccgctagctgtcttcggatgccagcattttcacaatatttctcaaattcttttgagatatattctcctccttgatcgctgcgcaatactttaatttttcgattactctgattttccaccatggccttgaagtttttgaatatctccaaggctgcagatttttcttttagaaaatatacccagatcattcttgtataatcatcgactaatgtgataaagtaccaatttcctccttctgaaattgttggcacttaccaactatatc

SEQ ID NO: 15488 - DNA, 401 bp, Oryza sativa
  unsure (1)..(401): unsure at all n locations
gaagaagagaatttttttaagcgtgccagccgaaggtgtgtgaatgaagtcaacccatgaacaggctgaacaagtgaacaataatagtgaatagtttttttcttccgtacctaattatctctatctatgatccacatcaccatctccgatcgcatacatcggatctgatatatatcaacttcaatctcggcaaaaccctgtcaactgatcgaagccaaagtcttggataataactcacctgaatatcaaatgacatagcatgattgatcttgtttcatacagtacatatatatgctactccctctgtttcacaatgtaagtcattctancaatttacgacatcatattattatgaatgtgtaaattatagattgactaccttggaacgggaaatatactat

SEQ ID NO: 15489 - DNA, 389 bp, Oryza sativa
  unsure (1)..(389): unsure at all n locations
cttcctgttcatcccaatggccgagccagcaaaggcgctcgatctctccccgagtatgagcggtgacgacggngagccaaacccacgccgtcgagctcgtacttcaccgccccctccacgccaaagtcctatgcgggagaaggcgctcgagagggctgaaggatccgcgacttcgacatccacaggaggtggagaaaggcggcgagatggggagcgtcgcctcctcgtctacggcgacggcagcacgccccagggcgcgctccaagctgcaggcgcgctcctacgtcacccgcctgtcgcccatgacccggagtctccagcccaacgttggctggacgatgtggccaaattggtcatgactgcaaggcagcgcctagatgctggtgggc

SEQ ID NO: 15490 - DNA, 427 bp, Oryza sativa
  unsure (1)..(427): unsure at all n locations
agctntacttagaaatattctttntatttgcttattagtgattcggataagcatatgaataagcgaaacaatgaggctttgtgtccgaattaaagcatcattaaacaatttctgaaaacaatttcttcaatagcgatgatccaaagggattcgttgaactctaacaattattaaaaatgttcttgaccacaaattcacctggccatatgattatcattacctattttctgcaattaaatttatgtattttcattctggtatattagtctcctgctgtttaaaattacatatcattctaccttgtcctaatttatgtcaaacatttctattcttgacagtcaatttctagaaattgtataagtaacaacatgcgaatatatattacaaagtatttctatgatgaactanaacataatctatgaataaa

SEQ ID NO: 15491 - DNA, 448 bp, Oryza sativa
caaactaagcttctattgtaacaaatcagcaattgccctcagcaaatttcctgtgttccacgagaggagcaagcacatcgctacccgctaccactacattcgagaacgggtggaagatggctccgttcatgtcgagttcgtcgggactgaggggcagattgcagacattttgaccaatgcacttgggcgcacacgttttcaggagcttcgctcccgcattggcgttgccgacgtcaaattcaggtgcaagacttatggggagattgttggatactttgattaagttagcacctgttctaccgctttgttagggtaggttttatctcctgtcttttacttgcatgttttcacggctcgggtattagaacgagcgcgtccataagccccgtgcgtatgttcacggcgtggcagtaatgtagcgagtcgcccactgcacgatccgatcgtg

SEQ ID NO: 15492 - DNA, 242 bp, Oryza sativa
gatcatctttggaagcactatacagtttcacgcgcggttactttgacaactgctaccgaccacggatacctgtgtccctcctagattccgatcgtaacgtccacccgggcacgttcgtgcatctggaagttcctcgtcgcaagcggctgctctgtggaaaaccgcgtccggtttaagcagacttaatgcgcgctctgcctctatgccgactcgtcccggcggtcgaccacccgacgcttacc

SEQ ID NO: 15493 - DNA, 428 bp, Oryza sativa
agctttgcacttcttggagctacatatgtatgtatctagcaatcccttgaaaaatgcaggaagaaggactacattaatggtgctgtagctggttttaccgctggtgcaactgtcctgggtttcagaggtaaacatattcaacttagttgaatttctatacctgacttgaattgaaaaaagttcaaagtcagctgtcccaacatccttatcgaaattgttttatgttgcttgattgaatgtttctacagccaaatctaacatgaacaaatgccttccatgttatcctttgaaactgtattgatcttccctatctagtagtatgccacatttatatgaactgatagttgtgcatggtatgcctgttctactgggctagcttctgataccgattccttataatgtaatgacactatacaactggagcacac

SEQ ID NO: 15494 - DNA, 368 bp, Oryza sativa
tagctcgctttttggaccaaaatgagaattcagttaatataaggggggaatagaaagcgccagaaaagtggaaaatttccatttaacctggtagttacatttttcagaataccaaattattatgcaagttcacacagggggtagctcttcctattcagaacctaccatatgtcaaaaccgtccactgcctgcaaccttaataagaacaaaattggtcccacaaaccctatcaaattactattattatatgataaacctcataataaagataagtttggacaaaaatttgaatgagggatatatgaaggacagactgctgatgaaatcaggactactgattgtacagataccatcatactggtatcaat

SEQ ID NO: 15495 - DNA, 488 bp, Oryza sativa
  unsure (1)..(488): unsure at all n locations
tgccctanagggatgcatgctgcagcaggcatgtcctttcctatgtgaggtgtggcgcggcatgcgtcgagcaagctgcgtgcgtgggcacgtgttggtcggtctggcccgtgctagctgggccgcgtatgaaaaaaagaggagggagtggactgggccggcttactgatgggctgaaaaataaaaggataggagagagaaggctagcccggcctgagagagaggggaaagaggacgacgaatagtgctactttattaataactagtgaggcacgtcgacatatattgaccatatacatccactgcctaaatcaatcatgagggttagtatgtggtaacataaatcataaaataactatgttctggtaatggtatcttatcggaataaatcattcctgcagatgttgatagtgaagtccatatcaatcctcattgggtatcttttcacatggtggcgagcttaccatatcaatttgatgctatgtatg

SEQ ID NO: 15496 - DNA, 343 bp, Oryza sativa
  unsure (1)..(343): unsure at all n locations
agcttatttccacttacatgtgggcctcctctgttagcaacattttgaagtttaatttgtcaaagtcatttcattgcctcgacatccacactcaaaacttacacatggctcacaagagtggattggatcaagggtgaagttcanggcaaaagtgaaccatggccaaatgaaaatttcagagttaagaagtggactacatgtccttttatgttatttttatgctttagtaactatgatgagaaatggcncnnccnctcttctatngataggactctgcttgagtggtagtcagcatttcctccccactgatgagtctaacccctgcatacacatttacaaccac

SEQ ID NO: 15497 - DNA, 449 bp, Oryza sativa
  unsure (1)..(449): unsure at all n locations
tcanaanttcttcaacaaagaggggaggtcatgccatattttctattgaatatattntggtgattacatacaaatcggaggtgcctaaaaggtttacaacttcatcctccaatgtttttttttgtcatactacatttgcacctatgttttgcacactttttttgtctccaaaatttagttgtaagttgatgagagagaaaatgtgtgtggggaagaaagaatatatagaaatttagttcatttgctaaacaaggttttataaaatagttgagaaggaaaactctagtgaaagttaatcttaaataatagaaaacaaactaaaatgaaaattaagagaagtaaacacattataagtagttttaaactttacaaatagttcttaagaaatatttggcggtatagtttatgaattttggatgaataaagatatcttataattattgatgact

SEQ ID NO: 15498 - DNA, 433 bp, Oryza sativa
  unsure (1)..(433): unsure at all n locations
agcttttccagtggcacacgccaccattggtcgctccgagagccgggctggacgtcgtgttcaatctccgccagcggatcttccattgaggacaagtttatagcggcggcagcgtagtaacagtcggaggcaagcatgacaaggtcttctcgttgtgattccgcagaaaacctgattgagggcctgtttagatcaatttgctgcggcaaatttttttgtaaaagatttggcattgcaattttacaactaggtgtttagatccattttacccaaacagtggtctaaaaaggaaaacttttgtcattntggagagtctaaacaggccctgaatgcatacgtaatgcgttacttgctacatggtcgaatcagaacgcaaaagcttgcttgatgctnggtgaactataatcgtgtatgctataccaggattctaatt

SEQ ID NO: 15499 - DNA, 424 bp, Oryza sativa
ctatgatataacgcattgttttcaaatatcttgggtattcacttgaatacctatgaaccatggggggttcacacctactagatgaggtccgaagctgctattcgttgttatgagtaactaggcttcgagcagtgacttgatggaaactgcaagtgtgtgtttggaagcaatcaatagcattggcacatgaactttaacaacaagggctaggtgtaccggttcaaaaattggtgccatgcttgatgtgctaagacaatggatagtatctatatcttatttggtaatgtcctagaaagtgactaagatctcacgatctttatgatgtgagcttgaatctacaatcttatcttattatgatcgaccttcactctttgttaatctgaacactctcatttaactattgtaccattgtgctgctaagatc

SEQ ID NO: 15500 - DNA, 350 bp, Oryza sativa
  unsure (1)..(350): unsure at all n locations
agcttggnttactttatttacttacctttttactttgactttctaaactttattcaaattaatccaaaaacttgtgctattaattggataaaggtcttaactcactcctttcacttgtctttagatgccgcgctacaagcctgagtacctgtttggtgttgagggttttgtccaagagttgcgtacgatgtcctttgtcattggatttgggactgcccctttttatgcccagattcctcatgatcgtcatgaagagaagtgtcgagtcaaagtcactttgaacagtaatagtgaagaggtcccctcagtaatgttcgaagctggaggaagaaactacatccatgcatgtc

SEQ ID NO: 15501 - DNA, 352 bp, Oryza sativa
tcggaggatccctacgcttactaccaggatggtgatgtatactatggcgctcagtaggtcttagttacggtcgttgcctatggcgatggcgtgccgctgccttaactccgctgccttatctacttttgcttttggaatgtattccggaccgttcggtcctatgttctaagactatgcctgggggcctatgatgtaataattcgcactagactctcgtgtatgtgcacttggtatttcagctatgaactcgtgagtaccagactacttgatccagggaaatgatactgtttacacgattgattcctgctataaaaacgggggtccacagagctggtatcagagccatacgact

SEQ ID NO: 15502 - DNA, 418 bp, Oryza sativa
tctgaagcattttaagaaacttagtaacaaggactggaaaataattgacgaaagaattgaaaagaaacttagtagttggaaaggtaaacatttgtctgtgggaggaatgttaatagtgattaattctgtgctctctagtttagctatattgatgatatctttttctagattccaaaaggagttcttcaaaaaattgattattatggatcacgtttcttttggcaaggagatgagcacaagaagaagtataggcttataagatgggatattatatgccaacccaaaaatcagggaggtctaagagtgcataatttataaattcacaatcaatgtcttttaagtatgttgtcgaaacgacaaccgcatatgtcgaaagacgtggttactcaacagtggttggaaaacacagtgtattaat

SEQ ID NO: 15503 - DNA, 351 bp, Oryza sativa
gactctaaattatccactgctttcaatacattatcttgaataagtttaacaaattcaaaataataagaacgattggcaagtatatatatatcaaacatgctattatcatttaatactcaagaccgccatgagccagacaaaagagcaccacatcaagcaaatcatgctccataaacaatttagtgcatgatgcatcattatcaaaaactatataattacacagttaataacatatctctgacattctgagctaatgagctatacctctgaccaactattaataccacctcgctcctcagaagccatacacaactcacacacagctcgtattatctagcccacgagcccact

SEQ ID NO: 15504 - DNA, 458 bp, Oryza sativa
agcttaccggcagggtttcttttggcctactgtagtgtccgatgccgacaaaattgtgcgcacgtgcgaaggttgccaatttttcgccagacaaattcatctaccagcccaagagttgcagaccatcccactgtcttggccgtttgcggtttgggggctcgacatggttggcccgtttaaaaaggcagtcggcggttacacgcacctctttgtggccattgacaaattctccaagtggattgaagctaaaccggttgtcacaatcacagcagataaagctcgagacttcttcatcaacattgtgcatagatttggagtgcccaatcggatcatcactgataatggcagacaattcactggctggagttttaaagacttttgtgaagactttggaattaagaattgctatgcctcagtggcgcatcccatgagcaatggacaggtggagcgagccaatg

SEQ ID NO: 15505 - DNA, 364 bp, Oryza sativa
  unsure (1)..(364): unsure at all n locations
actaagctcaccgnnnnnacactaccttcgggtgcgccaattatgtattttatttcttctaaagntctacctgngtgtgtgcgcatgcattcggcaacctttacaaccttgtagcngnngctggtcattaacattctacggtaaaacaggctgaaaaggacacttggtctttggcaagccatttaccgccacgaacttatcgttcttgtttcgccaattatcagcggggggccgaacgcatatttttcggccacgaacctcctagtaaagcacaaaggaacaagtgcaaaaggaaaaatgcggacgatatcaatcccactctccagcagaatcataaagttggcgaaacattaactttctcatt

SEQ ID NO: 15506 - DNA, 309 bp, Oryza sativa
agcttgtctgcggtgaaagacagaaacgttcttagtgttgggcatacaccatgcgcacactgctctaacatatgtgcttaagtccctacaagacacatgagtttaccacacccagaaatagacagcatatgtggggtaaaatccgatgaaatgaactgattaaagatttagccaccgtctggaaaatgatcacatatatactcagcctaattcataatattgggcaataaatatgcacactattgtggttgagaacaatgatattgtatccactcaattgcttatgaacctcaacagcaccttgactta

SEQ ID NO: 15507 - DNA, 391 bp, Oryza sativa
  unsure (1)..(391): unsure at all n locations
ctagcttctattngaacatgcgaatagagtgcggctctatatgttccatcacccaaagcacatagcttgcatacataatattccatcaccaaagtcaggttagaagcttttggctcgaaggacattctcgtctttttgaataatctctaaccaattaggctgaatgggtcctctagcaaattattagctctgtacaatgtacgacaattgatatacatttttcgatgtctgccaacagagtacaccaactctgagtatgcatgtacgaaatgtgtcctaaaaggaatgtactgacgagccttgagttgctcattactgcgcatatttagctgtattgcatagaaaacaagaagaccaagaagcttcacaactttctcaaatataatattaa

SEQ ID NO: 15508 - DNA, 456 bp, Oryza sativa
  unsure (1)..(456): unsure at all n locations
agcttccctggatctgggaaggttctctttcacggtattgggatcgnttgatcgatttccttgatcgctacttatgggcgtgcgctcaaaggatacaaacagggattcgcaaacaaaaaggggaattcgtagtcactttttcctgtcgcgtaaaaaaaaggctttacgcgagagcaataaaggttgggatacatctatctcttctgagcaacctcttttggattcttaagaccacccttgcagtaggataccgtctgctttgggttctttattatattatctccttcgagggatttttaggatcgttcaagctatnattagtctattttggcttttactgtctccttttctcaaggaagtggttaaagacctcagaagatagaggagagcgccaggcgcagatttccggaatacttctacggngaatgctcatngaatgcgcattctccgtattat

SEQ ID NO: 15509 - DNA, 456 bp, Oryza sativa
  unsure (1)..(456): unsure at all n locations
agcttcactatgcttagacagttaattccattgtcctagatcaactgctgatttagcttcatataactgtgctattaatcagaaaactgactgaccatgtttttatcttctcccctgcagatttaagccctatcccctaaggatggctatgcttacgacaatctatgggtttggcctttacaagtggtggatgtacgtatctagctagtggaatccaccttcctctccgcctttgctctcatgtatggattagaagtttttgggagagtaccatcatcacattgccattcttggccatttatattgcctgattntattatacactgccaatacgaaacgtctaatggggattggggaacagtcctcatcacaggttgatgtctgtaactaatggaggtttgtaatgggcaaatgccactctcagctcagctcagctcaatattcctagcccctatt

SEQ ID NO: 15510 - DNA, 388 bp, Oryza sativa
  unsure (1)..(388): unsure at all n locations
gtggtcccggtagaattatgctgttcttgagcgttgaatcggtagggggatggatacacggnggcgctatggttcaagatgcttgtgtttgaggtatagagatctcgagtcagggtcggttgtttttgcgtctccttagacgagatcttgtgcgatccagttatggggaattctggtttgtgagattgtgagaacgcactgcaagaggtgattctgacttttatctcctttttgctagatgtgtatgtgttggtgtatgcttactactagtatcttggttttagtatttagtcatgagttgacatgatctccactccccaaatcccagatccagttagtcagttacgcgctggtgntaccttttgagtttgagggtgaattatactga

SEQ ID NO: 15511 - DNA, 463 bp, Oryza sativa
  unsure (1)..(463): unsure at all n locations
agcttccttaaaatcattgtgattagacattttattcttctggccgcctaaagagcataattaaccatgtgaacattccctgccatgaaaccatgccaatttaacatttaccttcagcagcagttttggaagctatttatgggttatagtccacaattggcgtgcaattgaattttgtaatgtgatctaaccaaatattccatttccaaaataatggggtttccatcccttgcactacaaaagatggtgataatggtcttctttaaaatacttccagcaacaagaatgcttcaaaatctttcaacaagtgaaacaaattattcgtgagattattgtcacggttatatattttattataaagatatattaaatattnttagaaatgcacttagcaaactccataaanaacctagtattggacaagacataatcctaataaatggtatatcacatctaatactat

SEQ ID NO: 15512 - DNA, 458 bp, Oryza sativa
  unsure (1)..(458): unsure at all n locations
tggaagagaggcaagggtgntttgcanatctattgtttgtaatcattttgaaatcactaagtgatttatttctttctatgtttgggcgaaaagagacttgcgtctcgattcgactttaagagatgcttttcaacaactcaattggtaatgtaccgacctcccgggtcggatcattacttctcggctcccagagccatttcacttggttaatcggctcccagagcctttttcattttctcggactcccagagtccagctgcccagcagcacaacaatccgcttccactcgggaagcctagtctatgatgcccacagacatcctgaatcacacagattcggttctgaccactcangtcatccatctgccacataggctgattctggttacgattcccacaccacaacaacttttcacanagcacagggcaacaaatctacgcaacgggaaccacctcaca

SEQ ID NO: 15513 - DNA, 446 bp, Oryza sativa
  unsure (1)..(446): unsure at all n locations
gcttactgtgagactccacttcaatggatagtttttgacgatggaacgatgttgcattgagaaagacccggaggtcttcaactgtcatatttttaaccggaaggatattctaaaaagttttattatcccatttcaggcgacttgtttaccctgcaaattgtttccgtcattttctagtctaaaaaatttgctgggcgatctgccatgatctgtatcgatagtgatcgtcttaaatcatttcaatggaaaggttgcacatgctgggattgtatttcaaggacagtaaagcatctactttggctgcagcagacgcagcctgccctccatttgttagccactgcccaagaatctaagatgacatgcattaaacttatgggttgaagtgacaaatggtgaaatggaggcctcaactcacggctggattngaagatgtaatgagaaaaaag

SEQ ID NO: 15514 - DNA, 485 bp, Oryza sativa
tactaagcttatgcaatgtaccgggttcttctctggagacttatgttttcatgcaagaacccctccgaatagcttcaagctgctgtgaaatagttaatgctgatcaagtgtgtgctggagaagttggtaagaacagcttctctcttgatgaagataggggctatgttacctgcccctgtaatactacgtgggctctataaaatgcaatggccatggacacagtggagtctattcatggtgatattggaaacaacagtaacaattcagcggcctgttgaagtatgggctctgattatatggaggaagtgcaccaacttgtgacaaactgttctgagatatctgcagcaattcctgaaagctctggaactcttaacaacttcgcttaatgctgtggagatagtgcagacaagaatagcttattggatccacctcagaaatgtgagcactgatctacgaagcagatgctcctaagacaacatacacag

SEQ ID NO: 15515 - DNA, 446 bp, Oryza sativa
agcttgacgcgaatacgatcgatgtggctttgttagtgggaaagcgaatcgaatcaaaccaacggattacaagggagaaggagatgggcggttgcccacgtgtacaaccttcttaagctgccctgcttctagaaccaacaccagctaatcacgcagccaacgctctaatcacgttgcctctttaagtgttaatgctcttatacttaacagggcggtattcgtccaccaaattgctaatggcccatacgatttcatgggtatatcggtttatttcccatattttgtcttcaaattccttccttcgttccaaaggatgcttatagtagtctaaaataggataatggatgaaattgaatctatgataattactcgaggacacgaaccaatgaattactatatattggtttatattataagtcgcttatattttttctattacacatttc

SEQ ID NO: 15516 - DNA, 457 bp, Oryza sativa
agcttgagacgacagttatgcaactttttgtcaaccatggatggaggttcacaaatagacttgaataattgtgtgttccttatcttggtctggtcacttttataatgtttgggtgcgtttaattctatttgaattacactctctgttcgagtgttagattgcaataattggctgtatctctatcgagcaaaggccgggatgttatctattccattatctataaaaaagggttgcgtcgttccgaggtccttcgagccctagggttcttgctaacgtttggtggtcttttctatccctagaacccctcacgccctcctattctctctcttcttccttggagtccagacagactccagcgccgccacggctcgaggttgggaggagaacagtaacgggccatgcccatccagcatctcatatcatgagggcctttctggcccagcccgagcacacagtt

SEQ ID NO: 15517 - DNA, 393 bp, Oryza sativa
cactctattttctcttcgccgagaccctggatgatatgcagattcctcgctccgagctaaaaccaagcaatgcgccctttcacggagtaattccaggattattcgcaactccactcggacagatcaccctcccagtcacttttggcactcgggagaatgtccgcacagagaacatcagctttgaagtcgccgatttcgagacagcataccatgccatactcggacgcccggcgttagccaagttcatggccgtcccgcactacacttacatgatgatgaagatgcctggtccccgtggagtcctatccctactgagcgacatcaagcaagccgtcacatgcgacatggagagttgcgacatggcccatacccgcgagatggcgtctggccgag

SEQ ID NO: 15518 - DNA, 459 bp, Oryza sativa
  unsure (1)..(459): unsure at all n locations
agcttgcacagcaactattgattccaaatatgtgctttacaagagatagagcatctggccttttccttttgcttaatatgtctaacagcagtaaggattaaggaacactcagacaacatactgtaatcataggcaatgctagatttcaacacatcatgggatctgatatgtgactataacatgccatgtaaagatcgctccatacataggagatgttaatccaacagtggtaatggaccaattgcataatcctctattttttttcccattgaactttgttcaaaaactgaattgatagaactacttgtaataaaatcaaatgtcctagcctacataaaaatagtaaaattntagaacagtacaatgacacggaatgttaaagaaaagaaaagaactctntgcattaattaaagctaattgaatgggactacaaaattatctaaagatgatggccaaatg

SEQ ID NO: 15519 - DNA, 395 bp, Oryza sativa
gacacttaaaactaagcttactaagaaaccatgtgcaccagcaaacgcttgttttaaaggaatgggttgcaccagaatcaaacaatattactgccggtgtcgagttgacggggaatgtgcccaatataacctctggtgctgactgcgcctcctctgcagatgcatgattaacacgggcctgaacgaacttgggtccagcacgtcttggcttccggcactttccaaccgtgtgtccgggtttgttacaattgaagcagagttcgggtttttctcccaacctcttgggctgatctggcagagctggctgaactgattgagctggaatctttagtgaactcggagtagggttgagactgtgctgctcactggttgtgtgactgccattatggtggttc

SEQ ID NO: 15520 - DNA, 445 bp, Oryza sativa
  unsure (1)..(445): unsure at all n locations
agcttaacttcattagtcaatgtgcgtctattttgaagcagatatgtcaaccaaagagatggaaaagtccagcacgatcgagcaatcaattttcaggtttaatggattatatattcaggacattttcgtgagataggcgccagttttggggtctatttatatatatatatatatgggttcatacatttccactaaataagttaggtacggcattgttatttctccgaaataagctctttcaaaatagagcaattttacggtccttaagaaggtaccatgaggtaccacttttttctattgtaaatttggtacctcttgatatctatgtactattaggtaccaaattttacactgaatttttttttgtaccttatggtacctnctgaaagaccgtagaatgctcatggtcctcatgctccatgtacctattaaagaaagtaaattt

SEQ ID NO: 15521 - DNA, 409 bp, Oryza sativa
cgttgtttatgtgctgcaagcaaatataaaggtttctttcttgtctttcattcaatcatttatttggcatgaacagggaaaatggatggaagtgggtattttacaaacttgataaatgagggtggtcgcacttttgctgcttaaatagctgctgttgctgcttgtactggtgaatgctgctgctgctgaaatttctgcctaaatagctctcgttgctgctgtgtgatggatgctgctgttgctgctgctggtggtggtgaatgctgctgctgctgtgtgatgatggatgctgctgctggtggtgaatgctcctgctgctgctgctgatatgatgcaagaattcgtgctgctgctgctgctcctggcatatacgccacctggaatgctgttgcatataagtagattggcg

SEQ ID NO: 15522 - DNA, 403 bp, Oryza sativa
gcttgaacatgcagtgacaagtttctgtacacatcaactgtcacatttggagcctgaggatccaaatgaagaaatgggagtttgatggtttccctctaagcatctaaagtctgtccagctcgagcaagcctatatatatggagaatagcttcaagctgtctcagtacaagttgttgctcagatatgaggtccttgtcttgaacactgtaagaacgtttccaataaattgatcaaaacacagctttaaaaagcataaaggattaatgctcaacttgtgaaaaaacagaagaggataataacctggcttccgaatatctggcagtttccataatttcattaccagaatgaattagagcagcagcacgactttcaccatctaacatactgcgtgccatggcacata

SEQ ID NO: 15523 - DNA, 421 bp, Oryza sativa
  unsure (1)..(421): unsure at all n locations
aactataaaactcagctacaccatgttagctaatatcctacaaatcatactgtgaatataagnacagaataaaactctattttatctaaagatcatgacaatgaagaatattttaaacgggtgcgttgcaattgagtataaatacaggggaataactctttttgtaatagaaatagtagtaacttttttgagaaaaaaaaagagattactagtactcatntatttattgaccattaactatttgggttaaatgagagcagtgacccggtcattacttttcgattttcggcgcgacactgcttacatgtagggatgatgcaaaaaaaaccccgttttgatgacgcactacacatgtaggtgaagaaaaagcgaaagccataaacatctatgtttacctgacattaaaggactctactgtttc

SEQ ID NO: 15524 - DNA, 454 bp, Oryza sativa
  unsure (1)..(454): unsure at all n locations
agcttttagccttctagatcaatatatatttcctttccaggctttctatctcaaacattacaaagataaaaaccgagaaataccaagacgataataacaatcttcaaggctgtgtagtctacacgctgtgctgaaaaatcaagtaagagagcgtcttgtacgtgcgtgcggccgcgcgagtgtgcgtgcgacacgcgcgcgtcgcgcttttggacttcgatgaggaccacgcgacgcgacgggtccgtggcggtggcgaggccgtcgcgctgcggttcccgatttcgggggggacccagcgagctctcgctctctctcgcgcatgggacggggcgctgggcgaacgtgcgcagcggtctcgggctccggcgaccgcatcattnggtaagccggtgagcacgagggctcgcctcgcactctggcgtgccatccaaccccgcgagcgcgacacatt

SEQ ID NO: 15525 - DNA, 403 bp, Oryza sativa
cttctgacacaagctctctgcctcggtttgcatatgactgcggctatatctgaacctgctgctgcaatacaggtagcagcgttcatcatgttagtgtgtgtgcagatttgcagctccagaattcagaaattagattgaaggcctgttcactttgatgccattctcaaccttacttttactaaagttgctaaaatagtggctacatttaatttgctgccaaattttaataactatataataaatgctgccaaaattttgacaactatactaaaatattagcaatgccaagatttcgataggtttttttggcatcatagtgtacacgcccgataagaaagatatactactattaatctccataagatctagatcagcatctttcacctcatatctgattctcaag

SEQ ID NO: 15526 - DNA, 452 bp, Oryza sativa
  unsure (1)..(452): unsure at all n locations
agcttgtcgtgtctacgccggaacctatatagtggtatctccgaccatttcaaatatccaggtaccctcctcgtaccattagtttacagtttggttcaatgtttattgtttgatttttgtctacgttatactttaatgtattgatccttttctctttcggagatgactggataaaccatggccctgtggctatttgttggaagtgattgttccagctgatattttactaaagtaatactgtttatctgtgagaacgaacatacctgagatgaatactttgatctgaagggatggttacctggattgaaaggagagggtgaaactgaacaacttccaactattgccattgtttcaaattatgatactttcggtgctgcaccagtacgtcttcgtgaaaaatgtttctagtgccttctttaatattcttctagatatttngcataaatgcatat

SEQ ID NO: 15527 - DNA, 434 bp, Oryza sativa
  unsure (1)..(434): unsure at all n locations
ttcttctccaganaagtggacaaagggaatagtaacttctgtacctcttacctaataatagaaaaaaataagacatcacttgctactaatagttttggatcatagataccgcacgtgctaattgagatggtgagatgatagataccagacaaagaggactggaaaatattgagagtaacatcaaatagatgcatccaatgagccaatgaagagcagtagaagcaaaagatgaggcaaatagaagttcaagcttctgatatattgtttcaccaaacaattgtgaagcacagatatcaactgaccagccaaagaacaacggccatattgcaatcacattaatgagattaactgaaatattggcaacggtgactagatttatgatccctctgaagaacagtcgcaagaaagacaatgccatctggaccattacatgt

SEQ ID NO: 15528 - DNA, 440 bp, Oryza sativa
  unsure (1)..(440): unsure at all n locations
agcttcacaccgctgaaccatgtcgcatgtatctgaaggcggntggccagaaaaacccttatcggaaagcttttccgactaatgtcccaccggcggcatgtgacccacagatcccttcaattcatgtatgtcgaagaggaggtgtctgccgtcgtctgacgagacgcattntaagagtaccccgtttggtgccttcttgtatagatcattgccgatcatacagtagacttttgctttgcgggatattttctcagcttctgcgtcgtcctcgggcaactcttcgctgcttatgaatttaatgagtgaggtgcgccagtcgttcgtggtctcgatatcggcaacggcgcgctctgtctctgtagcccccgagctgatgtcgggggcgaccgggctatctttgccgcttgcctctttcactgatggcctcatcaagaagtcca

SEQ ID NO: 15529 - DNA, 490 bp, Oryza sativa
  unsure (1)..(490): unsure at all n locations
ctaagcttagccagctgaacaactggngctgttcatctttttaatgatgagctgggctcttggtttcgtccaaacgcaatataaaaaatacaacataatttgattacatttgctccattttttctgtcctggggacagataactctttttaaacgttatcctcattatcctaactgaaacattaatactataataatttacatatatatagttaatcattcaaaaacacacatataattaatctataccatttttatagacctataaaacaagtgtgatgagaacgactgaacaacgtcctatatcctctgcattacagcataaaatgatcactgtagcaatagggaaaatacgtctgctacagtaatctaacgcgtgagtaagcagcgtcgttgtactgtatgccccccgaaataatgtacctctgttccagaatataataangtntatagatagatatgattattaagagaataggtaatattagtat

SEQ ID NO: 15530 - DNA, 460 bp, Oryza sativa
agcttataacaattgctatggaccgcaatttcatgtataaagagatggcttcaattcttctatcctcattaagcatggaattgctctcaacagaagacattgtcaagggtttcataatgcttcttgaatctgcagaagataccgcacttgatataatggatgcctcagatgagctgggactggtcctagccagagcaatgattgatgatgtgcttgcgcctctgaacttagatgagataagcggcaagcttccaccaaactgcagcggggctgaaacattgaacatggcgcgctcccttgccactgcccgccatgcaagagagaggcttctgagatgctggggcggtgggacaggatgggttgtggaggacacaaaggacaagatagcatagcttctggaggagtacgagagcggaggcgatgtaagagaagcttgcaactgcatccgcgagctgcacat

SEQ ID NO: 15531 - DNA, 475 bp, Oryza sativa
ttggctcacggatcctcagaccgagccctctgctcggtatgcataggactgcggctatactctaacatgatgctacatgtgctgcgagtgcgtcctacggagaagggaaaatattctctatattaattacatgtcttctgccttagcctagaagctatctgcacgtcggctgctacgcggggcccatcaaatcatgcatggcgcccttgtcattcgtcatttaatggatgagaacttccacgttctcggtcacaccagaaaacgggaacccgggtcagttcagagtggttggaccagctctgactggggtaagaggctgtgaagcccctcatcattatgatgggacgggacggagcacgccgctcaccgtctgacacactgacaggactgtggtacacagtctccgtcccatcagtcattcaacacgtcacagaccggtcagatgcgcagcacgccgcattaaatgtgacatgat

SEQ ID NO: 15532 - DNA, 435 bp, Oryza sativa
  unsure (1)..(435): unsure at all n locations
agcttcgcgaccacatcaacagcgatcttacttttctttcgttgctgctgctgctcatctgaagcaccatcagtggtggtagtggtggtggtggtggaacaattaggggcattgtagtgacagcagatgtagtcactgttggttacatataaatgtggcacccatttcttgtcagcacgcacattcttctttgcactttcctcctctttggtactgtcaagtaatgcttcttcagtcagtggtagactagccttaacttttttccacaggtagctggccttctcactcatactccttacacccatggcaagtgaaacagaaagtggatngaacagatgacanctcacgaagactccttgcttagcgagctctttgcaaacctgaagagcaaatccagctcccaaggagtgcccagcaacactgacattagcgcta

SEQ ID NO: 15533 - DNA, 423 bp, Oryza sativa
  unsure (1)..(423): unsure at all n locations
ctaagctggtgctngccttctctgaatatgcacatatatgggccatgtaacaaaggaatttatgaactcgaccgtgtccatgtggattttttgtcttgcaatccaacaagtccctcgcgtggaaacgacgaagtgcatgcgcgagcaggccgagatttcgcaatcgtatgaaatctttccagcgaggcagcggcccagcgtcgcgccgctcaaagcataggactacttcaccaatcacagccacctgtgagctgggaagctttatgcattcccaagaggccccgggatatgtttgagtatgttaagattntaaaatgcagctgctgagaatctgaagaagctaaaaacccgcttctagctnttagttcatttttcagattctacaattacagattctcagaatctggataaaaagctgagctg

SEQ ID NO: 15534 - DNA, 386 bp, Oryza sativa
gccttaaatctaagcttccacattggatcgacgggccttggtgtcctttcttctgtatggagattcaatgcctctgcacgcttggtcccgctcagccgtagcgtccgagtccgacctcgctgctgttgctgcaactacgtgtctcagtggctgcacggaggcaagcggtccgtggacgtggagagaaagccctgctttccgtgcaatgcaaaagtgtccagcgtgcaagcgtacacacaccggtgatgggcgtacggtcaaaccggctcacttcaacgtgccataaatactcggcgccaccgatacgcaggcgctaccacaactcgacatggcaacgagagacgacacattggtacgcacgcggcacgcaccatctgccgatcgat

SEQ ID NO: 15535 - DNA, 441 bp, Oryza sativa
  unsure (1)..(441): unsure at all n locations
agcttgcaaaanagatatgtggcacattattgatttctcctcttctttataagtggcaactagagaattaatcctagtaacccagttttggccatgcatatattccctcttaaaaatgatatcatgattaatatagaaagagattcgagccaaaattaaagacaaggttgcttgacctcgagatgctcatgttccagaaagaagagctctgctgaagctccatcagagagagattcagagatgtttcgcctcgataggcttcagcttcaagcctgcatgcatgttcggatgttctgttctgttcgtcgcctgaagacgacgttagatatcaaggagcattttactaggttggatccgatcattgactgcacaaaatgcgatgtaaacgttgtactaactatgaaggaatcaagatggcaagagaaaagagtggacatgcat

SEQ ID NO: 15536 - DNA, 405 bp, Oryza sativa
  unsure (1)..(405): unsure at all n locations
tctgtgccgactaagagctggcccagatctcgtgtctttctgacctataattnttcgaaatttgtttgcagcatcgaccaaagtactggatagtgatgagtgaaaagcgatctttggaaatcaaattggattagtgttcaaagcctcaaaacttagctccagacctctacagaagcaccaagaggaagaccacacaatccatgagcccttgcaacaagaaggtgggtaaatgacatatgtcacaaccttaactcagagagttctttcaagtatgaggggctcgaacgcatgaatctttagaattgacagatgtagtagagaactctatggtttagaaaaggacagccaatgggaagtatagcacaaaatccgcttatcagtttcaattcaacggaatgatagcgt

SEQ ID NO: 15537 - DNA, 392 bp, Oryza sativa
  unsure (1)..(392): unsure at all n locations
agctngctagagaggtgtatcgaaccggtcaccgctaaatggcctgatcgatcgaagttctggtactatgctcacggtggaatgctcaacccagttgatggctccttggtcttcagcgatcagatacgcgaggctgcgaatcgactaacggacgcagtggaagcctcttctcagggcacgttccgacccgacagagagaaggacgagctgtcactcgccctacagactcccgagcattcaggacaaacacgagggaaaggcgtgattccctggaagatgggattcaaggaggacatccacacgtacaggagtcggatgaggagctagagagataccgaggcgacaaatgcagatcttgagtacagggtatcgagctacgagctcagcataca

SEQ ID NO: 15538 - DNA, 444 bp, Oryza sativa
agcttgacacctcaactagggctttttgtattgggtacatggctgccctagaggcacgacctacgctcgtggatcaagtcagagcagctcaagtaaatgatcctgaaataacagagctgaaaaagaacatgagggtcggaaaagcccgggatttccacgaagatgaacatggcacaatctggttggaagaaagattgtgtgtacctgacgacaaggaactgaaggatatgatactcaccgaggctcatcagactcagtactccattcatccaggcagcaccaaaatgtatcaagacctcaaagaaaagttttggtgggtcagcatgagaagggaaatagctgaattcgtcacactctgcgacgtttgccaacgagtgaaggcagagcaccaaaggccagcagatttactccaacctcttcaaatcctggaatggaaatgggaag

SEQ ID NO: 15539 - DNA, 365 bp, Oryza sativa
cggatagtgaataggcctaccattatatctcttaggagaagatcctaaattacaaccaaacaattggatatacttatcctcttctttcttggatttctcagcgtagaaattttcactcttttgaaaattgattttcaacctccagagttgttcaaagacacataagataaccttcatgttttttgcctgctcaaagtaatgattaagaaatatatccatttcatcagcatattgaaggatggataatccatcatccaccaaatgtggaattatgcctctcatctaactatcggccctggctctcttgataacgatttctaggtatcagcacctatgttgaacagaatctgggacattggatcccc

SEQ ID NO: 15540 - DNA, 393 bp, Oryza sativa
  unsure (1)..(393): unsure at all n locations
tttttttttttgaagncccgccgtaaagccgtctgggaagaccgtacaacatgtccagtgggatacagtgggtccgttgagaaacataattctaaggccaagttatcgaccctcccatggaataaccgaagtagctagctccccgagagcatgaaagcttatatgatgcagttagtgaccagttgtcaaacatggtatgctggatcagcgtgatatcatagtcctaagcattcagtggtcagttagaagtaaatgacaagcatgatattcttctgatgaccagcatggtatcctagtaatgacgaactgattccgacgctgacatgaatgggtacttgtatgtgttgacttctaaatataatcatagaagtttggaaccgagcatattaacta

SEQ ID NO: 15541 - DNA, 397 bp, Oryza sativa
  unsure (1)..(397): unsure at all n locations
actcagctttcttttcacaatagcgccgtggtggtgatctattttaatcccgncgacatgtgcattgcactcgctgaagtagtacctcaaacggcgatcactctcttccttgacacgagccttaagttcttggatctggttagcaatctgatgccttgaccataacattctaatcttctttgccatcttgagaacaatgttgaccttatcatcccccgcaatcaatttgtgcatgaataaatcgatgcaatcctcgatatcataactcagattccggaccttggttctacagtccttcacctgcacatncatgttctnctccacactggccatattcatcagaaagaacgtcatggtgctcagctcatctctcaagaacctgatgtcacccttgaca

SEQ ID NO: 15542 - DNA, 383 bp, Oryza sativa
aagacatatgccacccaacgttacagttaaatgatggaaaatgttacggctggggcatggaaaggatcaaattgaaaattcaagggtataaaaagggtccggttaattttacgggtatgaaagggattgagtgagttttcatgggtacacacggaaattactcaaacaatgttgagaccattgctgcatgataagaacttcaagttgcaaagagagaattcttgagaacaatgaaatagcttggtgattttactcaacaaaccagttgctttacaacttaaatctcataagtgccccttgtggccagtggcggacccaggatttcccaacccccgaccaagcctagtgttatacaaatcataatatactaccctaagatgatg

SEQ ID NO: 15543 - DNA, 418 bp, Oryza sativa
  unsure (1)..(418): unsure at all n locations
ntacctgccaccatagtgtntagggtcaaatgtcatgttatcatagatggntctcttcaagtcagcagcaaatttatgggacatcatatcatagacgacttcggtaacatttacaaactcatggtcgccaaggttcatccttattgcaaagtaatgcttcaaggactcaattagacgatggatcccaagtgagccagaaaaaccagcacggaggccatactgagtaaggatattcacaacctgtttgttgagcaagggtatcaagataaaatgataatactagtgcagaaaagattaagattcttctaaagggtctattatccgatagaggtgattctactaattaaacttgctacctgagatcaacaaacttaagctatccaagaacagtgacaaaatttagtaccaagataattac

SEQ ID NO: 15544 - DNA, 450 bp, Oryza sativa
  unsure (1)..(450): unsure at all n locations
agcttcacctaaagtcaaaccgatgcatttaactcggccttcacggagacagcggcttccggccggatttggcgcaaaggaacgggtggccgaagtggagctcttcactgcgaagccgagggaagtgacggcgcagatcagggacgaccggtgaggcaacacggtgcggctggagcggcggccggcaaaggagagagaagccgaacgtggggaggcggctagggctagggaaaaactcgggaaaaagagggaaacggaagaggaggtcttgggactgctatttatagccggaagagggagagatcggctagggaacggatggaattggcgacggattatgtanggttcgccgganaaaggaagggattgatccgcgaaattggaaagaatntccatataaacttttggggatttcttggnggaaaggaagaggatattgagaggattcca

SEQ ID NO: 15545 - DNA, 355 bp, Oryza sativa
aagagcaacgcttctttatggaccgaaaaagaaaggccgctcggatcagcttttctcaagggaacaatcaaaagcctcgcttcatgacgggacagctaggtgggcctttcaccccgatcgtctgtcagcaccgttcctatcacccgagttacttcaacaacgattacaacggtggcagtcacaacaacagtaagcaacacaaccacaactcgactccacccccactaatggcaccagctcagtcagatccgccagctgtgtcagctcagtcagaacaacccaagaagggggctgttggaaagccaggaccctgcttcaactgtggcaagcacgaacactttgcttgcaagtgtcc

SEQ ID NO: 15546 - DNA, 448 bp, Oryza sativa
  unsure (1)..(448): unsure at all n locations
agcttgattcccaaaggaagtgggccatctccttctgttatctgctacaacgccccanagacctcagcacttcttcaaggactcatcagagaaccagccgatgccggtaagaagcggagaaccagatcatcggctgcagatacttcagccccggcttcgaagaagaaggctaagacaaagaaagctaagccagctgacgatctacccgccctagatccatccatcgaacaagctctggatgaagaagaaatcgaggaagacatcgaccaagccgcagccgaaataagcgatactgataaaacaccatcggcttcacctaagcaggctcctccattcccttctgctccagctcaattggcaagggtaagcaactntctctgtccacttttgcagttcattactctatagccgagttctcacaattttaataaatatagagaaagaaaat

SEQ ID NO: 15547 - DNA, 356 bp, Oryza sativa
  unsure (1)..(356): unsure at all n locations
acttagaaactaagcttggttactttattacttacctgtgtattctgaggttctacctttatccaaantaatgcaaaaactagtgctattaatctgatagatgtcttaactccctcctttcacttgtctttagatgccgtgttacgagcctgagtacctgtttggtcgtgagggtattgttcacgagttgcgttcgatgtcctttgtcattggatctgggaatgctccttattatgcccagattcgtcatgatcgtcatgaataatagtgccgagtggagtcaccttgaacagcaatagtgaagatatacccatcgtgactgttgcatctggaggatgatactacattcatgcatg

SEQ ID NO: 15548 - DNA, 454 bp, Oryza sativa
agcttcgagatagttaacaaccatagtctatcttttgaaccacataagcaaggaagcaaacatcttggatgatgctctctttgctgatgctcacagaacagcaggagaataaacttgctcaatatataaatagagatctcatcaaacaaaaccatagaaatgccttaacaacaatatggagtattatctgtatggcagatcccaactcagcatagcaaaattacacaactaaagataaccaagaaacagccattggccatgtaagcacgtctgaaccctacatctcaactaaataggtaaaaacttcttcactgggaggcaggggttgtgttgatgatgtccgagtcacctgaaacagggaaagaggcaaatatattcagtacttctgaaggtgccatagaggaaaatatatgtaagtgatgtcggtagcgacgaacccaggtcgatgatgctg

SEQ ID NO: 15549 - DNA, 259 bp, Oryza sativa
agcttgtagccttctagatcaatatattatttcttttcaggctttctatcccaaacatcacatagattaaaaccgagaaattcctatacgataataacaatcttcaaggctgtgtagtctacacgctgtgctgaaaaaacaggtaagagagcgtattgtacgtacgtgccgtcgggcgagtgatcctgcgacacgcgcgcgttgagcttttggacttctatgatgaccacgccacgcgacaggtccttggcggtggcga

SEQ ID NO: 15550 - DNA, 414 bp, Oryza sativa
agcttcttccagatccagaaacgaagattatgttttggtacaacgagatggagggagagagaaagatgaagcttgtcagcacaggagctccccaaaagtggaagcagcatgacaccgttagccaccgtatgcgaaggaaagcggacggagagaccaccggatccgaagctcgccgacgtcactgctgcctttcctcccgccgggtctggcggaagagagggcgccaccgttgccgccgtcaccctaaagatccaccaccgttgggctgtcaccggtccaccaccgacttctctctcaccatcgggccgccacctgcaccgttcgctgtctccacgccgtttgtcagcaccgcgcctcccctcctgtcagatctggcataagggaaggccctgcccttcttcctcagatagagag

SEQ ID NO: 15551 - DNA, 255 bp, Oryza sativa
ttcctgcaacaccgcctctcttaagcgcttctatgtctagaatgggtggcacccaaatctccaactctgtaatatatacataccgtcatgtaagcccttcggcactatgttagcctttcggctaggaaataaaagagaaaaaaaaagagaaaaataaactggatgtatggctattatccaccatggacgcccgaaccagtataaaatctctgtgtccttcgccttcattttatttttcgtgtgattgataatgtg

SEQ ID NO: 15552 - DNA, 342 bp, Oryza sativa
  unsure (1)..(342): unsure at all n locations
agcttntagaccacatcaccagtgttcttatttttctttcgntgctgctgctgctcatctgaagcaccatcaatggtggtactggtggtggtggaggaacaattacgggcattgtgatgacagctgatgtactcactagtgtttacatataaatgtgtgacccatttcttgtacgcacgcaatttcttttatgcacttacctactctttgggactgtcatgtaaagcttctttagacagtggtagactaaccttaacttttttgcacaggtagctggtcttctaactcatactccttacacccatggccagtgaaacacaaagtggattgaacagatgacac

SEQ ID NO: 15553 - DNA, 290 bp, Oryza sativa
  unsure (1)..(290): unsure at all n locations
gaacaaatacgaatttatgaactcgaccgtgtccatgtggagtttttctctagcaatccaacgagtccctcgcgtggatacgactaaatggatgcgcgagcatgccgagatttctcaatcttatgacatcttcccagcgaggcacctgtccagcctcgcgccgctcatagcgtatgactacttcacccatcacatgcacctgtgagctgggaagctttacgcattcccacgaggccccgagatatgttcgagtcagtctagattntaagatgcagctgctgagaagctga

SEQ ID NO: 15554 - DNA, 421 bp, Oryza sativa
  unsure (1)..(421): unsure at all n locations
agcttatgttcgaataagccaacgtgtattcttaagccgaagacgccggcaccgcatcaaagcagtcatgtcccatgtggaagccaaacaagggtacgccggcttagggaggatgtggaagtaacaatcataaggaccgcaagcgtaagcctgaggaacttgttgcaaccgtcactcactcttctcgacagcattcgcgcgtcaacacgttcgacaagatcatgaactcccaatgcccgcaccatcctaactccaaccacgtggccaaagattgtttcgtctacaggcagttngcggagcaatacaccaagactacacggaagaactccgacgaagaacaaagtacgtcgaggaagaaagacgaccgcgacaccccggcatgaattcaagaccaccgcaaggagctcaaccatatcttcgg

SEQ ID NO: 15555 - DNA, 342 bp, Oryza sativa
agcttgattcccaatggaggggggccttcttcttctgccatcaggtacaaagccccaaagacctcataacttctccaaggactcatcacagaaccagccgatgcctgggagaatcggggaaccaaatcatcggctgcagatacttcaacctcggctccgaagaagaacgcttaaacgaatatagctaagccagctgacgatctacccgccctaaatccatccatcgaacaagctctggatgaagaagaaatcgaggaagacatcgaccaagccgcagccgaaataagcgatactgaaaaaacaccatcggcttcacctaagcaagctcctccattcccttct

SEQ ID NO: 15556 - DNA, 444 bp, Oryza sativa
agcttatgttcgaaaaagccaacgagttttccaaggccgaagacgccgtcaccgcatcaaagcagtcaggtcccagttggaagccaaacaagggtacgccggctaagggaggaggtggaagtaacaatcataaggaccgcaagcgtaagcctgaggaacttgttgcaaccgccactcactcttctcgacagcattcgcgcgtcaacacgttcgacaagatcatgaactcccaatgcccgcaccatcctaactccaaccacgtggccaaagattgtttcgtctacaggcagtttgcggagcaatacaccaagactacacggaagaactccgacgaagaacaaagtacgtcgaggaagaaggacgacggcgacaccccggcaagatttcaagaccaccgcaaggagctcaaccatatcttcggcggccccctggcttatgagtcta

SEQ ID NO: 15557 - DNA, 404 bp, Oryza sativa
agctttagcagcgatggaatatgttgagtttattggtcaagaagcgtgagttttttcttggcaactgcaaggtagttggcagactactattatccccttcctttgctcaaaggcggatcaaaagaacttttgtagttgatgcaacgatagtgagatggtgtggcaatagtaatgcaggctatccccgcatctccttatagttctaagcgaggaagaaaagtttagggttagtcttctagcttttgtttgcggttgttcgttggtttatgtttatcgtgtatgaaacttagaaagtcagcactcgagtaatctgtggctgtgttatatccacttatggaaaatagaggccggatttctatccattatgtaaagaaactcagcctctacttcattgagagcctcac

SEQ ID NO: 15558 - DNA, 262 bp, Oryza sativa
gcacacgcaacccctatgccgagagcgaattcgatgaccagaaactccgcacacccatcaaagagagggatatcaaccctgtctggaacgagcagttctacttcaacaatatctgatccatcccgcctcactgagaaagacctccaggcgtatgtgtaccacgcaaaccgcgccagcaattccaagacttgccttggcacagtacggatctccggtgcatcctttgtcagccactcagatgccacacctcttcactaccccc

SEQ ID NO: 15559 - DNA, 394 bp, Oryza sativa
  unsure (1)..(394): unsure at all n locations
agctctnttttttttaggtgtcctccgctcgctctcatctttcgagagtcccggcgttcaccaaggaaaactaaagttggcacccgcgttttccttttctgattatatgaggatttcgagaattctcttcccattggattggcactttcttgtctgctttccttcatcttttggggtgaatcgatcagttgatgtcctgaaatggaccgcatgaaaaacatcaatattttgtagaaaccagcatcaggcatcaggcatagcatcaagtgcacattctaagaaatttttgagaattctcctcccatgggcttggcacttgctctgctttccttttatctttgggtgaatggaacagtcgatatggtgaaatggacgccataaaacacaccaatag

SEQ ID NO: 15560 - DNA, 412 bp, Oryza sativa
  unsure (1)..(412): unsure at all n locations
gaactacatgattatctgtgtgtctgctggatggaaccattctggatttgctacaagtgtccaattctgaaaccaccttatttccttggactttctttngatcctttatgctttatgttcaaaaaatctactttatactctatatcacatatagtctgtgcatttcacgtggttattttgtttcaaaaataaaaccattactgatgagcttagctgtgatgtttctagttcttattttcagattctggacagcttttcatgtgtggagatggttcatttggacagctcggtgctggtgataaccacccaagaaacttaccttttgaagtggatactttaccacaaagcatgttgtgaggcttgcactagtgatgcgtcattctcttgtccttttaaaggtatgcaacatcat

SEQ ID NO: 15561 - DNA, 427 bp, Oryza sativa
  unsure (1)..(427): unsure at all n locations
agcttgtactgacactactttctcaaaatcatacagggatgactgtggcttttacgtattcaactatatggtgaactacgatggtcgtcgtcttctgaaccctattacagaggtacataatgctttcatatccgcacacaccgcactccaccataaatatgtcctcataaagctataaagaaaatactctaactttcgcaagacccgtactacctccggaggcaatttttgatccaccttttgactctgcgtgataacgaggcaatactaccagaatatgtggtggaccgtcttcgacaaattaaagacaattagtttagcaattttctacttctagctntaccagaacattttcatgtaatcttcgaatacacttctgtcctatcttgacagaatcatgaaaacattgctatgcatggacaaagta

SEQ ID NO: 15562 - DNA, 402 bp, Oryza sativa
  unsure (1)..(402): unsure at all n locations
tggcgatctgctctgcgtcgcccgcgtccctccggccgttgatcaagtcgagtgccacccgggctggcagcaagcgaagctcagagcgttctgccacaccagtggcgttcatctctctgtaagtcctgcatgtttctgagctcatcgatcacttgatatgtagtagtagcattgtgctgaggttcactgctcacatgattcttgcaggcgtatgctccattgggcaggatgaagggcatcgccgttgattcggtgttgccatcggtagccgagatgctaggaagaactccggctcacgttgctctgcgctggggtcttcaacanggtcagagtgtgcttnccaagagcgtcagtgatgcgaggttgaaagagaacatggatctgcttggttgtctattcctg

SEQ ID NO: 15563 - DNA, 398 bp, Oryza sativa
  unsure (1)..(398): unsure at all n locations
agcttgtcaaaagaataattttccatgcatctatccttctccaatctcaaatgttggccttgtcagatgtggaaatgctaataatatattagttcggtttttatcatgtgaaagacaatttatgttcctcttcccttcaaaagaaactatctatgcaccttaagtctactattgacactttatctgcggagcataagttaagtctggggcaagtgagaatggtgcaaacaatatgagaggtgagttcaatggctttctctcaccaattatgagagaaaatacattggcatattatgtttcatatgccttgctcatcttcttgaattaatagttttggccattacttgaaagaagcatgttanaaggaattgaggaattctttgatatgaattacatat

SEQ ID NO: 15564 - DNA, 332 bp, Oryza sativa
tgtgcagaccatgaccaacttctatagcgcacaatgctttgattttcatgttatctggctgttgctcaatcaacttgctctcactgataaccaagatatcgctccaccaaacatggtagaaattggaaatgccatagttaaaaagtgtaagggcttgcctttatcgatcaagaagatatgcagcatgctgcgctatgaaaccaatgagcaaacctgcgtggaggtccttataaatgtgctcttggacatggaccaaccatggtagggacttatgtcaatcttgcgagtgaactacatgcatatgactgttatcctgcaatgatgtcttgctg

SEQ ID NO: 15565 - DNA, 437 bp, Oryza sativa
agcttcattttattctacttgtcattaacactcacactctaccctctttattcaaacacataggaccacagcgatcagaacgtactggacatgaccggtgtgctgcctcactagaatcacctcattcactaggtctaatctcatacgaaaaaatggtcgtactcatatctcgttcctatctattttcttgactagtccttaaaatagggtcaacaataaccattttgtgactactacataattgattttttctagacgagatctcctttaggttgcaggcagatcataactacttccgcctgcaaaaatcaatctcccatgcacagttcaagaacgccatgcgaaaatatccctctcccatagtcccctcccctgtccactcctcacactccctgttcaactcttccattcctctccccactctttcctgtccacac

SEQ ID NO: 15566 - DNA, 345 bp, Oryza sativa
tctcagctgagactgtcccggtgggtcgctgcttaccggcgaaatgagaaagtgtttctataagaaacacagtggaaaaaatcaggactacctctgttccatagtaagtgtagccatgatattccgcgtcaactttgatcgagctaactttgatcatccggtttatttgaaattgtcttataattagcacttctgctgtcatgagatgataaaatatgaatagtaccttacctcgggacttatgttattaattgtttttaaaaaattttcagataagacgaacggtcaaagttggacgcggaataccatggctgcacctattctgggacggagtgagtactccct

SEQ ID NO: 15567 - DNA, 419 bp, Oryza sativa
  unsure (1)..(419): unsure at all n locations
agctacttgagtgtgtagagaagagaagtgatctccttctcttatagggtnggtataacggctgtagacaaggcgaagagacctttttgccccttaaccatcattgatagtgcatctggcgcgaacacgtggagggccacgctgattgggctccaccaaggttccggcgaactcctaggtcggacgaacctatgctagcccaacatgccttcagcttcgggacaatctctaacaggtgggtcctattgatggtattaacagataaagcggtttccagggcgtgtacacctgacttgtgggccctcttatccataagcttgcttaggagagagaattctttattttctctttatttattgctcaattcctacaacatggtatctctctagcacaagtggaactttattattctgtagaaa

SEQ ID NO: 15568 - DNA, 435 bp, Oryza sativa
  unsure (1)..(435): unsure at all n locations
tgcccgcaggtacaccatacacacacttatcggtgttcagctttatacgggcggagcggatgttctcaaaagtttccgctagatccgaaagtaaagtttctcggttgcgcgtttttacaaccaagtcatcgacatacgcctcaacattacgtcctatttggctacccaaagaaattcgagtagtacgctgaanagtgggacctgcattctttaacccgaagggcattgatgtataacaataggttcctacggtggtaatgaacgcaattttttcctcatcctccctagccatgcgaatctgatggtaaccagagtatgcatctagaaaacacaaaaagtcgcaccccgcagtggagtcgacgatctgatctatgcgaggcagggggtaaggatccttatgacatgccttgttaaagtcggtgtattcgatgcaca

SEQ ID NO: 15569 - DNA, 342 bp, Oryza sativa
  unsure (1)..(342): unsure at all n locations
agcttanggtgaagaatatatcatgcagtacatcaagattaataagtgggtaacagaatatacataccgctactaaactctcagtatcacgatcgccgtagtatgattcatgatcatggtgaccctgtgtttccctgcacaaatgtcaatttgtttgtttctggaacatgagcaaaaaaataataattatacaagtcttgcgccacaggttaactctcagtagagtatccggaagactgtaagatttacttgaacttacttaagatcactccctttacggaaaatgcgaatggatggataaacctgtttatggtgcctgcatgtaataaattaaaacaatga

SEQ ID NO: 15570 - DNA, 460 bp, Oryza sativa
  unsure (1)..(460): unsure at all n locations
cacttcttacagntcaggaactcacatcagggattcaggggctctatagcctgatatcgagtccaagttcaattgggtatcaaggtggatcttttgcgagaagctaccttgtacaagagctcaatattgccgagacccgattggtaccactaaacagcccgtcagattatgcaagagcgctagagttatgatcaggaaatggtggtgttgatgcaataattgatgaacttccatacgtggagatcttcttgtcaaaatactgcaaattcaagacggttggccaggttttcacgataagtgggtggtgacttgtagcgacttggactataactgtatactacagatttcgttccagccttccaggatatcttctgaatatagattattctgtttacgccttccaagagactcccctcttgctgaggacttgtcaacagcaatcttgacattgtctgagaat

SEQ ID NO: 15571 - DNA, 429 bp, Oryza sativa
  unsure (1)..(429): unsure at all n locations
agcttagtgtgtgtagttcagtgatcctaccaagaaaccatacttactttctcatttttatagaatatttactgccaagtttatcacgaagaacgtggtgaggagcatcaacctgtgagcagtgagttagatgggaatgtggtatataaagcttttggtggactgaaacatggacggtttgcaatgggcaacggagttttcaagaaaactgaagttcttgctgctgttaaacataagaaatctggaatatctggatctacgaattcttacaatgctgtagtgcgtgagaatgcacaacttcgccatgaagtgactgaacagcgtggaatgatacgtgaacagcgtggaatgatacaagaacatcgtggaatgctaaaggtaataactactacaataatctctgattcatttattttntttcccctcaca

SEQ ID NO: 15572 - DNA, 434 bp, Oryza sativa
agctttgtaatagtcaatactcaattaattatgttaatggaccttgattcgtacttttattctgataaaattatgtgtgttttattcatctatttcttttaatattatatacgtttcaaaggtgcccctagtttttcaaaggtgccgctaaaacatgtactggtggtactatacatgtttagcgtgttaagcatgagtttgagaacttgagtcgcttttttcttcttcttttactaaaaacatgctttaacgcttttagtactgctactctatctctttcaaaatatagcaactttgtactggataggatatattctaatacaataaatctgaacatacaagattgatcgttgttatattttaagacggagagagtatatgttttgccgctcttcttttattattcttgcacatgcttatgcgtgttagtggta

SEQ ID NO: 15573 - DNA, 463 bp, Oryza sativa
  unsure (1)..(463): unsure at all n locations
actcagcttgtagtntaatgtgctctttgggtttgcaggatcctattgaatacaagaggcgtgttcggctgcaggccaagcagtatcctccgattgtctgagaatattggcatagggacccatgctgcacattcgcttagttcttgctagatctaaaatgagtgcctctgcaaatatggattagaccacaatatgacctggaaaaagggtgctntcggagttcgagaagtattatcatcgttgtggactaatgtcttgtgagatccgtcttggatgtaaacggttntcttaactgtgattcttcaaccgtttgagtgcttgctttatgggataatgtcaaacatnggtttggcaggcaatctcaagagtattgctatttctgtgctagtctatatgaaaacccagattatattcgacgaaacatattagntntgcaaaagatgtggcaacttccatatgttct

SEQ ID NO: 15574 - DNA, 314 bp, Oryza sativa
agcttggataaatgatacatgtgtggatcaatcgtgacattacaggacatatagacgtgaccgagcgccaaatctaatctcttaaaaccgctatataaatcgctataacctatacatacacaatgattggaccggaagcgataatagtgaatgccgctaggcctgagatctggccaacattcacatgcatggggactgcgagagttatgatattgacgtgggtgacaaatgcatgcgagatgagatgtgaacacgaataactgtactaagtggccaataacgacactgatcgctgcaagatatactatgtcccg

SEQ ID NO: 15575 - DNA, 411 bp, Oryza sativa
agcttgatcaactatctgagggcctgatcttatccaatattgatcggcttgaagctcgtaagattgagctcttggcacaactccaagagtgcaacaccgaactagatctggaacacaaaaagctagccgatctcccgcaaactgtcgaaaaacagaaggcaaggttgacatcggccataaaaaatgtcgctgacatgaccaaatccttaaaagttatctctggaaccgatgctcaagatgcccaagccattgaagaagtagaacaaattatgcagagagttatatcggctatccagtgctacttgtctcggtgatattctgtaatacgatgtagaaaatattgtaatcggctaagatactctggtactctatttaacttggcttgataatcctttgtgccgataatataac

SEQ ID NO: 15576 - DNA, 419 bp, Oryza sativa
  unsure (1)..(419): unsure at all n locations
agcttcaacatctgtgggtaagttttccaagtaaagttcccattcctgtccactccagtctgctacctcatcttcacttggaagttttccagacttaaactctgcagctagggagcaaatctttttataaatagctgactctggttccatggcatccggagggataccagtcccctcgatccacagttgaaggtcaatttggttttctattccaggtacattggttttcaggaattcaaggaatgtctctgtgtctatcgacttgaacttaaatgtggatatgtaattcttcaggaattcatcaaatgcaggtcgaccaatctaacaggggaaaaagaatgaaacatcacgacaagtcatgaanaactcattgnatttgattaaagaacgttgcaaaacagttgaaacaaatagtcgca

SEQ ID NO: 15577 - DNA, 455 bp, Oryza sativa
  unsure (1)..(455): unsure at all n locations
ntgttgtatgacattntagttgtactgtctgcaacaaagtatatgcctgttgtgattattgatgttttcttacagatgtagtaatattcctgttgaaacatcttgtcatacagaccatgccactattcctcttttacttaagaacttatgtatttccctcttggaaacaaaggtttgcagctgaaatatttcacgacctgcatgaagatgtgatggccactgcttctagagggcatggcttaatgcttcggttgcgacagttagaggcagaatttcctgcagttgagaaagccattatatcccagtctgaccattcatattacccacatgatgaccgttagttgaaatttgaaaataacagagactatatgcctgccctgctctgttgtttcttatgggnatggtcttacttgaaaattcttgtacattctcttgacgtgtgagtggacacaatc

SEQ ID NO: 15578 - DNA, 437 bp, Oryza sativa
  unsure (1)..(437): unsure at all n locations
agctntctcttgagaacacccttaaagactaccgaggaatcattccttctatagacggtcacatcaacatcggtaaaaagataattgtaacccatagaacataattgagaaacggacggaagattgtagtttagagattttaccaagagaacgttggcaatggaaagatcattagagattgcaatcttacccaatcccataacctttccctttccatcatccctgaagactatattatcttgtgaagtgccatttggatcaagagttgaaaacattgattcttctccggtcatgtgattggtgcatccactatcaatcacccaacttcttccaccggaaacatattcctacaagagatcaatttctagttttaggtacccacacttgcttgggtcctctcatgttagtaacaagtgccttatgcacccaaagtactc

SEQ ID NO: 15579 - DNA, 362 bp, Oryza sativa
  unsure (1)..(362): unsure at all n locations
cggaccttagaatctcagcttggcaaatgcaatttcatacgtacatgatacatatatcgatggaacccaaagtactgaatttcctgattgattgctctgcaacaagagatggaagtcatggaacccccaaatgaattgctcgatcgactgatccagaacaggacaatatatatgcctttcagcgtgatgcttcttccacctgcagtaaatttggggatcatcatcagaatntacacacaaaatccaacaaataaaatgtcaagtaaaatttcacaggtgcattacattccgaagcaaaccaacaacagaaaaggctagagaaaattctgattaaacaaatgagcacacgtcaagtagataca

SEQ ID NO: 15580 - DNA, 430 bp, Oryza sativa
  unsure (1)..(430): unsure at all n locations
ncaagctttcagttgcatcttggttgaaccataggcttgaaccctacatccgttcttattgaagactaaattgctttaaaatataagggattttatccatataattgaataggcaaaatcccttatatttggaaaggagatagtagtacaaaccattgttcccttgaaacagtacagctaaacctctttttatcaataaaatatattatgtcctttgcttcaaacatgctatagctgattattacagatgttggaggatgaataattgtgaactaaaaaaccttgattagaaaaaaaactacttagcataccacctcaaagataaagaatttccatctatagttggtgcggatttgataactattgcttcttcccaacaactcataagctgcatgtaatatttatcattctcaacctaaacacataatct

SEQ ID NO: 15581 - DNA, 332 bp, Oryza sativa
gacacttgaatactacgctttaatagcagaacacgcctcatcgaactcattcagttttgtgaatagactcgaggtgccggcaggtaggacatgattgcttactccctccacaaaaggaataaggaccgcccgggtctcgaaatcaccaggggcgaagtggggcaccgctagggaatactctgaggcagatgcttctgcagccgcacccttccccttcgtcttgaccaacggcgaaacagctggttcacgcatagggctcccttagaccctcgccgtagccgtcacgatccattctgcggaggctgaaactccggcagcggcgctaccaccta

SEQ ID NO: 15582 - DNA, 224 bp, Oryza sativa
  unsure (1)..(224): unsure at all n locations
agcttctctggtgcatcanagttatgggttccataacaatttgatctcctgacgtccatataccattntctagagtaagacataaactaatgtgaataacataactaattgttgccatgagatgctatgctaaacttcataagtgactaacaatggtctactagatgtaatatgcatgggaaaaagggaaacactggaagaggtgttaatccgaaaaaaatata

SEQ ID NO: 15583 - DNA, 393 bp, Oryza sativa
ttcttcacaaagaagggaggtcatgccaattttatagcaaatcactctggcgattatatacaaatcggaggtgcctaaaaggttagcaacttcatcctccaatgatttttttgtcatttgcagctatgatttgcatactattttgtcttcaaaatgtttgtgtaatgttgatgagagagaaaatttgtgtgggaaaagaaagaatatatacaacatttgttatttgctaaataaggttctataaaataattgaataggaaaatatagtgaaagttaatcttaaatataagagaacaaactacctcgataacttaaagattttaaagcttaaaaacataaataatgaatattttggggaatatattataatttttgatgactaatgatatgtca

SEQ ID NO: 15584 - DNA, 433 bp, Oryza sativa
agcttaaagccatgaatcccttttatgcatatctggatctggatcctgcttaacaaacatataggatgagtagtatctgatataaatataatactcgagaaaaaatcaagtattttaaaatattgataaatatgtatttctcctcttgtcaattttgatttccccgagcagatgactctgtacgtttaaacactctgtccgactagtcatagcccccaagcatcgggagtcggcctaggcatttcccaaacatgcatatgagtgacatgagttcgtcattaatggaacaaagtttcacggatcagaatttactacttaggtacttttgcaattattaagagcagaaaataaatttatctcatctctatgcttttgatttattccgaataatacttagcaccttgcgttactcggtccatccaaacgagccccg

SEQ ID NO: 15585 - DNA, 373 bp, Oryza sativa
  unsure (1)..(373): unsure at all n locations
agcttggatccangngaccaaggcgaacgcgtgctacgctgctcgcccaagaataccctatgtatacactgagatcgatcccacgcgacaaccatcttaagagacatccacagaggcatgcccactctgttctcatattgaagatgtgtgtgaccattactcactagactcatctcttgaacctctaatggggtgccatgctgttaatgatctagactatcgtacgccgacgcttacgatgtcagctattttatccgcaatgaagtgtgcactttgcagctctgacctgctcatgaattgaatgagacaagggcgatcttccgccacaagctcgatgacgccaacctcgcgctatggaacatggccacgctag

SEQ ID NO: 15586 - DNA, 342 bp, Oryza sativa
acttgcacaatgctactattatcaactgaacaggttacttgaagctcacctattgtcgcgtgagaaccgttgattctgtctctactgcctcacacgcataatcacgcagtgcatgccccagactgactgcctgtctgtctaggcctcgctctctcttctctcgcagtgcatatctagtactcatctacaggagctatgctggccatgcgggcatactagtgctgtgcattctctgctctcagccttactaactaacatgatatctgtcactatactgaacatacagttgtgtcacattacgcactcgtgcgtgagtactgcatgctgacggtactgcctctg

SEQ ID NO: 15587 - DNA, 324 bp, Oryza sativa
  unsure (1)..(324): unsure at all n locations
agcttgagagacacttgtgggtacnatcatgtttgtgttctgtcactgttacataagcttactagctcttgctcattcgcggcgcacttggctggaaaaacgcctttgaacagtagactgttggatggagactacatgaggtggagccactcttgctataaaccactagctatatccgatgtctctgatacagataactaaactgacttaataaatagccgtcacacatcttgagtccctgatatatgtgccatgaccgatatgacgctacgtgtctatatatgacacaggatactgtataagcatgtccacattggtgcacta

SEQ ID NO: 15588 - DNA, 379 bp, Oryza sativa
atctactgtcttgctacacgtcattgatgctgacggtgattgtggcttatctgaccatgtgtgcgtctcaaattcattcatgcttagaagccaatgtgttatacatgagagatgagtgagatatatgagtgttctatatactcaagaacttacacgactgcttatagcccaagtcatttatattcctgatgcttctatctaatggagaaagacggtcgacgccttactacacgcattagatgtgacattgatgactcagaagccagtgggatgactatacgctgcactatgtggaactgcgcggtctacatacgatatatgctcatgaatgtcaagctacaacggcgctgatgctttacatatgtacaggaaacgatgg

SEQ ID NO: 15589 - DNA, 439 bp, Oryza sativa
  unsure (1)..(439): unsure at all n locations
agcttctcccacaagttttcgcatcccttactaactcttctgcaatgtcggtctgcatggaacggagcaacagtgttagaaattggaaccccatgtataaggagacaccgatgcaataaaatatttaaatgcgagtagtaccgtcaagtgagcggggggtgctagctacagatcatatatttgctcaatagtgggtggacctcgctcgtcgggatcctcgggtgcaagcagccggatgcgagtctgcgatgagtaccaggccatgtattgttcgtaagtgttgtgatcgtatgccctggtctcgtggacgacatcattcaaggcctgcgaccacgcctctatccatggngtcattcttaagtgcatagatcgacgataccttgtgtcagcttgcctcttttgcatgaaacaaaaatacaacaattagctgttaattata

SEQ ID NO: 15590 - DNA, 339 bp, Oryza sativa
  unsure (1)..(339): unsure at all n locations
acagagcccgtgcagccgccgagccgtgtgtgccgctgtcgattccttctgccgatttgctcgattctctcagccggttcttgaattagttgaggagatttgttcccttatcctcctctatcttttcccccaaaaatcctattttatccctttgaattcgacgcgaatntggattcgttttcgagtttatctctccttttcccggcgcgatttcatccgttcccgagccgatctctccctcttccggctataaatagcagctcctaaacctcctctttcgttttccacccttcgccgagctcgccgtcgcccgtagcgccctatccagctccaccctag

SEQ ID NO: 15591 - DNA, 364 bp, Oryza sativa
agctttgcaagtataaaacatgtgtcagcgcttgcctgtttaggacaggttatgctgcgccgttgacatgcggaccccacatgttaacctaaaagaccgcggtggacctattacacagaggcggtccccgggtcgacagaagcaaaccccgtgtgtcaaccgaggcgagtggccgacaaactgactccactaaacaccacacgacctgcacacgtggaaaccacgctgctaccgagcggacacactaacactgacactacacgagtaccacccgcgcacgtgaacgactaccgacaccggtacacggttacctgggtcgacgaccgcacaacgtgttctgaggacaccgaaaggaccaagaccg

SEQ ID NO: 15592 - DNA, 411 bp, Oryza sativa
  unsure (1)..(411): unsure at all n locations
aactactctgacattctagtgtacattcaaacttcttgtccttcctaagtaatttggtaataggttttgcaatagtggagaagtccttaataaatctccgataatatccagcaagtcctagaaaacttcttatttcaggtaccgatgttgataccttccactccatcacagctttaatcttctctggatctacgacaactccattcttggtaattatgtcccaagaatgcaacttgatctagccaaaattcatacttacagaatttggcatatagttggcgttgctttaacttctccagtaccaatcggagatattatttatgttcctcttcatttntggtggatataagaatgtcgtcaataaacacgacaacacactggtccaaatactccataaatatattggtcatg

SEQ ID NO: 15593 - DNA, 422 bp, Oryza sativa
agcttgagcattgtatttgtgttgagctcttttctactcacctattattaaatctcaaaccgaaaacataataatgagatttttcaacacaacatttaaatttgatggacttctgagttctgactcccttgtttctcatgtttttttttctgatttaggggttggggaaagactatccaaacaattgctttcttatcagctgttattggaaaagataatgaccacggtgatcaattagtggaaggaagaaagattgcccctatactcatcctctgccccacatcagtaattcgaaactgggaaaatgaatttgcagagtgggcaagatgttctgttgctgtctatcatggcccaaatcgtgacctggttcttcaaaagggtgaaactcaaagactagagataggtattaccacgtttgacac

SEQ ID NO: 15594 - DNA, 500 bp, Oryza sativa
  unsure (1)..(500): unsure at all n locations
tgatgtacanatgagtagccctaaatatattgcaatcctaaatatgcaaagtntggtgatgactcaataagtatatttgggctaggcatttgtgggccaagcccaaagattcttttaacaattaccacttcataatcaaactgctcccacagcgcatcacgtcagcactcaggacctatggatgaaaacagttggaaaaaccctctaccatttccattttcattttattttctcgaaaatggaattggaatagtatactcggaaacggtaacaatatcagtaatgttggtatatcgaaaacggaatcgtcggaacgggaatctaccgatgtctgtcggaagtcgataattcatgtcggaagtagcgaactgtggtatcaatccacatntaactatgtatgaagatgaccttantaactcaccctttgcatattacgcttgcacacaacaccattatattgatattaataagttgacaatatgatgacaaacaatataaat

SEQ ID NO: 15595 - DNA, 412 bp, Oryza sativa
aagaactgactgcagcatcgagcgtttccattccacaggcatccttgacgggagcgacggaaccaacttcctcgaaacagctccaactgagaagaacttcaactctggtgtgaaagagagcaagactgagtactacccactatacttagcaagacataccataagggaaggtatgatgcaggatatattcaaaggaggctaaaggttcatttgcaataaagcagtcatctaaaagcagtagttgaaagcagtaaaatagctgtagtaattaatcaatataaaccgatcactgctccacgctacaccatgtggagacaggcccaaaccactacctgaactaaccagttccataagctaactatgggtgagactaatcacggtgaatctagtggaccgctcataaccgggggca

SEQ ID NO: 15596 - DNA, 379 bp, Oryza sativa
  unsure (1)..(379): unsure at all n locations
tctgctgtatagttagacacaatcttgtaaataccctattacttcatataataatatctccttcaaagctatgcctagacgtatgcaaagacgatccagattattgaacttgtatcaatctactgatccagggcttgatacagtctaaacatgtcggtttctgaatcattagttttgggagccgacattataccaaaatgatcagggatttttggtggggtgatgagaccaataaacggaaagtgcattggatcgcttgggaacagctaattctgcctaaattcatgggaggcttgngttttcgggatatgaggcttttcaaccaagctctcctagccaggcaagcttggcgcctgattcagtttccggatagcttatg

SEQ ID NO: 15597 - DNA, 340 bp, Oryza sativa
  unsure (1)..(340): unsure at all n locations
agcttgtatggagaacgggtgtatatctattgccctgaacttatcgaccggagcctttgtcagctctgcattgcttangagtctaaggcctatgtaatatagtatataacttcgaacatagggaacgatttctacacacgaacctagctcaacattttgctaagctaacgcataatatgaatatgatagagcctgcatacgatacagtcgtttactatagttaaaataacaccgatacataaccgttcatgaatgacacacctcaaacaggcccttccttatgtacataacactgctgaacaaaatctagagaataccgtgtagatattgcgtatcttat

SEQ ID NO: 15598 - DNA, 440 bp, Oryza sativa
tatgctataacggatgtacgcatacgtggtatctcattgtccaagggtagagaaagatcgcttcctcatcactagcagcttatactagcgcaaacatgcaatatcgtattccgaattgttaccaagcccgccccatggggtctatacccgattcatagctccaaagattgtcttgaccttcacgagccgtggctaatagggctgaaatccgacatgcttagatatgattaaggcttgctattattagatgtgcccagcatatatcatattcaagaagcatacacatacaggcacttccaatgctgtggaacatgccgaactctgtgagaatatccgcgtcggcactcgctaattatacacatattctgtctacttctcagtgaatcaaagatcaggtattctacaccccacggctcagtctatctttgttactcttgcac

SEQ ID NO: 15599 - DNA, 434 bp, Oryza sativa
agcttataagaaaatatagcaacatttccacataataaatatactacaaaaatatatttaatggtgaatttaatgaaactaatttggtgctttagatgttagtacacttcactataaacttggtcaaacttgaagaggtttgactggacaaaactgaagtgacatataatatgaaaccgagggagtatttaggatttatgcgtttttcatatgggcatttatcttaattgctcctttcagtttctgaattctttgattccctccagacacaacctatgagatcacggagtccatcttctgttcagcctgcttgttttctggcatttcgatctgaaacagccgtactgctcttaaggaaagcacacagagacagagcccttggaattgtttgcctgaaagtaggttctttgatgtccttttcctttcttattgat

SEQ ID NO: 15600 - DNA, 466 bp, Oryza sativa
  unsure (1)..(466): unsure at all n locations
ntccttgacttgtctggacattcggttgtttcacttttgatgccaaatttgtgtctacttgtttggttatgagggcaagacattntttntccaagatccaaattcctaagtcagtggcatacgataaagcattaccataacctatagttatgtcggaggaccaaagctaggaaacacagccaacacaaagaagaaaacttgcctcgtccccagtgctgtcggtgatgtggtgcagccatccatgccattcatggggcacttgggatgcattgtancgccctttctctgcatattctacccacctgtgccttcctgcagggttaccagtatttagttttgtagaaagcacctctctttggaggagacagaaagttagaaacggtacattactacaaagacatgcataccaatcaagcccagggtgatcacttatgaagcaaagtacagatctcagaagtggaagaaa

SEQ ID NO: 15601 - DNA, 436 bp, Oryza sativa
agcttatgcctttgattgggtttagttttcttatatttaatataatcagccttgttaggaaaaaacaaatgttttcgaaacataaaaagtattttttactactatctcaattttaaattaattattgttttagttttgtcttaagtccaaatatgtttatctttgaacatcaactaatttatggaaaatcgtaataatttaccacacatgttgacagagctcggggctcctcaccgggagaccgcgcaggcccccctttgccagttcggccgggggcttagggtgagatctcaagctctcgctgtgtgtggaaagatcgcgtgccaggaagaaacgcgagacacggacgatgtatacaggttcgggccgctgggaagcgtaataccctactcctgtgtttttggtggatctgtgtaagagcatagtacataaaatc

SEQ ID NO: 15602 - DNA, 413 bp, Oryza sativa
tggagcttagctttgggcaggaagaacatatgaacaatcgggtgtgtatatatatataatactccctccggttcatatgtgtgttttacttttttttgaagattgatagaatctatagaaaaatatagcaacattcttgatacaaaacaaatatattatcaaaatatattccatatatttgtttgctttggtattgtttggatggtcctggagatgtggtggatgctacgttgctgctgttactgatggccggtaagcacaagggcaacatgttgtcgggggttgggaaattgtcactttctgctacaatgccgatgctagcgatgaacgtattatcacgagatgacgcgagcgctttaagaagatggatatttttgaatgaggtgtgacgcaatggacatgctgtgtgtaat

SEQ ID NO: 15603 - DNA, 427 bp, Oryza sativa
agcttatgcaatattcgaggggatgaaacggtctggcgtgaaacctgagctcaaacactactcttgcatggctgatgcgctaggaagggatggccgtgttgttgctgcagttaagctcatagaggaaatgcctttcgagcctgatgaggccatgcttggaggtgtattatcagcctgccgagtgcatggggaaatggaagctgctgaacgaatttcaaagaagttgatgggcatgtcaccttcaaagagtggttacttcatgagcttggcaaacatatattcagatgctgggaggtatagtgatgcagagagaataagaggcttcatgaaggaagtaaaagttgacaagcttcctggatatagttcagttgaatttgatgttaatgtctctgaaccaagatctggatgatcaatttcatataatgga

SEQ ID NO: 15604 - DNA, 474 bp, Oryza sativa
  unsure (1)..(474): unsure at all n locations
tctggccctanggataagaatttctgtgtttatatattttctctatattngaatttgaaataatcaaataatggttatgatcttcaacatcaatttaccgcagtgccacaatttctggatatcctataacaaattccacaaaatttaagcattttgtagcaaatattatcaatatatagtgttgtaaactttaattaagatcttttatgctttgatttgctttataattcttacatgaatccgtttagtagaccgtatttattgtacgtgagttcgatggtagattcgatgttgattcgctttataacttcgtttgattgaaattggaacgatgcgacggaaaagttaaagtttgtatgtgtatgaaattttgatgtgatgaaaaagttaataagttatagaaaaagtcggtactaaaccagcctttgatcatatgataatacattangaacttgacaccattactcgactgac

SEQ ID NO: 15605 - DNA, 428 bp, Oryza sativa
  unsure (1)..(428): unsure at all n locations
agcttgtccagattcatgtcctaggatgtgtcccatccagtactagcttgttatattatgggacagagggagtaataaaaatcaatgctgcaaatggaactttccatctgccacagcaaaggaaagtgcccagttacttccagacaaaaaccataacatactaacacatgcaaagcacatattcaggaaatggtcgggaaacaaaatgccttttacctggaaaactgagaatccttttgaaactcaaagtcatagacgtaggtagcaaatgagtcacaacaatttatgtgctgaacatgcatgtattgaggatccggaaagaaatggccatactgttgaaaaaaaaaacaaaaataaacaatatcagccacaagaacatctaanaaagacctcaaataactggaataaggggtgcacatccctcataa

SEQ ID NO: 15606 - DNA, 391 bp, Oryza sativa
  unsure (1)..(391): unsure at all n locations
tcttgtctcgtacttcgtcggcgctggagtcctctcctttctcctccacggcgacagtagcgctgtgtgccgcgtgcgcctcggcttcacgtcgcaggcgcacatcgcgttggcggccccacgcggtgtggcattcatctacggcgatggcgttggcgccggctcgtcatagattctcacggngaagccgccgacgaacgtggtgccaaggatcgacgacgtcgatatgccgcagtgggtgcgcaccgtggtgcaggaggagtggatgatcgatgtgttcgatgccagcatcgccgacgaggcgtgcacggaggatgaaccgatgaagagaatagggggagcaagatgactcggcctaacatgtggtgcccacgtgggtctcatgctgact

SEQ ID NO: 15607 - DNA, 439 bp, Oryza sativa
agcttgtgacagatcttaagttcgaatcccacattccacatattttttggtttagtatatatctttagtatcggttccttcaactggtactaaaaatcaagaactttagtctcggttgctacaaccggaattattaggggttgagaactggtactaaagatcatatctctcctggtgctaattaaacatgcattctcagtgttagagcctgattattggagtattagttcattatatatacacaacattatattatatgggacgccaggtaatttttgttttaattcgccactggcagcaaagtccatgaaaaataagcattgctatgatatatatcgatggacctagtatagccacatgggtttgtaatggtctggaaacataatcgtgtacaggagaattgcaacgttgggacagataattgtgctcttggcgtatc

SEQ ID NO: 15608 - DNA, 423 bp, Oryza sativa
  unsure (1)..(423): unsure at all n locations
gtgtatatataccagccactactatgagaaaaaatttcatggcgtttgtctatgatttttgctggcagataaatgccaaaaccgctagcaaagtcataacaaggtggtggggggcaccgaccgccagcgaaaatggatctttgctggcggccacgctataccggccggcagcgaagatatgttcatattcgctagcggtcacttagatgcaccgccagaaaagatggataattttcgctagcggntgagttatatagtccggtagggaagatacatattattttactggcagcccacttaagcaaccaaaaagtgatctttgctggcagtataacaacctccatctttaagcaccacgtacccatgtgttcttattcacccacgcttccacaataaaaatatctgtctcttctctcagcacat

SEQ ID NO: 15609 - DNA, 445 bp, Oryza sativa
  unsure (1)..(445): unsure at all n locations
agctntggtttcgatctctcttctctcccgtcgtccttaaagaccaatcccaatggtaatttcatcggagtttcattcaataataaataaagatatcatgcatgtaagttaaatttggtgacatggcaatataacattcacatacatcatgtttgtacaattgtgcagtttgggggctagctagtttcatttcatccaatcacatgcatcgttattagacgttatgaccaacctataaaatcgtgaaataggttacaagatgttttaacttttattaaagtcaaattgtttcaagtttgactaagtttatagacaaatataataatatttatattactaaattagtttcattaaattaatgattaaatatatntgttataataaattatcttgcgtcgaagatattactttcntttctataacattggctaaactagaagcactt

SEQ ID NO: 15610 - DNA, 412 bp, Oryza sativa
  unsure (1)..(412): unsure at all n locations
cacatgtgaaattcctcataagtattaagagatataaggttaacgccaaggatgtaagtctctccactcaattaccatataaggccatggagaactgcatatcttaaatgtacctatatattttttgtgcttcttttatgcatggcagctgtctagaaatagaaccatctgaactaagcttcgacgatacatgcattacanatgtgcagcacgatctttgtcacttcatccactgtgagtgctgtcatgtcaaaagacggttcttcgacccagagagcattctggctacaagtgaagaatacaaacatcnttgggagtggaacaacgtgattgcatagttgtattagataatgtattctaagtgacaatataacattctgatgatacttttcacatattgcatatatgtaca

SEQ ID NO: 15611 - DNA, 419 bp, Oryza sativa
agcttgtccttaagtcataccatcgtggctgttgatgttagataggactattgcttagtctctcatcctcagcttgaagactctaccataccattgaacatactctggcggtccatacggtccagtagttccaagtggaggataagcagtcctgacatcgacgcgcgaaggtgggtttctttcaatatacattccaacaggtggtggaatatcttctgctggtgcaagcatggcatcctcaccaaacatgaactccggtgtataatgtccctggcgataccttggcataatgcttctttctaaagtggctaccctggtgcggacgcgttgcagctcagcaaaggttgagtgataaagcatatctagtgagcgcacaaagtttgcaagttggaggtatggtgtatgtagtcctacaccta

SEQ ID NO: 15612 - DNA, 394 bp, Oryza sativa
  unsure (1)..(394): unsure at all n locations
gtagagggatcgncggcttgggtcgatgtaagtggcttcacttgtgttgaggaagaagccccttgttatggctccctatgacatacgtctccaagagccaaccttttgattgcttcgctagggtcctcctcttcacctaacacatgtgagtcaacttgctctacttgagaaccgttagttttgtcaaatgtcacatcacgcgcaatctcaacaataccagaggtgtttgtgaaaacgcggtatgcgcactcatttgacccatatccaagcaagaacccctcatccactttaggagcaaactttgaggatctaaccttcttattaagaatatagcacttactaccgataacacgaaagtaagagacattctggtttgtaaccggtagaagctcat

SEQ ID NO: 15613 - DNA, 437 bp, Oryza sativa
gcttagactattgataaaacccattccataatcttgttctaattcgcgagacgaatctattgagcatcatttatccatgattagcctatgtgatgctacaataaatatgtgctaattatggattaattaggcttaaaaaaattgtcacatgaattaactctcatttatgtccaaacatccgatgtgacacggactaaagtttattcctggatccaaacactcccttagcctacaacacattcaaatgaactaatgaaacatttttttcttacaaaaatcatctcaacctaacaaggctgaaaatttttaagactaatatgcccctttcctcttcttctactactctacttgcctccacaatctatactatttatataagtacaacccactaattcttaagcttaacgtgcaaacatatcatctcatctactagcaat

SEQ ID NO: 15614 - DNA, 412 bp, Oryza sativa
  unsure (1)..(412): unsure at all n locations
tgccatcataacagagntgtcagtaacattataggatgtattcatgctactaacaggccaggtatttacggttattatttcggaggggctgctctctataagccccttcatatgttctcctgcattcgacaagctttcctgatttccaccattgtactcttgccagtcatcaaaagcttcatctataccgactccaggatcaccccttgcacgcaattgatcactatgcgctgaactcttgctaagggaggactttgtgaactcagcaatattggtctcaagaaagattcacttgtactttcatctttaactagcatgccacttgctgaagccaaatctttgaatcttctaactggtactttcatatatgtttatttccactacgaccactaggctgatggcagtacatgtg

SEQ ID NO: 15615 - DNA, 426 bp, Oryza sativa
  unsure (1)..(426): unsure at all n locations
gcaagctgattcaacctggtgatgtanagtatttgtttgtatatgcatgtttagttcatgacatcattcttgatttcatcgcgtgcaaagccgctgaagagaattttgtcacctcattggatactgcaaattttggccaagtttcggatcgcagggttcgtaggctaagtgtcatgaatatcagtgaagaccatgccaccatatcagcaagccaaatcgatctctctcatattcgatcacttactttatgtgggcgtttcatgcaaactcctttggtggatttaccagctatacgtgtgttggatttagaagaatgtgaaaacatgggagacaaccattctattcttgcgaatgtagaaacgctgctccatttgaagtactcgcgtattggaatgttgtgtccgataactgagctcccaagaaata

SEQ ID NO: 15616 - DNA, 386 bp, Oryza sativa
  unsure (1)..(386): unsure at all n locations
tttcaaaataattgtctaaaaggatctcaaaatatctactatgagaaaatttaaacatcaagaatttttatttattaacataataaacatttaccatgaaaaatatattattacaatttccattctctggcaattgctcgtgggggttctaattaaagtcaagaggacacaaatgttaattaataagtaatattcacataggttcttttgtatgtcttcatgagaacagaccttggtgtcagaataaacaactagatcatgcctttatgtttctcttcctgcangccatttagtgatatgcccgaagtgaccaacatccatgtagaggagaacatctcatacaaatttcacacaccagctacattttatccttactacaactggac

SEQ ID NO: 15617 - DNA, 427 bp, Oryza sativa
  unsure (1)..(427): unsure at all n locations
agcttgagcgagtggtgcgccttatcaatgttagctagctcttgactntgagtcagcaacgacaatgttgacatggaggtagcgcctgccatggtggaggggatggagaggagaggtgagagatgggatattgttttgagttgatgaactagtcttgactatgttaacatcctttagagtaatcttttaaatgtaaattttatatctcctactacctctcggtttctccttaattaatagtcgtaaaatttcttaaggaaataaatactagtaaataatatttgtgaaccgaaaagtttattctagtacttgaaactattacgttaaagtgttttagccgttaaactataatatataattacccaacttcactcactagtgatagaactatgggtcgtgtgtaattgtgagaaacanaagaaatgtc

SEQ ID NO: 15618 - DNA, 439 bp, Oryza sativa
  unsure (1)..(439): unsure at all n locations
cgctggtgngaaggggtatgtctcggtatataattggatatttacaagtgaaggattaaaaaatgttctaccagcaaggtcaacatgaatgataaactcttattgatcttaaccaccaactagtaaacatcatgactagattttaaacaaaacagtcaacaaaagttccagaatcatgcaccaaacatagcttgcctgattactaggaagcagtagtccctctatttaaacattgaataccatcaacattgtttcgaaatgcaatgggagatcacataagcgtgaggaatntgatgaatttacaagtaattcgaccatccagcagcaattcatagtctgaatgaaaatctctactgacagagctgcgaacaggataaatatgttgctccccacaagtcacaactactcacagnttatcttagacgacgccggatagcca

SEQ ID NO: 15619 - DNA, 419 bp, Oryza sativa
  unsure (1)..(419): unsure at all n locations
agctntatagcgcaatnttcgtgaagccatgcattattttcgaatgtcatcgggtggtgagcctttcccagataattaatggccgaagatgactttattttcctatgggttacaatttgattagcttggaccttatatattggattgtgtcagctaaatgctataagtatagttgcttagccatgcttagaaacattagctaattaatgggatggatcatatatactacattattatttatggttatatttaatggtagctcacgatggttaatcgtgtaaagttaattaattgataattaaaacatggttaaaggtgggttgtgagcatatggttttgatggttgtgctcatgacaattaaggactggttcgcgagctactgttgtgaaacatttaccgtgccaaccacaagccagcg

SEQ ID NO: 15620 - DNA, 435 bp, Oryza sativa
agcttcaaataatcaaatgtagaggataattgttctcaaaccatgtagagaatgaagattgctggtttcaggaagtagctgttgaggacaaaactaaaaacttatatgcttgattctgcagattctaccaaagtggaacagatatctcatagcatggatgcaggtggtcctttgcagactagaaaggataaggtccaaggaaaggttgttgatgtccttccccgcattccagaagatcctgcttcaccatcatttgtttctccactaagcgaagagaaaaatgacagtgctgttcaaccagaggttagtacagaagccaagatgaccgcttcctcagcaaaagttactacaaaagacaaggggaaaactcagattagcgatgttgtttatgacaaggcacatgatatcaactctcttgcatcgattgagaaatgc

SEQ ID NO: 15621 - DNA, 470 bp, Oryza sativa
  unsure (1)..(470): unsure at all n locations
tgaagaaggaggtcaaggtggagttggaaattctcatatccgattntagntggattagagtccgattcatttagtcatttagtttctcttttccagatggaaatttggatatggtcttctcctatgtatccttgtgctgattttntattgggtggattagagtttgattcctttcagtttcgtgtttaactcgggaaatttagaatttggaaactacctagatacgggctacatgcgcgaggctgagatgacgcaccgtgatggatggagttgggaagcgcgttttgtgcaaccggttgcaaacccaactcatatctacaccgttcaatgttcattgagattcgtgcggagaatcttaatcttaactaattataagattattagtaattttaccagatagttaaatgcccgtgcttccgtacggtgtattaaaactataaatatttaagttcaaaaataactaaaaatat

SEQ ID NO: 15622 - DNA, 435 bp, Oryza sativa
  unsure (1)..(435): unsure at all n locations
agcttgtaaatatttttcaagaaggcattttattccttaaaacatttttccccaacggaaaccgttggccggaattgatttcgccttatttgtagagaaatagcatacacagaacagaatgtactgatgtatatacgagggttaacgacgttgtgaaaccgctaatggttagtttgtgaaaactgatacagtatgttttagctgttttttttacggttnttactggtttttggtaaaatggtgaggagcggtttttaatttaaaacggaaaggtaaaccctgtgagtacaattcagtcgttcaaagaaacagaaaaaaaatcatcagtgcctcagaggcagaaatcacctgtaatatgtgtataatcattgttgtatgtgtgaagtatatatttccctatttttggcatagctaaattaatcctttattacacaa

SEQ ID NO: 15623 - DNA, 394 bp, Oryza sativa
  unsure (1)..(394): unsure at all n locations
ggtgcagaatagaagtagagcaatggcataagagtaacatctggaacattcgatggatgacgatgattcgacgagggagcaaagtgccacgggtttgccacggtacgtatatccaccaataggcaatagctactcatactcgctctggccacatatatttgatctttagaactgatcaatgtgtaaaaataagtttgatctaaaaaaatgtgtgatatcaaatatctaaatggcaactgtgcagtatatcacacaaaatggacagtattttaacgttgccacacatagtccagcttccgatttcgagtttccaacaggaaacaaaaatactatacangtacaaccatttggaagaaatactaccagccattgctataaaactctacatcataat

SEQ ID NO: 15624 - DNA, 420 bp, Oryza sativa
  unsure (1)..(420): unsure at all n locations
agcttaagaggctgtcaggtgggtccaggtcttggcaaactaggctagggtgagagggttgggtaagattctgggtaaacttgatttttagattaattttcggaattattttctcctctaactttgaaactacataattcaatgtgtggaccaaattaattagtgttgattttactggaggtaaatgattacacctagattccattttctttggttgcactcaaaaataatgggtggactgctcacagaaattaaacaaagatgggctattagaaagctagattgaatttttaggaggcttaaacagagaaggaaaattctagaaaaattacatttattcatgataactaatctagtatttgaataaattattttccatgttcacttatgtgcagntaaatgtacttttggatgaaatat

SEQ ID NO: 15625 - DNA, 402 bp, Oryza sativa
  unsure (1)..(402): unsure at all n locations
cggcgccattagtagcgctactaggctattatgccccttatttgaacatctaaggcatttggagccaagtaactaatctaaaaggatatgcctactttgcactttattntatggtatctggccagaagcattgctacttaattagacttcactctaggccaaatatgaatacctcaaaatgcagaaccaaggcagactatgcaaggtttaccacttaattatgcttctcgaaatgcagaactaacataatcaaacttctatatctttgtaagtaggggctatatgaagttcacccaaactgtaacgctatccaagtttcttgtctccagtgccgtccatggggacacaacagcaatgaaatattaaaatgtggacactgaccagttctcgatgtaattatgt

SEQ ID NO: 15626 - DNA, 412 bp, Oryza sativa
  unsure (1)..(412): unsure at all n locations
agcttcgacgagctcgcgcccaccactgttcaaccttcatgtctgatccatgccatcattgatctccatgcaccttcactgccatgaagctccatgtcatcgtgaggagagggaggatcaggatgagagcctcacactactttaaaaaaggtttctcgtgacagtcaaaacacgttttcgctagcggtaaatggccccgccagagagtaaaaaccagtgaagatgtagcatctgtgctggcggcgacaaaccactagcgaagatcgattttcgttggcggccggcttaaggcaaccaccagtgaaaatcgtcttcgctggcggctggctaagacaactgctagcacaaataacactttctcttgcggaagataaagacacccgcgagtgaaaaaaattntgggattaaaaaa

SEQ ID NO: 15627 - DNA, 389 bp, Oryza sativa
agcttggccaaggaggttatggctctgtatacaagggtgtgctgctcccgggtgatctccatgtggctgtcaagatgctgaatggcaactccaactgtaatggagaagaattcatcagtgaagttgccaccataggcatgattcaccatgttaatgtcgtgcgtcttgtggggttttgctccgaggaaatgagaagggccctagtttatgaacacatgcctagaggatctctagacaagtatatttacttgtctgagagaagtttctcatgggacaagatcaatgagattgctctaggcattgctagggggatcaactacttgcaccaagggtgtgatatgtagattctacactttgatatcaagccacacaacatccttcttgatgat

SEQ ID NO: 15628 - DNA, 487 bp, Oryza sativa
  unsure (1)..(487): unsure at all n locations
ntatcactcatcctcctccgagatttcagttagccaagatgataaatggtaagaacccaccacatgtggcacaggctcgtcatcacagaagaatggcctagaaggcaattgcagactatcaacaccaccttcaagcatctcaatgacctcactcattgttggccgatcatgagacttcatctgaatgcaatgtagcccaacaatgcacaacttcttttccaactcatgcatattaaaggcagtgaccacctcacccaactcttgttgaaccagctaattatacacccatgatggataatacgcttggcttgagctcgacatatcctgcttagagttccttcgccctccaaccatctccaacagaagcattccaaagctatacatgtcagatttgctagatatggcaccaaagctccgagatatcatctcaggagcaatataacctattttgtcccttgagcgcttacaggcacaaactattatccgg

SEQ ID NO: 15629 - DNA, 417 bp, Oryza sativa
agcttgtcagcgagtggttgcggagcacctaagaaacttcctctcaactgtgtcctcacaaggtacagatcttaacccatgactatgaatatctaccacaattatgtattacgctgtaccatacctatgacgactttgctcctgaatggactcattgtattataaggaggattgttctcgatatatatgaccaagagaagaattcctttacgcagacatgcctaaataatgtgatgaaaccatgatcaatctgctaaaattatgccaatacacgtagatccatgctagctaaataccgacgatctactaaagataatgtatatgagcgacgattgttcccatatgactatgattcacgagcgtcctaagatagtgtgctctgctgttcatggaacatgacgataatatcagggtacg

SEQ ID NO: 15630 - DNA, 423 bp, Oryza sativa
catgaccctcccagatatactccatatggcatatctcacttactagccaagaaatgtgtcatcaaaactcagacattaactgctgtcaggacgtgacaagccaacgagtacacaggtgtcgatcaagagtgtagatctcacatactattcaaaagatcactgatgtacacgcggtcaatgagctcaatcactcttcatcaatcttgtcattgaatcgaccatacatcacaaccaaacaatatactatcaaatgcaacccgctaacacaagacacgagagaagaggctacagccagccaggcattactatcgctgacattcgctacatctcacggtcattcacatctatcaagggcagaactggtatcttcagaaaccaatgagacatactcgaagaacgctgcctgcagatgtcaccgctcat

SEQ ID NO: 15631 - DNA, 441 bp, Oryza sativa
  unsure (1)..(441): unsure at all n locations
agcttgagggtccgntntttcgctacatgtttcggctgacgacttttcgtctgaagtttgatgatgatgatggacacctaaccactggtcgcagccgacgggtgcgatactattatgcccctgcaaatgatgttagttattttgcctgtcggtttcccgtagctttctacatatgaacagtntgtggtcggtgtaaacccgagattgattaaaatcgggcgatcgggggaggtgggaaaaatcggtcgctccctcttcccgcatgcgcgcgctcccctctcctcatctggacccacccacttatccctccccttgttccacaaaaatgtttcaccaagtgtacttataatggaatttggtttatnnttttgtccactggagaatgtttcacctagtatactcacaatgtttcactatgtatagatctaatgttgcagtgaa

SEQ ID NO: 15632 - DNA, 418 bp, Oryza sativa
  unsure (1)..(418): unsure at all n locations
tccacgctgttaagcgctcatcgtcgtctcctgctttgcgccaccaagctcgttggcaagggtagcaacgacgaccgcccccacaaggtcgaactgccacgctttcccaccaaattatctaactaggtgacatgcctcgaccgaccacaagggtcccacgtgctcccttcggtgacaacaataatcctctcatagtgcgaccatgtacgatcgtggcgaagctcctagagcacatggacgaggagggcatggaaagccaaacatgaacttgaggaggaagtcgaggactttggttggctcttctttatggatagagttaatacaagagatcttctatatagaaagcattgtgttcctgacaatgcaactgtctattgcgcctgctgctcttagaatatatangggaaacnaaggaaca

SEQ ID NO: 15633 - DNA, 413 bp, Oryza sativa
  unsure (1)..(413): unsure at all n locations
agcttaaaaggggttaggattgtgctatttcggggggatcagtgntgtggtacgcggtatgatgtgatgtattgctgttatgtagctcgaggcggtgttcaacgaagtcgggccggtgaggcgctgcttcatggtcgcgccgaaaggtaaaagaattcacgaattccatggctgtttaaccagagttgtttggtgtttggtggtgcttattattaagggcttcgcttatgcgataatgtttgtttctaatgcacggtcggagacgagccgaggctttggattcgtacagttgtaagtatcaatggttgcttttgaagtgtttcaatgaaatgcgtttcctttccatatttcagaatccacactgctttgatcggagtgactgtctaggaccaattttcatgctaacgtaaatc

SEQ ID NO: 15634 - DNA, 391 bp, Oryza sativa
  unsure (1)..(391): unsure at all n locations
agttctacaatacttcaacatcgataactcgaggagacctaagttcagcaaaatccacatgccatgtcatagggttaacaacatttttcctggtcacttctcctttttttatggattgcaagcctaccagacttcattcatgggctttcgatgggttggccaagctgagtcgctggagaactantcgattttttccggaattttgatggaaattaccatacaaatacggttaccgacaaaaacggtcggaaaaacctncatcccattcccgctaccatttccagaagatattatccgttccatttccaccactgtcggttactgaaacagtcagtgtaaactggaaacggaacccaaaatctccgaaatttcataccgttttacccctact

SEQ ID NO: 15635 - DNA, 440 bp, Oryza sativa
  unsure (1)..(440): unsure at all n locations
ctgcagcttcgagctactcgtntatctttttcgctgcatttgtaatcctttatatttttataagacgtggatctgtatgtcaacaattgtcgtttgtgtaccctggctggtcctggacagggatttaatgcacattcagcttagaaattctggttcgagaatttctgggcatgacaagttggtatcagagctaggtttgaccgtagggcaagccaactggaaaacctaagagccctctgaaccccttttcatatgcatatgcctttttcacttgtatttgtttcaagaaaatttggggttttgcctcttgggtttgtgggaaaaatcttggttgttcattcggatcggatttttaaaattagctcagtctacgggtttagaaaaaaaaaatctatttggagtttattcgacagtcagtcgggaatttatcaagtgatatg

SEQ ID NO: 15636 - DNA, 439 bp, Oryza sativa
  unsure (1)..(439): unsure at all n locations
catggaaatcaaatcagtctttttttttagaatataaaggtagtgaccgagaacatttatttattttttattcataanaaaggtagtcacaaattacatgaactctatttcgctgtggtatggaagatgatgacagaatntgcctaacgagctggtaaatagcattgtagaaaaaaccacttgcaatcctttaatccggcagcattgcattgtgaaagcaaaaatattgtcttcaaagcctccgtaaagtaggacagtggattatcaatatacagatggctaccatccttttctgtagaattaagtatgtgcccaaccaaaaaatgattacttcgaaaattaaaggcnatactgtacagcatgcatgagcatcatatgtattgtcgacagaaatacagagagagcatattaaaagtcccctcttctagaaatatttaca

SEQ ID NO: 15637 - DNA, 353 bp, Oryza sativa
agctttcatgactaggcatttcaaagctttttcatgagtaccatatgccgacgagaggggtcccataccaaccacaagttatgtcccagaccttactgtgccaagaaacccaaaggtgctccccgactcctacccagagaatacaaatgactctcgtgatcaaggctcccctgatgaccagttactcacccaggggtgtaccattccacacacgtggacacactatacttatggttggatgaaattccaaggaaacgagccttacgtgccatagcaggaaaccatactcacggtacgaagcgcggaccgcggtgttggaaattcagttagctactatgcaccgaaccaggaga

SEQ ID NO: 15638 - DNA, 425 bp, Oryza sativa
  unsure (1)..(425): unsure at all n locations
tcactgaganacaagcttaggcggcagagaaatgaacatatatcttcacatttctggccgtcacttcattacaaacatgaaccagtcaccatctgaaagatgcaaatgaagtttgctaataggtgcttaagtagtacgcgagctgctcacactttcgcattcagacattcagtcggtgaacatctccaagtgattggcttgatggagaattaaagaatgccaccgcgtactatacttatgtcttgggagggaatgagagcattgacgagatggggacagccaatctcttctaattttcttctacgttcgttcgggcgagatagagaccggtacagcaatgtgtgcttcaaactctttggaggtaaagtggagcgatcagaacctctaaatgtgacagttngatcaacacaattcgtgaatctact

SEQ ID NO: 15639 - DNA, 427 bp, Oryza sativa
  unsure (1)..(427): unsure at all n locations
agctntgccgacaatggtccgtgcagcagcatgattaccacaaataccagaatgtatatccttcaacaattgtctcccttcctccaaagatacacagcgctgcagtattcctgatggacttttcttgtacagctcagtctcatgaataatgtaaagtctgctgcgtctganaatccgctcggcttcatttttgtcttgagggagttcttgtttggtcaaaaattttacaagaggttctctccagtaggcttcaatcatgcttacgccttgagtatccatggcttcgactatctcttttctaggcacggtcggttcataaagatgttcgacgaacacatctgaaggagctgcttcccgttttgaaccaaaattggccagtctgtcggccgccttattgttatgttggaggacatgggtgagctcgagt

SEQ ID NO: 15640 - DNA, 436 bp, Oryza sativa
  unsure (1)..(436): unsure at all n locations
taactaaccaacccacaggcataccgactatgggtagacccctatttagaatcatcctaaagaatcaacgaaacccacaatacttagctatctgcagcaaaatctaaacaacatataaataaagcaagagttagtacattaaacaaattaatgtactagcaagaccacaatcaattcttaatacattgaggctctaccatgatgccttcacaaacattntcaatgtatntaaagaaaacattntgcaatatgtatagcataaagaacatggcatggtgtcaacataaataaataagaatcatttcctactaccgaaccggtagcaagaacataataccatgtatatcattctcatcatcatttcaaaagattcgaagtctaaaagcatttataagacataaacctatacccatgacaattcactatgccgctcatg

SEQ ID NO: 15641 - DNA, 354 bp, Oryza sativa
agcttatcctcaaatatccctactgaacaatggtgaacaccactactaactcaggtcaccttctaaatcaaagcacatctgctcaactctgaaatacttgtgtaaatggagatgcaaggcaatgggtgtatttgtgtctgtaccgagtatgtccgtgatgagccggccgttgctgaaccggccggtgggcctgccgccgaggaagtcggcgccgtacggcaagaagttggccttcatcgccgtctgcagccggttgttgttgccgggatccaccgtcgagtcaccgaacaccagcatggtggtacacccggtggtggtgtagttgatcaccctcgccggcggtggcggcacttg

SEQ ID NO: 15642 - DNA, 356 bp, Oryza sativa
  unsure (1)..(356): unsure at all n locations
tctaagcttgcttaaacacctaaattccagtgacttgctgagtactaaagtactcacccttgctctatataaatatatatagttcctccgtcctgaangtgaagatgaagtaaagtgaagattaagggttttgtcctggttcccagccgtcgcctgtggtattgggtgttagaccgttggttccgctgctgctgctgttgttggtgtttgcctcgtccgtgtcgtcggttgcattcttaggctgtctgagctgcaacctaagttaaggtaaataagtcctctatttattttaaggattgcaatgattcatatttgtcaccgtgggtcccagcgctatgttctgngactggtactga

SEQ ID NO: 15643 - DNA, 267 bp, Oryza sativa
  unsure (1)..(267): unsure at all n locations
agcttagcatgattgctntgcgatgctaagctgtangggtgggcatttggttagatcgagcaattaggtcttggtcttcactgaaatttcagtcatcagaaactcaagagtggagactgaatctgtctttacagaaattgaagactgagcaatttggtctcagtcaaaatcgagattcttgagatgaaaaaaaaatacacataagctatccagaattttagatatgaacccggcccttcacccccccccccccccttttaaaaaaaa

SEQ ID NO: 15644 - DNA, 346 bp, Oryza sativa
  unsure (1)..(346): unsure at all n locations
tattacggacctataaaactaagctaagctaggtatgatgactcgttggcgtcgaacggttatgcacggatagtgcccggnttagatggtgaaatcttttaggatgggccaaaaaattttggcatggggccactttttgcgttttgtgaactaaacggngggcaaaattttttggcagatgtgcaattactgttcacccatggacgagtagtacccctcaccctgctcctcgtcgctccaccaaaatccccaacacagccgctcgccccttcgttcgtcccaccgctgctgcatgccatccctgtacaccgcccctcccagatcgaccccctcctcccctacgctc

SEQ ID NO: 15645 - DNA, 385 bp, Oryza sativa
  unsure (1)..(385): unsure at all n locations
agcttagggatgtgcaatgcgtcaccggttgcatggccgccctaagtcggttcatatcgaggctgggagagaaggcgctacccttatttaagctcctcaaacgctccgggccgtttacttggacggaggaagctgaacgtgccctcactcagttgaaggcgtatctcagctctcccccagttctggtcgccccggagccaaatgaacccttgctactctacttagcggcgaccccgcaagtggttagtgcggcgttggttgcggagcgcgatgaggacaatcctcattccgcgcacccccaccctgtgctggcttggcccgggagagagcanggaggagaggcccccgagccgaacggtggcccaaggcccccgacgaccggagc

SEQ ID NO: 15646 - DNA, 347 bp, Oryza sativa
  unsure (1)..(347): unsure at all n locations
taganacaagagagcctatttcttggactgagaattcttctgggagaagtcatgatcgatgagctcaaagggaggaaaaataacaaccaatcaatctagaattccacgcatattcattagtttctccttccgattagttggagaaagactaatttccaacgctaataaaatactgcaaggacaaaagcaacacagtattctccatggccccatggcgccaataattctcaagagaaaaaaacgaaaaacaatgtgcagagaaagccaaaaccatgtctgcttcctctgaccacccaacattccgacacctccagcttcagagctccgagctgtttaaataggccaca

SEQ ID NO: 15647 - DNA, 401 bp, Oryza sativa
agcttctcaagtcacctactgtagtaaaagatcataacaagaatgaggctagtgttaatataaaaaaaataccatgaacagatcaaactatactagaagcaaaaatacataaatggactggggagtaacatcaacgttttaaaagatacctgtgggcgagatgtttgggtttgtgactgtgaagcaacatattgcaagatttcataaagccttgtctgaccatagttggaaaccttctggaagtaaagaaccgccatgtcgcaagctctagtcctcaactcaagcagattgtgatcgatatcagcttcgtattatgcaatccacgggttaaagaatgattcatacacataggcagtcccctgaaatcaacctgtgttaccaacaaacaagagatagattct

SEQ ID NO: 15648 - DNA, 398 bp, Oryza sativa
tagacgacgtagaggggcgcaagattcgtgtgctggctctgttggaagggagatgccgtaaatcgcctcacaattattgagattgtcaccaacctcaaaaacatgtaaagaatcttttttttgctcctccattatcgcataatacagtaacctagtcgacttattctaatactacgaaagctcccatgtgtgtatatcttgagatgagtatattattcgagtttaacactatacattatgtgttaataaactgagaacaagtacaatagcagactattagtcaactataaatacatctcgaggagataaaggatgtgagagagcaccaacaggctatagatttgagccagctgctgcacgaactacaagaatatgtgtatataatacgttgaagcata

SEQ ID NO: 15649 - DNA, 427 bp, Oryza sativa
agctttcctaaagataaaatacgaacaagtccacatggcaaactcttatcatatctctaatttaaaccgacataaatatcctaattaatagatacaattgccttaggcgagctcaatctctatacggcaatatcagttattccaatctaaacccaaaccgagcccaagtcaagctgtattggctacctgccatatcggctcaatccgtttccaactatgtttccagccgatgcgcatttcgaatttggtaagattcaatctcctttgattccgcatcgatatccaactccaaatccatgtgaatcttgttaaatttcgcttttaacaaatggtaatggtatcaattgagccactggtcaggtggcccaactgaactctatgtgtcagctgtgaagatggttccgaatattcagaatcattgtatgac

SEQ ID NO: 15650 - DNA, 426 bp, Oryza sativa
tccatcgatctgtgttcagaattgaagagtgaaacttatctatctcttcagattgagctcttaattatctagctcttcagccagtgttaaattgttattgattctaattaactcttaacatctaattatactatgaataagttcaccaagtcatcgaatcgttgcttcggcgtattagtagatgctagttaaatcgatggcagcagattaactgattaagcatgtataaatgcatcatccatgcgcgccatcgtggaggaactggcgagcttcggcgccacggtgcacacgtgcgcccggaacgaggctacccctgacaggtgtctggaggagtggagagccaagaagctcgccgtcaccgtctccgttcgacgcgtaagtgcgcgctgacccggaggcgatcgcctgcagggtcgctcgcatgtt

SEQ ID NO: 15651 - DNA, 422 bp, Oryza sativa
agctttgagacgtcgaacctgagagataattagtcagactctgtgaagccgatcagttgatacgaaggagattacggcaagactattcagcagaacacaaagagattattgggctgcatttttgcagagtattgggcttcatttttgcattcttgttgggtagtattgtacagcgcttatttgtaggccgatagtgaggttctgtaattgtatggctgatcgattaaaaatggcatgtttaggtttgaataaacatattgactgcccaattcggttgcttctttgattcatcctgttggtactcaacctgtggtttcaaatataaaatctcccaccatatgtcatcagcttggcaagttggcagcggcattgtcacgctgttcatgtttctttctgattgctttgatgtatacagagaggac

SEQ ID NO: 15652 - DNA, 341 bp, Oryza sativa
tgcccctaggaagcgataggttcctgcttcgtcggactcctacgctgacgacgaggacgacgccgaagaacgcgacggcgaggaggaatgagaggaggaagaggatgatgccgtggccgattatgccactaacgacgcgatcgaagaccgcgtcgacacccccggctacactcctaccccaagtccctatcacaacgagaccggggtggagtcgaacagctccccccttctaccgaaggatttggaaggggcgaaggccctatttgcgttctcctcggcaaggcggcgaaaggaggttcggtgcggaatgtctctaataagatatgactcgtcgacatttg

SEQ ID NO: 15653 - DNA, 318 bp, Oryza sativa
ccttggacataccctaacttgccgacagtgttcatttgcggcccatgctaccacactatgagtttcaaaccgtgcttaagatctgtgagaatatctaatacacgttgcaaacatcgttcatgcgatttgactgcctacttataagcatctgtaccaatcttcgtacatatcaaccttatgtatagagacattctatgttggagtatatgcgaactcaacatatgatgcgcatttgcactgagtgtataaatctttaacctctatactgtgcggctacaaactttagatgtgagcacttgactctgtgggtcgatagac

SEQ ID NO: 15654 - DNA, 361 bp, Oryza sativa
  unsure (1)..(361): unsure at all n locations
agctntgcttgcttgctntgctnttacgggtccgtccctctctcggactccgatcgattgatcaagcgagctaaccaacgccgtctcgggaaagatagttaaccaacacatgtacagaaaaaagaattaagccgtcaccttcccttttaacgttgcttccttgatacagctttaactaacttgccccacccatctcatgccattgccatgcacacgtacgaacgaactacacacatcacccaccccgacctccagctgctaaaaaaatattgggtaattggggattttttttggctcctgctggctctcgcgatatgatctcccgtggccgcgacgcccaaacgaattcgtgaggcttttt

SEQ ID NO: 15655 - DNA, 469 bp, Oryza sativa
  unsure (1)..(469): unsure at all n locations
tactaagctcttagcatcccaagggatgggtgtgacaccttcatttggttactngcttgttgctgaccaatcacagaagcaatagcagcgtcgaatgaatcgaaattaatagggatctgtgagaaactcgtattattttgagaaagcaattgcttgttgtctgcagaaggtgcagcttcagataacaattcttcanagcttatattagatatgcaatcaatccatgaaagcggcgttactttgctttgattaccctgtttcagaaagcatgtgaagaatgtcaggtcgcaagtgaaaataccatcggtgatgctgggaaaaaaaaaactcctaatactcaccacagtctgtactgcattgtccccaacagactgcgcagcanagtcattcgggaactcactcaaatgaaccgttngtttctgttccatgagaacaggatccagaggctttgtgtcaatgatcttgtcta

SEQ ID NO: 15656 - DNA, 203 bp, Oryza sativa
  unsure (1)..(203): unsure at all n locations
agcttaccgganaggaaaccaacagatgtgcactccatatgtctcccatcagatgctcatatatatggagagagggagagacaaagacagcaacgagcacgcgcatggagggagcccggggcgctcgccggcctacggcggcggcgacggccancggcgaggaagcaaagggaggangccgcgaaccgcccgaaacggagagg

SEQ ID NO: 15657 - DNA, 415 bp, Oryza sativa
agcttattccccacagtatgccaccaaaaagatgcagaaccggtacacttattactagcagccttaatcatttgagcattagaaaaatcatactcatcaaattgtttttctactgctagctcccaattaatgtatgcagcggaatcatactttccatcatagactggtaacttacatgcaacttgtgcaaaattatagtcatgtacctcatatgcatcacgtgaagaagttgtcatatctcgtcgaaggtgtagatgttgacgttgagcatgaccatcttgtttccccttgcgcaatcctgccatggttagcagcaaacaagaaacatacacaagaatatacacgctcctatcaactattatgtactggcagctcaaatgtcacacacactcaagcttttaaccaagctcttaca

SEQ ID NO: 15658 - DNA, 324 bp, Oryza sativa
tcttgaccaaatcagaactcaccaaattgttgcagctacctccatcaatgatcacacgtgcacgacgggtgttgatgacgaagaaaatctgaaacaaattatggcgttgcaacctctcatgctgctgtacctgcatgctgagcacccgctgcacaacgatggtcctgtagtcagttgtgtcatcacggccaaagacttctccatcctcatcctcaacttcttcttcctcctcttcctcttccacgtcggaggtggtgatgtagccatcttctgtagcaacatatgcccgttgaatagggcaatctttctgcacatgcccaaacc

SEQ ID NO: 15659 - DNA, 403 bp, Oryza sativa
agcttgcgtttctgaagggctgccaaatcatactcgatgatctatggacatgcagcttctggtaatagattcccgcattttctcgtaggtccaacatatttttttttcaatgaaatctatatctatacctaataaaaaaatacgtaaggattccgatatttcttcgtccgtcatcccacgcgccactaaaatctgttttaatccgagtcgggtcggtcggttttcattgtattgcaaaaccgcagctgatatagtatatgtatcttccatgtaatcacataacacaagtggtaatttgcttgcttggttaatgtggaaaatcttcactccggcctctcctgtaataagtctactttcgctccctcgtgtaatgtgtctataggacctccttgcctaacgggtc

SEQ ID NO: 15660 - DNA, 415 bp, Oryza sativa
agcttctgtgtgtgagagctgatgcttattctcttactttctaattggggagatattgatgcactattatataagctagtttcatgccatttatagctctgaaatgggggacctgtagatactactatgatttcaaatgcatgatactcaatgttaaatgtacttttttctataaaataaagaaagaattttgtgtatgcatagccggccatgtataacagctcaattaattaagtgttgcatgcatgttattaatgtggaaaacatttttccgaacacaatggttcttataaatgttgatcaatgtctgttgtataaccaaattaatgcatatatagctacattgatcaaatacccagctataaattatataattgaagttaatttgatttcagttaaactttgtgtcaaattg

SEQ ID NO: 15661 - DNA, 292 bp, Oryza sativa
gtgcagcatgataacttggcatccagattacagctgaggcaaatgtgttttgttcaattactacccacagagtggagttcgatcgtttatcagaggtactagattctagcagagatcaacggtcgtcatagtacaatcaacgccacgattgtaatatctactgacctactgaagactgaacgctaacagactggtcactgcttgtcttgagggcgcgtatatttaggctatgattagattcgagagttggattcaaatttctggcgctttctatgcacatcgatctttatac

SEQ ID NO: 15662 - DNA, 371 bp, Oryza sativa
agcttgcgctggcgcatcgaggtctataactgtcgcttgacccggtcgtccagaggcaaggtccgcggcaacgctcgcgtctagacatgactaccacatgagcctaacgcctttctaatcacgccgaccaccggcctttaccgctggcacatttgcaggcattgcatcacggtctgatgaatcatcgactgttgtaacacattcccggtgcgccaagcattcgaaagattcaccgacacctggcgggcagagttgccggtctacgatctggacccgtggccgcctattctccttgtattgaacacatgactcggcatgacgtacagcacagcgaactgctgatggccacctttgacgcatggagcatgctg

SEQ ID NO: 15663 - DNA, 438 bp, Oryza sativa
agcttgttatcatccattgtgctaagtaagactgttctctgcttgtcaagtacatttgtcaacagctcatttagcacaatgtcaacaaagcgaacaccgattagtagaaacaagcatgtgaacacctttgtgaaggtagtgcaagggactatgtcaccgtatcctatggtgcacaagcttatgatggtgaagtaaaggccatcaactaacttcagtgtggacctccccttgaagccttcaacatttgtgatgtatacaaggactcctattgagatgtacaagatgacgctaacgatagcctgccttgcaaatgatggtacgtgttgtgcagcatggctttgctcattgaactcatctgcacagggagtttctttgattgatgtgaacatagaaggagaagaatgcacccgctgtgaaatttgtgcggtaactatattg

SEQ ID NO: 15664 - DNA, 460 bp, Oryza sativa
  unsure (1)..(460): unsure at all n locations
ntaattaagaaaatacacatgacacacccaatacattttataatatggaacggagggggcatgtangaactaccggaaaagaaaaatagaaaacttattcttatagaaatatctgtttatgttacgttctattggttgagtatgaatgacatgatgtttgacaaatcaccatctattntatatatgcaggtattttttagacaacatattggcttataaccgcacagctacaaaagggtgatgaagagggcgagtttttaaaagttgcatgtcgtaatctcgagacaacggttatacaactgtttaccaattntggatggagattcacaaataaaattcaataattgtatactccttatcttggattggagtctttagtttgctttttttcatgatggngctttcttattttatgagttcacttgttgtacattgtataattgactgagctcgctgaaaa

SEQ ID NO: 15665 - DNA, 413 bp, Oryza sativa
agcttgtggtaagaaggggtttcgttctagtgcccggaaataatattccaaagcctttgtatgctctccattgcttgtgtgtataaggcctatgttatagagtatataacttcgatcatagggatcaatttctagtcgcgtagcttcataataattttgcaaagcttccgcataatttccttcggattgagccaacatccgttacggtcgttcgttctattcaaaaaatctccgttccaaaaccgtacatgagggtttcacctcataccggctcctccttctgtacatagtactaagcgaaaaaatctagagaataaaaatagaattagttccatctcattatggaccgaaaggggctggtatttttccaagaaatctctagccaacctttccacaagagggttttcttaaca

SEQ ID NO: 15666 - DNA, 463 bp, Oryza sativa
tcgataaatacggatatacccaatacgtcgaaactcatttgtccaagttagagaaagaaccgttccacatcaaatacaacaaaaactagcgcacacatgtaatagcgtattctgaattgtaaccaagccccccccatgggttctatacccgattcataactagaaagcttctctggtccttcacgaaccggagctaaaagtgctgaaatccaaaatgctaaaataggaataaggcttgctattattagaaatgcccaaaaaatatcatattcgtgaagcagaaacataaatgtactcccattaatgtggaatatgcggaactgaaatagtcaattcaagtcagcattgtcaattatacagaattctctcttttctctgtgaaacaagatccgttttctctaccaaaggcctagttaaccttgtttctcttgcacgcttcttaagatcatcaatgatccgaccc

SEQ ID NO: 15667 - DNA, 415 bp, Oryza sativa
  unsure (1)..(415): unsure at all n locations
agctntctcgaaatgttaggccatggagattggttgttcaatcaaccacctatcatgcaaccacaaacaacaggtacaacttataatttactagaaaataatttattttcagtatgtgtgcacgctacaactttgcattcaatgttttgtaggaatgtacaaccctgaacaaatgatgggatatgccggcagcatacagtcatacggagaaccatgtagctacggtgggggctcgtcaacagcacaacacgacataggaccattgcaacatgatgaaccaccaccaataactcagccagcccaagactacgacgatgttgatctccgcggtgttgaagtcgtccgtaggtctgtccgcgagcgatattcacctgaaagattatctttgtcagggcgcagacctccaactggtgct

SEQ ID NO: 15668 - DNA, 372 bp, Oryza sativa
  unsure (1)..(372): unsure at all n locations
catatgataattatcactntcataatcattttccacaatagtaagtacagatgtaacttttactgaaataatgcccactaatatgacaatatacaatgacaataatgccattctagtggttgttatttgacacaaacagaaatgtgtcgataaaattcgaaacaacaatgtttgggttgctcagctgtcagattcatgaaaagttatcaacttccaattatatgaagggggtgttctgtctgcttgcatcaactacgatcactttctgcagtgagacctaccaaatctatgcaaccaccaatcaggattcaggaacttcagattagaaactttaatgaaacacgcaatgatcagcatgatcaagacatcata

SEQ ID NO: 15669 - DNA, 427 bp, Oryza sativa
  unsure (1)..(427): unsure at all n locations
agcttatcggtgtatggttntaaactattcttttttccttctaatttttcctttggtcggagtagcagtagttggtacaaggcttgtgccttctaaaaagccacccaattccatgtagtactaaactttataaaaccttgcacattatgcgaaattgcataaaaccacagggattttatcgtgtcatataactccacgtattgtgatctaaagtttcacagaaccacactttcattttgattttaattgatcaattttaaaatctacaatcacattttaaacttgtgaggattntatctatcatataaatgttacatccactttcaaaattttgatatatgtgtaatgctacatccacgttcaaaattntgatataggtgtatatcaaaatggctaacggtggggttttgtgaaactctatgactat

SEQ ID NO: 15670 - DNA, 482 bp, Oryza sativa
  unsure (1)..(482): unsure at all n locations
tgacttacactgagcacgttcgccaatattngattcttggtgtcagtttccccctgcttcgtctcgcatccatcaatatcctggcctttctcaagatcgacgaattcggttggttgtgtttctccccctttctcaaaatcgacgggcttgggaagctccatctaatccttgtgagattgcctagagattccctgtcttgctctcctangtaaggcggcgagagcttcttgcagatcttacaaatgcgcgctacggcggcttcgttggggaatatgtgagatggagaactctccgattccgaacactaacgaagaattacgcgcacgcctctccgattccaagtctgtctccaacaccttcacggattcacttacgaagcgcgggttcaaggtgaccgcgtagaatcacattcccttctctggctcccgtcgcgcttgctccggagtagctgaccatggagtggcttgcgtctcgctggcgta

SEQ ID NO: 15671 - DNA, 429 bp, Oryza sativa
agctttgactgataccagatggacaaattctttaccctggcaacagatgttaacacagctatgccaggcatccaatagactattaatgagaatggaaccaacgggcctagactaaaggatatgcagtactatcaaggcaaataagaatatgctcttttagccagctatgtcatcctaaatccccagccgcacaaatcgaacagaatagtcatatcagagcgatgtcaatctcttgccaccaaatctggtagtgcaaacaaaccataagcatcactttgtgaagggagtgaagtttttgcatagacgaatcctatcttactataaaagtatgacccactatactcaaaagcttaacatgcaaaaatacgacatcattatccactaataattattatatttaaacttcatgcgagcatggtattttatcta

SEQ ID NO: 15672 - DNA, 288 bp, Oryza sativa
  unsure (1)..(288): unsure at all n locations
tcaatttctaaatntaataccaagagttagttctgaagtgtatctgattaatcccagcttcacctgtctgcttcattttacggagctgaaattatttagctgcgctatagcttttaagaggatagagcctgagctgaaactgtgacaaatgggtccaacgtcacaaaatcggcggaggatgaggagcagccaaagctgggcaacttcgcgccattttctccgcatgttggccgtggatcctccgcgccgacgccgagatctcgcttcgcattttttgcatgaggcgac

SEQ ID NO: 15673 - DNA, 410 bp, Oryza sativa
  unsure (1)..(410): unsure at all n locations
agcttccatagactaaaattcgacactatgtttntcccaacttctactaccttattttcgtgcgctcacccctgaaatactcgacgatgtatattntgcaaaaaaaaaaaactatacaaaaattgctttaaaaaaatcatatttgtccatttttaagtttttaagctatcactcccttcatctcaaaatataagcgattatagatagataggatacatcctagtactaagaaactaggtagacttttgtgtacattcttagaactataatgtatatcattcatccaaaatctcttatattttagaacggaggtaattaatcatgcgcggatgacttaccttgttttccgtgccagagaccacaaccttgtctatatctctactattttcctcaaaaggtttctgtcccgc

SEQ ID NO: 15674 - DNA, 447 bp, Oryza sativa
  unsure (1)..(447): unsure at all n locations
ctgtcgctagttctctgctctttaaacctttccaagcccaactaagccatagcccatagagttctgctcgaaaatctctctaaaaaagggctaagaagtactcacaaaccccaaaaattgcagagcttcatttattgcatcttactccaatggttactcttaaaaaaaatctaatcccggagagaatntgaataagagattgttcaatctgtctttaggattaattcagatttgaccatctatggttgtattgagctaatacttcatttaccgtgaacgtgtttttaaaacagttaaatggtttattttgtgcgaaaaatttttaaataaaatattctataacaaaaaaatgtaaatatattttcaaaattataatagttaatgtttactacctccgtcctaaaataaagcagaatctgaacatatatagtngtctagattcatagc

SEQ ID NO: 15675 - DNA, 389 bp, Oryza sativa
  unsure (1)..(389): unsure at all n locations
agcttagaaacccgaaaactcagcgtcgtcttctataagtttantaccaactatccgtgtctcataatcttatgaagtgtctatatgcatggctgtaaaggttctacgtgccacatcgggtattatatagggtgtcgcatggggcgttcggacactaataaaaaactaacatcagttaaccacgagatgaatttatcaagcctaattaatccctcactggtatatgtttactgcagcatcacattgtcaaactacggagcaattatgtttaaaagattcgtcctgcgaattaatcataatattgtacaatcagttattntttagcctaagtagtgcttaataattcataactggtgtgcaaacgtacgatgtgacacggtgaataattt

SEQ ID NO: 15676 - DNA, 510 bp, Oryza sativa
  unsure (1)..(510): unsure at all n locations
actaagcttangagtaatgggtataaccttatagtataatcaattatttaaatattgataactagcatggtggcccgcgcagatagcgcggctagcatcattatattntctctcatataatagcatatatgttttcacaatntattattaaaatatattaaaatgacaacataattttaaactttgtactaactttatgaaactactaatgtgtaaatcatattatattttatatatgtgttagttattaattatntctaatatcaaatttccgttatttctaaattatattcctatatggactctaatctcgtctttcaatatttcttatttttttaattcccgaatttcgttaactataaattgtatttctatatagactctaggctcttcttctaatattatntaattttaaattctgaaatttattatntctaattgtatttctacgtggactctaaactcatctntcaatattgcgtttattgtaatttcgaattcaagtacttc

SEQ ID NO: 15677 - DNA, 407 bp, Oryza sativa
aattgataagtgtagtccctcctttcatttgttaaaagtctcatctgtttatttggacaaaaaaaaatctttggttgttataaaatggaatacttatgtgttgaaagatgaaagccattaagcatatgtcatgtcaagttgatctatatgtcaacaaacaatttttaatgtcaagttgagaggctctgtttttaacttgatcttaaggtgagttgtttagctacttgctgaaaacataattagtcgtgcattgtctgcccataccatatatagctgcaacaaggttatcttactgtgcaactgcacaaattacaatgactatgtagtgttcattcctcagtattagtaactttatttaagtgaaagttctataatattctatcttttatttcagaaacaaatgaatc

SEQ ID NO: 15678 - DNA, 441 bp, Oryza sativa
agcttgaaagtgtgtgtgagagtgaatgaagtgatgtccttatataggtaggtatgacggttatcctctatgcgaattgtctgaattgccccataaccgtcatcagggagtaatctgggacgtccatgccaaaccccagcctgaatggctgagatgctgattcggccgaacctgggctgggccctcctggcttggccttcggcctgtggactccctctgttctgccttatccatttctgtgaattttgggctgattctctggtattttgatgaagttcacaacccattcttgtatggatacatgtttctccctcactttggtctaattttcctcccaactcctaggtttattacctgcatcaaataaacaccaacacttgtggaatatgtgagatttaatacctatcactatgttggatgtttattatctagactttatgc

SEQ ID NO: 15679 - DNA, 408 bp, Oryza sativa
ctgaactgcttcatcctgctgataactgtaatgtcaagttggttgtctggggcttctccatcctctctaatccatgggtgggctgtatatttaaagtattaggtgcattaactatatttgcaaacagtaaaaatgataactcgcgttatatagaaacaagagcagaaattatctattaaaaagacccgaatactctttaaaaaaaaatgggacagtaaaagtgagcgtcttcgctctgagatactacagcaactactagctacaggtcaaggcttttgcatgaaaaagtacaataggaagaaaccagaagaattgtttgatctcaatttgctactgaactactagacaagtgtgcatttttctggtgataagaatgccattaaagagctatggttgacttactaaaaa

SEQ ID NO: 15680 - DNA, 444 bp, Oryza sativa
agcttcccttgctgcctgctgctggccactctcttgtgtctactgtccacagatacaaactccattcgtaatttcgtacggccggtcgggttacatctagtgcaggcacgaacacgtacagactcccctgatttttggatctatttaagccgagctgagtgaaccaattggccaccacccaccacggctccaaaaccgctgctttcctctaggtgatcttgctcaaattaatccctggttagtctttctctaccttgttaatttgcatccacattattaatgatactaagcacgctgtttcatccttaatcagcacaagcacgtaagctgcgcgtacggtcattcggattagcaagttgctgatgataattagtccttgttaatttggcactcattatgctacatgcagatcgacgagctaagcaacacctgcatggcgaggag

SEQ ID NO: 15681 - DNA, 283 bp, Oryza sativa
  unsure (1)..(283): unsure at all n locations
gggcgaacgngggggcgacgaccggnggagatggaagagggaatctgcngccaggccacgagggggcgatccccggcggagagagcatactacgcggttccggaacgcgacgctagcgacggattggaccgagctacgcccagcgaggctggcgacgagggggtgccacggagcacgaacggcgacggctgcgaacacacggcgagcgacagcaacgtgcggagcggcgccggctaactactaggagtcgactgcagcgaccaccgaaagctaaggggaggag

SEQ ID NO: 15682 - DNA, 436 bp, Oryza sativa
  unsure (1)..(436): unsure at all n locations
agcttgtatctcccanaagcattacagcgatgatgaacataaatacaactcttgggcccattttgcctgttagatacatggattaaacaaaagatggactagcaattcaacagaacagcatctaattcaacagaacagcatccctaagtcaatggcatttcttggattttctctataagaaatcatcatcaattattttctaaagtagcgaaaaatatttaaaagcattggcaccggtcgtttcggaccaatataccaaacaggcatcaattccttctttattatgagtataaaaggcacccattctgtcatatgtaaatnttgaactttgcaaccatttttttttaaaccgaactttgcaaccattttaaatagaaaacaaaataaaagaggatatgcgaaatcccagacatggttatatgctcaaacatccaca

SEQ ID NO: 15683 - DNA, 423 bp, Oryza sativa
  unsure (1)..(423): unsure at all n locations
actaagcttcaaataatatgcaatagtntaacatactgatgcacatagttntgtctataataacaggtagaacagatctctctgacaacttattagtagctagtgaacaagaacaactcaacttggaagcaaaacaggatggcaatgtctcctatattgtcttatagatggcacctttgagttatattgtacttaagtacatctttaaaattccatacgctgtactacaagaaaaagatatgcaagtgatatgaacctcgctaccaggaattctacaagaacaaatttgtatcctaactgtattgctcacgggtgaaccattgttcagttacaagaagatgatatattntgcttggtgcatttgcagtaactgaactagatatatttcttacctcagaacaagagtgaacaacatgtttaagc

SEQ ID NO: 15684 - DNA, 158 bp, Oryza sativa
agcttcacttttatattataggtcaatgcacaacactgcaccagactaaaagaatattagaaacaaggtataaaggaagaagtatgtgtggagctaaatgataatttcataaaattccgtaggtctatataagttggtgaagctgcataaaacagtgg

SEQ ID NO: 15685 - DNA, 389 bp, Oryza sativa
  unsure (1)..(389): unsure at all n locations
gtactgcctccatgagaagctccatctctggctcggcgttgctggactctaccttggngaggccgtccttgagctccttggagcgtgaccctgccgttgttgtctgtgtccatgagcgcgaacatgtacttgaacacctccacgctctctaccgacaggtgcttccgcgatcacctgcgtgcatcgctgggcggtcagacacagaaacgggctcgccgtcgccggagacgacatcaatagcagagcacgcacgccacgtacccgcatggccttcttcttgaggcggttcatgagggagaactgcttgaggcgggcgcggacgacatctccgaaggggactataggggcgccggcggcgtggtggatccagtggtggtcgatcacctgct

SEQ ID NO: 15686 - DNA, 437 bp, Oryza sativa
  unsure (1)..(437): unsure at all n locations
agcttgcccgcaggtacaccgaacacgcacttatcggggttcagttttatgcgggcagagcggagactctcaaaagtttccgctagatctgagagtaacgtttcttggttgcgcgtctttacaaccaagtcatcgacataagcctcaacattacgccctaattgactacccaaagaaattcgagtagtacgttgaaaagtaggacctgcattctttaacccgaagggcattgtcgtataacaataggttcctatgggggtaatgaacgcagttttttcctcatcctccctagccatgcgaatctgatggtaaccagagtatgcatctagaaaacacaaaaggtcgcaccccgcagtggagtcgacaatctgatctatgcgaggcagggggtaaggatccttangacatgcctgggtaatgtcggtgtagtcgatgca

SEQ ID NO: 15687 - DNA, 419 bp, Oryza sativa
agcttgaattaaccacctaagtccccctgtcttgctgagtacataagtactcacccttgctctatatatatatagttctgccagctctgaaggtgaagttgaagtgaagtgaagattaaggtttcgtcctagttccctagtattgcctgtggtgttgggtgttagaccgttggttccactgctgctgctgttgttggtgtttgcctcgtccgtgtcgtcggttgtattctcgggttgtcccgagctgcaacctaagtcaaggtaaataaatcctctatttattttaaggattgcaatgattcatatttgtcaccgtgggtaccagcgctatgtcctgtgactggtactgtgatcgcggtttcgtaggaagcggttcgcgccgtttttcctacgacacgctcctgtcaggtgccgttgta

SEQ ID NO: 15688 - DNA, 415 bp, Oryza sativa
  unsure (1)..(415): unsure at all n locations
tgccggaaggaatgggctcccctagcttcctgagtcactggctggtgtgctcttcgctaacatgttaatttatctctcatggtttaatcgttatcatgttntaaattttggaatttaataatatttccttattatgttttacaggttcaatattatgggacaggtatgaatatgtttctcacgggttcacaccaagtctaaatcatatatctctactattttaaaagcgaaattgttctacttacatgctctcatccgaatatgcataacgttttacaagttcaatattgtgggacaagtatgaatatngttctcactggtccacactaagtctaaatcgtatatctctactattttaaaaagcgaaatattctactttcatgctctcatccgaatatgcataacgcgtctgttc

SEQ ID NO: 15689 - DNA, 431 bp, Oryza sativa
  unsure (1)..(431): unsure at all n locations
agctnttacttttaactcgcggtaattaacttttctactctaaaattctgaatgagacgtggagaacgggaagggagagtagttttttttttactcgtgcacaggaaagggaagggaaaccgcagattaactttatctttcttttttgagaagaacggcagtacgatacgaaaaggcataataattttttggcgggctgtctagttttcaaaattagttaaatcttacaaatctagataagatttgcccactactagagaactgatatttactcgaatagcaaaaatcatgtttgtcccggttaaataggatcgtagactgaagaatatctttagccccagtaaaaagccaaacgacactcatttttactatggttcaatagctgtcaggcgtatcaagctcccaatgatatttagtctcggttgatgtta

SEQ ID NO: 15690 - DNA, 426 bp, Oryza sativa
  unsure (1)..(426): unsure at all n locations
ctaagcttggcacattcaccctgagttgtagcatcttgcataatttgtgggtcatatggcaatgtaacaagacctatatgttggaacatgtcagttgaacttgtcatgtttttgtcacttacacaatgcaatggggtatctctgatgcaccctcctgttctatcatcaagctcccaatcccacagtgacttcacagaaaaactctccatacagtcacatgttngagtggaattaccattgcagatggtgaaaggtccacaggtagcagagggggtgcaaggatcaacaggctgtgcatatatgctntgccaagactggtttgctcgtgaccatacatacatctngatctgcccattaacatctaacgacacaaacacagaggatgaatcatncgacatagtgtagatatagtactcctcttcacta

SEQ ID NO: 15691 - DNA, 428 bp, Oryza sativa
  unsure (1)..(428): unsure at all n locations
caagcttccgaaagtcgccccttgctcgggttgtaaggntctccttttatagttcaaggggataccacatgcaccacctctacccgtccctttttcaaggaggggcccgcgcgaacctggtggggcctccactcatgccttatgcaaaaagtaaagcggccgcgcaacctcatgtagggcccaacaccatccttcgcctaacacgggggacatcccccatcattcccttataaattcttggagactttggaggctcatgcacgcgggatgcaccggtcgaatcgtcgatcccctaccattgatgggacagggcatacctgcccccacgccgcctgaataggcaggtcgtgggtgcgctgacgcctgtcctatccgctggcagccagtcacgacctggtcaaagtgattgacgcacgtcgatcactggg

SEQ ID NO: 15692 - DNA, 405 bp, Oryza sativa
  unsure (1)..(405): unsure at all n locations
actaagcttagtgcacatgtgcaactgtgcagtcacatgagatttctcctaaactgctaaagccaaacctagactcacaattttaacattatgcaataacgagaagtgaagaatggaaaggaaaagggtacctctataggagtaagaggacattttccatctcttctgtttgcctcaggattgatcactcgaccatgccgatgaaactntcctctccagcttctttcacgagcattttccatttcagttttctccttcaagccaccatcatatgtacagcatgaaaaagctaccatatcctagacaatacagtggtacacanaaggttagttgcatgaatganaacatgcaattggtaacttacaggagagagaatgtcaaacctcttcgagcgaagatgactga

SEQ ID NO: 15693 - DNA, 414 bp, Oryza sativa
agcttcggacggtggtcggccttatggtctaagtgcttgcctttcttccgtaccgggtggtttgctgtaaggaatcgacgatgacccatgtatacaaccttcctacagtgcttaagatacgtactttctgtttcatccatacagtgagtgcaagccttgtaccccttgttggactgtccggataggttgctaagtgcaggccaatcgttgatggttacgaacagcagcgctcgtaggttaaactcctcctgtttgtcctcgtcccacacggggacaccttccttcttccacaactgtttaagatcttctaccagtggtcttatgtacacgtcgatgtcgttaccaggttgcttggggccttgaataataatcggcatcattatgtacttcctcttcatgccatagccaggggga

SEQ ID NO: 15694 - DNA, 380 bp, Oryza sativa
ctggatgccttccttttcagtatgttctggccacctatttcttatgcccacattttagtggaatgaatgtgggtgcattgataatgcacatgtgattctatcattgacagatgcttcaagaaattcagcgcttgactggacaacatagttcaagataataaaaggtgttgctcgaggcattctttatcttcaccaggactcaagactgacaataattcatagagatcttaaagcaagcaatgtattgttggatgctgatatgcaccccaagatatctgattttggacagccaggatctttggtgtgaacgaacaacaatcaaataccaacagagtggttggaacatattgagtacctccacacttcagaatatataattt

SEQ ID NO: 15695 - DNA, 140 bp, Oryza sativa
atctgccacattttaacatatgtgtagtatatactcaattagtagccttatttttaggtttaatgataccactctatcattatgggccactacttttcgatttcacgcaaaatcttgagtaactcacgcttgtgaaaata

SEQ ID NO: 15696 - DNA, 445 bp, Oryza sativa
  unsure (1)..(445): unsure at all n locations
agctttgctacttcaccaaccacgacgtctccaagagcctcgacatctcggcatgcacttctagatttgacgtcgtgctattttactacagcaagtggtgttccaatactcaagatttttacccagacatcttcaacatgtatctttacttaagcaatgattactcgacgacaataagctacagttcttgactctatgttcagttgtttcccaactaaccaaagagttgggggctacacaaatacaagactcaaaatttgatgagctgaagcaatcaattaaccagtaaatgagtcattatcttcgtctttgcttcggaccagacattctactttagcaactcgaattatttcaccgacnaatttggcatatggatgttgccacaatctactccaagattctcaagaattaagttcacgatttaatctacatgttcgggagtttg

SEQ ID NO: 15697 - DNA, 382 bp, Oryza sativa
  unsure (1)..(382): unsure at all n locations
acttcttctggcagcattttctttggttctgtccatcatctcttgcccttagtgccctgtcttgtaagcaacgaactcgttccaatgatcccttagcttcngtaatgtggtgaagttcagtgtctgccccttcaggatgtatttctggcagagatcttccttgaagctctgaaactgttctgccattttctctagagtccacattntcactatgttctctgtacccacaggaagggtgaacgtctctagcattgtggtccacagcatctctttctccgaatcagggacaaatctgtcatgatcttcgcgtgcccttctcctgcgccagtacaccgtactgacatgcacgttatacctcacaacccaatcgctgtgtcgtacg

SEQ ID NO: 15698 - DNA, 435 bp, Oryza sativa
  unsure (1)..(435): unsure at all n locations
agcttngctacttcaccaaccacgacgtcttctagagcctcgacatctctgcatgcacttctagatatgacgtcgggctattttactacaacaagtggtgttccaatactcaaaatttttacccagacatcttcaacatgtatctttacttaagcaatgattactcgacgacaataagctacagttcttgactctatgttcagttgtttcccaactaaccaaagagttgggggctacacaaatacaagactcaaaatttgatgagctgaagcaatcaattaaccagtaaatgagtcattatcttcgtctttgcttcggaccagacattctactttagcaactcgaattatttcaccgacaattttggcatatggatgttgccacaatctactccaagaatctcaagagataagttcacgatataatctacatgtt

SEQ ID NO: 15699 - DNA, 353 bp, Oryza sativa
  unsure (1)..(353): unsure at all n locations
acttcagcattgcgacgctatatgccgctgacctccagnggttatggtacttcttcttggcagcattttctttgcttctgtccatcatcatctagcccttgttgccctgtctcgttagcaacgaactcgtcccagtgatcccttaacttccggaatgagttgaagttcaatgtctgacccttcaagatgtatttctggcagagatctcccttgaagctctgaaactgttctgccattttctttagagaccacattttcactatgttctctgtacccacacgaagggtgaacgtctcgagcattgtggtccacaacatttctttcttccgaataaggacaacattgtcatgatc

SEQ ID NO: 15700 - DNA, 408 bp, Oryza sativa
agctttacatcaaacttgccagctaacaaaaacaatgtatattaccaagctttggttaagggctccaacaatagcatcctcattcccatccaaggacataataagcctaaaaatactcggtagtgcagactctatctgcaatatataatagcaatatgtaacagaccaaatatgaaaaaaaaaagagtgtaggattgaataacatcattgaaattcataatgaagcatatcaagaaagacaagttgaagaaaaaaaaaacaagaacactatctagtataatgtatttttaactctcaccggtcttctgtcaagaatagatatcaatggatagctctccttcaaacctcgctcaatctgagaatcactatcaccagctgtcttaagattagaagcaaacagattcaatc

SEQ ID NO: 15701 - DNA, 404 bp, Oryza sativa
  unsure (1)..(404): unsure at all n locations
cataggttctgaaacattcgaagtgcatcatcagtgagtttgtttntgcaaagtccatgaaggattatgttgtatgtgctaagtttgttggaaatatggtcataattcggcatattttaatccaaaataacaagataataaacatgatatttacaataggatttgatccagtgatagtggtgaatgtaatcaacatgagcatgcttaacgttgaataagcatcaacaatcacataatgacacaatgttgacattgcgatgaacattaacagtaaaacttctaattgaaataatgtaataaggttataccccaagaatggtcctccgctggagtttgaggcagtattgccttccgtggtgttgacgggagtctccttctccttgtctccaatgttcgacatgttg

SEQ ID NO: 15702 - DNA, 392 bp, Oryza sativa
  unsure (1)..(392): unsure at all n locations
agctttcaatgtactaccacagaaatacgcatctgtgcttattntatcaaaccagatagtgatgctgacggttgtaccacccatcagaaccatcaagagcctcacataagcaagacccgacactgataaactacatcagtgccggggtttaataataaaccagcactgatatcattccacgtgatcacatcaatgccggttgtaatgataagctggcactgatgaccacctatcagtgctgggttaaaaaaaaaatcggaaccaaatcaagagaataaccgagcccactcacgatccaatccaaccgagaacgttaacatatcgagccagcatagtaaactttgcccgctctcccccctcacacgatctatccatcccttcctcgntctttc

SEQ ID NO: 15703 - DNA, 415 bp, Oryza sativa
  unsure (1)..(415): unsure at all n locations
tactcaagcttcttatgataatttgcctcgtttgttagccaccattgcccagaggaatatttatacgtactatgacctacatacatttacatcggttgatgatcgaacaaagagtgtgctgcaaagagcctttttctcattgggtgcttgcatcaatgcttttgtgcattgtcgacctgttctatgcatagatggaacttttatgacaggtaaataccgaggtcagatattgacagcaattgggtgtgatgggaacaaccaggttctacctatggctnttgtcattgtagagagtgagaacactgaaagctggtacttggtcctatagagagtgcacattgcagtggtgcgtatgaggcccaacgtttgccttatacatgatcgtcatgcgggtatgttgcgggctattgactac

SEQ ID NO: 15704 - DNA, 391 bp, Oryza sativa
cctcgttggtatccaccattgcccagaggaataataatacttactatgacctacatacatttacatcggttgatgatcgaacaaagagtgtgttgcaaagagcctttttctcattgggtgcttgcatcaatgcttttgtgcattgtcgacctgttctatgcatagatggaacttttatgacaagtaaataccgaggtcagatattgacagcaattgggtgtgatgggaacaaccaggttgtacctatggcttttgcatttgtagagagtgagaacactgaaagctggtactggttcctagagagagtgcacattgcagtggtgcgtatgaggcccaacgtttgccttatacatgatcgtcatgccggtatgttgcgggctattgactactt

SEQ ID NO: 15705 - DNA, 433 bp, Oryza sativa
  unsure (1)..(433): unsure at all n locations
ctattacggacctatgaaactaagcttgatatngtgaataaagaaatntccatagtattgggcatacgccatgcgcacactgctntaacagatgtgcttaagtccctagaagacacatggtttcaccacacctggaaatatatggcatatgtggtgtaaaatccgaataaataaactcataaaggatgtaccaaccgcctagaaaatgaccacaatatataatcagcctaagccataatattggtcaataaaaatgcacacttacgtggcaaaaagcaatgatattgtatccaatcaattgcttaaaaacccaaacagcaccttgacttatatataaaaaagtcagcgggacagctatataaagctntactggttgacaccttttaagatgcattgtaccaactcctaaaaagntaagtaactgcgggataaa

SEQ ID NO: 15706 - DNA, 436 bp, Oryza sativa
agcttggcatgccattttagccatagtgcttggccaaagatttctaaatccagagttgatctgttatagagtgagcgataattaattgagcaagaaagagcctgcagagaatttactacagagttcatcagtgtatgcaaagaaattaacttctcagaaaactactgattgtggtgaaaggataacaataggatttgttaacgaccaaatttggtaatatcagcatcggaaaggaggattagattgaagtggagtcgaagacggagatcgattcgagaacagagcaagaatcggctggagtctggatcggctacgattggatcggctaagtctgagtcagactgggttaagtgatacagccgattccgacaatatgacttggtgtacaacatcaggttgagttgatatgtttcaagatgattgccgcacatggata

SEQ ID NO: 15707 - DNA, 407 bp, Oryza sativa
  unsure (1)..(407): unsure at all n locations
tactaagcttccttaatatattgatttccttaaccgattatagcatgaatccgactattggcgatatgataattatgttagaggcttaccaaatttcactattaacatctagctagatgacaaagcctataacctttaaggcgtttaacttattttattagtaggttaggcaacttgacttgatattgntgatattggtgctcaatgctggtatataggcaacaaatatcgagcatataggcaaggtttttagaacatatttgtgccttcttaaattaatgttgatgagtgggaggccaacgaatacgatgcttatgttttctttggtggctatataagacactaattntgcccttgacgttggaccaaggcttttgttangagttgatgtttggtgatttaaccca

SEQ ID NO: 15708 - DNA, 438 bp, Oryza sativa
  unsure (1)..(438): unsure at all n locations
agctnttaatgtagttgtttgataaccgcatgactaattttgtggtatatacttttatgataaatttgatattaattgtgtagtttcatgacacaatcttaaattcgtagctagattagtgtatgggtacttttgtcacaatatactctaaggcatgatcctagagtatgattaattaagctttagctaaaataaacttaaaaaatagattaatatgatatttataaacaactttctttttttttgaaaaaacacatcatttagcattttggaaagtgtaccatgaaaaatagagagtagaagttgggaagaggtgacaaagaacacaccctaataagtttatagaaaatgtaaaatcaaataagtgcattttaaaatataccgagtattctatgantaaattaataaaattaatttcatgctatagatgctgttatg

SEQ ID NO: 15709 - DNA, 450 bp, Oryza sativa
  unsure (1)..(450): unsure at all n locations
tagcctttgtcttccatccncacttctgcaccactccattcccttccattctgatcctcttattattcctctctctcctcttctattacgtctgtcccataataattgtatttcaaatcctaaaataattatcacaatagagtactaattgttccattaatcacttgtaattcaattgtttttcccattataccctcaaccacccttccactctcagctataagccatttaataagggacatcatagtatttcttcttaaaccttaatatattactaaacaacctataatacaattttttaggacagaagtagatctgaacttatggatggatgtgtgcaccaccggtagttgtggaccaataagattntatgtccagataatttcgaataactagtagtgcttntgctatagaatttcaaccatcatgtaatcataacattaaattaac

SEQ ID NO: 15710 - DNA, 432 bp, Oryza sativa
  unsure (1)..(432): unsure at all n locations
agcttggtgttcttcttcctcctcccatatatgttttaacatggaagaacgtagaagtcaaagacaaacatctaagtcatatacaagactttaaatccgtggcatctcactatatcatattttttttaccaccaacaaccaccgccgggtcatcacaacttatccttcacttcacctatccaactattgttgtcgatgttcgtcctaccaatgatttgttgttagttcttaggattgcttagctcatagttttgtgtgggaacagagcacatcatccactaagacaatagtgaaaatgctgatgctcttgtggcaccagtggcaggagaagaggctttagggaagcggccatggccacaatggttattgaggttgtcatataactttatggaanaactgtcatccataactgactttcctctattacttaaa

SEQ ID NO: 15711 - DNA, 401 bp, Oryza sativa
tcgacttatgttcaggccttccgccgaccaacttgtgcgacatatccagccttgattggagcaacagacctcgacgatccacactagacagaataggcaaatgttgattcagtggcaagcaaaataacgagagaatattcggttttcatccaacaaatgttttaaaatgtttcagttggcaagtgttttttagtcctccctctaattctactatctgttgtactctccttaaaccccgtgactttgagcaatgaaattcaggtggggaatctctcccctgcggtgacttgttaaaaaaatgttttaaaatgaagattgcttagaagtcagaactttgcagataatatcatattcctttactcaaacaatgtaggctatgcaaactattatgcagctcatca

SEQ ID NO: 15712 - DNA, 304 bp, Oryza sativa
agcttgctagagtgcatgatgaggtatgtttattatggagcagccagtgctggaacctgtttcattgtataaagcgttactgctgcaaaacaagtcactgtcgttggaaaaaacagagaagcgacatgttgctgaccaacgggacttacgtagttcgatactgactggcgaacaactacagctataatccggacatatgataagggctgtggacatatgcagatgctgcctattgatgagtttagcaatgctgaaaccgaatttgagatgtgtgtactcacgtctgtatcacaatgagacgcca

SEQ ID NO: 15713 - DNA, 292 bp, Oryza sativa
  unsure (1)..(292): unsure at all n locations
agcttgccaacggctatcgggttcgcctttttttcttangacgagatgaccaggcaacagctccgccggtcgtactttnttgttgtaagttgccgaagtgcctgtggcaaacttttgcatgtgctcgagcgcttcgactcttaccccctccaaaagttcgagcaacaactcgcgcccctcttcgcccncagagaacgtcacccttggtgagtttgcccctagctctgttggggtcattgcctcatcgtcatagagaagcatgaacgggctaaacttggttggttttgtgggg

SEQ ID NO: 15714 - DNA, 480 bp, Oryza sativa
  unsure (1)..(480): unsure at all n locations
nggagttctggaattatgtactgacaagtgatctctgttagctgggccctggatgggaccacatccttccaattctgaaattgagctattacagtctgcctgctattctgaagcgatgcttcacatttcttgctgactttccnagaggtcacaaatttgacttaaaggagctggtccatatgtggtgtgctttgggtttcattcatgaggacagtgtgaaaaggatggaagaaattgggcactggtatgtaaatgaattggctcggagatcatttcttcaaaatttgcagttggctggttcacgggagaagtttgtcatantgcacgacctcattcatgaccttgcttaatcaattggtggtaaagagatcctctgtcaacagtgtcagggttcatctgtaggtggtngcaatactacggcccataatcatcttcgatatttatcttggtctgttgaacaacttccttctattagacaat

SEQ ID NO: 15715 - DNA, 427 bp, Oryza sativa
  unsure (1)..(427): unsure at all n locations
agcttggagtaaagntttctttggttgcatgtctgcaaggagaggccctgcaacagtaacagaactagaaatttcctaagtgcagaatgcaaatattgttccaattgaacattaacaatactaacttaccgcgaagaggtgccatttgattcttaggataattagatgtcaacaaggttgaaacatgtccagcagggtcctttcctttctttccatccagcttgaatgagctttcacgtgacactggattttgtctcaccagtgaagtaatccctgcatccccatccttcctcttgttgacactgttcatttcatttcctctgtttgacatattacttnccacattntcagcatccacaccattctcagaagaactngtgttgttcattggtcctttggaaccaccaacctttaattcggatgtttc

SEQ ID NO: 15716 - DNA, 425 bp, Oryza sativa
atttggagaatcagtcctgaagagcacaaccgatgaccaacatgaggaatctttataggtggatgagttccaatcatgtgaaaaatgtgtcgctgaagataaccctgatgaggatgatgtttgcccaatctgtcttgaaggttgtatttcttatgaccattgaaaacccgattccttagattgccataataataactggatatttgtctgagtacaaactttacctggttgatgtagaattggtacacgtgttctgctgctgtagtgctattttactactgccagtaaactggtaaagtacactgtatgttgatccgtttgttttactgaaaaactattttaatttcgaatatggttatgaatctacctataattaccatacagatgctggctctttattacctcatagagtatattatgccatc

SEQ ID NO: 15717 - DNA, 441 bp, Oryza sativa
  unsure (1)..(441): unsure at all n locations
ctcttagtcacctgcggcatgcaagcttgccaacggctatcgggttcaccttctttcttatgacaagatgattttgcaacagctgcgtcggtcgaacctttttgttgtaagttgccgaagtgccagtggcatacttgcgcatgtgctcgagtgcttcgactcttaccccctccaagagttcgagcgacacctcgcgcccctcttcgcccccagagaacatcacccttggtgagttagcccctagctctattggggtcattgcctcatcaccataaagaagcatgaacgggctaaacttggttggtcttgtgggggtcgttcgaagggcccagagaacagatagcatntcctctggccatttgcccttcactggcccctcaagccttntctttagtgcttctaggatcttgccatttgtacgttcggcccgcccatttgact

SEQ ID NO: 15718 - DNA, 493 bp, Oryza sativa
  unsure (1)..(493): unsure at all n locations
tcactgaggtggntgactatgtcaaccggtgtttatggtcccatcaagacaaggagtacatcatgtgcgcacacaaccaagagtaagaggacaatacctttcgtgtatattgtttttgaagttaaagttcttagtactaacgctacataaccactgcgcaggcgacattggattctcctagtcatcgtacctaagtggagtagggttacctaccttaactccaataagtccaaagattatgatttcagtgaaatcaccaaggccttaaatatggcttgtggcccatatgtggaaaagggtggtaagcacaatgagggcaagaatgaactntatcatgacaccaagtttgcatgcgcacaacagatcggagaccaatgtggtttccacgtgtgccacaacatgtcaacacttctaagagaggtgaaagatttcacactgaggatgtgctaatgggaataactcattcatatcacattgtattcaaacgtgctat

SEQ ID NO: 15719 - DNA, 422 bp, Oryza sativa
agcttgctagtccatgtctcggcaatctcctccactcatattggttgcctcatccctcactcccattgtggtggcctctcataaacctccatgccagccaccttggctcctccacttacaccgatcggctttcacacaccaaaattgaggtttactgctactaatcgagctccatcacgactaatcaactactttcggttgacaaatgagggatatatatgtgatggcattgaaatcatctagaacatttcagatacttacccacattagggaatgacattagtatttgatgcacatataagagaccgtcgagaagcttagaacaaggatgtcaatgaagcacaacggacatgggtagtggttacctatgcatgtgcctctgataatatatttggtcatgggcgtgcccgataatccatgat

SEQ ID NO: 15720 - DNA, 473 bp, Oryza sativa
  unsure (1)..(473): unsure at all n locations
gcttgagtgcttctctattcgatagaatgttcagagagtggatatatanaacattaagctcgaagaaggcaggaacataagctgatggaaccatgatgtccactctctcattatcttccccactcttcctggcagcttctcccaaaggtaaccatctcccaatccaagaacagctctttctcgcactaccataggctcctgccatttatggtagataacccttgctgccagtagacgatagtgacaacttatttaccacactctctctcttgagtggtgagctttgctaaggtggtgagtagtggctactgactcgttaggccatgtttattggagcaagaggaattcaggaccttccatgtgatactgcactanatcttgagatgagaagctagcactaataggcttcagttgtgcttaagccatgtacttgctgatattgaaagcgagataagggaacctgtcctcattgg

SEQ ID NO: 15721 - DNA, 437 bp, Oryza sativa
  unsure (1)..(437): unsure at all n locations
agctntttcacttccaatagtcagatatgttggtcgtatcgtcatcaaatgtttggagatttctggttttgggttagttctctggactctgggtgctcaaggcctggtgatgtgtaccattttctatcagaatctgcagcacaccctccttacagcagtgcacacgcttgaaagagttattaagaagactataccaagaacagattcagtactcaatttatactcggtgcaaagttagatctgcttgtaagtccactgtacggtgacaaataatagatgcatgtttttgatataatcttcaatatctgtagcgtaattgggcaaagaaaaacattctgtcactaattattcttgtagtataatgttactcggtgcagcatagtcggacattctgtgttaacaccaagcctgccagtggtctgcagttttatacagca

SEQ ID NO: 15722 - DNA, 431 bp, Oryza sativa
  unsure (1)..(431): unsure at all n locations
tgcanactctggctctgtcctgtgcttccctaccttgtagaggacaaacaagatcatatccatggtgaatgaatcctgcgcagctggagtagtatttggggtctctggcagaagaccttccacaatgatcactttcccgccttcagggagagcttggtggcagttcttcagtatcttgatgcagtcctcgtcactgaacataatgagcatccactgcatatgtatatgcatgtatgaattaattctgcattatttccatctttatggaacgttctttctttctactagccaaatgtcccaatttcacagccatatatatgagacatcgtacaacgctagaatcaattgtgttattggatttgtactctcanaatttcatgcgtcacanattgtatttgggtaaacattttctttccatatgactatatatc

SEQ ID NO: 15723 - DNA, 399 bp, Oryza sativa
agcttgctgatgaaagtgacgctggcggcggccatagtagatcgaatctgaaactcaacgtggtagagtggttgttatcctccttagctagattaaatcttctccaactgatttgaatcaaagtcaaagagtgaggcttgttgaagttgtcggtggcgacgaagtcgaagctcctgaggctaaagcgaagccggcggctcataaaattgattccatcgcattcctcaataggaaactcggcgtacccctacctggcgcgccaactgtcgaaacatgaattcggcaataataaaagggggtagcgcacgagacataaaagtggatggatgcggagacaaaggatttagacaggttcaggccctctcaatgagaggtaataccctacttcatgttggggat

SEQ ID NO: 15724 - DNA, 367 bp, Oryza sativa
cttcttggtccttaagtatgcatcaatcttgattacatgcgaccctcttgcaacttcagcaaccgtgacagaagaggtgttgttgcaataggctgccattctggaggtgagctatcacctatggtgtttacagcagcagcagttcagttgtacctatgtcagaatataagtaagtaaagaatgctgagtagtttactgaataaaaaagtccctcgacaagaggcgggcccaccgcgattcaaaggtattcaaatgtactatctactaagtggcatgttgtacgaccatgaaaatccacccgtaagaagttacttatacttaatatatgtacaatgaatagtatttaaaaatagtaatatttatcaag

SEQ ID NO: 15725 - DNA, 423 bp, Oryza sativa
  unsure (1)..(423): unsure at all n locations
agcttagntattaaggatcttttttcactattgcattgttggataccctacatgggaaaaagatacatgctattccgcagccatgccatatgtgaaaaagagtatatttttgtagttgattaggactaactagtgcacatgcactcctttagttgcgtgcatatattttcccaacattgactagtaacgtgtactgtactgaaattaagacgtggtgacaggctatgattttttgtttcactgagcaacttcaagggggatctctaccccgatctctacctcctctccctaccctgtcctagataccctactgtcctccccggccctctccgtaatgagcaacggccgcgcggcaacggcgcgcggaggtgtgtggatgctcgccatgagcaccgcggcatgcggatgtaagctggcgggctg

SEQ ID NO: 15726 - DNA, 434 bp, Oryza sativa
  unsure (1)..(434): unsure at all n locations
ggaccttagatactcagcttgtaactactgaagtgtactntacatgtttataatcttatacaagaggccgaacttaaatangatattgttagctcttgaagctcagctcgtcaatacagaacattctgtgtttataaaaaaaaataacacggtgtttgtactcgtaatgcatgaatgcccttattacacagaaaataccagagaaagaagtgtcactactcttatcgtcgtaacatcatcagctcattgattcatacagaaaacatttctgcatccactatcaaccctaattgctactaccaagttaattacgaccggcggtatgttgataaacacagatctacaacggaataacaacatagagcctgaataactacataatgcacgcgttaagctcatgagatagacttaagcagagaaatcaactggatctg

SEQ ID NO: 15727 - DNA, 437 bp, Oryza sativa
agcttgtacacattgttcagatagagcaaggtcacatcaaaggcagtgaatggatgtgccaaacccagaaaatgggcatatcgactgaatttatccacgacaatcaaattacagtcgaatcccgaagatttgagcagtccttcgatgagatccaaagacactgtctcccaagcctgatctggcgtgggcaaaggttgaagaagccctgggtaacgcaccctttcagatttagcttgtttacaaacggcgcaatcggtcacaaaagtctgcactgcccgcttgagacctatccaggcaaacagccgtttcacttgactgtatgtgacctgaatgcccgagtgccccccaattgcactagcatgcaaggctgtcagaatgcgatgctataaagctggattagagcccacccagatacgctctttgtagcgaagtactcc

SEQ ID NO: 15728 - DNA, 180 bp, Oryza sativa
gatttggcttaacttcagacgtagctgacttttgtgagaccctccacaacgatcgcgacatagtcctgattacagaattaccacaatatcaatctacgcgtagccaacccataaaataacaatgggcttacgctgacatcataaccttagaagagcaatgatcataggttggaacttgca

SEQ ID NO: 15729 - DNA, 374 bp, Oryza sativa
agcttaaaccatctaaaatggctatatatatcacaaatatcatcatacatttgctttggaagtggcaaaatacttaaactggtgaaaatttgtgcgacctgaaagttcccccttcccgaaaatttagcactatatatctccgatcacgcacttaagcatacttacggctaaaacccgtgcaaatttgtgcgcccactgcactggaaaaaaaaatcgagcaataccaaaaacgaacctgggtgccgagaggaagggaacccatcagcgtcggccgatccggagaacctggcgtccatggacctcagcacgaactcccccatcccctccgcgaacgacgacgaggcccccaccgccttcgcccggcaccgatgccg

SEQ ID NO: 15730 - DNA, 416 bp, Oryza sativa
ctagcaactgtactgcacacagttcccattctccgcgcgccactgcccgagacagggaccttaccgcggctcttcccaccgacattcgccacgatcggagtgctccggctacgacgccgccgccgacgacgctccacggtgggattcccgccgaaccccgcgacgccccgttcgccggcggtggggcaccgcgatggggcgtccacgcgctcgccgacgaggcctctgctcccccgcacctgagacctctcccgctgcaggctgcagccggtggctcgtcgcctcctttgtgcgattcgacttgatttgcctcttcactggcttctcgttattgtccagtgtgagttgtcttgggttttaaaatcgcctacgggtggggaagaaccgttttataccgcatggcgcctaatgatgaa

SEQ ID NO: 15731 - DNA, 429 bp, Oryza sativa
agcttgactatgctgcttgcatgctttaagttggttcagtgcctctgtcacaagtgattgtataatctgattagtatttagtattatttgggcatgaaaaagaaacatcagattctattattgacaccagtgtccatattgcatgctttctgtatctctggttgatataataaagtaaaagcacggcatatattcgaagtaatatgcactattgtatacagagttaaaaccaatgttttgtatgcatgtttcccatgaaaactatgtaataatcagaggctctatatttatatttcctattgtgtcttgaaatctgagactcctttatttgcccaagtcattgaactttccattgtacactgttactgtatgtcttgagctgctaaattcagagtctagtgtgagcaaactagtgtaatcttcttatat

SEQ ID NO: 15732 - DNA, 383 bp, Oryza sativa
  unsure (1)..(383): unsure at all n locations
ttcagagctctgaacaggcagaacagtcggtcattgttgtgtgctactcctangcgtataacgtccaaggttatcaatctatcatcgccaaagcgaatgactgaaagagttgcttggaggtaacaatctccatataataactgccacgagactaagcatctcctatgattagactatctgtcctctgctaatctctctagatgggcttctttctcagagaaacttataatgaccaaatcgtacactatccggtagcataagttgggcagatagatgctcttccacacaactcttagattaaaagaatacaagcgtgcacattgacgaacggacggagctctgaatatcatagtaggaagtatagtattatcaaactattaatc

SEQ ID NO: 15733 - DNA, 431 bp, Oryza sativa
  unsure (1)..(431): unsure at all n locations
agcttccataaaagctagactaagcaataaagtaccgcgtattttaccttctgcttctggctgtctcgcaataccttctacagcttgtcctgcagcagtaccttgaccaactccaggcccaatagaagcaagacctacggccaatccagcagcaataacggaagcagcagcaattagtggattcatgatgagttcctcgtgtcaaaaaaaagaaatggttaaggatacaatcaaccaagaaattcatatttctaagctctattggacagaagtaactaaaaagtacaaattgaaacgataatctgaattctccgaactgcttcgagatctcctttntagtttctaatcattagaggtttgtgtactcattattctatntctctttctttccaaccaactgatctttcattccatccttctttctttcctct

SEQ ID NO: 15734 - DNA, 349 bp, Oryza sativa
ctcagcttgatcaacattacaagtatcctatgtggagggttgtgcaggggatgcaaaaagtgcttctgatccattacgcgttaaggccttttgttcttcttcgcatccgttattttggcacaagtttttttggttctcaaaaagaaacagtttgaaaaggttcaattgtacgaaatgaatttctaggtcccgggatttcttaccatcaagttggtaaaaagccgcgatttattggcgattgctagaattctctatgatccactttggaaatcttttttttgtttagactaaatttttgttgcgagatgtcttgtctgcaattccttatttctatcatctcatgcaaaac

SEQ ID NO: 15735 - DNA, 422 bp, Oryza sativa
  unsure (1)..(422): unsure at all n locations
agcttgggcctcgtcatcttgagtggactgagtgaggaggtccatcttgggggcctgctgcgcatctgggccgagatggcccatcttcttctggcccaactcagctgccgatgccaccttatcctctcccagtatcgctttttccccacccgtcctcttcgtctcgttctctgcctcccgtgggaacttgggagcgatctctgccaggagcggcagcatcgggtcgtggcccccctggtcgtctgagaaggggagcaggggtgaggagcatacgatctggatcagagggcaatgatgtaatgttgaaggaaaatttaaatttaagcaccattgtaccctctctttcaaacactatcttgatggtataaacatganaactctcacttcccaacattctctcgatggataaacatgaaagaaca

SEQ ID NO: 15736 - DNA, 475 bp, Oryza sativa
  unsure (1)..(475): unsure at all n locations
tgacctataaatctaagctgctatatatactgccttagctctagttccttgaaaattctntattatctttgtgaaatgtccttgttttcaccaatttgaattctagaagaatgtcaaatttagtgctagtcttatttatagacttatagtttgtgttcttcttcaatagggaaagggccaaactcatggaggaaattatatcacgcagacaaaagaagctgcttatccgacatactcgtgaaaaatacttggaggagactatttcaagggaaatggagcttctgctagaacttgacaggtttagagttgttgcctttgtcatttagcatgtcagatacaatataaatgttgctatccctatatctntgatgtgttatctgtatatggatagggctcatgagatggaacgtganatcgatagacagctactactggatcttgagcgcgttaagtctatggaacttgctatttacct

SEQ ID NO: 15737 - DNA, 374 bp, Oryza sativa
  unsure (1)..(374): unsure at all n locations
agcttgtatattgtgaataaagaaatntccaaagtattgggcatacgccatgcgcacactgctttaacagatgtgcttaagtccctagaagacacatggtttcaccacacctggaaatatatggcatatgtggtgtaaaatccgaataaataaactcataaaggatttaccaaccgcctagaaaatgaccacaatatataatcagcctaagccataatattggtcaataaaaatgcacacttacgtggcaaaaagcaatgatattgtatccaatcaattgcttaaaaacccaaacagcaccttgacttatatataaaaaagtcagcgggacagctatataaagctntactgtttgacaccttntaagatgcatt

SEQ ID NO: 15738 - DNA, 456 bp, Oryza sativa
  unsure (1)..(456): unsure at all n locations
cttatattntaatgttctattaatgctaaatattttggtacaaagtttaaattctcaaaataattatattntaaaacagagtaaatagtagaaagatttccgggcccataactaaatgaaaggttntatatttttttagattggctgtaaaattattatgtgatgggaggatggcatattgttgttttgaacgatgtggtgagattgggtagtatgaatggaatgatcctgcaaataccataagatgaagacacaattgtgcacaatcattgatcatgttcatttcatattataaatcggattatttattttacgcttcggaaaatatggcttctttaaaaaccttcttctactggattaattaattagatcacctattntaaatatctatcacaattatttttaaaaaatattaagttatctctatagtcagtagataatccgagacaatattac

SEQ ID NO: 15739 - DNA, 410 bp, Oryza sativa
  unsure (1)..(410): unsure at all n locations
agctngaaacaatgattctaagaaagtgatctcatgcaacactaacaaaacatcatttgattagcaagatttgaaaacaaagggatcttaccacttgaacaaagagacatttcaaatatggtttgtgtgctcgacgcaatcgatcaattgtaagactgaggtaaggctcaacccattgatccacattgcctttgcagttttgaaaaaccacctcaatgagcttgggagcaggctcaatatctgaatcttccatgttttgatccatcataatctacaaatttgaaaattatcaacatatgctagattgctagtacactgttatattgtgaaatctaacaaaaaaaatatggcaattaacccaaaacacactcacagatgatagtgcactccacaagctttgctgataatct

SEQ ID NO: 15740 - DNA, 218 bp, Oryza sativa
cctgatgtgtactctattcctattccacctgctagatagtactaaactaaacttgagagaaatgagagagctatcgcttgatgtgtgtgagtgaattgagaatgtgaagtccttttattggcaggtatgacagttgtaactgctgcgaaatgtctgaagtacccctcaaccgccatcatgagaggatctggagcgtcctgccaaaccccacatccaac

SEQ ID NO: 15741 - DNA, 409 bp, Oryza sativa
  unsure (1)..(409): unsure at all n locations
aggaacctgcaagcatgcaagcttaagatgccactgaagattaaaatatttatgcggtttttgcttaaaggggnagggctcactaaggataacttggcaaggcgtaattggaatggtagcttgaggtgttcgttttgtttgaagaatgagtctattcaacatctctttatcgattgtcatttggcgaagtttctgtggagaagcagtcagctctcttttggattaatctttcagtaagcgtatctcatatctttgatgggtgggtcttgggagttgataagacaatgagtaaactgatacttgttggagcttctgccatttattgggcaatatggctgagtacgaacaatatatgttttgacaaatcaccatcattttcctatatgcacgtcattttcagagcaaccca

SEQ ID NO: 15742 - DNA, 465 bp, Oryza sativa
  unsure (1)..(465): unsure at all n locations
ctcttagtcacctgcggcatgcaagcttgcacttactatggtgaaatgatgtgtttntacaggtcgtaaaattggctatatttatttagagtagtatgaacatctacggcggcatcctattcatgatactgaaaattttatgtcttggttcaattagatcaacattctggaattctatacgacgcgggaaatgtgttaatcggcctgactaggttgtacttctgcagaagcgatagaataactatatttcatttaaatgaaacttttcgtatgaattacaaccttaaacgttatattgaaggactcaaatttgctgcacgcttaaaaaaatatgaactttcttattaaatttccttttatcacttgtttaaggctactttntgaaatgcatatttcttaaaatattaaaattatccttacaattaagtagataattagtgcaaaaatctagtcagtaatctaaat

SEQ ID NO: 15743 - DNA, 398 bp, Oryza sativa
  unsure (1)..(398): unsure at all n locations
tgagcccgggcctggtaatcacatgccatgggtgtcctgttcttgtctcagctcgttgctgcgttnggattatgttggaaatatgatcacaatttggcatattataatccaaaatattaagacaataagtatgacttttgcagggagtaaactagtgatcaaagagagtaaactacagatcatgcttaatatagaataagcataagaatttgtcacaacagaatgcaatgaaaccattgcacctaacaaaaatatagaagaaaagaacatgaacacagtgaaaaacgaagtataccctgagaatggccctccgctggtgtttgaggcagtattgcctctgttgggttatctctaggtgcaccgccgttggtgtcatctgttgacatgatcaccgatca

SEQ ID NO: 15744 - DNA, 402 bp, Oryza sativa
agcttgccgttcttcttgatgactggcactatgtttgaaacccactcggcgtatcggcatggtctgataaagccagcatcgtataatctagttacctcagccttgatagcatcatacatatcggccttacatctccttggaggttgctagtgcggtttgaatcctggcttgataggtagccgatgttcaataatcgatcggcttagtcctggcatctcataatactcccaagcaaagcaatctctatattccttcaatagctctattaacttggctctgaactctgccgataaattcttactgataaatgttggccttggcctatcccctggaccaatatcaacttcttccaaatcatcagccgacatgaaaacttgtccttgcttgtcatcgagatcatct

SEQ ID NO: 15745 - DNA, 475 bp, Oryza sativa
  unsure (1)..(475): unsure at all n locations
tcctcttagtcacctgcggcatgcaagcttcaccacatacaacaatgtcaggttgctaccacactctatacatgaaattaacagggattaggcaatattaaccatttaataattgagaatctaatgccatttgtatctgcaaataaggaaaaaaataaaataaatggagataaagctgctgtgatgtgagactgtgacttgtgaaagcgtaaaatcatgtatgtcttctatactccagtactactactaatgaggctntataagccagtgcctgtacctaaccacatccagttaaagatctgaagcagtatgtggaagtaagaaggaaaatagttcaagggtcaacactgacaatggtatattccatgcttctatatgcaacaggaatcaggattatgatattataatgatntaagtaagaatcaaatgacaagcatctgcttattagtaacatactatcatcttatcacattta

SEQ ID NO: 15746 - DNA, 411 bp, Oryza sativa
  unsure (1)..(411): unsure at all n locations
ttntcctatnttatattcttggaaggcaaaaagaagttttgttgacccactatgctcatgctatacgtaaatgaagtgcatttctcataccaaagattgacaatttgccctacaccttcatatgagtttcgaacgtatgagttttacaaaacttccatagaaattagatcaattatcataaatatcctctcaaaccaaagattgacaattttcctacacttctacccttgtgactcctttggaactatgaattttacagaacttggaatttctcaggctgtcaaatactagtattttcagtactgaaccacggccaatcttgtgtgatatttgtcttgtggcattatctgatggacaggtacactacagagaaacgtgtactgttntaatacaagcagtactatcaagtct

SEQ ID NO: 15747 - DNA, 427 bp, Oryza sativa
  unsure (1)..(427): unsure at all n locations
gcttattatttccaaaataaactcatgtggaggcacttttgtagaggtcccctcanaaaatcaggagtttcaaagtgtagagacacattttagagacattntaaaaatgcctaacactnttactctanggaaactntagagacatttttccgacgggaggcggagcangatgctccgcaaggcgtcgttgggcaggtcagccagctgcagctccttctcctgctgctgctgctgctgctccttctcgccgtcaacaacatcgacagaacaacattgatctcggccatggtgatcaggggctagctcagatgacaacgaactcgatccgacgagtgatagttgctggaaagcgatcgagtttggtgagggtgaagtgaagagcacagagatggatattaatcaagaggacgagagtgatgggtgccgt

SEQ ID NO: 15748 - DNA, 397 bp, Oryza sativa
  unsure (1)..(397): unsure at all n locations
tgtgcacaagtagtagtgctcaagtgggttgggctgatgttcaaagtggacagtcggngtcttgctcgttttctgcgatgcctttgtcaacgatgatgtgatagctgtggagtcgaagctactgtgtcgctaggtgactagctcggcaacgataacacttgcctcgcgaagtcgaagcctctgtgtcgctntcaataagctctttatcgatggttgttttgggctccgccanntnttcttttttcgcggtgttggtagcttacgttagagtgggtgtggtttcatccacgtttccataattaactgcgcattgtaagttgcgcaaggtttattctcgctttctacttataatgagacaccttcttctttatataaaacatcggaaatggcctcatcg

SEQ ID NO: 15749 - DNA, 312 bp, Oryza sativa
  unsure (1)..(312): unsure at all n locations
acccctgaaaattactcaatcctttcaatacccctgaattngacattatcccttatatacccctgagttntcattntgatctcctctatacccatctccgttagttgaccattagttgaccgttaaatattntaaaatgactatattacccatcctatacatatgtgtggtacctacccaataaattntcatatganaaataaacttatacaaaatacaagcaatataatcatttaatgcccaacttanaaaataaaacttattatnttttaatttttaaaaattatgattaaatccatacattagtttcac

SEQ ID NO: 15750 - DNA, 377 bp, Oryza sativa
  unsure (1)..(377): unsure at all n locations
tggtttatctccatcgccgacgccagcccactatccttctcctatccacgtggcttcgtgcagccagtagcgtctcgtcgtccacttgtgtccactgcctcccacaaccatccttctaagtccagtgatccccctcccctcttgagttagggtttagtgatcggngaccctaaaccctaactctacttcctttgtcgagctgccagagatgaagggggtgtcgtcggagccaaagaataagagttgaggtcaccggagcacgaattatgaagcaaaatcccaagatcaataatgtgcacgattttaatataaaaaatttgtcgccggccaaaattgccagctcagctgcatcaacacaaaagtgccctattagtttc

SEQ ID NO: 15751 - DNA, 403 bp, Oryza sativa
  unsure (1)..(403): unsure at all n locations
agctngcatagtgtacgtgcactgtgcttgcaccattcttctaaaanaatggtgtcattagatttgcaatcttgcaatgaaaaatccaactaatcacagctacttttaacagtttctaaaatgtgtccaaattttgagcactcgcaaagtcccaagtcacatttgcactcagtgcactaaggttgtgtttagttccacgccaaaattaaaagtttgactaaaattggaagtttgaaaaaaaaacgttggaagtttacttgtgtaggaaagttttgatgtgatgaaaaagttgaaagtttgaaggaaaagttgggaactaaactcagccttaacaaaaagtcagaacagcaacaataacggctgacttcangttaagtttacacaatggtttttgagagtggat

SEQ ID NO: 15752 - DNA, 452 bp, Oryza sativa
  unsure (1)..(452): unsure at all n locations
aaactcacagccgatacatgtcttatcgtgtttaattacacctatggtacaactttgcaagtcggtgtgatatagtgcgagaacttaagaattgaatgtctaagtgtaacaacttaacaagtgggtgcgctctagtacaagaacttaacaatttaacaatttagtattttggtatatcaacttgactaagtatatgctaggtaagttatttttatgatgccaatatgccattacatagaaatcctacggatattaccttataatattaaatttaatcttgaagaattatactgcacataaaatttacatccaattacctttaagaattatttgttttctttatcttttcaaatatcaacccgagatataataattctacatcccatttaatgactntcattattagtattatgataaaatatattactgctatacaatccacatatatattg

SEQ ID NO: 15753 - DNA, 236 bp, Oryza sativa
  unsure (1)..(236): unsure at all n locations
catttcttaatttgcctagtaataggttgagatatattcagttatgctatttccccatgtcaaatctacaaattggttatgcaaacaattcgttctgttcctagtgaaaggaanaaaacaaaaggtaaaactntatcatggtgaataatgtcaagtagcatgaggtcagtcaaaacctgtgcaactgtggttactnacaagcacaaagcaacaacatattntttcctctgaactct

SEQ ID NO: 15754 - DNA, 406 bp, Oryza sativa
  unsure (1)..(406): unsure at all n locations
ggaactaagaaactaagcttctacattcagcttggaattctataaaggaggatattatctagctggctgcgagtttctgctcaaattcagtccaactggaaagaattaacagagctcacattgttctaattccaaaacctggcaaggagaatacagtagatggctatcgaccaatctccctccaaaactgctcagtaaaaattctttcaaaggttttggcaaataggcttcaaaaagttctgacaagaatgattcatctggaccagacaggcttccttaaaggtagatgcatctctgaaaatttaatttatgccactgaactgatacaagcgtgccatgcaaggaaatgcaagaccctcattatcaagctagaatntgctaaagctttcgattcagttctctggac

SEQ ID NO: 15755 - DNA, 398 bp, Oryza sativa
  unsure (1)..(398): unsure at all n locations
agcttggccctagggcgaaacccgactcttatgacgaccctaaggatactaagttcaaaactacttgcgaaaagctaaggtttcttttgttttctttattttcaatagtttgtttctaaaatggttactgatctttctccctccttcaaaattgtagatggcagtgaacgccagcttcagttcccacggttttggtgagggtcaccacgtcgcccagcttcgtgacctcgcccgtttccttggcttctcttgtcccgagtacacggngtactccgtggaccgtgttccccctcactgtgagctctctgtatacctttacccccgtggaggtatacacggagctggccttcgcccacaccacttcaccgtggccaggcccactcaccagatcgcgtacc

SEQ ID NO: 15756 - DNA, 455 bp, Oryza sativa
  unsure (1)..(455): unsure at all n locations
tacacaagagaagagaagagctactagagccaaaccctctgatttctactctattcccattccactagcttgggaacactaaactaaacttgagagaataggagagagctttgcttgaggtgtgtgttgaagtgaagagagggaggggtttatatagcctcccaatgacggttggaatggtcgaaaataccctccaaccgtcattgggagctaatccacagcgtccagtcgcaaccctgcatccaacggcgctgggggattcggtcgaaccatgggtcggcccaaccagcccaagttttggctggcggcctcctctgctgctnttcttcgtagacttgtgaagtttcgcccaattcatcgtgtcaattctgagttcttggcccattcatgcacaagtctgattctcaacatcgtccgattgattatcgtctgagtgatgtcattctcctcactta

SEQ ID NO: 15757 - DNA, 459 bp, Oryza sativa
  unsure (1)..(459): unsure at all n locations
agtcacctgcngcatgcagcttacagaggattacatccctctatgataagctcagctagtattnttgcacctgcaagcatccaggtgtgcccttcctcctttttcctttgcaggagcactgtcaaatacaccttgtagagaatattttctaatactatagagatatttttaaaatgcctttacagtgctatagagacattntgtagagtgtctcataaatgccttttgatgaattgtctctatgaagtaagaggtattntataatatgtctctatgcaaatagagacactntgtagaggcaataatatgttgcggcaactatagcanatcaatatgaaaaanaacaaanatattattccttatcaatccttgaactcatggacctcttaagttgactatntttatcttcaatgcactaaccatcccaacctcatataattacanntgtaatatgtattt

SEQ ID NO: 15758 - DNA, 458 bp, Oryza sativa
  unsure (1)..(458): unsure at all n locations
tgacgacatagtagtagaaccttgagtacctagtccttctacctagcgcgccactgtcgatggnggatacctgtagaccggatatagagggtattggggtacgctggtacgaggatctacgtagtacgacatcaagcaaacatgaaacagggattatactggttcangccccttggtaggtaatagccctaatccagttgatatgggattatatgatggaaatcacagattacaaagggaatagtggaactcgatgataccgacgagatcgtagtcgagttggtttgactagatcacccggcgacttggctcctgtatctccggcttcgtaggctgtgatggttgtcttggctgtgagattcgatgccttangtcctcccggagggtcccttttataccgcacgtcagttggtctctaagtagaactcagagacatcggaccctacacgatacagtga

SEQ ID NO: 15759 - DNA, 423 bp, Oryza sativa
  unsure (1)..(423): unsure at all n locations
agcttccttccatgctaagttatcttctcttagtaagctttccactaattcctttaaggtgtccacgtaaaacatgtttcgtaacaatcagagccaagtatgtgaattaagccatgtaagtatgcgaaccttgtatatacgcaactctaagtagttgtgtgagttgcagagagtataactatatctcgtagattgggattattctgaaacgcgactacccaggctgccaggcacgaccttgacgatgatggtagaattattcatatccgttgtgcactccattgaacacacatataatagatttatactgtaaaaatatattcgatgaactaatatgttactacatatattatatntatttctataaacatggtaaagntgagccttgatgtatgacaacctacgacgtacgacttaattata

SEQ ID NO: 15760 - DNA, 228 bp, Oryza sativa
tttcgaaagacaacatgctgagagaaaaaggcatataacacttcagttaggacacaattttatgggggaggggtattgaaaatatgctaaaactaaacagacgttggcatccaaggagaagcctagatgcttccgccgactctaagttaccgtggcccaaatgaagctagaagacgccttttgctggcttctgtttgtaatcgaactattttccgataataaaaaccc

SEQ ID NO: 15761 - DNA, 430 bp, Oryza sativa
  unsure (1)..(430): unsure at all n locations
catcagctancaactggactaagacaacatttgaattctttgacatctgtaatggaaacctgctgtttacggatacaattgtccctttcggagtcatctgttggcttggcatgtccacccaccaatcagccttttctcctacttgctgctttttgagtgtttcctttggttctgtgtctcagtacacgatgaagtacaagaaatatagcatgtttttttttgttacatntcaaaatcatcataaatacatataacctgaattttaaaccacccagaggataccactgtcaaactaagaatttccagcggggaatagcatgcgccttctatcatggtacacagatgtaaattcaaataaaatatgacacatctgatgagcacggctgtacattatacttccagacaatgaacatcatcttatcactattta

SEQ ID NO: 15762 - DNA, 392 bp, Oryza sativa
  unsure (1)..(392): unsure at all n locations
agcttctcgtcaaccaacaaccgcgtcaactagtgtagccattctattgtatactctntattccattcatgccctgtactacataggagacgcccaacctccttttgaaacgaggaggtcatcttctgattgaacacgttgctccttccagtttttgttaaattctcttcaagatcacctcgtaagcacatatcaagatgtgggtattctagcttcaaagactgatttgcaagataaacttgtgaaacaaacatcatatcttctctatactgatctgagattttccgttcttcaaattgacttagagttttccagatccctgagaagaacggacggtccatttggcctataacagcatatgaccaagcaatatttccaatctgatctcgggt

SEQ ID NO: 15763 - DNA, 477 bp, Oryza sativa
  unsure (1)..(477): unsure at all n locations
tctaagcttggacaagtctacccttttatcagatgcattctcttgtctttcatatcttgctattggcggtgacccctggcctcattgtggtcctatataagagtactgctgctgaatgtgaacatatcttggatttactgttcatatttagcggtaatcaattcatgttctgcacagtcttttacacttttcctcatatttttttccattatatacaatttaatttacagtgaaactgaatatgtgaacagnttttcagctgtaatccagcgtttatgaattaatatttttcatcatcttctaatatttgataggcacagctggttctgtcatttggctgttagaagcctggaggctgggccatttgatatcctgaagntntgagttagaatggagaatgggctgtccgatgaagctcttaaagcacgtttccctctactggatggtcaagacctagtcttttgcatgcttgtatgt

SEQ ID NO: 15764 - DNA, 182 bp, Oryza sativa
gtcaatttggtaaatctgcatgactaatttattaaggcaaattcatcttgattgaagccctaataacctaacttactattgaaatggactatttcttaagcatgcaaaatttggcttcaaaccaaaggcactaatactattgaataccaaatattgggagccaattacgcctaaaccaaacc

SEQ ID NO: 15765 - DNA, 378 bp, Oryza sativa
ctcactgacggccgccgctcgagccggagaatgtgggcgacctgccttgcctatgcccatgcccggatgggcagctcaaccttcatggaaggcccggtttatgttctgaactgatggaaattaactttgatcaaaattttaaacttctatcatgggttttatagataatttttataaactccatctatgccacaccaaaacatatggattttggaacatgacacatcctctcgtttatggtcataaaagttcacaaaaatcacaccattgaccattttgacatattcctatatcaaaattttaaaaagtggatctaacgcttacatgatggattacatccttatactatcacgactgtatcgcagaactttaaatgtg

SEQ ID NO: 15766 - DNA, 443 bp, Oryza sativa
  unsure (1)..(443): unsure at all n locations
agctnggtgcggcgctgccgcacagaattttttttccgtatgcacagtagcgtcatcaacgtgtcacataattatttttttccatcacacggaaaactcacaaacgcacagtgataaactcaggaaaaaaaaaacctgaaatactatacatatcaattatctaattttttaacttttatattagctagaaaaaatacccgtacattgcaacgggtgaaggttatttcattattattgttatacggcttagataagatggaattcactgtagaaattcacttggatatataatttttttcataaaatcataagttacaattaggagttcgatcatctcaagttagcatgtaagtctttctaaatagaatttttatacaacttcttctgtattttcaaaagagaacatacttanagcccgactcatatatagatatgtatttcta

SEQ ID NO: 15767 - DNA, 466 bp, Oryza sativa
  unsure (1)..(466): unsure at all n locations
tgatatagatgggacaatcatancacgatcaaagtggttatgattctgatcagctctcatggcaggtggtagtagtatgatatgagtaggacacaacatcactagccaaaatggtactactcagatatccacactgtagtagtggtgggagagagatattggagctagatagccccattcctcttttgccatgagttggagttgaaagttcactctgaaaaaacagattttcaaaatcttcagtactttggctgccctcctgtttggcttattctcattcgcgcgcttctcggtcccagaaattctacgataatttttcgttagtcttatacgttatagcccgatatttttacggtaaaagataaaatcatgtgttcgaagggacttggctgtgtacatgtgtgatatggagcatgtttgccctcggagctttgacatatgtggccacatgacagcatgaatttta

SEQ ID NO: 15768 - DNA, 418 bp, Oryza sativa
agcttcatatgaaataacaattgaaccatatgtttcgaaacacataagtttgtattttggtctgaatctatcttaaactctctttgtagaactgaccacacgccaacaccatataattaacatgagtaacacgaaactctactaataggagtttgccgtcgacaacgaggcgcctgtgatgacttcgtcaatcttcaggatttgccgcccagtcttcgaagatgttcataggggtagggttgcgtgcgtgcattcatagggatgagtgtgcgtgcattgtgagtgtctgcgttgtactgtgtaattctcaaaaaagatatgggatttacacactgcagggaataagggggctaggggagagaaggaaagagaatgactttatgaagaagatgtttgttctgttcaaatcagttcgaac

SEQ ID NO: 15769 - DNA, 480 bp, Oryza sativa
  unsure (1)..(480): unsure at all n locations
tcgcgcccctccgcacagatcggggaggggagaattcactgcggcgcacttccaggagtactgtgccgaactgggcgtgaggcgcgagctgacngcgccctactcccctcagcagaatggcatcgtcgagcgtcgcaaccagtccgtcgtcgggacagcccggagcatgctcaaggccaagcacctgccgggtatgttctgggggggaggcaattactactgctgtttatctcctgaacagggtctcgtccaagagcgtgggtagtgagactccctacgagctctagaattgctgcacgccggcctttgaccacctttgcacattcggctgcgtcgcccacgtgaaggtcaacacctcgcacctcaagaaactggaggaccgcagcaagccgatgatcttcgtcggctatgaaccaggctcagaggcgtacagggcctacgatcccgtggcgcggcaggtccatgtctcgcgtgacgtca

SEQ ID NO: 15770 - DNA, 452 bp, Oryza sativa
  unsure (1)..(452): unsure at all n locations
agcttacaataatctgtgtttaacaactattccattggagttgtatagctgattntgaaatagaggatttctagagctgcatatgcacattctcctatactcttgcagattgatttcaaccgtttctagaaacaaattgccgcaatctaaccatattaggtcagtttggtttcctcaaagttaaaaaaagatgccagcttagttaaacaacatgttagcctatgggctactccatactcaaactatacatgtaaatatcacttacaagatagtcaagattatgttaatattttataattagttntcaatccatcacaatccagtgcacatggaactatggaggtaacataagttccatttcggtggtggcctttgattaagaaactttcaggctccatctatggatggttntcagaaggccaatttgtacgtaaaatagcttttgttgttta

SEQ ID NO: 15771 - DNA, 499 bp, Oryza sativa
  unsure (1)..(499): unsure at all n locations
tgccaacttgctacgtcaccgtatatgcaagcccaacttctccgctcaaacaatcaaacctccgaaccacctcatcaagaaatgggcaatgtgagatccggtcccgaagtggtccaagaaatattcttaactccattatacctttgccttgcgctatccaacttgggatcaatgcttgagtcaagatcaacgcttgtgaccatgtttatgttaagatcttaacaatcatttatcaagaatttcttctcattgcatgctttatttcattattatcaatatggcgatgtccttggcttggtgacaatcaatgcatgatgtcatctatatgcctcatcatggttggtcatattcntttgcacagctcanaggagaacactagtgccaacaacattagtgtcatcctccacgtgatggttgcattgaaatatataaatatgtttggtgaatttttttttcgattaaacggtgttgagtatctaacaacaccacaactaacata

SEQ ID NO: 15772 - DNA, 387 bp, Oryza sativa
agcttgctttcatccatctcaagaaaattgcgttcctgcacctaatgcactaattaccctatactcagtagcagaccagagtgagaggccgagagcaatgccaggtgcaaaaaccatcttaaatcacacgcaaaaatcttgacttgacaggcagaatcattcatcatttcgtcaaaggaaaactcagctaccaccactgcactgtaaccaccgagacattcagaattaagcaacgaattcgatctgaaagtgcatgtctaggacaattaatcattagctcaaaggaattgatcagctggtgtgtttcaggcaaacaagtaaacaacagaattcagtagtacataaatatatatcagcgcgtctccatgtatagagaatcgattatat

SEQ ID NO: 15773 - DNA, 451 bp, Oryza sativa
  unsure (1)..(451): unsure at all n locations
tggttgaactgcaaagtacatgagagagaatgggtagattataagctatcaagaacggaaactaaaaggaagcaccggaagtaggataatcgttggaattttgttagatgcaaaacaagtcatgaattctcctgagctttacaaagaagcacatgatcagcaatgtacaacatcacatatttcatcgtattaacaggccattcagaggtacatgctgcaccagaatttttagaaataccttgattgaaggtgcagtttggtcctatcgcgtaacacgaacagaagttgtggatacatgacatttgtttaactcttatgtattctgttgtttgaacaatatggaatgcagagtacagacttaattggctaacctttgatcttgtgatgtaaacttggatgagctgttcgccgtccagctattntgtaactctactaaccgcagatatgttcg

SEQ ID NO: 15774 - DNA, 451 bp, Oryza sativa
  unsure (1)..(451): unsure at all n locations
agcttgatgagatttatatgaaattgagtatgttgctgngaccaaatcgcctttgtttttaagcctagataaacttatgtttgtagttacttatatcgttgatggtaacctgtggcatatcagcaaattttcaccgagtaaatatgggatgcatttgatggatgtattgggtgggtcgtgctatcatcaaagtagtttaagatggttttccatgtattatttgattgagtcttttggacagttcaatttgacaatttttggcacccctacataagatttgtgtgaaggcgtgttcttgcttgtgtgcatctcanaagccattcgaacaattcatttgtctattttttaggagtagcatttcttggataatcactgngcatgatatatccaaagaatatatggctaaggggtgcatgtggcattatttttggatccgtgtgcagcccatgat

SEQ ID NO: 15775 - DNA, 394 bp, Oryza sativa
  unsure (1)..(394): unsure at all n locations
actcagctttgcaatgttccttctataactgctatcatgtgaatgtggtcttggagatgttgggggtgctttgcctaaggctctggcnagaagaggacatcgtgttatggtacgtactccttcacatttgtctttggttgattgtctcggaagagattaacaatctgtagtactagtatatgtgcaatccacaacgtaagagactaagaggtggtattttgattgttatatctgaaactcttaagtctcattcttttgatttgcgtgcatcatggaaaacaatcctcacattggtaccctgttgtctctgtcagctattaaatgttgtttcacatatttaggagagacgtgtggagatctatcttgtattctctgtagataacactatttgagc

SEQ ID NO: 15776 - DNA, 414 bp, Oryza sativa
  unsure (1)..(414): unsure at all n locations
agcttcgcatctntatcaatattcacaatataacgagcaattcctgtcttgcactgttatattattatccatgcattggattagaaacaaggagcaaaactccctgatggttctcttaaatcaaaacattaataattacaaacaggcagatctgaactaaaaattcattcagatttaaccttgagcctcacaccgttacaaaacggagggagtagtattcacaagccgcgtagcggttccactgtttacaacgttgtgtacactacatacatcggagtactgaatcacaagaccacaaagcanaaattggctgatggttctcttaaatcaaaactaattcaggccatagctaaataagactctgctgcatcactcagtgatgtccacttcaccactctgacctcgccggacgca

SEQ ID NO: 15777 - DNA, 465 bp, Oryza sativa
  unsure (1)..(465): unsure at all n locations
taactgtganaaaagaagtgaaaactaactgccatatgatacggagaaattctatcagatcaattaattcagcgtggctctatacggagtattgacttcaatctgcaagaaagtgatgttctttatcagtatctgaacctgttcaagctaccaatacatgatctatcttcactgaagaaaaaaagacgaggacaaagcaacaaaaatgtgcgagtagtcgagtagatcatcaccgattcaggcatggggcctctcattctggatggtggccacaaggcttattattatcctgaattccttgatgctatgcattcaattattagcctgaggtgatgttgcaacctcctgcagttaacatctctaatttcgtacaaattgtgcggaatactaatggtgattagagatgttaattaacatctcaattctgtgcgatgcacgcaagtctggtcatcttaatggcttaaa

SEQ ID NO: 15778 - DNA, 368 bp, Oryza sativa
  unsure (1)..(368): unsure at all n locations
agcttaatagtatagcaaactactcgctctaaatcagctatagtcaacttaatagccaatttatacaatagttatctataaatatatattacactattaatacatgggcccacctatcatacacattgtgtcttggagttcgtgctgcagctggctataattatgtagcacgttgctcttttttcttctttntatcttctcgatatgtgtttatagctgacttaattatagtatgttattgtacccattcttagctacgtaaatctcggcttaattctgttacaataatagtgtaatacctcgtttttctagtatcgctggaccaatggaagcgcaagtcagtgaacagaggttggttacgttctcgt

SEQ ID NO: 15779 - DNA, 363 bp, Oryza sativa
ctataaaactcagcttgtttgacataatttagtatactgctaagtataatatctaatgaatggttcgtgcttgacgtaatgaaaggtccgaatccgcgccgatatttctgcttatctactgacccgttgcgataagaaaagaatttgaggatatctaatggccggaagctgttctatgtcaataaaagaagcacgctcacaaatgagcttctttcagtcagaaaaatggtactactaactgctagctagtactatcgtgcgtgtcaaatatgaattcacgctccgatctttcaatcctaatcaagcatttgtcacgcaatcttgcttcataacaaccggccgtaccgttcaatacggtgcatg

SEQ ID NO: 15780 - DNA, 445 bp, Oryza sativa
  unsure (1)..(445): unsure at all n locations
agctngacataagtcattaactcatccatatatgactatttgcgaggcataattaaacttgtcaaaccaccagacagaatataagtttgatataaattctgtacagagggacttggatataaatttatccaactcacagaacttaagaacgtcaagccactaaacaatgggatcaagcattatcccagaacaattactttaccttcatctctagttgattgttttcataaaaccatgcttttgctgtgagaagatccatctgctgctttgctaacacctgatatttaaacataaaacagaataacatacctgtagtttatgctcacaaacttcagtaataataacatcagtttgatatccagtgcattgtagtagcaagtccttgactcaatcagtgatatctcaagaaggcaaatacttgggctcangtgctcagatatcatat

SEQ ID NO: 15781 - DNA, 465 bp, Oryza sativa
  unsure (1)..(465): unsure at all n locations
ctcaagcttgggagaggcaaaagagaagacatttatgatgagaagttcaacaacaacaagccggagggttcataccaagagaggaagctggagaatctcacgaaggcttttcaacaagtttgcgccgccttcgagccactaagtgatgtagatggtgaaagtggagatgatgataagggaatgaatatctccgatgtttgcttcatggcgcgtggtgaatctgacacagagtatgaagataatgaggtaagtgcttttgaggaagctattaatattttgagtgaaaagaataagaagtgtgagaagatgtatatagaaaacaggaatttatcattgaatctcttanatctgaaattgctagattaaaatctcttattcctaatgatgatgattgcgaaaattgtgagggtttaatgaatgagatttcaaaattagagatgttaatgctgcacatgatttgaaaat

SEQ ID NO: 15782 - DNA, 324 bp, Oryza sativa
  unsure (1)..(324): unsure at all n locations
agcttgctctagttataggataataggatggcaattcanagctntcaatctcagcctcgctcaaacgaaaaatcctttttgcatacggccagatcaatttttcgcatgctcatgtggaccgcatgcaaagataaaaaaccaaaaaaattgcaaaaaaaaaatcacgccggccgctcccgctgtcggtgacgtgccagtgtcgcgccgtccggtcccgccgtcgaatctgggtaggaggagccctaccgcccgctgtcaaccgctgctaccgagccgccattgcgccgtccacttccgccgccggatctgggtggaaggagcccc

SEQ ID NO: 15783 - DNA, 432 bp, Oryza sativa
  unsure (1)..(432): unsure at all n locations
tgtcttgatagccgtacacgattgtgcatccatggaatgtgagaagcaatctcagatcctctccgtcagcatcgacgaactgcgcgaacactacagcaagatcgaccaaatcgcggcgaacacagtctccgaagcgcggcgcttctccaagacacacggatcatggcgtttctggatttgcccgcgatcttctggccaatgtgcaagcaagaagttactggacactgcatctttgctggaacatctgcgcaataagcacccggacgatctatgggtgaatgtgaagtcatttcttgacacaaaactgtgtgtgaaatttacaactgagaatgcctcacacgatggctattcatgccacgatgagatgctacacgtntagagcatagatggtatgatcgagctactgataaacctacctcctggctggatgaa

SEQ ID NO: 15784 - DNA, 446 bp, Oryza sativa
  unsure (1)..(446): unsure at all n locations
agcttagttatatattggggccttattaatcactaaaatagtataacatatttaaacgttctagcttcttcttcttggctagcttagctatttgcagagaaagcacacaccgttttttttggttcagttggccaatagactctctcgtactgtaactgtcttgctcgcttctgaaaaattgctaaaacccagaaaggatttggagaaactccccatgctctaaactngagttgtgatgtatcttgagctgagaaatagaggtcgaccaaactagtgaagctgtatatataagcatacaatgatatatacaagggtatacaatgcagtccggccatgtagggattgcacttaataaattaaagcatacagtacatttaatcatttattagaggagatcgaatagacacggtgccgcatctgtccagcagccaggacaatttttagat

SEQ ID NO: 15785 - DNA, 436 bp, Oryza sativa
  unsure (1)..(436): unsure at all n locations
gcttataatccaataaagtcatactctctagnnnnntgtatgaatgcagcntcgtgaanaanaatgaatggatgtactatattcacataaataaataaatgaaagcaattataatcagaaaccaacaaaatgtcactttgatctctaaataagaacataaaatcactttgtttttgggaacaaatattttgtgcttaccaatcggtttggcatttgtcgagtctcttttggagaactcttctgctgagacggcaccagacgtgtcctttggccgctgccactcctgctccctcttcttctctgcatttgccgaaagaattcacgtcagaaatgaatcggaacaccaatgtgaaaataatactagcatgcannaattgcaaacaaacagaagtaagtaaacgtttgtgcttggactgatcgatgcaatnctgtagta

SEQ ID NO: 15786 - DNA, 391 bp, Oryza sativa
  unsure (1)..(391): unsure at all n locations
gctaacctggatgatcacacttggttctttttatttatctaattaatttatctaaagaactagtatatgaatgtttgatttgatatcgttcaatnacaggaaaagaaaatagattgcaaataacatttcgctacatgaatattctttgttatagcaattatgaattactcctaccaattgtatctccatacaaaaatggattctgcaatgcattttacaagtactatttgccaggtgataggtatattattttttgggcgacaaagtaatattgtcaagcacaatagctncaattcttttgaagcgaatcttaactataattctggcctcgcaaaaaacttatattctgaagaagtgaaacttgtctgtacccttcacgaaatagagatgt

SEQ ID NO: 15787 - DNA, 450 bp, Oryza sativa
  unsure (1)..(450): unsure at all n locations
agcttcatcacttattggatcaacaagattttctaaggtcatgaggcttcatttcttcattcgcaatgccatgttgaagtccattcactaaagaaatatattntattttgtaggttctgaccaagtctacaaacaaattgagggattctttgcttccaaaagaagaacctaaacttgccattccccttttactgcttattgctcagcatcgatccaagtaaggttttatttaacatcttggaacatcgtctgcaattctttgttgtcctgcccatacgctgctcattagttattacctcgtttttgaaccctggtgggcacaaattgactccatttcccttttgccctcgactaaggtggacttaagtctgtcataattatgcaatacaatgattgtaatatagatggcatgacatactaacaagatatgaaccaaaatctttggaaata

SEQ ID NO: 15788 - DNA, 393 bp, Oryza sativa
taaaactcagctgcagccgtgaaaaacaaattgttttagtttgtccagttagatccattgctgtctcgtgactcggtgaccatcaccagcatcttctagtggtgactgcttctgaactgaaagcaacaagagctaaacattgcccatattcaccacgaccaacatctttagaaaaagaaatagactgatgcaccgcagatcagagcttccatcaattgctttctgcaagatatccaaactgttcatagtacggctctgatagtctgattctctgaatgttgtcccaagatccaggtgcagcccatgccgtcgtgtaacaagcggtaagtgccagtgatgaacaaacaagaggtaaccggccgcagaaagccagatatgcaagaaccaagcatc

SEQ ID NO: 15789 - DNA, 460 bp, Oryza sativa
  unsure (1)..(460): unsure at all n locations
agcttccagcctggccagatccaggcctgtgcacagcctctgcccaccaccaaaaggagtgaagctgccattgctcatgtccttctcctgttgagattgattgatttcttgaccaattagcacattattagacttcccaaatcaaatcataatgataggatgcctcaacagtagtacagcaccatcatttgcctagattaattatttgcatatcattttcagagcttacacaaagtacacaatagagggaaaaaaagggtgtgtattcctttcctggacagcttaagcttatgttgtctgaatttaccagttcaaagaactaccaaatccagttattttgggagattcaattgacttctgcctaggtgtatatatcaatcactaatgcaactttgagggaatctcttgtattntctgcaatactaagtgttagtacaaggcaatgtcaaatccatcatga

SEQ ID NO: 15790 - DNA, 488 bp, Oryza sativa
  unsure (1)..(488): unsure at all n locations
tctagagcagaagcttatatacacgcaacaacgcgaaatgtattatccctgaaaactgaaggaaactntntttccctttctttctttgcactgcatgaactgaagacatcaaggctacatcaacccatatatatgtacataacaaattaaatcgatccagaaaaaaaggaagtatgtgtagtgtatatgcttgtctccatatgtcgtggtcgcttgacctactctctcatgctttcgcttttggcatcgatcgagatggcatttgttcctgagattgcgtgacatgcaaagctgaaagttaccggtgtgctcgctctcgatcgccacctttgcttgctaacttgccattcatccacgtgaccacgtggtgatcctacgtggacacatatgtagaccatccnncattttgtttcaaatttctttttgtgtgaaacgatggtattttgttnnttttccccgaagaacacatgcaacaattgtactacatt

SEQ ID NO: 15791 - DNA, 370 bp, Oryza sativa
  unsure (1)..(370): unsure at all n locations
agcttatttcttataatatttaatttatcactagaggttgtgtttagttcgtgcgccaaatttgttttaagtatatggacatacatttgaagtattaaacgtagactaattacaaaacaaattacagattctgcctataaactgcgagacgaatttattaagcctaattaattcgtcattagcaaatatttactgtagcatcacattgtcaaatcatgacgtaattaggctcaaaatatttgtcttgcagtttacatgcaaactatgcaattgattttttttgtccacatttaatgttccatgtatgtgtccaaacatttgatttgacgaanaattggaagttngaagaannaaatttaaatctaaacat

SEQ ID NO: 15792 - DNA, 456 bp, Oryza sativa
  unsure (1)..(456): unsure at all n locations
tagctagcctgctagtgccatggagtgtgtgtccaatgtcagctgaccgaccgaccgagaccagctagaactaaaaactcttaaatccctattacatcggatatttagacactaattgttaaacgaatgtttggacactaattataaatattaaacgtggactattaataaaacacatttataatcttagactaattcgcgagacgaatctattgagcctaattaatccatgataagcctatgtgatgctaccgtaaacattctctaattatggattaattaggctaaaaaatttatcttgcaaattagctctcatttatgtaattagttntgtaagtagcctatatttaatactctaaattagtgtctaaatacagagactaaaattaagtttctggatccatacatcaacttagctagcttgctagtgccatggagtctgtgtccatcgatatc

SEQ ID NO: 15793 - DNA, 403 bp, Oryza sativa
  unsure (1)..(403): unsure at all n locations
agcttgagaagtgggatattacctgcatataactgctactgcattngcagataaaattntgttccttccacgagaccatgaccatgcatatataggattaaggaactatatgtttggttaattggttatatatacaagtattgaatcagtttacnnccaaaggattcagaagaagtggaggttggatcatctgtttgtccccccaaatatgcatcaacgagaaaattctgtgctgtgaaatgcgcatgcagatctacgtatacgaagcctctgtctaaatccccaaaaaaaaaagaaaaattctctgcctcnatcaacngccggctagcctcgccggcgtcgtctcttcgtcgtcactccgcctgcgacttgcctctgaacggcttgaggatctggaacgagc

SEQ ID NO: 15794 - DNA, 471 bp, Oryza sativa
  unsure (1)..(471): unsure at all n locations
atatacagtttgaantttttatttctgctctctctccagntataatgtgcatagcctcgaatacttcactgacattgttatgaaaaataaataaatgtagaggtaaaactagcgcactgccagcttggccaatggtgaagaaggtaaattcataaaaaaactggtaccacatttaaatatttaatatgtattgttattatatattggtcctaaggaaaataaaaaggaaacaaatattgcaactgcgtcatttattnttggactcagtgagctgcaaactgcaaaccatactagtgtggcataatctggactgttgccaatcaagcgaaacctcatttcttctgcacacaggaaagagcagtcttggattctttctccttatggaatatggatgaaatngcanagtcgntggacctaacaagacaatattcgaattcacccatcaattacatgtctctaacattctttatc

SEQ ID NO: 15795 - DNA, 428 bp, Oryza sativa
  unsure (1)..(428): unsure at all n locations
agcttgngaagaaactntcttgccagcgtactctgcctccatctcttctgcggncaaatgttgctcgctgcaatatattcaaaagagtaatagattcaacagtgtgttggacaaaaccaattttaggtattcacttaattttgtcaggaatatagatagggatgacaattgggcatggcgggcatcaatagtgaatacccatacccaagcttaattttgtccccgggaatattcattacccaacatgcatgaaaccttggtcaagcccatccagattgtgtctgccatccagattggaacataattattgaatattagtgcagcacacaggatggatcattcctttaaaattagctcagaatttagtggttgtttcaaactcagagaattgactaatggcaacttctaagtttgactgcacattctta

SEQ ID NO: 15796 - DNA, 428 bp, Oryza sativa
  unsure (1)..(428): unsure at all n locations
tcagatcttcgggtgcagcagcgtctacattctagctttgggcccttctgtgtatctcccttgtaaggtcactttcatcagacggtggcttctcatcctcaaacatgctacgaagctccttgcatgtattggagaggatgttcgctctggtgcccgacattagtatatccgggttaaccaccaacaggtacaacatgtagttggagatctctctgcatcgagtggcagccttgagatgatgatgattagctgcaggggcaccctcatagaagcatatgtcagttgcaatgtgccaaacaatgatactctcatcgaatggcacatctaagctcttgcacagctcttcatcgcaaagctcatgctgaataggtaagtggcctctgcgatcgntgaacatccagtangtggaggtatcttctatgtaagtc

SEQ ID NO: 15797 - DNA, 452 bp, Oryza sativa
  unsure (1)..(452): unsure at all n locations
agcttcacccgttagatgggtatttatgtcaaattttaacggtgttattccattaacctatagaagtgggattcttgcaataattatatatggatttggaaataagtgagacccaaacactcagattaatggtaaaccttttagtatattaataatgtattaggcttaattntggtgataggacatatgcaatttcatctattaaatatgcccgggtttcaaaacaatgataataagtagtcttgataatatgggaatttatacgtaaccgggtgccgtcatttttattagaatctgggagaaattattatcatctaacatattatctagggtctatttgacaatgtagatactntnttattataaggtaataacgatatcttatactacctncgtttcaggttataagactttctaccattgcccacattcatatagatattaatgaatct

SEQ ID NO: 15798 - DNA, 407 bp, Oryza sativa
  unsure (1)..(407): unsure at all n locations
ntcatctcggcctcgttccatgttgtatgccctgcaatcatctatgaaccaaagtcatgcaagcaacaaaaggggaaaaaacatcacaaaaatattggctctaccttttataggtggtcggagtcgaggaggtcccaatccagtgttgaagcaacgttccccggggtgaggcagcgcaccaactggcaagatgcttctgggtacttcaaggcgatgcggataacggcacgtgctacagcttgaacatcttcttctagggtggcggtgtatgcagcgtcagaacgaagggaggtggaggaaccctcagaagattctagatctgaaggtacccttctccttctcaccanagtgatgggtgacaaaagtgagtggaggatgcgatgggtggnggatttgtctacaatgag

SEQ ID NO: 15799 - DNA, 378 bp, Oryza sativa
  unsure (1)..(378): unsure at all n locations
ctctcacttctgtattcaatgcattngctcttgtatgtgaaacatttcttggttttcgttgtctctattctccacatgtgcttaaaataagtttaatagtatagccaatttctagctataaaattaacacgtcatctacaacaactctattagcctatccatacaatagtttatataaatatgcattacaccgttaatacttaacccaccttgcctacacacataatattgtagagcctgtgtacaactagctataatctaaaacaactattcttctcctcctctcttatttagatgtgttatactaacttgaacctgtattgtctatatactctatagtggataagcataaactgttaatctcttaaaacatatata

SEQ ID NO: 15800 - DNA, 438 bp, Oryza sativa
tgagggtcggcacatcataacggaagtggaagaatattgacgtcctattgccccggccgaagccgcccagaactatgtacgtcacagcggttgggttgtgcgggataacgtgcctgtcagtacggagtactggcgaataacaatggcacgcggagatcatgagagctctgtcccagattctgagaaagagatgctgtggaccacaatgctcgagacattcacccttcctgcgggtacagaggacatagtgaaatggtggactctgaagaatatggctgaacaatttctgagcttcaagggagatctgtaccataagtatatactgtatgggcagacaccgaacttcgacacattcccacagctaatggatcactgagacgagttcgttgcatataacacaggtgaacaacggaaggcgatgatggaaagaaacaaaga

SEQ ID NO: 15801 - DNA, 346 bp, Oryza sativa
agcttggacaaggcgatttgagaagatttattgtaccaccttgcatgcaccgatccgtgcgctctctttgactgttccttggcttattcgtagctcgagcacttctgtgagcaaccagagcctgattctcctgcttgatgtgatggaatagatcatctgatgtggcattaaagacagcgagaagagacgacgtacatgatcattcctccacatccaaacaggaagaggaagataccaaagcattcgacttacaatcatctgtctgagaaagaacaggcatcttgtgtgcttacagtgttgtataaagagaatcctgcgcccacatggacatgtgaacagactcctg

SEQ ID NO: 15802 - DNA, 363 bp, Oryza sativa
actaagcttgtaaccagagcttttattgagggcgtttaaattttcatgatgcctatgcggacgattctcatggactacataagatcatacgggaaactaatgatctctgggagtacctaagctctcattgtacaactatattcatgatagcctagtatatatggctcaccccaatagagatgtgcactgatgagtgatgataaagaaaccccgaagactgtccttcctagttaaagacggaagcaaatactcacttgatcatgctcatcatagtcctcatgatacctgctatcatatatgatgctggctgctgaacctttgtgattcattgtttcgagcgcagctggcttattatatgtgcag

SEQ ID NO: 15803 - DNA, 97 bp, Oryza sativa
  unsure (1)..(97): unsure at all n locations
ttaagtcacctgcngcatgcaagcttgtgtgtcggtgcttcatatgttttgatgacgagggaatggcggtagcgagccggagaacacaggggaggac

SEQ ID NO: 15804 - DNA, 474 bp, Oryza sativa
  unsure (1)..(474): unsure at all n locations
tgcatgtcatctaaatagttctaattaatttgaaaaaaatgacaacatggattgatatgagatatattactccgtaaatatataacttctacaagttacaacaaaaataacaaattaaattgaaaatagttatcgtatattcacaattatatatttttttcgcaacttgtagaagttgaaatttaacttgcatgtttgtggagtgatatatttcatattaatcatttttttcaattttttgatgattatttagatgacatgcataaaatgatgggatatcccctcgaggaatgaaaacgctttcccattatgaaagacaatacgacaaaggcacaaccacaaattcaataacacaattgttgataattggtggatgactttgtgagtaanaaccactcacttcactaatccnctgatcgttccatccattgaagtaggcagaanagaaagcanaaactaatacagtagcttaat

SEQ ID NO: 15805 - DNA, 297 bp, Oryza sativa
  unsure (1)..(297): unsure at all n locations
ctgccccactttgacgtgctcccttccggctcatcaaacccacgagtgtgaatcccaaattggatcatttttttagcgagtactcggagaatgctcgcgtcggacgtcgggcnaaacgaaaatcggacgctcgcgcgacagtcgatcatgacaggtggccaccatcatcatcatggttaacaaatttagctatttntctctaaatattatccaacatgatcgatacccttaattatgcattaatttaacagtccactgattatcgaaaaaatactatatgatattatgtgcctgtgc

SEQ ID NO: 15806 - DNA, 393 bp, Oryza sativa
  unsure (1)..(393): unsure at all n locations
tcagaaaccaaaaactgtattggatccnctgactttctattagttgattgtagaaaaggcatataaatttaaaatgcaggtttagtgatcatcatttgcttagagaaaattgcaagaaatttttcatgagcaaaagaacaaatcaagcatttggatcaatctatgcatatttttcttactcttttcttaatatggaaagaatgtactacaaagttgcaggattatgcttgcacatcttagcataggatgcatgattctggtttgccaacccacacaccagtttctattatcacaccacaaagttgcaggattatgcttgcatggcttagcatgaaccagaattagcttccttgcagatttcanaactaataccaatcatgtattagaaaacac

SEQ ID NO: 15807 - DNA, 436 bp, Oryza sativa
  unsure (1)..(436): unsure at all n locations
gattcacccactgataccttgctacctttgcagctccttacctttgacaaaaggttggtgtctggttactatagcctctactatgacactgataatgtcctccggctcatatataatggaccagagatttcaagtccctattggccaaacccatctgagtcaatttttgattttggacgaactaactacaacagctccaggattggagtcctcgacaatactggtcatttcacgtcaagtgatggcctaaacatcattgcttctgactcangtcttggaataaacagaaggctcacaattgatcaagatggcaatctcaagttgtacagcttanataaagtgganaaaagctggatagtcacatgggaggccatgccgcagcactgtgacgttcatggactatgtgggagaaatagcatatgtgagtattctcctg

SEQ ID NO: 15808 - DNA, 487 bp, Oryza sativa
  unsure (1)..(487): unsure at all n locations
tncagtgtgccttgagcgacgcagaagccatgggctctttcagaattgttctgtgcaatgcaacttatccggtggccatcacgcctagaagagatctgcccttcgcaatccattacaaggtgcgtatttctgaggtgagggcatggtttccttgtaaactatgcacgctgcagataattttattttgctctgcatatattgaattaatatggagtagtttctggttatttgggtggggttatggattcgatgcttgtgaaaatgacggttaaagtttgtaggcttgtagagataattgagagaaaacgaacaaaccaatcaattctggaatagccctgcatactattcattcactcatttcatctacagaacaaaacttgttacattatgcaatataatcattccaatgtcataaacaataagcccttgtcaccatatctagctatgcctataattacatcatctangatatcctattacgtacaca

SEQ ID NO: 15809 - DNA, 445 bp, Oryza sativa
  unsure (1)..(445): unsure at all n locations
agcttgttagaccaagcctaaacaagtatattactgcttctaaggttagtctaattgtttcaagttcaaaatgctatttctatttattgaacactacacaacaactaanatagcacacacagcatgttggtttttactgtaaattctctctattttttcagaaacgacaatgcaacacaatggactntntaactgacaattcaacagtggtaaaccttgctaacattntagtctaaatagtttaataaaatctggtcttaatgtccttttattttccactgtgatagaaagtgtatggtgacggtcccttgcaagaaaattgtcatgttgagcaggaaaacattgtgatggtaatatacataaatttcattgttttatacatgggaatagttgcactattttgtaactgggaatatatgctctctttgacaacagaattcacaaa

SEQ ID NO: 15810 - DNA, 373 bp, Oryza sativa
  unsure (1)..(373): unsure at all n locations
cttgccacacaccggaggggctcgatctcttggagccggtttgtgttttaacacttccgcgcgcgggtccggaatatcctttcgaagctgtctacgcctgaaccggtacctcctcaactacagccgaatgaaccggcacctcctccacagatggtggagttggagccgatccggaggcacctgttaaccccgacatgtatttggtgtcgaaatcacccaacgtgaacgacggcgactggtatggcaagttcggaaccattctgaagattgaaaccgacctagacaaactttccaatagttaattgaatncacatacgcaatacaaattatacacgaacttgaatattacttacatcgtttcaaccgggagctc

SEQ ID NO: 15811 - DNA, 463 bp, Oryza sativa
  unsure (1)..(463): unsure at all n locations
tcctcttagtcacctgcngcatgcaagcttcaatcacagcacctggtggctttgtgatgcacttggtgcgtgccttgattgagaactggaggtggcagcctttgccatggagaaaacagactgaggacatggtaggatgaagggtaaaacaggaaggagaataggcgaatccttgtgtttaggtgggaaatagtaaacaaaataggtaacatggcattttattaagagtgcacgtctgtttagtggcaaataattaattggcatctgtaaaatggcaaatcgttgaagccatcactgttgagtggcgaatagttaaatttccctaataaaatactccttccggtaaatattcgataactgaaatatgctgtctagctgcataattggttaaagcttgntcaatggctattcgaatgcccatagtgagttggttcaaactgttattgaagatggatntactcta

SEQ ID NO: 15812 - DNA, 477 bp, Oryza sativa
  unsure (1)..(477): unsure at all n locations
ntatattgctgatnggtgtaacagtacagatggaacaatatataccatggcatacgccatgcaaactaaatatgataagtactgggagaagtcgaatatggctcttgctgttacatgcttccttgatccacgttacaaaacaagttcaatagagtactatggtatgaagatttatggtttagaagctgcagaaaaatttgatgagttcaatggggttatcaaaaaattgtttgatgtttatgctactagtgcgtgtgcaacatcaaagaagaaaggtgctgaaatgcatgtgcatcaacttcaaattcaacctgatcctgttcataatactgatgagtttgatgatatctttaatgagaatgacagtagccatgatcatgagcaacattttcaaagatatttgcttgagagaagtcagccaatttgtagtgataaaacttgagtacaaatttacatggaacaaccactggtactatg

SEQ ID NO: 15813 - DNA, 202 bp, Oryza sativa
  unsure (1)..(202): unsure at all n locations
agcagtcggtatatcactcggatcctgttattcanggattcacaccgcatatgctatatattaatattaagtcacttggttgactataattatcanaaccactcagttggtgcatctattangtacatctattcgatgcacctgagtttatttntcagcccttcacagtcttcatatntggtaaaagtactcnggagatcat

SEQ ID NO: 15814 - DNA, 438 bp, Oryza sativa
  unsure (1)..(438): unsure at all n locations
tcagcagcagcttcggctgggccaagccgggcctcaagatacttgactntntcttcggccatagcaagctgcctctccctttcggcggccctattgttcaccccctccaagtcggtgcagagagatttattttcccccacaagggacttgttctctgcgctcgccttcttcagggcgtccggcacgactcggcgtttgtcctctttatggtgaaggtcctcttcggccttccgaaggcgaagacggtacacgtccagccgctccaaggcagaccgcttcgcgctcaggtgcgccacgagaacctgngtaggggaagccgaagcccttctgtacatcaagagcgaaaaaagcgaagaactagatgggtgaaagtgaaaaagttcagaccagcacgtacaagctctctgcngctgncaatgctcgccgaacttgttgact

SEQ ID NO: 15815 - DNA, 440 bp, Oryza sativa
  unsure (1)..(440): unsure at all n locations
ggctggtgtactctctagtaatcaggcatgtttccctattgcggttgacatcggtgagcggtacagngaataagcttaaatcttcatcctctgattcagtagagcccttgactcttagcacagcctcaaggtagacaggatcacacaccacaacagcacgggtagggcctgtcagtagtagatatggatcctacaacatgcagaaccactagtttactgctgtaaaatattgtgtaaaatattcattgaagtagcatgagttgcatatccgaatggtgggaaacgcgaagaaattaactggtggcaaatgaaaagaaattaacttgtggtgagcacagtttgccaagggccaataaatngaaatgggccagctaaagtgtgggaaatatntcagagaccttgaagctgagataccaatgtacattacattcagaaatctg

SEQ ID NO: 15816 - DNA, 341 bp, Oryza sativa
  unsure (1)..(341): unsure at all n locations
gtatctagctagttntactcccctgtatcttagaanaatggtttacaacaccttngagcattcataccttcttttatatcatattatgtgtgttcttcgtttcttaggccagaaatctacaagatagaagcagctgttgtaattccagatttcttgaatcttggtatgggatttgcctctcaagagtaactctgaacatacttggttgggatagtagtcagttcttgtcgccttanatganaaatcatgcatgtatagctcactgtattatataacctgataatgatgatgatgaatcgtaaaanatggacggaaatccaagaatgcttcgtaaatatatg

SEQ ID NO: 15817 - DNA, 465 bp, Oryza sativa
  unsure (1)..(465): unsure at all n locations
ggaccttaaaactcagctgcctcttcaccgccgccggcgtcgcgcgcatgcttttatcttgcctccgccgngggaagccaccactagcttgccagatccggcgtcacacaaatctgcggtgaagtatctcaattcgtcggttccatctgcgacccatctgatctcccacacgcagcagcaactgtcgctgatctgccgaaacaattgaagcactttacacgcagttggagtcttgaagaaatcgttgtaggtatgggcatttatgttttttctttgttttcctcttctttacgtacgtgaagccggcaaaaattattacgcaataaattgatttgttacagatagcacttagcaatacccatctaaactgtagattctttttactctcagacgactgtccacaaccaaacaagcaaaatgtcatgctgcctgccacgcaagttcatcaacttttctatgctttac

SEQ ID NO: 15818 - DNA, 354 bp, Oryza sativa
  unsure (1)..(354): unsure at all n locations
agcttgttacngcaatgtctcttagattatacatattgcccgccccggagccacctctcttgtcactgcgatacagtaaggggagagtaataataagggaaatcaaaggtaaaccgcatatagaaaaaccgtgtctcatgtatggtaaaggatcttgctactatcctacatgtaaaatacattcagcatggaaatgtgcatgacaggcatggctaagattaaccattcttcatgccaatttacccatcgtgcataactatggacccaacatgatacccgagaggatacagtggagaacgcactcaactctaatatggtgtatactcatggataaacgggcaaactggcacaatt

SEQ ID NO: 15819 - DNA, 390 bp, Oryza sativa
  unsure (1)..(390): unsure at all n locations
taggtggaggagtgcctttcacagaccgaaatgttgttcttacttatcataggccgtagcatgagggcactctcttatgtgtactatgcttttgaatagctttggagattgttcacatatattccatgcttttgtgtgcttattggggcctataggtttatgaacaataatttagatgatgaatacactctagatgtattggagtaccttgacgaagcatgggctggatagttgtgtttggtggtgatcacccggagcagatcttgcgtcatggacctacttagcangtgcagtttggctggtcttgcattgtgcctgtcagattagtgctgtacttgatgcattgttgccgtttatacatgacaccaaatgaaatacaagaaccatatg

SEQ ID NO: 15820 - DNA, 443 bp, Oryza sativa
  unsure (1)..(443): unsure at all n locations
agcttaacctggagagatattatccagttatcatcaaaaaggtttttcttggagataaaaaattaatgcgctcttaggtcgcactntgtgaactacaaaagggggagattagtctccagcaagctgataaaatagaaaagtgcagtaggacagctcaagatcactaatatattcgtcataagagcaaatatgttagtcccaacatatttttttttctaaaaaaaaaatccctgtcacaaactcacagggtaaagttgaacttttatgctggctttntatttatttatttatttattttaacaataggtggtgcaatcaatagtcagaacataaaagtttctgttaaatccagtcccttggaatgtggatcttcggcccacaaaacaaattaatttgaataggcaaaatcttatgatgtgaatatgttaacactggtatcacat

SEQ ID NO: 15821 - DNA, 427 bp, Oryza sativa
  unsure (1)..(427): unsure at all n locations
cggacatgatattgttattccacctaacaagggtgtgcgaagcgtgcacgacaggatcacacaagaattgggaattgcacggaatggtcggatctcagctaaaatgctgattgaagtgatcaagaaccacaaagacaacccctcggcagttcgtttcttagtcatggttcttatgtccaagctcctactcccaacaaccgacttttacatacccaagagtgatgtatgggttgccgctgacctcgatcgggtcgctgccatcgattggtcgaaggcagtgttccaagcactgagcgataccatcagatgttggcgacaaaagcccacatcgtcaatcacatcttgtgttgtatttttggtgggaagctattcccgtaatttcatctattntacttctggttctaacaatttattcatcttatgcata

SEQ ID NO: 15822 - DNA, 433 bp, Oryza sativa
  unsure (1)..(433): unsure at all n locations
agcttacataagttgatgtagtctatggttatttaaatttaaatagtatatatagaatgatgattcaaatgtaaaagatgatgtggcttcgtgagagaagaaaaggagagagataatttggaccatagattaatcatctaagggcaaaaacaattgatatgatatagctaaatgagaggagagaaataatattaactaagtgaggatgaactatataggtgtatgggatgatgatttaacattcgttcattntaaagctctaaagttcaataattataaaataaaattatagataatatagcatgcttgtacgatgtttatatgtaataattattagtgaaagatgatgtgtcatcattgcatgtagagttttagaatttagtgggttatagctttatagtaagataagaattatgcgggatgatgattaaca

SEQ ID NO: 15823 - DNA, 475 bp, Oryza sativa
  unsure (1)..(475): unsure at all n locations
tcagcaagtaacttggtgataatgtttctttatctgtatactaaagcacgataaccatttaatgtaacattgtgatggtactgtatgctgctcttgatatctttggtgtacggtagatcgttatcgtggcatctaatccattcatccacgcttccctgaaatattagcatgtatagaattcgaagacaacttcatacattttgtatgtaaactgcaaacaagcgtgtattcatctctagaaaaatgaaggaaccacaaatttaccttcttgattccgagatactctcgtgtgacgttatcgttggcccaaaaatatgacaaatagttggaatagctctgcaataggaaagttcattctaattcangtctaaatnggtataagatagaaacataanattaaacaagcgtctgttcctgtatcctttatgatataaaggatgccatatatattantttatatantttcagaaagtat

SEQ ID NO: 15824 - DNA, 351 bp, Oryza sativa
caagcttttatcattctggcatcgagctattttgccgcatgacctcccctacagtatcgtcaccgcagtagagtttaaccaccaaattcgggatggattggtgtggttcctctacgcctaggacaccagaatatcgaaccatgaacgaggaaaggcatgagagaaatattggctagtaattgtgaagccccaattcttgactggaagggacaccaaaggcctctgccctccctctctatctatccaagagatggaagggcagagcttttttttggttttttcatcttttcatcaaagagttgaacaatgaagatagatggcaagtgcctgatcgatttgatcaggtcgtgt

SEQ ID NO: 15825 - DNA, 403 bp, Oryza sativa
  unsure (1)..(403): unsure at all n locations
taacacctctntattgactntctcactatcttgaaatatttataagatccaaatccaaaatgcaaaggtcgtcttattcaaaacctcaatcatcacatcccctctctcccacttcacacctcggaacgcactgttcttatagagagaaaggggctttcccatcttcttaacccgaaatgaaatggctgaggagagggaggttccttttggggggtacccccgggaagagatccactggagacggngtgggcctgtagctcacaggattagagcacgtggctacgaaccacggcgtcgggggttcgaatccctcctcgcccacagcctttcaaaggggaagggcctttactttcccnctgagggtaggagaaccatgatcgcgatagcggacgtcaagctattg

SEQ ID NO: 15826 - DNA, 348 bp, Oryza sativa
  unsure (1)..(348): unsure at all n locations
tcttgattgtgttactaagacatcgaattgagcctgtgttttgantttgcgacttgtacaaataggtttacatcaacgactatgcatgaagatgagagtgtgtgttgaagtgtcagctaccaataccttcgacatctttcagagccgagtccctctgttttgccaattcggccttgtctctctctagagcttggattcgcttcttcagctcagatatcttagaagcttgcactggattggttttcatttgtcagatgcacatggatagcaacacgaaacaagtcagacaaagatgatatttaccttttgatgaaccgctcagctcatagttggagtcttggagcttgg

SEQ ID NO: 15827 - DNA, 340 bp, Oryza sativa
  unsure (1)..(340): unsure at all n locations
tactgatcacacactctctnttatcactcatgtcccctaatatgacgcacaaacatatntntcaagtaatctttaatactccctccgtcctttaatatataacgttgactntntacgtcatgtttggccattcaacttattcaaaaatttaagtaaatggtctttttttgttcgatgtatcactaaatgaaatntaagtattatntatattnttaagaattacaaaaantttntaataaaacgaatgatcaaaggttgtaacaaaagtcaatgatgtcttcgtgtaataccaagaacatagtatattcgtgcctacgctgtacaggcacacactcaaata

SEQ ID NO: 15828 - DNA, 389 bp, Oryza sativa
  unsure (1)..(389): unsure at all n locations
ntccattttcgagggcatctgtgactgagtcttcatgatcttctcatacatctctacaatcgacgaatgattttgctttacagtcttgatagcgtcgctgcgcacataacgaggcatgtgctccaaagaagatttatcaaaatcctctaatgcaggaatgtgcgcaaccatgtcgttcttggcaccactgtctttctcagctctctcaccatatcttttcacaacttccttttttcttaccgcggagttgacatgcgtgcccttttcttctttatcccctttttcgcctctggttttgccaagacgagtgcgctctatttttctgaaaaggagcacggatagtggtatcaactgtatgcattatataggaacaatgatatgtgtgattt

SEQ ID NO: 15829 - DNA, 441 bp, Oryza sativa
agcttgcagcctagtgtgcaaagtagagtgctcaacggagagaatccattgaatcccgggaaatgctttccccctagcctctcgtaccacgtggggtcgcatactaagcaagccaaaggcaagaagagtaagaatcagaagagaaaagcaccgatgcgaactgaagaagaagtacgtaagatgactattaccagcaccgaatggcctccagcagggataactattcctagacgttagagaggaaatactttccgaggtgcacgacagttgacccagcacctcctaagccatggcggcagagtatctgatagtgaagggtcagatcaagtctcctcggattatgaagatgagtctctccgacgtctcggcgaggaagagatggaatcaaaagcatgcccccgttgtggagaaaatggacacattgctagcatgtgtctcaca

SEQ ID NO: 15830 - DNA, 80 bp, Oryza sativa
  unsure (1)..(80): unsure at all n locations
aagaaactcaagctgccccagaagcaangggttcatggtgtcgtctaacttcttcgccgactattattatgatgccgaag

SEQ ID NO: 15831 - DNA, 437 bp, Oryza sativa
gtcacctgcggcatgcaagcttcggcgacctccgtctcccggagcttatcctccgttcgctccgcggcaagggaatcgagaagccgaccccaatccaggtgcagggtctccccgtcgcgctctccgggcgggacatgatcgggatcgcgttcacggggtccgggaagacgctggtgttcgtgctgccgctcatcatggcggcgctgcaggaggagatcctgatgccgatcgtgcccggcgagggcccgttcgggctcatcgtctgcccgtcgcgggagctcgcgaggcagacgcacgaggtgatcgagatgttcctcgcgccgctcatggaggccgggtacccggagatacggccgctgctctgcattggaggcgtggacatgaggacgcagatggaggtggtgaagaagggcgtgcatattgtagtggcgactcct

SEQ ID NO: 15832 - DNA, 366 bp, Oryza sativa
tcttgatcttaccaaccaggacatataactgagcttgataattgattttacggtctacaaaacacatctataataagaatctgctgcattaaagagaggacagttcaaattgtcagctggcagtaccttctacctccttcaaggctgagtcccttttcgcagccagttctaccttggtctttgtcaaggcttctatttgcttctccatctgagccattctggtggcttgcgctgtttgaaatccaaatgctcgaggatacagctatgacagcataaatcaatggaacagatctggaaattaccttttgataaccactcagctcgaagttgaatcctggagctgacaattcctcccttaattcttct

SEQ ID NO: 15833 - DNA, 296 bp, Oryza sativa
  unsure (1)..(296): unsure at all n locations
cacatgtgtgtgcacacctgtgcaatacaaagcgtgtcaagtgtaacatatactgatacacacacatatgggcgccacccaggaaatatgattcattggcagctcaagggtcaatctatataaacattctaagagcactangtntaaggtgctggcatangcttccgacaggtatagtatcatttctaggaaagtgaggtgaacatgtatgctgcagctgtggcatagatgaatttccacactttaccatatactattatangtagtatggtgcttataacttaatcaatatcata

SEQ ID NO: 15834 - DNA, 414 bp, Oryza sativa
  unsure (1)..(414): unsure at all n locations
actaagcttatggctgtgctttgagccctatatttntctgaatgccaaagcctggtcatcctgcctctgagaagagagaccacaagtggatgaatttggccccttcgagagggaaaaggccaagattctgatacatacatgacccccggtcggcgaggcgactcctactattcattccaaccgcgcagcgcgtgacggtggtcatccgtcatagacacaaaccggaaccatcgtggtgaggcggacgtaccttctggaactggacgaccaagcactggctgctacgcgatccgcgataataattctcggacatgccaacaccataagcccaccgggccgcatgtacttgtagcgactaccggcccggagaatacagcgcgaccatcggcccatcaatctgctggcgcgttgcgc

SEQ ID NO: 15835 - DNA, 370 bp, Oryza sativa
  unsure (1)..(370): unsure at all n locations
gcagctttcttttctgccgtccttctattatatactcgcacctgaattggacctttgagtagcatgtggcttaccattgaaagagacaataatttgcattatgacttctctntgccatctgattggaatttgaaaatgcccaactgagatcaaagtaccacagtaatcgctacagcgtgtcactcactacagtaatttactgttacccccatagcttaatggttgtctacagtatagaagagtagaagacaatctagatccctcgaaaccactatctccagcatgtatgattattggtgcatggcagaaaaagtgtatgtaaaacacanaatattacgtgacacaagttattcactctcatatgttctag

SEQ ID NO: 15836 - DNA, 494 bp, Oryza sativa
  unsure (1)..(494): unsure at all n locations
tcacanagcgagggtgagtccgcgccgaagatgcgcgtatatgattttctcacanaggcgctcggaaccaaagaacatcctggccgaactcggggaattggtagcgatgtgccctggaagcatggactccctcagtacagctcccaatacaggaaacggaaagtctccaaggaagagagggacgctcgtttgaaggccgaacttaaggttgaggtcattcaagaactagaagctagcatgaatgcaagggtggaagaaagggttaacaaggtgctcgccgacatgaatataccccgagtcacaacacctgctgtgcaaccaactcctcgtgtacaacacgacgcgagtccgtcacagcatatgagtagttgtgcattcacagaggtgccggcccctggtctcccgatcgcaccactagctgcagtggaccacatcgagggtattgttgttatccgatccatatctaataaaagaacattacacattccaatatt

SEQ ID NO: 15837 - DNA, 455 bp, Oryza sativa
  unsure (1)..(455): unsure at all n locations
agctnttaaaggggttgggaggcggcggtgaatgccctcttcggccggcgacgagaaggaaagttcgggaaaaacgaatccgaaacaaactcgaatccacgaatttccaaacgattttagccgatgtttccaaaggagaaaaggtagaggagatcgagaagatcgtttcccctctattgattcggccggaaacggaaaggaacggccggattggaaagcggcggcggcggcgcgaaactagggtttctgccggaggaagacgacgggcctgacaggtgggccccacctatcatcgggtggacgcgcgcgcgcggcggcggactgggccggctgggccgatgagagagagaagagaggttttgggccgactttctgcccanagccaaaagaagacttttaaaacctttntcaatttaaattatttcttagatgcaattccatttattaaaaatact

SEQ ID NO: 15838 - DNA, 412 bp, Oryza sativa
taattagctatctgctgctgatcgatcgattagtgtatgtgattatgatgatgatgatgatttgctgcagtgatggatgtttgttgtggcttgcgatcgagtgcagggtgtacatgggtttttatagcgttcgtgcctgagagagaggaagaggagaatcgtgtactgtgcaattgtgcatgagagagagagaaatctatagagagaaatgtggtgtggtgagggcataagaatctgttgggggacgtgtggatcgcacgctgaaaatgagcagtgaagagagaggccaactttttctttcaattcgctctttcggcgtaggggttgcacgtattggcctctgtcgttgtcgtcactatagcacaatcattttttcagacgatgccaaataatttttctaggcaaatagatc

SEQ ID NO: 15839 - DNA, 199 bp, Oryza sativa
ccacgtcgcacgggtggaggaggaagagccggctctgctcctggctcatgcaagcatcgagctacctccagcggcaccggccgcagcggctttcctccaccttgatgagccgaaggtactcgtctccctctgcaacggctccagcaacgacaaggctgatgggtggtacctcgacaccggcgccacccatcacatgacc

SEQ ID NO: 15840 - DNA, 444 bp, Oryza sativa
  unsure (1)..(444): unsure at all n locations
agctnggaaagggaatccaaggtattntgttttagttatccttgggagtaaatgctaggtgtgttttttttttaacaagcatggctgagtagtctatattttgctctttgtatattctttcttctcccttgtacatacatccttttattaatatattttcagtagggaagggatcttccctcctgtttatgtcgaaagacagaaaactgacatgtatcttgtactacatttggttaacctgaccgatccattacattcaacggataaaacaatttgagtttcctactaaaatgttttggagtgagacttanagcacatccagttctaatgaacatccaaggagatgcaagcgtcttacagagtaatataagcagtataatgattgatgggctcaacttaagactggatctagatgtgtgtgaaattcagtaaaggtgcaaatat

SEQ ID NO: 15841 - DNA, 439 bp, Oryza sativa
  unsure (1)..(439): unsure at all n locations
agcttgcccgcaggcacaccaaacacgctcttatcggngttcagttttatgcgggcggagcggagattttcaaaagtttccgctagatctgagagtaaggtctcttggttgcgcgtttttacaaccaagtcatcgacataagcctcaacattacgtcctatttggctacccaaagaaattcgagtagtacgttgaaaagtaggacctgcattctttaacccaaaaggcattgatgtatgacaataggttcctacgggggtaatgaacgcagttttttcctcatcctccctagccatgcgaatctgatggtaaccagagtatgcatctagaanacacaaaaggtcgcaccccgcagtggagtcgacaatctgatctatgcgaggcagggggtaaggatccttangacatgcctttgtaanggcggtgtagtcgatgcaca

SEQ ID NO: 15842 - DNA, 427 bp, Oryza sativa
  unsure (1)..(427): unsure at all n locations
tcagcatgcattccaacagggtaggcacctgagaagcttcatctctcattggaagcgagttcaaggtttcttggtatgttggagggaggcaagagtactccggaagagctggctaagggttctgcacataaaaccagtttgcatgccagcctttgtttgatgttttgaagggcatagagaaatatttctggctcagggtcccccttaactgaaaaccggctcccccaacgacgcacgacttgctcttgtttggctgaggcttcangaagaagatgcggcggaataaggcanaatgcgacctaatccctagaaaagcctcgtatgcatggatgaaattagcgatgtgaactatggaattggggttaggtgatgtaagctaatcccataaaactctagaattcccctgaagaactttgaaggtgggaga

SEQ ID NO: 15843 - DNA, 342 bp, Oryza sativa
  unsure (1)..(342): unsure at all n locations
gcacgtacaccggcggagaaacaatgtttacagatcataaacaccactntaattagttaattatatacttggtagttgtcaagcccaaagttatcatacaaaatggaaagaccatcgtagctgcaccaacacgagcatgtaaacataataaagctggcttgacgctcacatgatcgcccatcggcaagattcttcatatcgggctaccgacttgaaattctgactactcctcatcctaaatgttgacaccgtgactttaaaatgttgacgtctctattaaaattaagcatataatctttctacattgatcatgtaaatacttaattcaatagttattattac

SEQ ID NO: 15844 - DNA, 396 bp, Oryza sativa
  unsure (1)..(396): unsure at all n locations
ggcgctgttagttactccttcctaagctgcacttgctatttactgatactagtaagcaatntgcttctactgaagtggtgtgatggcccccctctcttttcagtatttctgtttgttgatgcatcaagttggccgttgtgacatgtactgcactgacatggctgaaatggaatacgatggcaagaggcaatttcctaccccgcgttgcatctgagtaactgtggcgaatgtttgttgtgtttctcatatggagtgctattaataaagattcagtaaatccccatttactaccatcatgtcaccattgngtcagtaaatcctgagaaataatgctgatcgtaccatgctaccgcatcatcggntgtactagagtatatgcccacgcgactcacatga

SEQ ID NO: 15845 - DNA, 413 bp, Oryza sativa
  unsure (1)..(413): unsure at all n locations
agctntttttcacccctaccgccaatgtccaatgctacgtccttgaacgatagatagacgacgtcctgcatgagcgcttaggtacacatcaatcataatgccctatcacctaccgtctctgttgggggaactaattaaaattctaataactagctggttagtaaaccgcttatgagaatccagagaagctgaaaaatctagtttctgatgtagttcattttctaacatctatacctacatattctcagaatttggataagagggagctagatcttctagaagaagttgcaatagttagaagttctcctaaatagggctatagatgcgtactgagacaacttcatttcctaaatttagattcatccctctgtcttacaaaaaaaataaaggaanaatgttgagttaattcccgg

SEQ ID NO: 15846 - DNA, 423 bp, Oryza sativa
  unsure (1)..(423): unsure at all n locations
taccacggngaacggctcacactgagtgtgagtgtgagtttttgcagagtacctgaatctatatcttctgaaaaatgagtgtactggaattttacctaagaattaaattgtgaagtcattttttgttggaaaaaagttttttttctttttgtagattcatgggtcattgtcggccgtacattatgatccaacttgaaccgattgaataaacaggagacctagagctagaagttggtaagatgtccatatatattaatggttataatataatgtagcagaaacagaaaaatcacataaactttntatgtcaagcatccaacgctaacggaggcatcggacgccctccttccctgtcttcttctctccctcttctccccttcccacctctatcatattccaacanatagcaatctagaaaagtga

SEQ ID NO: 15847 - DNA, 394 bp, Oryza sativa
  unsure (1)..(394): unsure at all n locations
aatatttgacatatntgtattgttgagtttacaacattatattctaagggtgtgcgtttttcaccaaaaaaagctatacgaaagttgcttttgaaaatcatattaatctttnttttaaaaatagttaatacttaattagtcatgtgctaatgagtcgttccgttgtacaggtcagagggattagtttccaactccaggagatggacatagcctaactgatatgtcatctttgtataagaattaagatgctctagaatattaactgctagtgagtgatgatgttgcatcattccattgtngagtttagtttctactaattggtagtgtgtaccaactatatatanaangtagatngggccaccactaataccatgggatgttctaaactgtaata

SEQ ID NO: 15848 - DNA, 441 bp, Oryza sativa
  unsure (1)..(441): unsure at all n locations
tgtgtcanatatcaagaatccagtgccgaatatataattgttaagaagagccactcgcagaagagaacagacatggtgtgtttagttcacgctaaaattaanagtttggttgaaattggaacgatgtgatgaaaaattgaaagtttatatgtatgtagaaaagttttaatgtgatggaaaaattataagtttgaagaanaaattggtaactaaactatgccatatacaaaatcagcaactgtcaaaatctatgcctctgctaaagcaacgagtagacgtgtagactgccagttctgcagcagattattgctaaagacgcccaatatgtgcagcataatagagttgcctttgaaagaagtgacttnacaggtgggggtgcgctagattggttttcttttctttctatggtggcaggtcgggaatggatgccaccttaatggt

SEQ ID NO: 15849 - DNA, 384 bp, Oryza sativa
  unsure (1)..(384): unsure at all n locations
agcttgaaggggatntactaacaggaactatggaaaaattactccgtggtgatggactttntgcctgctgctctgtggcggaggtgctgctttagtgccggccacaaagggttgatgctgctcttgggtcgggccgtcgtgggacgacgactgccagccttagcccctgagcccgacggcggagggtctgcgacatggcccgctaaaggaagcgctgcacccaccagcagagcaaacgctgcgcaatgcagaggcggcggcgagcggtagcagcggtggcggcagttggcgggagaggaggcgcgtgagcatgaagactggtggtagtgaacggcggcgcactagtcagatggctgggttacgatgttcacacgtattcgaaat

SEQ ID NO: 15850 - DNA, 330 bp, Oryza sativa
  unsure (1)..(330): unsure at all n locations
tcggctggggttagatgcaaacttcagttctttttcattacatcaacatgncatacacacacaacttttcagtcacatcatctttaatgtcaaccaaaatccaaacttttccctcaactaaacacaggcttcagcaacaagctaagcagccaccagagatacacgagcagcagcagaagcaacaccaaatctaccaatgtcaaaaactttataactctgaactatcatatggaactcttcaactgtctccgcttcgtcatcagaggcaatggaaaggcagcttacaacttacacgctgcggtattacaagaacactggtggtataaattt

SEQ ID NO: 15851 - DNA, 439 bp, Oryza sativa
  unsure (1)..(439): unsure at all n locations
gcttgtgacttgtaagctnggagaaagattgactagatgcatgcattctcagcacctgngctagttgatgactgtcatcatgctgatggcaaaaacatctccataattgtataatttgtgtttaattcgcatggataatgtgaggagatattcacgattagcacaaagaagagagagagagaagagtcagaagacaagttcattactccctacaaaagcagcaagcagcaggtaggaaaagtacaagtcttcaataataagcctgcacaattaatggttccatgaatgcacgagtggtcctagttgaaaatttatgcacacacaggaggaagggagaggtggngtgaggtcgcttttatggatttaatgcaccctccatgcttgctaaggaacaaaacacatgcacatatatcaaccctttgtgatctaagctttcacc

SEQ ID NO: 15852 - DNA, 458 bp, Oryza sativa
  unsure (1)..(458): unsure at all n locations
tcagaaccaagagcattaaaaatcaggggatattaaatcttacaataatgcatatgcagatgatatgcacatagacaaagaatagatcaaacaagaaactaatatagctggtagtaataaaatctcaaattctacaaatcatattcatgatagcaaaatagagatggtacagcacaataggtctggccaatgatgaatgaagagaaagaaacaatgaatactgtccttccaagttaaaatgggaaacaaatactcactttatcatcctcatcagactcctcatcagagctgctatcagagctgctgctgtctgtctcaacctttnttgatccattggtagcaagtgcaactggcttcttcaaaggggcagcaggctttttcacaggttcatcatctgataaactctcatcactgctatcatcactgctgctactgttggtagaaagtgcagccttatt

SEQ ID NO: 15853 - DNA, 362 bp, Oryza sativa
  unsure (1)..(362): unsure at all n locations
agcttggcaacataacatgctttcaagtgaatgtcggatgctgctacgtcgctttgcgcaagcttggcaatgatgactcgtgtttgggctccgtcgatggtctattctgagtgggttgtagcgttgagttgatgtgcgtgctgtgaacttgttcggccgacaacaatagcatcctttgttttctttttcttgtaactcgtctaggttnttactcctgcttattgaaaatataattggcagcctctgcctgccggtttagtttcaaaaataaatggtaaatggtaaaagttttagtggtaaaaaatatagcatggagttggtgtatagatgcatcctanacgtttaccaatttagcattaaaa

SEQ ID NO: 15854 - DNA, 427 bp, Oryza sativa
ataaatgtgcatgacgcgttctatctaacttgcgaagttcgatatgtcctcctcaccgaattaaggaagaaaagaagagtgtgcatgtatgatggccaatcgaactacgatagttcgatatatcctagctactgttcagagtaagattgattgcttttatgtgtttttaatcatgccaacatcacctgtcgaaccaccacagtttgaattatggttgttcgacatgtgctaaatttgttatttcatccaacacgaatttatttttatatctttttattaaaaagctattatttctgaacaaaaaaatcagctagtgacagcactttctaagtagctacctcgctcccaccgacttctccacattaacagtttctccatctcttcgtatccaatcttatcattgtctgccaccgtcttctcatcttga

SEQ ID NO: 15855 - DNA, 182 bp, Oryza sativa
gatcctcagagcctctatgcaagggtgctacagatgatcttatgaatttcatgtattaaaacgtacatattggcactctggctaaagctcttcgcttattggatgctcataataagatacaggattaatgatatgctccagattctgcagaaccttgtccatatggaaccatactaagattc

SEQ ID NO: 15856 - DNA, 380 bp, Oryza sativa
  unsure (1)..(380): unsure at all n locations
agcttaagcgtagaaacgacgaagatgttcaatgttccatgagttgtcaacgagtgtaccgtcttcgcgcttgagtcgataggaacctggtcgggtgacttcagagatgataaatggcccttcccatagaggagataactcgtgccgatctcgtgtagtttgaattttcctcanaactaggtcgccgactagaaaggcacgggatcgaacattgcgattatgataacgtcgcagcccttgtaagtatcgagccgactgaatcaaagctgcttcgcggacttcttccaatcggtgcaagtcatccactcggtcctcttcgtagcgttcttcacggaaatttcgaaagcgcanagactcgaattcaacttcactcggcaaca

SEQ ID NO: 15857 - DNA, 393 bp, Oryza sativa
  unsure (1)..(393): unsure at all n locations
ccgaatagatggactcgntcgttcggtcgggcggagcatatctctatgtggaattcgtgaaaaggtaccacactcaaatcacatatgatattatgtcaaacaaatcaactagctaaaaagctaggaatttatgtagaagtctgggctggtcagagttcaactcactactcgggctccttttcagntaaggatgcaagggagacttccatgtctggggctgacagctttcgtgtactgaatttctatgagattctcttgtccgcgggaacaaaaagctagtaaattcagtacacgaaattaggatattctagacaacgaatagctatacaaagaaaggaatgacaatgagtgtggaaatccatctcacanatcactcctacaggaggaataatc

SEQ ID NO: 15858 - DNA, 423 bp, Oryza sativa
  unsure (1)..(423): unsure at all n locations
agcttaaagccatgaatcccttntatacgtatctggatctggatcctgcagaacaaacatataggatgagtagtatctgatataaatataatactcgaggaaaacttaagtattttaaaatatttataaatatgtatttcttctcttgtcaattttgatttccccgagcggatgactccttacgtttaaacactatgcccaactagtcatagcccccaagcactgggagtcggcctatgcactttctaaacatgcatgcgagtgacatgagttcatcattaatggaacaaagtttcacggatcagagtttactactcgggtacttcngcaattggtaagagcacaaaatagattcatcttatctctatgcttttgatttattccngataatacttagcaccttgtgttactcgggccatccaa

SEQ ID NO: 15859 - DNA, 446 bp, Oryza sativa
  unsure (1)..(446): unsure at all n locations
gctgggatgtcatggcgggagcgggacggcccaacccgatacttttttcgagcacatagtgccgngatctcagcgtgcctcctgtcgcggcagagaaaccgatgtacgcgacatccttgagcagctttgagaggatgtacctcgctgagaccaatggcctcttgggtttggcgacggcgaggggggccatggtcacgtcgatccgcgttgtctctctgtcgtagtccacccacacctgcatggcctttccactgatcaaggtcaagttgcggaagccattgttgttgtcgtcgtcgttgtagtatccggcagagtaagagcgcacagactggaggctgttgatgtcgattccaacatggctgtcgttaatgtcgcggaactcagtcgtctgcatggtgtcgagctcgactgcgagcaggcgaatgcccgtgtcgccgtcgctggtg

SEQ ID NO: 15860 - DNA, 444 bp, Oryza sativa
  unsure (1)..(444): unsure at all n locations
agctaggaggtctcccgtcgtggntgattcccacgggctgggtgatccgggttagtaatgtcgtgtgggtaaagtgtaccccctctgcagaggttatcaaactgttcgaacagctgtgcccacggtcatgggcggatgtgaggtgattcctagcgtagttntgtttgactactgcttgtgaaattgctgttgtggaaaggggttcgatgtttgtaaaatctgcagctgatgggatcagctaggcccgggtggccgtttgaaagttgttggcccgggtggctgtttgaaaagctgttggccgggtgccaaccttgttttcaaattttaaagactaatacattgcacatactccgaccggacgagacgcactgtctcaaccgtgtcgtttgagaagcactcacttagttgttttatgaaagaagtcaataaatcactgcataacac

SEQ ID NO: 15861 - DNA, 377 bp, Oryza sativa
  unsure (1)..(377): unsure at all n locations
aaaatcaagggcaacttcaagttcactggagagtgctagctagcatcttaaacggcatgcaatggatgtgagattaatagtgcatctatcttcgccatgtgtgttccttttctcttactgcgacccatttgtttgctgacaactatgaaaattctatgactgttaactgctgcatgccaacaatntgttgccacatatatccttcttaactcaaacggaggtgggctctacactttttttataaaaattacattacaaaactagcctacattagcctggtgtttggacagatggcgccgcccgccggcctatttaaacccatccacacttataaagctctacgtcggcataacagatactgttccattggttattga

SEQ ID NO: 15862 - DNA, 457 bp, Oryza sativa
  unsure (1)..(457): unsure at all n locations
agcttccctccaatatcctcaacactcatctcgctcattaccctaatctcgtcgggcaccaccgacatggccgaatccctggtcgccgccatcgacgaccactccgtcatctccaccgagatcccgcactccgacctaggcgagaaggcgagcctcgtcgacgctgatcaccggatcggggatgtgacacgagcaccggcggcggcggcggctgaggaggagcacgggcactacaccagcgacctcctccgccgcgccgaggtgagcaagctcagcgaggacccggngagggaccgcagggaccgggaggccacgatgatcatcctcacattntagcaagaagtgaaaactctagatcagaataagtgtcttagtccttgtcaaagatccaatggctacggaggcctataaatagaggaggttntctcttgccatgctatgagaatgtgagcatgag

SEQ ID NO: 15863 - DNA, 442 bp, Oryza sativa
tgcacagctaactcctgctggtgccaaggacatgatgtttactgaacctatgcactggagtagagcttggtttatgatacggtccaattgtgatagtgtagacaacaatatgtgtgagagcttcaataattggataatcgacatcagggcacatccaatcatatctatgtttgagggcataatgaccaaggtttatgtgaggatacaacagaacaagagcaaagcaaaaggatggctaggtaggatatgtccaaatatcttgaagaagttgaacaagtacattgacttatctggaaactgtgaagccatttggaatggaaaagatggatttgaggtcactgataatgataagagatacacaattgaccttgagaagagaacatgatcctgtaggtattggctattggcatggtattcttgtgcacatgctataactgcatta

SEQ ID NO: 15864 - DNA, 435 bp, Oryza sativa
  unsure (1)..(435): unsure at all n locations
agcttacaactctactatgttattcccatgaatacaataggaaattagtcgtttaatagctactgaactcgtactgccaggatttagataatttggatgttctttagttcttaggaatcaggctgactaaacttagcatagtgttataatctctttcctggatcactgtgcatttttttacacatattaatatgttntcagcaagagactgggctgtgcaagaatcttcttcaggagtatgcacagaagatgaattatgccattccatcttatatttgcaccaaatcagcctcaggcttagctcctttcatatgcactgtagagattggtggaatacaatatattggtgctgcagccagaacaaagaaagatgcagagataaaagctgctcgaactgctcttctggcaattcaaggtattgntctcgtcttctct

SEQ ID NO: 15865 - DNA, 454 bp, Oryza sativa
  unsure (1)..(454): unsure at all n locations
tactcgctacagaaatggtggtcataatctttattcagttgacgggcttcaattcattcatcaggttcgactgaacttgctgccgttggagtatccatttctatcttcaatctggtatgcaagctgctcaatgtgccattgctcaatgtcaccacatcctttgttgccgagcagcatgcagtggatgcagctgaaagtaagcaattcgcaggtcttattttctttgttataaaacttaaagccatcttgcttgtttgcataacactgattagtttttagtcctcgcataggaaatgaaatttcaataccccaagagaaagcaagtaaacaaaggaggtttcttccagcgggctcaacatccttggctctagctgctggcatangattgatggaaatggtggcactgatacttgggtcttggacactaatggacatcgtggtatacctgtcgacg

SEQ ID NO: 15866 - DNA, 438 bp, Oryza sativa
  unsure (1)..(438): unsure at all n locations
agcttagctacctgcacgaatcgagctgttaaaacagtgagaaaagaaaaaaaaaaatccaaacttgttgggcaaatcagcatctaatcaagtaaagagacactcattcgaccaccaatcttgagagttgagacagaacagccccacaatctaatcagcaatgccgtaacagcagaagaagacggtaacgatccgtcagataaagtaaaaggtgaagaacacaagtacgccctggttcttggctcttgcagcagcagcaccggactgaccgagtgaccaacaatccaaccaagaacaaacccaagccccaactcacaagaactgaagaacccacctgcggttagcatttgccccttctcgaagactcgccacaagccaacanagctagagaataataataataattataataatcataataataattataataataat

SEQ ID NO: 15867 - DNA, 347 bp, Oryza sativa
  unsure (1)..(347): unsure at all n locations
gacccggatcctctaagcaccgcngctgcagcttgttctttagtatggacatttactattttaagcagtctggtttgtattggtcttggagattgatctctgctgtactgaatacagggttttgccgtggacttatgtagcatttccttttagatttggacacaatgcatgaattctattggttcttgagggaacctttgggtcagcatgctttgctatacttatagatccatgccaatgtaatgccgatctatctcatacaataagcagcaaccattgttaactaataataatattttgcagatttttgctggagttcttttctttggtttgggtgtcaagtttat

SEQ ID NO: 15868 - DNA, 431 bp, Oryza sativa
tgaactcagctgggtttcttcgagctcttatatatatctttctagacttgtaaactcttcacgaatgttccatgtgaatgaaacgtcatgtaagaaaaacatctatagctgtgcacaaccatgttcagtcattcagatgacaacagtgaagtatgagtgttcatggataattccatcagtgcactaattgaagattcatatagtataatttttttgcaaaattcagtccatcaaattgctgtaaatgattccatggactacttaagaaataagtttctcatggacatagtttagttctgtggtatctattctttatttgatgcagatacagtgataatagttatctaatttgttgtgatgttcacagaatgaagaataatagcatcgatagctttacggcctcagtggctagaaatgagtctgtaattatt

SEQ ID NO: 15869 - DNA, 448 bp, Oryza sativa
  unsure (1)..(448): unsure at all n locations
agcttgaaccttngctcgtcccgagtgattgacgaaaggaaacaatgacttggttggtgatcaggagttgctactatgctgcatatctcanagatacaggtgcaaggtatatgtactctctcttagattaaataattnttggcacggtggcttacccttacccctgattcccacgagacactgcttctccttgccttgagcggttgaaagacagaacagcaattaaagcaccaatcacccgatctttattcaactcttgttccggaagttttcaaatgattttgaaaaacaaaaccaagttcctcaagtgattcactcagtctctctaagtgtatcaaaatgaattcctcaccaaatgttgccttgttgattcctactctaagggtntgatatgtggcgctcggtanggatcaatcatggtatacttgcattcacatttattactaag

SEQ ID NO: 15870 - DNA, 239 bp, Oryza sativa
tcaatcttctacagtgcaatgatcactaaaaagtcgcctttgctacaccaggtgccgcatcatcttggtgggacaatcacatggttacccacctgccatgcacagaagtcacttgggcggagatctgttgcagcttcatgaaggcgcaagtgccagacaggtgtgtgcacagaagaagaggaattccggcacttaccagcgcacaggacagtgccgagacctcatgattcaatccctac

SEQ ID NO: 15871 - DNA, 394 bp, Oryza sativa
  unsure (1)..(394): unsure at all n locations
agctntgtttgatttactttangattattataatctaaattattagaaataagctgaaacaaacagatagcttattatgatagattattataatctataaaccagattactataatctaatctagtaattcactataaatgtgcttattttagattattaggttgctaacagctaacaaacagcttataatccagagaaacaaacagctcacagcttattctatgtcggcttattataattcagcttacagtaatttgactcaataatctagattataataattntaagctgaaacaaacagggcctgaggctcgaattatagaggacggatccacatgttaaggatcaggctcgtgatctttctcagccggctttggttaagaattattattc

SEQ ID NO: 15872 - DNA, 411 bp, Oryza sativa
  unsure (1)..(411): unsure at all n locations
aactcagcttataaaaaaagaagtatggaccctgcacaactcatttttatatttcaccggccggcctgcgcattattactacagaacttggcgtttataacctgctcattaatgggatgtttaatgaattgtacacgactgtattcacgaagtcaacgcttggctttgtggatgatacgtatcatacgcacatggtgattangcgaaagcaccaccaacgccaatagaggtgacaggccacacggagagggagtgagctcacattgacgccatgttatcaccaccctgcagccaagtgaaaaattatactttcacgcagagccatgaactgaatgaggatcatgacctccctcgtaggaaaaatcctacgccatactttgtttttccccgtcttccaaaactaaataataa

SEQ ID NO: 15873 - DNA, 369 bp, Oryza sativa
  unsure (1)..(369): unsure at all n locations
aagcaacataagtacatagtaccattgaaaaaatataanaacaacaaagccaaaaaaaatatacgtacgtaataccattgaaaaaaaaaatggatgacctttaaaatataattntctattatttaaagataaaatatatcactctataaatntaagcaaatattatagttaattntcacttanattagtgaacccaatagtttagaccgttagaatagatggtatttattaaactaataccttattactctgtgtatgggagaatatataactattggctagaaaagacaaagaaaaacataagtagcctttctacaatgctctaaatnacatgtggatctataacgctctaagcgcacgtgcacttat

SEQ ID NO: 15874 - DNA, 473 bp, Oryza sativa
  unsure (1)..(473): unsure at all n locations
actcagcttgtgctntactattaagataggccttaatatactctactctactagcacgtacttcatctgtcccataaaatactaaactagaatcagatataacacatcatattactatgaatttagacatatctgtgtttgtgtttagattcgctgcagtagactatatcatatcattaatntttttagacgaatggatgtgttggtgcagttgaggacttgggggtcgtacgctgcatgtgtgaattgaccgtgtaaatttggagacttgttactcccaatcttcttctcgattgtcaacctttcatgcttgtcctggtcatatggtactactcctgtcctgtacttgtgcctaacttcaagataattaagcagtaccaagtctcatcctctgcgctgctcgcccttttgactctccacatgccaacacacgagtgaggacaataattncacatgcaccacaccactgtagt

SEQ ID NO: 15875 - DNA, 462 bp, Oryza sativa
  unsure (1)..(462): unsure at all n locations
agcacctgcggcatcaagctattgngtgtatctatcatgacaactcatttttttttcgtcatccctatttctggattgattccaaataatcaacggactagacctcttattcgatcattaaccagatgtgttcattnttggtaaatagcagcgaaatacttacgcatttattagatctcataagaatgatgtgctctgctttcttacataaactgatgttctgttctaaatcaccaactattctgtatttctgtctgtaggtgaaacctgtttctctggaaaaagtcttgtcaaagtgtgcatacatgctattttacgcaaggtaaaaacccggttttccctgctcttagtcaatgatgacactgttatccagtatatnttgtagcctcatttttctgggtatccttaattcctttaaattaatcgggaaatatcaggtgttcaacacgggcaccaaactct

SEQ ID NO: 15876 - DNA, 386 bp, Oryza sativa
ccttaaaactcagcttgtcaccctacttgatatcgggattatggactttctatcatagaagaatcacatacacacaggagtagggtattacgcttcatagcggcccgaacctgtataagcctcttgtgtctcatcgtcttggaggggcctaaccccctcaagatcacatagcttcgctcaccgagccctcgaatcttacccgctgcccccggccgaactcacaaaggggcgcctcatggtttcctagtggaggagttcattctccgacatctggcgcgccacgtatggggcgcgttcgcgattttgaggttctttcgagcgctggcgtgataaacaccgcgccgccgatgcggtgtaatgcacaacctactcatgagtgtcgcgcg

SEQ ID NO: 15877 - DNA, 233 bp, Oryza sativa
  unsure (1)..(233): unsure at all n locations
ctgcacttacacaggactatctattcttctaatctgatcgcttttggaaataaaggacctcttntcatttttctcttgggcggttaatacctttttggcaatacacttatgcccacttcctgcaaactattctgtgctcctttgcattcgggcttatgccttctactactgatataggatcacaggactaacactatatcttctcacatttaactaagcaaagcttctgatta

SEQ ID NO: 15878 - DNA, 407 bp, Oryza sativa
tcacctgaagatgccgcttcgataaaattacccgataatatttttttttacaggactgattattcagagatattgtactgcacgtcgcgacgacagctagaacccacttccacaatcttcatccgtaaaaaatgatagaaactcgtccatgctcaatgcacatatataattcaattactttaagaaagaaaggtttatttcatcttccttttttgcatggactaataactagcttgtctatatatacaaaaggaaaacaacttgcatgatgaaaccagctagttgaaataattaaaagaaaatcagtggacaggattggactgaatttaaaacgtgccatttgagacaaggaatagttacgatatacagtccagtaaaaaacatacgacattgttaattatgtactc

SEQ ID NO: 15879 - DNA, 416 bp, Oryza sativa
  unsure (1)..(416): unsure at all n locations
taagctactctgagcattggtttttttttcccgcctttctttttccgatgggtacaccaggactggcaaccgcacgacaggcgagggcagcaacggcgaagaacgcgctgatggcgtgcaccccaacagcgattcggcaatggccgccccacttccgagaatacacgcttgcccagtatggccatatactcagatgatggagccatgatgcagcagatgcagcagcagcaccagcgatgcaccagagatgatgcacacgccgaacagancaccagcagtttggtccctcccctcatcaagtgccggagttctactgtagccaccactttcacccaccacctaggggaaagatggtctgcataaaaaactaattctacggcatgcagaaagtgtttgcccacacttagtctggcact

SEQ ID NO: 15880 - DNA, 423 bp, Oryza sativa
cccgcgacctctaagtcacctgccgctgcaagcttaatactactttttgtatgcgcttcttgtacttcgagcccaaccacttaaatgttgtctcaagagggcaattctatgactccaacgctccatgggggtgtcccccttatttatgttgtgccatcctttaaggaccatttcatagaaacctgtccgttgaagccaacctagttcatagcggaaaagaggtgtccaaaatgggcatgtgaaccacatctaacaataataggtgaatgatctgaaatggcgtgcggtagtgctatgcatgttaccaaagggaatttttgttcccattcagtgatcattaacactctatccaacttctcataagttggattttcaaggttatatgcccaagtgaactgcctccccgatagaacaatttctctc

SEQ ID NO: 15881 - DNA, 413 bp, Oryza sativa
  unsure (1)..(413): unsure at all n locations
tggctctngcgcagaagctatatatctctacattttctctcacacgttgacacaacaatcctttcgctctccacagccattgatgtgaccgtttgcccaccgatatgcctccccctcctcaccttcccaattctaccgcgtgcatgttattctgctctttcaaacatcgctgcatgccccctctctattgctcctcccttctcgacgcagtgtatgagacggtgcacggaccagatctgatatccaaacctcggtgctgctcagggttaccaccagatctagtccttgtagcgcttcctccactactcggtggaggagaactgnttgcctaccgatgtctctcccacttgtatccccaaccctaccgtggngatgtccttttgctgtccaaacatcgctgcatgcctcctctc

SEQ ID NO: 15882 - DNA, 395 bp, Oryza sativa
  unsure (1)..(395): unsure at all n locations
agctntccctcttagtttgctgaagacattacactgaacaaccactctcatcaatcatctgccgaactgccctccacttatcatcagaatttagtccccttacattccagcacaaaacattccaatttctagtggagctattcataggagaacaaaagataatatgagaaaacagaacataatttaattacattctgacaaaagtcacagactgacataataagaaacgtgaccatgaacaaaaactgatgcttaaccgacaagacgaacagaataactgagatgggtgacttaaagggacataacagaatttgagagaagggacaaaacaatgtcctaacaaaagacctatccaacctaaggacctgcaggacgcaaagcttaattctcttcat

SEQ ID NO: 15883 - DNA, 423 bp, Oryza sativa
  unsure (1)..(423): unsure at all n locations
taagctgttagacctttcttccattatgggtatgggatgcattattaatgtattaatattaaatactttttatgataacatccatgtttagtgacacttaaaaaagaatcacggagaaatttaaccctactggatttcctcctatgtatcatgaccaaataacgaaccatatcctgtgccatatatatttctaatgaaaattaatatagtaaggataaaatttgtcatataatattaatagccctctttagaggacaattacatgcctacaattttcttttatgtacatgtttatggagttcttttgctgacgttgatgagaagaggattgagaagattgtgaagatacataanacgacgtgagccattagcgcatgattaattgagtattaactactttaaatttcagacatggattaatat

SEQ ID NO: 15884 - DNA, 408 bp, Oryza sativa
  unsure (1)..(408): unsure at all n locations
agctgtgttgtatctgtcgctctttttgttgtgtgttctgtgtctcagntcgntgcagctaaatgttgttacttggttgcttttgctgctaaaccctagtggctggttgttcatgatttttgtaaggaatgctagtgatgaaagcattcttgtgcttttaacttgctctcgtttaggcatttgattggatatccctgcccaacatcaaagatttcctttntttatcttttagattgccaatgtttagcctttgtctcatagctttgccctccactagtctgcaatctgagttttctgaacattcttgtgttctacagcaaatacccctgtaatgcggttcacaggatgaaagctctgcgtntgctatttgtaattgttggttgctgattcatacagcactccatatgt

SEQ ID NO: 15885 - DNA, 401 bp, Oryza sativa
  unsure (1)..(401): unsure at all n locations
ntggcttcccaacaatccgtagataggaatctacctgtttatggaatacaaagtgtaaactaacataccacggaaagtgaactaagttaagaatcatgcatcaaattcaagttcaccatgagaactttttcagttgaaacagcaggaattgatacatgcactggttcactttagtccatatctgaatggcaggcggggaatttacatctggtttacaggttgattcatcatgcgtaaccagaggataacataagcttttccccttacttcgattataaattaaccaatcagagtgaaagggtcacttatgcctacaggagggggggggggcgaatagactcatgccggactaatattccttcatacattctaaatngaagcattagtcctcactaattgga

SEQ ID NO: 15886 - DNA, 434 bp, Oryza sativa
  unsure (1)..(434): unsure at all n locations
agcttggcatcctcttgaatgttnttntgcctttgcctccttgctctgcaacatggctcaactgcagatgtggtaagtaatttggaaagtaatttcaattcgatcactaggaagaatattttagaaacaagccctctattccgcaattttcagatcgccatagtattgtagcaatccctacaacaatgagcttatgagaaagtacctcaataactcaaggagtgaaaaaaccagctgactcacatttctgggtgggtcatatgaaagttaaagacaaattcttagggttggaatcttttatgatcaatgatggtaagcaagttacattctggaaaggtaaatgggttcaaaattcttcttttaaagagcagtatctatctttgtgtatattaatcgtcagattagtcaccaatttcaactgtgaaatgggtatg

SEQ ID NO: 15887 - DNA, 340 bp, Oryza sativa
accttatgatgttgatagccggcttgtgctcctgtatctctccctttagcactctaaaagctaaagtaaaaaaataaataaataagtctaaaataatctacaattaagcccgaaaattaaaattctgggtctggcttattatccaacaaaccatgaggaatataatataacactaagattaggtaggggtcaaaatttccgaatttcaatcctatggaacccccgccccttatacgatattatattggccgaatcttttaaaaactctcatgaaatacggcaatattttctcaaatctgactacaatttgttcacatttcagaaatatgccatatctaca

SEQ ID NO: 15888 - DNA, 410 bp, Oryza sativa
  unsure (1)..(410): unsure at all n locations
agcttatgatatagagtttataattaatatatgtttaatactctaaattagtgtctaaatatccgatgtggctgggacttagaataagtcactgaaaccaaaaatgctggatcactgaactccgccgtactgtgcgactgtgcacacacacctcacttcacgattaatgtccacagctgcttactgctcgaatgctttttttctaaaaaaaatatttgccgtatatacgacgcgacttttgaccgtgacagaaatttcaaaaatatattttcaagtactacatccgttctaaaatatagcaatctagtactggatgggatatatccctttatctagaattatttattagactaggatgtgtcctatcgagtcctacattgctatatnttgtaatggagggagtacttcac

SEQ ID NO: 15889 - DNA, 327 bp, Oryza sativa
  unsure (1)..(327): unsure at all n locations
ctgcacttttttattaggcatatatagatatanatatatattttctaaggaatcgatcataatattgcaacaactttaaaaggctcaaaataatgccaaagaagattatgtacatgactaaccggcctaaaaaattggccggcccgtttagcgcaagcgcacgagttgatcgcgcatcgagttggccatttatcggctacggcccatcgcggagtgaactgagcacggcccagatgacatccgcggtccatagactacgtggcccaacagcggtggcggcctgacccatggctgaactgagccatcagatctgatggatggctcgga

SEQ ID NO: 15890 - DNA, 366 bp, Oryza sativa
tactgaggattctgtactggaaaacatgtcaaggcagtgtggcgttgtgctgtctgtgaatacatgtttctttgagagggaggagcatgagagagaacgccagatttttttggcattctcaactagaatgagaaatatgaatacactcgtcgaattttggaagatgtgaatctgccaagatgtttgcaagctctacatacaccatttgtttgctaaggtgttttcagtaaaattcctttgggcaactgcgacaatggttaatcaagaaaatgatggtaattaccaagtgctttctaccacatacatccacattgatatatttcatgggcaattggcatgttgtttatggctatattacattcttat

SEQ ID NO: 15891 - DNA, 397 bp, Oryza sativa
  unsure (1)..(397): unsure at all n locations
tgatatttgctgagctgaaaccattttcatcccaaaatctcataacatgaactgaaaaaaactgagaaacagtttgagccaacaaacaccattttcaccaagtcctatgctaatcaaatattccggaattcatttcagtaaaagctaacttacaagaagttttaagatcagctgctagcacacttcatgatccaaacaaccacttcagtgttaacgcatggttgatcagttattagagcatggccaaatttaatccctaaatcttcatttaggacatgaaaatattctttcctccaaccaataacctatatttgaattcttaaaaaaaggggtcatttntataaactaccaacacaatggtattctcatctctcctcatggatggttgatcatctac

SEQ ID NO: 15892 - DNA, 193 bp, Oryza sativa
  unsure (1)..(193): unsure at all n locations
cataatggacactacacactattacatagaatttatccccgcattgaagccttacatcagaatatgctatatattcttactatanaagaactgtgtngaacacaaataacacaatntanacaggtattttgcatcttcaggctaacagtcttgtcgaatcatgatntaacccttatttgcaagtacaaatatg

SEQ ID NO: 15893 - DNA, 444 bp, Oryza sativa
  unsure (1)..(444): unsure at all n locations
tcctagtaaacctggccagaacagttgcatttactattgtnagntctgtcaaccgtggatcatacatgcgtgcgagacatggaaggctatggagccatgcgactcgtacttaccatcccagctctggaaagtagcattgttcatggacaaatccatgaactgaaactccgggaatgaagagaaaaccagtgtgtcaaaacgccaaaacgagtgaccgagtgcatctagcacttcattagaatcatacacgtttgagaaatagagatgtgatactcgcccagtgatgttgctgcagttgacgcgctcccacaagcagcagtcgtacgcgcggtaccatgaacgcagtgccgtgccatatgagcgcgtcagagaggagccgaagtcattagcgccgttctctcctccctgaacagtcatgggaagacgtggagatattggaatctc

SEQ ID NO: 15894 - DNA, 409 bp, Oryza sativa
  unsure (1)..(409): unsure at all n locations
atctcatttccacttgtgtgtacttgtacactactgataacttagtttatgctaagactaggttatggaactgtgggatgtcttcctcactagctatgtgtacttgtgcattactgacaaacctttgttatgataatcgcttacactntcatttttagctgagttattgtggnggttgctcaagaactggttactattctttaccttgtactttctatagggccatatgttgcatgggaagattgaagaattatttagttctttggaagacaagtttacctcagtattttccactgcacttctaatctgtagtaacgttcgcgttgatgatgtcacagtacatctccgatatcttgatgattccatcttgtcctattgaggacacatgaccttcaatttggtcctgagc

SEQ ID NO: 15895 - DNA, 372 bp, Oryza sativa
  unsure (1)..(372): unsure at all n locations
gcttgaaaaagacaagagtttgcatattactgaagagtggaggatattaatggatgcacaatagcccttcgtacaaatgacttgaagattgcttaaacactatcaacagtcagctaacatataaatgacatatcaatgcaccgtaatatatatagataatttgcttgctgctgcaatgtgctatgaatgtatgtaggtagacataattctctgctgctgcaatgtgctatgaatttatgtaggcagacctaattttctgcaaggctaagcaactagcgaagacaatgtatgatttgaaaatgtataaattaattaaataatactaatatanactaatgctaagggtgcaagagtacaatcaaaaataacaag

SEQ ID NO: 15896 - DNA, 452 bp, Oryza sativa
  unsure (1)..(452): unsure at all n locations
tggctngggggtcaagataatccatggtatacaaggtgttctctatggggtggtatgatccatcgcatctcattgaacacacacccatcaaagtttactaagccggagtgcacggaaccaagtcgccgggagatctcgctgaatctttcgattacgatcttgtcggtaccatctgtttcgactactctctttgtaatctgttctcatcgtcatcaatctcatataaactggactagggctattacctgataagggccctaaaccaggataatccttgtcttttgtttgcttgatgtcgtactacgtagactctcgttccaacgtatcccaatacttaactcatccggtccgcaagtattcctcgctacaggtacggtcttaaaaacaactttgatcattattctctatttaatatgaaaacagcgctaataattatgatttataaagactcc

SEQ ID NO: 15897 - DNA, 362 bp, Oryza sativa
  unsure (1)..(362): unsure at all n locations
agcttgattaatgtaccaatggtttgagttttcttgagccttttggaatggaaactgggagtggccagttcggttctacaacattggttgttctggtagctcggttgatttagaaggatcagttctgattattatccagcataactaatatacgctgaatctctcccattntcttcttataagagacgtaatagcagaatccgaatcgaccgtcacaatactatgccggtgaattagcaaaacataaaccaacgcaatcacaaaggtatggacaaacgaagaagcggcaagaacaatgtacgcacctggctgatggcatggcacacttcccggattcattctcctgcatcaccatggactta

SEQ ID NO: 15898 - DNA, 429 bp, Oryza sativa
  unsure (1)..(429): unsure at all n locations
tccatgttctcttggcttcaaggtaaacataattttatatctaagatgtcattttagtttatagtagatgtacacactttaactaggtatgctgtttttaactgtgaaactcaataggtgtaacttctactcccttcgtcccaaaataacaacttttagcccttagtatttgtcccaacatataacaacttctcctccaacattctcttcccaaacaatcacaaccctctaccattcacttttcccacttatctccactactcatccaatcacaaccctccaccattcacttctatctactttcttaataaccgtgtccaactctaaaattntntatattctatgacggagggagtactatttaaatgcagatntcaaaaccaagtataccataattgccgttgtaagtagtctacagcacactgctat

SEQ ID NO: 15899 - DNA, 401 bp, Oryza sativa
  unsure (1)..(401): unsure at all n locations
tctgctgttctctgataagattatttggccggtcagtctatgtaattattaagacgtcgtagtcttacagttctctcatcttagttgtgtttgctatgtataatcatgcttaagatgaaagtgtggatctatggcacattctgngaactaaattcatatgagtatgagttacgaatatttgagaggatgtagaactttaactattattgtcaagtctcctgaatgtgtaacacatctagtcacctgcttttagtggtttgacgggcacatctcatgctgaagttgactgacaggctataggcccatcaatgtcttcaatattcctctctcgaggcgtcggatgtgtcattatgcttgtntaatgacttgaattattcacttcatctctcacatattatgga

SEQ ID NO: 15900 - DNA, 414 bp, Oryza sativa
  unsure (1)..(414): unsure at all n locations
agctntatttgggtttttctcaattattcttgcgtatggacatttagttntctttccttttcccagccaccagttgcatatttttntagaaaaactatcacctttttaataatagatctaatctaatggtctaaattaacggtgcaccaatctaagtgaaaatcaacaatgagattagatagtgccacgtggcggtttaagagtgtttgtaggagcgccatgtggcggcttaggagcgtttgtaggaagtttaatggacttttagtatataatagaatagaatagaatagaatagactagattcctctctagtgtcagcttgcactgtaattgttacccttcgctagaatagtgctatgtntatgcataaggtgttatgtccagctagttnttttatagttacgttgatacctt

SEQ ID NO: 15901 - DNA, 353 bp, Oryza sativa
  unsure (1)..(353): unsure at all n locations
ggaccttaaaactcagcttagcgtacaaaactgggagattttcttttcaaggaagcatatagntgattcactttctgctgatctcatccgactactgtaccaaaatgcagaatccctcataacactggtgaatcctggtagatatttgggtaggccataaaataactacttggatgcaaaatcgtatcattagagctagcaatttgagattatgcttgagaaagtggccagcaattagagccaggggtaatatggatgaaaaatcctatcgttagaggtagtaatttgagataatggctgagatggttggcaagcagtcacaaccacggataccatgcatggcaagtaactga

SEQ ID NO: 15902 - DNA, 449 bp, Oryza sativa
  unsure (1)..(449): unsure at all n locations
agcttcactattgttatttcacttatactgtttccagaggtgctatagtgtgattattataaagatgagatggctcaagtatgaatacacaaagaagcaacagtacacatgaaagcacgtgcatgcaggcatgtgtaagacactaagaccagaggtataagtgaaatggaggcaaaagcaagaattatttcaagtgccattgtgtactctataataatcttctttaaaggttatatcatatgcaaatataaaatcatttattttactccattttgatattngcaaaaaaaagaaaaaaaaacttcatttggatagcatggtgctttgtcaaattaaatttggacagtactcataacataacagcgaanaagaaaatgtatcgtgcatatataatccatgtctcatggttttattactgaatatacaagcgaaagatancatatgtaact

SEQ ID NO: 15903 - DNA, 377 bp, Oryza sativa
  unsure (1)..(377): unsure at all n locations
ggcaatgcatgatgacatggtcgactgttcgtattggatcgtttagtatatgctttactagcaagaaactgaaatagtaagatccacacgcttccccctctcatatagagaaagaagaaccctaggagtgcgggaatcttggcttctgatgacaaaagaaagcttagccaagtctcccatccggttaccatgcacttaattcccctttctgcttttagttcatttcccacagttgtcaaaaccaaatattaatttaattgttgctatcatttttttcatagctattgttatcttattattctcaacctcgacatcacctnggatgtcaatgaaaataanaatgtttgcttggttttatcgatggaccgactgaacac

SEQ ID NO: 15904 - DNA, 240 bp, Oryza sativa
agcttgatgcgctgatctacaggctatatattctgacatatctactaatcaatccgtgctgctatggcgccttgccaggatccatattgccaataggcaccggatcatccccaagactcatataggaggagcctccaaactatcaacagcaaaaactggggattatattgccggatggtgaaggctctctgcgctcacttatgcaccgcatgattcacaaagagcataagacgactgcat

SEQ ID NO: 15905 - DNA, 362 bp, Oryza sativa
  unsure (1)..(362): unsure at all n locations
nggcaacnatgaccctcagtgaacgtcccggcaatgctgttagggtttggaagtggagcctttcgagagagcctctggtgaataccttgcctacagctatcctacgttgatgatatctacgcttgccggcagccgtttctccttggaggtattgtcatgctggctctctcttccttcatgtgaaaacccggttcctttccgaacgggcgttgacagcatccttgatgttgctcccttgatgaaggcttcgctcagaaggcttatgctacactataggatgcttggaggctctggagacctcgttagcattatgttgctcaagctgcttgccttttgagaagctcggtaacgacgacttttgt

SEQ ID NO: 15906 - DNA, 332 bp, Oryza sativa
  unsure (1)..(332): unsure at all n locations
agcttgccttgngaaggagttatgcacagtgcaaatcattaatgctctcaccggctccgggtgcctctccggcgtcctcaccgtccaagcctcatgttgatgcattattggggtctaataattagatntggtttgtttagattatgctctaggaaaacctggtgcatgtattaagttcaatattaaactagagtcttatatatgtgagttaaattggagtgtgatcaagtaatcttagattgtgtgatattggaacaatttgcatctatatagtatctttgtgagtgacaaaattattgtctttactttgtttcgtggaattaagaatattt

SEQ ID NO: 15907 - DNA, 263 bp, Oryza sativa
  unsure (1)..(263): unsure at all n locations
cggaacttaaaactcaactcgcgcccaaagatcaaggttgtcttgaagttcctgnngccgctaccggctgtctgcgagggacttctccggcaccggtagtacccggcgtggtctatgggtaattaattttagaggaaatttcacaaaacttcacgttttgtagtccaagttacataaaaccacacacactttgatacttatcacgtaagtacatatattttggcgtgtgcngattccgttgcaatgccaatcttatattggtt

SEQ ID NO: 15908 - DNA, 401 bp, Oryza sativa
  unsure (1)..(401): unsure at all n locations
agcttcagaataagctactgagagtatattggcttcagaagaagccacgggggatgaaattcttcagaagatacttcagtttgcaaacggatatatgcattgaacgctccgcggtcactcccttccctctcattatcctcacaggaaatgcccactggtgctcaggggcgatctctctgacgatcatgatggcagcactgacagaggtgaatgccaattgagaagcagccaccgctggatctgctgttgcagaatttggtcttgtaccagcaacaacaatacgcccttctgcaacaaagttatagggaaggtgctcttgcctgtgcattcctctaatctagcattntcattgcacatttgacctgataagatacttttcttatagatgaaggggtcagtac

SEQ ID NO: 15909 - DNA, 376 bp, Oryza sativa
  unsure (1)..(376): unsure at all n locations
tagagcaaggctaataatacagccgacttgttggntattatgttctttgcaatattttcttagcctacaaatataatagttaactatttataattaatatagtgcccatttgtctctctcacagaattatttggttcttgcgtccaagccggctgtaaatttacagcccgcttctcctctctctcctctcttctctccatcacctcagcatttatccgacttacagcctcctattatacttgctcttaagggtagccatagccatatattctcttgtgagtttacttcccaatacataaagttatactacaaatattattttagtgcttaaggttaactntacatgcacattggagatgccctatgcctttatttt

SEQ ID NO: 15910 - DNA, 335 bp, Oryza sativa
  unsure (1)..(335): unsure at all n locations
ctcgacccgngatcttgagtcacctgcggatgcactgactgtgctgttttgacatcccgcactggcagccatttactggactctagaccctggcgagtgccagctctcaaggaacactctgaaaaggaactttactttgggaggccgcgcctagaccaaccatgaccagatattgtgagatgctttgccggtccaacccgccaacgatacttgctcgacgacttgcctgaagcatgctactgagctactcaaactggcggacccacaaaaaagctgtatccactgacttagctgcgtggtagttttaacttatgcatgaccttattctcatcaat

SEQ ID NO: 15911 - DNA, 431 bp, Oryza sativa
ttaccagctcttgctatgccttattatattaaggctgcatgaaacgaactaccctacccatgatcctgaattagatgcagctgttcatgtcctcatgattcaaagacactacttaattggtaacagaagctagaggtttggcaacagaagctatatgtacactgatcataagagtctgaaatatatgtttactaaaacggagctcaacctcatataaaaagagaggcgtgcattaatcaacgagtattgatgtggaatacattatcatcccagaacagcaacatgtgttgctgatgcacttagctggaaagtgcactgtaaagttctttagaactcgctccatcatacagaggtgtgaaagaattagaaagctaagaataacatgggtagctatgaacttacaacccattggtcaccgacttagagatcaa

SEQ ID NO: 15912 - DNA, 412 bp, Oryza sativa
  unsure (1)..(412): unsure at all n locations
ttcgaagtgatagtatatggtcggtctgttcatgaccccgggcccaattctatcgatatgtgaatcacccctcttgattaaaacatataaacttttaaggactcaaaactctgggcacaaggaacctcgacctccttatgtcctcatgagcagaggtatgcctcggacccggccttgtcccgggtcctgggcttacctttgcccttgtaagtcctacgatcctcaatgagaaaagcgtagagatttactccctccgtcccaatatgtagcaacctatgatgggactagacccatcctaggaatacaaatgttccctatgtccatattcgtagtcctaggatgggtttaatctanggtcctacatattgcgagggacagagggagtacaagatatatatctagagtacataag

SEQ ID NO: 15913 - DNA, 372 bp, Oryza sativa
  unsure (1)..(372): unsure at all n locations
gcttatagaagggttatagctgagagatctttgtctctccgtggtaattttggcaattaataacaagcactaattgtggactaaccggtgtttttgagctatatattttaaggtagatccacgtcagatgtgcgcatagatgattatcgatggattaaaattgaaggcgcaaagcaaagggaaagaagactggtaaacaagtgctttacttttgaattgatcgaggtggagggcgaacaaatttgctagtttatttttagtttcgtcgtactattaagaggagtaatgacctatcaaagagaagattntaattgccacattagggcattatgcatttagacttgtgctcacatttcacacaacacacacaac

SEQ ID NO: 15914 - DNA, 370 bp, Oryza sativa
agcttcatgaaaggcatttcgaaagccgacacacgtttgttatatgccgacgtgatgtgtcccagaccaacaacacgttaggtgccataccatactgtgccatgaagcccagtggtcctccccgacaccaccctggcgaatgcacatgtgtctcggcatcaaggcttccctgataagctagttactcagccagaggtggcccattccacccatgtggtcgtacttgacttatgtttggatgaaattccaaggaaaacggtccttaagtgcgagagcgggaaaccgcacacccggtacaggtcccgggccgcgtgtttggaaattcttttaattcgcaagcaccgacccacgtcgtcgggttttcaaatct

SEQ ID NO: 15915 - DNA, 448 bp, Oryza sativa
gcttatcatattataatgatgataataagctgggatctcctattataataaactacttcaataagttgtctattttttcagcttactctaaataatttggattataataattccaatccgaaagaagcagggcctaaaacagggccagagattcgcttgggtgttgctctcgtccgtcactttgtccaattgttcatcattggtacgcttgctcccccaggctcctgccagatgcttctctttgtccggccggtgtcaccgctgcatgcgtcggcgacacgatcgagcccgtgtgatagatatattatgcactgggcagcgtggcaaggtaataattaacgatttaatagcaaatatatagattgtggattgcggtcgctataatttgtataaattacctgtgtcaaataatatgtctcgctgctgttatcgaattttagtggaaaag

SEQ ID NO: 15916 - DNA, 444 bp, Oryza sativa
  unsure (1)..(444): unsure at all n locations
cgaacacagtcttagtatgaagttcccatataccatgcgtacttaatagaaagcaaagagagagaaaacatggcttgtacttcgtctattattttgttattatttagaggattaatatagtctctaaaacgtataacaatggtagtggtaaatatgattgatacattataggttatcccggtatatatggatcaatagtatggaccctatatataagcatacttatacgatgatataatctacatccattattttttttcatgatttgtcaaatctccaatgccatgcaaagtaccaagatttgtgaactgataaccgatatatagtgatataatttatattgtcatattttccataattttcatatccgtttgcattggattacatgaaaggaataaaaatgctatcntaaatataatntccctttacaagttgaaatatagt

SEQ ID NO: 15917 - DNA, 378 bp, Oryza sativa
agcttgccggaatttgaggcttgtatttgtgttttccctgactctttgggtagatggacaacaatcgaacatttagtggagaactgtaacttgtctggcaccaacccttgcttgagtggagatatgtgctgacgatgttcgagcagaaagattgaatactgaaaaaccacttggtgttgtacaataacacatcgtccaatcttggaagtgcatgcccatatgtcttggttggcgaaataaccaaacttgcgaagtagcaacaattgggtttgccggcgcacaatacaatgaagatgaagttgctccaccatggtgactaagtttcatatttgtgaagacgttgacacgagtctacagcaacagccgcaaaccagtttc

SEQ ID NO: 15918 - DNA, 420 bp, Oryza sativa
aaaactgtattgttctgatctttattaaaaacacttataagggcaagcaaatatccttattaagacagccatatcataggcacatgatatcgaccgccgactgaccccaaacaagcaacctacacacacaaactaacaaacaaaaactagacagtcgatgaactagtggaaaaacgagcctaatgctcggaacggctcctgcggtcggtggagtcgaaagcgtactcctgctcgtcacccggaccctctgagcgactcctggagcctgacggatcggtctcgccgctgccgctgggagtagcagacagccaacctccggtaccactggctgaacctctggcggctgatgctggaacgaatgagagagtgaacgcggtagctggagctggagctgcaggaactgcgggcggaactggagct

SEQ ID NO: 15919 - DNA, 448 bp, Oryza sativa
  unsure (1)..(448): unsure at all n locations
caccttggtgactatctttcatccctctcctctaattttgcttgcttgngttgctattggactatttgttgnatgcgcctttcttttcatgtggtagtcttctagatctagatacttctgtttgtgtgcgctcctctgtgcattttcggaagattcgaaaatcctttcggaagttccgaaaattcccacccaagttccaaaaattactgcttccgcttttcttaagtttttaaattggcctattcaccccccctctagacctaattgaccttttcagttcttacattntgatactatagggagcagtttccttcaactagttgtactactacttattntgagatgtacagaggactatgggtgtgtatagttctttttgtgtaatagctttgaagtatacataaacacattngaagtatttaacgtatactaataacaaaataaatta

SEQ ID NO: 15920 - DNA, 437 bp, Oryza sativa
  unsure (1)..(437): unsure at all n locations
tctctatttacttagatctcccaaccctaaagatgcttcaataggaaaagtttgcgcaggaaaaatagtggacatccttgaatggtttcttatagaatgactcttccatgacttgcatctcttgtgtcacgccgcatgattatatatatacttttaagttgtccctagcttactggtgtgtgcgactcctacaaagcttttcctccaaattgtgatgtgatctagtccattcgtgctaaaatataaggaagtttagctagatgtgacacatacaaatctggacatgtgttctgtctaaattcatagtgctagaatgtgtcacatccgatcaaaatccattacggcctagtttagattcaaaggttttcttcaaacttccaactttccatcacatcanaatggtcctacacacacaaacttctaacttttccatcaca

SEQ ID NO: 15921 - DNA, 447 bp, Oryza sativa
tgtctacattgatatcgttccctgctagtggctgaagtatttggagatccatgctcaaaatcttgttgcgattaatacttacaatatctgtcacctaaaaatagtactgagtgaagcattagtgttgaagggggcacacattgagttagttctgtcatcagatgttattgagtatgcttttactgatcttgcaccactcatgccagacctcgagtcattgttcctgagtggctgtactgaggttagtgaaaacaatatcacttatttgagatactttacgttctttatcttgactacatttcctatgcagatgattatatccaggagacctccaagcaatagattccattgcctgaagcaattggagttaaaattgcaggatatatcgacgaaatatgatcttctatttcttgctaagtttgttgatgctgctccagtcctagaagc

SEQ ID NO: 15922 - DNA, 372 bp, Oryza sativa
  unsure (1)..(372): unsure at all n locations
agcttggcttgactacatgtacacatcctctttcttaccatattcagnggttaaacgattccggaagagcaaaggtaacacacgtttgtaaggtttcgttttccattggctcatatgcaaattctgttgattgcgatgtggttcctatgcaagcttgttcacttttgctggggcgtccttgggaacatgataatgatgctacacatcatggtaggagtaataaatacacttttatgcataatgggaagaaaattactttgctacctttgacccctgctgaaattgtagaagctgataaagaacgagctgctagtttgaaagttgatgaatctgaaaatcagcaagtggctaaatctgtttttccacctaaaa

SEQ ID NO: 15923 - DNA, 453 bp, Oryza sativa
tgcagagtttcttcgcgtgaggccacctgttttctctatcaccactaatcctgtcgaagctagtgattggttgcacgccatagagaagaagttggatctgctccagtgcagagaccaggagaaggtctcttttgcgtcacaccagctgcatggccctgcttcggaatggtgggatcactcctgccttaacaggactactgctgaacctatctcttggcttgagttcaccgctgctttgcgcaagacgcatataccatcgggagtggtgtccctcaagaagaaggagttcaggtcgctcacacagggttctcgcacagtcacggagtatctgcacgagtttaatcatctggctcgttatgctccagaggatgtgcgcaccgatgaggagcgccaggagaagttcttggaaggacttaatgatgagctttcttacccactcatgactggagatta

SEQ ID NO: 15924 - DNA, 417 bp, Oryza sativa
  unsure (1)..(417): unsure at all n locations
agcttgcanggcatgtgcatctaaatactcttaccagattngtctgcaggatcaaccatctgaagattagtggtgttcctaaaagactcaagtggcaccaacagatcggaagcatgatatcggaattcaggatttatgtccaagaggcaatataacggtacgaacggtacgatctccacagttgcacctatagacaaagatatgcgtccgttagctatgttctatcaacaccctatgaacaaactgctgacctagtcattgatgggcggacgagcaagtttatcaaatggctggccaatgatggggatccaaagctcaagatggtatctattgtcggatgtggtggtattggtaaaactacacttgccaagctnttctacaacaaatatggtggacgattcgactgtagagctttat

SEQ ID NO: 15925 - DNA, 453 bp, Oryza sativa
  unsure (1)..(453): unsure at all n locations
ntcatgtatgtgcgatggctctacagttgtgtatggcttagccgctgaggtgctgagcatgctaaaaggcccaatgggttagtctcttcattgtttatgggttgtccaagggttcacaaagggttaaggtttaacaagcactgaaaagcttaaaggttggggttggtttgggctaaaaatgcatggtagtgggctagggtggggttcaagtgcactatatgcacataaatgggcaggggtgggccacgacccattaccagggctacatgggtgcaaattgcattacaaaccttcttttttttacttgcactggtggggctcacggataatccggataagattagtttgttattccaccgatcacagcacatttaccgttcttattttgcgagtgggccngaacggtntgatttatcctctacacgtaaatatcggntgtttaataacgaaact

SEQ ID NO: 15926 - DNA, 452 bp, Oryza sativa
  unsure (1)..(452): unsure at all n locations
tcgaaagatttggtgttatgattagttagttgcatgcatgacaatgtgtgcttangagacgacgtgttcaacaagcagaatttacactcttgtaattacctttttgcccgtctttccaaacatggaaaagttagggcataaagccacagaaccacctctactataatattttgcaccactcacttacatgtggaccctctaattattcttagtatgattaaattctacacgaaagttctattggtgtgcacttgattgccgtccaggtgatacgatacttcttcgatgcacacatctaattagctatgtatatattatctatactaccccttttaaaagaataatacaatgtataatggtgtggtgtggtgcggtgacaggaatgaatagcccacccccattaaccccgcaatacatcgtcttactaattattctttattcaatattacaag

SEQ ID NO: 15927 - DNA, 337 bp, Oryza sativa
tacttaatcataaagaaatttatatatatcttgaaatttccggctaactaattacttgctggggttgggggggggggtttataaactatccaaacttcaatcacttccttaaactcttcttaattctctattcacaactcaatacatcactcccatacaatacatttaaacctacctttgtccaaaataaacttattcttcattcatacccattctctcatccattcacaacccacatatctccataaccttatatcatccaacccaaagacatattctcccatattttcttcttacaacctaataacatttatcaaaattcaataaactattctct

SEQ ID NO: 15928 - DNA, 434 bp, Oryza sativa
  unsure (1)..(434): unsure at all n locations
tcgctagaatttcttttctgctgcagttntcttcgtggtgaggactaagtgcctcatatgtaagtatttaatcactttagttattatgatgaatctatatattataaattgtcagtttgtatacctcgggtgattcctggacgaggatttttaatacacaaattagtttggaaattacttgtgaattttcgggcgtgacacacatgcattatgatcaaaccttgactaaccatttgcatttcctttcttcttcaggactgcaaagaccctgagaaacgaggcacagattgattgcacaagaggtgtgagtagggagcaaagagccataaacagaaggaacaaacttgattcctcattgctttcaagtangggtgatgacaagaaagacaagccaagccgcggcttaaaaaatatgagaaaatgtgcgtcattga

SEQ ID NO: 15929 - DNA, 370 bp, Oryza sativa
  unsure (1)..(370): unsure at all n locations
tatcacttggatcatattattcggggattcacaccgcatatgctatatattggtatcaagtcacttgggtgactataattatcaaaaaccactcgggtaattggatgacttattccttgactatatgtttggnttgttcaattaaccacatagtcgggggttacacctattaggtgcatctagtcgatgcatctgactntattttttcagccctccacagtcttctgacttggaaaaagtactcgggagatcatggcgaagatgatcgaagcactcggctttggagtaatctatttcgagagaagattatctttccgactgtgaacgtctcacgggctactgtggagattatgggtaccccatacccaca

SEQ ID NO: 15930 - DNA, 349 bp, Oryza sativa
  unsure (1)..(349): unsure at all n locations
gaccggaacttaagtcacctgcggcatgcaagcttgcttgagaggggtatcgtactcatctctcgcttaaagggtggatcgatcgaagntctggtactatgctcatggtggaacgcttaacccagttgatggctccctggtcttcagcgatcagatacgcgaggctaccagtcgactaacggacgcagtggaagcctcttctcaaggcacgttccgacccgacagagagaaggacgagctgtcacttgccctacagactcccgagcatccaggacgaacacgagggaaaggggtgattccttggaagattggattcaaggaggacatccacacgtacaggagtcggatg

SEQ ID NO: 15931 - DNA, 418 bp, Oryza sativa
  unsure (1)..(418): unsure at all n locations
nggtttactttatttacttaccttatactttgattttctaactttattcaaattaatccaaaaacttgtgctattaattggataaatgtcttaactccctcctttcacttgtctttagatgtcgcgttacaagcctgagtacttgtttggtgttgagggatttgtctaggagatgcgtacgatgtcctttgccataggatttgggactgcccctttttatgcccagattcctcatgatcgtcacgaagagaagtgccgagtcaaagtcaccttgaacagtaatagtgaagatatcccctcagtgatgttcgaagctggaggaagaaactacatccatgcatgtcangaggtggcaaggatcgccatangagagctccgcgatcgctacagtgatcagttggccgacactgagtatcgc

SEQ ID NO: 15932 - DNA, 463 bp, Oryza sativa
  unsure (1)..(463): unsure at all n locations
ggaccctaatgacctgagctgcagcttaactaggccagaaaagatttgtatttttactacttggaaccagcagcaaaagaatatatacaaaaatgcaaaaaagcctaaaataagaaagctccagagaacccatattgttcaaatattaagaatgaaggatcatcctaaaaacctacgtataaggaatgcttgactaagggagtagatcctttggatggcgaatatatcgattggaaaataattgaaaaatttgaagaagcatccccccaaattaaaaaagaattgaaagaagaaatacttaaagaattatagaaagaaatgaatgataaatttgaagaaatgaaaaaagcatatgatgaannaattgaagtctccttttctgatgtagatactatggnattaggtggtcatgggcaggctgaccaattaagcaatataatataaattgataataaatatccat

SEQ ID NO: 15933 - DNA, 393 bp, Oryza sativa
  unsure (1)..(393): unsure at all n locations
cgacacaccaagngatcatgctatgtgacatggctcaaactgatgcacctgttgtactcanagtataaatgcgattgcgtctctctgtcacgacttaacccaactaatggtacttggagctggcctagaaaaagcaagtgcatgccttaatatctatatgagaccgatagatacctcatatgttatcacagagtgacaagtgatcattctgttcatgtaagactttattaattcggtacaccaagaacacttgttttgtttgtatatttgcctacgaaagcgacaattgttacaattaattgtgaatatggtgagtcagctggttctctaatataaatgctttatacggaatctcgaatagaaagtactcagtctgatgactgatatctacgc

SEQ ID NO: 15934 - DNA, 397 bp, Oryza sativa
agcttacgcatggaatatcaacaagggctttttgttcactaggattaatatcaatgctaccaaaagtacaataccaatagcaaacttccacctgtccatgaaaaataaccaatatactcagatgagatgtctggcgaatcaaactggagaccaactaaaaggcacaactgaaaaatctttgtgcatatagggtctaaaaggggtaaaatacataccaggatacaacgatgcccaaataaaagaactgaatgtagaaagcaacagtccagacagttaaaactgtttgttcgaatatgtaccacctgaaaaacattaatatgtcctgaggataagctgcaagactttcgatgagtcatataatagaacaacattagaatggtatatgtacatttcaatg

SEQ ID NO: 15935 - DNA, 431 bp, Oryza sativa
  unsure (1)..(431): unsure at all n locations
ctcttctcaatcaagttgaatttaaactactccaacaaattatgctattntgggaaccactagtctatcatatcacgaagaggtgacctaagaagaaaccaatgccaacaaaatgtaactttgataaccactagtctattagatcaagaaaggatggtttaagacagagctntactctgccttccaaattatgcattgtccctgacttagaaatgagcagtggattaatttgtgcaaacttttttatgagtctatcttttgagctgtcatcttagtaagctgcaaataattatgcagtgtaattttatatatttgaaaaaaagaataaatctgatcatgtctgtntctgtnttggcctctgttgtagtgccaataatatatcatgttcatcgggcgcgcgatggaacacgctttgccaccataaaagtgga

SEQ ID NO: 15936 - DNA, 425 bp, Oryza sativa
  unsure (1)..(425): unsure at all n locations
agctttctatcattctggcatcgagctattttgttctttgacctcccctacagtatcgtcaccgcagtagagtttaaccaccaaattcgggatggattggtgtggttcctctacgcctatgacaccaaaatatctaaccatgaacgaggaaaggcatgagagaaatattggctactaattgtgaggccccaattcttgactggaaaggacaccaaaggcctctgccctccctctctatctatccaagagatggaagggcagagcttttttgtgcgtttttcatcttttcatcaaagagttgaacaatgaatatagatggcangtgcctgatcgattagatcaagtcgcgtaggaacaaggttcaaatcatacgttcgttaagatgcctcaactgcatacatcactgcacttncacttgacaccta

SEQ ID NO: 15937 - DNA, 452 bp, Oryza sativa
agcttctgtgctgagatggatgcggaccggatttctacatggtcaccttaattactacgtcaattgtgatgtaaaatttacaaatacaatacctaattctccaaataggtttacatgtgccacggattctcatatagatgttgctagccctattttcaatggatacactgtatcggctaatgatagttcaaataattatttgagatctttaaattatgaatgtaacatgcatgtcacagcctatgcaaagttaattcacatgctttaaattttaacaatgctatcaatatacaatatgcacacaccttttaattgatcggcaattatttcacaacctattgttacacaacaaattttgccgatgaaagatatgtatggccatggcaatattaattatacagttgattctattaattcattgcatgtcatgccaagtatctgtcagtcacatg

SEQ ID NO: 15938 - DNA, 182 bp, Oryza sativa
  unsure (1)..(182): unsure at all n locations
tgctcgggcagctggaggaggaagaagacatatatatagtggttggactttagtcccggttggtagcaccaaccggngctaaagatcaccgggatctttagcctcggttggtgccaccaaccgggactaaagtcccacccctatatatacgtcatcttcctcctccagctgcccgagcaagc

SEQ ID NO: 15939 - DNA, 430 bp, Oryza sativa
  unsure (1)..(430): unsure at all n locations
gcttttcgtgacctcgtgccccgtttttttttgtcaacggaggtganaccactagcctcctctcctggttcccttcaatccctttcacgagcccctgtggttcccctccgcattcctctccacgtttcctttcttgttcaagtactgggttggatcctcgttcccctcttcttcattcagaactggctgcttcccttcgcgattgtatcgtacaatatctgttcctcatcgcggtcagccatctgttgatacaagaaacatctgctaagtcacgagacatttatgttttaacaatctaagtcatgtatgctaagtgtaaatggtcgacattataaccctacacaaacttacgtgctaagtctaattacacatcgtgatataagcctcgtctaggtgacgtatattatacaaccctagctagtaataatta

SEQ ID NO: 15940 - DNA, 471 bp, Oryza sativa
  unsure (1)..(471): unsure at all n locations
taatgaggaaacaatggagtgggagaaggtggagagcctgcatggtcaagtagtgttcactgggtcgctgacaacgataataaagaagcccaaatttaagtggatggagaacaaagttttcctcccgaggttctacaattggcctgagacaattcatgttgatcttgtcactcgcgaaggggaaatggcctttgtaccaaagtcatcgtcctactcaaatacccttgatgcaagtattacgaacatttggtcttatgaattaggatgcggaacaccaacaatggaatactgggggacagagagaccggactatagtatctgggttgatttcgctggcaattgaattttgattcgttttataaaatatatgtaataaatttgtttaaatgcgtgttttatagagagttccgctatttcatccggngtataattattttttctcattatacatgctctttgatgcgttcgtct

SEQ ID NO: 15941 - DNA, 332 bp, Oryza sativa
  unsure (1)..(332): unsure at all n locations
taagtcggttcatatcgaggctgggagagaaggcgctacccttatttaagctcctcaaacgctcccggccgtttacttggacggaggaagctgaacgtgccctcactcagttgaaagcgtatctcagctctcccccagttctggtcgccccggagccaaatgaacccttgctactctacttagcggcgaccccgcaagtggttagtgcggcgttggttgcggagcgcgatgaggacaatcctcattccgcgcacccccaccctgtgctggcttggcccgggagaaacanggaggagaggcccccgagccgaacggtggcccaaggcccccga

SEQ ID NO: 15942 - DNA, 429 bp, Oryza sativa
tagaaaatacctacttttggttgctagggcgaattacctaaagtggtgtacaatcaaatggtttgctgcaatccttttgcttacctacatgccctaatatattagatcgatcccaaattgctttatgtatcgggtatcttattatatgtgcataggtcctaaaagagttgttgaaaaatacatctctgttgtcccacatagaatacatgatctctgttgttccatggcttgcatggattacctagctaatatattctactcctatcctcctttatttatttttaattatttatcttatttacttctgcaaattattcccataccaaactaattcagttgtgccttcttgcttgcaggtaaggatgtgctccatgtaaggactttggagttgctggcatagcagagaattgaatgactgcttttctaagt

SEQ ID NO: 15943 - DNA, 411 bp, Oryza sativa
  unsure (1)..(411): unsure at all n locations
cccttaaacaggagcatatcaatgacctgtttgctaacaaaattagcttagatgaggtatgtttatcggtaaagattaaagtaagggagaaaacagtgtgatcaattaaggaagtgaaagaaaacaatctgcatcgtttcctactttatttacatatatatgtatacaaaagaactacatccacacaaccataatatatactccctccttccctaaatatttaataccgttgacttntttaaacatgtttgaccgttcgtcttattcaaaaactttttgtaaatacgtaaaactatatatgtcgtatatttaacaatgaatcaaattatacgaaaagaattaataatcacttaaattttgttaataagacgaacggtcaaatatatttaaaaaagtcaacggcgtccaata

SEQ ID NO: 15944 - DNA, 448 bp, Oryza sativa
  unsure (1)..(448): unsure at all n locations
tcccgggttagctcgcttttatctttcccgctgcatttgttatcttttatatttttgtaagacgtgggtctgtatgtcaacaatagtcgtttgtgtaccctggctggtcctggacagggatttaatgcacattcagcttagaaattctggttcgagaatttctgggtgtgacaattatgccgccgttgttgggcgtctacgtcttcaccgaccggccgcctcgtccgccgccgactggtgtttccgcctgcacggctggcctattatgaccgccgttgttgggcgtctacgtcttcaccgaccggccgcctcgtccgccggcgactggtgtttccgcctgtacggctggcctattatgaaccgctgtattgngcgtctacgtcttcaccgaccggccgcctcgttcgccggcgactggtgtttccgcctgtacagctggcctattatg

SEQ ID NO: 15945 - DNA, 329 bp, Oryza sativa
acaaagaataagcgcactcaatctatactgttcatcaagtggctagccaacttggcaaggacgcctcagagtgcacaacatattttcattttttttggaaatgaagctttttaatctcgcacatttctgccggcgataaattatctaagagactcctaatgcaagtctcccttttttaaaaaaaaagataaataaatcggctctgtcctttgggggttttaccgccaacaagtccgagacctagatttggcttaccgggaaaaaactagttaaccatgcgcaagagacaaagataacttcattttttcaaatccccccaagaagcaact

SEQ ID NO: 15946 - DNA, 374 bp, Oryza sativa
acctataaaactaagcttcccatgcgcataccaccttctttcgtgaagccgttcgccgccgctcaccggagtgctccggccgccgcttctcgccgcttcttgccgccctagccaccgccccgccaatccgctgacaccatcagctccgccatcccgcgccgcccgtcggccacccctccattcccgcaatccaccggcgtagcaccactccccccaccaaaccgagccggcactgcaatccgccgtgttccggccgccgcttctcgccgctctagccaccgccgtgctgtgccgccacgacctccggcctcgccgcaccgagggctacctcggccgtccctcgctcgccgcgaaacaccgccgtagtgccgatt

SEQ ID NO: 15947 - DNA, 334 bp, Oryza sativa
ggattaacctatgactgttatttatggggagcaacgccctgggggggtcattatatgcggaacccgtccattaattcatttattataccgaaaacagggagacctgggcgtgttgcatcatgtggctcataatactatgactgaacatgacaaaagtgttagatttttcttaccaagggcaatgattacttgcgcatcccttcatttggggtgctgcatcatgcatcacaacatatggggaccatcttgcgtgggagagatctcgttcactgaaccttacaaatgcctttttacactattttctcaaaccctcaaaatttaccgatactacttt

SEQ ID NO: 15948 - DNA, 359 bp, Oryza sativa
tgaccaagggcttaaccacattcttctcgagcagccgttctctggcgctcatcgtagcgcaccggacgccgcttatcacctggtgatgcctgcctaaccaccgacacgccaattcggtgacatatggtaatgaacactgccgctccgcccgttggacaatcatccgttgaatgtgtggaccggcgtaccaccactgactgcatcgcgccgagacggaactgtagtacaccgtgcaccagccggagctactctacgatgtctactgcgtcgtgctgagtcgacacgatctcctgcctatacgaacggctggctacctcagccaggcctcgattggagtgacgcatcgatattccgacctg

SEQ ID NO: 15949 - DNA, 439 bp, Oryza sativa
  unsure (1)..(439): unsure at all n locations
agcttaacaacaaccccttaggtacctcttttttctcgtcactaaatccgctaccaccccttattacctcataataattctactttccttgccatggcccaaccgtcatctcagcttacatatctctagctaaagcaatgttgctgccacttggccattagctatcgtcgatccaccactttctaggccactctctgagccttaaaatcaaatggtttctgagacatacctctaagaaacaccatccttttctcctcctattgatgttttgtccatctttttctcctcctattgagacatacctctaagaaacaccgtccttttctcctcctattngatgtnntgccatctttttctcctcctattgnatgtttgaagttagcagaattgctccatgtctgcaatgggggttgaagatctatgatcactccaatctcat

SEQ ID NO: 15950 - DNA, 374 bp, Oryza sativa
  unsure (1)..(374): unsure at all n locations
ntagcttccgcctccccgcgcttccaataacggctntaactaattctctctctcttcgtcttctccagctaatcgatcccccctcttaatccattttgttttttttttccaaatctccatctccatctcctcccttcacccccgatcgcattcgctgccgcccactccgtgctcgcctcgcctcccctcagagagattaaagcagcagcggctttctttcctctgcgtttcttggattgcagcaaaatcgatccccccccccccnnnnnnnnngnnnnanttnntggtggggatggcaattcttgtgccattgatttgggttggatatccgcgcctgccgcgaaggagaggtatcttctggtgtgcccatgcgg

SEQ ID NO: 15951 - DNA, 306 bp, Oryza sativa
  unsure (1)..(306): unsure at all n locations
aaacccacatgcctgcgccctcttaaactaaatcagactctagcctcacatgcctcaccaccccgaggatgtttaacaatcgtaccggcggcaccacccatttcgaacaccctaaccattgcgccaaccaataatagcttcgtcgcaggcccttctacaaaatctcttttggtcgctcccaactgagccatgggtccctgacggcaccagcgagaaactcatcggggcaatgctatgttcccagcctctacctcaccctcatgattagcacccacggatttcactcagcannaagttcaaacatgc

SEQ ID NO: 15952 - DNA, 442 bp, Oryza sativa
ctgaaccgggtgatttagtttggtttgtcttgagaaatgatagatttccagaattgagaaagtctaagttgatgcctcgtgccgatggtcctttttaaattgttgagaagaatgataatgcatataaacttgagttgcctcccgagtttagggttagtcccacgtttaacatttcagatttgaagccatacttgggagaagaggatgagcttgagtcgaggacgacttcaattcaagatggggaggatgatgcggacatcactaactcggatacacacaacaatcctgcaacggtcattcaaggaccgataacaagagctcgtgcgcgacaattaaatttagaggtgagttcgttcctatgttcttctttgtatgaattcgagaatagatggctacctaatgactatattgtgattaggaacaatggagggcgacaggagac

SEQ ID NO: 15953 - DNA, 317 bp, Oryza sativa
  unsure (1)..(317): unsure at all n locations
agcttggcatgacattgtgtgatgttgtatttattgaattatccgcccttactcattaattttaatatgaattagcctattagttagcaaaactaaagaaaattctctagctcacagaggacttaattnttccattaattattagtaaacatgaatataatatacagattgcaatgccatattggcattacactcacgcggcctgatacatcctgatcaattcaaccatccttttctctgagtgatttttctcttgtcgatcgaatctaacttccactggctgcatgcttggattgcttgcacctactttattgatc

SEQ ID NO: 15954 - DNA, 412 bp, Oryza sativa
  unsure (1)..(412): unsure at all n locations
taaatatttgttgtcgacttctctttgaccgtgttgttaggaggtacacatggttgtgtgcatgtccatctactatgtaatcgtaaaaagaatggctcgcagtaaattgctcaggttttgctattatttgttttgcatattcgttcttaggcatgctttcatctttaatttatctacaccgcanagtatgtaggaccggcttcataagatgtatggttgtggttaagatcaactagctagggcttgactggagagagagctagtgggtggtatagtggatttgtgccactggatggaagcatactcatacttgcctgtgtcctgtctagatgctctgaatgcacatgcaaagcaaagtgtaataccccgtatattaaaatattaaaagatatttaggtntgtntagtttgga

SEQ ID NO: 15955 - DNA, 436 bp, Oryza sativa
  unsure (1)..(436): unsure at all n locations
gcttcatgagttccaacacgcatgacaacttgcttgtcttcgacttgcatccatcatacaacgacatctgacaatcttccaccaacttactaaacttctcaaaatctctgtcgttgtcctctgcgtcttcaatgtcatgcaacattgtaatagacattgagtgtccaaatctatggtctctccacctaaaggagaaggtacgaacatgccatctcgagctgcggcggtgttctctacatcctgatccaacacttcttcagctgcgacatcaggcacctcttgctctccatgcttggtccagcaggtatatttcttcatgaatccattcattatcaaatgaacatgcacttcatccttgtcttcgatcatctggtcattcttacacgccctacatggacacaacatgtgcatgctcatcctactttntctgtcatta

SEQ ID NO: 15956 - DNA, 381 bp, Oryza sativa
tattatctattatgatcatactatatatattactcagaaatttaccaccacgtttgcttggaacactataaattcttgtattaagacccccccgtgagtttggccggaggagatggcgcgatgatcaaaaaccgtcttccgcttaagatctaactactggatcgctcaccagtttgtgtggaagacaatggattatataggtttggactatgaagcgtaacaccctactcctgtgtgtgggattatgatgagttcttacaagaagtcttgagctcctagggaaacctagctggtcttcctctagagctcaagctatcgagagtcgttcctttttcttggtgggcgatatcctccttttatagttcaatgggataccacatg

SEQ ID NO: 15957 - DNA, 452 bp, Oryza sativa
gcctctcggcgatgtattctctggcccacagatgtgtctgatgctgaccagaatgtttctgacactgcgaagaggtgtcaattctttgccagacaaattcatttgcccgcccaagagttgcgaaccatcccgttgtcctggccgcttgcggactaggggcttgacatgggcggtccgcttaaaagggcagttggcgggtacactcctttctttgtgggtatttgctaaatttccaagtggattgaagctaaaccgggcatcacgatcacagccgataaagctagagaatatttcatcaacattgtgcatcggagtggggtacctaatcggatcatcacttgaaatggcactcaattcaccacaggagtgtttaaagaattttgtgaagagtttggcatccaaacttgctatgcctccgtggcgcaccctatgattatggacaggttgaacgt

SEQ ID NO: 15958 - DNA, 328 bp, Oryza sativa
ctgcatgcatgcatgcattgttcgaaagacgtacactgtgtgtttttttatagcacctcctgccaatcggatgaaaggtccggacttctccacattttcgggacaaagacggagcgttatcttatgagcacactaaccgattattgcctcaatgcggtgaagcatacggggatgaccttctcagagtgcggtgacttatggtattttaacccgcaccggctgttacgtcgtgatcctctctaccatccgggtcgatcaatgatgctacctttgaggataaactataccgcaccttgttttaatgcgaggatcggtagaccacttatct

SEQ ID NO: 15959 - DNA, 471 bp, Oryza sativa
tactcagcttctcaggttggagtggatctgtggatgaccaaacacatataatagcagcagtagcagcagcagcttcgacaagaaatttaaagaaagttggtattaatcggacagattccttggattaaaggcattcctttccaactgatgtgaaaatgtgagaagccattagcagagacttcaatgttcaccaacttttgattggcagctagatgggcccccacagacctgcttggcatgctgtcgatcgcggagtatttaagtaaacacgtggtaattaaaaatttgtcacttgcagactatcatacataagctcttatgtatttgaaatgtgggtctactaataaattcttaactaccacttataaaaatgataaatagttaaatatctcgtcgatcactcgcaacgacatgggttgctttcacatagctatagctgattatataagcagtattggtcattatcgactg

SEQ ID NO: 15960 - DNA, 446 bp, Oryza sativa
  unsure (1)..(446): unsure at all n locations
agcttgccaatntcacagcatacacacaaatcttcctgcgcaagcactacaaaccatccctctcacttggccattctcgtgctaggggctcgacatactcggtccattctcacgaggacagggcggctacagattcctgttcgtggcgatcgacaaattcaccaaatggatcgaggcaacacccacaggagaaatcaaggccgacaacgccatcaagttcattaaggtgatattttgccgatatggattgcctcaccgtatcataacggataacggctcccaattcatcagcgccgattttcaagattattgcatcggactatgagtcaagaaatgcttcgcctcggtttctcaccctcagagtaacggacaggtcgaatgggcaaacagcatagtactacaagggatcaagacccgtgtctatgacaggctcatgtcacatgata

SEQ ID NO: 15961 - DNA, 442 bp, Oryza sativa
tctcagcttgagcaaagaactcaactgggttctgacatcaccactgaaagaattgaaggacaagtcaagaacctcaagaaggggaaaaccagagaaattactaagaggcatggatagctggctgctgctgagattaagtgaccgcaatccagccttcatggagcaagaagaggtgaagaattgctctatcgaattggtgaaggaattcttagagagatcaaggatttgcaaggtgtcaagagagcatatggttgcaaatatggtggagttggacaaaccatacccagacaaagtaaggttggtcacaactgatatggaattggagctagaagagcaactcactccatcccatcggcatggattcgaatcgctcgtgttccacttggcactggcagtaaccaagccagaaagctccttcatgatcgatacctgagtcgtattt

SEQ ID NO: 15962 - DNA, 428 bp, Oryza sativa
  unsure (1)..(428): unsure at all n locations
agcttagctttgtattattntacacttgcatgttatatacctttcaccttttttacaaattcagtaaagtgaaagtaactatgagaactaagacaaacagaaaaggcatacagaccgctatagactggccgactgggatgttctgaatttctgacaggccatatattgtctgcatttctgataactgaattctgagtcttcaacactaaatttatatgaccatatatctcctgactccattcttatactactaactcaactacgttagtgtctgcttgatttggtatcatattttgccctaccaaaactttcgcaaaatctaattcgagagcactctcgatttagtcataactagcgacgcctatccagaatccagatatgtgttagctggaataatcttactttactatagtactaatccattaagt

SEQ ID NO: 15963 - DNA, 471 bp, Oryza sativa
gacttaaacaaggatggtttgctgcttcactaactttttcatcctcgatgtatcctgtcactaatgcaaccatgatgcccctgatattgatcaaattatcctcattgatcggtgttagcatttcaagtaccacgcttagctattatatgcctttacgtcggatatgcatgacgtgtacagctcccattttcaggaacattgctcaacttgcaaaggtgcggatcatgaaaagacctggtggccaatgggaagagcttaagattcctcgcaggtaaataaatccttgcttcctttgcagtgtatttgtacaaggcaatttccattttgcttcatctaaaatgtctggttcttccaaaatcccaaccccattttccatctccaagtttcttagacacatttctagaatgttatcatcaccacagaatgtagctatgaaaatcaacatatattccctctatttgttcagcattc

SEQ ID NO: 15964 - DNA, 322 bp, Oryza sativa
gtgactctcacggcgaacgcaagagcgacaaccaagcctaaagcgtgggatctggtccaacagcacacccaatttgggtggttctaatgaattcatcaatgtgtgatcctctactaggttgaagcaaaatctggtcatttcttgtcttaatttgtggtaggaaggcaaattaatacaggaaaagtacgatctttgtgtccggcatatgaaaatatgagtcaatttttgtcacttgtagttactttgacagtatatgaaaattgtctacattgtggagtactgttagctgagtatgtatcatgggaaactttacatcttatct

SEQ ID NO: 15965 - DNA, 424 bp, Oryza sativa
  unsure (1)..(424): unsure at all n locations
tcaattctcagcggctgctaacctgccataagcggcgttgcactattggtcgccttgttttacttgcgtcgattccgtccaccagcgaatcacaccaattctgcatccctcctnccatgctgcggcgacacagccaacccaacctcatcttctaccgcggctaagggctggaaaaggctgtgactacgtacggcccatattacttgggccggaacatgtgctatcatacttgggctggaagggattgcgcacggattcgtagctgagccgacggatcgctctcggtcgcagtgacgatggtggccgcctgtcaccgtgttcgccccagaaaggtcctcctcgccggcgacccttccagctgccagatgcgcagcaagtgcatgcatgaattaaagaacaatggcctaaaaatgaaacacgcttt

SEQ ID NO: 15966 - DNA, 324 bp, Oryza sativa
gcttgccggtcgccttgggaacgaccactgggttcgtcagccactccggatggatgacctcgcggatgaatccggcctccagaagtcgcgccacctcctcgcggatgaaggcttgacgttccggggcctgccgccgcactttctgtcggaccggccttgcgcccgatcgcacggcgagacggtgctcaatcacctccctggggaccccgggcatatccgccggtctccatgcgaagacgtcagcgtttgcccgcaggaaagagacgagcgcgtcttcctatttgccgtccagaagaccaccgatccgtgtgtctttgacgggcc

SEQ ID NO: 15967 - DNA, 449 bp, Oryza sativa
tagctaccaggcctctctgcagcacgcacttgtccgattagtccaatggcttcttgcggttccatgacgatgcatgacgagttagctgaccatgcctctagtgttgaaactgaattctgttctcaactgttcttggacaatagttttaacagtatgtagccatgtaggtggtaaagaataagttcatatctcatgtcagctgtcctgttcattgttttctaataaatggcttctgacagaccagaagtttttcatcactagctatgtcaagatccaaaatacgggcatcccacctgagctgtgttacaacagatcttgcagcttcaataagaggggcagtgtcacggattataacccaaccctgcataggcatcatataagtagctaatatttagacaacataagagtacaaatcaatttataactgatgcatgtacagcttcgaatat

SEQ ID NO: 15968 - DNA, 346 bp, Oryza sativa
agcttgtatcggcagccttaccctatgttgtttgagagagatcctcttcccaatcggttcaaagatccggacttctccaaattttcgggacaagatggtgtgtcaacttatgagcacattagccgattattggctcagtgtggtgaagcatcggctgtagactctctgaaagttaagttatttcggctatctttatctggatcggctgttacttgggtttcctctttgccatatgggtcgatcaataattcgaccgatttggagaagcaattccacagctatttctacagtgaggttcatgagatgaaattatctgacttgaccgcgattaatcagcggcatgatg

SEQ ID NO: 15969 - DNA, 450 bp, Oryza sativa
  unsure (1)..(450): unsure at all n locations
tcatcatcttagactcttaggcttgataagagataatattttatgaccaaagaatgacagtgactcagcatgattacaatgcaaggaatcctttcagctcttacacaatactattatgttttataggcaaaagtttctagtttgcacttaatcacatctactgcttaccttccatcaattttttttatcccagcaaaaatattacatgaagcttttaagtggttgctcataatattatacacaatgcaacaaactataattaactcttatgaaaatagatacttataatgatgacaagaccaaacacctttaaggcttttatacttagtgacttggttacctacttcatattttattggccaaatttggagtttgctttatgcaatgcttgttaaacaacagctataatctgcttttttatgcaaagtcaatactgaagagtnaaacatg

SEQ ID NO: 15970 - DNA, 410 bp, Oryza sativa
agcttggctcagaaagttgtacgaggttttcttatttctttttccacttggactctctgaagtccatccagacattgggttcaaattttctaacttggaatcctagctgttaatgttgaaattgttaaattctttgcaatatatgtgatatttgcattgctgatgaagaattaaatcaaccagttcttttactcctgcagcttaatacgactccaattgaagttgccgctaatcgaggcagaagggacattgttaaaatgttgtttcctttaacttcaccaatttcaacactgcctgattggagtatcgatggagttatttctcatgtgcaaacttttggtttgaagccaacggtatttgttcctttacatgccacctgctattgcatatcaattgttatcatcattctt

SEQ ID NO: 15971 - DNA, 429 bp, Oryza sativa
  unsure (1)..(429): unsure at all n locations
ngagctgaattataagaggctctattgtactattntgtatactagaattatgaagagagtagagtagaagaagtcggaggaattccggagttgtcggtaatcctctcctgtttcttttattctgttaattactctgctttcaatataattatctttctgagtaatttagatttacttgtgagaattacctcttggttagtacctaatcatcatacgggattattgtttgctataatcaactaaaatatagtgattgctttagtgagttataaacactagaagagtatatattaattgcttagacgtggtgtttaggtaatcaatagctagtaattgctgcgtatcccacagtatgtttgaggtgggtgtagaggtggcacttaagtcctccctacctgggtacgtagtagagcgacatttgggaacaat

SEQ ID NO: 15972 - DNA, 442 bp, Oryza sativa
tggaggtctcccgacgtggctgattcccacgggctgtgtgacccgggttagtaatgtcgtgtgggtaaaatgtaccccctctgcagaggtcattaaactgttcgaacagccgtgcccacggtcatgggcggatgtgaggtgattcctagcgtagttttgtttgactactgcttgtgaaattgctgttgtgaaactgggttcgatgtttggaaaacctacagctgatgggatcagctaggcccgggtggcagtttaaaagttgttggcccgggtggccgtttgaaaagagttggcccgggtggccgttcaaaaagcttttggccgggtgccaaccttgtttcaagatctaaagactgacacattgcacatactccgaccggacgagacgcactgtctcatccgtgtcgtttgagaagcactcacttagttgcttttagaaaag

SEQ ID NO: 15973 - DNA, 225 bp, Oryza sativa
gagatcatcgcacaattctatgccaccggttactttgagccaatcaaaaaaaagactattcattggatgacagaaggcatcttatactcagtgacatatgcccagtttgctgccattttgggggttttcggctcgctctcgcaccaatcatgtcaagaatcatgatgagaagcccatggacacaaattctcttcacttcttgtaccaagatgtggactatgagtt

SEQ ID NO: 15974 - DNA, 442 bp, Oryza sativa
  unsure (1)..(442): unsure at all n locations
tccaaaccgacaaagatgattntagatcgcaggctggatttgtgttctgcctgaatggaggcgctgtgagttggaagagttccaagcaagatacagtggctgattctacaacagaagccgaatacattgccgcttctgaagcagcaaaggaggctggttggataaagaaattcgtttctcaactaggtgtgatgactagtgcctctagccctatggacctctattgcgataatagtggtgccattgcgcaagccaaggagcctagatcgcatcaaaagtccaaacatattttacggcggtatcacctcattcgcgagatggtgggtagaggagatgtgaagatatgcaaaatacatacagatttgaatgttgcagatccgttgacaaagccactcccttagcctaagcatgaggcacatactanggcaatgggtataagata

SEQ ID NO: 15975 - DNA, 278 bp, Oryza sativa
  unsure (1)..(278): unsure at all n locations
ttataccccagntgagcgcctgtgaagatggagccgtangcccgctactccgctgctgtttattttttattgtcaggccttaagtgcctttgtaataatgtaaatattatcgatataataaagatgtgtcttttatatcatgtttgtatggtgtaccccggctttttctgtgacggngattaatacactagcgttcgggaaaatgcaattttctcggtcgcgacaatccagtatctctagggtgaggcccgtgattctgcatccgtcaaataaaacct

SEQ ID NO: 15976 - DNA, 348 bp, Oryza sativa
  unsure (1)..(348): unsure at all n locations
tncccgcactccactccaccttttgtctctatccgccgttctctcccgtgccctctatcactcccgcgccgctacacccatcggcggcggcctcctgccgggctccggacaccgctaaccatcgctagccgccgcgccgagcctcaccgtcgacgccgccgcgttcaccatcccgtgagccatcgcgttcgccatccgcccggccaaatccaccgtcgaggcccgcttctcctcgcgcgccggtgagtaccaccattgccgccgccttcggccatggtttacgacgccgtagaccacccctctccctctaatccttcccattatgttccctaggaggtcccggagatc

SEQ ID NO: 15977 - DNA, 415 bp, Oryza sativa
agcattctagtctatttaaagaatttttccaatcgagccgaaagtgttcttcatgaaattatcaaaatttgagggtatcatgcagccatagcacacttttctatgtctgatagaaaattacacaaactttgggtgtcatgtaataaaattttccaaaaagaaaaaggaagggaaaatagtgatgcagtgacaacctacacggtaggagtccatgcaatgatgcaaacggagtcaagtgctccactgaagagcaaagagactaagtagagtagaaagtgtcgggctctctgaggtactaaggtatgtcgcaaacgtgtgcagtcagacgtgtggggtgtaactgatatcgtgcgaggaactatgaagtcatatgagacgacggaaatatgttagaatttttactagtcgagataaa

SEQ ID NO: 15978 - DNA, 357 bp, Oryza sativa
ttcagagaatgtctcaacaagttgtatgggtgtgcacctctttggtgacatcaaagaaatcacaatctggagggaagcaggcttcatggtaggcgaaaaacgattggcattattcctcttgcagttttttctcttccactcttttgtaccgggttcgacaacttcgtgtggacgcttagtttgtaacaccatctcataatcttaatgaatatgcttatcctactcttgggccagtctggctaaaataaatgtaatcagagttatacttcatttgttggaaacataacttgtaaaataaaactaatcaattttatccttacagaaggctgctcaatgctgcaataatttatgttgaaa

SEQ ID NO: 15979 - DNA, 335 bp, Oryza sativa
atccggaattggcggaatgttctactaatcgggattctggtgtcactctgaattcttataatcatctacttgataatgcatatttatcttgcgagaattaccctctcgggaggtcctcattgacagacaagaatattgtgcactatgatcaactacaatatagagattgctttggcgagttattaacactaaagtatatattaattgcttagacgtcgcgcttaggttatcattatccacatattgctgcgtatcccacactacgttgatatgggtctagaagtggtgactgttctctagagcacttatgtcctccctgaccggatacgaagtat

SEQ ID NO: 15980 - DNA, 452 bp, Oryza sativa
tgctccactaatatcaagcgcacaagcccttaacatatcctccaatattggagtgacccgctcggtctgaccatcggtctgcggatggtacgctgtgctgaagttcatccgggttcccaattgctcttgcaatttctggcagaactttgaagtgaattggctccctcgatcagatactatctttttgggtactccatgcagacacatgattctcgagagatagagctctgccaaccttttgcctgtatatgtagtatgcacacgaatgaaatgagcaactctggtaagtcgatccacgaccacccagattgaatcgtggcccgatgatgtgctgtgcagacctgttatgaaatctatcccaatttctttccatatccattccgggatctgaagaggctgtaacaatgctgcaggcctgtgatgttctgctctaactcgctgacaaacatcgc

SEQ ID NO: 15981 - DNA, 467 bp, Oryza sativa
tgctgctatcgccatagccgatattaatcagcagattgttcttcagcgtgctgtccgtaaaaaaggcgtcgtccacgtgttgacggtcaaagcccgacatcgggccggtatccagtcccagcgcccggcaggcgacgatcagataggccgcctgcatggaactgttgcgaaacgctgtttcttcggcaagttgtgggctggaggtaaaccaactgcgggcatcaccgtggggaaacagtagtggtaaccgttcataaaattcactgtcccaggcgacgatagcggtgacgggcgcggtcagggttttttgcagattgccgctggaaagtgccgggcgcagacgttcttttccttctgccgtgcgggtaaacacgatccgtgccggagaacagttagctgatgtcggcccccatttcatcagggcataaatctcccgtaacgtctcatcgctgacgggtgtctcccgc

SEQ ID NO: 15982 - DNA, 149 bp, Oryza sativa
ggacccaagaaccgagcatgcacctgggggccaatgaggaggaacttcttattggggcgccctgccctttcatcggaaccggcgccattgataatgatggcaccgaacctgggcgccgggctaaacaatttatgttgacagataaaata

SEQ ID NO: 15983 - DNA, 377 bp, Oryza sativa
  unsure (1)..(377): unsure at all n locations
agctttaagtattactccctncctccgttttaattntttttctctgatcaaagtcaaactactttaagttaacttaaaaagtttgattaagtttctaaaaaaataataacattttcaattcaagataaatttattatgaatacatattcaattatatattaatttaataaaactaatttgatattataaatattaatatgattttgctatatatttgtcgacaaattntctcacaaaaatttgacagatataattacagtacaatcgtagtgtaattacactgtaactataatgtaacttatacgtactttcaaaaatctctttgtaatatgttatttcngtaaaatggaggtgtgggaacaaatccttacacatat

SEQ ID NO: 15984 - DNA, 463 bp, Oryza sativa
ggaccttagaaactcagctgtgtatccaaattaaccaatgtaaccacttttatcatttagttcgaatagatgtcactggcacctgaagagcagagaaagggtgtttcaatggcagaaaatgactaaacttagtgaatctatccaccactactagaatcacagtatagcctgaagaaggtggcaaaccctctatgaaatccattgagacatcttaccaagctcccctaggaataagtagaggttgcaacaggcctggataagagcaatgctcatgcttggcctgttgacagatgacacactactgaacaaattcttccacagatttcttaagaccaccccagacaaacaatttctagggtggtggtggtggtgtagtcgatgtcgacgctgcagaagccccgcctggagtggccaacaacggcggctgcatatgcccgagcgtcgactgcgccaccggaacagt

SEQ ID NO: 15985 - DNA, 227 bp, Oryza sativa
tgttgcgaggcactcattcgtaccctgctgatcagacacactgatgtcaaacgctgcggagcaaatgttccatcgacaggctcaacaataaggcacctatttttcaaatctctttaggaacaccaatatggcatgacatgaacattcttctcactcatttgccctgttgatagaattgcagatctctgctattattaggttcgaaaggtataaaatctaagttagtt

SEQ ID NO: 15986 - DNA, 181 bp, Oryza sativa
agctttgccgactatggtgcgtgctgctgtattgtttccgcatatcccagaaagtatgtctttcagcaattgtctcccttcctctaaagatacgcggcggtgcataaatcctgcaaggcttttgttgtacaactcagcttcatgcataacataaagatatgcttcgtcttgaaaaaccctc

SEQ ID NO: 15987 - DNA, 383 bp, Oryza sativa
tccctgtaccttgacacagcatgttagtaatgatggcttactgtgtctatttcccatagagaacttgctgttgtgcattttcaagtcttagtacatggtctgctgaggaccactgacatcttaggacttcagggttgcgaacatatggaatgattagcaatatgtctgatacatgtatcacttactcattgcaccacactttgctaggacagtctcttcattgctgaaaggatcagcgctcaccttcttacgtcgactagcttcgttaaagatttcagaatcatttgcgtccatttcctgataagtattcagaggagcattacgaacagcttacggatcaccacaaagcataacatagaatgtggactacatgaacatgatgc

SEQ ID NO: 15988 - DNA, 438 bp, Oryza sativa
  unsure (1)..(438): unsure at all n locations
tccaaataatcttnttttctctcaatataaccattatttattaaagctagatacatcgacctaacagaaaatattccattctgatgataattccatctaaagctatcagaggattgattcaattgaatatgtacaatagaagcacacaattcgtgccaatatgcaagattctgaccaactaatgatctcctaaaggaaacattgagtggaacagatctcataacattagcaatagtagaacttttccttcggacaatagagtataaagatgtatatttgtctttaaaagccaggtttcctagccatttatcttcccagaaccttatttgtttcccattatttacaatccaaaaacccatatctaagagggtatctttgaccttcatgagacctgaccaaaaatgagaatcgccctggttcttattaacttgggttata

SEQ ID NO: 15989 - DNA, 368 bp, Oryza sativa
aatggcctgtgggtaaagtgtaaccccttcgcagaggtaaccaactggtcgaacagccatgcccaccggcatgggtggaagtgaagggattcctatcgtaatttttgttgactacttgttgtgaaaatgctggttgtggaaaggagatccgatgtttggaaaaatctgcaactgatgggatcagctaggcccgggtggccgtttgaaagctgttggccgggtgccaatcttgatctattttaaagattgatacattgcacatactccgaccggacgagacgcactgtcttaaccgtgtcgtttgagaagcactcacttagttgattttttttaaaagagttcaaataaaatataatggcaaaacaaca

SEQ ID NO: 15990 - DNA, 309 bp, Oryza sativa
acctaaccagccttttaccaaaactatggcatggtccaaatattgacattgttaaaatctattatatactaaaagtccattaaactttctacaaacgctctcaagttatcacgtggcgctctaataaattaaagaaaatcctagaaattctaaaaaaaaagcaaaacatctacctcttgattttcacttaaattgatgggtccaatattatacaccattagataaaattgatcttaaaacaaaccacataatatgggtcccacctctcctatttctcccgcgtgcataagtataggtcacgtacgtaca

SEQ ID NO: 15991 - DNA, 424 bp, Oryza sativa
tgtacttgtacttgcttttggtgctcttttgtgactcaccattgtcctagctaagctagctaccatcctgtcctccccttgactcgtttgactcccttccaatccccctcctcccaaattctacttcaagaaatacagaaaagaaaagaaaaatcaaagagtcctgactttgcaaacagtgtaccagctctgtcttcttctcccctcttcttaacatggctggttgtcaggagcaggaatttacatgcatgcaactcgattacagcccaagcaagatgtagtagacgagggtgataggcaaggcgatgagcatgccaaagatgacactgcgagcaggagcaaaggcaaaaaatgtcagtggcccgtcgattcaggacagagtgcaaactgagagagaatctagtacttacgctgtgctgagaat

SEQ ID NO: 15992 - DNA, 442 bp, Oryza sativa
agcttcactagagcaggcggcaaaggaggccataatgtgaacaaggtggagacggctgttcgcatggtccatatacccacgggcatcgctgttcgttgcacaggtttgtactcaaagacagtcagtgcagcttgcatgatgtgtcatatcttcgttagggctgtggatctgaatatctgctaattcttggctctatgccttcacatatgttgcataaataggtagttttgtcatgtttgggtaagacccccaatcttagtttgatatgatgtggtcatcaaaagacccaaaaaagaaaaagtgaaattggtaatcgttgaagtaaagtaaagaactgagccagacatcctccaaatgattgaagcctcataatccctcgttgtgaccaatagtaaatgtgcagctaaattcagttttatcacataaacaccatgacttaact

SEQ ID NO: 15993 - DNA, 238 bp, Oryza sativa
cggagagcaactcctgtcaatttactttcgccggatgtttacgccaaatccacttacgactgtctattttcacttaattagggggctaaacagccaagagaggttgaagtgtcgtacaatcgtcccctattggattcgcccggccacaaccaccgatgagccagcccccacttgtggactataacctcaagggagcaggcgataaccaccaacccaacctgaaacccgtttaatgttt

SEQ ID NO: 15994 - DNA, 425 bp, Oryza sativa
  unsure (1)..(425): unsure at all n locations
ttgtactgttagacatgatgattacgaatttactgaccagaatttagtgattaccttgggtgtgatcaagaaatgacaacccaactgcccttgtggcatacggcttggatgcatttcgcaagtgtctctgtctactcacaagcttccgatctgtagctnttcttcaaagctctttatattcatttaggtcatacggcttacttaaaacatcattaagtntttcatcaaatgtagagggaatgccacaactaagagcaagaggttctccttgttcatcttcacatacctgngtccaaaaagcaaggtacataataaataaaacatcattaaagatattgccaagggaacttaagcagacaaatgactcacattcaaatcagaaagttcagtacaaggtggaagtccatgctcatctatgcagacta

SEQ ID NO: 15995 - DNA, 450 bp, Oryza sativa
  unsure (1)..(450): unsure at all n locations
agcttcagggttcagtcctacggaagccgccattttacagtgctgaaccttttcaccggtgaattttcttctgtgatggtaatggataaatggtcagggcggcgaggctcgcaatttatatgcagccatgtggcctgagaaacgcgaggtggctggctttcttggcttggcttcccggatctttctgggatggcgagcttggctctgatccgaaggttcggagatgcgtcacctgtcaaatccatggacctttagctaatctttgctttgggagatacgtcacatgtcaattccactatcgtttgatgtcgacgcatccctgaggctgcacttgatgcgttgctcgtaccacaacaatctttttttttattntaaagggtcctgattttttccgactacttcattagatcattagtgaatcattggtttatgcctctaaaaatatatcat

SEQ ID NO: 15996 - DNA, 374 bp, Oryza sativa
tctcctttcttatcggtgaccacagggagccgaacccacgccgtcgagctcgaactccaccagcccctgcacgccaaagtactatgcgggaggaggcgctcgagagggtcgaaggatccgcgacttcgacatccacgggtgatggagaagggcgccgagatggggagcgtcgcctgctcgtatactgcgaccgcagcacgcgccagggcgcgctgcaagctgcgggcgcgctcctgcgttacccgcccgtcgttcctgacccggagtcttcagcccaacgatggctggacaacgaggtcaacttggtcatgactgcaccgcagcgcctaggtgcttgtgggcggtcctccaacaccaagacctctggcgctggt

SEQ ID NO: 15997 - DNA, 441 bp, Oryza sativa
  unsure (1)..(441): unsure at all n locations
agctngagtgtgtgtgatatttgagctgcctctatctttagntgataggagcgcgcatatntttgtgtgtgtcttggttgctactaaccatggcaggattgtgtaagggaatacgagaacatcgacttctacaccttcgacgagatatgacgacttctccacgtgatgcctatgaggtacatgactatatatttgaacaagttgcatctaagttacccttctatgatgggaagtatgattctgttgcatacattgattgggagctagcagtagacaatgaatttgatatatatgagttttctgatgctcanatgattaaggctgctagtaataagtttacctcttctgcattatcctggtggacttatgttagtaataaacctgaaactcgtgatgaattgaaaccatgatgagaaaacgctntgtgacatcttattacaa

SEQ ID NO: 15998 - DNA, 423 bp, Oryza sativa
  unsure (1)..(423): unsure at all n locations
tcagtttcagctagactattgagtgtagtttataagtgatcctaccaacaattggtatcagagctcatgttaaagaagtgtgagagagatggagggagtaccagctgctggagccaatgcttgcaggtcgccacaacaccgcggccgccatcactcgttatcgccaacaccacggcgaggacgaggtcgaggcgctgctgttcgagaggttgttgtgcagcggactgtcagggaggttggcggcgctgctgctttccccaccctcacgcgaaccaactacaccgagtggtcgctgctgatgaaggtgatgctgcaagcccgtggcctttgngacgcggtggagcatggtgaatgcgatgagcaagaagacaggatggcaatggatgccatcctacgcgctgtccccagcgagatgatctcgct

SEQ ID NO: 15999 - DNA, 380 bp, Oryza sativa
ggatcttaagcgactgagctgcagctgctggttctggttacgcgattttttattttgatttatgctatcgtagcctacgtgtatcccaaccaagaccacatcattgatcaaataaacttggtcaagtgtcaatgcacctggtaagagctgccagcctactccatacatgcatattttgcttgcttgtagaactgaaaacagaaacgcataacacaagccagaggttgttgctatgaacatatcagattcccggaacaagggaaaatttcatgaggcataatggaagctgtcacctcatgagcgtccagccccaactgagactttcatgaacaaatcaagaaaactctttctaaagaattaagaaatcaaggtttacaccc

SEQ ID NO: 16000 - DNA, 389 bp, Oryza sativa
agctttttcataaaatacttgcggcagtttttagatagtcccttaaattgattgtggagggtaaaacacatgctctatatatcgttatcaatagtgacgggtctggttaaccagcgcgtgcaattagttgaccggtattttgcacgtgcatatactctacatattatacgaatatataggaggtcgtgtacgtctttaacaagccacgcagtgttaaaaaagaaaaaacaaagccacgcagtgttgtttcagcagagagagagagagagagagagagatgcgttcttccagaggtgtcattcgccattccgcgtggtgtctggtgtttgtatggtcatggcgggttgcagcagctcaggatcaacaagcaccaaatactgatccagtcg

SEQ ID NO: 16001 - DNA, 440 bp, Oryza sativa
tctcacaagcctagatgtatgtttattttttcttttatataacaaggtagtaggttaagaataaattagtgtatatttatgtaaaagtaagttttttttggtattatatattaatcttatgttcttctaacatttttctttagtattgttaacttaaaattattgcttttctaaaatattaacatcaaaatatgcattgacatatatactcagccaaactcatgagcctaaccgagctcaagttgaacctacttaaaagctcgtaggaggattaggctcggctcgagctccagcctagacaggcaggatgactcgagctcagctcgttgacagccctatgttggaggtagaagatatatgggcacaagactagaagggtctggaaacttttagaccatgtagaggaaggagggtatggaagtagatcagcacactagtag

SEQ ID NO: 16002 - DNA, 416 bp, Oryza sativa
  unsure (1)..(416): unsure at all n locations
cagcttgcaaccaatcttgaactatctcggtttgtccgatcnggtgggattgaaacttggttagtatatttaactgaaacttgatattcttggataaggctatatcagagttatagctgatacaccttatcttcaatcatctaaattacttcagcggctacgatataaatccatataattattaattgtctttttcttgagcataagcagntaatgctgtctcggttaggtccaatctattgtgattgcttatatttaagaaaaggatcgaattagtaattgcatgtcatttgcttctacagcctattgcaagtattttaggtctaatacacaaatatctgtccatcggctagttatatttaggtcatataattatctaatgattgactttaactttatcaaccttatgatgatga

SEQ ID NO: 16003 - DNA, 457 bp, Oryza sativa
  unsure (1)..(457): unsure at all n locations
cttaacactcaagctttaacactttcgtggnttggtttcttcgatgaatcttgaatttcctggttctttgaaaagaattcgaagtgataatggtggtgagtttaaaaatacttcttttgaacaattntgcaatgaaagaggtcttgaacatgaattttcttctcctcgtgttcctcaacaaaacagtgttgttgaaaggaaaaatcgtgttttggttgagatggctagaacgatatttgatgaatataaaactcctagaaaattttgggctgaggctattaacaccgcttgttacatttcaaatcgagttatcttgcgttctaaacttggcaaaacttcttatgaacttcgatttggtcatcaatccaaagtttcacatttgcgtgtttttggttgcaaatggcttgtcttgaaatctggaaatttggacaagtttgaggcacgctctatcgatgga

SEQ ID NO: 16004 - DNA, 327 bp, Oryza sativa
gcatcatattatgccaagcagtcggcatatcacttggatcatattattcggggattcacaccgcatatgctatatattgatatcaaatcacttggttgattacaattatcaaaccactcgggtgggtagattatttattccttgactatatgtttggatggttcaattaaccacatagtcgggggctacacctattaggtgcatctattcgatgcacctgactttatttttcagccctccacagtcttcagatttggtaaaagtactcgggagaccatggcgaagatgattgaagcactccgctttggagtaatctagttcgagaga

SEQ ID NO: 16005 - DNA, 459 bp, Oryza sativa
  unsure (1)..(459): unsure at all n locations
tcttagacactcagcttctgctactttcctcccagaatggaagtgctgcagtttctaccaccgatcatgaaattcctgcaccagccactgtcaatggccacgaatcatcaacgtgagtatagcgatgtttgtcttgtggaggatcgcgaacatcatgccggcattatatccatgtagtttaactgtctgtactataacttgatgagaacctgttaggtacctaggccatttctttaccatcatttagggtttgaatgttgttctgcatatgttgtaagccatgaaaaatcatgcttccggtcattatggccgtagcaattttatttcttgttagactcttgggtggaagtgagaacagagaaggtgatgaagtgaatattttacttgtgtcttgtagntatctatatttatctcacaattgatttatcccatacagctgtttcgtttgtaccgttttgc

SEQ ID NO: 16006 - DNA, 437 bp, Oryza sativa
  unsure (1)..(437): unsure at all n locations
tagcatatgtgggtgtatgatcttgatcacagagcatgtttagtatctacaccagtcacaaggatttgaccaagtttaatggaattaccagaaacccgaatggatatggtttaatcaatatgaatatttttggctttggtaggaatttatatcaaatgaggaactttcaaatttatcattttggaaaataaaacatacggaactcaagtcaaacttagaacatgatcatagcaactcttattttactatctcatatctcgcaacaacctagactcagatcagcaaagtgcagctcacttacctcangttcccggataaattttggcttctctgattcaaattttgagaccatacttaaccatgaatccatatatgagagatatcaaacagagcaactattcatcattcaatatgaagaactagcatgtttacctaca

SEQ ID NO: 16007 - DNA, 282 bp, Oryza sativa
ctgaaacctgtttatatctctcaatggcgtgacccgaagatacacaaagtcattcactgcaaattccagatcacggcgacggttatcggcataacttttctgccgagactgtgccacctttaagttatcccgaatgattctgactttagcttcagcttctctcaagatatcagtcccgaacacttggctttccccaacttggtcccacaggagcggtgtccggcatttgcgcccgtacaacgcttcatatggtgccatttgtatgctggcttgatagctgtt

SEQ ID NO: 16008 - DNA, 416 bp, Oryza sativa
  unsure (1)..(416): unsure at all n locations
gacctataaaactaagcttctttactgaagaggggagaaatatgatcatgaatttgtacaaccacagtactcagcaagccacaccggcggatgcacgattaatgcaagggggtacaaggggtaatgatatangggttaagttttgcagaaaacagcatttaaaagtcacttagttgcccaaagccattttataaagacgatcctagagctacacagtattattaatcaaggccgtgaaccctcacgaacctgccttaacccaaggcctacgatgatccagaccgaactggcaacccgaccctgggtcccagctcgtcccaagccaacccaggccaaccattccacattntagttgttaagcaggtttaagaattaaaacactaacttgtgtacattgctcggcttgcccataaccg

SEQ ID NO: 16009 - DNA, 416 bp, Oryza sativa
cagcatgcagctatggaaactgatcctctaaccttcatgcttctgatggccactaatgtgccaatgcctagtcgtcccctgtacatctgacaaacaaacaaagatctgatctcagctcccaagcttttcaaaatgcaggacttattcatcacactcatataagcccgtgaggttaatttgaacagaatacagtgaacttcatgcatcaaatagttgtaggtagctcaatgggacattttaccatccttaaaaatgtactgagagataccacattcttgattgtaaattgataacttcacgtgctacgtatcttgagtatctaaactttaacttgcttacggaaccataaaattctcttgctcaatagaatctgaactgatcaatggagaagaattgcatacttccccaaagaatct

SEQ ID NO: 16010 - DNA, 407 bp, Oryza sativa
  unsure (1)..(407): unsure at all n locations
gttctttgttttcttgcatgcatggtcaagaatggttctggttgctgcttctaaattctgcaagttatatatatacgtatgtatatactaatgcatctggggataaagcgagcatacattttctgttggacactatacatgaatgtaggtgacatanaatgatttatatatccactgtccaacaagaaaagtgagttggnttatatatctactttccaagatgatagcaaaaatgcaattagagtttttgcaacttttgtatcagagaaacaaccaatcacatcctgtgtgattaccctttggtttgctttgcttggagtgtaattagggatatatgtggattagggatacccttgcagtatatgcaacaaacttcatgtatacactatgtggattatggatatgta

SEQ ID NO: 16011 - DNA, 426 bp, Oryza sativa
  unsure (1)..(426): unsure at all n locations
atcgttccatgattggtagcttgctttttcttatcgcatctaggccggatatcatgtttagtgtttgcatgtatgcaccggttcaagccgctcctaaagagtgtcacttattggccgtgaaaaggattctaagatatttaaagcattcctctactattagcttgtggtacccaaaaggtgctaaatttaagcttgttggctattccgattcggattatgccggctacaaagtggatagaaagagcacatccggtagttgccaaatgcttggtagatcccttgtgtcatggtcatccaagaaacaaaactctgtagccctttctaccgccgaagcggaatatatttcggcgggtattgttgtgcccaatgcttngataaaacaaatttgtggactaggcatatcttcccgaacccaacccactccta

SEQ ID NO: 16012 - DNA, 451 bp, Oryza sativa
  unsure (1)..(451): unsure at all n locations
gctgagtgtgtgtgagatttgagctgccagtacctagtagttgataggagcgtttatattcttgngtatgtttcttggttgctgctaaccatggcaggattgcgcaaggggaaacaagatggtcatgctcaacgtcaacatctacaccttcgacgagatatgacgacttcttcacgtgatgcatatgaggtacatgactataattttgcacaagttgcatgtaagttaccagtctatgatggaaagtatgattccgctgcatacattaattgggagctagcagtagaaaaacaatttgatgagtatgaattttctaatgctcaaatgattaaggctgctagtaataagtgtaccggttctgcatcttnttggtggcatactgtggggaattagattgaacttgggatgaatgcccaatactgatgagaaaaagatttgtgtttcatactat

SEQ ID NO: 16013 - DNA, 445 bp, Oryza sativa
agcttctccactcctccgcggatgaccccgtccattttctctgcgccatccaactcctattcaccggcggtgccctccttcatggtatggacaaccgggttgcctactctcccacctcacctcgccagactgcttagctcccgacgctatcctctacccagcgccgccatgtcgctcgtcgtcaggcgtcggacctccttctcttcgcaccggacaaccagcccacccaaatgacgacaagaaaaactagaaagggtataaagggagagaagaggataatagagagggtaatgccgtggtcaccttgatatgtaggggtcacgtgggctccatggtgactcagtcgtcatgtccgacaaaaccaggatcaatggtgtctaacgacctggaatgatctagatttgtaagctgagggacctatacatctggattcttaggtgagaga

SEQ ID NO: 16014 - DNA, 466 bp, Oryza sativa
  unsure (1)..(466): unsure at all n locations
cacatagctcgcanacaaggtcttcctgacgtttgtgtnaactatactctataagatgtatggtcatgctaccatggaagttcaggtgacttgcctttgtgatcaaatttttagtactgcatagtgtgcgttcaatatcatcttatttacctgtttgcattctaatctgattacaggaagcatttgtgaagatatgtgaacaagccaaggcatacttagagatgaaaggcgaactagtcagtggtcttaacttaatcaataacaccaatttggaatttttccctgtgaagaacaaagcagaaatatttcgtctgagaggtgacttcctgctaaaaatgaatgactgcgagaatgcaaatgttgcttattcaaatgctataacactttttaagcatttgccaaaagcatggattagctgggggaattactgcgatatggtatgcatgttatcctttatgctcttaat

SEQ ID NO: 16015 - DNA, 436 bp, Oryza sativa
acctccattgtccgatttttgtgtcttgagaatattaaatcttgagggatgcctaggcttgtgtgacaatcatctgaaagatatcagcattttgtttcacttgaagtatttgagcctttgtagaacatggatttcaaaactcccaccagaaataggagacctgcatagtttggaaacattagacataagggacacaaatatagaagaactacctggaaccattattaggaatgtgcaactgaagtatatacttagtggtggccatacatggggaaaaataaagctacctgatggtatagggagcatggcatccctaagagtcatatctggattcaatatttgttgtagctcgaccaatgcagtgcaagaactttgtactctgaaaggtttaagggagcttacaatcaactggactgatttcagctcctgcgatatg

SEQ ID NO: 16016 - DNA, 476 bp, Oryza sativa
  unsure (1)..(476): unsure at all n locations
actcaagcttaacgaanactacatagacaaacactggtagcatactgtatatntgtgggatgtataaattccaagtacttcaatatatgcgagacagagttgagtcttcaagaatcaagagaaacagagatttgcctcataattcatggtcttttcctagaccgaagaaccaaacaagactccatttaagccttcatttagggaaaccggatgagaggaggtgatgggccggtcgaaggcgggtgtgcaacttatgcggcaattggtgaaagcagggaaccaagcagagcagacagcacaggccacaggagagagctgaactgccatatcagcttgaggcaccttgtaacaggcagcgaagtgcggagacgaggctacttgagggggacaattcttggtgtgcctgttcaaaaaaaaaggaagcanatattgaagtanatgccgtgtttgaaagctcggtagtgaatggaataaat

SEQ ID NO: 16017 - DNA, 421 bp, Oryza sativa
  unsure (1)..(421): unsure at all n locations
agcttgaagaaatgccggcaagtattgactctcttttattcttngnctactatgccatcacattgctggtgagtacaattaataatactaagttaagtttctatcgaaatattaatcttgggacctaataggatagtctcttatgagttaaaaataaacgcaaacctttttcactacggtgagcttatgatcgagcgaagctaggccaccaagtgggagctgaggagctccaatcgtaaaatgcaagaacgcccgctggtcctctctttcaaactcccgcaagatctccaggaactgaaaagaaaacgattttttcaattgactttctcattacaagttaagatataaaatatgtgggaggcataggcttatatgttgtacttacactaattactgatgcactgttcgcatcatattcata

SEQ ID NO: 16018 - DNA, 459 bp, Oryza sativa
  unsure (1)..(459): unsure at all n locations
taatactgaagtactgacaattactccttgctctntcatgataacaaggaggttcatttcatattcagcgtttcagcttcaggataaactccatatatagaatgaaattctctgatttgaactaacataagtacagtagtaacttggttgttcagatttcagaatcttttgctcatgcatgcaggaagcagaagcaggggaagaagtaaaatgttccagctgaaaagtcatatccgctctgcagaatccagacacaaacgcaacaacgccttggaacgtcgccattcaattcaacgcaggtttggtttccgttctgttctgcaaaccccaaagaaaaaaaattaaaataaagaaaaaagaaaaggagtagagtgctcgtangccggagcaacaagcaaagctaacgatgcaggataaaagcagtcaacaaaagacttcaatggctgtggaagtagtaac

SEQ ID NO: 16019 - DNA, 375 bp, Oryza sativa
  unsure (1)..(375): unsure at all n locations
gcttggagttgcgcctgcagagccgaatttcctttcaccattgttngtggcgcttggcccggtggttgatggtgtacttgggcaacgactgcggccgattgctacccggcgaagtacattggcgcttgtgcgacttgaagtggaaagggctgggtcgtcacttgcggatggacttgaggcgggacataacctgccgaatactgaaggattggagccgacgtgaccttggtccgccttgccgcctcgtatgcttgttngtgttcttgcatttggcgaagcatgtcttggagccgtgccatgttttgtcgcatggcttctatgtcggcttcggcttgtgtttcngggtcagggcttgacttggcctgcacaacggcg

SEQ ID NO: 16020 - DNA, 448 bp, Oryza sativa
tggaagtgtgtgtgaagtgaagaagtgaggtctatttatatggtagttataatgggtgggagaaggggaaatgtttgaactgccctacaaccgtcattaggagagcatctggagcatccacgccaaaccccaggatcaacagtgatcagggaggttcgggctgggccctctcggcttggacttcggcctgtggactcccctgactctcctctatccgtttctcggaattttgggcttagtctttggtattttgatgaagttcacaacccatccttctatggatacttgtttctcctcactttagtctgattttcctcctaacttcagggtttatcacctgtatacaaatatacaccaacacttgtgagattaagctcctatcactatgttggatgttttattatctgaactttatgtagaatgtggcggtatagaaatggtatttaac

SEQ ID NO: 16021 - DNA, 327 bp, Oryza sativa
  unsure (1)..(327): unsure at all n locations
agcttcttgccctagtagtccactccatgtgatattctangacaacgcacaagccctgcagttccaaagcgaagtcagtcagatccaaaccatgaccgttgaggttgtcggccatctataaacaaaggcaaaagaaaantttttgatgataaatgaagcagcaagacagggaaagactaaaggattttcacaaataagagaagaattttatttcaaaatactgctaaggcttgggatctaaggctcatcctatggtcaaggaggctctgataccaacttgtcacgaccggaattaacccaacgggcattccatacgtgcgtgtatta

SEQ ID NO: 16022 - DNA, 450 bp, Oryza sativa
  unsure (1)..(450): unsure at all n locations
tgagacatcaactctggaggatgagaactccacaaatgttcatgaaagcttctctttcgaaatcccccaggattcatgctcacataaggaatccctagagtcttgtcagtttaatgtcacttccttatgcgaggaccacagctacctttcgggcctcatctcaaacattgtttagaaggttggttgtggatgcttttatttatcataaatactgcaaatcacgtatatgttgtggcactaatcttgcagcatgatgtctccatggtcaagcttgtgagaataaacaaagcactaccgggagataccccggattatcttggtaagttttctttccaataaaaataagaacaaatttttaggatattatacaccttcgggtattctccatttcaggttgagattaagaacaanggacgtacggtgcctaataactcgggagctacaacaact

SEQ ID NO: 16023 - DNA, 432 bp, Oryza sativa
  unsure (1)..(432): unsure at all n locations
gctggatccgacattagatgaagtttagaagctatgtaatacttgcccgtaatttgctagaacaaagagagtcctttttcattacaatggtcatggtgtaccaaaacctacagctaatggggagatttgggtatttaacaaggtgaatgttgcaaagacactgcataaactgctgcattgtttatccatgtgtgtttttgacgaagtgccctttttttactttttgtgcagagttacacacaatatattccgcttcccattactgatcttgattcatggctganaacaccttctatatatngttttgactgctcagcagctggaatgattgtgaaagcttttctggaggtatggtatagttccttctaaattttatacgtacgccagatactttgaagtganagtgataatgatgaattcctatcttgttct

SEQ ID NO: 16024 - DNA, 455 bp, Oryza sativa
tcttgtataggcaaatattattatttgcaacacaactttatcgctctatcagaatatcaattacaaataccacaatgccttccttactgatctactgtagtactcctattgtagtactgtgtgtgtgtttgtagatccatgtcgatgatgggaaacaagtgataatcatagcttgttgctgaatatgtcatgtatatcctggacaatgcatagccgcgtgcttgcatgagcttttcagattagcagaaagtgccgaccaatgcttaactgaaggtcatatcaccgaagtgcatggattgtaaaagtgtaaagttaacacgctttttcaactaatcatacagatcgtgtaaactgtttctggaacttccaaacattggacaattatatatatcgtggaaaactaactgtttttgacaggacatggataaatacttattcatgcatattcatttcat

SEQ ID NO: 16025 - DNA, 368 bp, Oryza sativa
  unsure (1)..(368): unsure at all n locations
tacactttttacatgcataaaacatntaatggctcagcacttacaatgagagaatagagcattctactataccagcattgtttacacaactttagataaatactaccattctatttaggaaataaaataagggaattctaaagctcactttggaatgactaacccaacacagtaaacagtgggagggggacgtaacatgcaaacatgtgggtctctttttgaagtaaaatctgattccatgcctcttttttaataaatagcatgcacacaacaaatctcattcgaaaatcaagaacagcaaggaaataactcacaatcacaaattatatctttaaagataaaaacataatattggttaccatgggcat

SEQ ID NO: 16026 - DNA, 454 bp, Oryza sativa
  unsure (1)..(454): unsure at all n locations
tcgagcaactcagagcaaagctgactctctgcgcctattctagttcttcttatcatcaggaaagactttgttatatattgtgatgcatcaaggcaagggctaggaggagtactgatgcatgacggaaaggttgtggcctatgcattgcgacaattgcgaccacatgaggaaaattaccctactcatgacctanaactagcagccgtggttcatgcgctaaagatttggagacactacttgattggaaaccattgcgatatctacattgaccacaagagtctgaagtatattttcacccagtcagatctcaacttgaggcaaaggcgatggctggaattaatcaaggactatgatctaaaggttcactaccaccccggcaaagcaaacgttgtggccgacgctttgagtcgtaagagccattgcaatcatctgagaatggaaggaatggctcccg

SEQ ID NO: 16027 - DNA, 434 bp, Oryza sativa
  unsure (1)..(434): unsure at all n locations
agcttgactctttgattctggttttatgaatcggacacgcgaaagagcgtggagttagattntgatgtgtgctacgcagcagcctttgaaatcaaaatcaaattaggaaacttaatttactgacaggagacaaacacgtcatgtctgcatagctaaattagaaataataaatatgcacaactgacacgtcctgtacaaaatcatatgtaggggagataaaacaactgggcatccgaactccttcaaccacatttaagttntgctctatcgcataatctttagagacggtatgttttttagaaaaaataaattctactccctccatctacttttgatagtcatattttcaaatctgaaaattctattnttgataggcatatttcaattcaacaacctatcatcttaatgactntctcggatttgatgcatgactc

SEQ ID NO: 16028 - DNA, 455 bp, Oryza sativa
  unsure (1)..(455): unsure at all n locations
ntccctgaagtaacctttactgatgcacttgtggagcttatgtgtgacaaattctatgatgggttggcagctatgaacttccaatacttctgagcaatccttgtggctgtcaccatcttgttatccctccttggtgggcaagcatgcaagctctcatatgtcacaatttgccaactgtcagacctggagttctttgatagcaaacagacccattgacaggtatcccagtcacacttgcccctgacccttttctgatcatcttttataaaattgatcaccttcttctcagctaatgcatattttgtgatggccttcttgaactgattcttgcaattgaacttcatgccaagttcaaatgtgggaactccatccttcttcttatatcttggatgtttggcctgccttattctaacctccccatcactgccaagttcttcaactgaatagtcatcttc

SEQ ID NO: 16029 - DNA, 328 bp, Oryza sativa
tgggaaattaaccgtcccttgtattcttggtagtttgtggtattcaaatgatctcattggtgaatagttctaaagttctcacatgttagctactgattttatgccgtatatgcacattctgcatacttcctccattttaaactacaatgcctgtgtttttacattcttacttcaaaataaatacgtgtatatcatataggtttattgatccatactctcttttatctttgctggctcttatcatttgcgagcaaacacctacacaaactatttctatcatggctgatttctgatttaaccttccgtagccctcgtcatggcttataaa

SEQ ID NO: 16030 - DNA, 433 bp, Oryza sativa
  unsure (1)..(433): unsure at all n locations
ctgnttctgctctgcagngctagctattaagtcatctgtatcagataccagcatagaacacacttcattaatttgtaaaatggctgaaggccccgtcgtccaatgctaaaacagaaggatttgatggtgatcagctacagctgctcggctggtaccaagctgacatggatatntgtcgtgctgctcatcctggtcgcggcgacacaagtccatggcgtgtctcctcctggtaattatcagagctgtttcctctgcgagcctgcttctttgtaatccatgctccatctgcacagttcagatcacttcattatatgcagctctagaaaagtagaaatcaatgcataatacttgagagctaattaaacactctcatatacttccttccaagaataaatatgtaagcacttcccgtatacttagcgaccaaatatct

SEQ ID NO: 16031 - DNA, 263 bp, Oryza sativa
  unsure (1)..(263): unsure at all n locations
gtgacatttgaaatgaagggtatgactagacacatgtggtggttggcagcactgagcagagaaccaggaggagatgaatccggctagcatctctttacttgggtccgtcttctcaaatctcattcacaagaagaaaaaaaaagattgcctcaacgacctcgtcgtatcgtgctaactatggatcacctatgcgaagggtaggccttcgattaaaatttcaagtgatttcctgatcaaagntttggatctgtagttggaaagtc

SEQ ID NO: 16032 - DNA, 443 bp, Oryza sativa
  unsure (1)..(443): unsure at all n locations
gtcaactgaggcatgaagcttctcatcttgcttaccagaaccctgtttgttttcaccgaccccgccccggggttcccaactattggcatgtgaagttttcctgaaccgactagttaacttagccagggtgtcccattccaccttgtggttgcactttgattatgctcgatgagtttcccacaggaatcggtccttatatgcgaatacgggacagcgccacgtagccacagctcccgcatcgtgagttttcacaattcattttatttttcaaacacaccgacatcacatgtcgggttttcaagggcttacaaacccatattccaaagtttcgacaatcaacggtgtatgtgggatatatggtatgcgcgctcagagagcaccgatactgatgtaccacaagggtggagcaacaatgaatcacggtagtacaacctacangagtt

SEQ ID NO: 16033 - DNA, 309 bp, Oryza sativa
ttacagaactccttgagctgttaaaggatctgttgccagaggggaacaatttacctcagacgacatatgaagcgaagcaagtattatgtccgttgggcctggaagtcaaaagaattcatgcatgtccgaacgactgcattttgtattacaaggaatacgctgacttggatgtctgccctatctgtgggggatcaagatacaaacgagcaaagagtgaaggtgaaggaagtaagtcaaagaggggaggcccagcaaaggtggtgtggtatctcccaattgcggagcgcatgaagagaatgtttgcgaaca

SEQ ID NO: 16034 - DNA, 213 bp, Oryza sativa
taagcaacacatattacaatgataaaaatttgcgataaattttattacatgtcttacgatctaaacactaaaaataaccttgatgaaaaccccaaatctctttaaattaagattaaatattaaatttggctgatagcatgacgtagcgaaagatatgctgcaagctgtcaaaaggtatagtttggtgctgatacgatggatggatggcataac

SEQ ID NO: 16035 - DNA, 414 bp, Oryza sativa
  unsure (1)..(414): unsure at all n locations
agcctcatcttcaccttgacgaacacagtgatcgtctttgtttcttcctccaaatccttgggtcgcagctcgaacgccctcgactcttgattatagacgctgacatactcggcgaactcgccttcctccggtggatcatcggcgaagattntctcccagacatgtgcccgccacagcctccggtcctcctgcagccgctgcgtctcctcgaactcgtcgacgtcgtactccacctcgacgaagccgttgctgccgtactcgacgcggaacttggcccaggatttgcccaggtggccttgaggatgccgttgacgtgcaccaacagcgcctcccgctcgtcgtcgtaatagatctccgggaggtggtcctcgtcagcgtctgcgtcgggacgaatgggaaatgggatgatctctc

SEQ ID NO: 16036 - DNA, 362 bp, Oryza sativa
cccaagatgcacgaagcggaacgatgaaatcaatgcccatgtcgtaaacgcctaaaatgtgacgatgtggtgggcgacgcaaacccattctctgaacgggaaaaagaaaaattggcggcagtagcaatatatgtcgccaaaaccaatctgaacctcgagctcacggcgttgatgttcctggtagcatggaagagctcacatgcagcatgttgactcaagccatgcatgcatatgtgccgccgcagacgtcgagcatgcatgctcgttgcgtgcatacacaggtgcagaacagctagagccattagtagacggtagacgatgagattgctgttggtgctgcttgacgcgaaatgacaaagatg

SEQ ID NO: 16037 - DNA, 416 bp, Oryza sativa
  unsure (1)..(416): unsure at all n locations
tgcctgatgctgtacgtnggctcaagagatatatggtatatattcagaccatttggtanggaacctggacatgtattttcacctttttgtgaggtcctgtaagatatgacacatggtgtctagatcataagctcaggggactggatttgactactcacacctaccatgatatacccgagtacatgctctgatgtatgagataggcacaggttctggatgatcataaggtaccacgttcataaccctcacaggatggtggatgagtgacgccgtacctgtgtgaaaagatagagggaccaagtggttaccttttaccatgagtcaatctatatagctcgaccgctcattgatctaagaagcataaggatccttgtatcatactgtgtgacgcaattggtatcgagtgaacggaacat

SEQ ID NO: 16038 - DNA, 447 bp, Oryza sativa
  unsure (1)..(447): unsure at all n locations
caactgactgcggaagctcatgcacgaaatattctcaaacttgtctgtagtcatcagaatatccagtagaagagtagggtcagttgatgtcaactttccactgtacataaagcttaaaagctccataagggcattttcctctgttccaagtaaaatgaagataatgaggcatatggaaagagttcaagagaaaattattgatcatttgacttccgtaaatgatcaaggaagttgtgcatgcatgaaggcagatagattgacaaaacatctatttaatatgtgaagccaatgaagaaaaagagactaatcataatatcaaagacaaaaagaggagaagcagaaaccaccttcaccataaaacctaanatcaatattacattacaatatagtataaattaggaatattacgcagaattatagcacaactgcnacacanattataataag

SEQ ID NO: 16039 - DNA, 353 bp, Oryza sativa
cagcttatagtagaacaacattcaaagatatttctacatcctacacactctcttgtaccagaaagtcactgccatctcctgtgtactaccacatattggttcatcatcgaaaccattcattggatctatcaagcatattgtattcttgtatacaacccagttgtgaaaaggcatgtagcctattggttacagtgacctgagtaacaccccacagttctgagttcagattgagttattaatagaattcggattcatcctacagtgcaacgacaatttcaggataaaacgaaccccatagaatcaacaaactatgcatcccaatcgaatcaaaagaggggaatacaaacttacca

SEQ ID NO: 16040 - DNA, 442 bp, Oryza sativa
  unsure (1)..(442): unsure at all n locations
tatgagctngccgaagatctaaagcagtctgttaaacctgagctgactggtccatggggctcacggctatttgacaaagctgttatgtataaatcaacaactttgtaagttttttcacacttagcaaagcaaataagcaatagagtactacatctatgctacttaaaatgttagtagtggtggtgtncgtttctgcacaccacccctaccactgatatttatgaccaataatctatagtattacacaaacctccaacgagtcctctcccgtttcactgttggtttatcttaaactttgaaatcacctacttattcaatctatactacttcaaatgtcagtagtggtggtgtctgtacttgcacaccacccctgccactgatacttaagccccacatactatagtattacacctacctcacacgagtactctcctgttcactg

SEQ ID NO: 16041 - DNA, 339 bp, Oryza sativa
tatacatctcggcagttacgtccgcatgagaagaactaccctactcatgatcttgagttaactgcagggggtcatgcgttgaagatttggcgtcattatcttttccgtactcgtacagaggtgtacaccgatcacaagagtttaaagtatatctttactcagcccgatctgaacatgagacaacggagatggttggaattaattaaggattatgacatgggaattcattatcacccgggaaaggctaatgttgtagcagacgctcttatcaggaaaggctattgcaatgctacggaaggacgacagttgccattggagttatgccagggaattgaaata

SEQ ID NO: 16042 - DNA, 443 bp, Oryza sativa
tagctacacatcatacacagaataacacaatattgcacaatctagagatgccgtagactcgaatagtcattttccatgtaaatatgatattataattaactcatgcgtaggctaatgtagcaatagggatatggacattgtcaaaagtggtttaaaagaaggttaattatgatgatatgtggtaactggagcacgacctaatttacggtgatcatccataacttaacattgacaattactcttaccgacaataaaaaaaggttcatgactaatgaaatactaccagatttgagtattgtactgcacaagctggtgtacttgcacgacacaaacttgttttcagataaatatcccatactgcaatacttttgaatacatatttttgtaaatggagatgtcattggagcggtccgaagaactatgatgacatggtaactcaagta

SEQ ID NO: 16043 - DNA, 394 bp, Oryza sativa
  unsure (1)..(394): unsure at all n locations
atgaaaaggggaaggcgatccaatgaataaaaaaggatgaggtccttcgncagccactactactcatcctaatcatacgcatatcatttctttatatataaatggtgcgcaataaaggtcatttttgtgctataaagctcaaattctgtgaagcccaatcatccacgaaaaattaaccgtcggatcatttgaggaagttattctcaaccattcgattatctccaatatgcttctttttatggtccattcatttgattaggtccatttgaaattcttattcttctcagcccatcaaagaaccagcaacgaggtatggagttgttcgatctccccatgtggggctacaagtggtcactatggacgtaccaatactctgttgcttcatctccatatt

SEQ ID NO: 16044 - DNA, 448 bp, Oryza sativa
taattgtatgacacactaatgattgctggataaaagtctagtggaacaccaccctatcggtgatataattcatctcggaaatcaccaattcaatgtagtgttcctatgattaaaattatgtggctagtcacactagtggacagtaatgtgaagaccaggattaaatagaaatttagtggaaggagtagtagattatgtggtggtttggaggttgaaccccaccttcccacaaccagtactttgtgccagataagttaaaactaaaatacaaataattaagtgtgaacacattttcttctttctacttggtggcaaaatgtgccatcgacaatgttagtacccattaatggtttaaaacaaaaatgaacatggataattaatatctcaagcatgatatattaattatggctagctacttgaattaatttcgggattgcaataaccacat

SEQ ID NO: 16045 - DNA, 450 bp, Oryza sativa
  unsure (1)..(450): unsure at all n locations
ntatgatcatcaacgtcgagtctacataatcgacttatcaatacctatcataaaaaanaaccggatcctagtttctcatcaaaactcacctaattgaagtttccgttagcgaaaaaccactacatattatatcgataaaaaccagcgtgaaaagtggtttatgatgttatttatcctgttctggaatttaagggtgaaaaacaatcgattttataaatcaagttgcaaaatagactctagacaatggctgtgtttagttcacgccaaaattagaaatttagttgaaattggaacgatgtgacggaaaagttggaaatttgtgtgtgtaggaaagttttgatgtaatagaaaagttggaagtttgaagaanaactttgaaactaaacacggccaaagtttgtttgaaggactaaaaacggagttcacctaaatnccaagtatttgaagtac

SEQ ID NO: 16046 - DNA, 435 bp, Oryza sativa
aagcttgacaaggcgggtgacgcgagttctattcttttgttttctcttccgccttttcgattggtgcgactcctaacaattgatccgctattagaccggtgtcagtaataaattgttctaatcgcatttctttaccagtcaccaacggctcgatctcctgggttgtgtgctcttcaagctgaaggactggtttggactttccacaatatgctttctttatcgttcgctcatagtccgatagattgatggcctccttgacagatgcaaacatacccctaaagaagttcctgacactggggtctataagaatcttcttttctggacttcgaggcttgaaatgtctcttacttctgatgcaacgaagcgtcaagctccttttgcgtgcaattcgaccccgggtccttgtttttggcggcgtcaactatcgccttcttg

SEQ ID NO: 16047 - DNA, 437 bp, Oryza sativa
  unsure (1)..(437): unsure at all n locations
ntaacccattcaattgcctgcaatattcagtttctttatttntgatgcatcacgtaacaggaaacagaaaaaaaaagttactttgcagtggtataattgcgagacgtatgatttttcagcttaaaataagaattcagaaaagctaatggtacatcatgaactggtaaataatgagaaacattaccagaaagctactgccactctggccagtactattacttcatactgccttaaaaagggttaccaaatatctggcaagcagataaagttcattgctccctaaaccattatctagtactactttctaaccattttctttcctataaggacaaaatatggacaccagagttatattgttgtgtgcctcaaccaanagtggaaacaggatcagaactgcatgctccagagaaccggctgcaataatgcaatcacatcac

SEQ ID NO: 16048 - DNA, 422 bp, Oryza sativa
ttacctcttgtcggagatcgaacccgatgcagcccatctctaaagcaagaactcgtcgaaaacaaacgaaagtaaaagggtggcaatgcgttgagattgttattgaactgtgcgttaattgattacatgggtttgggctactttaatacctaaagtacacaatatgtccttgtcggacacgactcctaactctattacaacttaagatacaaacaagtccctaaggcggacttttaccgactcaaagtataaggaaattacaaaaaatattctaattaatagatacaattgtcttcccaggactcaatccatgcgtggcaatccatatgaagcacattaacccgatccgatgacgtatacccagtcatattgtcggaatcggctcaatcgacaaccttggccgactcgaactctaccgatct

SEQ ID NO: 16049 - DNA, 378 bp, Oryza sativa
tgagagcctggtagcctggagctgtgactacctgacatttgctcagagcgtgcatagattcgtggacttctcggctcactctatagatggcaagaggcatgaaggagttctataacatgtacttctacaacgtgctcgacataatactacatcttgcctgtacacatgatagacatgaacataatgttcgcacagaggtgcatcatagttaccaatgtatgatatgaaccatgactctgtacctacgatgttatggagctaactatatacgatgaacttgctgtatgtgacttgtataatgctctgatgactaacgctgctgacaactagcgtacctattacgcattattgtggaggactattgttgacaatgctaca

SEQ ID NO: 16050 - DNA, 442 bp, Oryza sativa
  unsure (1)..(442): unsure at all n locations
ttattctactcgtcattaacttctcactctaccctctttattcaaacacataggaccacagcgatcagaacgtactggacatgacccgtgtgctgcctcactagaatcacctcattcactaggtctaatctcatacgaaaaaatggtcgtactcatattcgtttcctatctaatttcttgactagtccttaaaatagggtcaacaataaccattttgtgactactacataattgattttttctagacgagatctcctttaagttgcaggcagatcataactacttccgcctgaaaaatcaatctcccatgcacagttcaagaacgccatgcgaaaatatccctctcccatagtcccctcctctgtccactcatcacactcnctgttcaactctcccattcctcttcccactctttccttgccacacttcttggcacccctgt

SEQ ID NO: 16051 - DNA, 368 bp, Oryza sativa
gtactacctctgttccatagtaagtgtagccatgatattccgcgtaactttgatcaactactttgacatccggttattgaaattttttataattagccattttggtgtcatgagatgataaaatatgaatagtactttacctcgtgacttaatgttttaattttttttaaaaaaatttcaaataagacgaacggtctaagttggacgcggataaccatggctgcacttatattgggacggagtaagtactccctccgtccaatataataatggattttgagtttttgtttgaaccgttgaccactcgtcttattcaaattttttgaaagtatatttatttaattgtgcctactttatatctacagtac

SEQ ID NO: 16052 - DNA, 288 bp, Oryza sativa
cttaaactcaccgggcaggctgcatggactcctcccctagctctcttagttatctctatctcctctagctcattccttggataccgtaggattcttttttcgcgagcgcgtaaaatgattgcacgccaatatattagaagaaaagagttatagttacacgacgcaattagccagaccggcttacgccaatggaaggggaaaaaacaaaggaaaaagtacgaattaccccctgaagtattgggcgagtacaagattacacccctaatcctgaagaccaggaattttcac

SEQ ID NO: 16053 - DNA, 359 bp, Oryza sativa
  unsure (1)..(359): unsure at all n locations
atcctgatgattgtagttcagttcttttgatgatcttgcccatgaacttcagttatacattgacaatgtacaatccgatgaaagattttccaacttgaagaccattactgaacttgcaaaattgatttttttagaagggtattttttaccctgcctctatatccaaccagatatatacagcatntaccaattaggaacttagcctatcaaacatggaatttagtcctcaaataacccaatctataatttgctcctatggagatttgtactcaagacctcggngtgctactcaagtcactgcaatcactatgctacatgccctttcacttgcaaaatgatggtggacagaaagaaacatc

SEQ ID NO: 16054 - DNA, 468 bp, Oryza sativa
  unsure (1)..(468): unsure at all n locations
tatatgccctntgtcactgggtgtgcgaaagatacacgcgtgtgttaaccactgtatcctatttcgtaaagagtacgaggatttggatagatgcccaacatgcaagagtagtcgatacaaaacaagccgtagccagtccgagggtctggatgttgcccttgacgatgtagaagagtttgatccatgcaaagacagtaacaaaaagaagattccccagcttgtcatgtggtaccttctggtgaaagatcgtctaaagcgtttgttctcaaacccgagggatgccgaattgatgcgctggcatcacgaatagcgaaaaaaaggatgggatgattcgacatcctgcagatgcaagacagtggaaggaatttgacagaaagtatcataagtttgcagaggatccaagaaacgtaagggttgcattgagcaccgatggaatgaatccattcggtgacttgagcagctcacaca

SEQ ID NO: 16055 - DNA, 284 bp, Oryza sativa
cccccctctttcttccttatttctttatttagcaccttttgtctgcgccctatacgagcgactctaacaatacaaatttctatactcgtttggtgtccaacttaagtgttgcatcctacactcacccaaagaaactcgcatcaacatacgaccaccttagattatgagatctggcaaaaaaaatggtagtcatcacaaaattatttacttttggacaaatataaaacatgacattcgattcgacgtcaactctttatctaataagtggctctatatttttttca

SEQ ID NO: 16056 - DNA, 469 bp, Oryza sativa
  unsure (1)..(469): unsure at all n locations
nttcttacttagagccattgagccattatataccttattctattatggatcttctacgggtntatttctttcattcttgctcgagccggatgatgaaaaattctcatgtccggttcctttgggggctggatcttaaagaattcacctatcccaataacaaagaaacctgacttaaacgatcctgtattaagagcaaaattagctaaagggatgggacataattattacggggaacccgcgtggcccaacgatcttttatatatttttccagtagtaattctaggtactattgcatgtaatgtaggtttagcggttctcgagccgtcaatgattggtgaaccggcggatccgtttgcaactcctctggaaatattacccgagtggtacttctttcccgtgtttcaaatactccgtacagtacctaataagttattgggcgttctcttaatgggttctgtgccgacgggct

SEQ ID NO: 16057 - DNA, 156 bp, Oryza sativa
caaaaatttattgacatactgaaaatggctgcgaatctgagatttgcttctgtaatttttgggctcgtccgaaaatgctcttcggagaatctctaaattacaagcttggtctcgaccggctcgcttttgagatgctcaagtatttaaactacatca

SEQ ID NO: 16058 - DNA, 444 bp, Oryza sativa
  unsure (1)..(444): unsure at all n locations
ntatagataattaaaacacaactgtaaacttaatttcatgctttgcctgtaagccatgctgcagtanggtagtctattcccatcaagccagtacgagaacgaacaccatggacaaaacgcatactgcacacctcagcaagagcagctagggcttcctggcagatatgaatgagaatagagaatttactaaatatctcaagctttcttggaatgctaaaataagagtaaatactgttattgtaacatgcacccaaataggccaacaccatctttattcaccattttgaccaggacatatatactaacacaatctatggacatttgcataattntagaatatccacaaaatagagaaaatgctttgttgacaaaatatacaacaaatccattaactaatgcaatgatgttacatgaatcgacaaccaaaataagatgagttttatg

SEQ ID NO: 16059 - DNA, 351 bp, Oryza sativa
  unsure (1)..(351): unsure at all n locations
caagcaagctgcacttaacaccaaaccgcattctcatccatactacatncaatggccgaacaaaagtggtaaagtgaaagtaacaatactggtgcccattaatattgcaattggaaaataccatgatgttgttgaatgtgatgttgtgcccatgcaagcatgttatattctgctatgtagaccatggcaatttgatagggattctatgcatcatggaaggtccaaccagtactcttttctgtaccatgataaaaaaattgtgttgcatcccatgtctcctgaagatattttgcgtgatgaagttgctaaagctgccaaattcaaatgtgagagtgataaaaagcccaatct

SEQ ID NO: 16060 - DNA, 417 bp, Oryza sativa
  unsure (1)..(417): unsure at all n locations
tgaaactttgtgatgaatgcaaatactaatgagaaaatagattgtgttttcatactatagacgtgctctccttgagaaatgggaacatctaaaacaaagtgacaaaactgttagggagtactttcatgattttaaaatttgtatcacttatagtggtttacaagaatctaatgagaacacaatgactagatntttcagagggcttaatttcaatattcaggctgggcttgttaatgtgacatataatcatataggccaattgttcatgcttgcttgcattgttgagcgcaaaattttggagaatccaatggagcaacaagatatgcttgtgcctcctatcacntgatgtttgcaggaagttcaaaaaagtcttcaaaatgagaagaacgatatgtttgagatgtcacttccatcact

SEQ ID NO: 16061 - DNA, 339 bp, Oryza sativa
  unsure (1)..(339): unsure at all n locations
gacatctggaccttgtggcctcggaagntgntcttgtcggcccgtgattctcgtcggaaggataagaattgggtgcactangatccttctcgggctcggatgtcgtcgacgttccgttctccacttctgcgggaggatccttcgacatggagtcgtccagggttgtagccacagcgttctcgcttccggtcattgatggactagtcgagatcggcaccgtggtgtaaaccgggaagactatttcaccgacttgagtccacaccaacattgttgaggtagaaattccttggctgatgcccgggttgacgctgttgtccatgaaactgatgacatattagt

SEQ ID NO: 16062 - DNA, 458 bp, Oryza sativa
ggacacttaaaactcagctatctcacatgcaggtgcacaacttgatctcaactcaaaagtgtattacaactttgttaattcagacttcaagtatgcaatacagaataatactatattgcattgccgcgaagtaaacgtagctcaactagttaacttccttgtggtggaaccaacccacccaaatccttgacacgggtattcatatttacggttaattattcttagtccttaacacgggtactcatatttatggctaattattctttcaggtgagtgtgcatgtagcctagtggttacagtgacctgagtagtaccccaaggtcctgagttcaaatctcctatggagcgaattttagattgggttatttgtggggctaagttccctatttcaattgccgtatatattccgttggatgtagaggccggggtaaaaatacccttctctaaaaaaaatgtgt

SEQ ID NO: 16063 - DNA, 299 bp, Oryza sativa
  unsure (1)..(299): unsure at all n locations
cttaagacacctgcagcatgccagcctctactaatgtcagagcgagttgttttatttagccaattccagaacagcagagcaccctttacaagcgactgaagatgcgttgcttcagctcacagagacgtgtctccaactactggaagatctcaattgaatgctctaaaactaaccaacaatcttcggcgcctcgatcaaatngagacaaatttgcagaaatttaaactatctacagctcgaatcgcagcctaaaatttcgcagcagcttcctcaagcaactcctcgccttcgtctcgcgg

SEQ ID NO: 16064 - DNA, 383 bp, Oryza sativa
acactgtagaagactctagccttgagcgtatgcctgttcacttctatattatcagcatatggacacgcgtggagtatcttatagtatggctaggcggttgcttgacaagaattatgtgaagaatggtgccaccgtgattactctctccataatcccttattatgagctctacatcacgtgttgggccatttgccacagatggacgcttcacccatatgcaatgatgagctgtaccttatactgttggcaacagacaaaacagtagctggtctgcgcgaccgagagctgtaatatttggagctatgatcattgtattatgccatatgactattactattagatgtattgtattcattgcgatgacgttaggccatgtggaagtg

SEQ ID NO: 16065 - DNA, 420 bp, Oryza sativa
  unsure (1)..(420): unsure at all n locations
agcttcagggatcttcagagtaataccaactctttactgtttaaccaattccactgctactaaattgtactcaacattacatcatgcacataatataggaataaatcgtggcacgttactattaatagttatgagttttctatgcgatacattatttatgacaaaatttatttttagataatgaaataaaagaatatgtatttcgtttatttttagaatgtcataaaaatgaggagcattcataaaaagataggactaccaatgctcacgatattttaaatgcccccataaaaaatctactatcatattaaatttcacataaaaaatttaatttattacatctggtttattnttaaaatttatgtcaaaaatttccgtactaattatttagtctcattagttacataaaatgcacatact

SEQ ID NO: 16066 - DNA, 453 bp, Oryza sativa
  unsure (1)..(453): unsure at all n locations
tgactatttcggcaatgtgacatggattaggttcatttcttaccaaatgatagaaacaaagatatgatgccaagttacaatagtaaatagatctggatgaaatatctgaagctntgactattttcgcaatgtgacatggattaggctcatttcttaccaaaagaaagaaacaagatactacacttgaagttaaattatcaatagcaaacgtacctggatgaaatgatccgtgacaaagttctggagtacaactaatttgtctaagaagaaatagtctagtagtagtagctgataacagaaacacttgcagggatctttccttcaacatcaatctcggtggtccgctgccagctgagattgggaaccttgtggagcttacgacactgtatgcgccgcactgcccattgttgtcaacactactttttccaatcagaaataccanactttcttact

SEQ ID NO: 16067 - DNA, 337 bp, Oryza sativa
  unsure (1)..(337): unsure at all n locations
aggtactgataccccacctgttctaggtcacattgttgctatcgaagactacattctctgccgcttgctacctacgccttctgaatatcttatcttgggtttgaacatctaccgcctatctttgctctatctgaaccccaactctattgccttccttaacatattttccatctttgtgaggcctacattggcgcagagcccttccttgatctctngtcgctctactactatgtgcacaggatagaatccaacagggcgtctggaagccgtagatgccgactacttgatggcctgaaactcgttatatgcccttcaatgactttctctccaacaaatg

SEQ ID NO: 16068 - DNA, 216 bp, Oryza sativa
gaagaccatagcgtcctttctattcacgggtgccgagtaaagataggatgaggtacccatgggggcaaaccccctttctggtgtgacttacaactgctggcgagaaaactctaccaaatggaaaccaagcttgttagcggcgagatagggatgcccacctgactctggacagcaacttataccaacttgtcgtgaagatacacttcaccaatatat

SEQ ID NO: 16069 - DNA, 419 bp, Oryza sativa
gacacataggtggatactcttatttctactgcgaaaccatcgcacgcaggtggacctgccaaacaagcattgtcttccattgacaatgggttgctgtgttgtgcctatccactggggatcagaagtgggcctcaactattgaaatgcttaaagcattttaaagaggacagcactactaattctgtaggcgcattcttgatgacaaatgcgttgattaacttctgtactgtttcaattttatgtaacacttctgctctttggtataaagcacgccatatctatggggacctttaagatagttatatacactttcatatatcacaactcttatatgtagataatggtatgactctataacgtcgcgaaataggatactacattctctcttaactaggtcctatccttcgacaatttaaaaa

SEQ ID NO: 16070 - DNA, 397 bp, Oryza sativa
  unsure (1)..(397): unsure at all n locations
gacctataaaactaagctagaattgagtttttttttactgagcgagtataatctactttaatgaanaaagtccttgatgaattaataaactcatttatctccctccagaaaaaaaaggggttaaaatcgaaagcccacatcaggtttaggctacatacaccagtgtacagtccactatacacccacccggtaaaaccacccccctctcaccgcccaaaacaaaattccaaaatcacctcctccccaaaaccgaattttaaatttgaatcccggtaatctcaccgccacattcccctcacccaccctttcccaataaaattccccacctcccccccttcccacgctttccaccctccaaatcctccttcctccctcccctaatcctcgtcggaatcca

SEQ ID NO: 16071 - DNA, 440 bp, Oryza sativa
  unsure (1)..(440): unsure at all n locations
aacacaattatagagaaacattatgtcatctacaatatcccactagtgttattatattggaaatacataattgaatatattttttattcaatgaagcggagggatcaacgtctgtttcatcttggactctaatattgattttataattctagatttaataaaattatcactaattacaattcggatgtggacttccctttaatctgagaacattataattgagttccacctacgttagtagagattattttttaatcgaagcatacaattcggatagcacaatataacagatgtggattctgttataactcgaagaattataattcggtcacacctaanggcatgcacaacggattttattattggtatctctctattgccatgcaagtaaatttgatgacatggaagaaagataactgagtttggatgtaatgcatgac

SEQ ID NO: 16072 - DNA, 384 bp, Oryza sativa
ggactccttgctctgccttatgaatgagctaatctatctgacaacaaaatgttaatcggttaaaagtgaatgttaaagaatatatgcgaaccttcaatgaatgtctactcattatgaataaacacgcctagaaaacaagacttacaaacactcgtggaaatgtcttttaattgcagaactcatacgacgataccataaggctctatttgtataaactgcatgacagatttccgattataaacatccttaatggcatatattcttatcagcgctgacatattataggtagcgataatcaaatgtagatcatttttaaataccatgccttagtctgggtacgatccgcatatctaatattttgctagaaccggacgtcgaatatat

SEQ ID NO: 16073 - DNA, 475 bp, Oryza sativa
  unsure (1)..(475): unsure at all n locations
ccacccgacgatcgtactccatccaagcatgaatgaactgtatggncgattcacgttgcgtgatcggcccgccacttgaagtaactctgactgtgtcaatccattgtacgaattgacatttccttacatcctcctatgtacatccattttgggataggtaagttaatgatagtactgaggagtgatgaaaagaatagttgtaattaccacgaaatcatcgtcgacaatgtgtggacacacgaaacacctctgttctcgagttcggtgccttacggaccttatgacctgacaacggtcaccacaacgacactccggacgctcacgccacgtggggagtcctatgggatttacgtgccattctatagcctcagcagcaattcgacattcatgctcatccttccgccttaggtagtccgatcttgtttactacgtgtgaagcacaggttccgcatttgtgggttctcatgtctaccca

SEQ ID NO: 16074 - DNA, 323 bp, Oryza sativa
ctgcagcttacaaaatagtcggaactgcatgctttcttttcttaaacactcaaagaagcagggagtgtacattgctaagaagtcggattcttttgtccattatttcaaccaaattattattattactgactgaacgagtggctcctcaccgagagaccgcgcaggccctcctttgccgggtcggacgggggcgctaactgaggatcatatcgctccgtctgtggaatattctgcgagagaggcaatgctctagacacgggcgatgtatactggttcaggcctctgagaaacgaaataccctactcctgaggtctgcgggatct

SEQ ID NO: 16075 - DNA, 434 bp, Oryza sativa
  unsure (1)..(434): unsure at all n locations
cttcgatactcagctttgatgactatctctctaggttcaaagaagtattacttatcttaaatctcgtgattcttcncatgatataaattacacacaatctgaggtttctcgtcactctttgaatggtcttgacatgtctatctgggagatgaaagatacatcaattcatgagtcttgtgatatgtatactttgactttggattcgctgttcacataactcaatacacatgagacgaatattatttcttgtaaagctgactctaagtctagtgatatggtttcttccttgacttctttggatgtcggcgcttcttcatcgaattactactattcttgctttaattaatgccatgtctaatgagcaactcgaatatttcgacgaggaggacatcggattggtcattaattagttatctagagctatgaataatgct

SEQ ID NO: 16076 - DNA, 302 bp, Oryza sativa
accgggcaccgatagatgagctgcgtttgttgctgacaagatccgcgctcgctctatttcctgctgggccgtactgagatactaaatgctgggacttgtgaaatccattctaatcacgactcgatcttactcgagtgaagacgttatcgcttcaccaaagattccgcgcgtatcaaaagcttctacatacctccatggcttgatatccagacttagatctgacaaaagcctgagactccacctaactgcatacaacccattcggttgcggctcccgtataaatattacagctttagtctagt

SEQ ID NO: 16077 - DNA, 332 bp, Oryza sativa
gctcagctttatctcttgcgctgcatctgtaatcttttccattttggaagacgtggatctgtatgtcaacaattgtcgtttgtgtaccctggctggtcctggacagggatttaatgcacattcagcttagaaattctggttcgagaatttctgggcgtgacaccggcgccgaccgaccgaccgtctgcgtttcccgtgctgttgcttgccaccgcacgacctgtgcccatgcccgagagagagggagtctcatcgtgctctgcattccgccccagctcagcctccgcggcgtgcagtcgctgcccggcggcgccctccaccgtcgaaagcac

SEQ ID NO: 16078 - DNA, 453 bp, Oryza sativa
catgaagcttcaaggtataatcaaaatcatattttttgattttggatggtagatactatattatgagaaattatgtttcttaagattttttaagacaaaataaacaatgagcattcaattaagaagggaaatacataattctaatttaaattcattttgttagacctggtttcgaaaagaaataacaagcatgcccgtgcgaatgcgcgggctaccttcctagttggaatataaagtagatagagcactaaaaatctcgttgtaaatatagaagtaagcatagctcaatcagctagtttcttgtgatgaaatctactcatacagggtctcacatttacggctaatcattctttcaatcgtagatgacatactccgtttacaaccatacgtctacgataacttcgtcatctcaagatatgttggatcagtcttttggacatactgatatgcact

SEQ ID NO: 16079 - DNA, 381 bp, Oryza sativa
  unsure (1)..(381): unsure at all n locations
actcagcttnttccattgtgacgcacanacacacgctggcctggtgttaatgactaaattccgcaacccaagtatcagaggtgaagatgggatcgaagcggacttcgagatggagatcgctccagaaacagagaagggatcggctgaagttcgaatcggctacgaccaagattggcagagtccgaattggacaacgttagtcgattgagccgaatccgacaatatgacgcggcatacgttgctgggttgggttgatgtgctctatgaggattgccacgtatggatagagtcctgagaaggcaattgtatctattaattatgatattttatgtaatttccttagagatatgtttgggcacaagtctgccgcanaggcttatg

SEQ ID NO: 16080 - DNA, 367 bp, Oryza sativa
actaccatcatgtgatatttccagtgaaataaagaatttatcccttgcctttgcttccaactcacttttgttgggcactctcgaaacaaaattagttcttcatgatgttgcgcagaaaattccacgtcaattactcatgagttcattcttagggacatagcacatattgtgtctatgaaggtagaaagtattcagttaattttattagtccccacatgatattcttttattatttatatccatagcacactgaaggaatcaatgctgcagcagcttgtgttgcacaggagggtatgatgcccaacgaatctaatatccaagcagataaagctaccatctctctctaccttggttgaaatgcaattgt

SEQ ID NO: 16081 - DNA, 468 bp, Oryza sativa
  unsure (1)..(468): unsure at all n locations
gcttgcagtcgataagagtagctcgagtttgttagagattgntacctactttcattagcaatgtgttagcaattcggttaagagttgtaagtctatttaaaggcaatgttagatggaataaagcaagtcgaattcaattcattcatctcatctactttctctgtttctcatcttgatcttccggcatcgccatcacggngcatcacacgaccaaacccacgtcctcctacctcccatacctatccaattcgatctcttcctggagcccataacattaatcgcgggctgtacaaatatttgtacctgcagtacaaataaatttgtaccggcagtacaactcgaaatctttcagctagtacacatttctatcaggccccgtctagatgaatggatattgcaagatttcactgagaaactgaaccatggagttagccactcaaactcctcatccccatacggcaatctgac

SEQ ID NO: 16082 - DNA, 487 bp, Oryza sativa
  unsure (1)..(487): unsure at all n locations
ngaacctttgctcgtcccgagtgaaggacgaaaggaaataaagacttggttggtgatcaggagttgctactatgctgcgtatctcaaagatacaggtgcaaggtatatgtactatctctcagattgaataatctttggcacggtggcttacccttaccctgattcccacgagacactgcttctccttgccttgggcggttgaaagacagaacagcaattagagcaccaatcacccgatctttattcaactcttattccggaagttttcaaatgattttgaaaaagaaagccaagctcctcaattgattcactcagtctctctaagtgtaccaaatgatngccttttgattcctactntaaggttttgatatgtggagttaggtagggatcaaacatggcatacttgcattcacatttattactaagtcaaaatcttagactagagcangtaactaaacacactcaagatcaagatcgtgcataatat

SEQ ID NO: 16083 - DNA, 442 bp, Oryza sativa
  unsure (1)..(442): unsure at all n locations
agcttaactccaaactaagtttatttctgtacttattaattcanaattgctaaattatgttatagcaaatgctaacaagagcaacanaacgagtataaatctatatttctaatattgaaattttaaattatgtaattttgaaaaaatagagtaatagaagaaatattagaatggattatatatgaaattactaattaagattttggcaactatcagcttcattcaaagtaacatattttatcattatccagtgaaagtaataatattttaattattagtcacagtaacccgtgcaacgcacaggttgacggctagtggttataatatttaatctatggtcatgattntacgatctagttaatcaatggccagattaatctgattaacgtggaagctncgagaaagtgctcaattagtataggtatagatagatagatagatg

SEQ ID NO: 16084 - DNA, 387 bp, Oryza sativa
  unsure (1)..(387): unsure at all n locations
tccattgagtgggtaagtaaataggcatttcttcagaatttttcttttactgacgaatatattctcatacagtaaattgttacgacttaaaatctaactaaactttcatcagatgatagtaattcggaatacgaaaatatctggtgcaatttgttaacagcaaagatacatgttgctcgtataaattttgcttactaatattctttcacgccctaattaattcctagtatcaatgcacaaaggatggtttatgaatgaaaaccaggtgacaatttctgtaactaaacttgtaatgtcgatgtggttntttgtctctctccaggcatggaacgtacgtctatctggaggtatacacaagctattcgatccatcactgtgtgacgagtc

SEQ ID NO: 16085 - DNA, 325 bp, Oryza sativa
cttgacgagtaagattgactaacgctgtgctcatttcacactataattagaagtttaaaaagactagaacgatttaacgggaaagttgaaagattgtttgtgtataaaagttcgatgtgacagtaaaattgaaagtctagagaataaaaagttgaaacctaaacagggccttacaaattgtctttgatacgatacatcaatggacgatttggttcctgcgtgactacaacttaaacagttgtttaggctgtatgatgtaaattcatatgcacaaatttcaacacgacaccgttagggcgtgagaagactactgtgcatttaatct

SEQ ID NO: 16086 - DNA, 381 bp, Oryza sativa
ttaagtcgtaattgcacattcgacgcattgatttcaatctttaaggaatacaaaacagcacgtatatttctgcagtctacaaatgaagcaacgaaataaccttaacttgtggataattatatacccagaagcccttaaactctgatactatcgtatcactttcagcacatgccattgtgcaaagtttaggcggtctgacaataatcgtcttctttgagtaaaatcaaactgtacctgtggtagtgtttgaagtagtattatacatcgggactggctatacatttatctgagaattacctgatagttacatacaaattacactaaaattatatgcaagttagaatgtaactatactacgattacaacgtatttactgttgag

SEQ ID NO: 16087 - DNA, 351 bp, Oryza sativa
tgcgttacacacctaagatgccggacttgctgagtactatagtactcaccctcgctctatcaatatatatatatagatcctccgccctgaagagatggtgaagtgaagtgaaaaattggggtttctccctggttcccagccgtcgcctgtggtgttaggtgttagaccgttggttcccatggtgatgttgttggtgttcgcctcattcgtgtcctcggctgtattctctggctgtctgagctgcaacctaagataaggtacataagtcctctatttattttaaagattgttatgattcatatttgtcaccgtgggtaccagcactatgtactgtgactggtaccgagatcg

SEQ ID NO: 16088 - DNA, 366 bp, Oryza sativa
  unsure (1)..(366): unsure at all n locations
agcttgggtgtggaggatgtattttcttgtaatattcattatctttgttctaaacctgttttcgtcaataatttgtttgggattaattattttgttggttatgaatttcttgtaattatccttgcaacanataaattctaaacttaaattacttgaaaccttgcgattttgaatttataagaattgtgtcacactataattgagtttgttcctatgtatcatttgtagtctgcatatattttttgaatatatttggcatattttatttttggagttcctaaactttaattaacattattttcttgtatactacagatgtctttgtggatttaaggatatattaattgacgatatttcgtattaaaa

SEQ ID NO: 16089 - DNA, 428 bp, Oryza sativa
  unsure (1)..(428): unsure at all n locations
gcgccgaaccaggtcgccatggcttggacacagcgtacgttcgacctatccatggcggttccccaagcgtcgccgttcgggaccgggcaaccgaacacgatggcccaacctcatgcgcaagtcatgacttcacccttcaccacaccatatccgcagctggtgccgaacaagccagggggtgagaaggggctaccgctgagcaggggaatcaagattcatccaatcccaccccagtttaagttcccacctgttccgcggtactcgggcaaaacggacccgaaggaatttctgtccatctatgagtccgcaatcgaagccgctcacggcgacgaaaacaccaaggcaaagggaatccatctcgctctagatggcatcgcccggtctggtacnnttaattaccagccaatagcatttactcatgggagcaa

SEQ ID NO: 16090 - DNA, 456 bp, Oryza sativa
  unsure (1)..(456): unsure at all n locations
agcttcatgtagtagctagtagctcgttttatgtgtatattgggcttgacgagtaaaattgacttaaggctgtgttcagttccacactaaaattagaagtttaaaaaaattagaacgatttaacgganaagttgaaagtttgtttgtgtagaaaagttcgatgtgacagaaaaattgaaagtctaaagaataaaaagttgaaacctaaacagggccttacaaattgtctttgatacgatacatcgatggtcgatttggttcctgcgtgactacaacttaaacagttgttagggctgtaggatgtaaattcaaatgcccaaatttcaacaggacaccgttagggctgtagcaagactactgtagcatttaatctggaccttcaacgganaaattggatgactggatngcgtgcaatctctaacgtgcagttattagtgggactgcacgtcagcagat

SEQ ID NO: 16091 - DNA, 364 bp, Oryza sativa
ctcagcgatctggtctcactaaggaccaactttaatttctccatctggccaaaagaaacattcttttgggaagaggaggtatggttatgatgtcaaacacatgttacactttgaccttagtttgcttttggtttttcgataatgtagtttgcttttgttactgagatacttttggcaataaatcggcagactctgttttagtgtgtttgcagaaaatttgagttactactttatttttttcctcattatagttagtatgggtaacttcctgtatgataaagattgcttgttcaaattgcagcttgcgtacctaccttacaaaagacgtgatatcgtgttggataatgaaagcaatgaattactt

SEQ ID NO: 16092 - DNA, 459 bp, Oryza sativa
  unsure (1)..(459): unsure at all n locations
gctttgngaatatgtgaatcagtggctgatttaatagcgtctgagcatgatttgtattcgtaggaacaacctccttgatcttctctggaggttaatagagcaacatttaaagtagtatgaaaaccaaccaacatgtatcatcgtcaactggataaaccatgtacaatattttcttacagctgaatggtgaacaagctgcaagctgttagtcctagcccaacgatgtatccctccattgtaaggagatagatagacccatgaacaataaaatatatgaggcaatggttaggaataaatagaaaccgtattggttgagtggcattcagtcgaacacctccggngcaaaacctgtggcagcggtggagttctgcggcggcaagggaatctgatttaccatatgtgaatttgtgtgcatataatatttttggattgaagctgcaacatagtgaatctgattac

SEQ ID NO: 16093 - DNA, 403 bp, Oryza sativa
  unsure (1)..(403): unsure at all n locations
agcttgcngngccgatgggggtgcatggcttatattatgcttttggcaatgacgatgaagactcgcagtgatgacgagcggaccacaaagctggtggcggcagtgggggcacgaagtggagacaatatccactgcaatgaggctcatgtgtgagtgtgatggtgatggctatggataaggagatgagggacgctgccgcaactaagtcgcatccacaagtagcttatttctggctactggactagagtaagaaaacgtatccgaccatcgaaatagaggaagaagttacatggtaggatcttaccagagtctaaagatgtttgttgttatcatttttttttggtgcatctcggcgtattcaagatgtttactctatccggtcagatattacacttgcacatga

SEQ ID NO: 16094 - DNA, 476 bp, Oryza sativa
  unsure (1)..(476): unsure at all n locations
tctcttagcgaagcggcgggagatagagcaagaatgagtacaaccactcgttctcagcaagccacaccggcagatgcatgattaatgcaagggggtacaaggggataataataggggttagattttgcagtaaacagcatttgaaagacacttagttgctcaaagctattttacaagcacgatcctatgaatacacaatatcattaatcaaggccatgaacccacacgaacctgccttaacccaaggcctatgatgattcagaccgaactggcaaccagacccaggtcccagctcgtcccaagccaacccaggccaaccattccacattntagttgttaagcaagttttaagaagtaaaccactaacttgggtacattgctatgcttgcccataaccganggcgcgactattcgaatagattatactctgatcagaggtgtacatcttaccacaaactcatcttactcgcattcac

SEQ ID NO: 16095 - DNA, 297 bp, Oryza sativa
tatttggcctctgcctaactccactctttaccgcaaaactgaatatctctctgccacaacacgtggactcgcactacaagcgcagagctatggaagaataaaaatgctatggccaaacgtatgttcatggacacgtcaagtaccccattgctgtcaagccctatactctatagcagcaacaccaacacgagcatatatacgcacctctcgctatatatatatctagtatatgtggcaactatcagcctgcgtgcagattgtattaaactatacatatggaatctctacggggctgcc

SEQ ID NO: 16096 - DNA, 420 bp, Oryza sativa
  unsure (1)..(420): unsure at all n locations
atcttgagtcgatgacatctgtgctgctcagctagagccagattggttgtcaccatgttggagtcaaggcgctctgatagcttctcctctcataccaacttcagcctctcaacattgtaccgatctgccgcgacaagtagttactgagccatcaccacgtcttgcgacgtatcacgcagcaagtcagagtatacgaaatgtangaatgatctgataacgccagcttccatatcttcaattttgatattgctcctacggngcttcgctctcgtagcaccaaagaacattgcctcgaagacggatgatcgagcagcgagcacgcacttatgtgccgagaatctctcctggccaacgtcgaacgtcacgtatgctccatccatgttcttcatcaagtcgcccagatgctggtgcagatcacct

SEQ ID NO: 16097 - DNA, 346 bp, Oryza sativa
  unsure (1)..(346): unsure at all n locations
agctntggacaccgcgccgatgaaaaggttgaattctgcttccacagatcccatctgagcacactagattactcatgcctcctaatcgatcctaagcatatcttagccaagtgaatcagtgacccatccatgcatacgcttcatgcttgaacaaccgatgatataatgtgtgttgagatccttgatcatatatccctagaggccacacatgtagagaggctcgccaattcatatatctgagcaaattttacttctatactacagtatcttatgcatactccgttactgttgtataatggcgacatttactgttcctcacactggccacaactagtaaacatctttc

SEQ ID NO: 16098 - DNA, 383 bp, Oryza sativa
  unsure (1)..(383): unsure at all n locations
actcagcttatcctccggatactagcttcgatgacatactacgcttatgctgaatgtctattgcaagaatgagcatatgagatactcatcaagccacactgcaaatatgcacgtgctctggatcacgaaggatggcagagtatagctcatttgcataaacagcgtttcatagttgagagcatactgcaacagcataggattagtcaatattaactatcaccatgcagacacccgtgttgtatatgcccaacctcatatgaacaaccaagcccggttgaacatgccaaacctgccaaccaggaatataccatttctgaccatgagtcacatttattaacacacggaccgatcaatgtgtaatatgagactaatcacganaaaca

SEQ ID NO: 16099 - DNA, 464 bp, Oryza sativa
  unsure (1)..(464): unsure at all n locations
agctttgngcgtcagggctcatcggncatcattctgctattatattcacaactcgtgtgagggatgtgcttacgtgctttccagggccgtgggatcgtattgaggccttcatcttggtttctccaccaatgaccgtggggaggaaccatggccaacaatggaattatgttcttcttgttgctggagcaccgctatcttcttctcctattattttctgttgccgacttcttctgtgccaaccagccacaccagcagaagttgtgcttccactgatggtggcgggaagcacaattaattgtgcccttcatttcagagcatgccgagaaatctcctttccctcttcagatttatacttactgccaacaatgatgagtaccatacatgctaatcgtatagcttccttaatagcgagttactaacagaggagcttaattttatgccctccatggcggcttattttaaac

SEQ ID NO: 16100 - DNA, 443 bp, Oryza sativa
  unsure (1)..(443): unsure at all n locations
tatatacacccactctgtatggcttcatttacagctactatctagattgtggaacagaacatttgacttgcacctcagcttcctcctcctctgctgcaggcaaacacttctcatgcgggcacggcctggcgaagaatttggggatcctgtccccaggcataataacgggcaaaccacactctttctctgctntctcgttctgcaaacaacaatacatggggatcattcttagatttctgtaagtctacaagaaacgatcatttcaggttaagatcaaagtaagatatgaatagggatcgctagtactgtagtaccttgtgatcagaagttgtcttgctcggagacgcaatggagatgacggtgtgctggccttcttggagtatcacatcaggatgccgagaccagaggaaggcacggagctcgtcccagtggtagcaacatga

SEQ ID NO: 16101 - DNA, 427 bp, Oryza sativa
  unsure (1)..(427): unsure at all n locations
gcatgcaagcttgcaatgcatttgcagcctttaatttatttcaccaagagagcatggtgctggaagacgaacatgtggggccattcccaaaaattttcatagaatccctgcattgtctctcgcagtcactgctgctcatcagcctctcacagacctgtttgcctgctgctgctctcttttcatgcagtgaacctgttgaccacacacacacacacactgactgggccccgggccccacccacgcctgcccagcatcggtcagtgaggacttgtcgatccgatgatccaatccgtgtcgggcggtgtggcgccaccaaactggcgtgtgggccccacctgccccaaccctttgccaccatggttttagggcacggatcctatgccgtaacnggcccacgtgtaagtggctgtcatanactgtgtgtgg

SEQ ID NO: 16102 - DNA, 408 bp, Oryza sativa
  unsure (1)..(408): unsure at all n locations
taaccgatgtagattcatagtacaatgttctgtancatcgcgtttggcgtcatgaagttgcataaagttattatcaagaaggaaagcataatccacgatcatctagaattttgtcgttaaaaagacccaatttcctttggtacttactgtccgaatcctatagctacacatccgtcatttaaacacaatcagaacatccgacggcgacgcatcgtccctcagctcctaaacccctcgccgttgctcgcttcgatcggctcgccttacgccgccgacggacgcctnctcgcgccgcccgccgcccgccgttcgccgttacttgcgcgctgaggcggaagctatgtattccccgcaacctccgagcgacgggcaacccgacgacggagccctagcacgcccttcgccgca

SEQ ID NO: 16103 - DNA, 370 bp, Oryza sativa
agattaatttgtcttcgcggtggcaaacagtatgatgaatgagagatcacttgacctctgaccttagtgagagcaacccaaaatatcgctcaaagagttatccagagaacatggaacgaaaatctttcttctcaaaagatatgtcatgttgatagaaccataccacacagcatggtactagtcggtccctgagactaccttaagagcctaacgtcttgaacttgtaacaacatttcctaatgatcaatacatatgactgctctacgaagtgaccaacaaaaataccagtcactgagaaaaaatgccaatcatttcctctttcttgcttcacatacgtaaaatggcaatagcagactaatcagaacatcac

SEQ ID NO: 16104 - DNA, 459 bp, Oryza sativa
  unsure (1)..(459): unsure at all n locations
tcanacgttgatattctttggtgagtgtgatggaggtttcatcaaacatgccctatctgataaacaagaatcagatttgataaaaattagtttttgtttacttgattntcagtgtgctgcaactagtgagtgcatttgctatttggctccatgaagctcatttgcaataacgtccacatcagaaaccgattaaagttagtgctttactttttatttaaagtagaatgtacagtttgactattacttagattcattcaactaattccatttggattatgctgtgtgcttttagcatttctctgcttttttttcctacttaaaaacagttaaccacttccagtttatttaagttgactactataaattacgccaggggtatcatctagttatctctctatctacatgtacttgcatgtggaaatataagcaattcaccataatatttaatccanaaataaa

SEQ ID NO: 16105 - DNA, 479 bp, Oryza sativa
  unsure (1)..(479): unsure at all n locations
nttgcagcttntcttgaanacccatttgcatcctacgggcttgcacccatatggacgctcaacgacttcccaagtaccattagacataatcgagtccatttcactgcgtactgcttccttccagtagtcagcgtcaggagatgaatatgcctcttctatggttcttggagtgtcatccacgaggtatacaatgtagtcatctccaaaggattatgcaaccctttgtctcttactcttgcgagtatctacaatgttgtcctcctcaggattttcctcaggcgttngatcattgtgttctatcggtgcaaagtgctcatggggcatgacagtttctttactagaagtgctaggtgtatgtttcatangaaattcattctcaaagaatgtagcatctctggactcaagaattgtaccaacatgcatgtcgggtactccagagtttactattaagaatctataacccacactgtggatagcat

SEQ ID NO: 16106 - DNA, 489 bp, Oryza sativa
  unsure (1)..(489): unsure at all n locations
ntatcaggcgtctgagcattacatcagtatagcgcctcttttcttctttggttggcggacatagtctattgaacagcgctttgtctgattgtgaagcctcatggaagatccttgtatcgatagcagcagcaagaagattgtttgcagctgtaattgcatggatatctcctgtaagatgaagaatgaactcatccatgggtatgacttggctgtagccaccttcagcagcaccccccttgattccaaaagtaagcccttgtgatggttgacggaggcaagtgacaacctataatagcaacattaatattgagtacagtagtaaagcatatcaataacataatatatactctataaaaaaataaacataatatgtacatcgttatgtcaatcgttcaatatgctctgggaatgcatatatactctatgtatcagtatcaacatttcgcacttatactacgttcatgatggtagagacatataaagaaccat

SEQ ID NO: 16107 - DNA, 472 bp, Oryza sativa
  unsure (1)..(472): unsure at all n locations
agacttcctcatgccatgcttccctctgtatgttganatctctgcctagagacctagatggactcttgggtaaagttcagaggatatttggacttctccttcctgcagagattacatttatttcgcggtcagaaatctaaataataagagaacagaaacaacatcattttccatgtagcattaagaggcttaacatcaacaccgtgaatgcagggcatgtaacactcagcttgccagagagaggaacccaaaaaaaaaagatgttttacaaatgcacgagtaaacataagaacgtagagccagctctaccttatagccatttcattgatagaaatgataagttacattgttacatgattgggaaagagtagataaaaagaagagaagaacatgccaatggaatgtacaaaagctgtagaataaaaatactatacattggcctcagatgattaaaggccgactntcactttga

SEQ ID NO: 16108 - DNA, 399 bp, Oryza sativa
  unsure (1)..(399): unsure at all n locations
ntgccattccatcttcctgctaggactggatgcatcaatcggctgtcatgcaccatgcttgctgcgtggaatatggaacacaactaaaatgagcggagcacagtatgcattattgcattggattctatattgagcatacaaagcacgcattccatcaggcaattcataagtttcaaacaacaccactcattactaagcacaaatttacactggagagtcgagcgacaccgcaaatcaaagagattgtgaatagagtataggttgacaagaacaaaagcagcgccctagaatacaatctccatagctaaagtatgtattcagtgccatcagcagttggaaaaacagacaaaattaacttatcaaatntggtacttgggcccggaacaacaaaaatacttc

SEQ ID NO: 16109 - DNA, 399 bp, Oryza sativa
agcttcgcagcagcagaggtggtttcttgtgtcctgtcttagagacatgggggacttacttcgtcttagagccggctgttttccggggggcatttttagccgagtgctcgttttttgcaggtatcctcttgggatagtgcctgttccttgagccttcggctgccattagcgtggcacccctgcccctctatcccaaccttggtccttgttgattacagtcattacatcatgctgttttttttccattgcgtcgtgttcggagctcaaatattgtcaaagcgtgttcttcttttccggtaattcttgttagtcgcggacatcaacaccgttcgtagaaacttggctgctccagttcttcagtgtccaggtgttcgcgatctctttgggtgcgtatagttg

SEQ ID NO: 16110 - DNA, 458 bp, Oryza sativa
cggttattgactgtgtagtgtaaagccttatctccctttctatgtggcgaccttccccctcctgtatcttgtccccttcgtgtttttgatttttcggcccgctctgtaaatacttttattccttcttaatacaaagatgcgcccctcgcgtattcccaaaaaactgtgtagtgtaaatatattcttggggacagattggttctttggtaactctgtatagtttatgttttgatatttttgatcatcttgatctcttgaacaattgcagaaacctataattcctgtggatttatatagatcaatacgtgagacacagcttgttggattatcaggatactcaaaggaggtacagatatcttaagctagttattgttttcaatttgttccttattaaactacactcttatatatgtaagatctgctgtcgaataagagtgttgactaacctgcatttcttc

SEQ ID NO: 16111 - DNA, 407 bp, Oryza sativa
agctgctctcatcaggaagaaacttgcttgcctcttgaaacccgcggcggaactgcaaagcctgttggttctgcacaacaaaatcattcaggctaacatcaggcaagacaccagccgggctcagcaacgactcgaatccttctgagaaagtaacactgctgccgttcgaagacgcgaacgacgaagaatgcgacgggaggttctcacgaaccggcttggtctggagctgatagaattccgtcgggtcgtacggtcaggcgccgcccgattccaccatgccccccgtggggatcagatccccgtacagctggggcgtctgcgagaaggcggccgtggggaactctaggaccggcgtctgcggcacggcgccaagcccgtcggaggacgagctacagttgcagggactg

SEQ ID NO: 16112 - DNA, 460 bp, Oryza sativa
  unsure (1)..(460): unsure at all n locations
tcgcgattcagttagagagatgctacaaatccatgacaaccgcgagaaagagagcgatataagataggagaaaatcgatctgctgctaagaaaggggatctagccagtggagacttacctcagcatactcggccgatggcacatcagatggattggtggaagacgacatcgctgcaggcggaggtctcgctggagatgaagtcacccgggagtcgcttttgcgtcngaggaatcgccggagagagagagaggataaagtttcgcttgagcggtgaacacagaagtcacggtgtgagatttctcgagggtgacggttagtatttcaagcacggcaataacggtcggaaaacagcaaagtgcgaaacttgctcgaagtcagtacacggcaaatccggaacattaccaaatatcccggacttggngggcatgtgttaacaaccgacattggtaatatcagcgt

SEQ ID NO: 16113 - DNA, 316 bp, Oryza sativa
  unsure (1)..(316): unsure at all n locations
gaaaggttctgcccacgacacttggtattgctgtgaagaccttctttgaccttttagacataaaattgcaattgctgcggattcngagatattctcagggaatattacaaacattagtcataaatggtatagactgcttagataataatgcatagatcttctgtatattcgacaaaatgtgccattattgcgaatttcaccggtggataatggaacatatgttcagaacggcaagtctcggaaatcataacgctatgggaccatacttcacaatcttggcctaatctgaatggtatggatatcactgtctgaatac

SEQ ID NO: 16114 - DNA, 435 bp, Oryza sativa
  unsure (1)..(435): unsure at all n locations
agcttccatgagataaatccatatgcttggttagatatatgtccaggtttacccagataaattccttatttgcccctgaaagtttacccattcccttatttgccccttgttctttcaatgacatgtgggtccagggacagatatcagtgagacatcaggggcacataagagattgcatggaaattccagtggcaaataaggattaaggaattgtcaagttccataagtatatacttacattagtatactaagaaacaaaaatttctagcatctgcagatatacattaacttgcagacaggagcaaccaagtattacctagcaataatatctgcagtaactagggtaccgtattatctgaatattgacttgttgaggaataacaacgagagaaaactagcgaagtaccanacagaacatagcatactcaatatttg

SEQ ID NO: 16115 - DNA, 487 bp, Oryza sativa
  unsure (1)..(487): unsure at all n locations
nggttagtgtgttattccggtcctaactagccaagacctcttcgggatcctacaaggtatgccacatggacactaaagtgacatgccacacggatattccggtcctaaattttctttttctttttctcatttttttcccacacgagtaggaacgaagaagagaagataaggaaagagaaaaatatatagaaaatgagttaacacccgtgtgacatgacacgtgagtgccatatatgatctcaaaggtgtcgtggtaatttgacacgtgagtgccatatacgatctcaaagatgtcatggtaatttgagaacaaaataatacactttaacaatatcaaggacctagataagacgaacaaatttaagtgccagcaatacactatactctgttaaatgtntatgtatgtagctaaagttttatacgataatgatgctagctgctgctagacacattatagtgtgaacgtgttcttgattggagattcttg

SEQ ID NO: 16116 - DNA, 431 bp, Oryza sativa
acagaagctgacttcccaagggtggaccccattgtagaagacaatggagaagaacgcacccatcgcagatccatgtcatatggagaatatgcatccacaccaaccgatgctggtgcataactatctgctgagctgctcaaagattggttctgcagcttttttgaacgcttccagatagatgcccaggtttggtttctctatgaagactcagcacaccttgagctcctattacacttcagatttgaagacatcaatcatgatagatatcaaacgttcagggaagtctttacagctgcaatcagcccatgcattctacctgtcggtattcaccacagaggaaatatccaagtctcctgcgaaatctattagcctataatatcgagttagcaagattcatgagcacgaactttgacagatggtggggagaatgg

SEQ ID NO: 16117 - DNA, 472 bp, Oryza sativa
gagttctggttgtccgaagtcaaagtcttatggcacgtgatatctgctaaaggagttgctgtggaccccaaaacagtgaccgccgtcactgattggaagcgacccaagacagtcactcaagtccgcagctttttgggtttggccgggtactaccgaagattcatcgagaacttctcctaaatcgctcgacccatgacatagttgctgaagaaagaagaacaatttgtgtggagcccacaatgcgagaaagcgttccatactctcaaagaaaagctggtttcctcgccagtgttgatcttaccggatactcgtaaggacttcctggtgtactgtgacgcttcgcgccaaggattggggtgcgtattaatgcaagaaggtcatgtggtagcctatgccacacgccagcttcgggctcatgaaggcaactaccctacccatgatttggagttagccgctgtgggtcatgctctaa

SEQ ID NO: 16118 - DNA, 477 bp, Oryza sativa
  unsure (1)..(477): unsure at all n locations
agctgtattacttctctgtgtttacaaagtacaacattaacaacacttcttacgaaaatctcgactaaactcgaaaccctaacttttctctaaactcaactctctcaaaatcgatatcggaaggctacacctaccctctctatttatatccgagggaagcaacctaaaaccacgaatcaacgttgtacaagaagtcctaatcctctagaaaaccttcccatacaaaaaaacgaaccttacaaactccaactgtaccaaatatagactccctccaatttcgaccctgcatccattacgcacacaatatctctatcatataccatataaaatcttcaccaaccacgtgcattgatctttagtctaagcatcccgcatgatatcctgatcttcctgacgtcatcttctcctgagtngactttggatccatcatcgacactacccttctgaggcatcaagaatcacctacacatgcatcaa

SEQ ID NO: 16119 - DNA, 494 bp, Oryza sativa
  unsure (1)..(494): unsure at all n locations
cttcgagacctatgctatactataccatgcgtgagatcgtgtatgcgagccgtgtgagaaaggtacagtgtataanaaaacagagtatttgccctgcctgccttccatccccacaacgacactagcgtacctgttcgcgtttcaacggagacacatgccgttcattcaaactttgtgcgagtaccataaattacgagagcaagagtcttcatgagatacaggtacgtacgtgggcaattntctcacgccgtacagtatagtacagacgagatgatccaacgaaagcgaagagaaggcagaggaaatgaaatgaaatgaagtgcgctagggcggatggagagtgacccaccaacgtacctagctagcgggagttgggagtggcattcggcagcgcgtcacggtcgtcctcgagtacgtacttacacttacatcanacgggcangaggagaggagagctgacgagtgatgacactgcagagtccatgggagaacta

SEQ ID NO: 16120 - DNA, 476 bp, Oryza sativa
  unsure (1)..(476): unsure at all n locations
acctctaagtcacctgcggcagcaagctnggcggtcaagtgtagcccaactatgcattacgaaatatgtgaatgtgttcctgctggaaataagaagctttggcggcttcagtatttgtttgctcagcgccaacttccaagaagtctgttaactaatcaattgcagtattctccagattgaagaaagtagcgaagcaagacagaagttttcaaatgcaaagtcaatttcatcttctcagttttttggagaccaggccagttttgaaaaggaggctcaagtttccctccaaaagttttcggtaagtatttttactgtgctatactgccattgctgtggtgtggtgttaccaaaattgatacttatcttgtaaacaaaagaggatgcgatagatgtggccttgtcctttttcttaagatcacgcggtgtcctaagtgaataaacagtggttataattcgtctttagctggtgtgatcat

SEQ ID NO: 16121 - DNA, 423 bp, Oryza sativa
  unsure (1)..(423): unsure at all n locations
agggaacaagcctccttncatgggaacgtctaggaggtatgtgcaaatctttccactctggatcatcgactttggaaaaatatttttgcaccacctcgtcgtgcacctcttgcaaccttggaggcatccactgcaattagcaaagatgtcaagattagatttaatgctatgcccatgccagattatacaacatgtggagaacgaattntctgacaaacaagattaacaagctgacctttgggtttcgatctttatccaacaatatagccctgcatccctgcaacaagaattgaatagttcaaagtatgttcatcttgagtgaacatgtcattgcgagatgtagatagatatttacctcaaagaagtctctactgaagtcaccacgcatcacatggcaaaccatcctatattctcgacgtaagc

SEQ ID NO: 16122 - DNA, 480 bp, Oryza sativa
  unsure (1)..(480): unsure at all n locations
agtcacctgcggcatcaagctaaatagtccgtctatcatccaagttgtgatgctcanataatcggtctatcatccaagcggagaggctccgcctgaagtgaggcatcttcagggcgttcacagtgcatcgccgatttttgctgttcctcgtatgccacgtagacgaagaaccttataagcttcatactccacagtgcaagtactagtagggggtcccaccagagacaaactgtatacttttcatctctctcctttttcttcccatccaaatgagtactagtactcttagcttttatccacccaaacgagtagtttctctccaagaacccggtggttaactttggacacaagaactntattttggtgggtctggaagaatacgtggcatgtgactttctcctttgcagacatgggaggacgatgctgaacgctacacaagctcactggtgaactcctcagtacattctggtcataagtcat

SEQ ID NO: 16123 - DNA, 471 bp, Oryza sativa
  unsure (1)..(471): unsure at all n locations
tnctggcccaacatggctacctacttcaactaatcatataccatattttattgaatatctattactaaactccacaattaataatgctcaatctggccagcacaggtatgatattctcagaacagaggggaaaggatggaccactaggatacaaagaaagctgacaaattcttcagaacaaagctagcattctctgaaactgtaagttcttaggcaacggccaacaagccataacagggacaaaatcaactcaggtcgacatccacatgtggtcagttggacaatatgaggggttcacatgctagtccaactggagtattgtaatagaacaatgcagtcacaatcagcaaacttccatgtagaataatcggcagtggaaattaacaggtcaattctcaccacttttgaacaaatctgtaacaaaggccatatcagtagtccaacagacaaaactgttctataataaagctt

SEQ ID NO: 16124 - DNA, 295 bp, Oryza sativa
tgactcgcaggacactctccgcaagaaaaacctttccatgaagacgctatatactttagagttatggatgtattctacctaatgcatgcattctacacgaagtagtgggtagatcctcagaggtatgaataatgattctatctgtctgtatgaagattggtctggcaattagctcgtttagatgaatactatgttacacaagtcaactaatctatatatatcgatgtaacaagtacacgcattaagttatttgggcacgaatgttataactaccgacatgtgacatcaatatata

SEQ ID NO: 16125 - DNA, 492 bp, Oryza sativa
  unsure (1)..(492): unsure at all n locations
taattaatccgtcattagcaaatgtgtactgtagcacctcattgtcaaattatggagcaattatgtttaaaagattcgcctcgcgaattagtcgcaatctatgtaattagttnttttaacctatatttaatacttcatgcaggtgttcaaacattcgatgtgatagggtaaaaaatttttggatgggatctaaacagagcctccctccttcccaaattgatcatcatataatagaatttaaatttctaaaactgatcatcatataaccgcacggagacaaatttcatcaaaatacaattaatacaacatgggagaatatgtgcataataaggtgtaattggcatgatgttntaattgatgtatggattgtangaaaatgtgtgcatagtgtctcgatggatgtgatntaattatccttggtcttggtgcataaacaaatatgatgatcaatntataaagganggagtatgtacaacgttttaaaaactattt

SEQ ID NO: 16126 - DNA, 385 bp, Oryza sativa
  unsure (1)..(385): unsure at all n locations
tgactanggtcaagttgcattaggtttctagtcaaccaaccacaatactacatgagtgcagcaaagatcacaacgagccaccaacacatgacaacaatggaatcccttgacaactaatttgtgatgactcaaacctttttgaactttgtatatctatatattattattagtatcatctttatttgaaaagggccgaggagctccatatctagttaaaattattggaattgatattaatgttatgaacaaccaattaggtaccactatcagccatgagacatgcgctagtcgctaaggaaaacattgaacaaacaaatttcaaataataattagtttgtattatctaagatctcaattttagtagtatatattaaacttgatgcat

SEQ ID NO: 16127 - DNA, 475 bp, Oryza sativa
  unsure (1)..(475): unsure at all n locations
taggtagaactggaattgcataatcgatctcgctagatatgcttgctaagggctaactgctcgatcgatcgatctctagctacaaactacaggaagctataggtcaactatggctgaaacccaaaacgaaggcatgggaaatttgccccagcagccggccggtgagatctacacgatcttcacggtcgatcccaatgacaggaaatactacgttgccgccgtcgacagcagcgacgaagtcatcgttaaggagaatacagaaggctcccgcgtcttcgatgatctccaggtaaggttttaaatctctagctatagctaccgctatctcgaggcaatggtnntaaatttaagtaagaccgtgtgttanatgtcttagcccgactattaaaatttaaacactaaactcagccatgctcgatatatataattaacacacacgcatcatcatcatatcattcatcagcagcagcaagat

SEQ ID NO: 16128 - DNA, 474 bp, Oryza sativa
  unsure (1)..(474): unsure at all n locations
gaactctaagcagcgcngctgcagcttcaagtccaaccttttaatgttactccacctccttttattgccggcacattatgtagtcaccactttcgatgaattcaagcaacaactcttgacctaaactcatcatcttgatcataactttacaacaggtcatctaaaacaaccctaaaatcaagggagtcattntgggccctggttntaacacttgtggcccgtttggttggagggagtattcacgagggattggaagtttagaggaatgaggctattaaatgtctttgttggttgggagacatgggaatattggtgggatggggatggcgaattgagataggaactcccaccttttcaatacctaggtaggggcagggaattgggagggaatcctcctttactttgtctaaacaaatctcagccatcctgttgtattaatgacctaatctccaattaactccctataatntctat

SEQ ID NO: 16129 - DNA, 472 bp, Oryza sativa
  unsure (1)..(472): unsure at all n locations
agctttagagatcagagtcgatatttcatgaataaattttgctgaagtactgtatactaggtaacgagaatactcagaattctgttcatgtcccatgtcctagttttctctaaaatgaaagcactgcattttgaatagcatgtgtccataattccatattaacataacatttttactgactgtaacctataaaaacctataacccctgacactactgcatttttacaatcaagtatgtctggaacaagttcaagattatactttagaatatatccaaacataaggatgaagacagaaccgattataggccatggacctttacttagccttttatcatatgttagcttgattagaccaacagacaaatcataaatgcataactcaaataatcacgtggtagagaaccttaagttttgtctgtgcttactagacaatgaagttngattacgcttagagaactagacatgattat

SEQ ID NO: 16130 - DNA, 415 bp, Oryza sativa
  unsure (1)..(415): unsure at all n locations
tttagtagcaccacaagtgactgatcttcactgctatcttttctatggttggnacgatacattgtgtaatgagcaatggttacaataatgagttggtttctggatataatctctctctctctctctctcggnttctatgaaaagtatgaattgtgtcttagtactatgtagtgctcttttacgtaagtgtgctggctgagcgcctttgagattcttgtcttctgtacttacactgaanaacaatgtattgtttgaatgatttacaggtgagtggagagttggatgatcatctccaaagttgggatgccctgcgagccgcgttgcctgttggaacagatagtggagcaccaaangtatgttgcctacaatctccttatttggatctagtgatgtgctgtccaacctccattccgtc

SEQ ID NO: 16131 - DNA, 390 bp, Oryza sativa
tctttccaacttatactctctcgcttttcacgtgcacactttttgaaatgttaaatattgtgtctatttcaaaaatattctataataacaaaacgctatatttttaagctttttaactaataattagttagccatgccaactgctctattatacgtgaagggaatatttttgaaccgcttctatatattgaacacatccttaaaagacattgagaactttagattcacattatatgttacagttactattgcaacttgtaatgttttttcttcacttaatgcccccacagctctagctaaggcgctaggtggcggatcgtctgatattgcgctcaacagcaactcactacaatgctttaacttttgagaaggcacatatacgtggaacac

SEQ ID NO: 16132 - DNA, 483 bp, Oryza sativa
  unsure (1)..(483): unsure at all n locations
caaatgtgccatacctcatctcaatgatctcttgtttgtctctccaggcctttgcatagcttatggtgtacttgaatttgttctcgatgtgcctaataattgattttggttcacagccaatgttaccaacaacactgctgtacatctcacttgccacaaaagctgaagtgatgtttcggtgatacttctccaccccttgtaagtagcacttgtgctcggtcacaatgctaactttccaataatcattccatttacccttatatgcatggacacgccacggacaatcttccttcatgcacctcacttcatacacataattnggtgacttgaccaccctaaactctctctgcaatgaaactggccaatgcttcaccgnctccttcatctcatccttatgagcataccttgcaccctcaattacctcgtactccttatactcccagngtacatgatcagcctctgatataacaagaccagagaagt

SEQ ID NO: 16133 - DNA, 463 bp, Oryza sativa
  unsure (1)..(463): unsure at all n locations
agcttggatcgaacccggatacttttcattatgatggcaatgaagtcaggtgaatgttcgtcttgtcttgttcagatcctttgccttgttcttgtacatgatcttaacttgtcaactgttctcttttttggggggtttacctggtacgaagtttcatcaattcttactcttctctgagtgtactactgtggaacgtctgaatatgtccaagagatgtgtaatacatcctggttggtatgatcttgaataacttacaaaatgcagatgttaaataacagagaaatattctcctgtttggtttactactggaattatagaaactatatctctcgatcccattatataggcccatttattccaaatagcctagatgctagatgcacaataactactgttcatttangcacaagcttgcatgtcttttctcgttccttacttatcacttacgagaactgtccatctt

SEQ ID NO: 16134 - DNA, 434 bp, Oryza sativa
  unsure (1)..(434): unsure at all n locations
agcttagccctaactttggcggcgatggttagtgaataggagcgcgaagaggaatttttgtgaagatgaagcggtggacaagacgatacacagtatcgtgttggtttttaggaatctctaagctttttgttgggctgaagtccattaaacatttactgaccttccacgggtttgtagggactcaagtatatttgtctttgcagtatgcacgtggaaagtatccaataccttgaaaattctcttttcttgctgttacacaaccttttatttagaagagttggtacaatgtgatttaaataggtggtgaacagcgagctctatagtttacactataactntttttacattaaagataagcactgtttagcgtatgttaaacaaatgcaatcagccaactgctgcgtcattgttttatttaacaacaacacatatgt

SEQ ID NO: 16135 - DNA, 452 bp, Oryza sativa
  unsure (1)..(452): unsure at all n locations
cagctagcacatgangagtatgtaatcatatcatgcgcccttattggacattgaaactatgcctctacacgaatgtgtgccatcatgctaatgtagctacaatttccctgatattttttagagcccatttttagttgtcaataaaggtcaaaacagagacgatattattcgctccaaatcctcccgaagcacggatatgataagagttcatatatatttggtgcatatatagttggatttgaatggtagcatgcggatacgaagccggatgtgataccgatgatatgcgatggatgcagattattcgatattctaagcagattatgtggtggacggtttggtaacaatgcgagtntttggcccatatttgtaccacttatttgtccatttacatcagacaaccattcagtaaatttgggatattccctagctatccctctattggatctttt

SEQ ID NO: 16136 - DNA, 452 bp, Oryza sativa
  unsure (1)..(452): unsure at all n locations
agcttctgaatcacgcgtgcatgtagaatataatatttttcagtaattcactatatgcagtcttcaggtgccttgtcgcactattaaaaagtgagatttttttcaaacttccaggctcatttctataggctggtcataagaaaatctgctggtaataatgatgaggatgtcctataatttacattaaaaccgcttgtgaaaaatctgatcatgcatatattcgtagaatagttcttaccagctagctagtgatgagtactaccactgctctcaaatatttatcatatatatatttagggcatgttcactttgatgccaagcataatttcttatatagttaccaaaatttggcaacaaactaaatatagccactttcttggcaactttatcaaaatttggtatcgctgaaaatggcatcaaagtgaacaggtccttaaactntgatcgatcac

SEQ ID NO: 16137 - DNA, 470 bp, Oryza sativa
  unsure (1)..(470): unsure at all n locations
atgaatgcaaaatactgatgagaaaaatgattgtgttttcatactatagacgtgctctccttgagaaatgggaacatctaaaataaggtgacaaaactgttagggagtactttcatgattttaaaatttgtatcacttatagtggtttacaagaatctaatgagaacacaatgactagattnttcagagggcttaatttcaatattcaggctgggcttgttaatgtgacatataatcatataggccaattgttcatgcttgcttgcattgttgagtgcaaaatnttggagaatccaacggagcaacaagatatgcttgtgcctcctatcactgatgtnttgcangaagttcagaanagtctccaaaatgagaagaaacgatatgttgagatgtcacttccatcactcgcgaatgaagagatggctgatgcagctacattatctgaaaaaggcatannaggtaaataaatg

SEQ ID NO: 16138 - DNA, 479 bp, Oryza sativa
  unsure (1)..(479): unsure at all n locations
agcttaacatgtaaacatgccgcctcatcattcattagcaataaattacatacaaaacttatgcaagcatgcaacatcatctataattcattgaattctacaaatcaacattcaatcattttccttcacattatttatcacaatatattttaacatatatgtatatccatcatttttataatagttaacacgtatccattcaataatcaaagcgtgggatatcatatttcatctacaatctcatacatagtactaagtttatttctctcttaacgtactttgacaaatcagttttatttgttgttaataactaatacaattgttacttttagctcgattattaaaaaatattaaaaatcactgtgttcgtttctccacaaagacttaaatgatattttggatactcatgacacgctnttcaaactgctaaactgtgcgtttcgtgtgataactntatatatgaaagttgctctaaaata

SEQ ID NO: 16139 - DNA, 491 bp, Oryza sativa
  unsure (1)..(491): unsure at all n locations
ntaactacctattactntattggaatatattacttttgtcccagtttagtactatccagggtttcacttatcgcatgataatcgcgcttatcgcggnggtacggtaggggaaaccggcgatatggtttggatgaattttgaccaaattcaaaattctggaaaaaaatcgaaaaaaactganaatattcatggatgtagttgttgatttgtaattgccaatggtgaagaatttttttgaaatagagtaagctaaattcaaatttgagtgcaaaaccaaaaatggtttacaaattgaaaaaggaagaggatattgngccttaagtatcctacatattcttccaattattctcagtttctagttntctacacatattcaaccgtcatttttaatttttaccctatttattntacanttacattatntcagctatacagcccgcgataaccgtgcgaatatcgcggttatcgcggtaaatcgtgcgattatcgcg

SEQ ID NO: 16140 - DNA, 449 bp, Oryza sativa
  unsure (1)..(449): unsure at all n locations
agcttntagtcccaagcaatccagaatttcaggacgattagtgttttccagctaatcccttcatcccataatataaaaggttttagctaaacaatccgtcctttctacatggttcttgttatgtggaactccgtagcacagaggaatgggctggcgccttgtgtctcctagcctaggtgtaattttataagggtattggagcatgtacactatatctgtgaggttgacacctatgttccaaattagccttgttatacaagtgcccgataataaaaattgttgatgaacgtgaggatcacccgtagtaactagccacagaggatgagtccgaaccgacaccgtgctatgccttgacatgcaggtcagcagctccattaatctaaatggcgcttacaagggtaagaanatggctgtgaccatagcataataaggggggcaaaaaaatacta

SEQ ID NO: 16141 - DNA, 430 bp, Oryza sativa
  unsure (1)..(430): unsure at all n locations
tgtatcggcagccttaccctgagtggtttgagagagtttctcttcccaatcggttcanagttccggacttctccaaatttttgggacaagatggtgtgtcaacttatgagcacattagccgattcttagctcagtgtggtgaagcatcggctgtagacactctgaaggttaggttattccgattatctttgtctgaatcgacttttacttggttttcctctttgccgtatggatcgatcaatagttgggccgatttggagaagcaattccacagctatttttacagtggggttcatgagatgaaattatctgacttgacagcgtttaagcagcggcatgatgaacctgtgcacgagtatattcagagattcaaggagatgaggaacanatacttcagcttgagtttaactgatgcccaggtagccgatct

SEQ ID NO: 16142 - DNA, 469 bp, Oryza sativa
  unsure (1)..(469): unsure at all n locations
agcttcttcttgaacacccacttgcaccccacatgtttacaaccatagggtcgctctgtcacctcccaagtcccgttagcgataatggaatccatttcactacggacagcctccttccagtagtctgcatcaagagatgcatatgcttctgaaattgacttaggagtgtcatccacgaggtacacagtgaaatcatcaccaaaagacttagccgtcctttgtctcttactccttcgaggagcttcactgacatcctcctcagagacaagttcatgtgtatgttcagtttgttctggtggtgtgattgaactgggaattatttcagagggttggttcgaaccactatgtgtatccttcattgngaaaaagctctcatagaaggtagcatcacgagacttcataattgtaccaacatgcatgtccggtacctcggatntaactattaanaatctataggcaatgctatgat

SEQ ID NO: 16143 - DNA, 380 bp, Oryza sativa
  unsure (1)..(380): unsure at all n locations
agtgggggaaaagagagtaagactgagtactacccactgtactcagcaagtcataccagaaaaggaggtactatgcatgatataaccaaaggaggctaaaggttcttttgcataaaactagcatttaaaagcagtagttgaaagtagtaaaaacaattatagtaattagtaaatattaaccactcactgtcaaacgctacaccacgttacaacatacccaaccaaccacctgaagtacaccagttcattaagctatactaggggtgagacgtatcncggggaatctagntgatcgcccataaccgcgggcacgactatatgaatagttttactctggctaaaagagtacaactgtacccacaagacacgattctacacat

SEQ ID NO: 16144 - DNA, 408 bp, Oryza sativa
  unsure (1)..(408): unsure at all n locations
tgttacaccagggattgaagagctcactcttacgctacataaaaaagacatctttgcatgctcacttttatctgatggtgttcgagactcaattcgatgtcttcagcttaccttctgtgccttccatcccatggctgaacttggccccttgagaagcctaacaaaactgcatctgtgtggtgtgcatattacaggtgacgagttagagtcccttcttttgaactcccttgctttggagcagttgagacttaatgtatgcaacaagataagtttcctgaagataccgcgtgtgctgcagcatcttagctgcctgagtgttatggcatgccgcaagatgcaagtgatngtgtgtgaagctccgaatttgtccagtatttaccttagtggatggatcaagtcttacttgga

SEQ ID NO: 16145 - DNA, 466 bp, Oryza sativa
  unsure (1)..(466): unsure at all n locations
agctntccatagttactggaggtttgttttgttggtcgtgtgcgttctctcaggatggaaatattcttgagcaatctgcccaacaaatctgcatcatcagaaaaattgtttcttcatccagattttatgagatgtccattcctgaaaaatatcaatggtgctaccaatttatttcttctgcattgccagtgtgcttgtggcctttggtgactacatcgatcaagtttcaaagcacatttgttccttgataatatatgccattatattcggttgcaaggaggcaagggtccattttctgaggatggagcgtttgcaaattggcattcaggtttttctatggggaagggacggaacctcatgaagatcatatatgtgtgataagagctgcaacaagatgaccaatgtctagcctcgacatggttcaccatttaatctactggttggctgagcttctaccagatgtcta

SEQ ID NO: 16146 - DNA, 453 bp, Oryza sativa
  unsure (1)..(453): unsure at all n locations
agcttattctaaacgaaatcaaacanatctagtcttatctgattaatacttaattaataatatgtgaaatgtttctatgtcacgtgcagaagaaagctaagtcaaaatgttgccactgcttcctccacactgcccacttgtacagcggttgccgaggtgcttattcctacacctaatttatggaggtcaataacaaaattattattgtaatatacttgtttttatatagtactagctcatttcacccgttgttatgtaaactctttagcccatattgtatatgtggcatctgacgaccgtccagtataaaaagcatgaggcctactggcctacttaccgtagaaagtcaaatgatacactctgtattcaaaacacactgtaccggtgtacacatgcatagaccaaacggaacacctcattntagtaaacctagtctgacgctgtctatacagc

SEQ ID NO: 16147 - DNA, 435 bp, Oryza sativa
agcttgttgagcctaagacctatagattctattaataactttcagtcctcgcagactaagtaggaaaaccaaacaaggcaatgatagaccaagtaagcatattgaattgataaaaaatcaaactccattattatgatgatagcccccgactgacaacttcaagaagaaaacttgatgttgacagtcaaagtagggaagtacaatgataagcttaagcgtagaaacgacgaagatgttcaatgttccaagagttgtcgacgagtgtaccgtcttcgcgcttgagtcgataggaacctggtcgggtgacttcagagatgataaatggcccttcccatagaggagataacttgtgccgatctcgtgtaatttgaatattccttcaaaacaggtctgcgactagacaggcacgggatcgaacattacgaatatgattac

SEQ ID NO: 16148 - DNA, 321 bp, Oryza sativa
ggccttaaatctcagctgactttttctgcacgattgctatggctgttggtacttcatctttgcgtcttgggtcgactagcttgctggtttctcagttgaattgagagtttaaatagcactggaggaggcatcggctatttttagaatcagagcttgacttgacttatgtaccgagtcctaattgatcccaatctaccaccagctgtctagagaaatgctctagccgagaaaatatcttcagagtcttttccatatcggataaggagctagctttgcttggggtctctttgctcataaagagtcttgattcaagagacaatc

SEQ ID NO: 16149 - DNA, 455 bp, Oryza sativa
  unsure (1)..(455): unsure at all n locations
agcttactntgcacctgtttccaacttatttaccgtgtaccataatatttgtgtcgtattgtatcggatacttctatatgtttatgcttactttcgtaggcagatattattggtggttcgttatggtgtccagatctacaatctgtagcatattgatacttactgtgtgttgtatcaggttctgttatgctgtcattttcgcaggcagacacagttggttcaggcagtcaggctgggttttgtgctactgtgggcaaatcaagttaccgaatcaagtttataggctactcccttcgtctcccagagactntatttttcagtttttagatataatgtttctcttcgtttaattaactatttttatgataatattttattagattagatgataaatataatagtatttatgtggactatctctttaatnttttcatttttttcaataagaatacggg

SEQ ID NO: 16150 - DNA, 482 bp, Oryza sativa
  unsure (1)..(482): unsure at all n locations
tgagggatgtatntggcacattgccaaactgatctgatcatctgatgtttcaatgggtcattcttgcctctgttggcatttcctctggtagtttccatacgactgtttatccagcgtacatgatagcatgaataaatgaaaagaatgttaaacatgggtcgcaactatatggtcctcaccgaaatcaactgaccaaagcaagagcaatttcgcatgatagcagcccatcaaggagatcctgatcggtacatactgaattatcgatgttgtatgtatgcttcgcgcaattgcatagcacccagctcggtgctcacgggcacacaccgtcaacgtcagacaatacaagaacaatgtgcgcaagcgcaatagacaccaagtgctttgaatagaagtatcanaagtatcaaaggtggaaattcttannnatcgacatactatagtctaagagtacatgtaaatatataatgtattttgacacatac

SEQ ID NO: 16151 - DNA, 347 bp, Oryza sativa
ctgaggctgcagctttaaagcagactagtcaaagaagatttcatcatgtatctggaggcacgacaatcaattgagggaacagactactagctgaagcatactccttgacagtatcagcaaaaatgcccttcacaacttcagctgtgaaggatggcaagcaatcattcatggagcgtgactgaccttctttcaacataagatccctcattctggatcttaacctcgtaagcaaccatgacggatgtgttaccggatacaacaacatatgccgcaagacaagcaggagtcttgacaggagtaaagcccatcttgtgagtccagatgcatatactccaagtggaggctgt

SEQ ID NO: 16152 - DNA, 466 bp, Oryza sativa
  unsure (1)..(466): unsure at all n locations
tagccatgcctttcctcccttttctcattattcttttttccaagaacctgttttttatgagaaggaagcatagtctaatgtaggagtttatttgaatggaatctttgtgggaagccaacttccagtgtagaagcttagcttaattatatttgtggaaatgaaagtggaaatgaccccttgatcatgagagtatgaaaaatatctaacacgagtcacataaatgtgacaaagctcattataatgtcaagtagtcatatgcataactaggggattccccgtgctttgttgcgggagttactaagtaattcttaatattatttttcgttacaattcagctatgagtaaaaaagaacacaaaatcaaatctcagagcttatcaatatttatcgtgaaacacatgagagtcgcactctaatatagaacatgttgattagtgtatattaaatattataacnaaatgaagaga

SEQ ID NO: 16153 - DNA, 381 bp, Oryza sativa
atatgcgaggcgggccatcgcgcggcaggccgcgcgcgcgggtgcatgcatgcgccgtcgtaccgagctcgctggcttttgccttattttttgtcctgtcaactttttttgtccgatcacgactagacggaggcatgcactattgcgcggtgtgtggaggtgcacaggcgttgtattgcaggtgagaccgtaatggcatcgcatcaggattgggcatgcggatcgatatggccagccgtctacgcgttgctatcggatcagttgttgtcctgccgagatgggccgtctgcttgcacttgcagatggttaggacggcctaatctgaccaatgttggtgttcgatcgatgttcttggactagtagcctatgtagagttctcgg

SEQ ID NO: 16154 - DNA, 434 bp, Oryza sativa
actaagcttggtcagtgcccttggaagatcatgccttttgtggactagatgtaaactcatcttcccttggatgggctatgtcagcagcatctactcgggcattccgtttgcatggtgaaatcccaatgctgttgcctcttattgatatgtgtaaccatagttttaacccacatgctaggattgtccaggaaggaaatgtggatagccctgatatgtcagttaaggcaagtatcctgaattgtttgtgtacttctgagcccaagaaattttgtatttccttaagacaatttttgttaattgaatgccctctgttagtagctttgtttatgcataacagcataagtgacatgtgaatgcatttatttaactgaattcatggataaatgtagccttttatgttatcttaccatagatgcaagtaactctgaccacct

SEQ ID NO: 16155 - DNA, 476 bp, Oryza sativa
atgcagcttaaattggactctcatctatgcaatgatggcgttctttatggaggatgctgtgagtttctatccattattccttaatggtgcttaccactctcgcatttccagattccattattcgatggatacctccagaatgttaggaaaatgttaactccagtgtctgtacaatggatagagtttcttttccaatagcacagttgtcattgaggatagttgaagtccatatacataacaaaatagttgaaatgatatttgattagcggttcataggtgatgactgatgagataagtaacatttatatgtttgttgaattttggtccttaagtagcgatatcttttcatacatttggtggacgttatttagatcagcaaaatcatgaatcaactgatgaattccagttaccatcttagctgagaaaagatctggtgttgtgtaaccattaatccatgacatatacatgtgcacgtg

SEQ ID NO: 16156 - DNA, 207 bp, Oryza sativa
atggggagggaccccccgctaggcgtttttcaatgggctcctcgggaactcccccgtggttcgtttctgaaaaaccagtggcgcgcttgacactgaacttttttggcgttgccccgaaaagagaggtttctccctactcttcttccacacccagaaagggggcttagatgttcatgagagtccccctcacgctggaccaaaacccgc

SEQ ID NO: 16157 - DNA, 339 bp, Oryza sativa
ccattaacaagtgatactattgttgtatggttcggccaaggggatgcagaaataatgcttcacgatccattacgcgtacaaggcctattgaacttctttgcatccgatattttggcgcaagtttttctggttctcacagagaaacagtcataaaaggtccaattgtacgagacgaatatataggtccctggattccttaccatcaaggtggtaaaatgccgcgacttatcgccgattgctagaattctctatgatccattttggaaagtctttattgtgtttacactatctcatgttgcgagatgacttgtctgcaattcctcatatctatcatctcat

SEQ ID NO: 16158 - DNA, 477 bp, Oryza sativa
  unsure (1)..(477): unsure at all n locations
agcttagtaggcatgagaagggacaacttcttcatatattaggctgntatgttttgtgaatatcatgggcttaaaagggtgtgcacttataaccatgtaagcatattgggatgacatgtatcaaattagccacttcacaacagtatatatgtaaacaacccttttttatgttttaaaactcctaactgttcctactaaccttgcaatgcaggtatttcctgaagctaaccgtacagttttggagcagttaagtaaggtggactgcattgtatatgctatgggatcactctttacatcagtctgtccatcattggtaaccatgctgctctattttntgtttgtacataattgtattgacttgatggtcttaagtcttaacatgatatcagatatgttcatttntatactacatgcagtactaagcaaacatgggtgccgtgcacatctgattactgatactgactntaaaagctttta

SEQ ID NO: 16159 - DNA, 483 bp, Oryza sativa
  unsure (1)..(483): unsure at all n locations
ggaacgacgttctatgttgggctccgtcaatggtttcagttgctattgagttctggcgcgtgctgtgcagctgttcagccagccggtggttgttttttcttttcttgtaacccgtctagggtttttactcctgcttattgaaaatataattggcagttctcctgccggtttagtttcaaaaaaaagtataatagtaggctataagccaactataagcttatgtggaggaaagagaatttgaaaaatggagaggattggctttcatgcaagagctagctattcacatactttaagatagatacattaaatacataggtgagagatagagagaggagaagaaaaaaagagataaccttatagcccatttactatacatgttaactctaatataagctataagctcatagttggctctcttattaaacttgctctaagaaatcgttcgatcccattcccaacctttcnctatacactcggatctcc

SEQ ID NO: 16160 - DNA, 274 bp, Oryza sativa
cacagccagatcgccgactgccagcactgtgcctgacgagcctggacgggcgttgcgaaaggccgccgtcgtcgtcaccgacgccgtcggggaggccccgccgttcagcctctgcgccatcatgtgactttcgtcgccaccaaataaacattcgctcgccgtcgtcgtcgactgcgatatgtgcttggtagcacaacggggtcaattaatggaaaacttttgttcgttaaccacttgcgtgatgaggccctgcgaattgtatgcttcattctat

SEQ ID NO: 16161 - DNA, 412 bp, Oryza sativa
  unsure (1)..(412): unsure at all n locations
cttagaatactcagcttgctcgctntcttatttctgctcggcggtttattcttgtatggattgctcattgcaaacgtgcatctactcctctgcttctaatagtgtttgccctgcgtgtagatgtagtccatatgatccacgagcaaacgctccactaggcaatcatcttcttcgcaaccttccactctaccatcgtagtgtcccctctccacaacctgtgccacgatacccacaacatgatggtaaaaaatctgttaaagatacgttcaattaatcatattacactacttcgtacatgcaaatttatcataggaaaacatgtcgtgatgcaacatgatatcaaatgtacaactgaaactaaacttaatagaaagagaaacagttgttttccttcaccttactcggaagcttt

SEQ ID NO: 16162 - DNA, 415 bp, Oryza sativa
  unsure (1)..(415): unsure at all n locations
tataatgggtgcctattctatcccgtctgactttgcaccacagatttggacatgggccatgaaccatgtggggcaatttggagagtacaaattaaaaggacatgagagaaaatatcgctagaggaagcatcatttatataagttctgaagagttaacctgtcgcggggctccggaggggactacgagttcgtcgacgacgtcgagtagttgcgtgacagagatgccgacgaagcagcagtgcgacaccccttcgccctccgtgcagcagacaatggaggaggcgggagaacacgtggtggagacngccgtggagtnggtggtggcgcgtgagtctncgacgaagcttgatccatgaacgaggagagcgagcgccgcgttgacgcgcgtagccaacgacgccacacctccaacgct

SEQ ID NO: 16163 - DNA, 465 bp, Oryza sativa
  unsure (1)..(465): unsure at all n locations
tagaataagtagatattctgctggttccaatagcatggagaatgcatttcttaatatctgaaacaatgaaaaatgcagtcagctgaaccaagtagccagtatatgtggatcaacatccacttttttcaaactgaaaaaaaaggttttgtgctcaagaacatggaagtggaaaaagaaaagtactactgcactactctgtaaactagcactcgataaccatctcataaaaatttaagaaagtacaacctttcaaacatactatgttacttttgtacacctgtcaacaaaatttcaataaaaaaatgaagtttcgtagtgtccagtccagaaagtgcggttcatgagntgaacttttttagataaactcgcataagtacaattaccatcatgtgcagcgcaaccaaatatcattcatgaaaaaggaacctttttctcatctntctacnaagaaatgcacgaataatt

SEQ ID NO: 16164 - DNA, 456 bp, Oryza sativa
  unsure (1)..(456): unsure at all n locations
agcttcttcgcattggctctgagtggtagcatcttctactctnttatgatttgggggcaatacgccacgacctattgcgaggaacatgtctatcgagctcctattactagagcaatctaatggtgtatttctgaagcaacccgcagttcgatccatgagctcccaatcttgtggtgacttcggagagaagccctccatacaatcacaaaatggttttctactgccatcgcagacgccaaaaggtccgcaagtagcaatgcagaaactgaatggtccgcaggcagcaaataaagcgcagggatcagtgggatgggcatatacttcttgccaatattgattaactngcgaccaaatgctcaacttgagctggccagacatgtctattgagacaaatgangaagctaattcgtctgatgagtggtacatgaagtattcctcctcatcattattaacata

SEQ ID NO: 16165 - DNA, 403 bp, Oryza sativa
  unsure (1)..(403): unsure at all n locations
agcttctgtggagaatgtagcttttggattgttgtggagctagccaattgagatctttctttccctgtattagttctgacccatgtactgcactaaaatatcatgcatgtacctattccccgtattgttttctgacacatgtattgcattgcacatcatcttttccccttttgatctacctaatattcttttcttggtggtctaccatgcatgggctggattaagtaatgtatggtcacttggtcagtactggaagcacaacttgtttgccactggatgtgttacttactactacctgattggctgattattattagttcttgctaaattggttcttacatatgtttgtatggtgaaactgatttagatttaagttganatgttgctttagattcatctatgt

SEQ ID NO: 16166 - DNA, 82 bp, Oryza sativa
ggacacaaaaactaacttggactacatgggggggcaggagaagttagtatgctacttattacgggacaaaaacgtgtctgtc

SEQ ID NO: 16167 - DNA, 365 bp, Oryza sativa
cagcttccgagaacatagcattgtcagtatcttttccatgaacttaaatggtcacgcactctatgcgtccaagtgactagcagggagacgagatctggtgctgccggcgaatagaagtctcacacacatattaaagtatggctcaagttaagatggctatgtcagacactgatggcaatgctaccaatggcgacatcagtgcatggcgcgcctctaggacctacctcaagggctggaacaccggagcgcacctgcctcactcaagggtgaaccatctatgcagggatactgcacgcgctcgggaggctactccgctaggcctatacccatacgacaagcgcggatgtacgatggtcgttgcatgc

SEQ ID NO: 16168 - DNA, 451 bp, Oryza sativa
  unsure (1)..(451): unsure at all n locations
tccgccgtctgatccaagtttgtcaattatattcggtatgtcatcccggnttggctcttggaattaggggtgagaaaaaaaaaacaaaccacaaagactgaggtttggctcttggaattatgggttagtagaaaaagactgaactgaaagaccgagaccaatttagtcctaagtaataaaagactgaattttgtatggtaaatccggttagtctcattggttaactgaaaaggccaaatttaaaaaaattgtcaaaatacaacctataatccactaagctcaataggagtaaactctaattttcacatctctacttattcaggcatgtaacctaataagagtcttctcatacgtgtttgcgattgtttttgtgatttttgagttgaaaaatgcatttatttctttgcatatatgaatatgttactgaatttccggcaggactgatattttt

SEQ ID NO: 16169 - DNA, 414 bp, Oryza sativa
  unsure (1)..(414): unsure at all n locations
agcttatcatcagatgtagccatgaatgtatacgccgacggttgatagcgaagacaaggatgctcccggccgtgggtggcgcaagcgtgtcaccagcaactgttacagacgtgaagacgctactggccgccggtcgcgccttctcacgccaagccgatcttgccgccggccacgccacctcgcaccgtgccgacatccactaccgctggccacgccaaccaaatgcggccatctgccacgcctccccggctagccgcccgtggccgtgaaaccaccgcgccgtgcatctcaccggcagaccaccgccgtcgccgggctcacgccgaggtccttctccggcgcccaactccttccccgccttcactttgacagcagacgtgacgggtcgctncacaggcacaggtctcccttctc

SEQ ID NO: 16170 - DNA, 412 bp, Oryza sativa
  unsure (1)..(412): unsure at all n locations
ttattatataggaattaaactgcaattggtctgatcttgtattaaacacttaaaaagcaagcgaaaaagataccttattaagacagncatatcataagcacatgatatcgaccgtcgactgaccccaaacaagcaacctaaacacacaaactaacaagcagaagctagacagtcgataaactaatggaaaacgagcctaatgctccgaacggctcctgcggtcggtggagtcgaaggcgtcctcctgctcgtcaccaggtccctctgagcgactcccggagcctggccgataagtctcgccgctgcccgactctgagccactggagctactactgctgagatcgcggctgccactgggagtagcagacaaccaacctccgttgcactggctggacccctgcggctgatgctg

SEQ ID NO: 16171 - DNA, 447 bp, Oryza sativa
  unsure (1)..(447): unsure at all n locations
agcttgctgccaatgctctcatctatgattgagtgngtactgcctgagtcaatcaacataagaatctctgttccttgaacccatccccttaatctaatagatntggatgattctgtacccccacaaagcttgctgagatatagccatcaatcctccatcaattgcctctactgattcaatagggtctttagctgtcaggatgtcatcagaattacactcagagcgcattgcttccaataattcttggacaacatggagctggacagaagtagcacatttatggtctctcccccatctttcaccacagacaaaacanagacccttagcccttctgtaagacttaagagaagcaaatatgtcctctctggacttagcagattccactccctttttgtcatcatgtgcactaacagctacagatctctgtcctggaggcactggcacata

SEQ ID NO: 16172 - DNA, 335 bp, Oryza sativa
  unsure (1)..(335): unsure at all n locations
agctntcttgaaagtaatatgcaccaactagttcatacattatattacctctgttntatattataggtcgttttgattttttttactcaaatctcttcaagtatgatcaagtttatagaaaaatttaatatctataatacaaattgagttttattaaacgtaacattaaatatgttttaataatatgtgtcttatgttaaaaatattgctcaactcaaaaaaggttagttaagaaaaagtcaaaatgacttataatacgaaacatatgtagtatatatattttttgtacgcaatcatgcataagatatactccctccgtcccataatataaagga

SEQ ID NO: 16173 - DNA, 481 bp, Oryza sativa
  unsure (1)..(481): unsure at all n locations
tcgngaagaccttgagcaaggcaaatcaccctctgatcaattgctcctataattgataagacattattattntgtttgcaacttgcattattagaatcacacacttaacttgcttggcctcggtttgcatgccaaaccgacggacctacccagtagtcgcactaatttccgtaggtcgtactaccctgattccttgtcgctccacccttgtggtacctcggtattcgtgctctctgagcgcgtataccaaatatcccacatacaccgttgtttgtcgaaaacttgggaaatgggtttgtgaagccttcaaaacccgacatgtggtgtcggtgtgtntgaaaataaaatgaattgtgaaaactcgcgatgcgggggttgtgcctatgtggcactgtcccgtattcacatataangaccgatttctgtgggaaactcatcgaacctaatcaaagtgcaaccacaatgtggaatgggacaccct

SEQ ID NO: 16174 - DNA, 490 bp, Oryza sativa
  unsure (1)..(490): unsure at all n locations
tgcggcatgcaagcttagcagttagcaacacaagtatcctaatgttattacaacaaanaaaatactctacttatgatggagtaaatctagtaaataaaaacgctaaaaggattatcgtgttatgaatctaatggtgccgagagcatcacattcataacactcagcatgaaacattcagatcatttgacgccttgttagcatgccaatgcagtgatgtgacaaaaattttcttttcagaccagcgtgacctacaaatatttgtcactgaaaagttagttcattgagcaagttacagaacgaacaaacgcttcattattacaaacaatacccagagaataatcattggcatataaaccgctctattcttattaagatacatattgtatcttggttatcgttcacaccgttttcaaagtactaaactgtgtgttccgtgcgagaactttatatataaaagatgctttaaaatatcaaacttatctactttatg

SEQ ID NO: 16175 - DNA, 455 bp, Oryza sativa
  unsure (1)..(455): unsure at all n locations
ngagtggtgacagcaatttgggcttgttcttttgaaagatggaatttgggcttgttagctagctttttcctacgagtaagcttcttggattgctagcaaaaaggtcatttcaagtttccctgctgacatggcacactaattagggagaaaatctctctcttgtagtgtttgtgtaaaaaaaatctaagagtggcatatggatagtggcactccggaagagtggcaaatagttaaaacccccaaaacaaattatagattccgtctgtaaactgcgagatgaatttattaagcctaattaatccatcattagtaaatgtttactgtagcatcacattgtcaaatcatggcgtaattaggcaaaagattcgtcttgcgattatacantgcaaacggtgcaattggttttttctgtccacatttaatgctccatacatgtgtccaaacatttgacgtga

SEQ ID NO: 16176 - DNA, 471 bp, Oryza sativa
  unsure (1)..(471): unsure at all n locations
agcttaacattgatgttactctcatcttccctctctctttcatgtcgccaaacttgacttctttagttaacaaccataaaatctattaattgatttgtagatgcccttacctccattcctagcacttgtcgtaattatgggcaataccagagcattatgttgtaaatttatgagagaacattccgaaaataataaccataatatcctatgaaattctcgaataaaattgcatctaaaattagacatttggcaaaaattaatgtatttggtgttgtatgtattatttattgtgttgcttcattaggtcaatatagtgaaacacaacaagcatgtccgccgtaagtttctcgtcatttggatcattntgcatgacatgcaaacggataccaattacttaagcaaaaagtaacaatataggttgtgttatcatatatcactctatagaatttataaccaattagacacacacat

SEQ ID NO: 16177 - DNA, 495 bp, Oryza sativa
gcttaacatggtgcgtctcgtaaatagaaaccaataggttgacttatgtcatcgggaatgttgcttgaacccatcgctggtaaagaggatcattccctgattgcacacaccaaataagggccggtgattcattgagataaagggggataaaaataaatctgtcttgcgaaccagagcaagggatatgtgtaatctcttcacataaacaagagcaaaggctaactagagatgacttcaagtttaacctgaatctgtgctgtcgacgaatgaaaaaagaagattcttaactcaatggaaacaggatggcgatcaaaatcaaccgatctgaaattaactgtgttgatcacgtattccataatggcaaaggtgcccacactgccattcgcacatgggtgcttgcagtgaacccagcatgagaccaatttacacaagttcttccagaatgcaatgctagctagtctcgaaccatcataaagatacatgagtgtgatacat

SEQ ID NO: 16178 - DNA, 452 bp, Oryza sativa
  unsure (1)..(452): unsure at all n locations
gcttatacgaggaactagaatcgattcatgacttgccatccgataagaccataatgcttcggtcagtcgtgtatgccactgccaaggataatcagatgttnttctcttaatcaatttgatcaaacttttattatatgcttcggcttgtccattggcttgtgcataatatgaagaacaattcaacaccttgatacccatactatcagcaaactgaacaaactcattggacacaaagattgatccctggtcagttgtaatattctgggaaataccaaatcggtagattatgtgctccttgacgaattgtataacatatcctaaatcaacctttttcaaaggaatagcctctacccacttggtcaaataatcagttgcaaccaatataaatctatgccccttgctggaaggtggattaatgtcacgaccggagataacccaacgggggttcctta

SEQ ID NO: 16179 - DNA, 426 bp, Oryza sativa
ggaggcgaggacagagctttgaacacactcatctttgagacgtgtatggacaagacaagcgaagaacggtaccgcagctatcgaaaaaagaagtggtggcatgattaacaaactctgtaccgttatcggcctgaaagcacttaatgggcatgctgaactgggtcttgacatatgccacaaactccacgagatgctggtgaacatcggacttatgacgaagaggaaaagtccaacataagtgggtgaaatcatcaagcaacactagatagtatttaaaaccagacaaactcaagactggagaggtccatacatcgcaatgaacaagctcacaaggggaagaagtactagacgaagacctataaaaagaaagacgcgtgtgttctctaactgacacgcattgacaagcttattattagaccgagtaca

SEQ ID NO: 16180 - DNA, 440 bp, Oryza sativa
  unsure (1)..(440): unsure at all n locations
agctttagccaaccttatacttgagtgatttgtcctgcttcgcattngccacgaagtgtgaaaccctattgagcatactggaaaatggtgatactccacctattaattactccctcccccaaaatataagattctagaattgagtcttgtccagaatcatagtattaggatgtcttatctggacacagattcttatattttgagacagagggagtagtcatgaattgccccttacatgcgcatagcttctgaaattcactgtgttgaataaatgcattaaaatggtgaagtttttgtacttatacgatatctcctgctgattatggattgttcgtttccaggtcttacgatatggaacggtttggaagcatggtgggcaatgaattctataaccctgtatatctcatgtacagtagagattaaccttgttggtcattaca

SEQ ID NO: 16181 - DNA, 198 bp, Oryza sativa
acctgcccaggagattgaattgtcggggcgattactcgtctcaatacttctctctctttattaataaccccgcgaagcacgcaactacagcgtcccacctcaacaatgttttcataaccaccaaattgagctatgcacgcggcaagaaatgcttgtctcggatcaatcgaagcattcattactttggtagctagctag

SEQ ID NO: 16182 - DNA, 406 bp, Oryza sativa
  unsure (1)..(406): unsure at all n locations
tgcaagcttgcctattatctaaagaatatggttccttccttagtcctctactttaagcatactctaagattcctagactattgaatgcttatagaccagtctcaggttacaggggaagagttgcatgctgattgctgcggatgtctacaggcctgctgccattgatcaactcactattctggggaaacaggtattctgaagacaacactctttccagggtagtattgtcttggaaaccttttctagctactaattttaactcaaacacaaaaattcaaatttgccgcactctgcatattttacctgtttgaagttaaaatgacagcttcttttaagtgtattgctgtgatgcgctttttaatgaaatacatttcaactttcataggttgnggtttcagtttactct

SEQ ID NO: 16183 - DNA, 421 bp, Oryza sativa
  unsure (1)..(421): unsure at all n locations
tgcgtcngtcgcactctccaccggcgcggtgccgcctgtcacaggatgccttctatataagctaaacaagaaaaagaatgaataagaaaagaaaacgatagatagagagaagagagtatggaggatgacatgtggggccacatgggtcccactttttttaactggcatgggtcccacggattttattattattttattgaattgccatgtaagcgccacgtcagtgccacgtgggacgaagacctagccaatggagtgccacgtaggcgccacgtcagccaaaaccggtgacaatactaccgagagactntgtttgcacggttttgtaagttgagggacgggctgtacccggtattgctgttcatggacgaaaattagactgggcgacatatagagggaccataagtgaacttatgccatg

SEQ ID NO: 16184 - DNA, 392 bp, Oryza sativa
agcttacaaggctagctcgttttatttattctctctgcattagaatcatttatatatttgtaagacgtggatctgtatgtcaacaatcgtcgattgtgtaccctgtctggtcctggacaggggtttaatgcacattcagcttataaattctggttcatgaatttctaggcgagacatactatcttcctccacgcccggaatccccgcctcatcccctctcgcaggcgatcgatcctccaccctcccgtacgcggtaggcctcccgcctccgccaatcaacgccgtcgtcctctcccgtctcgccgatgggatattgacccggcaccaacgtctttctcgctatcgtcttcccgcgccgacgagagtggcgtcccgaccgtattctcactttc

SEQ ID NO: 16185 - DNA, 481 bp, Oryza sativa
  unsure (1)..(481): unsure at all n locations
tacaacattcactccctctcactaaactgtggcatgttctctatccgctcgtgatactcgcaatcctaaaccacgagagaaaacattgcccctatagcagaagggtatatcgatggaggcagccatcggcgcagcgagctggctcgtcgacaaggtggtgacacagcttgccgacgagctggtggcggcttacatagccagcaccgagctcggcctcaacatggagcagatcaagagggacctcatgtttatgcaagggctgctccatcatgcccgggagaggagggacaagagcaaccctggcctgcaagggcttctagaggaactcagaaagaaggctgatgatgctgangacgtgctggacgagctccagtacttcatcatccaggaccagatcgacggcacccatgaggccacccccgtgtagacgatgcatncgtgccaagtctccatggcgcatgtcttgcacacatcgtactgc

SEQ ID NO: 16186 - DNA, 382 bp, Oryza sativa
  unsure (1)..(382): unsure at all n locations
agctngcattaaacacctaagttcccgtgacttgctgagtacggaagtactcacccttgctctatataaatatatatatagtttctccgccctgaagttgaagatgaagtgaagtgaagattatggtttcgtcctggtccccagccgtcgcctgtggtgttgggtgttagaccgttggttccgctgctgctgctgctgttggtgttttctcgtccgcgtcgtcggttgtattctcgggctgtccgagctgcaacctaagttaaggtaaataagtcctctatatattntaaggattgctatgattcatatttgtcaccgtgggtaccagcactatgtcctgngactggtaccgagatcgcggtttcatatgaagcggttcacg

SEQ ID NO: 16187 - DNA, 431 bp, Oryza sativa
agctagcgctatggtacgatgatcagctattatctgtgcacggatggataaacggtcccaatgtatctaatgacaataacacacctaacacgctatcactctaacattattatcagactgacgactagatatttctactgcacatagagataatttgctcatataaatgtcaaggagataagtcctacatatcgctgatgctacattagtgatgagttaactgatatgcccattgactgctgctaccacattgccagtaccaggactgaagaatgaactatgaagaattactgatacattctaaattcttgccaaatttgcacaatgatgaatctgcttcagctgatacactaataatttcagagcttcatgcaataatatgagcagcataacggtataattggcgtgttagtaccttcaccaggaatgtt

SEQ ID NO: 16188 - DNA, 375 bp, Oryza sativa
tcggatgtgcatcgactacaccgaccttaacaaggcatgttctaatgacccttaccccctgcctcgcatagatcagattgtcgactccacagcggggtgcgaccttttgtgtttcctagatgcatactctggttaccatcaaatccgcatggctagggaggatgaagaaaaaactgcattcattacccccatatgaacttattgttatacgacaatgcccttcgggttaaagaatgcaggtcctacttttcaacgtactactcgaatttctttgggtagccaaataagacgtaatgttgaggcttatgtcgatgactcggtttgtaagacgcgcaaccaagagaccttactcttggatctagcggagacttttga

SEQ ID NO: 16189 - DNA, 399 bp, Oryza sativa
agcttcggcttcatacaactgcatgtacattcactatccgccttcaagacacattcctgcacggcttgcttgcgatagataccacgcctgctcctatcaacacacattatttcataccgatgcacttgtgtgccttgagcaacaactcgatgtctccgtgcctttttgattttatcttccatgtactttgtcactacgttgccaaacactatgttgtcatcggccatggacggaccaattttcttgtatcgatccctaaagtacgcttgcgtgccgtgaaggatgaattcaacaatagcaaccaatggaagtacccgaactcctcgcattacccagttgtacacctctgccaaattggttgtcattatgccataccgagatccatcggtgtcgaacaat

SEQ ID NO: 16190 - DNA, 425 bp, Oryza sativa
tgctgcacatgactctggtatctatgttattcccggagcaacaaacatcgtaatgacgcgacgctatgctcttgaaacttgtagcatgtatggaatgtttatccttctctcagttcatgctgtaggttttgtgaagtttggtatgttaactgcagctacatcatttattgtgaaatgttacttctttacttaattattactttgcatgtatgcttatgctgctaatgtatttgataggtgcaagcttacttatatgatggttactgggaagatattggtactatagaggcattctacaatgccaacttggggataaccaagaaacctgtgccagattttatgtaaggtttacatattgcatggtgaaacaagttacttttaaaacgtgcatttctgctgaatttcttcctattttgacagacata

SEQ ID NO: 16191 - DNA, 434 bp, Oryza sativa
  unsure (1)..(434): unsure at all n locations
agcttcttattcttcttctcaaaattcttgagcagatgcttcaattctttgataccagatctgagatctttcactgaaatgccatccttcagaagttgttcctcaccattaacggacctaccaattagagctggaatattcttcacaccaaggcttttgaggagtggatgagaaacatcctggacctgatcaaagaaacatgatatattactacattaaattgtctgtatagtcgtagtactagcatagccatgacgttcactgcatggaccaatctataattatatattagcataggattaactatatactactagcatttatcagcgccttatcatnttttnttcaaagcacagtcaacaccacataggaattgcgagttagttaggccctataaaacacagcatggcacttgtgcttcagctttctcatga

SEQ ID NO: 16192 - DNA, 393 bp, Oryza sativa
  unsure (1)..(393): unsure at all n locations
tgtcctcatggacatgatggtgcgaatatgtgtcattattaagccacataacaaatatctgcataagggttnacaanatgtgaacacatacatcaccagacactctcatcaatccaaattatcattttgcagaaactaataaaaatatcatgctcttaccacgtatggaacagcatagagccttaacattttgaggggccccatcacataggtcagaccagcatgaatcccaaccattgccagccaggatgcaggtgatgttatcacatccttcttctcatttggttggaacagatcactgcttgtgttgaagtgtgaaccttttttacctggactccttgcaaactgcatagacatgaaaccctaaccaggaatttagtatgatattaccaa

SEQ ID NO: 16193 - DNA, 386 bp, Oryza sativa
  unsure (1)..(386): unsure at all n locations
tcaactcgtaaagtatcatggaggaacgaattttggtcgcacggctggaggtccctttatcaccacgagctatgattatgatgctccacttgatgaatatggtgagttacaaggaatatgcttagagacgttttctgtattgagcatgaattataagtgcccttatcaatattatcatcttctgctgctgttatttctctacactatgagcatatttgcagcttttcaagcattaagagtggatcttttttaaaaaaataaaattcagctacaccactatattcttcttactcaatccttttcttgtggggctaatacacaggacttgcaagggaaccanagttggtgcaccttacagaactccatagagctgttaagttatgtga

SEQ ID NO: 16194 - DNA, 383 bp, Oryza sativa
  unsure (1)..(383): unsure at all n locations
agcttaagccaccataaactgcagcaactcatgaaacttttatgggtatctgcgaatgatagtgcacgacagggagtgtggcaactatgcgtcgnctatttaaatcagctcagagagagagagagagagagcgagactctttgtgtttcatatgacatgtttgaaatttgtcacattgtccaacccatgattgtctgtgatcccttctcactcctccctcactcaccaagtgatttgaaacccatccagctttgatctacagagagatacattcatgctgcacttccagctcgtattctctcttcagatgaatgattttctggctgccagtcttggcataccagggtctttgcagcctcccagagcagagcagaaaaacatat

SEQ ID NO: 16195 - DNA, 208 bp, Oryza sativa
  unsure (1)..(208): unsure at all n locations
gagctattatgccattcataatgggtctacatggcattcagtctcaacccctaanagcgaatattccttgccacatcatccaaccgcgtggctttctcaagtccgagtagccaactttggctatgagttcctgctctcaggcgggccccacactcattgctacaggaaagaggggcgaggggcgaggcagccaacggggagaggagcg

SEQ ID NO: 16196 - DNA, 354 bp, Oryza sativa
  unsure (1)..(354): unsure at all n locations
agctngctgagctgcacctgcacggtggtgtgttggctgctgagcgtggcggccaccgctgcgcggcgatgctccttgaaggtggagatgcactccttgccatagccggcggacatcatggtgtcggcgagcgcacggaggcggtcccgactgcctgcaagtggtggtgcgaggagtcttgggagctcgagctgaagcctccgcatggccgagtcgaggagatgatgggcctggacgaggccgtggccgttgtgggcgttggtggggtcggaggcgaagaatagcatggctcggcggaggtcggcggcgtgacggacgaactggtccgcctcccgtgaggaggcatggatgaag

SEQ ID NO: 16197 - DNA, 448 bp, Oryza sativa
gcaagctgtgctcatacgagcagctcatatacttgtttttcgccaataaagcgcgacccaggacagtttcaggacggtacgcgccaaaggaggcggatacactggtgctgacggatcggaaaccgtggcacatgtctgacctgcgactcggcgagaagcccttggtgattgcctcggtgctcaaagccgaggatgctgaaggctacaccgtagacaggctgtcaagtaatcatgttgagcaacaagttaggattggaatcgtgtctcttcacggtgttcctgatcaacatgacgacgtacaatcgcatatggagtgaactggatgcggcggttgctagtgtcaggaacactgacatcattccgatgatcagaaattgcaatccaaaggtatgcattaccatgtcatatatctgctccattgcatgctacatggtgcatatgcatgttc

SEQ ID NO: 16198 - DNA, 471 bp, Oryza sativa
  unsure (1)..(471): unsure at all n locations
ctcagagtcacctgcggcatgcaagcttatgcgcatacgacactgcaccattcttcttcttccttacaatcaccctaccagcaacagtaagatcacggtcgaaccatgtgtaccacaagccacctccataagtttggaccccaacctcaagataacctccctttgttacctgcgtggcaagaagcaggatttaatcgccaattcatcgaattgtaccacgccaattaacataaacagaaatcaactacgaagagttcaaactctaaaccttggagacaggcttgagcttcagggatggactgtcagtatgcgcaccgattatgtgaaacccattgccggcagcatacctacaacacatcaacataatccaataataaataatgcactaatcaggacattcatgatccacanaaccgtatagaattactacagaataagttcttcacaaaaaaaaaatagaanaagtatgac

SEQ ID NO: 16199 - DNA, 492 bp, Oryza sativa
  unsure (1)..(492): unsure at all n locations
ntgcctggacgtataggaaagcaatgtctggaacggtaatgctatgattattacttattcattagcaacaattacatctagcttgcactgaagaaaaatgatataacaagaagttttgtggggctcaacagagcaacttctttgtgctagcaacaactgatttcttctatcccgacggtctgctggtgaatgcaggttttctttggacatagttttcgcatagaccatatatgttgtacaatgatgtctggcgaaacatgtgttagattgttaataagatttattttcacaatgcagtattttgtaaactatgctagattatttcttaatgtgcatgccattattnttaatcgagtatcattactgtggattctacgtcttanagatggactatctaatctgcatttatgtggcacaaccatcttaaccctggcattaacaatgaggcatgggacacagaagaggataatatcctcatacatgctcatcgaa

SEQ ID NO: 16200 - DNA, 432 bp, Oryza sativa
  unsure (1)..(432): unsure at all n locations
tgcaagcttcttgactctagagctagatataactctatactctagagctagtgcaaaaactggaaacagggtagagttagatatatagtggaatcaaattagtgagacaagtagttccatttttgtcagttaatgcaaaatatttagctttcatatcctttgatcagtcaagctatttttaaccacacattgtacagattggcatgccaatttagcaatatccacatttttttagggctagcagtatgcctactaatcaaatgtaaacactccagcgccaattgccatcacttgatgcctgngagaatacagaanaggcttgtgtatcattgcactaatagtgataggaaagaaactgtttcgtaccagaatgaatgagacttgtacgaagtcattgcatttcgagaaaaatgtactataatcgttgaaatg

SEQ ID NO: 16201 - DNA, 336 bp, Oryza sativa
ctggcatccatgaggactctaccacaggtctaagattgctgagctcctgaggtaccactccaccaagagtggtgatgagttgaccagcctcaaggactatgtaacccggatgaaagagggccagcgtgatatctattaaatcactggtgagagcaagaaggctgttgagaactcccccttccttgagaagctgaaggactatgaggtcctgtacatggttgatgccattgatgagtacgctgtcggtcagttcatggagtttgagggcaagaagctcatctctgccaccaaaggactgaagcttgatgagaagtttgacaacttgagcatagtgat

SEQ ID NO: 16202 - DNA, 416 bp, Oryza sativa
  unsure (1)..(416): unsure at all n locations
agcttgaatgccgtcatgtgcagcagccatcggattgagcagctggctgccatatttccatgctatgcgcacactttcgttcgatcgtaccacacaggattttccttgtcacgtaactatctgcgtacagtggcagggggccaggcagcatcgcatgcacggctagatgccatgccagagcacgtacaccgagtttaacgcgccgcgcccccaccagctaattggcagtggcaccggcgcaacatgggcaagcatctgctgcagcagaggcgcagagcccctggccgctggcacttgccccccgccccgcgtgccacggcgccatatgcgtagctacgcgcgcggccggcctgatcatcaacgcgcgaggcagcanattcgcgcggcgaacgtggcgcacggctgtcgagcagtga

SEQ ID NO: 16203 - DNA, 394 bp, Oryza sativa
  unsure (1)..(394): unsure at all n locations
ctattacggaactataaaactaagcttggatacatgtataccgaagttgtgtacatacgtattaaacctataaaatatacttatacaaactntatatacacgtatgtaaactttgcatatacgtatataaagtttgcatatgcatcgtttgtatatgcgtatacaaagtttgtatttatacatgtataacgtattaaaaaaaactaataatgatacggaaagaaaaacagaaaagcaacaaaacaaaaacagaaaccgtaaactacggaaagaaaaaacagaataagaaaataaaatcgcaaactacagatacggaaagaaaaacaggaaaaaaaaaagaaaccactcccaacaaaaaataacgtgggggagggcgcgcgcgactggtcgcgga

SEQ ID NO: 16204 - DNA, 470 bp, Oryza sativa
  unsure (1)..(470): unsure at all n locations
agcttagaatggtgaccaccaccggcgaatcgccgttcaagtgcgacgcctgcaaggagcccggagacgggccgaggtaccactgcctcacctgcgaggacctcaacatgcacaagttctgtgcccatgcgccgagcacgctctaccaccatctcttcggccgcacgttcgagcttctcgccaagccaccgcaaggacgaccggagaaaccgcaccccgccgccaccggtggtggcagaggcgaaagcggcggcaggtggtgcgacacctgcggcgaccatgtgttcggtctcgtctaccactgctcaggcgccaacctcgacctccacccatgctgtgcgagcctgcaggaactcccggtccanaaccgggagacgttggaccaaccgaaagaaagtcttgctacgcctcanaagctagttaaagaggtgagagattccctcacttntaagttggctcaaccccataaa

SEQ ID NO: 16205 - DNA, 92 bp, Oryza sativa
attagctgggctcgggggcgatttttttttttttcaaacagaagaacattgacgccgcgcttttccgtaaattacgttttatgggggtactg

SEQ ID NO: 16206 - DNA, 445 bp, Oryza sativa
  unsure (1)..(445): unsure at all n locations
agcttgtcgagctcttctcgtatggcttgttttcgatctggggcaaatctccgcaagttttgctttactggctttgcatcgggtcgcaccatgagtttgtgctcaatcacctccttgggtacccccggcatgtcagacggctgccaagcgaacacgtcagcattgtcgcggaggaaggtgatgagtgcgagttcctatttctcgcctagtgatgccccgatcttgacggtcttgtcggggttggcactggagagtggaacgatcttgattgcgccgtccggcttcggcgtcttgtttggtttgctcactttcttgggtgattcagctgtggcgggtgggctaggcgtgtgctcgaccatgtcgaggctccgcttgtcgcattgtactgccagcttagcgttcccttgaatagtgattggtcccttcngtcctggcatcttgagca

SEQ ID NO: 16207 - DNA, 441 bp, Oryza sativa
  unsure (1)..(441): unsure at all n locations
ttttccatctatttgatagaatatctntgacatattcgtatgggctatactcgggatctggtggggcagcaatgaacaaggatgctttaaagagcttgaacataacccatatcttgattgttgccagatcattaaatccagcctttgcagctgaatttaactacaagaagattgaaggtaaccacatgccagcttggtttatcagattaagttgcttgcaccatataaatttagaatgtgttgcttgcaccataaccacattacagtttctcttcataatgaaatgaagtgcagtcctgcgttntcaagaaaaaaaatagtatgtttggttcaaacaggtctatgtccttgagagatgcatatntatattcctacagctgcatatgtgggtcagcttanattcaattgatcatggaatggcagcctagcaagcgctcatgt

SEQ ID NO: 16208 - DNA, 463 bp, Oryza sativa
  unsure (1)..(463): unsure at all n locations
agcttactgtgccccgtcatctcgcatattcaatgaaatcaagtgaagcggccggctagctatgatatctacgtgcaggtgcatatgcatcacatatatgcaacaatataatcggattgtgaactctaaaagcaagcgttatacttggagagcaagaacgtagagcatgctgctatcatgctactccgtgatcccctctttatatactatataagacctggccttttggtttgttttaagtcgcactttttaaagttgatcaacttaatttatagaatgaatgtagcaacgacatttcttataaaaaacaaataggctgtaaaaaattcaatggtggtgatgaaactaattntatgttgtagaattcgatttttttctattaaccttatgtacttaaagaagtttaactcagaataaactcaaaatatcttatactttctccatttcacaatgtaagtctaac

SEQ ID NO: 16209 - DNA, 369 bp, Oryza sativa
  unsure (1)..(369): unsure at all n locations
aataaccaacaccttgcctcaagttgatctcacttatctttcagctactactagaaaagatcaacgtacgcgatgcttgtgactgtgggcgagggcattcccaaccaagaaactaatatagattccataaacttaacagcataaaaaaaaaaactagtactatagacactattcttctaatacaaacactactattccatacttaaatttaatactacttatctcatataatgtcttagatgttgtatagaaactatgtctcatgcaagatattgnttccttctcttgtcttatttatttacttaccacatcattccttatcttaggtggtagcttatttaatgctaaagacgcatcctatccctgata

SEQ ID NO: 16210 - DNA, 438 bp, Oryza sativa
  unsure (1)..(438): unsure at all n locations
tctttacttgtgatacatgcatgctgaaggtacagaagtcatcaattntctactgcaatatgaatttgttcctctctgcctgcatgccatggcggtaggcagtgagctttcaaaaactgtaagtaaccagccatatcaatcctctcctaaaataacatcacctttaattaattgtcttttagtattctttcctatgtaaagtttgataggagcacatttttattttcagctagcatcagctcaaagtataatttgtagcaattcatttattgatatatagtgattctttgtatactttgggtcttgctgttttggaatactttgtagcaattcattgattgatataattgtaccaatctaacactctagatattgccattttcttttggtacctatggataatcatgtatatatctatgggaagatatcatatatata

SEQ ID NO: 16211 - DNA, 394 bp, Oryza sativa
  unsure (1)..(394): unsure at all n locations
agcttaggcaaggcggcactaccggcgatggagcttcngcgggttccacggcagggaaactcctccgtcaccgccttcctcaccttgtccggccgcctgccccactttctctacacccctcatctccgtatcgaccttccccgtcgtctgaacagtgaacgcacaagcaccaaaaatctttgatgttctaatatggaaactcttaccagaatcagttatgaacttatcatcagatcaggacgagatctttttaatgttctaatatgcattctgacttgcgatcatagttattagaactggactggaccagcggtccgaccagaaaaaactagaaccagggcgccggccggtccggtccagctaaaagatcggtctgcaatcaaaccggcgagaa

SEQ ID NO: 16212 - DNA, 383 bp, Oryza sativa
gatgctttgattgcgaggatgttctatacatcatgtcacaatatagcatgatctgttgcagatctaacattatcaaatttgttatgtctatgacgcgcaactaattatatgtgtgcatttggattgcaggtattcctttcaatgttgcaagaaatccatatttcaggaaggcttttcagtttgcttgctacatccaacttggaggctatacccctccaaatttcaacaaattaagaacaacacttcttgttcatgagaggacaaatgttgagcgctcgctgaatgctctcaagtcaacatggtctactaaaggtgtgagtatcgtatctgatggatggtctgatgctcaaaggcgaccgatcttgaattatcttgcagtgaca

SEQ ID NO: 16213 - DNA, 488 bp, Oryza sativa
  unsure (1)..(488): unsure at all n locations
ctaagcttggtntgagcaaaaactcccagctgatcctacagatctggtgtttattgctcgctctttggnggactcgtgggcaactttgcagaagcatgagggaagtcgaagaaatcttcgactgggggccatgatgctaaaacaagtggtaaatgaagtctacaactctaagctcggctggagaggaggtgttcgaaggattaggtcataactcatgagaggaaatgtttactgagtattttgtgtggatggaatgagcaaagatagctctgtaatagacaatctatctatggtctttgggtttttcttttgcataagggtccgatgtcctccctcagaagttttaggtcttatacttctgttttctgtntagtactctggtagtctgacttgatctcatttctagtaaaagaaatgggggcttcatgccctagctcacaaaagaaatcagtaattaactcttcacgagttaaataataaagattttg

SEQ ID NO: 16214 - DNA, 473 bp, Oryza sativa
  unsure (1)..(473): unsure at all n locations
agcttatgagttagtgggggtaactntatagtatgataagatatgcagntggtaatattaattagaggcaccttcatttcctgccttttttaatgttaagccgcacttgctgcctagccgacgatgcaggggtttatgggtgatgggtgaaaacttggatttcaaggagatggctgagatcgtcacgagtgggattgtcgtacacatttgaacctttgtttcccaacgctttcactttcctagatttgtggatcattagcgcggcagttttttttcccatagagtgtgtgaaatcagctctcaactgcactatacctggtgattctgttagtcatttcagatgttgcatctgccttggattcaaaaaacgaacagagcatggcatttggtgttgcattagagaagagtccgatgggtgtatctactaagaatgcatggaaaaatctatcaacgaatgaatatatatcactggt

SEQ ID NO: 16215 - DNA, 205 bp, Oryza sativa
  unsure (1)..(205): unsure at all n locations
ctttgttaagcatatctttggattttttggtagaccttggagacatanggagctcgcttaatgtatctggtttgagaaagttgttaaatgataagagatatggcattcttttgagttgaatcattatgaaacgatgtcgaaaatatggtcttattagttggctacaattctatgggaggataagatacgcccagatattcatgaa

SEQ ID NO: 16216 - DNA, 471 bp, Oryza sativa
  unsure (1)..(471): unsure at all n locations
agcttgcaaaataagttgagatagttggaaacaaggttacaattntagtactnttgaacaataggtttcaaaagaaataaaagaaaattataaaatcaacatgctaaatttattttattgcagcaagattaaataaaacagtattgtaaaacttttgctggtataatgagccattagtacagtaatagatgtacagtactaataacactggaataaattgtgaatgagaaccattaaaagagattatgaagtgcatgtgccattagtttggtttaattaaaagagaaagggagaagaacagttctacttttccaatatttttagagggcttctatggataaccatttggcataacctagggtcaaagaggctctgataccaacttgtcacgcccggaatttctatccaaaattccaaacgcttacatgtgtgtgaacccttgtccaggaatcagccgangcacacaataac

SEQ ID NO: 16217 - DNA, 492 bp, Oryza sativa
  unsure (1)..(492): unsure at all n locations
taccgccgggtccgtcgccttccggtgggtgccgagcacacaggagaactctcttcccctcttcggaacattgctgccactcgtggtggcagcagcagcgtctaatgcttccttggcggcgccctccttcagcgacgtcacagcctggtgatccacgagtggtccgatgacgtccgtcagagggagagcctgcacaacatgaagtcacgacgcgatctcgagaagaaagatgaaaaggaatcatcgagtacactcacgttaatcgcggcagcgcgttcggctgagcccttgtcgcagagtgggacagggatgttacccacctccgagggtccactgatcattatctggatgacgcggcgctgcacagagtcactgtccagacctgtaaatcgagaatgagaactcgatcagtcaggagaaacagatngcacttaaacacaattgganatgcgaggataaataccccgagaagagaacccggtcacgtcattg

SEQ ID NO: 16218 - DNA, 364 bp, Oryza sativa
agcttgactggccctgcatgccattcctctggtactgctgccacatcatctgttcctgagtcaagaactgctgcttcttctccatctctgccatctgaacataagacggtggtgggaagctaagggacgccgcaaacgggtctccaccaacattctgcattgaaccatctggtgctggcagagccagcacttgtgttttctgtccagccggaggtagagcaacgctgctggcactcccagttgtcacttgtgcattgacatgctggcgcacggcaccctgatcatacataccattcagtagcaatggatccataccacctgtcattgtggccttctgcttggacagattgctcgctgtctccac

SEQ ID NO: 16219 - DNA, 366 bp, Oryza sativa
tcctaattaaccgagtcaaatattactagtcaacgactcgtagcaagcagcccatcagccagctggctcgcaatatctgcagaaactagtgcatcgacattgccatgtccgactcagcaatagttaagctcgtagtagtctccatatacgaccgtcaacatcaaccattgcatgcaaccaattaaagagtcaaaaaaaggctgcaatcacatcgctcctaacccatatccaactcaatcttataagatccaaccattcctccccagtgaacccaagccccccacacacacttctaactagctaggtgtgatacacagcagtgacagtgagagtgagagtgaacttgagtgatcatagccatggcat

SEQ ID NO: 16220 - DNA, 227 bp, Oryza sativa
tattaccatgaaaatgagcgtagaggcattgcacattgtgggtgagcgagctttggttagactttgccaagcttagtgaaagtgctagctgcttcactggcattatgcattactagactatggcaggctcctatatgcccagacctcagcgtagctattgggtgcgcctatctactcctgggaacgtgatggatcgtataacagatcatctggctagcacttggtgc

SEQ ID NO: 16221 - DNA, 297 bp, Oryza sativa
taatttatcaagactagattggaatgggtgtttacgatgttgtgtttgtatgaaaaatgagtctattcaacatttgtttatggattgtcattatgcaaagtatatttggagagcggggcaattctcttttggttatacctccctagaagtatatctcatatgtttaacggttggcttcacggtgtggacaaggaaaacagtaaactgatagtctgtggtgcctcggctttatattgggctctgtggctgcgtagaaatgatagaggttttgacaaatcaccatctatttcctatatg

SEQ ID NO: 16222 - DNA, 311 bp, Oryza sativa
gattaagcgatgatgagcgcctcttcaacaggagatggggaggcataagatagataagtcaccgtggacgcaacacaaggccgtgatacctgaatgaatgaagctgatgaacatcttgcatcattccttatcacatgcttgttgatgcgatgtatgtgttaattgtaagctgaggagaaatctccgaaagcgatttttctcttaacggacttgttgttatgagctactattaatgtaaaatgaatgagagcgcttctcatcccctctatgtaatgacaatgtcctccaaagatgagtgggacaattcttga

SEQ ID NO: 16223 - DNA, 381 bp, Oryza sativa
  unsure (1)..(381): unsure at all n locations
atttacttaccttntacttaatccattaacttgtgctattaataggataaatgtcataactccctcctttcacttgtctttagatgccgcgctacaagcctgagtacctgtttggtgttgagggatttgtccaggagttgcgtacgatgtcctttgccataggatttgggactgcccctttgtatgcctagatttctcatgatcgtcacgaagaanagtgccgagtcaaagtcaccttgaacagtaatagtgaagatatcccatcagtgatgttcgaagctggaggaggaaactacatccatgcatgtcaggaggtggcaaggattgccatangagagctccgcgatcgctacagtgatcagttggccgacactgagtatc

SEQ ID NO: 16224 - DNA, 404 bp, Oryza sativa
  unsure (1)..(404): unsure at all n locations
agctttaattntgtgcctgctgccggagcatcattgcggagctcatccatggacagaaatgcagaggtgcgaattctgaaagaaattaattatctcttcttgggtgcaagcctggatttgatcttctccacctccttggtgccaacctggaaggccttggtgagcacgccgtcgggcacctccggcgacgccgcgaagagcgtcatggcgagggactgcgtgccgggcagctggctgttgaaggcggagatgacggcggcggnggtgtcgccgttgttcttctggaagtggagcaggccgcgcgggaagactaagacgtcgccggcagagatggtcttggtgtacagcttgttggcggtggtgatgaagccgacgtcgagggtgccctgcatgacgaacaccat

SEQ ID NO: 16225 - DNA, 461 bp, Oryza sativa
agcttcatcgcactgtaacaatgtaacatcttctactccacctagcaaagacgaacgaagagagctggatgcccaccacgaacaagaaagtagccaagacggctaaggccattccaaacacctaggtgtacagtgcttcggaagcacaagagtccatcaacggccatcgttgcatgggtagatctctccaaaacagcatccccatggaggacatgacgtgaaatgctacaaccgctcgtcggccagcgactggatcaagcttttcacttggagattggtagagacatagaaaacaccataaagacccttccaaggaagggaataatgcctaacggtgtcgacgccagccaaaggccatgcaagggctttactagcgctttccatctagtacacaatgaccatcgccgattcaaccaccccctgttactcagccaccaacccagtcgacaaaacaggaatct

SEQ ID NO: 16226 - DNA, 375 bp, Oryza sativa
aactcagcgtagggagctagaccgggtgtacttcaccggtcacttgtgatactatctctgttacatctatgctctaacaccggaagtggtagagattctctccctgttagtcctattgatgcataccaaaagaacaggaaaagcggtattattggggatcttccgcccaagaatatgataaaaaaagccaatgccgaatatcataaagatgcgaacgatgggtcatctaattcccagaagaccaaaaagccgcagctcacttttgagatgcttatggctgaatacaacaaatgattaaccggttaacgatttgatcacccaactagtgattccaaaagaccaatatcatctcgtaggaagagatgtagtcaaaca

SEQ ID NO: 16227 - DNA, 329 bp, Oryza sativa
  unsure (1)..(329): unsure at all n locations
gtgcgcacctcgcgccagtacgcgttcgtaggtttattgccaccttcttactgcacgacgtaatgtcgacttggacacgccgactcgggccgagtgttagtatccatgatgtgagccgtgagcgtctnccacgccgtctccttcgaagtctacaccacggtcgacgcctttccgagccgcaggcgcatcacctggccctggaccctggccaagtcccgcacggaccggtgccgttgcgggccagctagctgatgctgatctccaggaagcgaacctgctccgggccacgtggcatcttgaggcgccctgttcttgccgctgcaacatgg

SEQ ID NO: 16228 - DNA, 363 bp, Oryza sativa
gctgcatgcaacttcatgacaggtgtttcgcttgcttatacaggtataccatatgccggcgagaggggtcccataccaacaacacgcttagtcccacaccatattgtgccatgaagcccaggggacctaccctacaccacctcagcgaatgcacatgtctctcggaatcaaggctcccctgtcaagcgttgatactctgccgatggtgtcccattccacccaagtggtcgcacttgacttatgttctgatgaaattccaatgaaacaggccttatgtgctagagcaagagaaccgtacactcggttcgttctgcggtccgcggttttggaaattcatttaagatacaagcacctacccatgtg

SEQ ID NO: 16229 - DNA, 385 bp, Oryza sativa
  unsure (1)..(385): unsure at all n locations
ctcagctgctatatgatagatgaagttacagtctggtatcttgtntaaacattgcagattgtagaacaaaatgtcagcataatacatgggaacataaacatctctgaaatatcgtttcaggtctttccaagattgtggtattntgttatgcctacaaagatgtttccaatcattagaagcatgtttaattaaaacactagaggcacacataaccttttgtttctccgacaagacatgcatttgaaattcactatcaaccgctagctcccaattaatgtaagcaccangaatcatagtctcctcgaaataaggcagtgcagatttgatcttacctagaacatcatcacttacctcataatggtcatgttgatccctcctcatgtct

SEQ ID NO: 16230 - DNA, 386 bp, Oryza sativa
  unsure (1)..(386): unsure at all n locations
tagcgtacccatggttggcaacctaactatgttatttgtagtatagtgtatacaatggccatgtacacacacgtagcaactntaagaagactggtgtactctcaaccttttttttaagaatagctaataatgcgccattcatgttatagaccaaaagacctctcactattatataaaacgcatgaccgatgcggcgctgatgaaccctggttattggtgccagtttcacaaatgacacctttgactgcacacgaagctaaaaaatccgctcggtgcattcaagctgatacattaaagctgcatatccttgatatacccggatcccaaaagatgcctcatatcacccaaaattatggcgtcaatgcatgaacacattaactacaatc

SEQ ID NO: 16231 - DNA, 439 bp, Oryza sativa
agctcgcactggactatgtagattctgaatcatctaacgagacacaagtacatgactagttatgctttcttgcatgagcaaaggtttcagacatcattagcgtcccgtcccgactgaaaacttcatgaagagcaaacactgaaaaaggagcgcataagtggacagaaggaagagatcgagggagatacttgccttgagatgcccaggatgtcttccttgactgtgcaaaggagcccatggagcctgctgacaactcttccaatcctctgaattcactcatctagtaaaattgccataaaaaatcacaaccagagaataggaagatgtatagatcattgcatagaagattacttggagaaaccttccagctatgagatatgagatccttacccagcttgtgcatgaatcactagtgcccacgcctatgtgagacacatgc

SEQ ID NO: 16232 - DNA, 440 bp, Oryza sativa
  unsure (1)..(440): unsure at all n locations
attagcttanaatcttatatgtaattttcctccattctattctcatggccctgcgacactcgcgtgttgcgcatttgtttggcccctccgtggtaagagcccaacctctctcccatctacatgaatgattcttcgctaactgtgggggctaagtcttctatccttatactaaccttaacttgagctccgggtgccgtccaaacccgggaccccctgtgctggctcttccagagcggctggctttgtacccgtccgctgtctactgtgcccggcccgggtcaactgtggacggcgattgctggctctagaagttctcggctctcacactcgtgcgaaagtcatcgtccatgaacaaggaagagagattggatcgaggccacctattcgatagagcgaacaacatgtgtaccgtcgatgcgcaagctcatgggagctagacc

SEQ ID NO: 16233 - DNA, 401 bp, Oryza sativa
  unsure (1)..(401): unsure at all n locations
agaacctgagctgcagctcagctggcaaaagaggtcgttctgcttgtttctcaccggagccgcggcggagtggaaattattaagtgagaaaattgtgcgctgttttggcgcggccctgcatctgcggtttncaggacccgtctacccgttttgtcaacacatgggctacatgacggggagggggccattgggagcacccggatgacatgtgcggtgtgcccacaatcaaggcgtgtgctctgtactactatgatactgcagaggcgagctgtgctgggcgagagcgtactcggcgtgacgaagaggaagggtagtatccacccgtctcgcggcctcttaatgctcgtcatcgtatgttgtcttctctttgtcctacgctgctgccactgagccattccggc

SEQ ID NO: 16234 - DNA, 453 bp, Oryza sativa
ttaagtgactgaggctgcagctgaaataggattataaagttgtttattatagctcctctctcctggccagaagtgtgaccatccaatcggagggtattatacttctttcatacaagataatcctccattacatcaagcaatcttgtcattgtagagaaaagcagaacctacatggttgtaattgaagttggtcaatcagaaattatagcaaaagaacaaaacaaaggcacaatagaaacgagataaacttgcagcttaaatagaacgtctacagaaactagtagatctggcatcatgtggtgcaaccaaccgcgttaaaattcacttactctatggccagtggctttgagtttgggcagcaatctatccaacatctcaagttttccacagagcctcagaattgatggcatgtagtgtctatgtaaataaccctcaatctgcagatataacaaa

SEQ ID NO: 16235 - DNA, 473 bp, Oryza sativa
  unsure (1)..(473): unsure at all n locations
actcagcttctgcttatacaactgcaggtacattcaccatccgcctttatgacacattcctgcacagcttgcttgcgatagataccacgcctgctcctatcaacacacattatttcataccgatgcacttgtgtgccttgagcaacaactctatgtctccgtgcctttttgattttatcttccatgtactttgtcactacgttgccaaacactatgttgttatcggccatggacggaccaattttcttgtatcgatccctaaagtaggcttgcgtgccgtgaaggatgaattcaacaatagcaaccaatggaagtacccgaactcctcgcattacccagttgtacacctctgccaaattggntgtcattatgccataccgagatccatcggtgtcgaacaatagagcccacttctncttangctcattctcaatccactgagagagatttctgatggccgaccctgacctcct

SEQ ID NO: 16236 - DNA, 152 bp, Oryza sativa
ttacattggtgaacgcggcgaggatgacgcctgccgccgatggcagagatcttggtactatgctcatagaattagtcagatgcaatctctaatggatactccggagcttagcatgacattgtatagatcatatatgcgtgccgggacgctcc

SEQ ID NO: 16237 - DNA, 467 bp, Oryza sativa
actgaaccttgattgctgccacgttgtagagcaaattatgatccataaactctgccgactttctacaataaaatagtccactgcattttcattgttcctttcaatacacatgcttgagtataattttgaaatttgattcttttaaaaataatttcaggtataatttttactcctcttcatcgcaattatgaaaagagagttgggtatcaaaaaacaagcgaataaacttataaatttggttctaaaattgaaaatctgaagaggtggaattgtgagaataaccagatcatcacaaaatcttccaaggcctcacctaaaatagagccatagcaaaattagcaaaggacaataaatactccactggaagagaagctctctatattgagagatatttattcttcacacctaccaaccctactgtcactaataaatcattgtttattacttaatcacacgacatcaacctc

SEQ ID NO: 16238 - DNA, 437 bp, Oryza sativa
agcttgtactgctctttatgtcttataatatattgatctggatttgtatcacatgcatctaaaatcccttatatctgggacggatggagtacaaagtacacgtggtacaatcttgcgactagagattggaactcctgtgagtgttcgattcagtgcgtgtctggcataaacacgcaataaattgcacgatacttggtggacgtatactggagtacatactaccaccaccaccgtcttttagtttacacacttagaccttgtttagttgcggaaaatttttgggtttgattgtcatatcggatatactaacacacatttgaagtattaaacgtagtctaataacaaaacaaattacagattccgccagaaaaccatgagacaaatttattaagcctaattaatctgttattagcaaatggttactgtagcaccatatt

SEQ ID NO: 16239 - DNA, 451 bp, Oryza sativa
  unsure (1)..(451): unsure at all n locations
tactcagcttctgcttgagtgtgcgagtgaagtgttatgaacaacttcttacatatgtaagtatgacggctgtagagcatgtgaaatgtccgaaatgctccgcaaccgccattagcaagcaatcctatacgtccacgtgtaagcccgagctgaacggccactgccagggttcagctgaacctgngctgacccagcatgcctccaatcttggcaaagatgttgacaggtgggcctgacatgtgggtttcaggacggttacacctgacatgtgggtcccctctttccttgagcctgcttaggagtgagtgtttcttcattttttcttcatttatgtgctaatctatgcaaacaaataatactccatactccaagtacaagtgagaatatactattctaaaatagatatgcactgccagcatagctagttctcctccatattagttatgttgat

SEQ ID NO: 16240 - DNA, 393 bp, Oryza sativa
gaatcaataggattgaacgacgccatgcaaagaagcaactctgtgtgtaactcatcaaatctatcattaaactctcgaagatgtctatcaatgatgcttataaacataaaacatgtcaacatggaagcgagggaaattcttgaccttcttgaataatcttttagatcttccaaccggcttgtagaagccatacatatcaacaactttgatgccatgcttcacacaaaaagaagtggcatatctttcagaaaagattaccattcatcttcatcatcctcacgcaatagctgcaattgcatctttgaattaattagttcaattgcattaccaatatcttgatccatcacctgctcagcgtcggcagacgccgtagaggcctcacgtgtgaggcga

SEQ ID NO: 16241 - DNA, 393 bp, Oryza sativa
  unsure (1)..(393): unsure at all n locations
atacgtagagtcgcctgctgcatgctagcatatgtgagtagatgtgggtttgattatatctcctcacaccggctctggaggtgggagcggcatatggaggtaaaaatacagtgttgtggctatatgagaacccatcgcaggagacagtctggaccatgtagattaatcctctaacagctatgaacaattgaggcgatgtggcttantgagagtaacaagaagacatatcatttggaccatagattcgttattcatctgcggactaaaaacaactgatgtaatatcgcttaattcgagaagagagaggcgacactaactgagtgagaatgaactatacctgtgtatatgagattataaaaagtgctgcaattatttcttcacatattatgtgaa

SEQ ID NO: 16242 - DNA, 408 bp, Oryza sativa
  unsure (1)..(408): unsure at all n locations
cgcctactntggggtcgcgatgaacacgatcttgacaatatgtttgtttatgatattgacctgcgacaggacgtcctgctggatgccgtccataaactgtctggctacgaacaaacacctgatccatatggagctgctgacgatgacaccaaactggatctggtgcacctgaacgtcgtcttctgcgatggcgcgacgatggctctgcactaccaccgccgggaacgatggccaaatctagctcaacgagctggcgagcagattactctgcgttactggttggcttatggtacgggcgctactccacgacgagacaacaccatggcctcccaggcttattagcgagaccggtatcaactaccatgaacaggctcgtcgcgtaatgctactggtgctcacactagcact

SEQ ID NO: 16243 - DNA, 434 bp, Oryza sativa
  unsure (1)..(434): unsure at all n locations
agctngcatgcaccggcggcctgacgctgtcgagatgagcatattttgacgttagagatacaaacaacttgatggtgatgattgaaattgcccatcatacagacatcatttccgttgagtatgtagtactaaaatcgagagaagcacggctcaatcatagtacgcaataacaaatcatcaattactcccaccgtttcatgtcataagacattttaactttaatcaaagtcaaactgttttaagtttgatcaagtttgtagaaaaaatagtaacatttttaacccaagacaaatttattatgaaaatatattcaattattgatttgatgaaactaatttagtattataaatattactgtatttgactataaacttaatcaaatttaaaacagtttgattttgaccaaagttgacacgtcttataacctgaaatgg

SEQ ID NO: 16244 - DNA, 188 bp, Oryza sativa
acctttgacattcatgtgacacgagctaaaaccttttggagccgcgaaagccaacaaaagtctaactggctcaattctagcaataggagcaacagtttcattgtaatccaaaccctccagccgaagtaaaccgtgagcaaccaggatagcttgtatttctcacaatgcaaccatatttattttggtta

SEQ ID NO: 16245 - DNA, 417 bp, Oryza sativa
catgcagctgtttggctgcaaagccgcttgggttaactaggaatgactcggttttattatagtcatttacttggcgtgttatatgcctgtttccatggtaaataatcatggcctatgctatttgacttatttattaccataatccttataatacttggggggtaatctttaaaagttttatattctgatgcctgccaagtgtgttcattcgtgaaccttttatagtgtacaccagtcggatttcttttattgaggctaaaaagcagtcggctagcatgcctatttacgtgacgcgtatgcttttggcatataatgcacaaattgcgttattattgtgcctttcaactatatgtttagttcggtaactaatcacatagttggcggctacacctaattacgtgcatctatgccatgcac

SEQ ID NO: 16246 - DNA, 306 bp, Oryza sativa
agaacccatatttgttccattcagccgatccacattctggtttacctttaattggacttgaaaccggaaacattgctggataatctttaatgggcaccaagataaagggcttcactgtgagaaattcccttaagtacttcggccacacttttaatctctcttttcataaatcaaccatatcgtttcacaatggttcaagaaatacgtcaatatccataccaagctaacagggtccctgtgtgaggacacaaaatagtacctatttcgcttttgactaaacccggttagaagaatatacatggtgag

SEQ ID NO: 16247 - DNA, 357 bp, Oryza sativa
  unsure (1)..(357): unsure at all n locations
aaatactngcacctncttgcctgtgtgtgatggtcaacgtaccgttgattgtgaaatccactatgtcccatgtttctatgaggcatacatgaacaatggaaaaaattaaaataaatgtgtaccatatgaacaatatgagtatatagctaattcgtcaatgcatgcctggttcacattaatataatttggccttggggagacctatgtccccgtctatccaacagtaatgaaaactatatgtccttaggacggcacggtagaaaaaaaaatactaccttaattagttgtgtatatgttaaagaaatgaaatatgatatgggttctctatcaagtcgccaatgtgtggtttgataagtt

SEQ ID NO: 16248 - DNA, 401 bp, Oryza sativa
cccggaccttagaccgacgcggcatgcactttccaccatagacttcttttgtttgtgacccgcatataccttgatggatgacgaggaggcaggctttgactgcctttgacaaatcgtatttgaggatctcggtcgggcccattttatatagatctttgagcatcaaacaatagattctggcctgtggggatatcttttctggctcaacgatagtccctgggtaactcatcggggcctcaaaaatttagataagcttgactcgccagtccgcttttgtctcgacgtccgccatgacggtgatgacctctctagcccttatagtgatatcagaaacgcgtggaggattattcgtcgagtgactctatcacatatgtgttctgcaggatatccagaatagttcc

SEQ ID NO: 16249 - DNA, 291 bp, Oryza sativa
tcttgaagcgattgatgctccggataacacccgatgctctatgttaaccatcatatttgaagacaatgttcaccattttaatgatattaattttcgctgtccagtgagctgccggagaattttggtggaacttgccaacgtgaacgtggttgtatgaaagctgactagggcccctggaaagatgatgaagtcatgaaagtgactgctcccatctgaaaccttattcttgaacaaattctttaattacagctgataaaggaaaaggaactcataatttctatgctatattat

SEQ ID NO: 16250 - DNA, 439 bp, Oryza sativa
  unsure (1)..(439): unsure at all n locations
cctgagctgcagctccatcaacagcaatagtgatctcttttatttaaccatccctttntagatcaatctgaatggggattacgatacttacggcctgtctggatctctggttgtaccaagagtccaagactagatcttgtaaaaaaaagattttagaggctaacaacctaaaactttgtttggatcacataacatatttattatgtgtcccaaacgaaatttaataaggcattaggttctcaaatccgcgtaacaaaacagttctggtaaaaccagagaatcagagatccaaaacaaaatcagcatgagcactttcgagttatgccatacagcacagatggtaaagctcatgtgcaaatttgtggagagacggggaagccaaagcgttaagaagttgcgtaactgttatgattgggcatattgatactacataaggact

SEQ ID NO: 16251 - DNA, 275 bp, Oryza sativa
  unsure (1)..(275): unsure at all n locations
cttggagaatacgagagattcattcattcatggcacgtcgtcttctattatcttgtcngcctcgtcgtcacgagcgtgtactcgccggacgccgctgccgctgtcgaggagcccggcaatcgccttctcgcactgctccgtgcagctcttgccagcagcggcggcggacatagatgggtccctttgagccaccacgagcaagcatgcttaacgccatcagcatggtgagggatcagccccacccttaattcgttgagaccgatcatacccctcct

SEQ ID NO: 16252 - DNA, 458 bp, Oryza sativa
  unsure (1)..(458): unsure at all n locations
atccttaagtcacctgcggcatgcaagctnggattcgagtcggcgaggtacttctatatgtcttcggcgtcggggaagtggaggccggtcttcctctccttcctgcgaacccaacggcggcagcggctaccgaaagcgacgacagacgacgacgaacggcgcggctggagcggcgccggcgcttggagagagaaggagagcgcggngagagcgattccggcggcggcggaagaccggacttgagaggataggtagaggacgactagggggtcctttatatgggcacgggagctcgggtccgggcccaagtcgacgggaaaactcgggaaagtctagggttctcgccggaaaaaggaaagattgaaccgcgaaattggaaaggatttccatagaaacttttggggatntcttgtggaaaaggaagaggagattgagaggattccattcccgcaactaat

SEQ ID NO: 16253 - DNA, 462 bp, Oryza sativa
  unsure (1)..(462): unsure at all n locations
cttaaaactcagctttgaagaacaattacatgctgtaaaaacaaaatgcgctctatcagattcacgatgactgaaaagttcaatgaattcaattaaccagcagaggcatctatgcaggaccaacaaaatcgtaaaaaaataatgcaatactaggtctacaggaattgcctgcacaaaaactcagtttgtgcaaaacattcacctcatatttcggagaattgcctaaactgtcacatgtactatgtggnttgtaatgttacaataaaactagtactttcacacacataccatcaaataagcactcataatcttaacaactccctacattacgaatctctgggggtaaaaaaagaaagggtttctccctatacgttcctcctgcgacctgcatgccatcngttttagattttctaccaaacctatttaaagaaatgttgaccaaaattctattaccgtgcacct

SEQ ID NO: 16254 - DNA, 412 bp, Oryza sativa
  unsure (1)..(412): unsure at all n locations
agcttttcatgtgcatgcgacaacgatggttgttgaggacatcgggcccagcggcggcggagtcttgcgtgacggtagcgatggcttgccctgaggactgaggaaaattatacgacggtaatctccctagctgctgtgcctggagctcacgccaccgaaataaatcgcctgactcaggctaattacgcgcggagatatgcattatgccaggcgaggggaaaacagtctaggccagccacctaataggaccaaaaccgtgtcacgctagttctcctcaggatagcaaccaaacagccccttataacctgaaacggaggcagtaataaatatttatatatataatntatttcattctaaaactagacatacacatgctaaatcatcattctcaaatcattttcttgatatttca

SEQ ID NO: 16255 - DNA, 170 bp, Oryza sativa
tgttcatgcatcaatgtgtcatgctaccctgttgcaagtgaacagtcagcaactatgaggggtgctgcactgcgtttacgttctggaggtgaactatcaattgatagtgatgacaaagacaccagttatgctgtcctatgtagttctaaatcgttgaatgttgaatgaat

SEQ ID NO: 16256 - DNA, 434 bp, Oryza sativa
agcttacaagaatgaaaatatggtataaacttattaaatatttggtatagctgacattaatgttccattccataaattaaatcttatgtcctgtatcttttacttgttcaggtgggcatcggataataattttactgggcaaataccggattatattgggagctggaatttaacagacctgtaagattggtatttagcttttgttcatgataaaaataatcaagaaaatagggaagttaacctttttttatatagtttaaaagaatatgggtaaattctgctacagttttacacaaactgagctttagtttgagagaaaaaacaatattttgtacctgacttctattctttaagagatttctagagtataccttggctgtgctgaggtctctttatttaatatatcctcagagagcactaataaacaatgcatc

SEQ ID NO: 16257 - DNA, 440 bp, Oryza sativa
gcctgtagccaggccgtgtataaatacaagacatcaacagccgagctgcctcagcattcagctcaaaatcgaaaattgaaatcactctctccggagctcctgcaccgtaatcatcatcaccatggctagggaagaagagctcaaggtaataacaacaccaatccaatcttgctgaatttaattctttttctttcagtgatccattgatccatgttgctaactgagataaattgcgttgcattttttgtccatgtgcaacagagagttgatctgaaggtgaacgtgagctgctgcgagggatgcacgatgaaggtgatgaaagccatatacctgaaaggtatcgagttcgttcacttctcctgtgttcttggtgttgtcgtcagagacgctgatcgaatttgtgtttcgtcagagatgcttaattttgtgttcgtgtgcat

SEQ ID NO: 16258 - DNA, 365 bp, Oryza sativa
tgaggcatgcaagctgaggcagccacagataactcgctttattctcattgtcaagaacatcatgcatcctgaaggaagcacatcctatatacgaatcataattaccatgaaactcatgaattgactgtctactcaccatgaagtggttagtacagatgtctataaggactgttacagacttaaactatgcgtcatgctacaccctagagtaccatatcgaaatggctgagcttatttcagacttatgagaacaatttcttcttgtcgattacgctaactgttcaggacgtattgaagaggtgtttagatctacaggtgcaccacttagcgagacgtatcgtatactatatatggtgtcccatggg

SEQ ID NO: 16259 - DNA, 406 bp, Oryza sativa
  unsure (1)..(406): unsure at all n locations
tgattgatcatgtgtaaatggacctcatacaggcataatgtccattgaaaaaagagtgcaacgaggggggaagtaaatataataaataaaaaaagaacagccataaagctgtaaaacagtgattgtgatctactaccgatataaatatttacaaacgaaaagaagaaaattgtaaagttaatctgcaaatccctcccaagtgcacgatttcagcttttctgtggcttgagcacagatgcagaagcagaacaacaagcaatgctgtcaaggtaatcctgtgtcaaatagcagtgagccttatgattcaattccaggcttccagcatgggtttgctntcccattcaatcatatctgaaaggattnttattatcttctttagttccacgaggcanatncacacccagct

SEQ ID NO: 16260 - DNA, 434 bp, Oryza sativa
agcttacaagaatgaaaatattgtattttcttacaaaatatttgggatagctgacattaatgttccattccataaattaaatcttatgtcctgtatcttttacttgttcaagtgggcataggataataattttactgggcaaataccggattatattgggagctggaatttaacagacctgtaagattggtatttagcttttgttcatgataaaaataatcaagaaaatacggaagttaacctttttttatatagtttaaaagaatatgggtaaattctgctacagttatacacaaactgagctttagtttgagagaaaaaacaatattttgtacctgacttctattctttaagagatttctagaatataccttggctgtgctgaggtctctttatttaatatatgctcagagagcactaataaacaatgcatc

SEQ ID NO: 16261 - DNA, 428 bp, Oryza sativa
gctgacttcttttcttaatgatgagtctattagctccgattgttgcttccagtttagctctctcgcgcatgtctgctattctttgttgtgccctttccagcttgaaacgatgttgctctagatatacagccagcgaaatgatgtcggcttcatcttctgggatctggtggtggatctcttaaacctggacctgattgacccgctgccagtaaccaatgaatccaaggaactccctagcgcgtgagcaatatccatgagtttggtcttgagatcatcatcaagagggaccaaggctccactggcggtttgctcttcttcttcatataggaactgtttaacgtctaaggaaaacatattggcccagacctgcagaaaagataaatcgggattattggcaaacaaaatatcccagccgatatgagaagatt

SEQ ID NO: 16262 - DNA, 295 bp, Oryza sativa
  unsure (1)..(295): unsure at all n locations
gcaatttgggaaaattgctaaaaccacactaaatgtcatcctgattttgaaattcccctaataagaatatttggcaatacacagccctaattcaccttgattcgatattcctcaacaattgcgcgtgttcgcatttttgttccttttccctcatgtgttatatgacttagcgcatctaactcagtgtgacatttgggattgtttgtacaanttttccacgcaaacaagatagcccatgtgttacgcccacatgtgcgattaggtatgaccgaattaagcaaaattgccatggtcg

SEQ ID NO: 16263 - DNA, 397 bp, Oryza sativa
  unsure (1)..(397): unsure at all n locations
agcttgtagcctcctaagaaacgagctatgtcgtcatctatgcttcggagattggtctcttggaagcaggccaaggtgcactntgtgtcgagcatgagctcatggactacgttgcagcgcgcaagtgagtttaggcctctcacattccatgagatgagatctagactttgtgccatttaaaaacgaagagttctctatatctggaccggcccttagcctctttttaaaaaaggccacttcggggcgcatggcccattaacatttggcggcccaattcgcaagtctgtgttgaaaaggcagcctttgggcaagcgcggactgatacgcacgcggcccacgagctggcgcatggacggtcttagattgcgcgcgtggcccaggtgacgcatgggcagtc

SEQ ID NO: 16264 - DNA, 272 bp, Oryza sativa
atggtgagtgtgaacagaaacgggcacttaatatcacgagtatgacgcatgacaagtgatgatcaactctttggtaaggtaccaaacaaagaactccattcatattattcaacgttgcgaacaaagagtacagtgcgtggacttggttaaaaaaagtatatatgctttcatactaagaattatatgggtacacagctataaaagcaatgaggcccaatgcattcaattttaaccaataccatgttggtacatataaacctacatatggaaaa

SEQ ID NO: 16265 - DNA, 421 bp, Oryza sativa
agcttgcaacagtacgcccacctcgaacattcaatgcctgatcaatgatttcctgggcatcctcaatactaagcccagcatgcataggaacacggagagatcgccggctacctgaggacctcaaccctttcctaatcaccttatccaacacaatctctgcctgctcacctcggccaggcgcacagagcgccaccagcaatgcccggtacaccacaacatcttcgtcgcatcccttctgcgacacgcgccacagcatggagtagagaacgtgtgtggcctcatcgagcatgccagcatcgcagagcgcaggcacgatcgcgcgataagcgtccttctctggtgcgaggcactggatagacatttcatcaagcacctgcagagcgagttcaggtcttcgcgcacggcacaatccaatgatcaa

SEQ ID NO: 16266 - DNA, 333 bp, Oryza sativa
cttttctactgagtacaccagtccggaagacattcaaacctcagcagggtgatctagaacttaacgctttttttacccacgggacactatggttgattccatgactttattgtaacaatacatttcaagtggtcctcacgtgaaagcaagatcaaagcaatgtttgaccttgatttgctgaccatgctctggaaggcaacttaaaactcgtctaagtgagcacgccatacgccaggtaaggacactacctttatgagcttgctctatgtattcgagtggtacgtatgagtcagtttctgacatgcattacattattcagagactacctatatg

SEQ ID NO: 16267 - DNA, 433 bp, Oryza sativa
  unsure (1)..(433): unsure at all n locations
tagcttgtagttcaatgaaaagaactattcattactgttcataaaacttaaaagtcataagttcttttgggctccaaccctaacttcacttncttgtctcttttgtaggttgcgatcgaattgccatacatcctagttcagacactggtatatggtgtactactctactcaatgattgggcttgaatggactgttgctaagctcatttggtacctggtcttcatgtacttcacattgctgtatttcacgttcttcggaatgatggcagtaggattgacaccaaacgagagcattgcagctatcatttcaccagcaatctacaatgcatggaacctcttctcaggatatcttatacctcgacctgtacgttactttcctgccgcgtatgggtttcgtttcatttacaattcattaccatattgctctaatgtga

SEQ ID NO: 16268 - DNA, 216 bp, Oryza sativa
cagtcatcctgcaacctgactgtactatcacacctatgctcatatggcatgttctatatatgcaaccataaccggactgtggacatccttaccattcttccggatgacagcattgaactgccctgaactaactttgaagagataaaattgtgactcctataccatctggctaccaacacacttagaaccttcattctcactgctttgccttgcaat

SEQ ID NO: 16269 - DNA, 368 bp, Oryza sativa
ccccagaataaacgtacactcacctgcacgccagggaaaatatatggccctctatcctaacctaactctttgttgcctaaactggtgtaactccacgccacaacccggggactcctactagaaccgcagaggtatggaagataaagaatgcgatggccaaacatagtcttcatggacacgtcgagtacccgatgccttctaagccctatacgctatagcaacagcaccagcaccagcatatataccaggctctgctatagataaataaagtatatgtggaactttcagcctgaattgcccagttgattaacactaaacatatggtcccttaccgcgctgccggctgcacaaggacgatagagcatcgc

SEQ ID NO: 16270 - DNA, 440 bp, Oryza sativa
agcttgttgataaccctgtctttaacccattaattgctggccatgcaattattctccaatttgcctgtgctagcacacctatgctcatatggcatgttctttatctgcaaccaaaaagggacagtaaacatccaaaccattattcagttgcaaaacattaaatgacaaagaagtaaaacaaaagagctacatacctgccaagttctaccatctggcaacctagaagcatggatcctccatttgcacttctttgccttgcaataagctctgtatcttgtggcctcagagtagggcactgcaagctcaacctctttcaggacagcatattgtctcatacacctcttaaaacaaattacatcctaaaaagtaacaccaacttctatccttggattgcctacatcagttatatggattagaggctcacaacccctattatcatt

SEQ ID NO: 16271 - DNA, 434 bp, Oryza sativa
atcgatttgaggactgggacaatggtacttgacaactcattaactattggtggaaatatcatatctatgcacacgtataccaaattactgcttgtgttctgaattgcagcaccattgcgcccaaccactacagtgaatacacaggcagcagcaaggttcattggtcactcattgccccatttgacaactggtacataattgtttattgaaaaagtttacgaacggtttggttttttatggagtagtgttgagggttcatttgctatttcagatcagaagaggagcatgcaggcaatcagtagaggagaaggagggagttactctgggaacaagagaaaaccacaaccaccgcggccaaataataagtctgttcgtgctgccacggaagaattccttgcataagcagctctggagcttattgggcataatgatag

SEQ ID NO: 16272 - DNA, 318 bp, Oryza sativa
  unsure (1)..(318): unsure at all n locations
gatanagtagagctgaacgcatggcatgcaagccgttcaccttgcgaacgaccatttattttctgagtctcgtcggacgcgatgacctactcgctatgaatatcggcctccagaagaaaaccccactcatactaaaggatgaactgctagacgatattgagcctgtcgtcgcgcttattgtcggaacgaccttgtccaccgtacgtcagaaacaccgcgctcagatactaacttgaggaccccggtcatattcatctgtactacaagcgaaaacaccgcatagaacagccgggtggagcactaccgcaacttgctatg

SEQ ID NO: 16273 - DNA, 257 bp, Oryza sativa
ctttattgtctcataatccgagtgatgccacatgtacaccagctctgaccaaaacctctcttacgttgaggggtgtaactcatcggagctgaaagattctgacgtacgagatctttcgtattggatacgaggtgattgtctacaacctgatacccctatagcggacaaataaggccttggcgcacgttggtacgaggatctacacgataccaccgttagcccacaagaatatagagattatgctggctcacgcccct

SEQ ID NO: 16274 - DNA, 418 bp, Oryza sativa
  unsure (1)..(418): unsure at all n locations
agctncgacncaatgaaaaggtctaatgttcttatcttttacagcatacattacaatgaacaggtccgacattatcacatcttgaagcctgaagggatcttgctttacttttagggaagaggattataaaagacaataaaagctgcttcctagatggacgcacatcaccatctatcattatcatatctagccctctctatcaggagaaatccttagctgctcataaacatacatataattcatacatgcacgggtggcggatccatgcatattctgtggtggtcggctgactccacagctttttaaaaaacagcctaccaccttgatttcatgtataaattctaaaaacttagagaaatgactccacttaaatacaaattactagtaactgacctcacaggattaaagtcctaagctc

SEQ ID NO: 16275 - DNA, 391 bp, Oryza sativa
  unsure (1)..(391): unsure at all n locations
atcatgtagaatcctttctgctcctccctagatgtactagctctctccaagngcctaaacatgaaactcgatactacatggggagcgtgcatgcatgcatgcgaagatgggcatgagtctgcttccgagatggctggcaagacatatggtgcaatgatggcgatggacaagcgacatgcagcacctaataatttgctctattatactctcaaaagagtgtgctggttggtcacaacactgtgcctgttgcctacttattgctcaagctgattttcgcgcccgaatttctttcttgtcgtacgtacaagctacatatgcatacggcaagggcctgtttaattctcgactggaaacggctgtgtgtcatatgatatgcttgatcggatattca

SEQ ID NO: 16276 - DNA, 439 bp, Oryza sativa
accgcgtgcgagctcaactttaatcctaatgcaacacttcagactctgtcaacctgctattcccagatgtcgctctactacgtacccggacagggaggacttaagtgctcttaagggctgtcaccacctctacacccacctcaaacgtactgtgggatacgcagcaacgactggagattaattacccagacaccacgtctatgcaattaataactactctagtgccaatcaaacactaaagcaatcactaaaaataaatggactatagtaaacaatgatcccgtatgctatttatgaactaaccaagaagtaattctcactaagcaaatcttaattactcagaatgatatttctattaaaacagagtgataaacaaagtacaagagataagaggggattaccgacaactctggaagtccttcgatttcttctaccttac

SEQ ID NO: 16277 - DNA, 444 bp, Oryza sativa
  unsure (1)..(444): unsure at all n locations
tcggtgagcttaagggcttcaagtccgataagtaacccgaacccttagcttaattgatttggatttgactcttatggttcttacacgaaattagggttcttcgaatttagagaattttgttgggaaatttcaatatattttattccctcttttcaagttaggggagttacaatatcgtttatcctcttttaattttgggaacttcaatctaggttatccctttgctcaatttcgttttttttttgttttggctggcgtttcatcgtgcgtgcggggatggaggatgtttttttcttttttatagtagaagtttttttttctctttttttgttttttatagtaggagtcggatttttttttagagtcggacacttttttttgcgatggaagttcttttttctctttgctnttttggtttttctctctcttttttccaccggagga

SEQ ID NO: 16278 - DNA, 370 bp, Oryza sativa
gctcaccgtgctcgagaacgtgcagtggttcgagctcctcgaggggaagcacggcaagtctgcccctgccatcgaactcatggggctcggcaggctcatgaacgagaaggcgaagatgctctccatgggccagaggaagatgctccagctcgtcaggctgctcgccatcaatcgcccgatctggctcctggacgagccgttcgtcgcgctggatgccgaaggtgtcaagctgctggagtacatcatagcggagcaccgcaagaagggtgggatcgtgttcgtcgccacgcatttgcccatcgagattgacgatgccatgtcgctccggctcccccaacggttccctcggaggaaaactttgggtgatctt

SEQ ID NO: 16279 - DNA, 406 bp, Oryza sativa
  unsure (1)..(406): unsure at all n locations
cgtggtctccttcgatcttcgccatgggcaacagcttgttctccatggcgagcagcaccgcttctccttcagatggtcgatccccacggctgccggaaacactgtcgaggtgcgtgacggcgagcgtcgccgctgcgcacaatttcgaggtgacacggtactcgctgctcgccggggtgggcgccggcgaagtcgtcacctcgggcaccttctccatcgacggccacaactggaacatccaggtctaccccgacaggtggaagcatgagatgaacgccggctacgtgtcggtcttcctgtgcctctgcggcggagcaaccggcgtcagggcgaagtacacgctgagcctttcggagaacggcggcgagtccgtacaacggagctngacgcatccggtcgacacggt

SEQ ID NO: 16280 - DNA, 401 bp, Oryza sativa
  unsure (1)..(401): unsure at all n locations
agctttcagccaacacgacttacatatattttatgatcttccnagcacgccttataaactgctaaacgatatgtctcggatgaaaactttctatatgaaagtcgctctaaaatagtatattaatctatccttcaagtttataataagtaaaactcaatcgatcatacgttaaaaccacctcattttggtactgacttaatcttcatcttcatctttatctttacgagaaaagaatacaccgcaaagaaaagtcgcgtgatgcgtacttaaatgtggactgctattctcttattgataatccttctagaggtaggagccactagctagtacaataaaataacccgtgagtgcaaacgtgtgagtatgcttcgcactggtttatctgatgtgagatgcaatgc

SEQ ID NO: 16281 - DNA, 353 bp, Oryza sativa
  unsure (1)..(353): unsure at all n locations
tggacgatatgggtggcgggatcccggattcgcgcgctctcatctgcctcggtcccgggagggaactcctncagcgccatccatggggagaagccggtgtccctggcctggtaactcgctaacacgagttccaccgctccttgtgcgaggtccctccaggatgactagatggtcttctcgagctcctcggggaagtgttggacagcccaggccatcctcctaaggtgcggtgcgaggccttncagattggtagaacgcggaatagtctggcctttccagaggcccgcttcccgaccggcgcgatccagccgggagactgcatcccatagcatgccgggccctatctcacccga

SEQ ID NO: 16282 - DNA, 424 bp, Oryza sativa
  unsure (1)..(424): unsure at all n locations
agcttgngctcataaacccaagccaatcttttggagatagatactgccatggctggctgcaaacaagaggtatagctaaagaaaacaaaacaaaacaaaatgcttactactcgctctgttccaaaatacaccatccgtcctagaaagaataaacttctaggctcagaagttgttgttgtctcgtttaaaacaaagggagtttggagtattaaggatttataggttgtttagaaaatactaagtttagggcaattttttttgtcattttagttgtcaatttttaaattttgaattgcatagattctctttccaagcatctaattggctttggaattattgaaatgatgggaattgtagaaatcagagaaggaatgcttatatgagtattaaaaactaaatactagaaatcctgatatcttgaaac

SEQ ID NO: 16283 - DNA, 458 bp, Oryza sativa
  unsure (1)..(458): unsure at all n locations
tcccgtaatgtgtgtgccacccaccatggcatcaagttcgtcaatatcatcaaccaatgtggtggcagttttagcataaccctgtggtcgtggtgcgaggacggaacatggagagaagatgcgacactggatgctgcccaactttgggacctcgattgtgaaaaccgccttccaaatgtccaaccagaattccctattgttgacatggaaaacccttacaccgtttgcttcttgttgaacgagggcaactacattgtccctgaagccacaacatggatgatcaaggtccacatgaagaagaagattctactaggttgtactagttattctaaaaatggaagcttgtctcatcagaacaccacctacatgactggcagaaggatgtctgagagactctcctttatctncagtgaaatgccatattacctgtctggacaaaccatgaaaagggaataatt

SEQ ID NO: 16284 - DNA, 408 bp, Oryza sativa
agcttgtgaagtaagtaatctatgcaaattcttttttttttggttctattacttgtcattactggccattattgtagccagcaagcatattatggtcgcttaatgttattcttctttgtggataattcaccatactaactcccatctctttttggttactgtctgctagccgaaaccatccaaaatgcaaaagaaagaacctattttgctggatccatggtctgagtctactatgaataatttattggagaacattaatgttgacctgaagaagttcgctgtaagttgcatttactctatatgattcgctagtgtttagcttagctctcatcttggacgggtgcccaaatccttgacagggctatcatcagagcaacaaggtctatcatggaaaggtgccattaactt

SEQ ID NO: 16285 - DNA, 357 bp, Oryza sativa
  unsure (1)..(357): unsure at all n locations
attttcttggccctggtggtgagaacttcttacaaatgaccaaaactttgggattgcagcacaagctaatgcaccaataacaaatgccatgacatattcacaagggtcccatttcatgctcgacccaaccacgtaagctagcagtatgcccgacaagtccagcacaattggtatattcattaaccttagccacctggtcttttttaacagatccgtccgtagcaataggatgattacaacaattgatgccacaaaagaaattgagtngctgtagaagaaggtgaggtagcgatacctcttattgtcatgcataaccgagtgaccacaccatggccgtcactattaccctcgcacaca

SEQ ID NO: 16286 - DNA, 391 bp, Oryza sativa
  unsure (1)..(391): unsure at all n locations
agctntactgngatgaagcatctcaatatgcactgtctattggattgggtgcactgtctatttctttataaaatgggaggttagctttcattgcacattaaatgtcgtatttacagaggcagtcaaaattagactaggtattcggtagtcggtattgcaagcttggcattatataagccaattcacaaccatcttaatcaagatttacatactacatatgttattctataattatactatctgaatgcccctgcattgcaacatgaagagaactcctccatacactttacagcctcaaaaattaataaaattattctcattgtaaaatcttctagtcatattatttgtcatcatttttacctcacttcaaaagaaaaattttctgtttgat

SEQ ID NO: 16287 - DNA, 436 bp, Oryza sativa
  unsure (1)..(436): unsure at all n locations
agctntggcaagatataattcagtttcttatctttttataacctggtggtgtgaggcgttcagtctcgccggttctaagattggtcttgtaagcgacgttccacgggctgcgacgttctcgcactggctccttggtggacacatacacgaggtaatggtcaaccgtgcggccatccacctagtagccgccggcaatgcagccgctgtcctccatgcgggcgccgctgaacaggccgtcgccgccatatgcgtcggccagggagaagacctggacctcgccgtcgtcgttgaagcgcacggcgatgtggagcgtctcgaggttgtgctccctctcggagacgaagacgaggccggtgatgcggccggaatcgatgtcgccctcgacggcgtcgccgcgggacacgccgaggcgctccacgaccgtcttgagcgccgt

SEQ ID NO: 16288 - DNA, 422 bp, Oryza sativa
agctgacggtgcatgcagctgggctctaagacctacctatctttgtatactatactgcctggctggctgcaaacaatagtacagcttaagactacattccatacctttacgctcactactagctctgtctcaaattacaccatccgtcctatgaatgagatgactgtctaggctcacaaaatggtgctgcctcgtttaaagcaaagggagcagggagaattaaagatttactggttggataaaaaatactatagttacggcaaccgtctgtgcaatcatacatggcaataattaaattccgaattgcatagagattttttccaagcatcgaattgctttttgaaatattgacatgatgggagttgttcaagacagataatgaatgctcatatgagtactagaaacataatactgtagatcct

SEQ ID NO: 16289 - DNA, 384 bp, Oryza sativa
agttcgcatgaagtcgtggcggccgtcaaaagttggcgctggcctgcagtccgaatccaccccgcgcgaatcctcttccctttggatcctctccatcgttcctgagtaaaacacgagtgcacgcgtctccgaggtataaagacgaagaatatgaactcaagaaagaactcacctgataatttagttgacgtgcacgagcgcgggtaataggaccatcatgctgtatatggggggacgtggatgtatcgatggtggtgatgtcctcatcatcctccccttcttgcatttgagtcgtcctcgactcaagctcatcttcttcttccacatacggcttcaaatctgcaacggtaaatgtgggactaaccccaaaaactgccggcaaat

SEQ ID NO: 16290 - DNA, 432 bp, Oryza sativa
ctcagcttgctatcatgatagtatgaagtaacagttctggtatcttgttgtaaacattgcagtttggtgaacaaaatgtcagcataatacatgggaacataaacatctctgaaatatcgtttcaggtctttccaagattgcggtattttgctatgcctacaaagatgtttccaatcatgagaagcatgtttaattaaaacactagaggcacacataaccttttgtttctccgacaagacatgcttttgaaattcactatcaaccgctagctcccaattaatgtaagcacgaggatcatagtttccctcgaaataaggcagtgcagatttgatcttacctagaacatcatcacttacctcataatggtcatgttgatccctcctcatgtctcgacgaagatgtcgatgttgagcacagctatccccaattatc

SEQ ID NO: 16291 - DNA, 435 bp, Oryza sativa
  unsure (1)..(435): unsure at all n locations
agcttgataaaaattcttaagacatcaattacttggcttgaactatcaagcacagcataaatacaccagtattgtacaaattaaacctccattcgttacatttacactcagtcagaatcagtcctttcatcatcagagttatcgctgctcggctgaaagttgctgctgcggaattgatctaccacatcgcttgcaatcttgtcagccgcactttgagcattactgataagatcaagagcagcttcttcacttgtcccgtctgcaaaaccatcaatggtatcaatttcaatcctcgggtacaaggatttggtcatcgccaatgccatgctagctcccatacttccagctgatttgatattcttgaagtatacatncggtgcaactctcagctagtcaaagatttcgggtgcgtcaagtgcactcggaccactgtta

SEQ ID NO: 16292 - DNA, 205 bp, Oryza sativa
accctcaacggagacgtatgatccgtggatgcgaacttctggaaacaaatccacgtgtctgctctctaggcctgctcgatcgtgccatctctcatatagagctcgagcctgttttgacccgatctacctgcatgcttaattaatagtgttggtgaccctatatcttgaggagaattcatgttcggcaccatgtgatgaatataca

SEQ ID NO: 16293 - DNA, 226 bp, Oryza sativa
  unsure (1)..(226): unsure at all n locations
agcttagcagctgcagagtgtgagcacgatgccnatacacgttgcgtgcgggcggagtggcgcctgcgtctgaatgcgtactgaggagagaggggggcttccttccnccccctctctcttaaccctttctccccccctctcaccccccatgccccggttcttcccccttctctttcacggcccgtctctcccctctccacctccaagctccctcccccgcacactc

SEQ ID NO: 16294 - DNA, 336 bp, Oryza sativa
tgatgtagctgtggctgctgcacatctgcagcccaattgtttaaaaaaaccttccttatatccgcataaatcttgacgtattcttgaggcacatatccacgataatgtaaaccatacaaccaacttcgagaaaaaaaagaatgtgaaatagccattgaagagcagcaagtgcacgtgagcaccatttctacgcccacactcggcgtgtccggcgcactctctgcgattggaaatggaagtttcacacgtttgcccatagaacctatattttcacagcgcattgaaccctactaatttgcccctcttgattgatgccattccctgctcttatccaca

SEQ ID NO: 16295 - DNA, 366 bp, Oryza sativa
agcttcagagccgtgtggccattactactgttttatgtgacagcaactcatcaaaagaaaggatacatgttgaggagggtgttggaacttcagatggagttaatgcttcttcaagtgctgcccctccacggggatttgatttggtggatgatatatttgatcagtatatgcctggacaatcctgatccctcttcctcaccgattcgcactgagctacatctgtctttaaaagaaaaaccgctgtctatgacacacgattttgctcttatcaatcggaccaagattgtgggcattccgtacccatctttcatactactgacccggccatcttggcactcctccatccaacagccgaatcttcaccaa

SEQ ID NO: 16296 - DNA, 444 bp, Oryza sativa
  unsure (1)..(444): unsure at all n locations
ttaagcgactgagctgcagctaaacttctattaggccaacttttttgtgacagggactaacaatttttagtcccatccaaatagctcctaaagattatcaccgatgtataaaacgagacaagttgttggcatatgattaattgagtattaactataataaacttaaagaatgtatttatttgagtttttaagcctaattaatctataattaacacatatttattgtagcatcacataggctaatcatggattaattatgctcaatagattcgtctcgcgaattagttcaaggttatggaatgggttttatcagtaatctacgtttaatacttctaattagtgtccaaacattcgatgtgacagggactaacaattnttagtcccatccaaataacccctaaagaatatcaccgatgtataaaacgagacaagttgtggcgtatg

SEQ ID NO: 16297 - DNA, 435 bp, Oryza sativa
tcctgttcagcccaatggccgaacaagcaaaggcgcacaacctctctccgagtgttagcggtgacgacggggagccgaacccacgccgtcgagctcgtactccaccgccccctccacgccaaagtcctaggcgggaggaggcgctcgagagggtcgaaggatccgcgacttcgacatccacgggtgatggggaagggcggcgagatggggagcgtcacctcctcgtctacggcgacggcagcacgccccagggcgcgctccaagctgcgggcgcgctcctacgtcacccgcccattgtccctgacccggagtctccagcccaacgttggctggacgacgtggccaacttagtcatgacggcacggcagcgcctatgtgctggtgggcggtcctccgccaccaagacctctggcgctgctaccaccggctccgtgt

SEQ ID NO: 16298 - DNA, 430 bp, Oryza sativa
  unsure (1)..(430): unsure at all n locations
atgcagcttgaattcctgtctgatttccccactctcggaattccccacacagccatctagttcataaagatatctcccaaatttttgatggagatgcaaagctcctcccttaaattgtttcccaaatcactgccacatacctcagttgcagcacttatcttctgaataatgcaatcaaaaactgttgtcctgtcctcttcaaatgatttccaatggatcacgcatcggtagatgaggtatgcggcaataggccttgcaatagagaaacccatatcttcagatatgcacttgatcaacaactcatggatattcagaaaaatatagaaaaaaatgttgaggcacaacacctgaacgaattgtgatactgcttcaaaagaagttcanaattactaagcatcatacctggtgctgcttctcagcttcaggatca

SEQ ID NO: 16299 - DNA, 470 bp, Oryza sativa
  unsure (1)..(470): unsure at all n locations
ngttgaggcatacaaagtgcaataaagataatggttgggcgatggcttcacaatcagcttggcggcacactttttttttataaaaaaaataacatggcagctttatatatcaaattcaatatctcatgtctcaacaacatttttttgaaaatatatcaatatagtttgattggattcactgagctgatacaagggtttttgtcagggtgagagtgaatgccagcactatactgtcctctcatttcccctctgattctttcatgtcgtgtgtccaccagagtggttagcacaccagatgtcatatcggttgtctttcattttctctcaagcaaacacacacacacacacaaaagtacaagtgttgttgttatgcttcattttgcagaattgaaaatgtttttgactaaacgtaatatcaatccatatcatgaataaatcacgagtaatacctctataaaaataaagatcga

SEQ ID NO: 16300 - DNA, 437 bp, Oryza sativa
ctgcatgcttgcttcagatagaatagaagacaattactttgtttcttcgatattggtcagctatccttcggaaaaaatggtcgcattgaacaaaaactgactgcttggagagggatacacagattgtgagattttcataataaactgacatgtggaggagagatacgcagattgtaagactgaaaacaggagcattgttctatcatgtacgaaaactaaagaagatagcccaatcgaaaatgtgcgatgcatgtgaattgggaaacagccgatgaatcaaataatgtattatgatgacatttatgaaatgttttgagtcttacaccagtgatggtaatcactatcataggtggagattatacatgcatgagggttcctagttgtacaacaatattcttatcaagtagcagtgattcttgacatatgctcgcacataa

SEQ ID NO: 16301 - DNA, 421 bp, Oryza sativa
  unsure (1)..(421): unsure at all n locations
tcagtttgctgtcaccccattcatttgccgagtaatgctctgtatttcatttttagcgctcgaacacatcgcaataactccaaagcagtaagccttatttgaacatcagcagagctgagaaagacaagaccaactgcatccatttccgaggcacggaattcagatacatccctggatctatgaaaaggagacctctgtagtgcatcgcctcctagactagaacgcttaacattttgcatgtcttttgccaaaagttcctcagataggcatactctccacaagcgcatgagctctactaatcgtcccagtgatgtttgaatcanaagagggaactcatcaggaagttttaggataaagttggccattcctttcaatacagcaaagcgacgattcggcaagcatcgtacaatcctgttcaaca

SEQ ID NO: 16302 - DNA, 428 bp, Oryza sativa
  unsure (1)..(428): unsure at all n locations
agcttcgaaagccaatgggcgccgttgtctttttgaagaaaacctgaaggagatggcggcgcacggcgttctccctgccaaagaaatcatcgggtggcggccaccatgcggtgaagcctttccaacccccgatacacacgaggtcgtggtcttctctcatttcttttatggcggatttgctcttccaacctcaaagttcttccgtgggatactgaatttctatggaatcagcttacatcatttgaatccgaactccatagtccatattgcaaatttcgtccatgtctgcgaagcttttttgggcattagacctcattntgctctgttccgccgaatatttttccttaagcctcaaccgaacaaaaacaaaccatgcgtagttggaggggctggatttcaactgaggggcactctgaagccaaagtatt

SEQ ID NO: 16303 - DNA, 406 bp, Oryza sativa
tcaatgtctcaaggactaccttgctgatgctgaacagattctcatcaccgacaagcatgttgactggtgggagacgaagctgaatggcatcatgtatgacgccactgacatcctacagctctgccaacttatagccatggagcagggttcttcagttgacttgggctgttgcaaccccttgctgttctgcctaccgaatacattgttcgcgcatgacattggcagccgtatcaagaagctcaaccagagccttgatagcatatgcaagacatgtgccgagtttagcttcatgaagctggaagcctatcaagatcgaatgactgcctctgcgctcatcagtcgtacaacatcaccggtgttggagcggtcacgtgtggttggtgatcagatcgaataggatacatca

SEQ ID NO: 16304 - DNA, 420 bp, Oryza sativa
agcttccttttcattgccaatggctctgtttgaacatgctcttgtcttcctgtagaagtgttgctggcatttgtgatttctgtacttgattttactgataaaaagtgtggatcatgcaatttattgataggggcaatgtttgccggttgaaaaaaatgagatgtgatttgttaattgtgatcgttcgggattacaatttaaacagataatatgctttcagagaggagatcgggtaggttacatcaaaaggaattattctcttgtcatgaaaattggaattaaaatgtacgtagaatcgtgtgttcagctggtagaaaatgctaccagataactgatgcaacagagacagtagagtttcaagagctattagtctaagaataattgatattgtgcaagaaacgtgattgtcccttgatgaat

SEQ ID NO: 16305 - DNA, 303 bp, Oryza sativa
  unsure (1)..(303): unsure at all n locations
agctcgtaaacatgtactccttttttcatatgtttattngcctcacaaactcggtaagaagtgtattaattacgcctatcaataatttcttctaataatacttagtttaaaaatagaagaaacaacatacacagatgtgcctcaaaagggatcactgtgatattatgaacttgtaagatcttataaacctatgttaatataaagttgagggtcagaattattaaacatctatcacggttcaaaccgtgcattttgcacatgaagcatcatcacaaatagccaaagagcacaagagcattttca

SEQ ID NO: 16306 - DNA, 428 bp, Oryza sativa
  unsure (1)..(428): unsure at all n locations
agctntaactattaatattcttttaaaaaatagtgtgtgtgggtgtatatatatatatatatatatcatacaaagaactataataaaaatacagttgtatttatttatgtatatattataaaaaagtagtaaaaagatatattatgaagaccattttgttgttcaaaacgttaacaattatacaaaccggtgaaattacgtgattcaatgctggagtaattgcttgattacatatatatatattttagtctacagagagcacaatgccttggaaagctcagagactggctggaagaattgggataccgtgatggggacaccatgttcggagctccctatgattttcgctacgccccgccggtacccggccaaacatccgaggtgtactctcgctacttcagcgagttcatggcgctcgtcgaggcagc

SEQ ID NO: 16307 - DNA, 431 bp, Oryza sativa
  unsure (1)..(431): unsure at all n locations
agctttccacaagcgacatattagttccgtcttcgctgcgaagatgccctaacgccaaaacaaacaaacaagtttgacaacccacaaaggacattggcccaagctaccaaggagccacttcctgcacacagctagccaaaaatcgttgccaagcttcattacaccccaacaacaaagcagctccaactctacccaacaacaaccaaagaaaaatgatggtcactcaccgcaaagcaagaaacaccctaagcctatagagcttctgcaccattgcaggagtccaccaatggccactgttgcacgcagttggtgttggggaaaaaggggtcagtgccataacgacacctacaaggaggagaacggctcctaatggcgtcggtgtcggtcgcaagtcaggccaaggcttatcaaggttntcactagcaatttct

SEQ ID NO: 16308 - DNA, 310 bp, Oryza sativa
gtggcgtccataatagtgtatgtcgctttattccgaacttcatacccttaccccatccatgaatcgacatgcgtaacacgtttttccttatcgataacgactatctcgggaacaccaaacacagaccacgaagagtctctaccactgaccttgaatacccatcatcagagccacgtggccgaacccatgtaccacctgtccggctggatctcataaaatgaactggttggcgagctgggctaattctgactgagctgctcattggcagaccgcggaaacttgggctacggtcgctcatgcaatagtattc

SEQ ID NO: 16309 - DNA, 450 bp, Oryza sativa
tatctctgctgactcaccattctggatctatcacccatggtacttcagcaatttatttacaccagatgaccattggtgattgtccaaacctacatttaagtccagcaattttgatttatttatttttcttaatctgcactaattatgttctgaacacctctcaagctgtgttcattcaaaggtgttgggaactaatctctcgcacactataacatagctatccattaacacatgattaattaaatattggtaattttttttaaaataatttttcttaaaaaaacttttacaaaagatacaacctttaactgttctgtttgggaagcgtgcatacggaaaacgagtgatgagttagaaaaatactctctttgtcccaaaataaaccaacttcgtatgaaatatgatacatcctaatactataaatgtggacatacgcatgttcagatttgt

SEQ ID NO: 16310 - DNA, 428 bp, Oryza sativa
agctgcctattacctcgttggatgattatttcttcttgacccatcttgagttgatatcttccaagaagatggcttagaaggtgaattcatcatagacattggccaaggtctggataatattgtcattactgatgtacatgagatcactgatcaacaagacctgttaacaataaataatcggagtactgatatgagtgaagacaatgacctagtatctgaagatgaagaaagtgaagacgacaatgaatcaattcctgaaatgaatgattactattaccgtcaagaagaagctgatggtttctaagtctgctgtgtgtgtgtgagtgtgtgtgcgtatatatatatatatatgtatgatgagcactgttgctctttggctttatgacatttatttacagaagctatgtatgagtaatatttctaaaaca

SEQ ID NO: 16311 - DNA, 266 bp, Oryza sativa
  unsure (1)..(266): unsure at all n locations
tagtgctcttacgtggcagctcgcctttattcaagtntgagatctaaagcaattcatgtgcagactggatgatgatgtccagcgacagctattcattccattgagcgaacatgtgggccatgattgctctaatgtgccaagtacatgtgcttacaatataaaatatgcatgcatacattgaaatggacganggctactcactcttcttaggcactagacaaaactcaaaccttctggtctggatttgataaaataagacttaactt

SEQ ID NO: 16312 - DNA, 432 bp, Oryza sativa
agctataaggaattgaagtatccccacactgtattcaccattgaagaagctataatgagttgcttgacatattggggcattagaagcaaactgcttactataactctagataatgtcagtaataacaattctacatgtcaagagttgataaagaatcacaagaatgcattgatgtttgagggtcagcatttgcatgttagatgttgtgcccatatcctaaatattttggttcaggatggtatgaaaataattaaacctacaatacacaagctacgtgagttgttgaagcatttagattcttcagtatcaagaatgcaagatttcaattctatggcaaactcgaaaaatctttcttcgaagttgagtttttcttttgatacaccgactagatggaattccacctataaaatgattgtagaaggattaatgtac

SEQ ID NO: 16313 - DNA, 452 bp, Oryza sativa
  unsure (1)..(452): unsure at all n locations
gaaatggcaccgatgttgttatacgtttgtgcttctctctgtacatgctctgggggctgaaagcctgtaactgcattgtgttaatctgaggactgaggcttaagtttttactcttgaaaacacttgcagcaagttatgtgcggtctggattgcagccacctgtatcacaagtatgtccaggagaagaggaaaacatgctgaagcccagtgtgtgactagcagaactggagattctttcaactttacagtgaaggggcgtcataagcaaattacaataccgctaattagaacatctatcccggattactcgctntactactcacccctgagcatctatctgagggtaaatccactcccctgaaacaaaaatatctgaacctgcgatatatttacagatcttaccataagtaacttatgggcgataggcacgtagacacacacgactcatacgg

SEQ ID NO: 16314 - DNA, 452 bp, Oryza sativa
  unsure (1)..(452): unsure at all n locations
ttaagtcacctgacgcatgaagctaagccaattgtaaagtacctcttcttagtgtctagtccgatcacctatacaggcctgatgtgaccgcctacaaatgactggtctaactagataaaacatagtttgactggcagactccaacagcaggatgctccatggcagtggattaagcggcggtgagctcgttggaagcggcatatctggcaaggtggaccttgacgggtgcagatttgctgcaagtacctcctcacccaatgaggcaacagcgggctcgggctctggtggaggcaggctcgggtgagaggcaccctaccgccgacaacggcgcgaggggcggatccggcaccccctatccttccgcacagatactgttgcctntgcacacccacacatagcccacccaccaagcatgcggatctgccaacggcttcgagtcaagctagctaacc

SEQ ID NO: 16315 - DNA, 438 bp, Oryza sativa
cctagctctaacgttgagggaattaaattgaagggtggtgttatgcttgcaacataacgtgacattgcttaaatttcagatgatgatatttgcaattccttgatatgcgaacaagctctgttttctctagatggtattgctagttcggtacctcctgctgttactaaccttttgcaagagtatgagaatgtatttccagctgagataaccctatgattgccacctatgagaggaatagagcatcaaactgatttgattctggaagcatcattgtcaaaccgtgctgcttatcgaaccaaccccaatgagactatggaaattcaacggcaagttcaagatctttcggaccacgggtatgtatgtcaaagccttattccttatgcagtttctgtcattatggttcctcagaacaatggttcttggcgaatgtgcatttga

SEQ ID NO: 16316 - DNA, 444 bp, Oryza sativa
  unsure (1)..(444): unsure at all n locations
agctattaaaaagtaactaaaaaatcatttcatgtgttactccattntccaaccacaccagcaattaatccagggcccaactaggcagcgcttgcccaaaattaatgcacatgcaatgcgaggagagcatactcctacacacatccatccatatgccctttgctcgcgggcaatactactagcaattgatcgttttgattaatggcccatgatgatacgatttgaccgctccctcctccgataccatatctgattccagcacgagaccgatagatacgaatacgatttgaccgcccagcccagtccatccatccatggacagtgcagatggtgatatgcataatgcgtcgttgtcgtcgcgatgaattaaattgttggcaacaaccacaaaaaatagcaaagcgaagcaaagcagcagcacattgtccatggctgccgcgtgct

SEQ ID NO: 16317 - DNA, 444 bp, Oryza sativa
  unsure (1)..(444): unsure at all n locations
ggatgtaactggtatgttctnttaaaaaaaataaagaagatgtctgatactaattgctatcatgataatgacgggatggtaaaggtccactttgccttgggtgcctcagccatgagtcatctgatattctttccctcaaacaccatccaaaaacactgaacaggtagtactgatgccctgctactgaagagcctctctgaagtatttctagaatcctaaatagtactactctttggtgaaaaatactttcttttttgggggcaaaactctacaaaattgaaggcacaaaattggtttatatttgtaaatgagcaattttacgggccttgagaagataccatgaggtactaaaaatttagtataaaatttggtacctcataaaatctagatattaagaggtataaaatntacaatataaaaagtggtaccttatagtatcttatc

SEQ ID NO: 16318 - DNA, 445 bp, Oryza sativa
  unsure (1)..(445): unsure at all n locations
agcttcgtcatcgtcgtcgtcgccgccgtcgncgtcatcgccgataattgctgtgtgtcgcgaaaaggggagacagatcgagatgaaaggttttcgctagctaagccgaaattaagcgctaagtgagatgttaattagcttaatcaattgcatggcgagacgaagcaactagctgcgtatntatagccggccggccgcggtttgagcttattttgaagctgtcagagtctcttctgtaatggagacaatgttttgaagtcagcaaatgcgtacgtctttaattattattatacagcaaatgagcaaatgcagtaaattaattacgtgctaggttttgattaagccgttccttcctggattctgttcaattcgtttctctcgatgctgaccaagaattcgtacgttgagagtgactgcatgctatttttcttttctcccacacggg

SEQ ID NO: 16319 - DNA, 350 bp, Oryza sativa
  unsure (1)..(350): unsure at all n locations
tatgatatngataggatatcagtagaagcagctgaacaactcattcnattgaatctgaatcaaaaacatgtttatgatgttgaccttcaatcagtcaacaattgcattggtcacacattctttgtgcatggctatggtggtaccgggaagacatttctttggaatgctttgcttaatgctgttagagctcaaggaagaattgcttnggctggtgcatcatctagcattgctgcacttcttctgccaggtggtcgcacaccgcattcccgcttcaaaataccattagatatacaagaacattcactctatgctatcaaaaaaaaaaaactcatctagccaaattatacaac

SEQ ID NO: 16320 - DNA, 425 bp, Oryza sativa
gcatgctagcttgtgcagaagtcccacacggttttgctttacgaacagcagaagtctgagctatctgggtcaacgagtccatgaccaaactgaactgtatgatcagatcggatgctaaacttgagcttcctgttctgcgtagctttacagctgctgcggcgctgactgctcattcagtgtctttggacctcatcaaaagctttatgctggcctgacaacactaatagcacttgtgcatgagctggccatatttaatttctactggcgtcttccactagagtattttgctagcttttgcaaacaaacaaacaaacaattgtgaaccttaaaccaaactttcatatataacttcattgcacaagatcgagtatctagttgtatatatcagtaccttaggcctattgatccgatgaactgacaaaccg

SEQ ID NO: 16321 - DNA, 459 bp, Oryza sativa
  unsure (1)..(459): unsure at all n locations
tattctaattatccctctcctttgtaggcagacatttgctcagtgggcatggaccaaaggaaggtcaatgtgctagccagggagtactgtaccgacatcaaaaggaaaaacaaaccgattattttgtcacatcgtatcctaatctgcccttgcatgttgattaaacctttatcttctgtaattaaacagcgcgggacacttttcttttggtctgtcaaattaattgggatgctaagccttctttctgaaaaaaaaaaaacattgtcaaaaattgtattactcccttaacgtgaattgcagacatgctccctggttttaaggagggccaggaaaagatgtcaaagagtgatccatcctcagccatttttatggaagatgacgaggttntcctgttattcaagtatcaatntctataacttctgaaccttgtgacnacccactattgaatataaaagaaca

SEQ ID NO: 16322 - DNA, 432 bp, Oryza sativa
agcttgttcacctgtgacgtcaaatcttttttatttgaattgcatcactaaggatagttgccttatcattcctgggtcgatctggatctgtatatttgaacacattaatggcaatatggtatcagttaatgagaacactatagaactaagtctaatgattatgatatcgcatagatgcagctagtaaagagaacaaacaattttaagtgcaattaatcttagttatgcagaaactagcaatatgttaattgaatcaagaatctttgcagatttcaaatttgtttacacgctagtttccactgaccaacctttgtccattgtaggtgcaaccagtaaagcagctgactgtaaactggccagtttgtggttgctgtgctgtgttgtgctgtgggaatctagttagagggatcttgactaatgcaagtaagatta

SEQ ID NO: 16323 - DNA, 456 bp, Oryza sativa
  unsure (1)..(456): unsure at all n locations
ntncatgaagtactggcacgcncaaatcggagttcgcattaagtcgtggcggccgtcagaagttggcgctgccctgcagtccgaatccaccccgcgcgaatcctcttccctttggatcctctccatcgttcctgagtaaaacacgagtgcacgcgtctccgaggtataaagacgaggaatatgaactcaagaaagaactcacctgataatttagttgacgtgcacgagcgcgggtaataggaccatcatgctgtatatggagggacgtggatgtatcgatggtgttgatgtcctcatcatcctccccttcttgcatttgagtcgtcctcgactcaagctcatcttctcgcagatacggcttcaaatctgcaacgttaaatgtgggactaaccccgaaatctgcaggcaaatcaatcttatatgcattctcattaatctttgctaacactttaaatg

SEQ ID NO: 16324 - DNA, 427 bp, Oryza sativa
  unsure (1)..(427): unsure at all n locations
agcttaaattcctcttcatacgttattattagtattttagtgctaagtggagtagaatataatagtattcggagtcctcggagtcttcggaagagttntggtatggctcaagcaacttttgtattctcttctataatactttcgatattaatgaaatactcttctatatatatctttggttcttactgtatatctgcggcgtaccaattgtgtgggtagcctactagagaggtgcaatggtgcgggtttaatgtctaatttatcaattgctctatgtcatgtgcacgggtgtagagtagtatttagtaatgtaagcatcgtgcttagattattaaatatcattaattgggcatatatcctacgggacagtagagatgggccgttgatagtgacagctcaatacggatattccttcacgttagtatat

SEQ ID NO: 16325 - DNA, 396 bp, Oryza sativa
agcttgtgctggttattatattatttcattctattagactctgaaagtctgaaactgccatgtctgaatcgctgcaacagacagaggatcaatagaaggcgaaggctgcctcatctgtggctctctgacgctgatgctcaaagtccatatgaatcacttgatttacctcaaggattgaaccatgcccatgattgattgctctttttttctcttgtgaacaaactgcagacaaaggcaccgatcactgaatctcctgcctttaagcattacaattacaatggtcaatggcaaactgcaactgtaagaatcaacagtccattcattaatgcatgtagaagaaaaccattcagagaggcaggggacatgcatcattacgatttagacgtaatttaccat

SEQ ID NO: 16326 - DNA, 370 bp, Oryza sativa
agcttgacattacgaaccactgtgtctattatctatgggtaccgccccgggtggaccactcggtctggatgatctgagcggtcaaacttgattgttgtctccgaccaccgaagatattggggcgtatcgggctgaacagcgttgatctcccgttcggtcagcttttgttttctcttagattcataagccaagggtccgccaaagatgtgattgagctccttgcgatggtcttgaaaacctgtcggggcatcgtcatcatcgtccttctttttcgatgcactttgatctccatcggaggcctttcgtgcgttcttggcgtattgttctgcaatctgtttgtagacgaagcaatttttggtcgcgtgattgg

SEQ ID NO: 16327 - DNA, 374 bp, Oryza sativa
gacacatgcacatccctagcgggtatatgggcgccaccgtgtggaacaacttcagctgcggctaatgttggaagaaggagtagatttgtatggtacctgttaacgattgcctcttagattattacttacagactatgatgctgaagaacaagaatagtattggatgaaaaaaacaccagctggcagtgactcatccgctccactagtataaagtgtggaattcttctactatgtaagactatatactcgtctatataacagtcgattaatctacggcttcgtccttatcttatcgctgacaactaagcccgagctaacatacttgattctttgagggccgtcatgacattgatgattaacaacaaatgtctgct

SEQ ID NO: 16328 - DNA, 411 bp, Oryza sativa
  unsure (1)..(411): unsure at all n locations
agcttattgcagatacaatgttcatactttttagaagatggcacatatatttatatatgcacatgcatagcaagcatctgggcttcacagtgtggcacagacccagctgtgccgaccgtgtgtagcaagagttgacttgaaatggttccctgttacacgatctgcaacattaaattattactactgttttatattgctcaagttcagcatctgtcattgctgaaaaataatcagcaatggcgggaatagattaatactagtagtttacagggggtatctagcctagatgtagcaatatatacttgttgagtaatggaccataagaacgacggttntggtcttagttaagtgatgttaactaagccgtaccaaagatacatgcatccaaaacggccgtatgtgattgatgtt

SEQ ID NO: 16329 - DNA, 436 bp, Oryza sativa
  unsure (1)..(436): unsure at all n locations
tgctgtcttccacctcctctctcttatatgaaggagatgttatgataggacgaattaataatgtggaggccacacctgctgctgctgctgctctgaacctgcaccacgcgcgtcgtgggaggcgccgcctccatcctggccgtccacctgcctgaatcgaccgcggatatgctatgggtgatgggtgggccccacggtggagggagaatgagaatgacgagaatggcatgcagatgtggtggccttccgactgtcctacgccttctgtgccttcccgttcacgaaaagagaggagagcttttgactgcactctcctttcttttttactgctctgctctgtgcangcctgccaaatctgccatggatggatggatggatggatgctttttgcttggttctgcacggatccggcgttgccgtgttgcacaggatgctt

SEQ ID NO: 16330 - DNA, 434 bp, Oryza sativa
  unsure (1)..(434): unsure at all n locations
agctntagatgaaggggaaattgatgattatgtttaccttgctgtagccgaaatgagtgacacagaaagaacaccatcggcttcacccaagcaaacgcctccaactccttctgcccccgttcattttacaagagtaagtatctctctttgacttcttctaaaattacttccctcttcggctaattactcatagactttgtggttgcagaaaaagaaaactgttgtgaagaaaaagccagcagcaacgattgtcaagtcggctccactagtaagatgtcttcaattcttttacttaatcaaactcaaccggctctatataacacttgtctattctacagcctcctcctccttctcctcctgtacagcaatcgtcaagtgaccagactccatcggttgtgggcagtcatcacatcgaggaggaagaacaaccatct

SEQ ID NO: 16331 - DNA, 451 bp, Oryza sativa
  unsure (1)..(451): unsure at all n locations
tcttcatggactgcgacctttagtcaagctcacaaaggtgagttccttcaagaatgctctgcaggacaacatctttgctaattaaagccaacagaactcattaaggcatagccaacctgccttgcagctcacgagagtatatgcatcttcacttagagagggtatatatattggtactctcctctagtttattaatgggttgttcttcccaggatctaattcacgggatctccgatcacatagactgggttaccaccatagtataactcacatgggtctcaaacccatctccttcgatgcattgtctatcacatttcgtgatagtcccttcgtgaagggatctgccaggtttctcgctgtttggatgtaatccaacgttataactccggagtttcttaatttcctgacagacttcaatcgtcttttcacatgtctagacgatntcatatta

SEQ ID NO: 16332 - DNA, 361 bp, Oryza sativa
  unsure (1)..(361): unsure at all n locations
gtagagctgacgcatgcaagctngggctggcaagaaaggcaactcgttatttgtctgctggatccagntccacccgaaaacacagctgtttgggcagaataagggaagttagagacaaacaaactggaaaaacgcacaagtgtaatgaaggctggtgacccctcagcgtactcggaccacttatgggctagtgcattcttggtttgggttcagtttgaaccaccttctgttcaactcaaggcagccgacatggtgcatctcataatgaagaccgctcttcccttgaggagggacttcattatgacattctcacagtgcggctcggctttataactgctcaaggtgtgcaccaatgtccctg

SEQ ID NO: 16333 - DNA, 466 bp, Oryza sativa
  unsure (1)..(466): unsure at all n locations
tgcgtgcggaggatgatgaaagaaagaaaaacgcgtgttatatagagagtgttatagacagagagagagagagagagagggggatggattacgaagaactaagaaacgagagatgagtggtctcggactgtcggcgggtgataaataacggatgggttgggtggttttcacctgtgacggaaaaaaaaagaggacccgttagaaatggtttcataacatctttgacgggctggatctgtatggcccgttacaggtatctaatcacctgtgacgggccgtagccggatgccttaccgatggcggcatcccgtagaacctgtcaaaggtgatcctcatcactgaccaacacttatgcccatcacaggtatgtcttcnaatgttgatgatatggcgtactgcaagacgctttacgtgtattanttagtactaccctcatccccaattaattgaattctaagtatttaac

SEQ ID NO: 16334 - DNA, 386 bp, Oryza sativa
aatagagtgcatcagtatacgaatacactattgtgggataacttatcgtctaaatctataaatgaattggtgcgatgcacaaattcactctaaggctcgctaactaaaaccaaaaagcaggccataactaagttaactaacttgtgcgggtcgtgaccttagctgcatgtttcataggagattagctcgttatagtttctttattccatgactgccgccttggcgcatggtaatactacgtactttcgaactgtcttctcctatcaactaaaataccaaacctcctgaatgtttagagagaaaaaacatatactcaatcatagatgaaggcctgtggagcgcacatagaaaaagcctataaaacatataggaagatgcagtacata

SEQ ID NO: 16335 - DNA, 422 bp, Oryza sativa
  unsure (1)..(422): unsure at all n locations
tatatcttacggctatagtttcttttaaaatctccaagactccaactctctaaacagtttatatttttaaagaaactacgtagctgtctaataaataaaaaaataaaccggaggaaaaactgacataacacaattttctaaagattttcattggttagcctatttatcaggatcacaagttccccaaatataaacaagtaacctggtgtttctattctaacaaaagtatatagttatatatactacctgtcctaaaatattgttgatgagacatcacctagtattaattacgaatctgaacagagaatactcaaatctagatactaagttatgtctcattctatacataacaacattntggaacagatctactaattaataaaaggaagagtaaaaactcacaaacacaattttcttttaag

SEQ ID NO: 16336 - DNA, 427 bp, Oryza sativa
  unsure (1)..(427): unsure at all n locations
agctntagttaccctcataaatgtcaccatcttattggtacccatgtaaattccccagtacacattaactctacggtgcatgagcttgtactaaggctataaatagccccctaggggcatgttatggggggttctcaaaaaaattcctttaattaatacatattgctttactttctagtgtgtgaactgtgtgaaccacgtctttcgatgtacgcagttgtcattcgataacatatatattatatttacttgttatatatttgaacaatcgttggtcacaaagagattctggtggttcatttcaaaggtacttgcttggtgaaagaaaaaggatctaccgaaggaaccatggatgatcaaaaaagttgattaggaccaaccagaccttctcaagtcacttgacctcacacgtacttttggccataca

SEQ ID NO: 16337 - DNA, 379 bp, Oryza sativa
  unsure (1)..(379): unsure at all n locations
aaatacttataacagttagtcatgttcagtatgggaagataggtaatgataccggatatataccagaagcccaaaacaaatttttatataaagcaatttcagaattatcacaacttggatcactgcanataaaaaccagcaacttggctagacttgaaatatgttccactttaattaggtagatgggcaatctggcatatattagtacatagcaatgtacaatacaaacaataagaatttggcatttataacattaaactggtaaattttatttatgaaacaaacaatgaatgggcttcatcaacactcacanaaacaacanattatgtatatccacgaatacctttaaaaccacattgctgtgtataaaaacaggaat

SEQ ID NO: 16338 - DNA, 309 bp, Oryza sativa
agcttggctcagaaaacttgatggttctatgggcttgcaatacccatggtgcagagaaatcatcgcacaattctatgccacaggttactttgagcccaacaaagaaaagactattcattggatgacatatggcatcatatactcagtgacatatgccaagtttgctgccattttggggtttccggctcgctctcgcaccaatcgtgtcaagattcatgatgacaagcccatggacacaaaatctcttcacttcttgtaccaagatgtggactatgagttatgcaccatcaaaggtctccttgccttcta

SEQ ID NO: 16339 - DNA, 397 bp, Oryza sativa
accttagatactcagctctggaatctctggcgagaatcacgtataatcagaattatgtgttgataacggcgagtgagggtgttgtgctcaatgaaccagccgaccagccatgtttcctgaaccacgagactattgacgaacctgaaagcacgacgacgagcaccacctgctaaacacgcagctcctcgaaggagagagctcgccggcgaagcagcgacagcgtggttagtatcggaaggggaaaacactcttacagggggtagaggacgcttctcggcgaacgaaagggtgcgggcgtgcggcgctgttcactggaatgcgtcgtgagaactgccgctggccgcgaatcaatccatgagaagggatgtggatacggatatgggcttttacttctgga

SEQ ID NO: 16340 - DNA, 429 bp, Oryza sativa
  unsure (1)..(429): unsure at all n locations
agctcggtacgttctgcataaatttatatctatctttaaaaaagataagtatagatattgtattctgtttaggcttaattaattgattcagaaaataaaatagtgaaataacaaaaattgcagcacattacaatgatacacatgcatatcttaattaacgtccacgaactgacctttcactttgtggcaaccatggcccatgagccgctgtccagtttctatataaggcgtttgaactgtttttaacaatgtgtgtgtgcagcagagtttgcaatcttacatggcttctaacattagtgcagctgctcccatgttggtagaagctttcgatgcctcagtgtggggcgacttctttgtgaactatactccagaaccgttacaggcatgtttatattattgtttatgtgtactactcacaaaatntatgta

SEQ ID NO: 16341 - DNA, 454 bp, Oryza sativa
gtgaggacctgaacggacgatctgcttgtctagggaccgttatgacacagcggtataagtttaaggaccggtgatggactttactcttatgagttcatgataacctcactcagtgtaattattcacgtactctatcggtttggcaaataacttttcttttaatttatttacaaagagataatagttttgtcaaaaaaaatcatatttttatcccaactaaattagcagggggtaattgttagatacacgatagttagatatacatataacatattctgtcaaaaagaaagtggtacatctatacaaaagaacttgcgtttctcgttgccaatgcctcaccaccaaattaaacacacatccatgacaatatgacatatgtcgaggatgaatcgaattcctcactcatttaagttgcacagtatgaggcccatcgatcgagatgccgaatttatat

SEQ ID NO: 16342 - DNA, 388 bp, Oryza sativa
tgcctgccattgtgagattattcttagtagtgaaagaatagatgaatacttctgggtgatgggtgatggattgcatgggtagtatttatagtgcttgacgaggccatatgcaacacttgttacttattatcttaatagagccactttggccttttgggttagcaaacctctgtaggtaataattaagtgtcaagttgggctgaaaaaattgtactagcaaagatctcgtttacttgaagaagcaatctatataactgtgtgaatcacaattgtattatttgttggtactgttatgtactgagtctcgaacatataaatatatctaacctcgctaactattatacttctttctgtcacaaactcatgttgctataacctactctctcca

SEQ ID NO: 16343 - DNA, 450 bp, Oryza sativa
agtctatctccgctaaactcatttgtagatgcaaacttcttctattactttatttgctatgatgtgattgcataataaccagttatatgtattgtagatacctttgaaaaggccaatttgctggtatattaccagtttggtgggctcaacttagctggaagttcatctgaatgtctcgcgcaaagattttccttaatgtgcatataccttgaaatatattctttatttgtccattcataagaacggccttcacaacttttatttaccatggacctgctcaaatggtgcaagagaatacgtggagttgatctcaacttcaagggcctaggatagtcatctagttgttgcaaattaacttattttgagggtgttgctctctctctcttttgatatagtttgatattgccttgatcacaacaactttgcattatggaaagtctgctgtccatc

SEQ ID NO: 16344 - DNA, 418 bp, Oryza sativa
agctctcttactctggatgtagtgtgtattatgtgtcttgtcacttcgcaactttgatcagtcgtttgagttatacaccctccctagcccctagccttgtcatcggggaattcttctcggaagataaggctcttggacctttgacctgccttggttgaacaagcactgttcctagcctccagccatgaagttgcaaagtttatttccgattacaaggcttggttaatacgcacggcaagaactcttacacgaccagatcttacatggtctttcatctctacaggatccgacaaggccttatcggctctgggcttccccagccgaagttcccttatgttcctcggaggccttgtcaagacggcgtaaagggacatgaggataggtttcaacgctaggtgccatctgggtagggatcatc

SEQ ID NO: 16345 - DNA, 431 bp, Oryza sativa
atcgatccatgacaagccatcctattagaccactatgcttcggtcaatcgagtatgccactgccgaagataatcaaaaatctttctcttaatcaatttgatcaagctcttggtagatgcctctggctggccattaacttgtgcataatatggtgaaaaatataacaatgttgatacccatgctatcggccaactgaacaaactcatcggacacgaaaattgaaccttgatcggttgtaatggtttgagggataccaaatcgatagattatatgttcttgaacacattgtatagcatccaaagaatcaatattcttcaaaggaaatcgctctacccactttgtaaaataatcggtcgcaccaatataaactatgtctttactcatggtggataatatgccgacatatcaattccacctttaatgccatggtt

SEQ ID NO: 16346 - DNA, 448 bp, Oryza sativa
  unsure (1)..(448): unsure at all n locations
tgcatctcgagtacaaataggattttatattcttcctttaatcatgtcacttgggtactcgcacagattatccgcattgagattgtgatgaacacccttagttcggacccaaggaaggtgatgtctctttctaagatcatttgcaaacacctctttcttttggtgaatcatattcaattgattagttgatgacatgattttggtaccaaaaaaagatttcctcatgaaaatattcagagtgctttattttgtttcgtgctcatcttttgggaactgcaaggactaacaagtaataacagcgatcgacaaactcagctaaactaatctcacatccaattgctataaaactntaaatacatacaaactttgtgtaatacttctaatgtttcctttcatgatagtctgtgggtggcttaanttacccgctataactctatataccattctg

SEQ ID NO: 16347 - DNA, 417 bp, Oryza sativa
agctcgagcctccggcgcatttatgccgtctgggatatgcggcgcacacgcatctgccgctgtcatatcgaggccgacgcacgctgccgcacatcgaggccgacgagcagtcgtcgcatagatcacgccacggccgacgcggcttcaacgccgccgcataagaactgacgtttccacccgtcgcatccgtcgtcgcaggcgcatcaacatcgtcgcctacaccgcgtacgatccaccggttaagacacccggaagactccggaatatgttccaccatatggtgtggactctgacggcatatgaacccatgttgagaggtgcttcatatgcattagtgaggtgctgatacattgtaaggctgaataagtgaccaaggcgggcaagtatatagcagggtcactgtgccctgcacacagg

SEQ ID NO: 16348 - DNA, 295 bp, Oryza sativa
  unsure (1)..(295): unsure at all n locations
gcgaattttcatggatgtctttggatatggctggagtgtcatataaatgactgtgattgcatggatgacttagcatatgatgagtcagagtcaacctcttggagtacattattactttatcgttaattctttggtgtacgatggccaattgcttctgagtagaagtaccatacttctggcggattggtctggatgatagttntaacaatagataacgtgctgttatctgatactaagatattggctctatagaacacatggatcattcattacttctaaatattccgttatgcct

SEQ ID NO: 16349 - DNA, 410 bp, Oryza sativa
  unsure (1)..(410): unsure at all n locations
ctagagtcgncgcctgtagccctatcatcttcttagctattattgcttgctcaattctgtgtgtaagttcggaggttgatgggtaatcagcggtccatatcacaggccactggtatggctgacttaattaagaggcgcttgctctcgtttcaaatttttaatcaaaattaacataattgcacctaagtttacaagaaagattagctgccgaaccatccgttatattcctttctcgtatttctacctatcctcgggcagatggtgaagacaaggaacgatccccgtgactccaacgatgccagtggcagcgaagagcataccgatagagctcataccaacggagcatgtaacagcagtgcatctccaccgtccgagaacacaatggtcactcagatgatgacaatgatgat

SEQ ID NO: 16350 - DNA, 435 bp, Oryza sativa
agctttctatagaccctatactcactagatattatctctaccctctgtctacattttgtatattatgtccttggattaacctggagaagagttacatgttccgcgagaaaatcaataacttgcatatgattttatctgcgatcgacatatcaacagtgcagctcataacaaagatatttgttttctgtatacagggggacccaactctacaactcaactgtaagctgaacattaatgatggtgcacaatagatcagttaggccttaatgcacaagaatattttgtttttattaatgagaaaacaaagttcaaacctacttaagaaaaacaaaccgtgacacaaaatagatatttgaagaattgatacaagaagaatgttacgccccaggtaaccacgtacctatagtgccacatcaaaatactctcaaaactact

SEQ ID NO: 16351 - DNA, 333 bp, Oryza sativa
tcagacatctcaggccgacaatacgactctctaaccagaagccttacgatattatactcacgagtgtgagtgggtccattgacaatgctcatggaatatgcaataaattaagatagggtatgaagaacactagataggagtacaatgatatgcatggtaaggtccattactattttacctgtaacagttgcctggcagaactgaaatatattacattatattttagaacgtaaataaggcttatacttagagcatgacatcacaccttaaccgaaattagagacaattgctttcttgccaaagtcatgatgataaaaccaaccctggcagact

SEQ ID NO: 16352 - DNA, 383 bp, Oryza sativa
cctgaggcatgcaagcttctctggtccagagaataagacaaactatcttgttgatatgtatcttaataagcgggtcatgaaatgctgaaattggctgttcaagcacatggtttgttctgaacattcctttttaatgttagcctttagaactagtggttttcatttgcgagaacataaattgcgtctaactggagactcacctttcttatatggttgagcaattgcactccagaaagcttatttattactatgcgcagataattaaatctaatgcagattgtttgaatactctgccattgtgctcatctgatcaagagctataaataattggcttattttggttcttagtctgtcagactgattcggaacgcgttctatgtgaa

SEQ ID NO: 16353 - DNA, 437 bp, Oryza sativa
  unsure (1)..(437): unsure at all n locations
ctacacctctacaagttctgcctttacagagatccctgtcttccgtcctctcccatgggacatgcacccaacgantttttgaaggacatcgcatttccctcgtgtcacagcctcacaggcaccgcttccgtgagtcccccttgatacccctacccctctctcttgagttgctgtccaccctctctaaatctattcccatgccaccttntgtcgttcactagtgtctcttatgcctcctttgtcacaagcggtgtatcgttttgacaaagcaggtagagtcggacgttgggagaagcggtgatcctcanaggggatgaattttgtagcgtcagagcttgacaaaggatatgtgtggaggtgatggacctatgtgaggcacacgatgactgaggcagaagaaagatgaagtggcatcagctaatgcctacatcgtcgtc

SEQ ID NO: 16354 - DNA, 452 bp, Oryza sativa
tgaggcgtgcagctcgggacatgggaatcctactagttatttatttcagtgaagcatggcaatgacctcttaaactaaaaagtacccccaccaccttttccaaaaatgaagtcgccctacaatgaagtcaatcaactttatacatgaaggagatactatataattaatttttcataccatatacttccaaaagatatgatagtatattattttgttattgcatatcatgattaaaatccatagccaaagttctacatctgagattgagaatacattttgggacagagggagtagctttactcactacagaacaatagttctatgagtaaccgctaaaaataaaccctaacatataacaaaatttaaatattaaaactagcacatgcatgaaacaaccagcatcatagatgctagtggatatcaacctatttagccaattagctattatgttc

SEQ ID NO: 16355 - DNA, 456 bp, Oryza sativa
  unsure (1)..(456): unsure at all n locations
gctggtgatgaggagccgcctatgaggattgtcaagaactactagaggcctgaggagagaatccctgcggagagggacccaacgaaattcgttgtctcaccaataactggggagctcattccaattagtgagatggaggagcacatgcgcatctcgcttattgatccaaaatataaggagcagaaagagcggatgttggcaaaaattaaggagacaacacttgctcctgatgatgaaatctccaggaacattgtgggtcttgcccgtaccatgccagacatctttggaacaacagaggaagaggtctctaatgctgtcaaggcagaaattgagaagaaaaaggatgaacagccaaagcaggttatttgggatggccattctggtagcataggtcgtactgccacacaagctctgtctatgggcggcgaggaacangttgatgcttcgaaatgttct

SEQ ID NO: 16356 - DNA, 378 bp, Oryza sativa
agctcgaaatgaaatgcctaacactggggttttgttcatactaactttcattgccaatgttctacgttgaactatctttatctaatatgtttacttcggactagataaagatacctgtattacagtttgaaccactataactctttgtttaagcacactagcagcctggtgcgcacttacatccacatgctggcgagctctacacttgcgttcaatctacttctttaccaaagacgagagtgtatgtggctaaaagaaaatagagttaggatgtgtctagctccacgccaaaattgacagtttgaagaaattgaaatgatgtgacggaaaagttggaagttagtgtgattaggaaagttcgatgtgacggaagagtta

SEQ ID NO: 16357 - DNA, 345 bp, Oryza sativa
agctcatgatgatgatagtggccgttctttatctatctgaaggatgacctcgatgcggatttagaagaaacttttgcgagcattcgtgctttcaggatgaagctcaaccctgaaaagtgcatcttcggagtaccgtcaagggagctgctcagatttatggtatctcaaagaagcatacatgtcaacccggagaaaatcaacgccatcctcaacatgaaaccgctgagcttccacaaagatgtgcaaaagctaactggttgcatggcggcgctcacatggttcgtttcgcgactcggcgaacgagggatgccttttttcaagttgatgaagaatactgacaatttc

SEQ ID NO: 16358 - DNA, 373 bp, Oryza sativa
  unsure (1)..(373): unsure at all n locations
tggagaagatgtctanggggagttctgtcttatacccttgttgagcgccggcgaagatggagccgtaggcccgctagtccgctgctgcttattcttgtctgtcaggccttaagagcctttgtgataatgtaaagattatcgatataataaagatgtgtcttttatatcatgtttgagtggtgcaccccggcttttcctgggacggcgattaatacactatcgttcgggataaggcaattttcccggtcgcgacaagctggtatcagagccatcttgactgttggattagcgcaatggcataaacctgaagacatattttataactaaaactatttgagagagttccttgtttctgcttgcactaatgctattt

SEQ ID NO: 16359 - DNA, 342 bp, Oryza sativa
gctgctgaactctaagaagagggattgttttaacatgcgcaaagagtgtcgaccacgaacaacaaaagaatatatttgttttttttcgccgggcaagattatatttgtcggagcaaacgttgtcaaattcaccagaccagaccaccacaacattagtaagaaatactccacttcaacaattttagcagatacggggtactccttacatcttgaaccagcgccatctgaaagcaccacctcaggggcaatgcacgccgtgactccaacctcaaaaaccaatgctagctgaataaaattgcggaagagcgcttacttacgttcatcgttgggaagggggggggg

SEQ ID NO: 16360 - DNA, 196 bp, Oryza sativa
ttaatggttgacgctattgacttttaaacacatgtttgatattttttcttggtcaaaagaaatatggaattatcatttattttggtggtatttggtaactcataactatggctttcttggatatatgtataagtgttaaaataaaacaagcgcggaacgtattgttaaatgccaacaatgtcagccattaaaaact

SEQ ID NO: 16361 - DNA, 426 bp, Oryza sativa
gcctattcagtgtgcctgctgagtgagttttttgaggaaacgggtgaagactatgggatgcaatgcaattgttttttttttgtgcgcttaaattggacgggtttcattttgtattattcttctgcctgaacctttttgtaacttctgtgggtgcattccttccctgtaccaaaggctgaggcaatgatcgcgaatccggcgaatcagacagaaagacgacgaagacaggtagggtatttgcgtgtgaatggattctaatccctgaacacaacttaatttatatctttctcttctctcttccaaatttaatgtagatagttacaaaaaaatctaaaaggaattaacaacatacataacggtgtctatgggtataaaaattaagtctaaattcgatcagatgtaaacaataactattagtcatacctg

SEQ ID NO: 16362 - DNA, 305 bp, Oryza sativa
gacccaacgaaattctatgtctcaccaataactgcggagctcattccgatgagtgagatggacgagcacatgcgcactctcgcttattgatccaaaatagtaggagcacaacgagcggatgttggcaaaaattactgagacaacccttgcttctgatgatgaaatcttcgagaacattgtgggtcttgcccgtaccacgccatacatctttggaacaacttacgatgaagtctctaatgctgtcaaagtccaaattgataacactaatgatgaacagccaaatgcagggtaattgggatagccat

SEQ ID NO: 16363 - DNA, 439 bp, Oryza sativa
agcttctgcagatgtcgtgcataccacatctgtggtgctagggtttatgaagaccttgtagctgaaaaggagataacaaaattcagttagatcatgagtaaatcaataacataaatcacttctaataaaaacatagcgcaaaatacaatctagcagctaaattgcttgtgaataacagttaaaccattacttttctgctaagtactcactcatgaaatatggaatctccatggtcacgaccaggatagactcgaacatcaagatttagtttctcgggtgatgctttaacctcatcagaatcttctccactgccatacagctccatcttaagaccagataattccttctggtgcttctgaagcagctggagtagttctgtataacctttactccagaccatctttgcaatataatatgcaccctagaagaatgcttgttc

SEQ ID NO: 16364 - DNA, 427 bp, Oryza sativa
  unsure (1)..(427): unsure at all n locations
agcttcaagaaatatgcattaaactcaatgtgagataaagagagaggatgaaaaatataaagctaaccttatagttaatctattatacatgttagctctaacattgacttataataagtagtgaattgtactattaaacttgctcttagggcaagtactataggcattntaggcatccaagcacagacccaagataccacatagcactaagggcaagtactacgggcatctaagcacaatctcctagtgccacataagcttaaatagtgaggtggaggagagaaaaaatgagagagataaggagccacccctcatgcaagaggcaactactacacaaaattcaagacaaagagagcgagagaggaagagtagatagggcanacanatattggngctagtgtattataantagtatagatgtgatata

SEQ ID NO: 16365 - DNA, 422 bp, Oryza sativa
agcttgtcgaattttgagccatgtatttgtgtagcccccgactctttgtttagttgggaaacaactgaacatagagtcgagaattatagcttcttatcgtcgagtagtcattgcttgattgaagataagtgttgaagatgtccaagtagaaatccatgatgacaaagttgcattgccatgatgaagtgacagaagcaaactggtagtgaagacgcgcaattgtgacgataaaagcgccagtcggcggcagacgtagacagcttgcgttgaagatgatgacgcatattagcggtgacggcgacgtagccaaccgtgaagaagatagcatcagtcggcgtcataacaggccagctatgcaggcggaaacaccagtcggcggtggacgaggcggccggtcggtgaagacgtatacgcccaacaac

SEQ ID NO: 16366 - DNA, 228 bp, Oryza sativa
  unsure (1)..(228): unsure at all n locations
nttcctagacactgtttcacactaagaaatcctctctattctttgcctatcttcgcttggtgtccttggatgaaccagaggaagagtttatcacacacgttctcttggattccataccattggaatactccgtaggggaaatgcgtcattcgtatattcgtgcgcttgccgattctatcttgtgattgtagaaataccagtacaaatttcttgctcccattgccggga

SEQ ID NO: 16367 - DNA, 435 bp, Oryza sativa
  unsure (1)..(435): unsure at all n locations
agcttaagaatacaacgtatgagtataactgtataacagcacaagcacagcgacgatgacagattgttttagcttgccaggattgttcgcctccggtttaatacaccaggatcagaagaatccgggtcaaaacactcaacaaaagggtgtgatacggaagaggttcatcggatgtacgtgactgacatgcgggcctaggaaggcaggcatcacctatcagaatcttatgtaagaccttcccacacaaaaacttttcaccctatcacatctaatgtttagatatatgcctagagtattaaatatagaaaaaaactaattacacagattacgtgtaaattgcaagacaaatcttttaaacctaattgcaccatgatttgacaatgtggtgctacaagtaacctttactaatgacggactaattangcttaataaatt

SEQ ID NO: 16368 - DNA, 428 bp, Oryza sativa
taacctttttgcgatagaccatttcccagagcttaacttgttttaatttgcgaaaggactcgcacgcatcggcacacttgggacggtgtacggcacagctggaagccacgctgcgaaagtggagtgaggtgagtgaatgcgttatctggtaagggacggggacgtggctgggttgggtcacgtgggtggaggatgaatcgaagtcggatgtcagcttggcgtggccgtgcaaggtcgagatatcgcgcgcttgttgctccacggttgttgacatgtggcgcggcgccgatcgaattgccggctcgcgcacggctttgttgcctctgctttttacaccttttgccgcgcacgtcatagcgtgtggctgtgttgtctcgttcgacgtcatggcggctgctgctgctcatctcttgcgcccggtgcacgca

SEQ ID NO: 16369 - DNA, 269 bp, Oryza sativa
tatgatacaggaatgtatgtatcattgactgatgctaagcatggtagagtgctaataaacgtggtataagggcaagtacaattccgcgatgacagaattgcagcgacatgccgacatgacacatagcaattggggccggtaatccgcaaatgtgacgacaaacgcgtattgcggcagaagatgtaaacaggttgcggaggagatgatgactcatattaactgtgacggcgacgtaatccaccaggaagataataccctcaattcgcgac

SEQ ID NO: 16370 - DNA, 263 bp, Oryza sativa
  unsure (1)..(263): unsure at all n locations
attcttacgacgtttaccagcaaagtacataacgcttaggtatactgcggcggagattacctcatccgaaatttccccttcaatttaacacaaactacaatctagcgaattcctgaattaccagcctcataacactgtgacttgcatagggatgaatacgaagaccagtaaccactcctctgacagagttaagagatgacgtntatcgatataccagttctgccgcatagctcagttcggagttaaccgaagtatatataact

SEQ ID NO: 16371 - DNA, 416 bp, Oryza sativa
agcttgcggaaaaggcacccacagcttcgttcattctccgctagcagcaatgcagcatgacctgacgaagagacgaggaaaccaggcgttacttaacaagcagtagaagcccacagtcttgtcagccaatctcctgcaatcttgcagccccaactcttcggccgtgctttcaattgtggaaattggcatggcggaagcacgacaacctcggtcggagatccgtaggcggaggcggagataccgtttcctcacggacatggctagctgtttccgtaaatcggaaggtccaagcacgcacaagccatgcatcactcgtggagatctcgtactcctgacagcaatgctgcagaaaccggcgttcttcacgcgtgtaacttccccactctatgggctgcagaattagatgaggatacaac

SEQ ID NO: 16372 - DNA, 201 bp, Oryza sativa
  unsure (1)..(201): unsure at all n locations
tgccgcgctgctggaggaggactaccagatgcacaaggtgatgaagcgcgagatcttcttcctgaaagatgagctgatcagcatgaacgcgctcctcgaggggctggccgacacggatgcgacgctcgatccgcaaactaatgagtggaggagtcangcgagggagatgatctatgacatctaggactgaattgactagta

SEQ ID NO: 16373 - DNA, 441 bp, Oryza sativa
agcttggtctctcgtctgaatctgcgtttattgcatgtcgccattgcacgtaatcctgtctgtattactatggctgactcatacatttgaaggtaagatttcctggctgaatgagtacgtgcatgcttctgtatcctgattgaagcagcatttcttctcatatgctcgaaaaatattctagctaggcgtgctgcagtgttgaattacattgtatgtcaatgccaagtcagaacttattactaatacggaagatatgaattactaaaggcacatcagtgaagaaatacccctccaaaacttctgagactgaattgaggcttttcttaagttgatgaattcctttcttgtaagatgtgtctttatacgtctctggataagccgtgcagcattggccaatacttctgctcttcgagcatccagctctgccatctgaccagctct

SEQ ID NO: 16374 - DNA, 458 bp, Oryza sativa
  unsure (1)..(458): unsure at all n locations
aagaatntattaagatggcgtcatgggctttattggcggagctggaaccatgcatattgagcgtgagcgtggtgcattactttactatattttactatatagatgaaggcaatcgctctaactaattagtatttgactatttatagatagctattaacaccaagtcattgattaggaagtaaaagagcttaccanaatataagataaacataaaccgcaaagggaaacataaaaagaatacatacgatcaagagtaaattgcatcgccggtacacgaacttgtcaggtgagtgcaatctagtgcacgaacttgtaaaatgctcattntggtgcatgaacttaactgatgcgtgcggaggaaggcgannaggacacttcatggctaatcttatcgattcaggggctgattagaatattatgtatatctgagaaggctactattagatatacacctctct

SEQ ID NO: 16375 - DNA, 443 bp, Oryza sativa
  unsure (1)..(443): unsure at all n locations
agcttngcgagtctaggactatcggtttgtctattatgtcaacttcctcaattctatggttaacttccgggcatattcgagtcgcccttatattcctcccaggggaaagtactatcattggtacacgtaaattttgggttttccaaccatttcttttcacaaaagcttgtgatatgaaagaatgggaagctcccgaatcatacagaactattgcgggtacggagttgacagagaacatacccatcacaacgtctggagcatcctgagcggtctcagcttgaatgtggttcacccggcctcgaccaaagttgttggaagcacgtgaaccttgtccacttgcctgagagctatgacgagactgagctgccgctggagtaggagtcctggcagtgctgccattagcatgccctgagctggcgttggtaggattctgagggcactgt

SEQ ID NO: 16376 - DNA, 455 bp, Oryza sativa
  unsure (1)..(455): unsure at all n locations
tggcattgttgaactaatttgtccaataacatattggtccttacattaattagatagttatttaagcagacgttttcaacactggagtagaaagtttcttcctactaagttttagagcaaaaagttataaatacaacattctaaaatcagggtccagtcttgcacccggcctcccgggttcaacggtaggcatgcgtcctatatgtgatccttcagcgtatccactggttgatcagttaaactattgatgactggtttgcccgtgacgcacggtatttctagtgtgcttccctataaaatagttgttcacttcttctagagttaaccgtaatcaattgtcttagtggtgaaagctagcgtgtacctatgtaccgcacatgcaatctgtccgtgcctttatcatgatttgtttccataatataatcaagtgtttagaggggactncaatagtccat

SEQ ID NO: 16377 - DNA, 361 bp, Oryza sativa
  unsure (1)..(361): unsure at all n locations
agcttgggtataaatggacttacatattcttgcggcccaaaaccgaaataggccaaccagcatgtgggccgaaagaggaagtcatgagatgggcgaaataaggaggtgggccgactagcacgtgggctggcttgttggaatctgtcgtggtcacacgtgcatgttagactcgcccacctttcgatagggtttatagagtaattttaggcatattaaatctactataggattggagaaatagtggtttttggaccagatgtaatctgtgaggccaaagagagtngctctaataagggatagattaaaggtaggccttattaacatttcgactagggttatttcgatagggtttatttaatcg

SEQ ID NO: 16378 - DNA, 355 bp, Oryza sativa
tccgctggtctctaataagtctatttggtcggtcggcctatgtaattattaagttgctgtaagtcttaagtttctttcatcttagatgtgtttgcgatgtataatcatgcttaagatgaaagtgtgaatctagtgcacatcctgcgaactagattcacatgagtatgagttaggaatatttgagaggttgtagatctttagtcatttttgtcatgtctcctaaatgtgtaacacatctggtcaccgccttcgagtggtttgacgggcacatctcaagctgaagttgattggcaggctaatggcttatcaatgtctccaatattcctctctcgagggcgtcgatggttcattatgc

SEQ ID NO: 16379 - DNA, 432 bp, Oryza sativa
agcttaattaattgcatgaaacattgttttctttagatgatgtgtggataatgctctttacatgatacaaaatgttatgttaattattgtgtgagagtgcatgcatgcatgggagaggaaggaggctagctttgcttgaggatgaggccatgagggcatgttctcctaactcaaggccacatgccaccacatgatcatatcatatataccttaacacagccaacaacacaacacctgtctctctctctcatgtatccaagcacaccaccaaaccaaccaaccatgaattagcatgcatgtaagtgcatgcactagctagctaagctaagctcccttttgatttgcctcctcatcacaacaccctggctatacccttgcatcatcaactctctaatatctctatgcatgtgttgtgtgtcatgtggactgctg

SEQ ID NO: 16380 - DNA, 409 bp, Oryza sativa
ttaccaagaaacactaacctggatctctgagaaggttcagtctggagtacgcgtcgaaatagctcgacctcgacagaaccacgcaaagaatccacccccaagaaccacgcgaaatgcaagaaatgatgtagctttactctctgaatcgcatcaaaacctcccccaaatccccccctaaagctgcaccgattccagcacggcgaagccaagaatcaccagttccaagaaacggggaaaagaacagagctcctcgcttcaaaccgaagcaagaactcccgaggtgttgacctgaaccgagagacgaacaaccagagctcccggctcgatctgatttgcatctctgctgcacagcagcagccgcggatggggtggattcacggagtgcttcggattattagccgttaaaaaa

SEQ ID NO: 16381 - DNA, 427 bp, Oryza sativa
agcttgacgttgcgaaccactgtgtctagtacctatgggtaccgccccgggtggaccactcggtcaggatgatccgagcggtcaaacttatttgttgtctccgaccaccgaagaaattggggcgtatcgggctgaacagcgttgagctctcgttcgctcagcttttgctttcttagattcataagccaggggtccaccaaagatgtggctgagttccttgcgatggtcttgaaaaccagtcggggcatgatcgtcatcatccttcttcttttacgtgctttgatctccatcagaggccttacgtgcgttcttggcgtattgttctgcaaactgtttgtagacgaagcaatctttcgccgcgtgattagaattgggatgatgcggacattgcgaattcatgatcttgtccaagtgttgacgcgcgaac

SEQ ID NO: 16382 - DNA, 351 bp, Oryza sativa
  unsure (1)..(351): unsure at all n locations
ctcagcttatgtcgacgacatcggcgtataaagccgcaaggctttctttcatgcgtncgacctacaggagaccttcgacaacttgcgtgcagcgggcataaaactgaatcctgagaagtgcgttttcggcgttcgtgcacgcaagctgttaagcttccttggttctgaaagaggcattgaggcgaatccccgaaaaatcgatgccattcagcaaatgaagcctccgtcgagcatacatgaagtacaaaagcgccaagcagcgttcgacgagctaaagcaatacctgcaaagcccgccagctctgctaagcccagcaccaggaagcgaactgctactatacttatcagcttc

SEQ ID NO: 16383 - DNA, 438 bp, Oryza sativa
tgctgggtggtcttgaactctgttatatttttccgaatcacttttctgtatgttttcaagacatggagccataattgaacatgattctttctgaatatatccgcaaacacattcactgcgacgaatgagccaccgagcaacactgacagctcatttgctatagacaccatttgagggatgctctttgggttagtgcttccaaatgcgagaaccttgaagaggtagctatactcctcatgtgacaaactgttaagatgaattggccttacggttccgaaccttgatatcctctcaatcctacttacaactataatcttgcttcctcttcccatatgtgtgcatgatgcatacaacttctttcaattctcatcatctgtatctgctgggaactgtaccacaaccaaatccctccttttactacaacatttacactccatt

SEQ ID NO: 16384 - DNA, 413 bp, Oryza sativa
tgctgacagattagagcctcgatctcttcttcgtaagttataagtgactaaacgaattaatgcactcacggcataaataaaattgtaagttatatcaccattaaggccgaaatgacagataattaaaataatgattgacaatacttaaatttcttcccttaattacatcaccattgggtagaaaataatttaagaaataacaatcttaatgaaatcatatttctttctagataataatctagaaataatttactcagtattgcaactgatcaataataagcactgataattgcatataattagtttaccatggcttagtcaatcatgtgcaaaatagacttacaatgtcatagtcgaaacaccattggtcataaattattatgaataatcttaaaattaattgctcaattata

SEQ ID NO: 16385 - DNA, 426 bp, Oryza sativa
agctagaggagcgggcaatggatttccacttttatattctcatatgtggggggagctcataccctacggagtgggattttgcacggatgaggctcattgctgataagtgcggcgcggtgctcatgtgcgatatggcacatatcatcgggcttgttgctgccaacgtaaataactaccatagaggatcatttatttatgttgtatgaaatgtagcataattactcagatcacgactgaaaagcctagatgttagtatgggttgctgctagctgcccagaaacgtgttgaagaagagtttcaatctttggctaccttcattacctggctatctgttaagtcctgctgatttgaaccattccacatcacaatgcgagattttctttatcatgtttctaatgtgacgatcaagctgatactataatcctg

SEQ ID NO: 16386 - DNA, 428 bp, Oryza sativa
  unsure (1)..(428): unsure at all n locations
atacttggtgacggtttatacacgaatacttataccaatgagtgaataattagtatgcctacttactgttctactcctaataaatatggtcttgaggcataccaaatcataacctgctcttggtttgagtggccatctcatgcaaaagtgaagctaccagtcctgagttctaatcttggtggccacatttttttgcatggcacttgtggacgcgtgactgtaggcatgcatgcactttttttcaggcgttcatgctcgcagtcgcctggaaagattaacactcgcgcctgctaacaaagatttgcctatgcgtttgccggcataactatattgtggcgctgtttgcacagaattccttagccatctcatctattatgctggcaatactgctagtttacgctccactccttcntctccgtctgttacat

SEQ ID NO: 16387 - DNA, 347 bp, Oryza sativa
agcttttgcaacggataaaaatgttattctgttcaaatcacagtcatgatttcttaaattgatagagagttacatctcacggttgactgccgcacattatattataaaatgacatctattggagaacatcatctagagtcaaatacaatagttttcaaattatacaggtcaacatgacttattacaaaatttaatgctgtggcaataaaactctaaagctaaataggaaaccaattgcatctaagatttgtcaggcaaagtcagaaactcgaatttcaactgttggcatgccacttgaggtggtatgaactcctaatgcggaaaaaggcatgcctaatggctttacc

SEQ ID NO: 16388 - DNA, 381 bp, Oryza sativa
  unsure (1)..(381): unsure at all n locations
tgtctaccgtcgcgtggtcgacgcttgcaatggccgctgccacccggttgggtgctctgccattctttttcctggagctagaggcccagtgggccggacttttcaatggactcgcggcacgggtgatagtaaccgcgaactttgatcttgtgcacgaaaggcaaatgtatggcactgggagctgggttgtgtttgggattttgagcagagggtttttcatctggctttgcaagaaagtacttnctcgatcattctcttcaattntctgtgatatcacttatggagtactatctagtacattagcattttcactagtctaccaatatcaaatcatgtacaaatgtatctaaacttgaccgacctaatcatggatgtcataaa

SEQ ID NO: 16389 - DNA, 228 bp, Oryza sativa
  unsure (1)..(228): unsure at all n locations
tgctgaggattggaaacaagctatatcgcctactccgggaaattatattgaagcacagaactggttgaagaataccaagcgctttgaatttgaataagaacactctcctttttcagaanatgggggtttgggtggtgatccattaatcaaagtaattacggcggaagatcgaatcaagaatttcattatatctctttcctctggcctctattttatattatatttcat

SEQ ID NO: 16390 - DNA, 419 bp, Oryza sativa
agcttagagaatcacttttctattactttgttacacgattttgaaaaaagaactagaacattcttctttgcgaaacagaagaacttatgaaaatcctattagaattagaagtgcaacgaaaaagcttaacaatccacaaagcgccaaagcatataaaacgagaatattgttttactagaaaacaaacatcgtattgtacgaaaaccaaaataaggaaaatttgaagatgtagaagaatcaagatggcattgacaagaaattaaattagacaccaaactccataactccaataataagtattgtgataaaaatatcaaaatatcaaaatattttttgatgaaaggcaacacccaattcctaataacaaggaattataaggtcgagctcataagcattacaatccacaaaaaagcatgaaa

SEQ ID NO: 16391 - DNA, 337 bp, Oryza sativa
tgctggcgagccgtctcgccacggaactcacaatcatgtctccaaccccgctcatgggctcgaagctaccagccagctagagcacaaactccctatctctcccacaagagtatatgctgccaatttgtttgtgaaagctctcttaccacaagtgcactccgtctctatgctttatggaagaccctaccacagtccaccatgagcaaagttattccatgcgacggcatgctccacactacatgtcgcttgcatgagcaaagctattctatttgcccaccatatagattgtaaaatttttagtgcgttttccttaatgaaatgtggtcgaccgaacctt

SEQ ID NO: 16392 - DNA, 445 bp, Oryza sativa
  unsure (1)..(445): unsure at all n locations
cttatctcggatgcggntgattttcgggttgatatccgtggattttgccggcgtcngcgttgtccatcgtcagtgctactacggcgatcatcagagttgagagagatgccgttgtttctgactgaagaacgtacaccgatcacggtaccaatagtaaatactcctactaggagcagtagtgagcttttttatggatacggatgatttgtacatgctgttcccaatgtggagcagcacaaccgattctctgacgaatatctcccttctcgtaccggacgcccncacttgggttctgatgacttgggcaaacgagcccttctctatctctatctccgaaagcagcagcagcagcggcaaggattcgatacgatgcgatgcgattctccggcacgagagcatgtntgccgcgatctctcatctanctctactaccactcttccgggtg

SEQ ID NO: 16393 - DNA, 66 bp, Oryza sativa
ttctatagccaactatagctacactgctgctacaaattctctctgaagaattgtcttctatataag

SEQ ID NO: 16394 - DNA, 406 bp, Oryza sativa
tgagctgaattataagaggctctattgtactatattgtatactagaataggaagagagtagagtagaagaagtcggaagaattccggagttgtcggtaatcttctcctattttttttattctgtttattactctgaattcaatataatattcttcttgagtaatttagatttatcttgtgagaattatctcttggttagttcctaaatagcatacgggattattgttcactataatcaactagactatggagattgctgtggcgagttataaacactaaagtagatattaattgcttagacgttgtgcttaagtcattgtgactaaacaattggttcctattccacactacgtttgaggtaggtgtataggctgtaacatcccttgcaatactctattctccgtga

SEQ ID NO: 16395 - DNA, 446 bp, Oryza sativa
  unsure (1)..(446): unsure at all n locations
actactatattaccacaatatataatacatatggttttccttttcgggaaccccgagggatgatgatacaaacaaggtttgcttaccttacacaatttatattgcactccttgcttcaatatactagcaaggcgaactcttaataaatttctactactaaagcttagagagtggcttctgagactctggctgagggttgctgcctcttggtatccttctgtttcaccaacttccccttttatagaagccggagagggagctcaatcttcactcatatatttttttatcatactgtggcatcatgggttcttcagagagttatatgtcttcttctgatcacgagtgctctgtttattcccgagaagttggattnttacctttagcatattgtgacttgttgtcttctgcattcatgctagtttagaatatatgagagaatatttact

SEQ ID NO: 16396 - DNA, 396 bp, Oryza sativa
ctatacataactcaagcttgcccgatggttactccctacttctgtcagtgtcctgtggcccccccttgatagtatcaattttttctttttgagaacattgatagtatcggttgctatgcaattgtggatagtgttcactgtattgtacttctcacatttacccttttccccttacaatatactccctccatcccaaaaaaaacctaatcctaggtttgaaccacacatgggttcatgttcaaacctaggattggtttttttttttgggacagatggagtacatcattcttgactcatccaataaaaagtcacatcctataattgaatctaaacatacacttatttatgtgcactcatatgcctgtgatacttttaatttacattattatgtctata

SEQ ID NO: 16397 - DNA, 241 bp, Oryza sativa
  unsure (1)..(241): unsure at all n locations
gaaaaaaaaagacaaccctgatttccgttttcaacatttaaccgttcgtcttatttgaaaaaattataaaaaaaattaaaaagataagtcacgcataanatattaattatgtttttttatctaacaacaatgaaaatactaactataaaaaaaatttatataagacggacagtcaaacgttggcacaagaaacccatatttgccttttttggacggagggagatcnctagcaacatatgat

SEQ ID NO: 16398 - DNA, 404 bp, Oryza sativa
tatcgcataaagcgttaaatctaaaccacagacagaaaaaagaaactacttttccaccttatcaccaacccagcagcagcaaattccactagggcctaagctgactagtatacccatataacaaaaaaataataatagcataccaacaaggattgcgtttaccaagtcagatggagcaattttagttgactacagatcaagaaaaaaattgcagtgcaaagacgcttaaacactaagttcaatcacgaacaagcactctcatttgccacaaaatatgggaaaccggggagggaaaccatactctatctggagcagcgccttctgcgactcggcgtgaagcttctcccacttcgtgttagaccccgcgggctatctgtccgcgtatatagcatcagctgctgctc

SEQ ID NO: 16399 - DNA, 457 bp, Oryza sativa
  unsure (1)..(457): unsure at all n locations
agctngagaccagctcatctgcaatatgatgtgaggaagcaccacttgtaaatcctaattggaacatcaattgctccaagcgcttgaaatttgtgaggtaaagatatccaatctaatactccctccgtttttaaatatttgacgccgttgacttttttaaacatgtttgaccgttcgtcttattcaaaaaatttaaataattattaattctttttctatcatttgattaattgttaaatatacttttatatagacatataattntacatatttcataaaagtttttgaataagatgaatggtcaaatatgagctaaaaagtcaacggtgttaaatatttagaaacggatgaagtaatagaaataccaccaacaatgcaaggattagtcttctcaacgaanatagtgagggttagtataaagtacaacagaagttgcagcttagggttgatttttccc

SEQ ID NO: 16400 - DNA, 420 bp, Oryza sativa
  unsure (1)..(420): unsure at all n locations
tgcattctntgcggngagaaccattcccgtaaagattgcagcatgtacaatgtanggcaagatgccacaggcgctgatgttcgtcgcgttccaaaggggaagtcgaagaagaaaaataatccttagttcgctattatccttggtggactccctactttgaagatcgttatcgttcaatttatgtttagtgcgtctgtaattttaatttgaactttcttgcacttttattacccgaatctatttgtaatggccttgtaattttcattttgaactgcactgcacttttaatatcgtcatgtatttgtattggtggactaatttaaatttcgaactgcactgcacttgtaatatcgtaatatatgtgtcgtgggcttgtaattttaaattgaaatgtactgaactattcttatctgtatctat

SEQ ID NO: 16401 - DNA, 454 bp, Oryza sativa
  unsure (1)..(454): unsure at all n locations
agcttatctaatgtcggcccatggctcatgtctctatacaggataagagtgtccaacgaactatgtgctatgaatacgcaagcagcacacctatcactctttgtttcaggaatcatgtgcctaaccgaacgcatacttgtagctatcatcacagttttggtacgggatatctggggttacttgtacagcaatgaagaagaagttgtgaaatatgtcgcagcaatgatgccaattcttgctttatctgacttcatggatggaatacaatgcacactatcaggtttgggataaaacacacatccaaatatgacaattctgcatttatcacgtagtgcctacactccctgttnttaatcatacatgtaaccagaataccagattgcatatctttntacattgttgccaatcttgcagttggccgttttgccccattacagtgccacttctaataata

SEQ ID NO: 16402 - DNA, 418 bp, Oryza sativa
tgcattgaatctctaatctgctatgtcgtgctaaaatattgagagcacactctcattttacgacaattacacaaagcacgtcacattctaatcagccgaagcaggctccatacaatgcatggaactaatgacgagcacacattctccaatgataggaattctccgtaactaacgacagcttgatattaagctgatgctaatggaagatcacttccgctcgacgatgtctgatatgatgactttggaccgcggagtaccactctgactgccttcagctgcaatcttgtacacgacgtacattgcagaaagcaccttgccaaacacaacatgcttcccatacgacctgcagtagcaaacaacacatatagagtatgtcatgatcagaattacaatttgatcggaagatttctaacgcaca

SEQ ID NO: 16403 - DNA, 452 bp, Oryza sativa
agcttgtcactgaactgaaggccaggaatagagatatgttgaagtgccgacggcgaagtggtagactaaccataggaattccagagtacatgaggttgcatgatggtagctaattaagctcgagcaaatgaatgctgttgtgttagccatgatgaacgcatcgaatatataccttccagcaagtgttggtgtaccgccattgtagtggtcgtcggctttatatcctccaggtatggctaaaattacgccaaatgtgacagttgcaaccagcactgatccaatccccaggtttgtgttgaatttgtcattttctctgattccttctcttcacctgcttgtttttgttgaggaatatatcggtcgtgaaagtgacctacctgaccacccctgcttgcattgcaaagttttagtgcacgcaatatcaatttttcagggttctgcaaaagcaaaca

SEQ ID NO: 16404 - DNA, 418 bp, Oryza sativa
  unsure (1)..(418): unsure at all n locations
ntgctagcccaaaatcggagatcttggcactcaagtctttgtcaagcagtatattgctagccttgatatctctgtgcacaatccttattgcagactcctcatgtagatatgctaaaccccttgctattcccaggcaaatcttacgtctcgtcggccaatccaagctcagcctgtattgttcgactgtacctaatcacagaaattgcacatgagttctaacatgaaataagttaagaggggaaaccaggaaattagaaagtaagattaccgaaaagagcacgcgctaggcagttgttttccatgtattcataaacaagcaagagctggtttccttctgtacaacagccataaagcttgacaaggtttgggtgctggagtgcagatatcatgcctatctcattcacaaattctcgattcc

SEQ ID NO: 16405 - DNA, 428 bp, Oryza sativa
  unsure (1)..(428): unsure at all n locations
agcttgacctggacctgcangtangtgttgcgttgaagaaggggtcctggaggaagacggagcccggngtgaggcccacctcggtccacagccggctctccagctcctggaacgccgtgccgttggtcacgtccccgaagaacggcgccctgaagtacatcaccccctggtacgggtacgcgcacgcgcagctctgcgggctcatgctctcccccaccgcgttgcacgtccccgagaagcacttgacaaggctcgtcgagtacggcgccgccgcggcgcgctgcgtcacgttgcagtactgcgtgttcggcagccggtcgcacaccgggttcccggccagcctgatcgatgtacagggagttaggcaaggagaggcagcagcgaaggccacggcatcattcggagatggttggttcaatggactcacg

SEQ ID NO: 16406 - DNA, 416 bp, Oryza sativa
tattcagttacttcctggaacagttcgatccaactcatgaatgctcgagagcttccacattccactccatccattcagatagtgggaagcgccttacccaagaaccccaaccaagacccgagcaaggaggtcatgattccaagaaccaagaaccgcccagccgcccacagcagcgagatcaacaagacaagaaccactcactcctgcgaggcacagccgggggcgcgaggcgcccgacctcgtcggcggcagcgacggttacagcagaggaggcgctggagttgctgccgccgccgccgcctaggcaggagggccgggcggcgaggagcggcgggcggtggaggccgaggaggctggataaatggaggagggccgtccagagcacgatgctcgaggcgacgcgcaccgcccaccgg

SEQ ID NO: 16407 - DNA, 251 bp, Oryza sativa
  unsure (1)..(251): unsure at all n locations
acctgaggcatgcaagcttgcaaaantagataacagaatttcnacagatgacatgctcaatgtgctaccttgaagctgtaatgtcaagccccacacttaagcatgagagaggagtcacatntgaaaaacaagaagcaatcatagccaataaagaccactgcatttgttttgctttattcaggagggcctccccaggattcttttgtttttcacagacagcaagaacagagaaacattccatatagttgcca

SEQ ID NO: 16408 - DNA, 417 bp, Oryza sativa
tgactgtattgacggccatgatgatccagtaatggttggctggaagacatttagagcgagtagaaatgtcaacactatcacaaatacagagatctctaacagctccatgaaaaagaaatccatttgagatggttctaactagatgtcaaatcactaaaaattaatctggaatgggtcgcccaatattgaacccgccacaaacgatctttaatatctcctaatttgcaaatcattacagatcagtgaataatgaatgcaaagaagaggttgttcggagctaatctttatgatctaatgcttaacctataacatgatcatgtaattcataatttcttgtgcggaatttggtatacgagaaaggcggtggctgtctcgcagaagagggatggatgagacagaatcacgagagagcgtgag

SEQ ID NO: 16409 - DNA, 418 bp, Oryza sativa
  unsure (1)..(418): unsure at all n locations
agcttagcagttcgggtatgctttttctctcttcttgattntcctcttctttttacatgtctcataattaacatttgctctcttcgcctgctcctatcttgcacctagattcttgcggctcactgttcgacagagcgaaccgtgcgggcccgtcttgacggatttaagaaccgtcttcgggccaaggatgacgaaataggccgcaagaacttggagatggaagccctcgccaacaccctgaaagaggcaaaagccgaaaacaagcagctccaatccgagttggagaaaggaaaagaggcgagggccgaggttgatcgcctcaaggccgagcgggagaaaganaaggctcattccgccatgctgaccgattattataacctcactgagccgaagatggaggctcttcgcctggaggtca

SEQ ID NO: 16410 - DNA, 409 bp, Oryza sativa
tgcccgcaggtacaccgaacacgcacttatcggggttcagctttatgcgagcggagcggagactctcaaaagtttccgctagatccgagagtaaggactcttggttgcgcgtctttacaaccaagtcatcgacataagcctcaacattacgtcctatttggctacccaaagaaattcgagtagtacgttgaaaagtaggacctgcattctttaacccgaagggcattgtcgtataacaataagttcctatgggggtaatgaacgcagttttttcctcatcctccctagccatgcgaatctgatggtaaccagagtatgcatctagaaaacacaaaaggtcgcaccccgcggtggagtcgacaatctgatctatgcgaggcagggggtaagggtccttaggacatgcctt

SEQ ID NO: 16411 - DNA, 446 bp, Oryza sativa
  unsure (1)..(446): unsure at all n locations
agctnntggtccattaagagtctatttggttgaagggatgaaaatagatgaaagataatcatcccatttttacatgtttttgtttcatgggcgagagtggatgggatgggatggacactgaagagaatatatattctcttaagatgttggatgagcccccatctaaattgattgatgagaccatccacttttgtcaacgcaaatgattagacatagttagttttttcgttaattaataattttcatttcaagatctattatattattaaaacaactttgaaaggaggcaccacgttcgctgtggtgactaaaaattcccacattaatcggagaaaaagaaaaggagagtccaagcagaaatacaatttaaaaatagctgaaattcggaattaaaaataagcaatattgaaataagagtccatataagaacccaataggagattaat

SEQ ID NO: 16412 - DNA, 411 bp, Oryza sativa
  unsure (1)..(411): unsure at all n locations
taagtacagctcatattgtctctctcaaaaaaaatacatggtgatttaaaaggatttacgcaagtttatggaggcctnccccctccccttccccctctctctcccctctcctccctctaccctcctccctccccctcaccttccccactccccccctccctctcccttccttccaccctcctcacctcccccccttcccctactcttccccctctcctatcctttctcccccccctcccccctcttcacctcccttcttcccactccctccctctcctcctcccccattctcccacactccccccctctcccctcctcccctcctccccctctcccccccctcctccctccccctcttctctctcctccccacatccttccaatccctcctcccctccctccccctccccc

SEQ ID NO: 16413 - DNA, 250 bp, Oryza sativa
  unsure (1)..(250): unsure at all n locations
agctngngaaggctatatcatgcgctctggaaggtgcaagtaagcgccgcagttagaggagcgcggcttcaggggcatctcaccggtgcaaccaagcggccgccggcagagatcgctgtcacaaaagatggcgccaccaagaaggagccgaacccagcccatgaagactgggaagccaccgaccagcaagttctggggtaccttctctcgtcgctgacatgagaggtgctgatgcangtcgctacctgcc

SEQ ID NO: 16414 - DNA, 407 bp, Oryza sativa
  unsure (1)..(407): unsure at all n locations
ntacatctttatgtcaacatcttatatcttctgatccaatttctttacttttcttgacaaccagctataatttataaacggcgaattaaggcatactagtgctgaacatgtcactatgcactggatatgcatattttactttcatttgtaggggttggttttaagtcagttagtgggtcttgcatcttttaaacagttccctatcaactatagctagcattcatgtcttagtttctctgtgttgtttttaagactcaggatgccctataattttgttgaattttctgtgctattgtgtatatctccttgctccagcaaacaatctgtttgttattttagctgtgcatcagaaacaatgtacattcgtgctttgcttaattgtctgtcagaaccaatctattatatgg

SEQ ID NO: 16415 - DNA, 463 bp, Oryza sativa
  unsure (1)..(463): unsure at all n locations
catgcaagctgcaaaatctatgggccacgccattgtctctttctccaacttgcncaatgggtcgctgcgaaagccccgtgtgtatgtatggataaagctcatactacttcgctttcacataaaaatggttcctcacattaacgaattaattaatgggggatataagaattcatacgtaagtacgcacttcattatgggtcaaaatattaatttgtccgatcgagcagctagctaacagtacgcaggaaaaaaggtttgtacaggcagttactttatcggtagaatatactattagctagctatagctaggagtataattccaaattaacccctttgatccactgatttgganannataaattaatctaaatgtacatatatatataataaccttttcaaccctagccgtttcataccggccatgcatgcatgcatgcaaataaatgtgcatcaccacatatag

SEQ ID NO: 16416 - DNA, 414 bp, Oryza sativa
  unsure (1)..(414): unsure at all n locations
tagactttagaaacatctaagttagtgcttctcaacgacacggatgagaaagtgcgtctcatccggtcggagcagtgaaaattgtatcgattgattcttgtccgcacgagaggctcccttgcaatcgtttaccgacccggctgcttcaacagccacacgcgagaggctccctgccaatcgctcaccacaccggctgcaccaacacgcacaaaccaagcacgtctgaacgagtggctccctgccaatcgttcaccgacaccggctgctctaacagccttanaccaagcacacaatggataacctcacacaccaacagcagtttacatagtgttcattaaaactatgctaaggaatcacctcacatccgcccatgaccgtgggcacggctgttcgaacagttattaacctctgcag

SEQ ID NO: 16417 - DNA, 411 bp, Oryza sativa
  unsure (1)..(411): unsure at all n locations
tgctggctggccggctggatcgatcaagctagctatgctaggctgaggcttgaattcttcattacttctgtggccgcaagctagctagggcatgcattcatgaattggatgtcgtggatgcttgtttggctaatcgatcaatggacaacggttgagtaatttctgctgcagaaacccatacttgattccatgctgcttgttgctgcatgacaagataactaagggaatatttcccttgtcctagccttgaggaaactgatggcattggatcccaatgctttattnggcctgcaatgcacgcacattatatttaattctctttacttctttctttcaaggaatgatattcctttgattacttctctctttggagcactgtcatccggctcttaacttcnttattttttatcc

SEQ ID NO: 16418 - DNA, 150 bp, Oryza sativa
  unsure (1)..(150): unsure at all n locations
gtactccgnatcaactatggtgttgttctgaaatctgagccaagagctagctatagataagcacctaatccaatgcaaaatctattaataaagtcaaatagatcacataaactaatacttatcaaaagaacttctattaacactttctat

SEQ ID NO: 16419 - DNA, 426 bp, Oryza sativa
  unsure (1)..(426): unsure at all n locations
ctcaagcttcacatatgcatggntggttttactgtaaaaaaatattgattacattcgtgcgattttaaaaaaagaacacttgagtgacatatagcttgccccatgcagcttagtacttagggtgcattcgaatatgcttatgaactgagctttttagcctcacgcaaaacataacaagttattaccgtataattaattaattaattaagtattaactattataaatttaaaaataaaattatttgatttcttttattaaaatatgtatatataatacttacaaaatgtagtttaggaaatcgtactcagggaaacgagtaagtaattaattaaccagatatgggagccttaattaccagtgagtacaaccaggtcggtggtgctgagccctttcccggcgaagctagtgacgaagttacccaggtc

SEQ ID NO: 16420 - DNA, 410 bp, Oryza sativa
cacttccgattttacctagcttctcaaaatacgtagctacaaaatctatgaaatagactagaagttaaaaattgggatacctagtgtttgaaactcttaaaagctaaataccaaccagttgcttattagaatattaattaagctttcaaaatgggtctatgtatgactcctttcaattaaaatctaagtggggtcgtcaaacctattgaaatagtttttttttccaatgacaccaaaagctctttctgcccttttgtgcctcctttggattgaaagaaaaataagaaattttggagggtcgttatccttataaaagaattagacgatataccacgcattaaacggagatttgtagatattcatgtgtacatatatgtaattggacaacagataaagatagcatgcactta

SEQ ID NO: 16421 - DNA, 422 bp, Oryza sativa
  unsure (1)..(422): unsure at all n locations
ntgttggctgcagctgaagctcgccttctatgttgtcaaggatcgcacggccaccagggtgcaccgcccaaaagaggtcattccaattaggattcatgtttccaaccgatcggaatgtgtcgagcaagcactgccggatgttgtccttgatcagcattggcacctggatagagaggtggaaatctatgccgctgcaggtggtctgcatgccaagtgcatgctcagtacctggtatcgttgtttgcgaggcaaggaccatctcaaacagcgggcgctctccatcgaccaatgggtcagcgccgacaatgattgctccggcaccatccccaaatagtccatggccgacgattntgctttcatctgggtttgagaagcatatcagcgtcaactcggcgcaggctatgagaacgcgtgcatcgcga

SEQ ID NO: 16422 - DNA, 259 bp, Oryza sativa
  unsure (1)..(259): unsure at all n locations
atcctctaagcacctgcggcatgcaagctnggattaaaaaaaagcacacgatntattaacacttgttttatctgaaanatgcagttagccttctacaggaagaactgagacccacagtggacttgggcccaacagagaaacgatgcgtccagttgaggaaaaagtccacttttactctctcaattattggttggattttactcatattcctcaaccgcaaatcaggtataataatccccaccacttcctaatcctggta

SEQ ID NO: 16423 - DNA, 427 bp, Oryza sativa
  unsure (1)..(427): unsure at all n locations
taacacattgtagcgtgcgtatgtgttgtgtcccactgcggaggagacacaagcctaattaaggttccttaatctcttctaaacctttagagaaatcatggaaaatttgaagatacaataaaacacatgagcctttgagcttgtcagtgtacacctccattgaaaaagattagagctagaaagttgccaccatagctaacctcgtactctttatgtaatattacatattaactttccaatacattagcctcatacttgtccttttcttttattatacattctctctccgttttatattctaagtcatttgactttttttaagtcaaaattctttaggtataatcaaatttatagaaaaattaacaacatttacaatactaaattagtttcattaaattntacattaaatattgtaaatatatgtttg

SEQ ID NO: 16424 - DNA, 454 bp, Oryza sativa
agcttctcaaccgcggcctgcgtgggatggacgacgtcccagaacatgtagctcgtccggttgtcgcagtacacgctcgccggcgagcataggaacatggcgttgttatctcctaggccacagcacgctgctttaacctccttatagcctattaaaaaaacaaaatcactgaataaagtgacaaatgtggagaatcttaatcctaataaaccatattctcttcaccttaatatatatagtaatctaattcctgtatagatttatagtactaccccggtgccgtctaatatatgtactacctcctttttctttaatatatgacacaattcactttttcacgtaacatttgatcattcaacctatttaaaattttagtataaatatgtgaaaggataagttcgaattataatttcttttatgataaaataagtcaaaacaaaataaataatattta

SEQ ID NO: 16425 - DNA, 414 bp, Oryza sativa
tgtgttactgaagtagcacccaaacctcctagaatggtcggggccaccgagacttggaacaatcttaggcgtgcggtggggccggagggtggatagaacacattcagcacggccacgcacgtcacaacaccaactcttgcctgcatggccgcttcttgttgttgttgttgttgttgttgtgtgttgttgctgcatctggcgaagaatttcctacagcctagccatgtttttgcttcactgcctcatactccagccttgggaccgatgttgtttaaaccgtgctaggcatcactcactggtcctcaacttcgtcgccccctgaagcctacatgcctgagcctaaagactctcaggctgagcttcgacgggaaccccttggacttcagctttggcaccatcttcggcgtcaccttc

SEQ ID NO: 16426 - DNA, 454 bp, Oryza sativa
agcttcttccataagaacgctgaaatgcatactgcgagggacaagattcgtcttaccttctcggtcctgcagcttcaaagaatgacaaccaatcaacgcacataggagtaggtcaagaaatatgagacgcacttgtgccaactcacgtggaagaaaataacaatgcaccgaccaagcagacaatacacgatcaaacttcccatgggcagccaaaaaagaaaatcagtgacttggaggagaagaacacacaggcatattctttcttaacaagcttccttttgttttattgtactccattaaaggcccaaaattaaaccagcacatcaaacatgtatgtgaaataagcaaatgcatgatttattatgaccaataatctacttctctacacaaaagcttaagaaacagtataagccatactccccaagattgccaatttattccgaaagatccttct

SEQ ID NO: 16427 - DNA, 418 bp, Oryza sativa
tccattctattcaaattactggaactagttgagtcactaagctgaagcctagcaagccaatcccagtagtcctcactgtcagagaactctttcttcaggtcatccatgacctctaccttcagttcgtcagaatgtgctaggtcaacactactcaatatctctaagaatttcttccgcaaggttaagcttgaaggaagagcttttgtagcaccatggtatatggtttgaatgattagcagcccttgctgccagaataggtcttccttcccctccaaagcaactccctgtgagccagactccttgggaccttcatcttgttcattcagtgacatgaacagttctttattttcctctttccaagtgcttgcatcattattcttcttttgcagtgtcttcacatcctctccaagagcaacct

SEQ ID NO: 16428 - DNA, 448 bp, Oryza sativa
  unsure (1)..(448): unsure at all n locations
agcttcctttgagccaactctctgaactgtctgtgcccagagaggtcttgcaggggcttgatgtcattgtgcgtgaggcctctagctggcgcaagattatcattggtcagggattttactcgcagggccgcagtgtgcccattgggccggatgttgtagctctcanaggaacccagcagaccctgaaatgcactcagaaaggactgatcctttgtgtggactattcggttatgccgtttcgcanagctggacctgtgttggatcttgttcagaagtctgtgagataccttgactacaggacaacactaaacaaacaccaattggacactttgaagaatgaactcaaaggccagcgtgtcactgtaaatcataggaggacaaagcagaagtacattgttaaaggtttgactgataaacctgcaagtcagataactcttgtagattctga

SEQ ID NO: 16429 - DNA, 416 bp, Oryza sativa
  unsure (1)..(416): unsure at all n locations
taaaggcatccttcctacaagctcttctagctctcaaaatgaagaaaaaactttntgcaaagaatatattttgtcttctctagaacgggccaagaaaaggaatcgtgctgcactgggtacacccaaagtaagacattttaacgtcctgttttttgatatcttatattcttctagctctcagacccattagcagactgctttggcatcgtgtatatgtgatttaacttgctttcatcaagtacttgatttggatttttatgtgctacaggttcctaatgtcaaatgggaggacgttggtggtcttgaggaagtgaaaaaggttattctagatactattcaggtaaaattttcttatgttcatcaatgtttattgtaacttaagaatatgaagctgctttagtaagtttgtgaatagt

SEQ ID NO: 16430 - DNA, 279 bp, Oryza sativa
  unsure (1)..(279): unsure at all n locations
agcttgaatggtaatgcatctagcattccaactgctagtgtggctgctgatgcagcggngcgatggaagagagaaccaatttgggtgttttagtattctacacttattattcagttttctgtattttttattccctctccctctccctctctctctctctgtgtgtctgtgtgtatgtatagacgtatccccgtatccgtgtttcttagaaaatgccatatccccgtatcacgtatctgtatccccgtatctgggtaacagtacaaaatatagaggtat

SEQ ID NO: 16431 - DNA, 413 bp, Oryza sativa
tgacgggatggggagaagtgcgtgtaggcgtggcgctgctgccgacctgcggcgagcgtactgaccatcgtgagctgcggcactgcggctgcgccccccaccggctgtccggtgaccgaaatgatgatactggtttgattggggctaactcatgcatgcaccgtatgctcgatcgggacaactacagagttagtgaattttctaaagttaagagagatttcattaatgactaaacattagattacattcttggttcagaagttcaaggatttctgcacgagcacataatctccactccgtatcaattcgtgaacccattaccatttgagacaaagcatgagctatctcatttgaatctctccttatcttatgtagtgtcaaacactacatggccgctttaatttctgaaatta

SEQ ID NO: 16432 - DNA, 189 bp, Oryza sativa
agcttaagctctccaggacgtctgcatttactcatggaagacgacaagatccccacatccacaatggttataaacaatcctgggtggcaattattaatcactcatgtcattcaactagattgagaaataaaagaaagaaaaaagggggtccgtactgttgtactatattcctgagtgggggacgggagg

SEQ ID NO: 16433 - DNA, 419 bp, Oryza sativa
tttcagttcagatgaggatatgaattttcttcttgtagtttcacagcactcattcatatatctgcgttcttctgaatgcagaatatgatgtgtcaaactcaggccctgaatgacagaatagtatatatatgtatattagttcttacatctagagacacaccagataggctttaactctttatcttaaaaagataggcctttaactcttgaatcatgattattgatatgtacatgattccttctgaataatcatgaaattcaataaccacttggttctgtattaccatcactgtatatttcccaccttggcatccttgtacagctgatcaatgcactcctgcattaaaaaaatgtgctaccattatccacatgcttagtcttataaagatcaccacaataatgtcatgaagaacttcatt

SEQ ID NO: 16434 - DNA, 438 bp, Oryza sativa
  unsure (1)..(438): unsure at all n locations
agcttatccttccaatctgctcgcagggtgttcgagcttgaaatcaagcccatactccctcatgcagagtcatgcagtgagacaatataatacacatgctcacatgcgacgccggattaataatttttcgatcgttaattattttctccttaattcctagctccaaagtcagcgagcctcgcatgctagctgagctgttcttgcatgtgttcttcccgcgctgtccgcgcagacaaaaaccctgcaaatttcttccggattccgaccactagtctgtcactagctagctctctgtccatctgatcgattcggatttgtgctataaatggacgtgcaatggagagcttagccattcagacaacggtagtggagtgtgtgagtagctgaggaggtcgaccatggcggcggctanggttgcgatgtgggtggcgtgcgtgt

SEQ ID NO: 16435 - DNA, 270 bp, Oryza sativa
ccatgacaaagatcctattttgactaattattagtgcccataaatggatctcaatttttctgacctactggaagtggtactgattaatcggagttgccaattatgtgatatgaatcttgcaagcttagtaggagtttctggaataagagaagtgggccttggaatttattgaaatattgtgctcaataatattattgacagtcactgacgcgcgggaccaatagaaatgatttgtggaatttttggaattacgaattgattcatgggaca

SEQ ID NO: 16436 - DNA, 440 bp, Oryza sativa
agcttcttgtcttgagctcttctgaactctcgattccatcctcattagctggctcatccataggtataacatttctggtttcagtactgctttcttgaggtacttgagaattgttttcaaatgcttcatccttgtgccacaggctgctcttttcgatgccacagtgccaaagcaatgcccagattagagtaatgaactcgcctccagactcgagattattcttatgatctgatgcattccagcttggggcgatgtgcacaagtaaatcagcccaaacctcagctaggatcttccaacaggcttcatcatccttcattccgatcaggtccttggctagagtaacaccttgctgcagtatgttcattttcaatttctcatctacactgcttggtgttgcttgcagtgcaattcccatgagtttgttatatctacaccatttc

SEQ ID NO: 16437 - DNA, 407 bp, Oryza sativa
  unsure (1)..(407): unsure at all n locations
tcgtgaagaccctaagcaaggcaagccacctttgaacatattgagcctatatttgaacttaattaatttgcttgcaaaatattatgcattgataggattgcacttaatctgtttgccccgtctgcaaggcagaccggtgggcctacccaacttgttgcatctgatccttccattgttaattgttatatcatgttcccttgtaaccatctagttgcgcctcgatatttgtgcactctgtgcgagtatcgacggtcgccttcaaacttaaaatctaagtaacttcttgggtaaaacttggtttacaaaagctttggaaaacccgacgcctgngtcggtgccttatgaaagaaaatgagttttaaaaataaaactcgcgacacaaggccattcctaggcggaatacttgt

SEQ ID NO: 16438 - DNA, 423 bp, Oryza sativa
  unsure (1)..(423): unsure at all n locations
tatacccctgttccatgtgcttgtgaagcttcagttgcagtcagcattaaggggctagtatcatccaagttcagtggcaaagtaactgcttggacttctggagacgatgaaaacaagatcattctatatgacagtgaagtgaaaggcactaacagagcacttggacctggtggatcaatcgatttgactcgtcgttttgtcgctgtgaaactggatgatacactggtgctcaatgtctctgtttctgagggcgaccaccatgaagaagctgaattgtttgagctcgttgtaggtcacgatgatgatgaagaagaatgtattcgtcagcaaggtccttatgagctgcaggtgaaggttgtttggacggcangcttggaggagagttggcggcgaaggtgcgtggaagttggngacaactacata

SEQ ID NO: 16439 - DNA, 325 bp, Oryza sativa
aacaattttccaatgggtatatgacaggaaatgacaaatgtccaaatgtacagtacatcagtaagtcaaaggaaaaaaaataatttgggccatgctcagtttgtcaatatttactgaatttgaagctcggatgtatgaccattttttctttccacgaacctatttaacctcacaactgagaccgcccaaccatcacctgaattttgcgggacctaagctaaagcttaatgattcaaaaataactttaattacaataagacgctactttttctggatgtatagaaacaatacccataaggtcgaaaattccttgaagccagattct

SEQ ID NO: 16440 - DNA, 456 bp, Oryza sativa
  unsure (1)..(456): unsure at all n locations
agctnggatgatggngattgtgtgatcttcatgcatggattgatcttgggctattggatgggatttggggaggagaagtgagatgagagctcagcttgaggaagaaaagaaagaacaagcagtgaagatgaaaggtgaggaagaagaaggggttttctctgcccccttaagtcctgaggtgggagcacgcccatgggtgtgttgtggggctaaagaggcacccaaggtcagtgacaagtgggcccaagtcgtggctgttaatgagggtgagagaggtgggtgaaaaactgagtacagattcgtttttgcaatttccaggatttattttctttccctctcttggtaaattcaatttgactaggtaaaactagttcanaaattaagggatttggtgtggtgataggtgttggtttctaggttccatttttcanagtttcactcanaaattcgaaatat

SEQ ID NO: 16441 - DNA, 437 bp, Oryza sativa
acactactagaaactcaagcttcttcttgaacacccacttgcaccccacagggttacacccatatgttcgctctgtcacctcccaagacccgttagcgataatggaatccatttcactacggacagcctccttccagtagtctgcatcaggagatgcatatgcttctgaaattgacttaggagtgtcatccacgacgtacatagtgaaatcatcaccaaaagacttagccgtcctttgtctcttactccttcgaggagcttcactgacatgctcctcagagacaagttcatgtgtatgttcagtttgttctggtggtgtgattgaactgggaattatttcagagggttggttcgaaccactatgggcatacttcattgggaaagagcttttggagaaggtatcatcacgagactccataattgtaccaacatgcatg

SEQ ID NO: 16442 - DNA, 433 bp, Oryza sativa
  unsure (1)..(433): unsure at all n locations
atacaaatgctaaattagtagtaattaccttgaccacaacgtactctgcatgcactaactctgctggccatgcatcgaacacatggctcagccactaattaaccaactcaactaactcatgcaagcacatgcatcatagctgaccaagtaatacatctcctacatgcatgtcgtacatgattccgtacatacaaacttgttcacactaataatatcacacttgcatgacaatgtttccaacagaatttaacataaataggttatggatgaactgcttcacggtaaatttctgaattcagtttttcagagatcaactgtgccttttgggtttcaatatcagttntgcgaatcacccataggaatctggagttgaatntctctattgaggatttcaataggatgttaaacccatatggttnttatttcgaattga

SEQ ID NO: 16443 - DNA, 420 bp, Oryza sativa
tattaaaagtatattaaaagtatattgtttaatagtttgtaaaatatgcacgtcgaaaacgaaagataggagatcggaacttgcccaaataattaaaacggtttttacatggggtgagttagttaattaattaattactgcatgcgcgcctttttgctggtgctgttagaaaaaaataaataataaaacgataagtcctgcagctgcaccatgcacgtaaggccacacgattggttgagtcggacaggctcacacaggcacggtcctggtctggattcaaagcagagagagaacagggtacgttgttgcatcgtggttttaagctggtagtacaccgtagtactcctactcagggcgccatggtgtttttgctggtcctcatcagtcagcacttaactctagtagactctactactgctc

SEQ ID NO: 16444 - DNA, 454 bp, Oryza sativa
  unsure (1)..(454): unsure at all n locations
agcttcatgtggtgggatccccataagtttatttctctatgctgntggatgaaaattatcatccatgcagtgttcaagactccttaaatgtaacccatccaagtctcatctaactgtatgcattctgagttcccatgatagcatcttgggttcatattagatggagcatgagcaccaaaaacaaattagaaatagtcaatatacccctgccagttgtagattcaaatttgaatctgctcctttttttaatatatatagacctttttaaataatttgaaaccgctacgaagttcttctttctgaaatataccatcaacgcgttcctctgttcaagatataccacactgggccaagactaaattggcccttcttacaccctctctccttagtcctgacaaccttgtacaaacggccccatgcacttgacgtcacccttgccctccttatacgctct

SEQ ID NO: 16445 - DNA, 313 bp, Oryza sativa
  unsure (1)..(313): unsure at all n locations
ntgccacacaacactacccttggaatcagtgatgacaagattgcctgtatcaagtagagcaactcgagaatcctgtcctagcattgtcttgctatcccacacaacgaagcccttctcatcgctgaggactaagctaccctcctgagtaaaggatagctnggagccatgaccattcactggtgattctgagtttgctgcccaaacaacggttttttcgactgtattggtgaaccagatggagagggagaaggcgttgctacctgtttcgtataaaccaaaggagaaagtcttgttgggtgagatgagataatgc

SEQ ID NO: 16446 - DNA, 408 bp, Oryza sativa
  unsure (1)..(408): unsure at all n locations
agcttctttatagctattgtgctatatcactcatcatattttacaaagcagttggtatatcactcggatcatgttatttggaggattcacaccgcatatgctatatattgatatcaagtcacttggttgattacgattatcaaaaccactcggttggttggattatttattccttgactatatgcttggtttgttcaattaaccacattgtcggnggctacacctattaggngcatctagtcngngcacccgactntattttncagcccttcccngncttcncanttggtnnnnnncctcnnnnaaccatgncccnacgaaagaaccactcccctctgganaatctgcgtcgcggaagaaancntttcactgccaaggctcangggctactgtggaattatgggaccc

SEQ ID NO: 16447 - DNA, 427 bp, Oryza sativa
tcaattccgacctctgattaagtttgtatattgcatgggtgagtaccaaccgtactcagcaagccactacaacaacaatgcacatgatagggggtattcaagggatggctatggttttttgtgcaaagcaagttttgtaattcttttcacaagcctaagacctagcatagactgatcaaattttagtaccagtgttcatattaaacaacgacggttctgtccaccatccattgtgatcccaaggatagcttcccgccattgagtcgtcatggttttctgaggacgaccaccttccctcctctcaggaagtggctccatcagcataaaatcatcatgcaatattccaccccacacaagttaagaatttagagtctagccaagtgtaatacatgtcccggtgctcaataaccgcgagcacagctattcg

SEQ ID NO: 16448 - DNA, 436 bp, Oryza sativa
  unsure (1)..(436): unsure at all n locations
agctnttgtgtagcctaagcctgcatatatataattctgatgaatgtgcctggtacaagattagttggctcctgtgctagtaaatttaactcccaacactgtttcatttatgtgatgtggaaaaaaaaaataaaacaagataatcaataatgctaggagcaaagcatgttgccggtaattaccagcacagtcagcaactcagcaagccggccgatttcaaattacaggaacaatttgctttctcaagtggagggagaagaaaggcatcatgtgaggtgtttcactcacaccttattccattacccatagaagaaatgaagcaagaaccgaagtgatggcaattctcccgtggacaaatcaatcataaggagattgtgagggaagaacacatggcatgaacaaaagtgcctgtggatgctaatgttgactctgataa

SEQ ID NO: 16449 - DNA, 416 bp, Oryza sativa
  unsure (1)..(416): unsure at all n locations
ntctgcaggctatctcgtttggatgtgttgtccagtatatgcctcaccgatgcattgagcattgcagttgttgcatcaggtgcaaacacccgggaacaagttgagcactcagtagtcagcactctcctatttgctccaactccaaagctccggaagcataatgcccttcatctgctgctccatttcattgagctccataactggcacgatgtgtactggagacatttgcagtacatcacaggctcacagatcggcacaaacatactggacttatctatcatggttacaatttttgtcgctatgtccgcgccaaaaagtcattaactgcaagtgaggcatcaccatgtgcgacggcattctctggctctggcatgtaaagtgtagtagtagaagcctgccaagcaaagaaaggcacg

SEQ ID NO: 16450 - DNA, 452 bp, Oryza sativa
agcttgctactcgatcatggccagcaccaggtcctcttcaccagcagcgctaagagcatcggccttggagatgcggcacctggaccagctgctactgcggcgatgcggtcggagtcagagacgggatgcggtcgcacgtgtggtgacgcggcggccgcgctccatcggcagcagatggcgcggaggcggaagaatgtgtccggcgggaggcgtgccaggacgcgctccagcacgccgtcgtggaggtccccagcccacgcgtcggcgggctcctgcgcttcctgctaattctcaccgccatggaggaggaagctctttttttttgttacgatttggtttggtttggatctgaatccgttgttatatgtgtgttgatttacgattgtaccctcgttatatgtgagttctaccgataagaatgaggggtaagtcggtccaaaccacccggtccg

SEQ ID NO: 16451 - DNA, 426 bp, Oryza sativa
actcaagcttcttattgagttgtgcttgttgcttgggaaatgtccgaaggtatgttgtgttctgatagaatcttactatgctgtagtgttttttagtattatagtaataatagcattctttcttgagatgccttttgtctcaatgatctaagcaaaggtggtgaaccactattactggcaggatgtgtgattttattgtgtcatgtatttgtttggcttttatacatattgatgacattgagccgttttgttcttcagagtgctatgatcttaccatcagcatatagtggcactgtagaaattgttgataagtatttgattaataccgcaggtttgagcatcgggaagagaacaggaaagattgcttgaggacattgtatgctgtagtagaagatgcaaacaaggccaataagttggctgatgatg

SEQ ID NO: 16452 - DNA, 445 bp, Oryza sativa
  unsure (1)..(445): unsure at all n locations
agctnngggactntgggctcgcacggcttgtagaccatgaccgaggctcacaaactacagtgatagctgggaccatgggttacatggctccagagtgtgtcactactgggaaagcaagcaaagagactgatgtctacagctttggcattcttgctctggagatagcttgtggaaggaggcccgttgtgccaaaggaagataatgacaggatcagtttggttcaatgggtttgggatctttatggaagaaatgagatacttaatgcaattgatggaaggcttgatggtgaatttgaagagcgggaagttatttccttgatggttgttggactttggtgtgcacacccagattataatatccggccttcaattcgccaggtcataagcgtactgaagtttgaagcaccattaccagaccttccaccaaagatgccagtggcaatgta

SEQ ID NO: 16453 - DNA, 418 bp, Oryza sativa
tgcttttacagaactcatggacttctttacttatatcgtataattcgcaggaatatttcgcgaaatggggagagcaaggcacggtggatctgaaacgcgagctcgacctcctcatcctgacgatcgcgagccgcgtcctcctcggcaaggaggttagggagaccatgttcgccgacgtcgtggcatccttccacgagctcatggacaacagcatgcacctcatcagcctctgcttccccaacctcccgatcccgcggcaccgccggcgcgacacggcgtccgctaggctcaaggagctcttctcccgtgccatccagcttcgccgcggctccggccgcgccgaggacgacgtgctccagcggttcttggagtccaggtacagggacggccgcgccatgtccgacaacgagatcaccgg

SEQ ID NO: 16454 - DNA, 447 bp, Oryza sativa
agcttatatgcgcctgattgttgaaacgtagcatttgctacatgcttcgaaaaatatattctctaaaaaaatgtcctaatgcattgcttagaccacttgttttaaattatttattaagtttatttatcaaaatatttaatttatttttctgggtcgataaaaataacatccaaaatcttattaagaaagaggtgaaaatttaattcatccatataattaaatagatatttcaccgcaaaaatcaattcacgccgtgtttagttacaaagtttttcttcaaacttccaacttttccatcacatcaaaactttcctacacacacaaacttccaacttttccgtcagatcgttccaatttcaaccaaacttttaattttgatgtgaactaaacacagcctcaataatccatttcaaaacagagcctctgaaccaaaaaataaacatccat

SEQ ID NO: 16455 - DNA, 416 bp, Oryza sativa
  unsure (1)..(416): unsure at all n locations
ttattataacattggcggaggtctcaaactactatcatcgtggacaaaccctagattggaggaaaccctggaaagacaaggtatatgcaggcggaagtatatataaaagcataatgacaactataaatccacaagctatgtttgggaactaggcttgaaaccctaagaaatcgtactcggcctgctcttgaaagtaggctntgacaaaagggtcaaggtatccttcctctaactctataatataaatataaaaaatagtgagtactcaatgtactcagcaagccaggaaaaaatatgacatgcaaggctaaaacaaggagtggaacggtttcatttggaaaacccaagatgtttaaatgatttagttgcaaacttctagtgtgtcaagttttagttacgaagtaaggctcacgcct

SEQ ID NO: 16456 - DNA, 450 bp, Oryza sativa
  unsure (1)..(450): unsure at all n locations
agcttatgtgcagtttctggtgtgtcattttattctaaaacaaaaaggatgtatttatttaaatccaccttgtcactggaacaatcatcgaaacttgtacacaccaaattcatactatttgggcaaaatcttttggtatggcaaaaccttagttgactgcattgtgttacgtttcattcaatattttctgttttcagaagtgtgcngcncanaaagattagcagatttaggttctttntgacaangnggggtcttttcnnagacacttcaaaaatctcattggataagtaaagattcaaccaaccaagttacacangggcaatctgactttagtttctttccatgaagctttcttgttgatgatgatatgactgngatgttngtacttnncgttccttggtgatgatgatgacttacatatttctgttgttgtgaggtcatatttaaaaa

SEQ ID NO: 16457 - DNA, 424 bp, Oryza sativa
ggttggctattccgattcggattatgccggttgcatagtggatagaaagaacacatccggtagttgccaaatgcttggtagatcccttgtgtcatggtcatccaagaaacaaacctccgtagccctctctaccgccgaggcggaatatgtttcggcgggtagttgttgtgcccaattgctttggatgaaacaaaccttgttggactatagcatatccttcaccaaaaccccactcctatgtgacaatgatagtgccataaagatagccaataactcggtccaacattctagaaccaagcatattgacattcgccaccacttcctaagagaccatgttgccaagagtgacatagtcattagccacataagaaccaaggaccaactagccgacatctttaccatgccttttgatgaaacccgcttt

SEQ ID NO: 16458 - DNA, 443 bp, Oryza sativa
  unsure (1)..(443): unsure at all n locations
agcttgaagaagactgtttgaacttaggcttgtggcgantntcttgacagttntacccatggttaaactcgaaaactatagaaagttcgagtagaaagagaaagtggtcaaagaacgagataaaactggagcacgtgaggctctctgatagtgaccaacaatgttttatataggcgcgaggtggagggagcacgcgcagatgagggggcacaaaaaacgaaaaggcacgactcaaatgccaaaatgagtaaagggattagctcccgtctatccccctatttgtccgtgaccttgggtcacgacaacaataattagaaaaataatagttaattaatcaattactaatgatactaattattaatcgtgtaagttcgcttgtcgggagcgcgatgcagcggatccactgtttggtttttattagggcaaatttgctacatgacatc

SEQ ID NO: 16459 - DNA, 404 bp, Oryza sativa
tcccaaacagaccataaatctctcctctacccctttactctcccctctcttggaccctgcctcctatctcctctgccctctcccaccacctgacactagcagaatattttggttccatgatttcggtttaatatatagttaaaatattggattttggttttctgattaattttaccaccactagagtatatggttcaatgcagaaccatcgacaagctcgtgctggctgagtgaccgaataggacccaaaaaaaattaggggccccattttttctaattttaatctatcttaatgtgttccaacatgtttaaagctctttggttctatttttaaaaggcaaattttgctataggacataacgacttactgttttagctgtaggacaccgcacgaagtgagtatt

SEQ ID NO: 16460 - DNA, 438 bp, Oryza sativa
agcttcaacgttgcggtcgatctgagttgtaaaacatctctggatcatgcgttgataagtttctcctgcgttctttaatccaaaaggcatggtgatgtagcagtaggccccgaagggcgtgatgaatgaagtctttaagcagtcggattcccttagttggatctgatgatatcctgagtagcaatccaaaaaaccgagtagctcgcagccggccgttgagtcaactacctggtcgatgcgaggtaacccaaaggggtctttgggacaagacttgttgaggtcggtgtaatcaacacacatgcgccattgccccatcttcttccgaaccacgactgggttggccagccagtcgggatgaaggacttccttgatgaagcctgctgctaacagcttggtcaattcatccttgatcgcatcattcctatcctgtgcaaaacg

SEQ ID NO: 16461 - DNA, 403 bp, Oryza sativa
tgcaggatgatgcgaccagactgttcgaaagcttgttaccgtaaaggaactgctctaatgttactgaaggtgggacaaaatgttcaaatcatcttttgaacatttttttttggtgtggtatttcaaacattttctgagagatcattttttatgttccgatatttatgcattcaggactacaaaaaggcatgcaactcatttctgttggataagtctttgtggtccttggacgtgattcttctttttgcttttgggtagtttcacctttttcaggacagcatctaccctttagcatatttttcaattgctaggacaactgcggttagtaggacagcagcagctagcatctcctatatgcctcctttatgctttattcaggttggatgccctctatgacagcatc

SEQ ID NO: 16462 - DNA, 459 bp, Oryza sativa
  unsure (1)..(459): unsure at all n locations
agcttataaagcatgactccagccattagcgtgactacctcgaaaagtggtacgactataagcttgcttttactatagtaataggccctagcccagtctacttgacttgagaacttctctatccttcttctctgccaagcctagcttgccctatgggaataagaaaaccttgccttatcagtctctcgtgccaaaagagaaagctgtccttccctggaaaatcgagttcttttttgtttcgtagtagtagaattgctagaaaatataagatttcgttgtagaatcctaaaataaagtaagtactttntttaagtacataccaatctagttctggacctctacatatcanagtcaattntattntttttttcaagatatttaatgcaatgaaaaattaaagaacgattctccacagagatatgtacataagggggatccatagataataatgctgttcgg

SEQ ID NO: 16463 - DNA, 416 bp, Oryza sativa
atgctcgggatggactgactccatatgcgcgaaagaactgagatcttcatttaaagccccccaatttcatcgacccttacttaatgactggtgatggcgatttatgcttttattgcctcccagacttatcattcttacttaagcttaagatcgggacagaatagttgggcactggcattctcacaggctattgtaagaggagagaatcgcacctttgataaaaacagtctttaaaagttaaaataccctcctatgattggctttaccttttagaaagaatcctcctagggttgccgaatctgtataaaactagtgtgcaggaaaagcatataaagccttggtttcccgtagtgagactgcttccgttggagaaataaacccttgccactagtataacaaggtgttcttgttcggat

SEQ ID NO: 16464 - DNA, 441 bp, Oryza sativa
  unsure (1)..(441): unsure at all n locations
caatcaaaattcatgatttcatacgatttataatgcaacattntaacaagcacataggttgaagaataaacactaaacacatagacctattgcatttatcactctntctcaaataacctttagcacaaaataaccttttttcttgagcctttttgctcatatttttctcttttattccgggtacatccctgtcgtcaagactgtttccagggattcggcactcattattttgctcacatcgaatacgtccttgtcgtcaagactgtttccaaggattcggtattcatttttttatatttttattctctttttcacaatgagcaattaaaggtatttgaggaataacaaatcaataaagcatatatatagagcatttataaatcaaaccatatgcgagcatcaacattgcatatttgcttaattcaagtatagaatttaagt

SEQ ID NO: 16465 - DNA, 376 bp, Oryza sativa
  unsure (1)..(376): unsure at all n locations
tactaagagctatgcgactgtttcgggttctaccctccataccgagttggggtagggagtatactggagcttggtcccttagcataacctnntcgcctacgtnnggaagtgagaaaaagtgcttggatgagagtaggcgaacgcgcgacgcttcgacatgacgactccctggttacacaataactgagaattgtcatgatacctgatgagtggtgtatagctgttttttcttttttgacaatagatttctatgtggaatacagcggcattgttcatcgctgaaaatgtatatatatagtacaattctctgcttgacttgcatcatagaatacacgggttttgttaggtctcaaaagaaacgctgtgtcaacactat

SEQ ID NO: 16466 - DNA, 463 bp, Oryza sativa
  unsure (1)..(463): unsure at all n locations
aagcacctgagctgcaagctgttaggagaaataataacagagctagtatgatntagtcacctatatgaaattaattaaccaatgttatatcaggtggaataattcggttgacatccatcaactaacccaacagaaccatctagagcacatctactgtacgacttgtattaggaaactgatgtacagtatattgataacctaccttttgcatatattaaactgaggtgtatatgatgaacatgtatagtagattagcgaaatgtgtatcccatttatactatgatggttagctcctaaataagccaccatgacaataagaatgattaagagattatccgttagcaaacacgagtatgaacagccctaggttcaacccccaacaattatattttggttgcgcatttgattgttggttgaatattggtttttctcgcgtattatagaatntatatatcggatagtc

SEQ ID NO: 16467 - DNA, 398 bp, Oryza sativa
taggcattaggaaggtgacagtgaaccacacgatgtagcctgacttctcacaacttaaacacaatttattcaactggtactgaaaatgaaattaaatgatacaaaaacgtcacaaagttagattttcgacattatccgagtaagtacgaaggacatctcaaatataattaagttgcacggcagcatcgatcaccttatccggatcttccaaagctgcacgagcagtttggggagttcccgggtggcctggtcctgatcagcgggtttctcttaaacaagttgatatggccggagctcgaatgcaccactaatcattggcatcacaggaaagtcctcctggtacggaacatggtgcacgtccaccgtgtaccataggaacaagttctcttcctttctct

SEQ ID NO: 16468 - DNA, 318 bp, Oryza sativa
gatggctctgtatcatgtgagagtgctcggagcataactaattcggcacaattgaccgaaagcacataagatagccaacctcatgctactgccagaaagcctgctcaaagatcagacacacaaattgcttctcaagcatctgccactgcaaagaccgagacagaaccccttgtgacaaagcagactacctcaaacacaaaaccaaaagctccaagagccaaggtagagcaatcgcaagacaactcggttgaaatacctcctgctgaaccttctggcccataggggctcactgttgaacatggtgttgaggatgcaaca

SEQ ID NO: 16469 - DNA, 415 bp, Oryza sativa
tgcctgttatgtttcttatttattatccaaagtgattgggccatcttttatgataattgcttgcgcacaggaccaccataattcatggttgtactctcactttgagacttttgacatgcatcccttatcctatatatctataaagcttatccccactaagtgtagataatgctatttctctactctcattaagccacatcacctcaattctttctagctcttagatgattgatctatggtccaaattatgctcctccttttcttctcttacgaagtcttatcaccctagatttatctttgaatgattaatctatattatctcccttacctcattgagccacatcaccttagttttgctgctggatgattaatctatatataatttaaattgctataaaccatgtcatcttaaatt

SEQ ID NO: 16470 - DNA, 468 bp, Oryza sativa
  unsure (1)..(468): unsure at all n locations
agcttagttatgatcaattagaacatgctgcnttacaaattgctaagaaatttcaaacatgttctattgtgcttgatgagaaggatcacactattgagattctaaatgctgaaattgatagattaaaatctttgattcttaatgatgatgaatgtgaatcttgtgaagttttattttctgaaaattaatgctttgcgagatgtcaattcaattaattgcaagaagttggaatttgagattgaaaaatctaaaaagttggagtcttcttttgctcttggatttgctttacatgctcgtgttgttgatgaattgattttgacaaagaatgttttgaaaaaatacaaagttgctttttgtgcaagttctttggtcaatgcttcatgtgcaaataaggcaaaacaaaacaaagatgttttgatttctcaagattgttcanagtgtattttgaatgagttgaagttgaaagat

SEQ ID NO: 16471 - DNA, 433 bp, Oryza sativa
  unsure (1)..(433): unsure at all n locations
tgggagaggcaaaagagaagacaaagatggtgagaataccaacaacaacaagcctaagggtacatcccaagggaggaagttcaaggagaaacttaggaaggcttttgatcaagtctacaccacatttgagtcatcaagtgatgtagatggtgaaagtggagatgaagataagggaaagaacatctccggtgtttgcttcatggcgcgtggtgaatcggatatagaatatgaagattatgaggtaagtgcttttgaggaagctattaatattttgagtgcaaaaaataagaagtgtgagaagatgtatagaaaacaggaatttatcattgaatctcttaattctgaaattgctagattaaaatctcttattcctaaggatgatgattgcaaaagttgtgaggttntaatgaatgagatttcaaaaattagagag

SEQ ID NO: 16472 - DNA, 449 bp, Oryza sativa
  unsure (1)..(449): unsure at all n locations
agctttgcaacgacaacaatgttcatgtgttgatgcaacggctgtgtggtagcccgatgcatctatggcggccactagtgacgacccaagggggagccattgaggccttcaacggcgatggagtgacgaccttatgtgacgctggagtacgaggtgtggaggctggctgacggtgggggtgtcagtgaacaatgactatgtgctaatagtagtttagatggttgtggggtcattggagctgaagctgtaggggtgggtaggcaggcaataggtgaaagcttagcttgaaagcgttntgggcaggcaatggcgacattttcttgtgctgaaatccctcttgagggcgttgttagagtgtggctntctttcccccagcaagaagaatctccgggttttaattgtgccaaaatccctagacaagtggcattgacgactatggcatcatgttc

SEQ ID NO: 16473 - DNA, 418 bp, Oryza sativa
  unsure (1)..(418): unsure at all n locations
ntctttctctgccacacgtgctaaaatcgtataagcaggctataagctcactattgtacctgctctaagactcgtactaccagtccaccgtaaaaggggttacaaatttaacagcaaaactaattagcacatatttatttagtgcatgttttactcaaaagtcatgttgtacgtactgatttaagactatttttttataaactcaaaatccatggctatatgcattttggatgtggaggctggctgttaggtttgcacacaaagtgtagattgttggtcacaagtatgtagcatgattcagctagaaattaattgagtgtatcacatatatatatgggtccttagttatactagcaatgcaacatgtatagcttcatcaaatttcaacaaaccaaccaaaaaccgggatattaaattg

SEQ ID NO: 16474 - DNA, 448 bp, Oryza sativa
agcttaccaaagattggtgagacgtttgatctatctttgccatataagacatgatatctcctatgcggttagtgttgtgagtaggtatatgcatgatcctcgaactggtcacttggatgttgttcataggattcttagatatctgaaagggactcctggaaaggggttgtggttcaggaagaatggacacttaaacatggaaggatattgtgatgctgattgggcgagtagtatggatgatagaaggtctacatcaaggtattgtgtgtttgttggtggtaatcttgtttcttagcaaagcaagaagcaagcagtggtggctcagtctaccgcagaagtagaatacagagtaatggctttgggcttgagtgagatgctgtggatgaggagtttgttgtttgaactccgagtgttaagaagtgatactatgatgcttcattgtgacaat

SEQ ID NO: 16475 - DNA, 415 bp, Oryza sativa
tgaccaaatttaaagaaatttgattatctcaaaatgatatataatataaaatggatggagtaattagcatatgtttttaacttgggtttattcacggcatctgttggaaaatgcgttagaaactacgtgcgtactcctccagttgcgctagctggttcaaataatgagattctctgatactgatgtgtgtgtagacttttttttcttttttgacaaaaaatttctatgtggtatacagtggcattgttcatcgttgaaaatgtatatatatagtacaattttctgtttgacttggatcattgaataaacgggttttgttaggtctcaaaagaaacgctgagtcaacactataagaacggcgtttagggttgtcctacaattgattttgggagtggctttcaaacatgtatcataa

SEQ ID NO: 16476 - DNA, 448 bp, Oryza sativa
  unsure (1)..(448): unsure at all n locations
agcttacaaacggatcttcttggtacgcatttcaacttactactgtatctgtataacttacttgcatttgtgccttgagtcctttaccatcgattgattgacgacacctgttgcatgcatgtaggctgagattggtcggcatgtggtgggtgatagggaatgggaggtttacagggtgcaccttggtgagggagatcattcttcattgcggagcaagattgttgatggagtcaccaacatgctcatgggctgggacgacactcctccatcctaatcctactagtagtagttctagttagttnttttatggaacacacgtcctttgccttgtacatagttggtagtggctgctgtaaattgtgtgccttgttaagtcgttcgtggtagaatgcgttggcagtagctagctttgactaatcaatcagcagctaatttcagtctgtttagt

SEQ ID NO: 16477 - DNA, 413 bp, Oryza sativa
tcgccttcgccttccacctgaagtggtgtcagattgactggaccgaagatgcagcgctgtagtccccacagtgaacctaagcccctcgctgaggcttaatcagtgtctgttatagatcattgtagttgtagttgagtaaccccaactttgtaactccactctagtaagttaaaacaatgtactaagctcgattgccaattgtactagtagcactatatgtattgtcgtatggactgggatgtcgcagttactgcttgtacagtggagctgcgtaactttaacccattactacagctttatgccgccgattttattaggtccctttgtgttctgtattgaaatgatgccatccttcctgcctgctactcacaccctctccatgtttgttctggtcatagggaggcagccagcag

SEQ ID NO: 16478 - DNA, 395 bp, Oryza sativa
  unsure (1)..(395): unsure at all n locations
agcttgcaggcaaggggatatatgaggagtacatgcttgagcctcttgtgtgtttgcatgctntgtcccatacgtggtgtcctactactagcaaacacaaacaggagtagtagtagtagtttgcttgtttggttttctttgggcttgtttctctgcaattgctttgcatggtgtagttcctcttccattccctgcatctgcatttaatcagcacaaatgagggcacactaaatttagtactccctccgtctctatgtttgacgccattgactttttaaatatatttgaccattcgtcttattaaaaaattcaagtaattattagttcttttcctatcatttgattcattggtaaatatacttttatgtatacgtatactccctccatccctaaat

SEQ ID NO: 16479 - DNA, 419 bp, Oryza sativa
  unsure (1)..(419): unsure at all n locations
taacatcgactcttagcctctataaattaataattttctgcatgagggtggggaaaagaaagaagagtaataaaaaaaactatttaggagggttaatggttagagcctctgttgcctcaactcttgtaagggggcagtttctaaatgacatgtttgcataagagcccataccgggctctacctttgagcatgacctaagaagcacaaaacaagcattgagatcatgatcggcacagctaacaagcaactgaagtctgaagattaaacacaaaaactaacggtattttgcaaagcatattttcacgcgtcccttcattataaaaatgtattatttaccccccaacccccaccatacccctttcaaatataaccataaggagaaacagaaaactaacaatcactntgcaaagcagtacata

SEQ ID NO: 16480 - DNA, 407 bp, Oryza sativa
  unsure (1)..(407): unsure at all n locations
tatgccattntcaatccaatcgtggattttatgcctgtcatacctgtactcttttttctattagcctttgtttggcaagctgctgtaagttttcgatgaaatctttactactctgtctgccaaattgaatcatgtattcattctaaaaaaattcgaaaaatggataagagccgagaagtcttatattatgaaccttcgattctaaaattcaaattcttctacattgaatgtatagctgcagcaataaatttggatcagcctttctactccctgcatctacgttgagcaggtatctttaggtaaccgcacaatacctaacctaatttattgataagagtgcttattataaatcaattcttgcaatttttttcaaaaattgatttttgcatttttaggtgtcaaaataa

SEQ ID NO: 16481 - DNA, 439 bp, Oryza sativa
  unsure (1)..(439): unsure at all n locations
agcttgtagttgatggccatgtgggcgcggaagctggccaccgtgctgaagaagcgcatcctgcgcagccgcccgttcttccccgcgcgcggcggcgggttggcgaagaagtagcggtggccggcgtccgacagcaccgcgtacggcgccgggttgctcagcgacgacgtcacgtggtagatggtctgcgcctgttccccggagtgcgccgccattgccaccatcatcgcgttcaccaccatgtcccccggtatctgcatgtcccaggcacagtcagtatacagcgccattgctaacctcgatggaggttaatcatttcagactgttgaattaattaatgttggttgtcactaaagggcttaatatnttggtttgcaatttcgttaatttcgggtatttcgatccagcgacagggaagttattgagtcanaaaatacat

SEQ ID NO: 16482 - DNA, 407 bp, Oryza sativa
tgagctgaattataagaggctctattgtactatattgtatactagaataggaagagagtagagtagaagaagtcggaagaattccggagttgtcggtaatcttctcctatttcttttattctgtttattactctgaattcaatataatattctttttgagtaatttagatttatcttgtgagaattatctcttgttagttcctaaatagcatacgggattattgttcactataatcaacttaaatatagtgattgctttggtgagttataaacactaaagtagatattaattgcttagacatggtgtttaggtaattgttatccagtaattgctgcgtatcgcacagtacgtttgaggtagatgtagaggtggtgacagccctcgcgatcacttaagtcctccctgt

SEQ ID NO: 16483 - DNA, 445 bp, Oryza sativa
  unsure (1)..(445): unsure at all n locations
gctggtctatatatntatntggtccggtggcccatgtatctctaaagnagttgtaaattttaattgctttcatcttattgtgtttgctatgtatgtccatgcttaagatgaaagtgtgaatctagtgcatatcctggaactagattcacatgagtatgagttaagaatatttgagatgttgtagatctttagccatttttgtcaagtctcctgaatgtgtaacatatctggtcatcgccttcaagtggtttgacgggcacatctcaggctaaagttgattggcaggctaaaggcccagcaatgtctccaatattctcctctcgaggcgtcggatgtttcattatgtntgtttgatgacttgaattattcacttcatccctcaactataatgaaaggtccggagagcctgcgacacgaggcatcggcgttggggagttgtggagat

SEQ ID NO: 16484 - DNA, 424 bp, Oryza sativa
tgattacgagcagtcaatgtttgctaagaggatgtgcttacatatcgatcgctgaagcagatgatagctctggcgacgatgtcttcagtgctcctcttctgaccatggaaggctcctgctgctgcttcgtctgcatgcatcagaattcagaaaaacgcaaacaaaaatcgatttcagtttcagatatgacaccaaaagagcagcaacagcatagtgtaaacctgatttgcagcaagtgatcgaccagctgcagacgcacgccatcatgagcaagaagctcctgtgccaacaccaggtcatggagacccaagccattatcgttcttgtcaattacttttcacaacttctcatgctcgttcttatgtgccataggacaggaggaagaaatgctagcgtagatagatagcaccagcctgattgtctg

SEQ ID NO: 16485 - DNA, 447 bp, Oryza sativa
  unsure (1)..(447): unsure at all n locations
ctcagctaaaccttggattggtntgattgctagatcatatccttggaaaacacgattccgaggatgtttcatggngaagcagaagagccagcggacggcgaggcttccgctggaaagaagcgaggaatcgcgcgccgcaattccgaggaggtttcactgggatgtagaggagctggcggatgatgctcgcgccggtggaaggaagcgaggaatcacgcgctttctaggaggatttgccatgatgcggagaagccggcggacggtgcgcgtgccagcgggaggaagcaaggaatcgcgcgcgaaggcgcgcgcttccgaggaggtttcgctgagatgtanggaagccggcgtttggcgagcgcttgtcgtcgttcacgttntgctgcaatgcacgcaggtggcggacgacagttgctgagagcgatgtgatattggtaccagaatcgt

SEQ ID NO: 16486 - DNA, 424 bp, Oryza sativa
tgtgaagaagagagaagaaagaagatgatgacgtcgtcatcccctggtggtttcccacggccgcacccgacggcgggggcagtggcggcggcggcagaacaaccagcttggagttgagaaagtcgtagcgtgtaggccgggcaggtggctgcgccaatggtgacgacattggcggggacagaggcatcacgaggatcgtcgggccggtcatccctccgagcaaggggaggtggagtagcaacgaggaggaggtggacacccgaagggaggaaagcagtggggaggtggagtagcaacgaggagggctaggacgcagccagttgatgccggcagaggagccactcggcgccgaagcaccagcagaggaagacaagggattcgctgctgcctctgacccctttgccgccgggaactgaataagaga

SEQ ID NO: 16487 - DNA, 445 bp, Oryza sativa
  unsure (1)..(445): unsure at all n locations
aatgctacacttgcattctttgtccgtcatattnttctgctgatataatatcttatatcataatgcctcagcattacattgattctgatttcttaaacattctctcaaagttaatgccgttttttcttttgttgtttttcatgttgtaactgggattattatgtaaatcacgcgtctactgatcagaggggaagattgatgatgacaacagaaagactgaatcagtccaatgataagattaaagagagccgaagaaccatattggagacagaagaacttggtgtgtcaattcttcaggatcttcatcaacaacggcagtcactgctgcacgctcatactactgtacgtattctgtcatagaccttttacacatttattggatttgccttcctattaatgtcatattcattcgtcttctgggcatgtcttatgtttattatttgaa

SEQ ID NO: 16488 - DNA, 423 bp, Oryza sativa
tcctctcttcaggtcaggcctcaggtagttgatccatctcagcctgcagctcttgccacatctctgcaaccctgcatgccatcaacaatacatggataacacgttcaccgatcgatgccataaacccaagtaaactgactgaactgaactactaagctagtctgaagaaactctgaactgaaactctgaactttgatctgcgactgaaaaaactatgtaaacgtaataaagcacttaccggctagcctggggacggagctccagcagccatggccgtgcgtggagatgtacttgacgagcttctcgtcttcctctggtgaccacaggcccctcctgaccttctgcttgttgcagcaggagtggtgccccatctcccttgacctctcactctctcgctgtactccgtgtaggctaggctcttga

SEQ ID NO: 16489 - DNA, 453 bp, Oryza sativa
  unsure (1)..(453): unsure at all n locations
agcttncgtccaagaaaacaacagtgaagcgtagcaatctcaatccagagtggaatgaggatttcaaatttgttgtgacagaccctgaaactcaggcactggaaattaatgtctttgattgggaacaggtatggaccgcttcattaatgaaatccgctacttttttctgcattttttataccaaaaaagacatgattatttcttttgatgtatacaggttggcaagcatgagaaaatgggcatgaacaacattctgttgaaagaacttcccgcagatgagactaaagtcatgactgttaacttgcttaagacgatggatcctaatgatgtacaaaatgagaagtcccgtggtcagcttactctggaggtgacatataagcctttcaaggaagaggatatggagaaagaaggcatcgataatgctgatgtggtggagaaagctcctgatggtac

SEQ ID NO: 16490 - DNA, 423 bp, Oryza sativa
tgccaaaaaggtcgcggggtggaaaccgaagatgttatccattgatggaaggttgtgcttgatcaaatcggtacttatggcgctgccagtgcactttctgtctgtgctacaactcccacgatgggcaataaaagacattgagcgcaagtgccgaggtttcttatggaaaggacaagaagaagtcagtggaggtcactgcctggtctcttggagaaaaatttgcttgccaattaataaaagagggttgggggtgaaagacttggaacttttttggccagcccttgcggttaaaatggcccccgaggcacctggaccaaaaggacaggccctgggcttcggccggtttccttccggggagtgacgtggatgctatcttcaattcggtggcaggtttcattccagggaatggtcaagatacacggg

SEQ ID NO: 16491 - DNA, 392 bp, Oryza sativa
  unsure (1)..(392): unsure at all n locations
agcttcattgtccttggtggctggggaaatatctagaactctattctttgactacagagagtacgtctacttgtgtgatggtaacgattccttttggtccttcccacgttntgtttttaactgcgttgttagactgtattgcgtatagattgtgacaaccatcgagtttgtaatcaaagataattgattttggtggggattagtagtagtagtgtgggttggggcaaagaatgatgcatcgaaagatgatgagggtgttacgaaagcaaggttgttggcttgtccttgtacgcaacgcaaacgcaatcaagtttaatccacctggtcatctcgataacagcaaatacactactaaacgagccatgatccaaaaccaatctttntnntttttt

SEQ ID NO: 16492 - DNA, 442 bp, Oryza sativa
  unsure (1)..(442): unsure at all n locations
cacagaaactcaagcttccccgtcgccccctctcgctntttccccatctcgtcgaactccttcgtgctccccatcgctcccgcgccgtgcaaccacccgttgctgccgtttccgctactcccgccgccgctagccgccgctagggtcgccgccgcaccgcgccgtcgccaccgtcgggtttgcgaggctaagctccaccccggccaccccttccccgtccggattcatcgccggaattcgcatcccctcgtgctccggtgagttcaacctctaccgctgccttcggccataaatgccggtcgccgtggttcatctccctccctctaatctctctcttctcctttcttagggcaccccgaatcccgtccgtcggttgccgccgcctcccgtgccgccggtcgccgccgccgtcggccgcgtgcgtcgccgctagccctggccg

SEQ ID NO: 16493 - DNA, 449 bp, Oryza sativa
  unsure (1)..(449): unsure at all n locations
agctngcaagtactgacccacaatcacaatgacaatgtggctgattggctggcatgtatggtctgtttttaatattatcatgcttaattccagggaaatgataatcacattttttttaaaaaaaaaagaaaagatcaccacatttctagtagcatgttgtttgcctttcattttcatcgtccgttgcctctgcagatgatgcacacaccaaaggtcactctcatctagaagacatgcattctcttgttccattctcaaccaagcatttggttatctatgctatagagtggtcgcttatgaaagtaatgttctagctatactcaagtaattcttttttcaacatgtgcacacaaaaatcatataaatgacaagattcaagtaggtgataaagcatgtctctaccttacaaggaaggcccttntttttttcatattatcatgctagccatg

SEQ ID NO: 16494 - DNA, 415 bp, Oryza sativa
tgccaggctacgcagccaggaggatgagtagttattttggacttggtttttgcctgcagtagacttgcacatcatgaatattgttctacgtatttgtttacatcaggatccgaatattctgagagcaatttgctatctggaattatttgtgactctggcaatgtatgattgccatattactattttgagtatagcaattatgacgtgaaagaaatgtcgttgtttaatgaatgttgaaaaatatatttccatgaatgccctgtcacttttctttccttgtgcaattatttgctgttgaaagcatgactcaatgtagagtgacgcaaattaagatttatgacggttttgttactgttatgcactggagaagaagattttcaagttcagattcatgtttctgcctgccaattggaaa

SEQ ID NO: 16495 - DNA, 338 bp, Oryza sativa
agcttcagcatgggagtcctttcgtcgcatgactaaactctaccggacatgtatcgcatgagccaacacgacaccaagttaatttcgctcgctccacgatcaaaatttacttggtgggggcatctgtttgatggtattttggtgattatatgtgtacacaagacttactcatgatggacaaagcaaacaagcagtttgtaagttggctagcttatcatttctacgcaatgctcggccatgtatatacacgcaaatacatgcatgcacaggcagctgggaatatatatactgggaatatatatacttggattagtatatgtgcatgtataattaatcaa

SEQ ID NO: 16496 - DNA, 415 bp, Oryza sativa
  unsure (1)..(415): unsure at all n locations
tattntgctgttctaacatttcacgatgtttgtatttacttaccttgttgacccaaattgttgatcttacagtgtaatttggttttgtgctgtccatgtttctaggatctctcaatctcattctccagtgatggagggtatcaatttgatagccactttggacatgttggagggaaagagagtgacaggatgttgatgacagtgggatcagaagacagtgttcctgaggctagtaatacatctctgcctcgacctttttggttcacacattaattagtggaacataacatttattttggctggtgcttcatgtaggcccccgatgtctggtcccagccaagcagcggaaagttcagacaatgcattatttcgaattctcataaaagtaagttggtctgtattaataccttttggt

SEQ ID NO: 16497 - DNA, 439 bp, Oryza sativa
  unsure (1)..(439): unsure at all n locations
agcttattcagaagagaccatgttcaaagttaatgcggcatagcaagttatctattaattaggaatagtttgttagtttccttttatctctaggaaagtgtgtttagtgtcctataaggactttatcattttcttttatctttaggaaagtttctttcttgtccgacaaggacttgtatcaacccatgggtataaatatgtacacccggggtctatgtaatctatctccacgatcaatacaattcggtgcatcgccaccttttaccttttctactttattttatcatccggcgggacttggcacttgacgcggngctgcatcggtgttcgatctccggctaaggggtaagtccaatgttccgccggcccagggaattgtatcgtttacgtcggcgtcgttcaaggctgcatcagtacattcgacctcttggattgctct

SEQ ID NO: 16498 - DNA, 414 bp, Oryza sativa
  unsure (1)..(414): unsure at all n locations
tgtgtgactnttcctgcatgcctttgattattcttctaagattttggggttcagaaattcaggtagaaagtagaaaaaagagtacagtagttattattcagaacatcctgtgcaaagcccaagcaagctgtacccttttagtggcaagattgcaatggcatgtaggttggttagtaggtagtgcgtctagacaaagacacatcagtagcaacagcagcagctggaggaagaacatccatcaattttctaacaaaacaatccactcacagcctcacaggcattcaatggatgcgtggtggcaattataggaattgaaccccgttgaacagccgacttctttctcattttctcatgacctcataggtatcccgctgaatctttatatgcttatatcttacagaatatggattgtac

SEQ ID NO: 16499 - DNA, 446 bp, Oryza sativa
agcttgtgcctggttggagagatcatcatttattattaaagtatgccgttcgcggtacataaaatactcagccagggctgctcccgtataaggagcgaggtattgtaatgtagcaggggaatccgccatttcagctactacaatagtgtattccatggccccctcttcatggaaagtagttactacttgagctacggaggatgctctttgaccgatagctacataaacacatattacatcttgccctttttgattgagaattgtatctgtagctactgctgttttgccggtttgtctgtccccaataattaactctcgctgaccgcgcccaataggaatcatcgaatcgatagcaataagccccgtttgaaggggttcatatacagaacgcctggaaattatacccggagcaggagattcaattaagcgagattccgaagctacaa

SEQ ID NO: 16500 - DNA, 414 bp, Oryza sativa
tattttattcttttagttactgatttttttgttggatttcactccacccgcggttgggaactactaattcgttgggtctataacgatcttggatgggttcctaacgagctaattttcactatttttgtttgtagttttcctgtgattctagatacatgtttgaaattttgggtctttttttgtttaaaccgcctatctccttcgcttgtagtcatttatcattcaattagtgaagcataaactcatttgatctcctgatattaatcaaaattagcatcctttttcctttagaaagaaagcctttttccattttagcaaaattctttttttctatttctacctgctcaaggtattcatcattccagtacaactgttgcagtagaatgacaacagattcgtgtatagggaactaga

SEQ ID NO: 16501 - DNA, 198 bp, Oryza sativa
agcttaggcagttcttccttttttttttgtgtgctatatatcctgtaagctctgtgtgctattatgcttgctgctgctgctgctggtgcaacactagtgagttccagcaagggaccaagatctcagttgattgcttcaagacttgttgagcttgttatgtagtttgatttgttaaacgcctgaaatgtgtacatagac

SEQ ID NO: 16502 - DNA, 422 bp, Oryza sativa
ttcctaccctcccacgtcaatgagtgtccgtcagattcaacagccaccactagctaatgccctttaacgcgcagccaccccgccaacgcctcgccgccggtcggccatcagagtagagtctcaatcctcgggtcgctctagatccatccacgtgggcgggttggagagggaaagggtgagagagaagatggatcccccctcccctgcactagccagtctagcgtggccatcttgtggcaggcaaaccgcccccgccgccgcctcaaccatgttgccctagacgagccgcttggttgcatcgccgccgcctctgacctcccaccgttgtagcctcgtcgtcgcaccggcccatcacggccgcaccacactgcatcaacctacgcgccgtgctcgccagccacaagccactgcgccgtgcactt

SEQ ID NO: 16503 - DNA, 368 bp, Oryza sativa
  unsure (1)..(368): unsure at all n locations
agcttcggagacgaaatactctggtttctggcctgactctgtttcttggacgagggctgcactgatcgacactggcgaagctgctaggtagagtagcagttcgcttcctggtgctgggctgaccaaagcgggtgggctctgcagatatcgctttagctcgtcgaacgctgcttggatttaatttctcaggatttaatttcatacccactacacgtaagttgtctaaggtctcctgtaattcttactcntttccacctcacatttccctcactcttcactttctcaccccctcttcctcccattatacctttactctcttnntcttcaccacttttctctcttcattcttcctatcttcttcctctatc

SEQ ID NO: 16504 - DNA, 408 bp, Oryza sativa
tgggttggctggcttggactggatgctgcttttatctatgctgaaatgaaatggtacggagtttccacatcccgatcacacacagctgtgcagacattggtcggacggctgtcggggcagggtacagtacagtgtttgttaacagatgcctgcgatgcgaggtgaggtactgaggtgaggcggcctttcgatcggtctcatctcttctgccatgtgctggtagaccctcatgtcgatcctgtcatttcgttaatttgtgcccgatcgaaggtacggcccggtcgaggacaacttctatatgtatgtacgctttgccaagctcaatgttcgctccccaatttaccatagaccagctacttttgagtccttttttctgcaggattacaccattacattagctctgcatgg

SEQ ID NO: 16505 - DNA, 440 bp, Oryza sativa
  unsure (1)..(440): unsure at all n locations
agcttataaatntcataacanaattgagatcaaagaccgtatatataagaagcagttgatgtcacacagatttcacaatggcttgttcataagcttataaatttcataacaaaattgagaacaaagaccgtatctatgagaaacagttgatgtcacacagatgtcacaatggcttgttcatatgttagtgaatttcatatggaacagcataatagccaacagaaataaacagaggatgagttctataagtagtgagtatcttaaaaacttgttggttgctagtaactacacaaatttctttgattttaggtgtcttgtcaggggaatgagtgcccaccacatcccttaacttacttaacgtcacagaaataaacagaaatcacaaatttctttgatttagctgtcctgccaggggaatgggtgccaccaccnccttaact

SEQ ID NO: 16506 - DNA, 406 bp, Oryza sativa
ggagatgtgtttccctctgtcatttttcaatatgatgcaacacctcatggttcatatcgtgcctcagatacttgtgcttgggcccttgtaccttcatcagatgtggacattcgaacagtatatgtccaatctaaaaaggctatgtacggaaccgtgcccacccagagggttcgatgatagagggatacactaccaagaaagtcattgagtgttgcattggttacttgcaagatgggaaagcaattggtttactagtacctcgacataaaggtaggttatctggaagagggacaaaaaggaaaaaagaatcctcgacaatgactacaaagcagtgaaagatgctcatttcattgtcctgtaacagcttgtgatagtggagctgtacatagagcagcacctaaaggaa

SEQ ID NO: 16507 - DNA, 192 bp, Oryza sativa
  unsure (1)..(192): unsure at all n locations
atcacagtatgttcacaaaactgaaggaagttatagatgtgacacatcaagatcaaaattccaatctgtgaagacagatgaatcaagagttaggttacagtgcattctttcaaccaattgatgcactcgacgcttttctggacatttctctaagtgccaatggcactaactngtgccaataccatgattagc

SEQ ID NO: 16508 - DNA, 411 bp, Oryza sativa
tagtattttgcttcatgtgccacatcactgccacgtataactcataccaagtcaaagtagccatgtaggcgccacgtcagcgaaaaccactatccaaatcgccttaggacgttatttgcactggttttaaaagttgaagaacgtatcatacatggtattgcggttcacggacgaatttcaaactcggcgactaattgaaggacctaaagtgaacttattcgtctactataaccccattgtgattttcgcccattgatacggattacggagactccctcgacaactataactggttcatttgtgtccctccaagcgttttgaacagcggctgtgtgctacatgccgcatagacgctagtagataagataaagccattcactgctataaaacatcaaatatgtatcgtcatta

SEQ ID NO: 16509 - DNA, 232 bp, Oryza sativa
agcttgccgttcgccttgtgaacgaccaccgggttcttcagtcactccggatggatgacctcgcggatgaatccggcctccagaagtcgcgccacctcctcgcggatgaaggcttgacgttccgggacctgccgccgtactttctgccggaccggccttgcgcccgaccgcatggcgagacggtgctcaatcacctccctggggaccccgggcatatccgccggtctccatg

SEQ ID NO: 16510 - DNA, 423 bp, Oryza sativa
  unsure (1)..(423): unsure at all n locations
tctgtggggagaagccaatcacctcctccagtgtctctgggttgttcgctgcagnggcgacgcgctcactccggccatcagacacggcggcgccaagcttcgccactttgtccgcatctgggtaagagggttggtagtggttaggttttcatggaacgaccgcctccccaccgaggttgccgctgccggccgctgtcgcggcgccgccctcctttcccgcctccttctccgtgcctccgcttcgccggccgccgcgcgctcgcgagttgcctccgctggccgccgcccgttccttgctactcacccgcggcaaagggaagagaaaaaagaaaggggaaagagagagggtgacgtggacacctgacatgatgggcccacgtgggtcccacgctgtcggtgacatgggaccgggagtatcatgac

SEQ ID NO: 16511 - DNA, 451 bp, Oryza sativa
  unsure (1)..(451): unsure at all n locations
agcttgagctgaattataggaggctctattgcactttattgtatactagaatagggagagagtagagtagaagaagtcggaggagttccagagttatcagtaatcttctccttatttcttttgctatgttaattactctgattagaatagaaatatcttttgagtaatttagttntgcttggtgagaattatctcttggttagttcctaatcagcgtgcaggatcatcgttcactataatccagtaaaatatagtgattgctttagtgtgtagctaacattaacgtaagtaattagctgcttatacgcggtgtcaggtagttgatttccggtgttntcaccgcatcccacantangtgtgacgtgggtgttgaggtggtgacagccttcgagatcactaatgtcctccctgtccgggtgcgtagtagagcgatatttgngagcagtgagct

SEQ ID NO: 16512 - DNA, 425 bp, Oryza sativa
tgagaagggatcaaccgtagcttgcaccaagttctatcaagaagataacaagtccaacaacaagagcaaggggcaagatcaaagcaagaacaaagcttccattacttgcttcaagtgcaagaaaatgggacatcatgtgagagattgcccttggaagaaacagaagaagttgagcaagaatgaggatcttgctcacaagttcttcaaatccaccaaagagggacactttgcctcaagttgtccttgcaagattgatgatgaagccacacttccaagaaagacatcaagaatcaacagaaggaagtgctacggttgcattgagaaggggcatgaaattggattttgtccgcacaagaaggatgatcatagcaatcgatcaagcaagaggcaaaccggcaacaagcaagtcaagaagcaagataaaa

SEQ ID NO: 16513 - DNA, 450 bp, Oryza sativa
  unsure (1)..(450): unsure at all n locations
agcttctgattgcnggagttgcgtggactgacgtgctcggcagctacgtttctcggttttgggcacttgtcggcgaaatgacccattccttgacaattgaagcaacagatatcttcccggactcggcattttcttttctcattttgattcctctgtcctggcactggagttaggctgaaactggaatcttggcgaggatttgtgtttccttgatgcttccctccgttggaactggcgggttggttggccatcttcttcgtcagcagaaaactgaatcgacaatcttttggtacatgatcagttccttcacaaaagaaacaagtgatcctgctcgttggacacctatcgggtggatggtcttcctcacaatgaacgcatgtaaaggcacacgagctggcaacatgaccgatttctccacaacgagagcatgcctnagttctatttattctg

SEQ ID NO: 16514 - DNA, 425 bp, Oryza sativa
tcccaaacaggtcctaatcgtacaaatctgtaacttctgttgttccataattcttaacgttttataccatgatacaatttttaaagggaagtccgaattacatccttgaactatttggtaagtacgaattaccgcgctagacccgaaaataagatatttttcaccctcaactatcaatactggataaaaataaatcccccgagcagctttgcaagcgtattgatcctacgtggcagtccagtcagcaattcttttattaaaaataagatgggcccatctgtcagatatctctatgtccctctcaccccctctctctctctcgcgtcagagcccggaggagtcccgcacacctgtggcgtaggcgagacgcgcgctggcggcagcagagatggcggctatgggcgccctctccatcgccccgagct

SEQ ID NO: 16515 - DNA, 214 bp, Oryza sativa
  unsure (1)..(214): unsure at all n locations
agcttcggagcaacatggacagccttggctagctngatgaggcgcattgcaagacggtgatcgaggatggtgttctcactttgcatgatccacagcgacagctgctgtgtacggtgcgccaaggagttgggcgcctctacgttctccacgtcgagctggcgcaaccggtttcccttctcgcaaaggggaaggatcaatcctgggtctggcatcc

SEQ ID NO: 16516 - DNA, 426 bp, Oryza sativa
  unsure (1)..(426): unsure at all n locations
ttcattntctttactataatcttacaggcaggacacatgacttcgatcatggtttagcatcatctgtcttggaatctttggaattcctaaagctaaattgatcaggcactcagtgtcctatatatgcagcagatgaaatgattcaaaaacataatatacaagtatccgttgttgattagtccagtgaatattgtcgtagccacacaggtaaccaaaactgcacaaaaagctgcacaacaatttcacttggttttagttttcttattgcttttgcttatataagagttagggcatattacaaatagtaattattagctttaaatcttttttttacctaatgatttaactggaggaaaagttcaagctagctactgcagataatcagttntgctttaattatcttgatcagtctgtaagtgataacct

SEQ ID NO: 16517 - DNA, 241 bp, Oryza sativa
  unsure (1)..(241): unsure at all n locations
agcttctcgggttcttggtctctgcccgtggcattgaggccaaccccgagaagattcgagctatcgagcggatgcgcccccccagcaaacttagggatgtgcaatgcgtcaccggttgcatggccgccctaagtcgtttcatatcaaggctgggagagaaggcgctacccttgtttaagctcctcaagcgctcggggccgnttacttggacggaggaagctgaatatgctctctttacatc

SEQ ID NO: 16518 - DNA, 417 bp, Oryza sativa
  unsure (1)..(417): unsure at all n locations
ntatcacttgaaattcttggatctcatatcctgtgtgtggtagtaacaataatttgcctaacgactttaaccgccttataaacctacgccattttcttgctaaaaaagaattccattccaatgttcctgaggttgggaaaatgaagtgtttacaagagctcaaagaattccatgtcaagaaagacaagattggatttgaactggcacaactgggacagttggaacagcttagaggggagctctgtatatttggccttaaaaatgcaactagggaagaagctattgaagctaaattgaagcataaaagtaacctaagcaagttgcgattagatcgtggtggtaatagagagaagaatacatcctcctcctcctccaggacacaagttgttagcaatgaaaatcaggacgatgatatta

SEQ ID NO: 16519 - DNA, 255 bp, Oryza sativa
agcttcaagcatatggccggaattcaatttataaacctcattatccaaacggcatccagtaatgggtggctgtacactcactgttgatcctgataatccccaatgtttatctcttcttaaccttcaaaatcttgcgatcgtaacaacttgaaaatgacctctcgaaaacgttggtaatcacaacattaatgtggttgccgtgcatccgattcttgggaccgtatggctatacttgtggatcatggtgaccacttt

SEQ ID NO: 16520 - DNA, 411 bp, Oryza sativa
tggactatgcaattggcaaccaagcttggtgttatcaagttcggtttggacaaattaccaaatcattcagttggaagtatcatggctatggcattgttgcttgcgcaatctttggaggatagatttattgagtgggaagtatatgttggcagcacaaactatgagaggagtagcacttgtttaacctaacaattcattcctggttggcctgaatattctgtaagagctgaattggtccaatttcaaagaggcaaggtgacaattacacagtaccatttgcacctacaagctatagtggtatttgttcaaatattgctggagtttgtacattcagataagattcttcaagagcaagtacaaccaccattagctacagaatcaccgatgcgagtatcttgggatcctggtgtc

SEQ ID NO: 16521 - DNA, 452 bp, Oryza sativa
  unsure (1)..(452): unsure at all n locations
agctngctcagttgactgaacaaaatatttactcaccgaaactgaaaatctaggttcagatatagcaatttctgaacaccaatgccagattagaaagtaattgaaaaataggcatggagtcaaggactttgggtaaattgcaataaaatgccaaaacgaaatggaatcagcatttgtaccacgtaacaaaattttgcccatcgatcatggaagaaacgtgcatacgattttgtggctggccaataaactacaaaacaactgaaattattgacaactatgaagagagaatgccatgttacttctttcttatggaacatccnctcttgctcaaaacacagtcgtggaagaaacatgcacactgcagctggtgcagaaatgtttatacacacaaaatgcttggtatcagtaggatctaaccatganaggaatctctcttattcctaatggaaaca

SEQ ID NO: 16522 - DNA, 435 bp, Oryza sativa
tgacactatgaaactaagcttgacttagagtcacagaagccaagtccatcggtatttcaggctatgcaaggaaaaatggagttggatctgtgcagccttaggaaaaagtggctatggttttgatgcaacatcatgcaaatttaacattgacccatcggagaaggaagcaaacaaacttggtgtaagttattctatgattgcacactagtttgagttataattcatacaagaattgttaagtttgtttatttctaaccatgcttcttctaatgacagacaactaaatacaactacttgactaagcctatcaaattcttccatctctttgaagaattatttgtgggctgttcaaaagctgatggctctcttgcgatggaccagtttactgctaatactagtagtgatagtgatggcagtggtagcatcaaggagttg

SEQ ID NO: 16523 - DNA, 443 bp, Oryza sativa
  unsure (1)..(443): unsure at all n locations
agctttctctctctctttctttctttcttccttcccctcccgaagattntgctcgctttctccaacctctcctccgctccgaagcggaggtcggcggcggtggcggcggcggcggcgcgtttccccggcgagtaaggtgaccggctgctcctcccgcacttcctacgcctcgttccgtcgctacagtagcggaggagggcctgcaatctcagatcaggggtacctgtaacccgtttcggttcttggtgggtgggttggtggtggtggttcttgatccatccatccagcggttntggtgcatctgtgcgagttccatggtctaggttttttttttcttttagcatttcgtagtacgtggcccgtggtagatggcttgggggagtgcaatgaaatgctgtgggaaattagcgtggcgttagcacatagcatctgttcttagtact

SEQ ID NO: 16524 - DNA, 411 bp, Oryza sativa
tagggatgtgcaatgcgtcactggctgtatggccgtcctaagtcggttcatatcgaggctgggagagaaggcgctacccctatttaagctcctcaaacgctctgggccgtttatctggacggaggaggctgaatgggccctcactcagttgaaggcgtacctcagttctcccccagtcctggtcgtcccggagccagatgagccgttgctactctacctggcggcaactccgcaggtggtcagcgcagcgttggtcgtggagcgcgacgaggacgaccctcgctccgcgcatccccaccctgtgtcgactcgacccgggagagagcagggaggagaggcccccgagccgaacggtggcccgaggcccccaacgaccggaactggccctctgcccgcttgtccgacggtgcc

SEQ ID NO: 16525 - DNA, 407 bp, Oryza sativa
  unsure (1)..(407): unsure at all n locations
agcttattgattccaggtctcttccccttgctagctcagaggaagggtactcactcttcacctcctcaaccgcttctatgtcgtgctcagctgatgatgattcggatgtttggtttttgcagctcctctcggcagcttcccacagctgcagcatctcgtcatccatcccagcattcgcgccattcttaagtgggtagagcgcagctccagtgccatatggtggacatgtggatatttgatcaagttcgatatccttcatcatcngaacctgcttccctttggagccctcgacgctgntcagcttctcattgtcggagcatatttcccnttgcctncatctgtgacccgcctcttgccttcagctcttgaatatctatgtgtgctgctgccaacgtaacaccagactt

SEQ ID NO: 16526 - DNA, 422 bp, Oryza sativa
  unsure (1)..(422): unsure at all n locations
tgtcgacaacctcgcataggcagcacccgctccattaacttaaattctcatgcactctaggcgaacatgtttctagcagtgagaggagttctggcgctcccgggaaagagaagtctcacacacatattaaattatggttcaagttaagttctctctctcacacactcatggcagtcctaccaatggcgacaccgatgtagggcacgcctctcggccctacctcaacggctgtcccatcgtagcgcacctgcctcactcaggggtgaaccatctatgcagggatactgcctccgctcggctatctaatccgctaggtctatacccattcgagaagtacgggtgtacggnggtcgtttcatgcttaacttcatggctcggtccttaattgaccggngacggtactagcctttttcagataccac

SEQ ID NO: 16527 - DNA, 271 bp, Oryza sativa
agcttgaagctaaactgtccttgcttattatgaacatcaaaatcatgaattactagcatgtgattctgacatcaaagaattgacctcaggtaaatgctgcagattattccacttgatatgaacaccaaaatccataataactaacatgtgtttctgacatttatccacatcaaataattgacctcagataaatgttgcagaaacaatcgagatgaatgtacatttgtaggagatcaaagcggaattatgagctatgcagatccttgtacga

SEQ ID NO: 16528 - DNA, 409 bp, Oryza sativa
  unsure (1)..(409): unsure at all n locations
nttaattactatagttggcccaaggtatagctttgcagggttattctttgatttggcccatatacaagtatacaacatcgcgtggtccaagcaaactccatctggtcggcttagcttcgtttaattaggcccgacaatcgccctgcctgctgggccgaataacggcacaggcgccgcctcaggcctcacccaaactaaaccagcatgtttcatcacgggcaggcatcgatacagcatgattcagttctcaacaacaacaacaataacaaaaaaaggatacagcatgattcttcgcaaaggggagagaagaggaagcaatgccgcatgatcgcgggaatgccatcttttggcgcctttggcacgagcatccgtcatgcatggactccatcgtcgacatgcgccgtcttgg

SEQ ID NO: 16529 - DNA, 444 bp, Oryza sativa
agcttgaattctgttccaggaagtcaaatatccaatttctcaagtgcatgatcccccttctcttcaatttgatatcatatatctgtttaatttcctgccaaacagagctagcaaaggggcatgaaagaaagacatgttccaacgtatcatccctattacagaaaacgtagccgtcattagaatcaatgtgacgccttctcagctggaagccagtgggcaaacaatcttggactgcacgccagaggtttatcttcatcttcccaggtgcattgatcttccacagagctttccagcttttctgactctccagtagagaagaaggaagtcctctcccattgttacactgtgaagcaaggaaagtgttagaccgtgccaagttataagccgagcgcactgtgtaggtgccatgtttgtcgtgtggccaggacgtgaagtcctcgtcac

SEQ ID NO: 16530 - DNA, 397 bp, Oryza sativa
tttgctatactacatgttaaacagttatgcgcagttgatttcagaatcctccatatgttggtgagaaacagctcatttggtacgaaaaataagtgatatacatgagttttggcacaaatttcggagggaaaaaaatgcttctctgcttgtcggttattcgcacatataggactacatagcatatcctaacactgtgaaggtattttacactgtcacaaatgaagagaaatgctattctgtgcacaatgtaataaaccacaaaactgatcaggtgctgttgacaaaactgacaatgtgctgctgacatagtcattatgtcacacagaacattatgatactagtaacatgctaaatggccttacctcatcgctctactcctgtagcattgagcacaccc

SEQ ID NO: 16531 - DNA, 220 bp, Oryza sativa
  unsure (1)..(220): unsure at all n locations
ttcaagtcattcattatccatcatcacatcggnttcagagagaagtgtacaacaagattattttctgtgaagaaaatagttaccattcgtggaagcctagaaggcaatgttcataataggattataccagaaggctaaaaaggaatattaagtgagaacttgttgactcatatttgacagactaaaaagaaaatgcatactttcatagcagacacctatg

SEQ ID NO: 16532 - DNA, 379 bp, Oryza sativa
taaaatgagttatgagcttttaaaataattttcttatatgtatattttttaaaacgtatcgtttagcagttcgagaaaacatacgcaagaaaaaagagggagaagttgggaatatggacaatcgaacatagggatgaaaacggacggaaaccacctttatcattttcgtttttgtcgacgtttgatgtctcgactacggtatttggacagtatggggatcgtcggtgctaggatatatgcgagactaaggtaaaagagatggagacagggatttctatacaggttcgggcccctgagttgtcactgaataaccctacatcctgttgtgtcgaaccggtattgctcttactaaccattaattcactcattcatattgtgg

SEQ ID NO: 16533 - DNA, 449 bp, Oryza sativa
  unsure (1)..(449): unsure at all n locations
agctcttagggtaccagatgaccctttcgctaagctccattgggacaaccaagctcaagtcaaatgcaagatcttcctttggactacacacaagaggcgcatcttcaccaatgagagacgagctcaacgtggattagcagcatccgcacgttgtccattntgctcctctgatgaagatgtggagcatctcttcctacgctgtgccgaagtggcaacaatctggcacacctttgacctggacgaacaacagatcgcctccctgccgcagcttgaaggtgtctgggacatccctccacccggacaacccgccactccacgagtctggcgcactatcatgcttgccgtcatgtggaatatttggaaaggacgcaacaacaaggtcttcaattccgttgacgaacccgccacgttagttctccggtgttgtgctagcgacattgatctttggt

SEQ ID NO: 16534 - DNA, 418 bp, Oryza sativa
  unsure (1)..(418): unsure at all n locations
taacagtcagtactcaataggcgaacaggattatatgccaacaacaccactccgaggagtcgagctgatcttgatcccggaaggcgtttttcgcggatttcacgtgaacgattgagaggtgaaaggtcccactcgtatgcgttgcacgcgacggtagcacagtagcacgagcaacggcggattttggtcctgaaaaatttagcccttcctgggctctacttactgcctctcgggccgcgcaccctcggccgcgtcctgcggtctgtcggaagcttgcgtttggcccgcgctaggcctgtgcggatgagctacatgggcctgcgtgaggaagcgagcaataccaaactggaacagtcttggattcatggacagggctcctcttggcccangcacttccgaagagtcatctgggccttct

SEQ ID NO: 16535 - DNA, 454 bp, Oryza sativa
gcttcaaacggtgccatctgtagactggtctggtagttggtggtgtacgagaattccgcatatggcaagtttttgtcccaagctccaccaaaatcaagagcgcaagctctcaacatatcttcccagatttgattgactcgctcggtctgaccatcagtttgcgggtgataggccgtgctgaaatttaaacgggtccccaattcttcctgcagcttctgccagaattttgaggtgaactgactccctcgatcagatacaatctttttgggtactccatgtagacacatgattctcgagaggtagagctccgccaaccttttgcccgtatacgtggtatgtactggtatgaagtgagcaaccttagtgagtcgatccacgactacccagattgaatcctgacccgatgatgtccggagcagtcctgttataaagtccattccaatctcctcctatt

SEQ ID NO: 16536 - DNA, 423 bp, Oryza sativa
  unsure (1)..(423): unsure at all n locations
ntcatgcctggtacggtctttaatttctgaattttgttaccaacagcatcactagtataattacttcatggatctatcttttaattatcatttactccctctgtttcataatgtatatcattttagtattttccacattcatgctgatgttaataaatctagatagatacattctagcatttcccacattcatactgatattaataatgaatgcataaatgtggaaaatattagaatgacttacattgtgaaacggaggaagtatgtcttaagaatgtcctagagagttatattttcacgtgtgtgcgcgccaacgcatgtaattaaaaaaagtattgcggagacatgaaatgcgaaatatcacacgtgcttatatacatcgagtcgccttgcaatataaaatgccaagagattatcggtgtg

SEQ ID NO: 16537 - DNA, 453 bp, Oryza sativa
  unsure (1)..(453): unsure at all n locations
agcttctcctgtgaatgatagcattatgcttttctattacatcatcacagaaccaatcaaggatgcagtcactagaacaatgccagctatatctctccggaatcaaaatgagcagccatgtttgtggttttcagttcgctacttatcatggtgtaatcgaaagtttgcagcaataatgcaatacataaatatattcatgtctataaacagtgagcttgctatgcttatggatgattcatgttgaggatacaatgtaccgatgttaagcaccgtccctttttgtttaaggcagtgcctcgtattcatgtaatgagggagaaatgtgtaatacagacaagttccatgaggattcttttggaagatgcgaatatgtgattatgtgtataattgcttactgataaaggagacctanggtctcatttcaaaggaactatgttctaacctcgagtaata

SEQ ID NO: 16538 - DNA, 419 bp, Oryza sativa
tgaaagcgtgcacacaaacacacagcaaattgtatgtctggcctataagcagttagatacaacaaagatccaatcatacttctattctccttttgatcaacagcttcaccatcttcatcaggatccaacacaggtgtagaaccaattggtgttgaaattggcttgcaattctccatcttgaaccgtctcaaaagatccttcgtatactttgtttgatgcacaaaagtaccttgaggtgtttgcttaatttgcaatcccaaaatgtacgataactcaaccatcatgctcatctcaaattccctgggcatagtttcagcaaaatctacaaccaacgcgtgagtcgaacaaccaaagataatatcatccacataaatctgaacgaacagttgattatcaccatgcttaagaacaaaaagcat

SEQ ID NO: 16539 - DNA, 437 bp, Oryza sativa
  unsure (1)..(437): unsure at all n locations
agcttgtcatcctagatttccaccccttcttctctggtccctcttccctccatccccctctcctgtgctccaccattctcattaggcccttctagtataagaaaaggagaagcgacagtgacaatggatgcacctgcatccttaaccccaaggtaaattatccatcgtgaagcaattggtaggtcggtttctccttggcaccaatgagctcttaataagaaatattgcgtaacataacagagtgctctatgggcaagagcaacatactccctctcgcttatactccaacgaattccgatatgatacatgcttgtcttccttgatcatgcagcgtcctatccaatctaagccgctatatatatganggatggagtagttctttacatggcttcttaatgtgacaactatagagtagccacgaatatgtgatatttatc

SEQ ID NO: 16540 - DNA, 428 bp, Oryza sativa
tccattttcctgcaaactccaatgcacaataaaccccctcactgtatgctgcggctacatacaagaatcaggaacctaatcttctgtcgaaggaagagctaagatcttaggtatagtttgggccagagtaacaacaaacagctcagcacctcaattccataacaagttgtgcagcgtgtgatacatgaaaaatacacatgcaaccagcttcaagtggcgtgtgtgtgtgagtgtgtgaccatcctggtttgttcgggggaaaaaaaattaaaatgtgggcaagtgtgtgtagcactatatagccatgtcactgtcaccctaacctagcaggtacaatagcaggctataagctagctataaacatattttgaagagagataaaaacagcgggctacagatctgtaatcggttacagatctgtaaccagc

SEQ ID NO: 16541 - DNA, 449 bp, Oryza sativa
  unsure (1)..(449): unsure at all n locations
agctntntgcatagtagtgctgttattgttctcctctaagaaatggagcatgcaggagcaagtaatttcagaactaagcaaacagagaaagaaagaaagaaacttaagttttacgagatcgatcgtttcatagatcactggaataacacaggtcaacagccaggatgacgaatcggatggcagtttacaagcaactatcgctctacaagcaaccatcgaaagaagaaagattggatagaacacgcaagctttacctgcacttgagctgtattgcactttgcacagatcatagaaaacaagaactaatgactttgtacagtatgcaagtaattcatgtgccaccaagatctgatctagtctaagaacccctcgtggccacgaatcattgatcacgagaaagcctgaaactttcatttcactcccaaactggaaagacaacgaagcatagc

SEQ ID NO: 16542 - DNA, 416 bp, Oryza sativa
  unsure (1)..(416): unsure at all n locations
tggaagagaggcaaggttgatttgcttatcctttgtttgaaatncatttgaaatcactaagtgattcacttcttgttaagtttgggctgaaaagagactcgcgtctcaaatcgacttaagagatgcttttcaacaactcaattggtaatgtaccgacctcccgggtcagatcattacctctcggctcccagagtcatttcacttgattaatcggctcccaaagcctttctcattttctcggactcccagagtccagctgcccagcagcaaagcaatccgcttccactcgggaagcctagtctatgatgcccgcagacatcccgaaccacacagattcgtttctgaccactcaggtcatccatctgccacgtaggctgattctggttacgattcccacaccacaacaacttttcaca

SEQ ID NO: 16543 - DNA, 447 bp, Oryza sativa
agcttctttggtccagaaaataagaaaaaacaatcttcatgttatgttattctggcctattttttaaatatgtgggtcatgaaatgctgaaattggctgttcaagcacatgatttgttttgagcattcctttttaatgttaacctttataactagtggttttcatttgcgagaagatgaaaatagcagaatggagacacacctttcttatatggttgagcacttgcactccagaaagtttatttattactatgtgcagataattaatctaatacagtttgtttgtactttctgccattgtgctaatctgatcaagagctataaataatttgtttattttggtttttcgtctgtcagactgattcagagcgtgttctatgtgtatattgcagagctttggccttggatgggctgttggatcacagcctctgttccggcttttttcatt

SEQ ID NO: 16544 - DNA, 414 bp, Oryza sativa
  unsure (1)..(414): unsure at all n locations
ntgctctgaggtccttcctgagaatcttgccagattgactcttcggaattgaatccgcgaagaaaactttgttgagcctcttgtagaaaacaacctgtgatgttgttcaaaacaatctggattatgatgcttataacggtgaaacattggtatatggaccaatccaattatttctatgcttctgcatgatgtatgatttagctttaacttgttagagagtactgttttctaagcataaatgaatatatgatggcttctatagactagtgattacttgtatgtgaaccataaagcggtagatggagagattgataaactaagcattacctcctttgccacaaattgcttgatctcattctcgctgattgcagatccttcaatccgtacaatgaatgcaaccggcacttcacccgc

SEQ ID NO: 16545 - DNA, 445 bp, Oryza sativa
  unsure (1)..(445): unsure at all n locations
agcttgcccagttcgcgcacaccattcgtgtctacttccagtaccggggactcgtcgccgccactctcgcggacttggagccgttcatgctgcagccggagggcgaggcggacgcgaacgaggagcctgaggtgatcgccgtcaactcggtgttcgagctgcaccggctgctcgcgcagcccggcgcgctggagaaggtcctgggcacggtgcacgcggtgcggccaaggatcgtcaccgtggtagagcaggaggccaaccacaactccggctcattcctcgaccggttcaccgagtcgctgcactactactccaccatgttcgattccctcgagggcggcagctccggccaggccgagctctctccgccggcttgccggggcggcggtggcacggaccangtcatgtccgaggtgtacctcggccggcagatctgcaacgtcgt

SEQ ID NO: 16546 - DNA, 416 bp, Oryza sativa
  unsure (1)..(416): unsure at all n locations
ntgacccgaaggcaccgtgggaatagctcagaatgaggtgataagcattataaaattgatacgaagaatatccgtagaaatctttctattcgtagtagtctaggacccgggctttggggacgagggttcgtattcctatttatttctttggattgagcgacaaaaacaagagtgatgcgcggcagcagaagagcaatggcggggaacgacagggagactcatgcatcggcattcggtaggagggcaatggaggagacgggaggcgaacgcatgtagcaagtattccaggtcgaatggtgaggccagcgccatgaggctgaagaagatgagctttttgaccagttcgttgtgccatcgatctttgcagttgtctcggcgacagtcgtaatggcggtggtggttgaggggatgaccgc

SEQ ID NO: 16547 - DNA, 445 bp, Oryza sativa
agcttgcccagatcgcgcacaccattcttttctacttccagtaccggggactcgtcgccgccactctcgcggacttggagccgctcatgctgcagccggagggcgaggcggacgcgaacgaggagcctgaggtgatcgccgtcaactcggtgttcgagctgcaccggctgctcgcgcagcccggcgcgctggagaaggtcctgtgcacggtgcacgcggtgcggccaaggatcgtcaccgtggtagagcaggaggccaaccacaactccggctcattcctcgaccgagtcaccgagtcgctgcactactactccaccatgttcgattccctcgagggcggcagctccggccaggccgagctctctccgccggctgccgtgggcggcggtggcacggaccaggtcatgtccgaggtgtacctcggccggcagatctgcaacgtcgt

SEQ ID NO: 16548 - DNA, 412 bp, Oryza sativa
  unsure (1)..(412): unsure at all n locations
ttgacccgaaggcaccgngggaatagttcagaatgttgtgataagcattataaaattgatacgaagaatatccgtagaaatctttctattcgtagtagtctaggacccgggctttggggacgagggttcgtattcctatttatttctttggattgagcgacaaaaacaagagtgatgcgcggcagcagaagagcaatggcggggaacgacagggagactcatgcatcggcattcggtaggagggcaatggaggagacgggaggcgaacgcatgtagcaagtattccaggtcgaatggtgaggccagcgccatgaggctgaagaagatgagctttttgaccagttcgttgtgccatcgatctttgcagttgtctcggcgacagtcgtaatggcggtggtggttgaggggatga

SEQ ID NO: 16549 - DNA, 251 bp, Oryza sativa
  unsure (1)..(251): unsure at all n locations
agcttctaacttttccgcacatcggttttttntaaccaatggcgggtttagttcaccctcaactatccccaacttccaactttccatcacatcatatcacatccaaaactttcctacacacataaacttccaactttttttttccaaacttccaacttttcctaaactttcaacttttttcattaactaaacacagcccaaacttctaattttgggttgaactaaccacattcttcttctttcaaacactc

SEQ ID NO: 16550 - DNA, 412 bp, Oryza sativa
tatactagctggcaaaggattgaaaacatactgtttgatgcagcaaattaaacaacaactgacagtgtattggtagatgtgattatgatatatagtactccactacaatataaaaacgtacggattaacgtggagcatgtataactgatgttggtttgccaggtagctggagtagtagtactagtagtattttgggcacattttcactgcctcacgtatataaagaacgtacaggtacgtatttatcttaagagaaaacgatcgacactaaatattaatcaaaatctaacaaggaaaactatatatcaccatatatataccatgtggtaggagtaatatatacatatatattagcagaaatgtaaaagtttctacattatttcctccattaattcattttcatgcaatctca

SEQ ID NO: 16551 - DNA, 436 bp, Oryza sativa
agcttagggtaatactttcgcatccattgattctcctgtataagctctcatccactatactgcctttgccaaaggcaaataaaccacctcggacgtcagggtgtcctgtagcatttcatattgatttgttgccacggcatataggcctaaaatgctgtccctgatcaagcacagcagtgccactgagaatggattcatctgtgttcactttaaaaagaccagctgctggtggggtcacaactcaccgcttgctttcctgatgcacatttttcagccttctgttggtcgtgagttgtttgctgcgggctttgcaagttgctgggcccaaatgaatgaaacatcccaggagcaacttgtgagaagtctcaagactgcattctcatctcagaacatacctccagatattcttgccacactgctgaacttggtaaattac

SEQ ID NO: 16552 - DNA, 403 bp, Oryza sativa
tatcatctgccacatgttgcacggaagataccacttcggagtccccatcatcaaggcaatcaatatcaaggctttccgttgaatcaccagttgacatagcatcttccttagacatagaattgtcagataggccgggtgaacagtcatggtgccccactgacggcacaatggtgggcagataagggttacaagctaattctttctgaagggtactgcctcgatgtggtattgcttgatcaaactggccagaagttggttttgggacagaacccccttctgtgttccaattgcaaaggcttcccacaaatcaagggcggatccaacttgggacatgggggttcaggctaacccccacactttttggtgaactgaccaactgttatggcttgaactatgtactaga

SEQ ID NO: 16553 - DNA, 439 bp, Oryza sativa
  unsure (1)..(439): unsure at all n locations
agcttaaattaaagttacctaccacataatcatccgatgctaggtgttcggatggatntgtgttgcttcgttattagattctaggtctacgcttcggtgcaaattgttgaaaattcaggcatgtcctctaagagtttgaccacaaacttttctaaaacatcaacatgtatcttttgtgttacagaaaacattcaaacctttatcatcagagggtgcgtgtacaagtacaacttaattacaaaaaaaacattcaaacctttattcagagtagtagaagcagaagccggcattaaagagggagaccataaattggtctgcannattgcaaagtccttttcaaatagctgaacctttttatttttaatattgccaaattgatgaatgttgacaaacctggtttgattnggaggcgaatttcacatatntatatagtagaaat

SEQ ID NO: 16554 - DNA, 408 bp, Oryza sativa
  unsure (1)..(408): unsure at all n locations
ntccatgttatggattgtccatagggatttgaaattagataacatcctcttagattataacatgaacccaaagatttccgattttggatcatccagttcactgagttcagaagttgcagaagaacatacaagaagggttgtgggcactaggtatgagttttctgacatgtcataaatataagtttccttacttgtgttgacttgactgttttaatctttctttattcagtggtttcaaagctccggagtatgcatctcgaggagtttattcagtgaagacggatgtgtttagcttcggtgtcttggttctagtgatcattagtggacgaaagaattccatactttataagcagagggatgctataggtgatcttgtacgggatgtaagcgaacactcattatttttat

SEQ ID NO: 16555 - DNA, 157 bp, Oryza sativa
  unsure (1)..(157): unsure at all n locations
gtatatgaaactgaacctattgggtttgatgatgtcaaagacgtaagataaatatccctcttatcacccttgattctgatctttattaaaaaaatattngtgaaccaaaggttcctaggaagcttacagataatgtaaaactacagggaaaagcccg

SEQ ID NO: 16556 - DNA, 450 bp, Oryza sativa
  unsure (1)..(450): unsure at all n locations
gcaagcttaacatctgtattttcgaagtgtctaccctggtgataatcatcttctgctgacaacaaaattcacctattttatccagtgtcttaactattctccctttccaaccttcactgctagcaaggcagcaaaactttacatgtaatcctatggcaggtcaacagagaacgaagaagaccatgaagttctccatgatgcttttgatgataacgatgaggatgggcttgctccatatggttctcgagatgacaataaacatgcccatgtgagacaacaaatgaactcatttcttaactcaacttataaattctgtgcataactttttgttctatccatgtcagtttttgtgtacctttatgtgtatttagatgatattggggtgtcggcaatacatgatttccgaatcactggttntatgtgccatggcatacaatntaaagatgacat

SEQ ID NO: 16557 - DNA, 99 bp, Oryza sativa
taactattctcaaatacaattttctttttgacgttattttgattgtttcacaggagtcggccattccgtatataacgtacttactggtcaactcacaca

SEQ ID NO: 16558 - DNA, 65 bp, Oryza sativa
ctttcgtttcccatcgggctctggtgtcattccaggtttttctcttgtgacattgtgtatttgtt

SEQ ID NO: 16559 - DNA, 454 bp, Oryza sativa
agcttcggaggatctctacgcttactaccaggagggtgatgaagacaatggcactcagtagatctagttacgatcgttgtctatggcaatggtgtgccgctgccttaactccgctgcggggcgagcagcgggcagaaacgtttcgtttctttgtgcgctgatgtttgctactttgctgggcctttgtttgctgccgatgtggacaacgaagcaggcccattggcccaaccgcccaagaatactaggaggcggacagccgggagtctgactgggaatcgcaatcgcttgttgccgccgtcgccgcgtcgcttcagtttcagttcatcgcctcatcgcatcggctgatcgcctcctctcgtcgacagtcgaatcgtctcctgccgggacaccgccggacgccgccacggtaatcactccgatacaccagttggttccatcgatctctcacacatta

SEQ ID NO: 16560 - DNA, 398 bp, Oryza sativa
  unsure (1)..(398): unsure at all n locations
ttgcgaggaagaagaggaggcggcgtcatgaaaagtatttcttattatagagagaaggggttttggagtgggagaggggggagagtttttcttttttcccccntctcttttttgctattcttctttctcctccctttcctcctaccttttctcttttcctctttcttttttctctcttcccttttttctttctctttctctctcccctttctttcctcttttcctttttcttctttgccctttctttatctctcttatttctttcttttcccttccttctcttttttttctccccccttcactctcttatctctttttctcttttcttccttctttctttttcttctttcttcttttccttctctctttcctcctttttctacctcttctcttctctc

SEQ ID NO: 16561 - DNA, 452 bp, Oryza sativa
agcttcggaggatctctacgcttactaccaggagggtgatgaagacaatggcactcagtagatctagttacgatcgttgtctatggcaatggtgtgccgctgccttaactccgctgcggggcgagcagcgggcagaaacgtttcgtttctttgtgcgctgatgtttgctactttgctgggcctttgtttgctgccgatgtggacaacgaagcaggcccattggcccaaccgcccaagaatactaggaggcggacagccgggagtctgactgggaatcgcaatcgcttgttgccgccgtcgccgcgtcgcttcagtttcagttcatcgcctcatcgcatcggctgatcgcctcctctcgtcgacagtcgaatcgtctcctgccgggacaccgccggacgccgccacggtaatcactccgatacaccagttggttccatcgatctctcacacat

SEQ ID NO: 16562 - DNA, 319 bp, Oryza sativa
tgcgagggaagaagaggaggcggcgccctgaaaataaaacggaaaagagagagaaggggttttggagtgggagaggggggagagtgaggcgtgtgaacggcaacagcgttgggcagttgggctgaatggcggtttgggccgccagggatgcttttcagctggatgagtggaacaggcccgtataaggctaacgagcagctatatttatgggaataagttcactttacgtctctctacttgctggtcattccaattttcgttccttacccacagtacttggtactacccatcctcccacttacgaaaaccggacatatga

SEQ ID NO: 16563 - DNA, 252 bp, Oryza sativa
  unsure (1)..(252): unsure at all n locations
agcttcagatcagatggcgattattatgctgtgatgatgtgctgattacttaatagtgtgcactgtttatcccaaatgacaggcaactaattactatatacaaccagtgttaaaaagggacaaaggctgtaggatacagtgatacaccaccctaggaagaatgttcacgcatctgacctgcctaacagcaacataagctgcaaggtgttgcactggagttggaccaaccaatcaaaaatnttgtagtaacaa

SEQ ID NO: 16564 - DNA, 394 bp, Oryza sativa
  unsure (1)..(394): unsure at all n locations
tctaagacaatagtctataaaaattgatttttacatatagtcctttgagctatgcatttccaatggttcattgtttagactgcgtggaaaacaaaagaagtatctacgaaaatagttatatataatacaccatatcgcacatggattcagattgggtgacatatggtaggagaatcacatggngacatacggtgaatctctgcccttcaggatagattcaacggctgatattttgaacgctatcactagtcacaattttactctctgctgatgtctactcgtgaaatattactcccaataagattatgacttaattacacgttttaccacctattattggcataattgcagtatggaccatttctattgtattctattgactctcgaccatgat

SEQ ID NO: 16565 - DNA, 447 bp, Oryza sativa
  unsure (1)..(447): unsure at all n locations
agcttagtattctctagttntactgaattgaactttcttcactcttttgtgttgggatgcaaacttgcagatatcttcctgctcctgatgacatgtcggcacttaaaatagcttttgagatttacatgaaatttggagattttgcaaatgctttgcgtattgcacttctgcttgatgacaaggtgggtgaatgaatgttatcattcctgtttgctgtccagtacataatgacactgacaaagatttcattgatttgttagtctctggagttgaagcagatttttacagcaactgatgattttcacctgaagaagcaattcgcgtttatcatagcacgccatgtgagcctcatcccatgcacataaacatgcaacagaagcaaattttctattgtgttcttgtctacaattcagtattattggtagtctgcattgttcacatttcctc

SEQ ID NO: 16566 - DNA, 417 bp, Oryza sativa
  unsure (1)..(417): unsure at all n locations
tttcgataacctcgcattggcagtatccgctccatgaacttaaatcctcatgcactctaggcgtccatgtttctagcagtgtgaggagttctggcgctcccgggaaagagaagtctcacacatattaaattatggttcaagttaagttctctctctcacacactcatggcagtcctaccaatggcgacaccaatgtagggcacgcctctcggctctacctcaacggctgtcccatcgtagcgcacctgtctcactcaggggtgaaccatctatgtagggataatgtctccgctcggctatctaatccgctaggtctatacccattcgagaagtacggttgtacggnggtcgtttcatgcttaacttcatggctcggtccttaattgaccggngatggtactagcctttcccagatac

SEQ ID NO: 16567 - DNA, 451 bp, Oryza sativa
  unsure (1)..(451): unsure at all n locations
agcttgttagttgaaagaaatgtggngcatgaagtgacacagttgtcaggaatgatatgggagttcgattaattaaacatcataacagccatttatgatgcaatattgtactaagttgtgtcaatcttcaagtcagtcaaaaaattagttcttgtgacttgtaagtgtgcatgtattcatgcaaacatacgaatttctttaagtcaattgtatttgtattatgcagctgtatggacgctttccaaaattacatgtatatgcatatggagcagcaccatgtgtggactatgtgatcgcagaagcatgttcacagtttgttaccaggtgatactgaacttgtcatacctatgaacctattgttcatttatttatttgttcatatataccagtcatgtgattntctaactaagtgcccatcaatcacagtattgtccacaatgatgaattttct

SEQ ID NO: 16568 - DNA, 418 bp, Oryza sativa
  unsure (1)..(418): unsure at all n locations
ntgtgtaagttgctcttagttgcgtaactgcaaaagtttgtgccaaaaaaaaaatggccgctcgtaaaatgtcccttacacgaatcgccaccatgcaggtcttgttaatcgcttaattactcacatagttaagaaaattgcgttcgagaaaaaaacatagttaagaaaattattgtattttaaactgtcagtagagtaaactatgggctagacagcaacatttttcgacaattctgaaatcataatagatttttttcggttgaatttaaactgtttttgcacacccacccacagattcaccatattggcgtggcggtaaattccgccaattttattttttgcggcgcgaacgaggtgcatgcaaacatgaattgaaccaagcccggatctaccgccgccgcagcagcacggacaaaaa

SEQ ID NO: 16569 - DNA, 421 bp, Oryza sativa
  unsure (1)..(421): unsure at all n locations
agcttgattaaattngagactattactgtctgtttcttggatataccgaagtattctcttcactgctgcccaatggactgtagtatgacaatgtaaaaactaacacaccttattaacagagaaagaaatatctggccgtgtgagagtaagatattgaagtgcaccaacaatacttctataccttgttgaatcttctggacctaatttttctccctcgtgtatagacagtttttcataggatgacaaaggtgtattaactggtttactattctgcattgctacccttttaagcaagtccatggcatacctttcttgtcatactagaagaccgtccttggttcgtttcacttccattccaaggaagtaatgtacatcaccaagatcctttacggcgaagtctgcttcaagactctcgagaagt

SEQ ID NO: 16570 - DNA, 418 bp, Oryza sativa
tgatcatgatccttttccagtgaatacgattaatttcaatgataagaaggtgttgatccggccggagcaagccgaatctactaagggaaaaggagtggtcattggcgagccaagacctaagatgatagtgccaaagaagccggagattggcgtttggaaggagaataagagtgaagcttcaacttctaaagcccctaggaagaccaaagtgacttttgatatgcttttggagaagtatgagaagcaaggtggtgagaaggctcacaacaaaggaaaaagaccaagatcacctcctagggagtgatttggtcattcaccgagacgatcgcattcacctccatatcatcatctacaagacatgtcatggggttcttattcaatgccgccaccgggttatccttatccttattatatacca

SEQ ID NO: 16571 - DNA, 231 bp, Oryza sativa
agcttacaagtaaaccagatatggagatggcgactaaagttgctgtttccatttttatagaatttcaagattacaatggatctacgaaaagatcgtgtatttacaactacaacggaatagtatacaaagtcaacacaaatcattaaatggaatttatggctacacaaaccgttgaagatagttctagacctggaccaagacaaactcgcgtaggtaatttattgaaaccct

SEQ ID NO: 16572 - DNA, 399 bp, Oryza sativa
  unsure (1)..(399): unsure at all n locations
ctacttggtatgccttatataccgcgttntggcatccctctcaacaattaagagatccattcgaagaacacggggactaattgaagtaagaagttntnntntntttnntttntctctttttntttttttcttttcatccttcttctcctttttctttttntctttctttctcccatcctttcttcttttctcctattttccttctctcccttcctttttttctttttactctttcttcttctttgcctgttttcttttcactcttcttcatctttcttcctttttccttttctcttctttttcttcttttttcttctctttttctcatttttttctatctccgccttcattcctccttcttttttttattctcactccctacctttctttctttttctt

SEQ ID NO: 16573 - DNA, 442 bp, Oryza sativa
agctggtggcgctatattagataatgattactatacggacatagtcagaaacaaattgtacaagaaaaatcatcttaagaacctctctgcaagccaacgaaagttgttccatgctaccgacatgcattgagagctcgatatggccactgataacctaatatatggtccttgtggagaatacggaagtcattggcttttcgcctttatggaattatgtttgactaagaagaaacacagagatatttcttcacgtctaaagctgaatcacccgtggacatacgatagatattggtatgcgttatattatgttagagtatatggtagttagagatgtattaggataggattgatttgtatagattccttccttatctggaatccttccttatctcctcctcatgtactcctatatataccggccccctgaggctcaatacaatcg

SEQ ID NO: 16574 - DNA, 407 bp, Oryza sativa
  unsure (1)..(407): unsure at all n locations
ntattgccttcttgatttgaggtaggtaatttaatttttcatatttattcattctttgttttgatcgttggttggctcagattgacctttatttcaccagtgattgaagaggttcaacattttccagtgattgaagctctggtgacttttgggaggtcagcctcttttttttctagctcatacattcttatctttcaaattctcaaggcacatatcttttctctaatggcaaggaagattatgatcccaaattttttatctaccaatttgatttctttgtttcgaatgagaattatgttggcctttgtataaattaattaatgagatgctggtttcataacattntaaggatccactctatttttttccaatgtcttttttcagcatcacttcttttcattctaatg

SEQ ID NO: 16575 - DNA, 432 bp, Oryza sativa
  unsure (1)..(432): unsure at all n locations
agcttcgaatgtgttctagttcttctctctcttcgccgagagacaaagaaacattgcagctaataataggtccaagctaaacccttcgagctctacattgatttttctgtagcagcagatagtttgtggaatgccacacctggtccattggcaatttcccggtctttttcttcatcatgcatatccaagcccatgtgaaagtcagagttttggatatggtgtatcccaccacattaatatatacaataggacaacgtaattggagttaatacaatggaccgactacagctaatgcaccactcttataggtgacttagcattctaataggagacatgtccactctctttcttctacgagaacaccacgtaccctcttcttgnggtgatagggggtcctcgcagtaatggtaagacacctaaagtatgagaact

SEQ ID NO: 16576 - DNA, 400 bp, Oryza sativa
ttacctctagttgaagattgaaactgatgcagcttatcccgaaagcaagaactcgtcgaaagtaaaagggtggtgatgcgccgagattgtattgaacgattgttatttgattacatgggttcgggtcatatttatacccgagatacaaagtatgtctttgtcagacacgactcttatctctaacaaactctaatataccataagtctttgcgacagacttttgcccaaacttatctctaaggagtttacataaaatatcctaattaatagatacgattaccttttcgggacccaatccatgcgtggcaatccatatgaagcacattaactcaacccgacaacgtgtaccgagttacattgtcggaatcggctcaatcggctaccttatccgactcggact

SEQ ID NO: 16577 - DNA, 433 bp, Oryza sativa
agtcacctgcggcatgcaagcttaagggaagccagttggtttcatattttgatttagttaagactctacaaacatctaagtaagtgcttctcaacgacacggatgagaaagtgcgtctcatccggtcggagcagtgaaaattgtatcgattgattcttgtcggcacgagaggctccctgccaatcgtttaccgacccggctgctccaacagccacacgcgagaggctccttgccaatcgctcaccacaccggctgcaccaacagccacaaaccaagcacgtctgaacgagtggctccctgccaatcgttcaccgacaccggctgctccaacagtcttaaaccaagcacagaagggaaaacctcacacaccaacagcagtttacatagtgttcattaaaactatgctaaggaatcacctcacatccgcccatga

SEQ ID NO: 16578 - DNA, 504 bp, Oryza sativa
  unsure (1)..(504): unsure at all n locations
taagtcacctgcggcagcaagcttacacacgcaccatagctacaactttcattctntggtaagacttttgagttggaatgtgatgctagtggagttggcattggaggtgtgttgatgcaagatggtaagccggttgcatattttagcgagaagttgcatggttctgttttgaatcattccacgtatgataaggaattgtatgctcttgtacgttctttagagacgtggcgtcattatttgtgacctaaagaatgtgttattcactccaatcatgagtcgcttaaatatcttcgctctcaaaataatttgtatcgtagacatgctaaatgggttgaatttagggtaaattgaaaccatgcgattataattntgcatagtttgagatatgccatcggtatctcaatgacatgtaagacccacatgagtcaatgacatgtgggtcaggatggcatatctcannattntgcaaattataatggcatggttccaattttccttgaatta

SEQ ID NO: 16579 - DNA, 468 bp, Oryza sativa
  unsure (1)..(468): unsure at all n locations
agctatgccaaaactatgtcatatctttatcaattagatattagaattaaattaaattcatattacagagagcagaaattggtactagaattgttatgttgttagcattattatgttactctatattacagattgtttctgcattttctcagcactcaagtggaaaataagttggaaattcatgcatcgttttgtaattataataaatttctaaactaataaataacccatggagatctttctcatacattgtagtgctgtcgaaactcaagtatggttgaattggtaccatgattaatcgtagcttcatgcactttcttttattttggcaatggtctctttgcgtactcttctattcatgcaatgacatgagcattgaattctgaaactgaactggcattattttgaagaaataaaataacacccaatcatgttatcttattangcaacaagatcagtgatcatgct

SEQ ID NO: 16580 - DNA, 474 bp, Oryza sativa
  unsure (1)..(474): unsure at all n locations
agcttgacaatcggaaagttcgccgttttgtcaatcggacgcggcatgtaagaatgttcatggtctcgttntgccggtggtgaagacgttgactntggagagccaatcacccaatccatgcatccaatcaggtcgatcatatcagtggttgggaactgaacttgcttccaaagcaaacttaacacgtggatatggtatttatatactctgatcctccttgctcttcatcactacaacccacttcatcggaaagctagctaattaagcacctagcctaggaggaagatcgaccatgaggggcggcaggatgaggctggtcggngcggcgatgctggcgctgctctacatggtcgcgtcctttcaaggtgcctctggggccgccgccggcggctctccctccagcggtggngggaggagctccggcggaagtagttccagtggctcgagctctggcggtagcagcacaagaagccc

SEQ ID NO: 16581 - DNA, 480 bp, Oryza sativa
  unsure (1)..(480): unsure at all n locations
agcttaccggcagggttttgtctggcctactgtattgtccgacgccgacaaaattgtgcgcacatgtgaaggttgccaattttttgccagacaaattcatctaccagctcaagagttgcagactatcccactgtcttggccgcttgcggtttgggggctcgacatggttggcccgtttaaaaaggcagtctgcggttacacgcacctcttcgtggccattgacaaattttccaagtggatcgaagctaagcctgttgtcacgattacagcagataatgctcgcgatttcttcatcaacattgtgcacagattcggagtacccaatcggatcatcaccgataatggcacacaattcaccggcggagttttaaagacttttgtgaagactttggaatcaagatctgctatgcctcagtagcacacnccatgagcaatggacaggtggagcgagccaatggcatgatacttcaagggattaaa

SEQ ID NO: 16582 - DNA, 305 bp, Oryza sativa
aaccacagtacgcagcaagacacaccggagacgcacaattaacgcaagggggggtacaaggcgacaacaacataacgggctaagtacggcagtatacagcacgcaaaagtcacccaataagccaaagccaggcgagaaacacgagccgagagctacacaatattaataaccaaggacgcggacccacacgaacccgccataacccaaggcccacgaagagacaaaccgaaccggcaacccgaccccgtggcccagctcggcccaagccaacccaggccaaccataccacaacataggtgatgagc

SEQ ID NO: 16583 - DNA, 481 bp, Oryza sativa
  unsure (1)..(481): unsure at all n locations
agcttctcccgttagttcggcaccggtgatatactctngcacattcaagaatcgttgatcaatgaggcatcttatgtttctcacttaattcctgcattcctctcattctcatagcactctgaatctgttatatacataattctgcccttgcacacaacaatataacttgtggacactctaatgcttacacaactcctcagttaatctttttgcatccttatcatctgatctttcttgctcacgtgtagcatatccttatgtagcattaataatttcatattaaaagcgtactcacgtgtgcctaatatttatatgcacttggattaaaacctatttggtgagttatttttaaataggaatgaatgtttaactttaacaaatcatcaaacataaattaggtgatatataattgaatagaanaccaaaaaaaatgtnaaanaagaattaatcacttgacaacttatcaagtatataatggcta

SEQ ID NO: 16584 - DNA, 425 bp, Oryza sativa
  unsure (1)..(425): unsure at all n locations
agctcgctggtgccatttctctctctatctggaccatgtcgntgccagatgtgtttcctactgttctggttttcttgttcccagcctttaccatctatatacgagtcacatcgtttcctcatcgccgtttggtcacccgagcaccgatacccatcttccctcctattttgttacttgccttcggctaaggaagacgatgaacaatgctattccttcctagtctagccataccatgctcctagatcactcatataatagagacaataggaatatgaatagaacaagaaaattttaatttatctcaatgaaacgaacacccgttcagaattgatggatcatattttcatctatcagctaaaataggttttttcagtttatagctaatttcagttggttgttatttacaattgtagagtaaaatttca

SEQ ID NO: 16585 - DNA, 402 bp, Oryza sativa
agcttcgctgtgtgtagaagaagaatattatattatatgtcatataaaaaatatattttgtatcaaatatcttatcattatatggtattcacttgtttgaatcaaacgttgggctatttcataatattagaaaatattataaagtaatttacaaaaactacaaatacaataatgaagtgacagatttactgtcaccataactactccctctgtaaaaaaccaacctcgtattacgatgtgacaatgaatctagacttcgagaatatccaaattcgttgtactatgttatgtcatatcctaattaaacgaatctcatactaggatgttatttagggagtataatgctttaaaaagatatatgtcttggttagataaaaaaaattggcaaaaatgttcataaat

SEQ ID NO: 16586 - DNA, 406 bp, Oryza sativa
  unsure (1)..(406): unsure at all n locations
agcttcaccgaaacgtcgtagaaggcgaatcgagctcggttctcactgagctcaagtgacaggaacccttgtccatcatagaagaactggagcttgtcttcgttntgttgaaaaatgcctctccatgcctttgatccgcctccactagtgaagtactgaattggactgaaaagagaggaggaagaacataagattcttgaacccttctttcctctattgtgtcacaaggtattagtgtgctcacctgtttctgctgctgatgtgctccaggcagtgatcatgcccattgatgtagaaatcgacaccgttttcctgtgaaatcatcgtaaatttcatcgaatgctcatatgcgaaaccaattggtagaagattaaagtactactttntatcagtgttaccttgagga

SEQ ID NO: 16587 - DNA, 413 bp, Oryza sativa
  unsure (1)..(413): unsure at all n locations
gtgcaagcttgcaattgtacctgacattcgtctatgagaccgcaccaatgtttcactgcctaaactctctcatcaatgagatcgcccaatgcttcactgcctccttcatatcctccttatgagcatatgtagcaccctcaattaccttgttatccttgtattcccagggtacatgatgctcctctgagataacaagtcccgagaagtcctcgtttgtccaatcagtgggcattacatcaccttcctcgtcggatgatgcatcaccctccgcttgctcgttatccgaatcttccctctccatttcatcaacgattgcatagcatctctccccctcatccgccacgcccatggnctgctccacccctgtgtcatttcctcatcttaccctgatggttcaacagaatccccctcat

SEQ ID NO: 16588 - DNA, 445 bp, Oryza sativa
agcttcttagggttaccagatgaccctttctctaagcccatttgggacaaccaagctcaagtcaaatgcaagatcttcctttggactacacacaagaggcgcatcttcaccaatgagagacgagctcaacgtggattagcagcatccgcacgttgtccattttgctcctctgatgaagatgtggagcatctcttcctacgctgtgccgaagtggcaacaatctggcacacctttgacctggacgaacaacagatcgcctccctgccgcagcttgaaggtgtctgggacatccctccacccggacaacccgccactccacgagtctggcgcactatcatgcttgccgtcatgtggaatatttggaaaggacgcaacaacaaggtcttcaattccgttgacgaacccgccacgttagttcttcggtgttgtgctagcgacattgatc

SEQ ID NO: 16589 - DNA, 491 bp, Oryza sativa
  unsure (1)..(491): unsure at all n locations
agcttggtcgaacattcgacccgtggcggcttgctacaggtagatgaaagaaaacagagaatcggagatgagaaattgtagaattgannatttgcttggctttaattcatccgaatggctacctcttaataggggcttacaattggtannaccaaattactataagaaatagctaacaaactggtaattaaggaaaagagttaacaaactttatctaatttgcaagcggatagaactgttgccgtccggcgcggctgatcaggcgcgacgcgctgcgctccctgctgccgcgtcctgctgagccggcgtgcctctgcgacgatacgtacgtaatcctgaccatgacacatttatgtttggtttgcatttcaaatatcatcgtagcattaccacgcatattactagtgatctaattagggagactaaccaacgggagactcggagagctacgaaccaatgattaagcacaacttctatatatacgtaatgga

SEQ ID NO: 16590 - DNA, 518 bp, Oryza sativa
cgccatccttaagtcacctgccgcatgcaagcttgccatgggattaaccatctggaatctctatcagaagatgaatgaacacatctaatgtaataaaaacagtataaatcatcagggagcatacctgtgcaaagtgctcggaagttctctgtaggaaaaaaaaaagatatagtgaatcattagcatttgtgatatgacaatgaatttcctgttacctaactaaatgataagcaaatggtacctgccgttttaggaacagtcttcccgaaaagtcccatgacaacccgtcctatggcaatacaagaaaaaataataaatgtcagtaaggcaatcattaacaggaaagacattataaatagtacatacacaaatatcacatcaacgtttctccttaaacataaacaacaatagaagaagctaaattctcatcataatagagttagcttcaggtcaatctcaaatgctgataactctaactgtaataatcactgcatatgacatcagcccatcacaagtca

SEQ ID NO: 16591 - DNA, 467 bp, Oryza sativa
  unsure (1)..(467): unsure at all n locations
ctgccgcatgcaagcttgtgtccggtgctcctgtggctagatcttacatcccttccttccttccttgtcagatctcggtgctcccttggctagctagatctggcatatattctcgctcggatcggggcaggcaggtggtggctagcggctgccaaggacgatgctggcaacagtagaaggtcggggtcagcacaggcaaccgtgcgggtgatgacgggaggtcagctcgcatggcacctcgagctacctcgtttcgctcgtgagccaaatagtacatttttgactagtcttcacttcaaagatagcacccaagtcccaaaaataacataagagattatactagttgcagaaatgaattttgtaattcaataaaaatcaagcaactggcaattntttgtgcacatcagtttggaatatgggatatcgaatccatccacccaaccgacaatccgagatttacgagatct

SEQ ID NO: 16592 - DNA, 463 bp, Oryza sativa
  unsure (1)..(463): unsure at all n locations
agcnttcttgttagcctgtgagagcattctgtgtcatatctcatatgcatacttagttctttgattattgtactatacatgtcatctctgggaatgcacgtctgtcattcactgaaacggtggtgctccagtttccctgtttctcttgtagtgatacttacctgtactcctgtctatagctgatatgtggattcctctgacgacatacatgctggtgtaaaactgctcatcttaccgtgaattttgtattttctggaaaagtatcattggctccccaaacaatttttcgattgttgatggctaagttttcttaacccttggtaggtagtttatttcttctgcaatgcagtgccctatacattatggactgctagtgttcactttttctgtactctgcaactgggacaaatatcatatcttctgtangcaaagaggcattacattatgtataagtctgatgctg

SEQ ID NO: 16593 - DNA, 469 bp, Oryza sativa
  unsure (1)..(469): unsure at all n locations
agcttggagtggaccgttggtcccgtagttatttactctctcacatcgaggaggtttttccacgtaaatcaccatatcttgtgtgtatgtgtttattgttattgcattgttgatttgctagttgaaactatcctcaaagttcatggcaagatgatgggttgattgtgtgaaatatgtttgccggttagtgaattgtactttgcacattctacgtgttttggttcagtcccaacacacggtcctcccactcccaatggccgccgcaaccaaaggttcttgtggaacgctacagcgcgggaggctaatgtggacgggataatgatgtggacactggcgccagtcctggagctggaacgcatcgctgtcgactccggtggtgacccatatgccatccaccactgcgcggtaagttcccatatatcccgtntatcttaaccagcgtttacgattccgagatggccttatgttt

SEQ ID NO: 16594 - DNA, 457 bp, Oryza sativa
  unsure (1)..(457): unsure at all n locations
agcttanggagtgaaatagacttctctcttttaaacgatataaaagctcgaattcatgagttggaaattagggttcccatggaaattcaaaatttttactagaaaagtttagaaagttcgagctgaaagtttgagtggtattgttgaaagttttacagtacattgctaaaggtaaaaaactcactgctcaattatccacagaaaataaaaaaacaatccctctatttatgtgttagcgatgctaaaaattaaggctgtcaaaagagaaactctaggctcgtgagccacttgagctcagctcattcaggcccagttcgggctcagctaacacttcaaacaagcttaactttatatgacttacgctatttattcagccttgttatttgttaattaaactaatagggaaaacatgtattagtactccctccgcttctaaatatttaacaccattgacttt

SEQ ID NO: 16595 - DNA, 454 bp, Oryza sativa
  unsure (1)..(454): unsure at all n locations
caagcttgctataaagtacatgtattgctcctatcaaatacacaaaataataaatatctaaaattagcttgacttaaaccatccatttcgcttcatgtggtcctgattatctggacagggctacaaaacaaccaaaatgtatattgtcactctagttattatttgtatttagacaaaaaaaaagaatattgtccatttcttacttgaagataaagtgctgatgtggcatatgccacgcgaatgtgacgtgacataatattgactgataaataggactcacttaaaaattttccttttccttcttctttttcttttccttctccttctcattctcattcttctctttntttccctttatactcctttctctatctacaactgtaggccaccgccgcacggngtgctcgggtcacagagaaaggagaaaaaaagaanaaaagagagagaanaatga

SEQ ID NO: 16596 - DNA, 443 bp, Oryza sativa
  unsure (1)..(443): unsure at all n locations
agcttatcgtccacagcttcacacactgtttattccgacaatgctcgtggctgcagaaaggcacgacaagcatgcccccacgaacatcgccggcccggtgcccatccatcccatgtgacgagaagatacgtacggccggngggattaagtacgcatcaattaaatccctcacaaaggaataagtacaccttaattgattactcctccattacacccaaacaatacaggaacagagaagctacagccgctagctacgacaaagtacaacatcaatagtccccttgataaataaaacacggcctcgcggtttttaattccgttgcaaggccatcactccggtacaagaaaacgctcaaaagtagaaatttaatcaatacaattattattgattntttcttcaagtagtactaagcttagtactcccctntactactaccactaca

SEQ ID NO: 16597 - DNA, 467 bp, Oryza sativa
  unsure (1)..(467): unsure at all n locations
agcttcggatgtgcatcgactacaccgtctctttcaaggcatgtcctaaggacccttacccncttcctcgcatagatcagattgtcgactccacagcggngtgcgaccttttgtgttttctagatgcatactctggttaccatcagattcgcatggctagggaggatgaggaaaaaactgcgttcattacccccataggaacttattgttatacgacaatgccattcgggttaaagaatgcaggtcctacttttcaacgtactactcgaatttctttgggtagccaaataggacgtaatgttgaggcttatgtcgatgacttggttgtgaagacgcgcgaccgagaaactntactttcagatctggcggaaactntcgagagtctccgctccacccgcataaagctgaaccccgataagtgcgtgttcggtgtacctgcgggcanagcttctcggttctttgtctct

SEQ ID NO: 16598 - DNA, 470 bp, Oryza sativa
  unsure (1)..(470): unsure at all n locations
agcttggctccaataaagaccacattatatgccgatagctccccaccacttgtcaagggccagaagcgtgaacgcggcaaggggaaggtcgaggagttggcgccggagccaaaaaggggcaaggctgcgacgtcgatgccggtgagcaaatcggggaaggtcgtgagggcgccagcccaatttgagctaggcatgccattggtggaggacaatgtgttagctgtgatgggtattgcttgccgagagctacataagcaatacatggagctaagcaatgccaagcggaaaatgagggagtcatccatagttggacatcacgaccaccagccgttcctatcgtcgcctgcctatataactataggctntgatgacctcttcgaccttttcaggatccggaagttggacactggtcttctaaaatgctactccttgtagtgcataccttctatacttgtgatatgactggacta

SEQ ID NO: 16599 - DNA, 402 bp, Oryza sativa
  unsure (1)..(402): unsure at all n locations
gcaagctgacgacgatgtttctcatgactcttgccgaacgnatacatgatggtcagggtgggtggaggctttagagcangtttaatcgcatagcctactactagctccaaatcatctatagctaatgtaataggcaattcatataatagatgcttactatactattaatacctggccccacctgtgatacacacattacggattgaagtccgcgctgtagctggctacagatatgtagcccgctactcttctctctctttatgtatcttattaaaaatatatctatacgtggctgatagcccgctattatacctgctcttagagagttcctggccagcacgctaacgcagaagcaatgtntntatattaatcacactagcaactatatttcacgctacatct

SEQ ID NO: 16600 - DNA, 468 bp, Oryza sativa
agcttcatctgctcatatacttactatgttccttgctagaatgctggttgagttctttgaccagatgaatgtttgtagagttatccctagtaatttaaatcatgcaggtgatgtctaggtttaaatgattttcatcagatgtagaggtcacagccttccacatgccatttttcattgatatacccgtgtatcaacacattaagcaatactcttagtctccaagtcatgatatttctggcatatctcttcttctcagttttttttaacataaagctttgtccatatatatattgtatagcatcaaatagatgaatcttttgtgcacttctcttcagaatgtcgatgccagacaaaattctccttttgtattgatgctcatagcatagctatgatattttgagaattgagaacctcattagtccagttgatctaagaaattatgtttgtgggtttcatattggcatttct

SEQ ID NO: 16601 - DNA, 501 bp, Oryza sativa
ctgcacgctgccaagctttgcattcttacaccacctacttgttattactgttctaccaacattaattaattaatttgagaagcaatcagcattaatcaatgcgaacgggtcatgttaaaattatactctcttgagttgcccactttcggaggacggcaaccttttacccgtgcactagcttgagtgtgaagcgcacacgtccggtactgtacgaatccgtattatatccatacgacgaataacacatctatcctcgtacacatatacagaggcgggattacgagtttaaagtatcgtgttcaaaatataaaaggttaaagaggattttatagctaaaagctgacgtgcataatatatatactaatggtataacatatttataacatatagtatacgaatactatactaattgcatataggatatactctctccactttagaatataaccatgtttagagttgaagaccgttcttaacaagatagatagtaataaatcgatg

SEQ ID NO: 16602 - DNA, 464 bp, Oryza sativa
  unsure (1)..(464): unsure at all n locations
agcttggacatntttaatccagatgaaagacatgtatcaaattgtatatatagttaagttgcaagaaagtttcctccagaaattaaagttgttcatctagaaattttcgttgtacatatcatatgcataagaaaaaatattaatggaagttctctacacatcaaaatcttgaaattgtcttttcaacattnttttttgaatgtggaatatctaatacgtactatacatctaactccatctctttaattacctgtgtgctggaaattgcgtagaaacttaccaaagaaatgagccagaagaacaatagatataggcatatatagagacgacagtaaaaaatatctattcagaaaattttcaagatcaaacccactcgtacgtgcatcatacatgaatgccagcaaggttgaaaaggggtgaagtttgtgtatatggaagtattaacattaatatacattccatac

SEQ ID NO: 16603 - DNA, 466 bp, Oryza sativa
agcttaagccctgcaggtatccgcaacctatataaaggaggtaatcttctaactgttcacaagatgtaattagatataaaccatattatgtttatagtaaattaattaacaaagagcaacagttcttatcacctgaggtaaagtagaacaacggttatccttaaaaacaatcacgtcccctcgtctaataccgattctctcagcagtagaatcaacttttaccttaatttgagaccaaaaagggtcaaatactatgggtcaaatcctgtgagaaaaatatctggatggaacagtattataccagattcacaatgaaaccgccggtgatattgtactcaagacaaagttcctcccgcatagagacatccagtagttccacagccttcaattgcatgccaagcatgggacgagcaacacggctaaaaatgagtcggaattagagcgtcagctccaaaagttaaactat

SEQ ID NO: 16604 - DNA, 446 bp, Oryza sativa
  unsure (1)..(446): unsure at all n locations
agctngcaagttcaattccatactccgtatattccttgcaaggaagttttcacaaacctctggaagatcatcaaattgaacatttctcccctttccgtggtttagcttctgatggcaatgatctgatgtcgttcgtctgcaggtcagttcattctccattccagtactgaagtaaaaaaaaatacaagccttacagttacaacagaaaaccaaatggatgctccaaggcatacgtctggccctctaaggccttgattaaggttgattaggtgggatttggaattgatttatttcaatcgcttcgtcatgggattaaccgaaacaaccgatggccaattagtgccgactgttgtgacccaagtgtagtggtgctgtaatttgtccacattgagagctaactgtgcactgcactatcgtgtacagcgcttacactttttgttttcaac

SEQ ID NO: 16605 - DNA, 406 bp, Oryza sativa
  unsure (1)..(406): unsure at all n locations
agctntactgccaattaaatttcttacttttgtccttctcgcagtagatcatttcctacaaaattgttaatcactactacaacaatcaaaaagcttaaaagcatcaacagaagctcaaaagatacattaaagggtattttgctacgccattgcggccaatcctccaatctacacgcaaagaatacaccgagaacaccgctctcgtgctactggttcaatgactaaaattttgacaataggaggccccttttgctcgcccatcttcgtttttaggtcaaataccccagcaattgtaaccacagtcacctaaatcctcactgagaaggcataattcaccttgataagatcaaattaggccatccagtctgagatcccgacctagaccactcccatcagagagctccac

SEQ ID NO: 16606 - DNA, 363 bp, Oryza sativa
  unsure (1)..(363): unsure at all n locations
ctgctgcatgcaagctcataatagcgagagggagatgtattctcttttggatcagaataaccgatgacacgggattgtttcgatcgctcccacgtttggttccatgcactggcgcggcatgatcgcctanatgatacggttccaggagagggttcattatctggggagggaacaccctaatatccagcggtctcggttatgtgcgaccgaatggcgacactatggcgactcaattggcggcgatgtgtcatggtcacggcctcgataggggaggcgcaaggctatgccctagggtgacacgcggtcgacgtggcgaccgatatccctctatcccgaaagcgacgctcgatgtgaccggatgac

SEQ ID NO: 16607 - DNA, 455 bp, Oryza sativa
  unsure (1)..(455): unsure at all n locations
agcttangtgatgatcaactcgggatggtgaaagtatatataaacacgttggaaacagatacagtagtgaaacatattgtatggtgtatttcaacagagactatgcaataaacaagggcaaataagaaaatgacccaataaagtatacatgcaagccttatgtttcaaacaagatgaagaaaaccttgtgccatacatagtacacaaacggacagatcccatccgatggcgaagtatatattgaggcatctaaggaatatatatatccaagtcgttggacgtctcttaggcatctcagaaattaatccctggcggatgatgcatgcatatggacattcaacggngttcaaagtctagtctctccatcgtcgccatggaagaccaccataaatgtcaatatgcacgtgcgcagtgcgctaatccatgtcagacgcacgtgcgctaatcaccacgga

SEQ ID NO: 16608 - DNA, 451 bp, Oryza sativa
  unsure (1)..(451): unsure at all n locations
agctngagttcagtgtcagttacattatgttctaactgtnttttatggcaaatttacaattatagtttttttagttgcagatccacgatacctgttcaatccagtggcaaatatgcaattgacccttccgaataacaattttgttttagaaaagtttatgaaatatatctaacgaattgatgatatcgtgatatatagaacttttcaagccaaatttgatttcctttgtattaaaactaagtatttgagaaattattaatggtcagaattttaaaagttctctcaaatctttatgaccagacccttacgagaaataattgttagtggtctggtcatagaattttagtggaatttttagagctctagaaataattctaaccaattaaaattgagcacaagcaatatttaatcccaggaaaaatcatttccttcttttttttctttttccctt

SEQ ID NO: 16609 - DNA, 451 bp, Oryza sativa
  unsure (1)..(451): unsure at all n locations
agctngcctacatctcctcccacttctgtatctcgacgctatagccgctagaccccaagtggagatggtacttcttcttggcagcattttctttgtttctttccatcatcgcctgcccttgatgacctgtcttgtaagcaacgaacttgtcccagtgatcccttagcttcgggaatacgtcgaagctcggtgtctgccccttcaggatgtatttccggtacagatctcccttgaaggtctggaaccgttctgccattttcttaagagtccactgtttcactatgttctctgtacctgtagggagcgtgaacatctagagcattgtggtccacagcatctctttctctgattccgggacaaagctgtcatcacccccgcgtgcctttgatctgcgctagtacaccttgctgacatgcacgttataccctacaacccaaccgctgtggcgtac

SEQ ID NO: 16610 - DNA, 286 bp, Oryza sativa
  unsure (1)..(286): unsure at all n locations
agcttangcctgatggtacaatcgattatgtcatggcaaggctngttgccaagggttatacccaaaaggaaggcgaggacttcttcgacacatactcaccagtggcttctttgaccacgattcgagtactacttgctctggcagcctctcatggtcttctcgtccatcagatggacattaagatagctttcctacacggagagctggaggaggagatctatatggatcacccacacgggtatgcactataaggccaagaggaaatggtgtagaaactgaagaaatc

SEQ ID NO: 16611 - DNA, 417 bp, Oryza sativa
agctggctcttagtgattatggatgcattgtaagtatgccagggtttacatttgcagttaccgcttggtgaaaacaacattatgaataaaattgttatatgtgaaagaacttttttgctaccgaagatttcagtttattttgtgctcaaatgatttatactctactgatatgtcatcttttccctttcagttacttgttgccattctttccgttgttgatgacacaaagcttgttaccaaggttagctagctccagtcttctatgcacctgttctgagtattgtgctgtgataaatatcgtatggagcatttatataacacttttgtttgatttgatagatcgtaattcaagagctcgccaaacatttgaagcaacttatttttgacaaggtgaaaaggaacactgagcttctgata

SEQ ID NO: 16612 - DNA, 370 bp, Oryza sativa
agcttatactcatgctacatatcttcaatgttgtcaagcgaatcataaggtatttaaatcatatacttgagtttggaatatggtattctactgtcattttctatatgcttgagtggatattctgatgctgattttgttggttgtaaaattgataggaaaagtactagtggaacatgtcattttcttggtacatcattgattgcatggtcttctacgaaacaatttagtgttgctcaatcaactgctgaatcagaataagttgctgctgctagttgttgttcttagattctttggcttatatcaactctgaaagattatggtcttacttttgagagagtatctctcttttgtgatcatactaggaaagaaa

SEQ ID NO: 16613 - DNA, 466 bp, Oryza sativa
  unsure (1)..(466): unsure at all n locations
agctnttcagattatcctattaagtttttttgttctgttatcagactgttctatataaaaatccatacaatgctttcatcattgcgatagcaatttctgtgcatcttattcgattgttttgtaccagaaataaaaggagtggtccaagccggtttgcaagtcatagtggaactatacatctgttctaccggtggaggcagtatttggatgcgtcatttcacctgagcagatgtggctgtgtgtgttactgtgcatgtgtgtgttgttttcctttatttttcctcttgccctttgctttgctgtttttacctgatgaagtataatgaaatggtagggcagcaacaggtagccctttgttttgctggtttcacctgatgaaatgtgatgagatggtagggcagcaacaggtagccttcaataaaagaaaaggttgctactcgcaacattactaatgcgtctgttaatt

SEQ ID NO: 16614 - DNA, 495 bp, Oryza sativa
  unsure (1)..(495): unsure at all n locations
atccttgagtcacctgcggcatgcaagcttctccatgcaaattataagatntgtgttttataatataatgtggcttataactgtttgttagcaagaaaagaaaaagaaacatgcgttgtctaactctttccattagctatcttttgacaatttagtgctcgttcactgataaaatactcccaactttatcctgaagttttgttgtcttctcattgtattggaagctccagcctattttcgtcatttatgttttatctgttcaacagactgttagactgctttttaatgtattccatgggatattttatcaaatacaacgcgttagtgtttgccatgtttttctgcttcatagtattactagccaagagcccacgtgttgcaatggaaaataaaaggtttctagcttattaagtcaattaagcacatatttagtccaagtaccgcttctatgattttccttattgaacaaataggtgatttcaaaattaatgtcag

SEQ ID NO: 16615 - DNA, 447 bp, Oryza sativa
  unsure (1)..(447): unsure at all n locations
agcttacccgcaggtacaccaaacacacacttatctgggttcagttntatgcgggcggagcggagattctcaaaagtttccgctagatctgaaagtaaggtctcttggttgcgtgtttttacaaccaagtcatcgacatacgcctcaacattacgtcctatttgactacccaaagaaattcgagtagtacgctgaaaagtaggacctgcattctttaacccgaagggcattgatgtataacaataggttcctacggnggtaatgaacgcagttttttcctcatcctccctagccatgcgaatctgatggtaaccagagtatgcatctagaaaacacaaaaggtcgcaccccgcagtggagtcgacgatctgatctatgcgaggcagggggtaaggatccttangacatgccttgttaaggtcggtgtagtcgatgcacatccgaagc

SEQ ID NO: 16616 - DNA, 442 bp, Oryza sativa
cgatcttaagcgacgcggctgcagcttccaggcattgagagcccagtatctctaccctttggttaactaagccttggccttcgccttcgcttctcttttgccttatgccccctcttttgatcctcctttcggcttataaaaaacccagggcttattcatgcaccatcatggaatagtcactttcttgttaaacgccaatgctggtccacgggaatccagcgagtaattgcatgcaacaactaagatatcaatctttaggaggccgctctatgatcaaacataacttaggatactagtacgctgatctcacaagaaactaagatatcaatcaagcgtattaaagacaattacttcgcttcactgttgaacgcgctattctcaatatgtgatcaagatcctctgctggtagcaaaaggaaattactaagctttaagactacaaa

SEQ ID NO: 16617 - DNA, 453 bp, Oryza sativa
  unsure (1)..(453): unsure at all n locations
agcttgctgctctcactttccttgccgtctcttctttagttntagctattatggtggcagtggttgacgccatgtgtcgaaaaatctgtgtgttgtgctcacgcaaaagttcctatacaatgagaatgagaagggatttgagtgacatcttcggcgtccgtggcatagagagaatttgttgccaccactcctctatacggtgtcacaggtttcctattgttgttaggtgaaactgcatctattgacatatcgtcatccatatcctctgtaaatatttgtatttcgctagtaggtttattgttgtccccggtgctatccgactgagagtgggcacatttacgggtttggcatcctcttcttttaagcatatccaccgtccaaacttggtatagtcttgttntacaagccaaatggagaactttgcattaggatagcgcaacacttacagatcat

SEQ ID NO: 16618 - DNA, 480 bp, Oryza sativa
  unsure (1)..(480): unsure at all n locations
agctngngagaggcataagagaggttttatactgtgagaagaccaacaacaacaagcccaacaactacaagtcgaagggttctaaccaagggaggaagatggagaatcttaggaaggtttttcaacaagtttgcgccgccttcgaaccactaagtgatgtagatggtgaaagtggagatgatgataagggaaagaacgtctcggatatttgcttcatggcgcgtggcgaatctgacacagagtatgaagataatgaggtgagtgcttttgaagaagctattaatattttgagtgcaaaaaataaaaagtgtgagaagatgtataaaaaacaggaatttatcattgaatctcttaagtctgaaatgataggttaaaatcttttattcctaatgatgatgattgtgaaaatcgtgagggtttaatggaatgagattcanaaattagagatggtaatgctgcacatganttgaaaatagatct

SEQ ID NO: 16619 - DNA, 454 bp, Oryza sativa
  unsure (1)..(454): unsure at all n locations
agcttgctntggcgaagtcgtctcccttctgcatatactcttcgccctgcatccttcgcccaagaggcctccggcttggcagagtacccgcacgatccttcgcctctcaccgtccttgttccatagtcttcgccatggggggggcttagccccgactaactttgacgtttcgggcttggatccccactcctcgcatagccttcagcagattntggtcgaagggcctcatgccataccgccaacaagcccctcatgggcaagggtgagattggagcttcggccgagaccatgcaaaccatgtggtatgtggtatggtatgtggcgccccctttcaaccgatgctcctgccgaaacctacattgttcctgcaaataaagtttgttgtctgtgcggctggtattgacttgccgctcttcgccttctgcggacggtgatatatattttttatttttta

SEQ ID NO: 16620 - DNA, 360 bp, Oryza sativa
  unsure (1)..(360): unsure at all n locations
agcttaacangctcgtcgcgcgcgttattgttgtttctgtaagtagaactaatactaggaccctgacactgcatgcgacacgctatatactacctgatgtgacacttcatatggttaaacacctggctctagacaacccatgacctatgatgctatgataacgagccttgcaaacacaattgtatagacacattatatcgagtgagattgtgcgcgcctaaaaaccgaagtcaaagttagaaggtatgttttgagatcagctctgagccaacaatcccggtgcctcacgtgaccagatactattatatcgatggatctattaggcacgatgggcctcgtagtatgacgatgggatactat

SEQ ID NO: 16621 - DNA, 479 bp, Oryza sativa
  unsure (1)..(479): unsure at all n locations
agctngagcaaggcggattcagtgcagtgtatctgtgctacctcagagagcttggcctcgccgtcgccataaagaggtttgccaaaaattcctctaagcaagggaggaaggagtacaagtcagagatcaaggtaataagccggctacgccaccgcaatctggtgcagctcattggctggtgccatggccgcaccgagctgctcctcgtctacgagctattccccaaccgtagcctcgacgtccatctccacggcaatggcaccttcctcacatggccaatgaggtttattaattaactcattgatttagtaattttcgctatgtgcaatcgacacctttgaaattcaactgatcagctgacttggatgttgccacaggatcaatattgttcatggactcggatctgcactactctacctacatgaggagtgagatcaatgtgtagtgcaccgtgacatcnagccgagcaacgtcatgct

SEQ ID NO: 16622 - DNA, 394 bp, Oryza sativa
agctgggaagagaggcaatgttgttttgcttaatctttgctctggaaatcattttgaaatcactaagtgatttatttctttctaagtttgggccaaaaagagatttgtgtctcgattctactctaagagatgtttttcaacagctcatttggtaatgtaccgacctcccggttcagatcattacttctcggctcccagagccatttcacttgattaatcggctcccaaagccttttcattttctcggactcccagagtccagctgcccagcagcacaacaatccgcttccactcaggaagcctagtctatgatgcccgtagacatcccgaatcacacagattcgtttcttgaccactcaggtcatccatctgccacataggctgattctggtaa

SEQ ID NO: 16623 - DNA, 261 bp, Oryza sativa
agcttgtgttggcgcaagttgttttctgtctcctggctgagactgttgcgcgtgttatcgaacacaacgatgtcgttcccacactgacacgacatctcacgatgttgtaagatatctgggagcagtaggctaacgcgtatatgcgacatgggtcacgcgattcgtctaccaccaacatcgtcgacgcatatctcccaggctccgagccgctgctagcatgcaccaccatgcgttggatggaactcgtgaaaatcactacaa

SEQ ID NO: 16624 - DNA, 488 bp, Oryza sativa
  unsure (1)..(488): unsure at all n locations
agctngcagntctcanatctganattgatcttgtttgtgaagctattgcgggagagatcaaaaacccttaatgcttcaatattgctcaatgtatctggaaggatcccactcaatcgattacgtagtagatggagcacctccagtttggtgcagttgccaatggaactgggcattggtcctgatataccattacctgataaatcaatgactttcaggtgcttcatgagtcctatctgaggacctagagaaccagacaatccagaatatgataagttaagagaaaccacattgctcatttcatcacaatcaactcctttccatgtacacggagttgcatcatcagcactccaattcgagcttatggagctgggcagtatcagagtcttggctagatccagaagagccaggccatctgcgctcaaactacaacacaatggggccaagctgaacaagacaaccaaccaacaccatatgtgcagtcccattat

SEQ ID NO: 16625 - DNA, 453 bp, Oryza sativa
  unsure (1)..(453): unsure at all n locations
agcttaactatactctggttcttggttcttctttatacctctgctttcttgcgctatgaaggcaaaatctatttgttatataaaaaatatctatctattatatactaaaagttcattaaactttttataaacactcttaaactgccatatggcacttctacaaacgctccaaaactaccacgtggcactgtcaaatccaacgtcgattttcacttaaattacctaatatgatatattttattttaagaaactaattccttaatctctatatgtatacggtagaactataactgccataactgcaagtactacatacgtacgtacgacttanaaacaaagaagtacagacgtacgcaaagacgtacctgctgttcgtctgaagaaaaatatataaacctacgcacagacgtactatgaataaagatcaatanagcanaanaaacacatacgtac

SEQ ID NO: 16626 - DNA, 429 bp, Oryza sativa
  unsure (1)..(429): unsure at all n locations
agctngtgtgttcatggcagagcctcagctcttattttatacagatcacactgtgtaacttgtttctttgtacccgaaaacaagtttgggagttcgactgaatcgagccctccatctgccatctaggataggatccgccccctgcaaaagcgcgaagcaatactagacaaaatacaccataacacacactgcatattatgctattgtgatagccgtgggggcaattacgccataactaatactacttataggtcccacagttagaatcatagcttgcgtcatcaatacgataatctttttatatgaaaaacgacgcagcacaataggggctacatactctaaccgtaataactgactgcttctttcaggcataggatagaaaccaagtttgatcttttgagtgaccctctttcatatctaattgcatgt

SEQ ID NO: 16627 - DNA, 484 bp, Oryza sativa
  unsure (1)..(484): unsure at all n locations
agctngagtgtgtgtgatatttgagctgtcactacctagtagttgataggagcatgcatatttttgtgtgtttcttgtttggtactaaccatggcaggattgcgtaatggaatacgagaacatcaacttctacaccttcgacgagatatgacgacttctccaaatgatgcatatgaggtacatgactataattntgaacaagttgcatctaagttacccttctatgatgggaagtatgattctgttgcatacattgattgggagctagcagtagaaaatgaatttgatatatatgatttttctgatgctcaaatgattaaggctgctagtaataagtttacctcttctgcattattntggtggacttatgttagtaataaacctganacttgngatgaattgaaaaccatgatgaganaacgctntgtgacatcttattacaaatgtactcttcgggagaaaatagaacatctgaaacaaggtg

SEQ ID NO: 16628 - DNA, 457 bp, Oryza sativa
  unsure (1)..(457): unsure at all n locations
agctntntccattntttgttcatctacgttgtctcataataatataggctntgatttcaaattatttcctgaagtcaagctgtctggagaacatcttgaaacggtattcaaatacaaaaatggcgatgatgtccgggagatagccaaaattaacattactctccaaaaagaagagggtggtttatataatttacgtggattggattttaaggggtgcttcttttctggacagaacttcagtaactatgatattcaatatgtgaactggggaacgtcattgtttgatgttgatactccgtgtatttttaatgcgcctgcttacaacaagagtaatgaaaaatcattaaaacctgtgagcgaaaacggtttaagtggagtattgactgatcgtaataataaaataaaactcatcacgggcgtggcaccattcgatgatattttatttatggatgatgac

SEQ ID NO: 16629 - DNA, 467 bp, Oryza sativa
  unsure (1)..(467): unsure at all n locations
agcttgaatgacaatatatatattttatttgatagactttatggtgcaagccaaggtgatcattgatagacatatgtatctcagtggccactatcgttttggaactgaaaagtgcggcgctgttcttaagcctcagcgtgaatgaaggataattacccaagttaatcacccgaataattaatgaccctcaatgttcttgcttttttttacgtttttcacatgagacatgttcttcatccccaattccccatcaccctagtattatcagagccattagcaaattaattggattggaatcgtaatctaaacatggtgtacacgggaacagcgtcgtgcgccgttcagcccgtggaaaagaaaaatctcactctntttccatganaaatagagaggtaataaaggataagaacaaagagggaaaaagacaaatggataacacaacgaacatcaagtnttttttaacaaat

SEQ ID NO: 16630 - DNA, 385 bp, Oryza sativa
  unsure (1)..(385): unsure at all n locations
agcttctcctcatgcttcacatcgtctttcggtcaagcgaataataaggtatttaaatcatatacttgagtttggaatttggtattctacttcattttctatatgcttgagtggatattctgatgctgattttgttggttgtaaaattgataggaaaagtactagtggaacatgtcattttcttggtacatcattgattgcatggtcttctacgaaacaatttagtgttgctcaatcaactgctgaatcagaataagttgctgctgctagttgttgttcttagattctttggcttatatcaactttgaaagattatggtcttacttttgagaaagtttctctcttttgtgataatactacgaaagaaattngaaaatatacttta

SEQ ID NO: 16631 - DNA, 474 bp, Oryza sativa
  unsure (1)..(474): unsure at all n locations
agcttgatcttggaaggcgccattttctgttcanaagcctccgaccgaattcacattgggcatgccattggtcggtgacgatgccttattcaagatggaccctgcatgcaaggagttgcacgggtactacatggggaagtccaacgcaaggaggaagaatagagagacctccatgttgggctagcatgatagtcagccgttcctcgggcctactgccttcatcaccgtaaacttcaaagatctatgggacctctacagggtgcgagcgatcgataccaacctccttgagtgctactccttgtaagtatttctggctaccgatatggtagtaactgtccataaattacgcttaccctgactcttgtctttctcgtaggttaacctggaagcatgtccatcataaagcaccccatgttgccttactcgatccagctgtcgtcaatgagacaacgctgaanaacgatcgagccaaca

SEQ ID NO: 16632 - DNA, 469 bp, Oryza sativa
  unsure (1)..(469): unsure at all n locations
agctngcaccttctagggtttagggttataggggantttacatggttgcccttatgaaagggacatttacatgggtacgcagtgtcatttgtacatatgggccgttaatgggctgataggctgggcctggtctatggcgaacgggcctaaaaggccgggggcagcctgttggtcctccttgatgccgaactcgtcatggcgaagtctttgtagttcgctcgagatgcctttactttcggagtaccgatgcggctttccagccttcgccatcttcgcttatggctttcgccatagggcttcgcctgaatggttttgatgtctttggcttgaatccttgctggtactatggtttcggtagatctggccgaagggcttcatggcatgcctgcaacaaagtttgtctagccgatgatcctagagctaccgtgcatttcatctacagtgcaaccaagaagtaaaaggagaactg

SEQ ID NO: 16633 - DNA, 431 bp, Oryza sativa
  unsure (1)..(431): unsure at all n locations
agctgtcgatcagatctagtagtacgtatatatcgtgacatacgacacttgccatattaaatccttgatgatgtccaccatgtctgaagatttccttaaattggttgttgagtccaaggaaagacagcggcgatagcaaaattaattgggacatttcgacaacgacgtgctaatcagatcgttagttgctacacggtgcagcaatgcctgtgctatataagcctcacatgaatgatcattcgtgaagcaatcctatttgtcaagagcgtcaggggcggcggacctagttgtcatgggtctacatctgtacacctaaatactttaacaaaaaattccagtatgtatcatgtatttatactatggttagatctaaataattgtgtggntccctccaccagaaacaccagtttcaacccaaccaaatcacatgt

SEQ ID NO: 16634 - DNA, 379 bp, Oryza sativa
  unsure (1)..(379): unsure at all n locations
agcttcggttcggcgctgccacgtcgatgtcacgcgtcgaacgcgcccgagggctgtcggctcggtctttctctcagttctggtcggctagagaagttgcacaggggaagggtaagccaagaaggctgccaggtgggtccaggtcggtgtaatctaagtgggggtgtgagggatgggtagataattgggtgtaagtgattttggacaaattttcaggattaattcacttacccttcctttgtaactcgatagtttattttgtggccaggataaattagtgtgaatttttgtgatgatagttgaagatacctagattccattttctttggttgcacttaanaaattttggatagattactcacagtaattaggagaaaat

SEQ ID NO: 16635 - DNA, 454 bp, Oryza sativa
  unsure (1)..(454): unsure at all n locations
agcttacacgaaccaagccaagtctggcccaattcatttccaaccccggtaagagaagaacacaagtttagcggatgttcgatatccaaacagtaaggaaggttttcaatgttgctttcaataaaagtatcactgttgctattgatggtgctgctacataaactaggagcaaaataggaaataaaatgtgttcaaataaaaaaaagagggcagctagcccacgagataccgtgcaaaagtaaagtcacgggacaattttaatgtgtgattaatttgtacactatgccgtaccacaggtaccgggtaccaggtatcacaggtactaggtgccaggtatcacaagtatcaggtatcgggtaccaggtatcacaaagtactaggtgccaggtatcgcaagtatcagataccangtaccangtatcangtataacaagtatcaagtaccangtgtcac

SEQ ID NO: 16636 - DNA, 452 bp, Oryza sativa
  unsure (1)..(452): unsure at all n locations
agctntcatgacaaggcatttcgaaagccgatacatgtttaccatatgccgacgagaggggtcccagaccgacaacatgttaggtcccagaccatactgtgctaggaagcccaggggtcctccccgacaccaccccgacgaatccacatgtctctcggcatcaaggctcccctgataagctagttactcagccaggggtgtaccattccacccatgtggtcgcacttgtcttatgttcggatgaaattccaaggaaacggtccttaagtgcaagagcgggaaaccgtacacccggtacgttccctggtccgcagttttggaaaattcatttagttcgcaagcaccgacacaggtgtcggagtttccaagtctttcgtaaaacccatgttttacccaagatgtgtntcagagtttaagcgtgaacactaaccgtgatactcgtgcagagtgca

SEQ ID NO: 16637 - DNA, 449 bp, Oryza sativa
  unsure (1)..(449): unsure at all n locations
agctntaatgtaaaatctttgattcatggttatactttaatgcatgcttattatattatagatgggttcatcttctttttattgcaacacatgacatgatatgctatatgtatgttaagcttttatacattaatgaaataattcctatgctttatgaaatcattgtcaaaagggggagaaataatgtgaaaatttttagatcttttggagttgtcaaaagggggagaaataatgtgaaaatttttggatcttttggagaagagttaagttttagaagagaagagtttttaagaagagcatgtttttggttcaattgggaatttctttcttttaaaaaggggagaaggtttcttgtttttggttcaattgggaatttctttcttttaaaaaggcggagtagttttcttttggaattttgagcacgatgtgtacgtttgtacgaagtgtgc

SEQ ID NO: 16638 - DNA, 444 bp, Oryza sativa
  unsure (1)..(444): unsure at all n locations
agctcgtgtgacaatggtctagcaactgttcttatctataatgatcgangaggctaaaaggtagcggcctaaaattaaacaaagcttttataaaataaaataccagtacatcttttgacattatattagacagatggtaatcaaatttaacttgcgctcgacctaaagcaagtatttcttgatgaccgagggatagatcgtgcttgacttgactcatacttaacccctccaaacacagccgaatttataggccccacacctcaacttcaaccctccccctgccatccacttcttccttcccctctccacacgcacaacacaattgccacaaaccacactagctaattgtacttacttcgtctcaaaaatatatcaatctactataagatataatatttcctgaatcgaaacgatattatattagtaataggttaagttctactt

SEQ ID NO: 16639 - DNA, 411 bp, Oryza sativa
  unsure (1)..(411): unsure at all n locations
agctngtatattgtgaataaagaaatntcctattattgggcatacgccatgcgcacactgctttaacagatgtgctttagtccctagaagacacatggtttcaccacacctggaaatatatggcatatgtggtgtaaaatccgagtaaataaactcataaaggatttaccaaccgcctagaaaatgaccacaatatataatcagcctaagccataatattggtcaataaaaatgcacacttacgtggcgaaaagcaatgatattgtatccaatcaattgcttaaaaacccaaacagcaccttgacttatatataaaaaagtcagcgggacagctatataaagctttactgtttgacaccttttaagatgcattgtaccaactcctaaaaagttaagtaactgcggtataaa

SEQ ID NO: 16640 - DNA, 271 bp, Oryza sativa
  unsure (1)..(271): unsure at all n locations
agcttactacgttgcacacaaagacagcatctctgctcattcgcncttgtctttctattactaacgccaaagccacaactcggtgtctgagtggtcttcgtggattttagaccacccactcaccactggcacgcgtcgttggccctctcctcttgtctactataacggggagagaccagctcattgcagcgctcgccatgcgccgcgccagcacatcacttgtggagatgagaaagctcagctatgctcaagcgaccgtccggcgttcatg

SEQ ID NO: 16641 - DNA, 391 bp, Oryza sativa
  unsure (1)..(391): unsure at all n locations
agcttgcttgagaggggtatcgaactcttcaccgctaattagccggaacgatcgaagttctggtactatgctcacggtggaacgctcaacccagctgatggcccactggtcttcggcgatcagatacaagaggctgcgcgttgactatcagacgcagtggaagcctcttcttagggcacgttccgaccggacagagagagggacgagctgtcactcgccctgcagactccagagcatccaggacgaacacgagcgaaaggggtgattccttggaagattatgttcaaggaggacatccacacgtacaggagtcggatgaagagcaagagagataccaatgtgaagactgcagatctagagttcanggtatcgagctacgagcgcagcatgc

SEQ ID NO: 16642 - DNA, 468 bp, Oryza sativa
  unsure (1)..(468): unsure at all n locations
agctggcttgagaggggtatcgaaccggtcaccgctaattagccggaacgatcgaagttctggtactatgctcacggtggaacgctcaacccagctgatggcccactggtcttcggcgatcagatacaagaggctgcgcgttgactagcagacgcagtggaagcctcttcttagggcacgttccgaccggacagagagagggacgagctgtcactcgccctgcagactccagagcatccaggacgaacacgagcgaaaggggtgattccttggaagattaggttcaaggaggacatccacacgtacaggagtcggatgaggagcaagagagataccaaggtgaagatngcagatctagagttcagggtatcgagctacgagcgcagcatgcaagaggaggtggcaaggaaggttgatgaacgcatggccgcacatcggtcccatgaatcccagccgaccattccttct

SEQ ID NO: 16643 - DNA, 452 bp, Oryza sativa
  unsure (1)..(452): unsure at all n locations
agcttagctggcatcaagagcaatgttcttacgtggcaattaaggagctctccctcccttgttaagctctcgaaaagcaggcagatacgatttcctgcgatctgaatatctgatcctccttgatcggatttatagagattccatctcattacactgtttgtactaaactcttaactttttgtaataataacgagtggagtacaatggcaggtatgcctccaagtaatagtatagcagccaaaattgcatggctgcagaggcgtttctggtcagcaatgtgatgtcgtgtatcgtccgctacttgcatgtagccgttataagttggtcgcttcttcagttcagtttccattttcctgcaactattctgaacttctgctcactactcttcgctagcttccatcttgatgatggcaactntgtccgtcaaactaaacagatcattgtcactagta

SEQ ID NO: 16644 - DNA, 454 bp, Oryza sativa
  unsure (1)..(454): unsure at all n locations
agctttactgtccagagcgagatctcttctntcatttgacgtcactttcgtctacagttatgaaagcaatggacgctatggaaatgcatgcagagaattaacggagtgccaaaaggcttcaccccaagttgtgttgacagcaaaagtgacaacacacggcatgtaagacagacatcctgtccttgttgatgttgccttcgtattatgggagaaatacttcggaacttgctactgttcagattctagatgaggctgttcttgggcaaccagctgcttgttttccttcttgagaaggcagagagttgtacatagagaagctagtcgatggagtatcaggcttgtttgtgaaacactacgattactcgagatgtatacactgatatagcatgtggcggtattatcgaatgacagactgatgtagtatgatactcaatcaacggagctgtggatatgc

SEQ ID NO: 16645 - DNA, 453 bp, Oryza sativa
  unsure (1)..(453): unsure at all n locations
agcttggcatagatatatggtcatgtatatttacctttctgtttgatatttttctccatccagttattataatcaattaatagcaactaatgtgcttcacatctctcactagtgcaacaagacgtacatgatgtttggattgtatcctatgacaacccctctttcaggctgtaaatgtttcatcagtggaatgtgtgaagctcctggttgaggtattgtaccttcatcttagctttgtcaagttctaccattgctctggggttgcttactttattaaaacattcttccaacacttcagtttggaagcctttaaattttacattattcaccttanagaaacattccttttatgtgataggctggtgctgatgtcaactcagattgtatctcaactgctgcacttgattctgcaatgggcaatgatggntcaactgagtgcttaaatntcttaat

SEQ ID NO: 16646 - DNA, 466 bp, Oryza sativa
  unsure (1)..(466): unsure at all n locations
agcttaatggtacaattgataagtatatttcatgggtcgnggtcaagggttatacccaaaaagaagcgaacatttctttgatactaattcacttaccactagattgacctcaattcgattactattgtcattggttgcctcacacgatcttctcatttattagatggacgttaagaagctttccttaatggagagttggaagaggaaatttacatggaacaactagatggatttgtagtaaaatgtcaagaagggaaggtgtgtaagttgtttaaatctttgcatagtctgaaacaagcacctaagtagtgagatgagaaatttgacatatgtaggttttattgtgaatgaagctgatatatgtgtgttttatccttatggtaggggcgaaggagttnttctatgtttgtatgtggatgacatactgatctttggtgcgaatctcaatgtgattgagaaagtcaaa

SEQ ID NO: 16647 - DNA, 470 bp, Oryza sativa
  unsure (1)..(470): unsure at all n locations
agctggccaccaatggtgatcggctctgttttgtgtttctgcttgcggnngncgacggccttgatgcgacccgtcacctcttcgatcgtgagctcggtgaagtccagcagcgtctcgatcgacagagccagctgcgtgtacttctcggggacgacgcgaaggagcttctccacggctctctccttgtcgatggtggtgtcgacgagctgcgccaaccgctgctgcaaggagttgaagcggagaacgaagtcgtcgatgtcctcacccggcttgaaggccaggttctcccaatcctgacgcagcttctgaagcgtggacctgcgggcgcggtcgctgccgatgcgtgccgaagcgatggcatcccatgcgtccttggcgatccgcttgttcacaatggaggactgcatctccgtcggaacagctcgaaggagcgcctccagcgcccgccaatcttccccgtagtcgacgtc

SEQ ID NO: 16648 - DNA, 278 bp, Oryza sativa
tgttagtgtacatccactgcagtgtgagtaaaccaaatctattcgaatagccgggcctgtggttatcgatcaccgttacatgtattatacatggctacactctaaattcggtaacgtgtgtgggatgggatattgcatgatgatattcatgctgatgaagccacttcctgagaggcgggaaggcggacatcctcataatactactgacaatcaatggcgggtagatattcttgggatcacactggatggtggacagaaccatcgttgtttacatacaa

SEQ ID NO: 16649 - DNA, 316 bp, Oryza sativa
  unsure (1)..(316): unsure at all n locations
agctnttcagcttctgcgcggtcctcagtgtagattattttcttcgagatacgcccggacattagtcatccatgcgacttggcgaggggggtcggggtcgaccccctcgggccccgggggcgcggaggggggtcggggtcgaccccctctggctccaaggggcgcgagttggaaggaatcagagcggatggcatgtcgttggagccactcgaggggttcggtcgagctgatgtgttggacaagcctttcttcaaaggtccccgggggaagtggggcttgcgccaactcaacactcggtatctcatcaccaagtgtg

SEQ ID NO: 16650 - DNA, 234 bp, Oryza sativa
  unsure (1)..(234): unsure at all n locations
agctntaagaggcctgccttggaaatggtgtgtatcacaggtaggacgccttaagtgctcctcctgtgcaaaatgtatcttctcaggcggcgcattatgtcgtctacctaagaagattggtcttcgcagatggatggccatcttgccctcctcccctcccccggcacattctacaggaggaccgatggtggcaaaaatatactccctccgttttgaaatgtttgacaccgttga

SEQ ID NO: 16651 - DNA, 261 bp, Oryza sativa
  unsure (1)..(261): unsure at all n locations
gcctccggagagttcgatgcttcttttgcttgcagntgagggtcttggtgatgaactcaatctcggccctctctacatccttcacgaccatgatcttggcctttgcgagataatggagcgacagatcggtgactgaatcacgcaggatgcttttctggatgaacaagacgttgcattcggatgccttgatcttcttcaccatgccaaggatgtaaattcgctcctcgcggaggattctatccatatgcgcgtaatacgaca

SEQ ID NO: 16652 - DNA, 494 bp, Oryza sativa
  unsure (1)..(494): unsure at all n locations
acctgcggcatgcaagcttccccatgcgactcgcagatagttcnctcttatcaactcctgcggccctgcctggtttatgttaagatggaaaagaagagtgaaaaggtacagctgaaattactgaacctccaaccataacttgtacaagctgtaagtaatcaggtctaacggtgtgtttgagaaggaggggattgaatagatacgtaaaacgaggtgagccattaacacatgattaattgagtattaattattttaaacttcaaaaatggattaatatgattatttaaagcaactttcatatagaaattgtttgcaaaaaaacacatcgtttagtagttcgggaagcatgcacgcggaaaacanaactatctttctctctttctcctgcgcttgaacgcagcctaagtgatgaacatgaacaaaaggcggactacatctctttgtatataacaacaacaatctatttgccgaaactatcaacttatttgtataac

SEQ ID NO: 16653 - DNA, 320 bp, Oryza sativa
  unsure (1)..(320): unsure at all n locations
agcttgaatgaacttgagagcaaactttttagatgtaatgaaaanttgttgaaatggggtggagttccctctcccggccggttggcttaagtagtgcacccacaacggtcaaaaccgacctgtggggcccactagccattgcctcaaagagggaggcagccgaccgttgcctggccggttcggncgaaccangtgttcggccgaacccctggtgggcccaatcggccccactttcgaccggtggattccaacggtcagtgtagtcgtggcactgtgaatttttgttggaagatttattttggggtgctctgagaaaatca

SEQ ID NO: 16654 - DNA, 430 bp, Oryza sativa
  unsure (1)..(430): unsure at all n locations
ctgcaagcttgctagattcacacaatttgttgntcttagtttaaacactttgcatatacaagtttgctttagttcgatgcaaggttaatcggcgggtatttgcctaacccccgtccgagtagtcttgtattcttgctctttgttgtagctatgaagaaacgacttttgggcatattcaagagacaatcaagctcacggacaagaagacatgataagccgagtacaccttcttccgcggatgcatccatcgaggaggcgtacgttccaccaaggctgtacgacaactccgatctcgacctcgtgggcgaccgggaaatgcaagcctatcatatgctgaaagaccgaacgtgtgctcagacctgagcatacgactcgaccttctgaanaggataggtgtggatgctgagtttcatattggtcagcgtgctat

SEQ ID NO: 16655 - DNA, 424 bp, Oryza sativa
  unsure (1)..(424): unsure at all n locations
agcttctnntgggctaatggcacctttatttnttctctccccgttctagcagcttttctacttgtatcaagcttgggtggagaagatttcgccctcttgctccttttggcaggagggggggaggtgcggcctgctgtcgacctccataccgtcgtccccaaaatctgtatcatactgtaattggagatcttcgtctctttgttcaacggcaggagggagagatataaaagttggatggggacgcgtcggcgacggatgagaacttggcgctggccttggagttatattgatctcaatgctgtgcttgggtcattgaataaaggtcccacgtgcagccccaagggtcagaatcttctcattcggtgggtgtgggatagtgtagccaacccaatcgggcttaactaagtccacctgaactttggca

SEQ ID NO: 16656 - DNA, 432 bp, Oryza sativa
  unsure (1)..(432): unsure at all n locations
agcttatggacttgtcgatattgtatgtgtataaatgctngacgagcactgcgatactgatccagtgtggtttccagaaatgtttaaggattggtagtggccagatttcttgtaaatttatttcaaccctaaattcgggttttatgcaatttaatggaaatacttcataatgatcaatcattcaggttaagatcgatctaaaccaatccattttttctatatacatacgacatgccaacggttaaacaacttattagaaacgcacgacagccaatacgaaatgctagaaaatcggccgcgcttaagggatgtcctcagtgtcgaggaacatgtgctagggtgtatgtgcgactcgttcggataatgggttcaaacaaataagacaatgtttgaagtatccatgatcngtaccaatgaataggatagagcttc

SEQ ID NO: 16657 - DNA, 400 bp, Oryza sativa
  unsure (1)..(400): unsure at all n locations
agctntagcttgtgcagataagatcaatgctttaagaaagggaaatgattntgcaagaagtgtgcatgctgttcttcttcgctggttaattccttaccgtcagcagagtttagttgttgaagtcctttttacagctcctcaaaataaaagatgtggttccttcgcctgcaccatctatgggttttttttgggaagaacctatttaagacccctatatttttttcaccaaaagatagccagcatgtattcacattataagtctctaaatcacatatataattagtgtggaatattagtagtgaattatgagggaagtagtgaggaattatattctaactaacctgtatactaatcactgacactcaaaatgtgttataagaacccctatatctctccacta

SEQ ID NO: 16658 - DNA, 436 bp, Oryza sativa
  unsure (1)..(436): unsure at all n locations
agcttcagaagaactgattatctgtatgctttcactcttatggccagagcgccagtgcagtgtctgacaaatagaanaaaaatagttcaacaaagcatgctttagggcatatatagattaacgattagcgggaaaatgacttataaatacctgatgcttctcagagcagtagcgtgctttcttgcagctactacagagtttatcacctttccatgtaccgcaccaatggcagacaggagctgacagcatagttgaataattgaaagaaatctatattatttgactatcaattaaaacaaagagttcaaccatgaaaaatggccacctattaataaaagttaaaacagtttaacaaggctgaaaaagaaaaatgtngcctatgaaagcatgtcacacaagaaaattcagcaactagcataacacataaatcttacac

SEQ ID NO: 16659 - DNA, 479 bp, Oryza sativa
  unsure (1)..(479): unsure at all n locations
agctngagctacatggtatcaaatattattattatctgtatgttgnngagatcgaatgtgtcataattttcatttagtacattctgattgtaggtagaattacgatccaggtggggcgagaccaactcttgacttgtcctagttctccacttaccaactaaatcaaataaatgtatgcaatttggactgccaattatgtgaggactggaacatcaataaattgggatggttagttaacaaactggaaaataaagtttcaaacacaagaggtttcgctattcctacaggaaatgggcaatttcatgcgaaaatcttagcttaagcacataaatatttccatgacttgcgaatcgttcgcattactatacagttgccaatccatcttaccgcacaatttgaatctggggcataaagaacatagaacattttgtgccatatctaaacatatacagcgtgttttctgatgtactaaagcaaca

SEQ ID NO: 16660 - DNA, 474 bp, Oryza sativa
  unsure (1)..(474): unsure at all n locations
ttaagacacctgccgcatgctgctagccnaaatccgcgcgacaggtaatacatatgcgtcagatggcatcaagtattcaggtctgtattcacctgatagtcaatagctcctagaagaagcaggttatctgtccgccgaggattcttctcataaacgatgttaccatgctctaatgcctctttatactttccagaccggtaactttgatgtgcacgtgccaaatgccgttctacatcaacagctgaaataaatcaatgaaaagcttaattagatctatcattgagcatgtgatatcgatatagataacagtatgatattcctatagagattctattggacagtcatatatcatttgaagacaaaaatcatgtacttatttttacagaaaaagttaggcttcgaatacataagatcggaacagggatgatagccgatcatcttcacaaccggatgtgtataagtcaaaactcctcc

SEQ ID NO: 16661 - DNA, 477 bp, Oryza sativa
  unsure (1)..(477): unsure at all n locations
agctngagagatccatgggtgaacttcgttgtgatgtgctccgtgatgagactgatcaaagattgaagtctcttgagaaacatcttcatgaagtaagtaaatcactattttaagaaaaaatatattttgagactagatccagtatttcacattttccaccctttcagtttctgcactgaagggggacagttcttttgcatccagtgtaattatgatcatgtcatatactcatccatatattataccccctccattccaaaatatgagcatttctgcacgtatttcaaaatttatatgcctatttggacatccccgcgtgcagacaaaaatgcttatattttggaacggatggagtagccttttgtgttgattgacatgtacagtacatgttntctttatttgttgtgacaacttaccttttctttatactgtgtatgtgaatttgctcttcgcttanatgctgctcaattctatatg

SEQ ID NO: 16662 - DNA, 465 bp, Oryza sativa
  unsure (1)..(465): unsure at all n locations
agcttgctntcatccatctcaagaaaacgttgttcctgcacctaatgcactaattaccctatactcagtagcagaccagagtgagaggccgagagcaatgccaggtgcaaaaaccatcttaaatcacacgcaaaaatcttgacttgacaggcagaatcattcatcatttcgtcaaaggaaaactcagctaccaccactgcactgtaaccaccgagacattcagaattaagcaacgaattcgatctgaaagtgcatgtctaggacaattaatcattagctcaaaggaattgatcagctggtgtgtttcaggcaaacaagtaaacaacagaattcagtagtacataaatatatatcagcgcgtctccatgtatagagaatcgattatataggtttgaataaacattatgcgaccgaagaacaggaagaaaaagagaaaanagaaagtgtgacaagctcaaaacaaat

SEQ ID NO: 16663 - DNA, 435 bp, Oryza sativa
  unsure (1)..(435): unsure at all n locations
agcttgtttcctgagtaaatcaccaatgctgggttcaatgaatgcatctttggtatgttgtgccaacccaagcaataataggccaaggaattcagatatatcgaggcaacaaaaagatggcctgctttttgggaaaaaaaaagctttaccaagaaatatatatgactgtgagaacatttatgattntgattgttatatagtgttctccaaaggtggtccagccatctctgtcctctggggcaagcaattcacgcccgctggcaacatcaactccagggataaggtagaagattgtagagctatttgaaatgatccaggcacaactgtgagcgaggtcaacatccggagcacaaaaggcctgaacctacagaagatcagtgggagaggggcagtgttgatccaatccttaatttgctaaggaaacactcatggaac

SEQ ID NO: 16664 - DNA, 436 bp, Oryza sativa
  unsure (1)..(436): unsure at all n locations
agcttctaccgcaccgatccagcttgtctgtttacaacgtcaagggcttcaacaactgttcctgagaaaccagctatggcttggaacattcctggcaggcctgtttggatgttgttcagtgtcattgatctagttacctccactgccttagcatgccttgtcatttcgtcctccaccttccgccgacattgggcaatctcggttttcttctctgcaagaggatcgcgggcatcgaacgaatggctttcaatgccatcgcgcccactgccaggaaggccaaggccaaccattgaataggattggtagtacttcttctcaatggctcgaagtgagttggtcttcttttccagctcctttgaatatgtctctgtccgctcttntattttcatctcctctgcctgcttagtgtagatgacatggacaacattcacgaagc

SEQ ID NO: 16665 - DNA, 456 bp, Oryza sativa
  unsure (1)..(456): unsure at all n locations
agcttagatgcatcgcaatacacttgtttacccttctttggatcaggcaaaatcaagatgggtgctgatattaagcgacttttcaactcttgaaaactctgctcacattcttctgaccacttgtactttacatctttctgaagcagtcgtgtcatgggcttagcaatcttggagaaattctctataaatctccgataataacctgtgaggcctaggaaactgcggatctctgaaactgtctttggttgtttccagttggttacggattccacattactaggatcaacggcaactcctcctgctgagatgacgtgaccaaggaacttcacttcagacaaccaaaattcacacttgctaaacttagtatacagttgatgttctcgtagcttctctagtgcaagacgaagatgttcttcatgctcttctttggttcgngagtagataagaatgtcatca

SEQ ID NO: 16666 - DNA, 429 bp, Oryza sativa
  unsure (1)..(429): unsure at all n locations
agcttcttcagacctgtcaccatcttgttagtcagctagttntgatcaatggattaattacactacgtggtatggctggcagtggcaaatccatatgggttcctttttccaactgtttttcaattagatccatgccaattatcaaagagaagaaatataaaggcaccctttggagaagttgttcctgtcctttgaaattccttcgaattaattctatataccaaataagtaacatacatacgagttatttttttggattaattggtttttactacttttctgtaaaaaaaattcaatccaaaggagccttaagagtggtggcatagtgctaggagcgtttacatctataatctgcttaaatctataatcttacgtcctctgtctctntgtttggtagccgtttatgtggcagcgctgcngcgatgtatg

SEQ ID NO: 16667 - DNA, 473 bp, Oryza sativa
  unsure (1)..(473): unsure at all n locations
agctngaaacctagcttgaagctagcttatttngctagccattatagcctctcatcgatatatataccccaatgcatatgtaattaagcttgaatcctatttttcttccttgtttgtgttttgtgtttgtgacttgggtcgaattagtttgagagaatttggagggtttttggttttggttttgattntgattctgattttgatttagtttttgagttacatgaacaggttcagaaatgtgttgctacgaaagtgcaagagcctgtcacgctctctctcgaggtcgagctcctacaggaacctccgatccatgtccacccgggagcacgtcgtcgccggcggcgatggcggcattgtcggcggcggcgacagcaaggcggtgtcngccggcggcgaccgngcggtggtgttcgtcgggagctcgcggcggcgctacgtgatcagcaacatgcacctcagccacccgctgatcg

SEQ ID NO: 16668 - DNA, 470 bp, Oryza sativa
agcttaccgtaggtggtggttatggacctatctgtcaggccacttccataggcattgcagaaggccattataggtgcaaatatatatgcaatcaatatatagtaccacttgagctgtgggataatgagagggaggcaaccactcgttataactgcaagaacaacatagcccccaatcgcaactgtcttgggaatttgatccttcaggaatagttcattgcgacgcttgtcatcaaatgactcctcttcagtggcgttggcaggagtgccattgtcggagataggaagcgtgtttgagtttttgttcttatacataactatgaagcctttgattgtgtagccgaagaccttcacaaagttgtaaaggccatccccaagaattactgctatggttatgaacacctgcatcattcttagcatggtcagttctggagtcttgacagctagaatggttacaaaagaaaaaaaaaa

SEQ ID NO: 16669 - DNA, 439 bp, Oryza sativa
  unsure (1)..(439): unsure at all n locations
agcttcccggtttagctcgcttttatcttttccgctgcatttgtaatcttttatatttttgtaagacgtggatctgtatgtcaacaattgtcgtttgtgtaccctggctggtcctggataggggtttaatacacattcagcttagaaattctggttcgtgaatttctgggcgtgacaagttggtatcagagccgaccttgaccgtaggacaagccaactagaaaacctaagagtcctctgaaccccttttcatatgcatatgcctttttcacttggatttgtttcgggaaaatgtggggttttgcctctttggtttgcgggaaaaatcttggtcgttcattcggatcggatctttataattagctcggtctagggttgtagaacaattntatttgtagtttatttgacagtcagtcgggaaatttgtggntgatatgca

SEQ ID NO: 16670 - DNA, 398 bp, Oryza sativa
  unsure (1)..(398): unsure at all n locations
agcttgtatgttgggaataaagatatttttatagtattgggcatacgccatgcgcacactactttaacagatgtgcttaagtccctaaaagacacatggtttcaccacacccggaaatatacggcatatgtggtgtgaaatccgagtaaataaactcataaaggatttaccaaccgcctggaaaatgactaagatatataatcagcctaagccataatattggtcaataaaaatgcacacttacgtggcgaaaagcaatgatattgtatccaatcaattgcttgataaacccaaacagcgtcatgactatataaaaaagtcagcggagcagctatataaagctttactgtntgacaccttttaagatgcattgtaccaactcctaaaaagtgcggtat

SEQ ID NO: 16671 - DNA, 456 bp, Oryza sativa
  unsure (1)..(456): unsure at all n locations
agcttaaacggcagtacggcatctctgcattattgaacgctacagaccaacagaggaacacgaactcaactgctatcgaccaaaatttcttcgttccagcgatccaaaaccacagcctctctctgcaccgttcgatcatatacaggcggctgagattagacgcgcctcggaatccgtgggccgattttcgtttaggccctcgtattatctcgtgttgtcgtgtcgttgtacaagggaggaagagatgtcgagacgccgccgccgctgccgccggcgatgaggagaagggaaccgggcgttgcccctggcgcggcctctccactgcaatgttcacaaagataccccgaattattactccatctgcaactacacattctgttaatcacagttggcatctgaaccgaaaccgagaattatnnttttcgagaatatgcagaacttgcgttagttgagtat

SEQ ID NO: 16672 - DNA, 442 bp, Oryza sativa
  unsure (1)..(442): unsure at all n locations
tgggactggnggagttggtaagacatcttttgctcagaatatatacaatgattgaaaaataaaaggaagtttcaacaaaaaggcctgggtttgtgtttccaaagtgtactctaaagcttctcttttgagagaacttcttcgaattatggaagttcatcatgatcaagatgaatcaattggagagctccagagcaagcttgaaatagcaattaaggagacaagttttttccttgtgttggatgacatgtggcaatctgacgcatggacaaatntattaagaattccgttgcatgctgcagaaatgggagcaattctcataacaactagaaataatattggtgccttagaaatcggagtggaccatacttatcgagttgatttgatgtcaaccgacgtaggatgggagctanctttgcagagcatgaatatcagtgaaagcata

SEQ ID NO: 16673 - DNA, 407 bp, Oryza sativa
tctcatccccatgatgagcaatgtaatctaggatatgtacaatgggcaacttattcaaattctatgtacaaggatatgttgtagacatacgaccgcttggaaataaaacatgagtagcaacccttgatcaacaacctacagttaatctttactaaggatgagcaaatgtttagcttgagaatatcagtaatccattatgtcgttgcactagactagcataattaacatggatgtagagaacatacgttaaagtgaaggatatatgaaggcagtatgctaggtaacactcttacagcgaatcatgtgcgagaacatcgattgagtggaccacaagtgacaccaaaccaccctcaaccatcatacgggcccacatggcaaatcctgtgttgacagtaattatcgagcac

SEQ ID NO: 16674 - DNA, 455 bp, Oryza sativa
  unsure (1)..(455): unsure at all n locations
ggatgatggtgatgattggagtgcgatggtattgtctgatgacggngatgtgcttgtgctggtttactacagacaatggctgctttacattggtactgatggcaagctgttggcgagttttcaacatgatgttgggtgccactacaatactcctctgaagcttaagcaaagccttgttccacatgcattctttccattgttaaagggttatgtcgtgaatgctcgacctttcatctgatgctggagcggctntgctagttgttggactcgtcttgagatggtttcttttcatcctggtgggtagcaacttttggtgctgtcttttagaggttgtggacactgttatcttgtgggatgtcaccttgctaaaatgtactcaaaccctgctgaactatgtaatatgcagtagctggtttgccaatctttntcacaaaaagagaanaaattctgatgtc

SEQ ID NO: 16675 - DNA, 458 bp, Oryza sativa
  unsure (1)..(458): unsure at all n locations
agcttgaatcanagtgggaaggaccgtacctcatcaaacacaagttttgtacgggatcctttcgcttagcgacactngaaggcgaggagttcgaccattcctggaacgccgcctctctcaagcgcttctatgtctagaatgggtggcacccaaatcgccaacttgtaaaaatgtacataccgttatgtaagccctttggcactatgtaagcctttcggcaagaaaaaaaaagaaagagagaaaaaagagaaaaaaaactggatgtagggctattatccaccatggaggcccgaaccagtataaaatctctgtgtcctccgccttctttttatttttcgtgtgattgataatttgtggaaaaaccccaaggcaaacgcctgatcagcgaanaaggccaggggggcgaaacgaatcggtcgaagcatcgctcgccgaacgttgaaaccgcaacagcttgt

SEQ ID NO: 16676 - DNA, 449 bp, Oryza sativa
gcagaacacgccgcacgtgctatccaaccaaatcgttatacaaccactcacctacaagataaccacatggcatgtgtactgaataaatgctactctcagctggaagtaatctctttatctaacaaacagtactgtagcgctatctgagatggcgcgctacatgctaacagacagatagggccactccgtactgatgccaacacagtgccatgcccatattaacgtgagtctgaatagtaacatatgattgcctggtcgaaccccattgaatggaatagcactatgctcaattcatgcataacataaacactgactatcacatgggtatctatccaaacacatcactaacaattccaccctactaaattattggtagcaccactacatacgtacgccatagcattagcattgtgacggtcctgaactaacccaaacaagcccataaatga

SEQ ID NO: 16677 - DNA, 456 bp, Oryza sativa
  unsure (1)..(456): unsure at all n locations
agctnttataactntaataatatttggtttaaagccactataacaacatatatagatttttcttaaaattactataataaaagtaaaaatgtatttatttagtgtatatattataatagaaaatcatagtctaggatatattttggagactgtgtcattgttcaaaacgtcaagaattatggaaccggaggggataattaactagtattttaactttcaagctcaaagttacagagctgaagaccaactatctacactgatgtagtgatatatacgatgtaattataagtacttttgaatacggatctaataaatttaattgtgtcacaaaacattatatcctaatagagtaattgttagtcaaagtcttgtcctaacaaaacaaatattttgaaaccgaaggagtaatagataggtacagcgaagtagattgaacaacttcagtagattaagctg

SEQ ID NO: 16678 - DNA, 458 bp, Oryza sativa
  unsure (1)..(458): unsure at all n locations
ntatttgctagcctgtgctacttataggcttatgactaacatctcagtattgttattgctagaattgttttagtagatatcttttactttctttttttgaaacaacccacacaagatagtgcggctatcacaatgacccttgtgagttgtgaccaactatcatttagagttcggagcttggtcggttatgtttaccatgatatgatttgatcaccattgcatcaactgtattttggtgattagtacattaaaactggagtcgtgaactgataataactatttgtgtcttgtgatgattgtgcacagttggttgtctagacgggctgaacatacattcaaatgagtttgcttttgagggatctgtttcaactggtcatattaacagacaaatggagtctcctctggacaaagctganaagttcaagagcatcaaaagcgacgtgggtagtacagggaca

SEQ ID NO: 16679 - DNA, 257 bp, Oryza sativa
attgtacattgaaacatgtcaaaactgaaactgaaatttcttatttaatgatttcaatagaccattagcaataagtccctgaggcattcaatgtgtttgatgcccaaatgacacggtacaggatcgaacgaatgactgctccaatgtaatgctaagaggtactacacctgctcaaacttgtaagctgctttttttttacacgcaacaacacgaagaggctcttactacgctatattaatatgataagaattataatg

SEQ ID NO: 16680 - DNA, 467 bp, Oryza sativa
actcaacttatcaccttccttgctcacacgttcttgctgctgtcggtgattgtggcatatctcccaatgtgtacgtctcaaattatttcaggaaagaagcaatctttcatacatggagtgaggagatatatgggttcgggatctcaggatcttacacaacgctgagtgcccaagttttttatattccagatccatctaagttaaaggtgaaaaagggtcgacgccaaactagacgcatcagacatgatatggatgagtcagaagcaggtgggaggactttacgctgcagcaagtgtgatctgcgcggccatacttacaagaaatgcccgaagaatgcagaagttccaagcggcgctgatgctagtccatctggacaggcaagtgatggtaggcgaccacctggtgaatgaacaacaagcaggcgcgcaaggccaatgcgtcgtcgcgcatcaagcgattccatggtg

SEQ ID NO: 16681 - DNA, 491 bp, Oryza sativa
  unsure (1)..(491): unsure at all n locations
ctcgacccggatctctgagtcacctgcngcatgcaagcttcgtttccgctgtcttcccacaggctactggaggatgaagagcacgcagcatcgcctctaccggcggcgcatggcataggcatcgcctgcccccaccccgcccccgcccaagaatgagagcttgggcctccactacaagagatagagacagacccaccaccatcaagaacatcaggaggagaagtagatagatgggcaactgcgggacgcgagaggagaatgccgtcgttgcggcgcacgcccaaggtattcttcgcttcctcggatttgatttcttgggggatttcccggtgattgttttcttgggatgctggttgttgggatgggatctcgggttggatgatctgaatttcatcaaaaaaaattgatcttggtggttatttctgggttccnctgatctctacgactctaagttggtgggttcagtggggaattgacaaaagcactgtctt

SEQ ID NO: 16682 - DNA, 438 bp, Oryza sativa
  unsure (1)..(438): unsure at all n locations
ctatgtgcattggttttcgttcagacttaccatcgaacctgggaaatgtgttacattaatttttatagagctctgacttgagattcttgaaggctatataaaatgcttcccttttccctttgctatatctgtttggtatgtgtttgccacaatgctgcaactcgagcgttaacagcagtatattctacagtctgcagttctgtacactgattgaagtgatacttatttgtggaatgcaacttttacttctcgtctgacaattaatagtttacataacatcaggtgaaaaaaaaactgatgtcatgatggccgagtggtctaaggcgccagactcaagttctggtcctctaacgagggcgtgggttcaaataccacttctgacattatatatatatatatatatantttaatatnaatttcattcatggacttgataac

SEQ ID NO: 16683 - DNA, 420 bp, Oryza sativa
agcttctccacgtgcttcacatcgtcaagctgtcaaacgcatcatgaggtatttgcaatagactcttgaatttggaatatggtattctacatattcttctatatgcttgagtggttatttggataacaagcaaatggctttaacaagctattcggataacatgtaattctctcgacagtggttggaagtcaagaacaattgtattgctttttgaaaattttttggatccccctattacatggccttagggggctatttataatcctattacaggctcccccctttagggtttagattttacgggggaatttacatggttacccttatgatagggacgttattgggggcactcaatgtcttttacatgtatggcccctattgggcttaaatggcttggcccatctatttgccgaaatccct

SEQ ID NO: 16684 - DNA, 447 bp, Oryza sativa
  unsure (1)..(447): unsure at all n locations
ngaacccgtactttagggtgctttccagaattactataaagggtgattgcttggctgcctatcaagaacaaaagttagctttgtttgaggtactgaggaaaacaaattctcgggtttcactggcggctgacatgtggtcatctaatcaaaacctaggttacatgtgtataacttgtcacttcattgacaatgaatggaatattcaaaagaggatcataagattcactcaagtgcgtacccacatgatagtatagctctcttcaatgaaattctaaagtgtattcaggattggcagatagaaagtaagttgttcagtattacagtagacaatgcatctgttaatgattctatggttgtggaattgaaaggaaatctcttgggtaagcttgccatgccttgcaaaggggagctatttcatttccggtgcgcagctcacatccttaatct

SEQ ID NO: 16685 - DNA, 409 bp, Oryza sativa
  unsure (1)..(409): unsure at all n locations
tttcttgtagttgaaaccagacatgcactaccctgttttcacaacaaaagtgaaaacaaccaatgttagcctgcacaggaaaatgattatactgaggcgaatataaattattagttaaaatagtctctattatgaatcttccctggcaacagcgccagaaatgcttgttactatattttaacgacgttactagaaatataattcccaacaatggcgcagaaatacttctggtatattatgggtacaaagttcatccgcaagcgcacggatataccattgtagcatttcacccgagagtttttcaagggtatcgtatttattntatcccgcgcgaagatcatgtacagagaacttgactaataattnatatattacctgtcataatcatattctaagacggattaagata

SEQ ID NO: 16686 - DNA, 448 bp, Oryza sativa
  unsure (1)..(448): unsure at all n locations
gtacaacctacggttcgacgttttggtctgtagacttcgcgaacgtccccatggaaggcgtaaagttccaaccgacggctttttagtggctcaaggatatcttgaaataaaaggagatatttgaaaagcaaatgacatttaaataacttcaggaaatccaaataaaatattaaaatagcaaatttggtatcaaaatgtagattttgaatttagatgaatttaggtccaagtttcatcggaatcggatcttcgatttacgagatactagaagatctgcacgcctgttggcgtgccacctaatttagcctgtaatatggctcatctgtaatatatatagaaaatttgcctacctctcattttatattattnttaactctagcanaatttcacatcaaacaaggagatgtggcaaattacactgctatgcttattaactacattataatca

SEQ ID NO: 16687 - DNA, 429 bp, Oryza sativa
  unsure (1)..(429): unsure at all n locations
agcttcgagacagtggtacttgaagtttgatgggacaataaagaaatttgggtttcaagagaatgtcgaggacaactgtatttattcaaagtttaagaatgggagatttattttcctaactctgtatgtggatgacattctactggctagtagtgatgtcagtctactgcagaaacaaagaatttaaattcttgtcctcaaactttgacatgaaagacctcggtgaggcttcatatgttttgggcataaaaattcaccgagataaaacaaagtatgcattgngactttctcaaaagacatatatagaaaaggtgttgaagaaattcaacatgtacagatgcagtgctacacctgctcctatagtgaaaggcgaaaagtatggggcatcgcaatgtcctagaaatcagtatgagctcaatgaaatgaaaa

SEQ ID NO: 16688 - DNA, 357 bp, Oryza sativa
  unsure (1)..(357): unsure at all n locations
taccaagccggagaaggngggatctgaggagggagtattatgaaagaggaggagatctgccgggggtggcgatgagggagaataaccaacaaagaaggcggtgctggcgatccagccctgtgcggatcaatgaagatcacggcttggaactgtcgggggttgggaaaccgcccggcagttcgggggcttctggatttccagaaggcagagaatgttgacatcattttcttgtcagaaacaaagatggatgagagaaggatgcagcgtttgaggtggatggtggggctaacgaacatggtggtgaaagactgtgaaggaaaaggggggggaattgctgtgttatggaggatgggggtt

SEQ ID NO: 16689 - DNA, 375 bp, Oryza sativa
agctttgcgctctcatggtattcggcacacacccggaggttcttgatgagcctaatgggagctcctggattggaagcgatcagagcaaaggccatggcgagcctctcgctgtggtaggacagtgcattcgccttgtactcctcctggacatcaaacaacgcagatgaggtgctcgaccggtgtccgcactcgcttaatctggtctcaatatcctcaaccatggcgtatatctcctttgaggcaagatgcgtcttgtcacccaccaagaactcatggagaactccattgatgtctacaaagcttgatccaaggctcttgtcaatgcccatggacttcatctccttcctcgccttcttatcgtcctcccatcggttc

SEQ ID NO: 16690 - DNA, 441 bp, Oryza sativa
tgcaatttctgttgtagaatagtgttgtcatcaattatgtatcattgcattgacttgatattctttttaagcgtataactgataagtgccttcccctaacttgtttattttttcaatctcttaactgaaaatctgttattaatatatttgctaaagcatttgatttctcttggtcagggttgaagacggttaaatctagaacacggattgtagttatcctgaacatgttctatgttgcaattctttcacaattttgcactattgattgccatacaaggattttggctatacggtcttctgcttcacataactattactttcacaatatcagatgttctgcaatatcttctgctgcttgacataattaagttaaatagttagtctatctcaggattaacataatctttcttaatctaaatgaattattattacaaattcaca

SEQ ID NO: 16691 - DNA, 424 bp, Oryza sativa
tcagctcaggtatcacgtttcgacaactactgagctgcgagaactcatcatttggtgaatacttgccatttgtgaccgcttgccaagattgtatggatcgaacccaggttacgtctgtaggtatggcgcatccgacctacccgagtcagaggggggtgaagatattccttatacgctaagacaagcaagctagtatatcatgcattaagatggagaatcttaccaagttgacattacttgtctttgtgctaccattaatcttcaagttctccattgcttcttgcatagctagatgatagacaaagtcaaggatcgcaaaacaaattgaaaaaggtcggtgtccatgagtgagcaataaagtaagccaaccacgcctgaatgacggataaacaattccctagtgcaatcatgctcagctcataat

SEQ ID NO: 16692 - DNA, 443 bp, Oryza sativa
agctcttcaattataaaattaccacaatctagagcatgtattttggacttgcataagaacagagacgccaggtgtatattaatccttctgcaactgcagctagatcatcctgtacaagttcacttagttcagaacagaactttggaatatcactagcaatcctttgctctgggtttgatattcgatgatccacatgtgaaattttgtagtaaaccatattctgcaattgtccatacagcaaaaaagaagcagtgatataccttattaaggttgtatatcataatggaaggcgttaagtaaattatcaaaagatgggctaatttctatcctaaaagatgcacacacaagttagtctactgtaattccacaataattaacaaaaaaaataaattaatctgatctggaactacataaatataaaaatgaagaaacctcgcaatctt

SEQ ID NO: 16693 - DNA, 282 bp, Oryza sativa
ttcaacgctcatgcgtgctccggcacctgttttgcgtacgctattttcttgccagctcgatcctggctttgtgcatgagcatagcgagcctaagatgctcgcacgcgttatctactatgccatggacttcaccgagcatgctatctagaccattcacatggcctctctttctgacacgcctcgcactcatgagatgtcgatcgcaccatgagctcgctctatatgtagctgctgccgacttgacacatatatcatacggtgaactatctaataccagatctt

SEQ ID NO: 16694 - DNA, 460 bp, Oryza sativa
  unsure (1)..(460): unsure at all n locations
agctgggctnttgagctcatcaacggcgatcaccacgcctgagctcatccgatcggcaaggccctataaataggaccccagaccctctctcattcatcatcaatcaccatcgaccacaaccatgctacacctaatccctgttccacccttacaccatacccacaaccgccgtccgccgatcgaacacctagtgtacggtctcctccacacctagtcctaaccaaccatccgaacaccttctgctagtcgtgtttcatcattccgaaaccaagccgaagctctgcaatgactntcacctcgtcgcattcgatcgagctccgccaccgccgccgtgccttgtttttgccgccatgaagttattccggccgcatctcaccgtttcaagctaactgagtgagctcttttgtttcaagcatctacgtatcccctagattccgtttttgcattcctttagcactaa

SEQ ID NO: 16695 - DNA, 432 bp, Oryza sativa
tgcaagcatgccagcttgcatccaaccgtgctgtgcaatagtgtgcacggttttttgttctaagagccggcgtagcaaccaacaccttttaggctcaacattaaaccacagccgccacggcatctatctttgaatcgacccgatgccttgagccaacaattgcttacgtagctttacagctacaacgaccctgaatcaaaatctaaccactggattacgcataatattcatcgaggaaagttacttacatcaaagaaaaacgtgaactccaaacacctgagccgagggcaacgtgtacgccactgctcatcgtatgaggtggatgccactgccccaacgtctttaaggctggatctggtcataacatcgctgaacaaggagggcatcgcaccacccttctgatatcgaggggaggatgacgcagtcatgctg

SEQ ID NO: 16696 - DNA, 454 bp, Oryza sativa
  unsure (1)..(454): unsure at all n locations
gcttggaatacagcagntntgagtttcttatctgattatgtgtaatattcttatcatctaccctattatacttcctctagtcaaaactcaaaaatatttgcggctcccagtaccacataaatttaactggacggggtactaatgtatgcaattctaattgtaaacactccctaattgtatagaatngtattattattgaactgcattatctctgactctgagtatactggtgcactactcatgtccctcctgaccatcgttttgaggagcttccttgacaaaaatgagaaagacagtcctgtcaattattacaccattatgtttttgtcctaatctctacattgcatcagaaagttgatgacatgcatgctattttcttctctttcttccccagtagcacatgaatcaggagtgcctgtgttttttgagcctgtctcacttgcgaatggttcaa

SEQ ID NO: 16697 - DNA, 135 bp, Oryza sativa
  unsure (1)..(135): unsure at all n locations
agcttcgagcatccactgtgtggccttgcaatactttatacattataggttccgnngaatctagcgcccccacacacaccccacacagttcgcagccgtgcggtcgatctcgatcttccctcgcttcttactact

SEQ ID NO: 16698 - DNA, 456 bp, Oryza sativa
gggtacagcgtcacatgccgtgcttggcgtcggacttgcgtctcctatatgctggttagttcgatcctgtttttgtgcatgattagatcgaccctatgatgcttggagtagtttcctactagctttttctcttcaccgaacatgctaactagaccattcgttttcactccttcctgatttcctagaccaagagatgtggatgcacgatgaaatcgttctatatataactgggtccgaaatgacacatcgatcatccgatagactctcttatcgcaaatatttaatgttcgatccgaaatggcattagattttctggtgactattctgttatattcatcacacaaataaacagggtcgtggaaataacttgaggctcacgagcactttgatctcggcccgatctccaaatgagccgaaatggagcctaaccaaagcttgtgagttctgttgagccga

SEQ ID NO: 16699 - DNA, 458 bp, Oryza sativa
  unsure (1)..(458): unsure at all n locations
gcttatccgcgtttgcagcgtttagtttgtttctctttgctttatggatgaactgataagtcccccaaatcctctcagcggatgaactgctgataggttgcgagagaacccttttggcaacctctgccaattctggtgtctcagatccatagctgcaccaccactcaattggttccatcgatgctgcatcggcctgcacatattctagtgcaaaaaatcccttcttcataataaagtcattgagttgctcgcgaaggactttttcctcttctttattatctgctattctctcaaatgcttttagcacacctgtcatgacctcaacatcttgattcggtgctctccttaatgtgccaccgggagcaggtttttgaagataattntgatcataaaaccttgggcaaacagcataagccaaacaatgaagtgggatactcatcttttcccaacgttcaatg

SEQ ID NO: 16700 - DNA, 457 bp, Oryza sativa
ctatagacaactcaagcttcactaaagataacccatgtgcaccagcaaaacgcttggaaatgaatgaatgagttgcaccagaatcaaacaatattattgccggtgtcgagttgacgggaaatgtgcccaatatgacctctggtgctgattgtgcctcctctgcagatgcatgattgacatgggcctgaacgaacttgagtccggcacgtcttggcttcgggcatgtaccaaccatgtgtccgggctcgttacaattgaagcagagttcgggctttccttcgaactccttgggctgttttgactgagcaggcagagctggctgaactgattgagcttcattcattagtggacttggagtcggattgaggctgtgatgctcactgttgctgtgattgccactgttgtttgataccgtgaaatttcctgggtggtaaggacgatgctgccggataatcat

SEQ ID NO: 16701 - DNA, 376 bp, Oryza sativa
gtcgagcagtcatacgtataataaggtttatcatatatatacttgcatacgaccttggtaggaataaataatgaagtcgattggaggaatgagcttttaaaacaattttattttgaaaacaaagtcccaagagtcataacaaaagttgccagaattcctttcatctttaatcatctctcatatagcaaatacttagatgtataagggtccctaaacatggatgggtgttcataagcacaggttcagctgagaataaagaatatacaagatccaccatatgaaaaatttcattaggtggaaattttatgttatacttatgcttgaaccaattgtgtcctgaattttcactctagtactataccatgggggagatata

SEQ ID NO: 16702 - DNA, 472 bp, Oryza sativa
tatagaccactcaagcttcgtcgtctccttgtctcctcctcctccttcttctttattgagcttcgcaagttctctaaggtggcgagcagcatagccttcgccctctcccaatacttaaaaatgcccatgatgaacatgaaagaggagacccagatcatcgtacctaacccacttctgaggactatattcttgtacatggcaaatactgctcctgatacctgcaagatcatttctacgttctggcgcgtcgacagaacattgtcctccaaggagtaggcggtgatgttgtccggaccagcggcatggagcagcaggaacgccccccagagcgtcaccagctccagctccagctcctgcgtcgtgctgccgagggcgagcttgctgagcgcgtacgtcgcggcccaccggcccagctggttcgccgcccacaggatggttatcggcaagccgatagccctacgacggcggactc

SEQ ID NO: 16703 - DNA, 409 bp, Oryza sativa
gcttcgctgcatctgcatgacaagctatagctacctggttaggttaggcgggaagttagtatgatcaccttacactttatcgcaatagttatcgcagtgtatacattttgtcttatattcacatttatcgaaatcattattatggagctaatgggccgaatccgtcgtgaatggaccactaaacaggcctccgtaaatgagctaagcctgcgttctttccttggtgctgggaactaatcttgtggaacgttacattaacgcatgattaattaagtattagctaacttattttataaatggattaatatgatttttctaaagcaactttcgtataggaatattttgaaaaaaaaaaggaaccgctcaacagtttgaaaaaagtgtggaaaacgagagaggagtcatgaac

SEQ ID NO: 16704 - DNA, 444 bp, Oryza sativa
cagctttctcttttttttgctgcttatttctggatagttctctatagaaacaaaattccttgtccttaattctaagccactcacttttcatagagttattatatccatctgctatatctggtcagggatcttcataatactttatttcactttcacggtctaatttttccatcaattcagatataatatgactgctgttatctataatatctctgtcagatgactctgcatacgaatcatccgaagctctggttgtataacttgcaaatctaatactaacattacctttgctgtcttggtaactcatgaaggtttcaggcctactcaaagctttattttttataaatgcactaatcgggcatttttcttctgctctttcttcagaggctattatatcagggctcatgaagtttattccttcagaatgcattgttactatcacat

SEQ ID NO: 16705 - DNA, 428 bp, Oryza sativa
  unsure (1)..(428): unsure at all n locations
agcttgtagcttgctattgtacttgctctcagtttttcttcattntgggtgcaggattggaattcccttccccttctgaaaccagcataaaccaatgatacttttctttttgacacaaaataactagcaagagcattggatgctgatgctctctaacaaaacaaaaacatagcataaactctgcccatagatatagctcaatgcccaatattgggcctaacttccacagaactaggccctgggctcaatcagcctatttgctaggcctttgggcccaattagcccgtgcttgtacggcccaaccagttcaccacccaccgataaatggcccgacccgcgaccgcgcgagcgagcgaggcgagcgagcgagctcactgttgcctgcgtcgtcgtcctcggctcggctcctcccttccctcgcggatctg

SEQ ID NO: 16706 - DNA, 448 bp, Oryza sativa
tattaattatgtaatcgccaaatgttggtgtatgtgtgtatacaacctcgggtctccagatcggctcattgattgtaccatagcttcatttttcattactcctaaccccagcagaagcatccttataatattaatccctggtgctactgcagccaggaaaggagcatagcttcctgagctgtataaagcatcaatatgtgagtaccaatatggcgatttatgttgaccagagaacattagattttcttacctgaagagacgccggaagagcaagaataccataccgatggttatatgcacaagttttctattgagtctctgcatgcaaacaaatggaatttatcagtagaaagcatcatcgtattgaagcaaatctcaataagacaaactactgttaatttgtcagctaattgcatggttcagttcatatgtctatgttatgtagaga

SEQ ID NO: 16707 - DNA, 413 bp, Oryza sativa
  unsure (1)..(413): unsure at all n locations
ncaagcttgctgcatctttgtcttngtatttttttttggctntgactttgactttgccaacttttataaaacttagctacatagttctattggttatctctgcaggagttcagagcaagaggagcctaggggccatggtcgacgatgcctttctagagacccaagcaatttcaaatgtgccaaagggagcaattcctatgtgctacttcacattgtgcaaactacagaggcaagactattgttcaaactgactctgttcaaatgtttctgttcagactgtatctttcagtttccgatatgcctgaccatttctagtaaaatctagagttctacacacttccggttctgctgtaattagcgttcaacaaattgactcatgattgtagcanacactgcataccattcatatatct

SEQ ID NO: 16708 - DNA, 447 bp, Oryza sativa
tgctggcagagtgaaaattaaatgagattaaaaaattcagagccaggagagctaacccacatgcaaatcatgattggattggatgtgccgcgcgtctcctccaactcatggctgtctattcctttcatccctatgatgatcatttcagaatagtttcatcctattaggtgtttgtttgttctaccatccaagcatgcaactaactaaactaacacaatctgtactttttttctcctacagaaaatgtagaggctggcaagagtggaagaactagtttttgtttgttaaaaaaatgtcaaacctaccaaattcagtctgaagaaagaaagacaatgatatactccgccaaagtataactaaagttcagaagccaactataactactgaagatgaggctataatactattgaaagtatatgtataatttttttctaaaactttaataac

SEQ ID NO: 16709 - DNA, 317 bp, Oryza sativa
agcttggcgtacacgaaagaatgcgagagcttattagaacacacgcagagttccctacctggcgcgccacatgacagcacgtggggcttctcaccgggagaccgcgcaggcccccctttgtctgttcgggggagggccccgggggagaatctaaactcctaggctgtggaaagttctcgagagtggcaaaaatctcatgacacgggcgatgtatacatgttcgggccgctgataagcgtaataccctactcctgtgttctggcggatctgtgtgcgaagaaactacacgcagctgacaaaccagagagcttttactc

SEQ ID NO: 16710 - DNA, 385 bp, Oryza sativa
aagcgcctacttcgtcagaagggcgaagccgtgccacgtgtacaggtgcaacttctaggaccacggcacggcggagactcttgtggacacgctgcccgccggatggaacgactaaaggtgcatgtggttcttgcccgacccggacattgctccggtgatcggagcacggacctacgaagaagaagaagtagaagctgcgcgaagcctgccgcggcagcgagacctgaggatctacgccggcgatctgccacagaagatgtatatatccaagcggcggcgagtgatgctcatcaggcactggaaggaggtgttgcttgcgtgtacctcaatggagatgatctacgccttatgttttggtggccttctcttggtttttggctcacta

SEQ ID NO: 16711 - DNA, 346 bp, Oryza sativa
agcttgcaacgaagatattggcgtcccggttggcgccgagaatgggcgatctagttgctgaaaaccagactgccttcatccgtggccgatcgatacacgaaaacttcatttttgtcagaggtttagcgctgcaattccaccgaagaaagaagcctatgatcctcctgaaacttgacatcactaaagcgttcgacacagtctcttggtgtttcttgctgaacttgctccgaaacaaaggctttgggtccaggtggcgatcgtggatagctgccctgctcttaacttctgaaaccagaatcttgctcaatggccatgaaagtgacagcttcaagccggcgcgaggact

SEQ ID NO: 16712 - DNA, 388 bp, Oryza sativa
aactgtccatcatctaaatgaaacactctccattttcttttccattattgtgaaagaacaaaaatggagcctctctttgaaaaaacaaaatggtgaccatatggtcaaagattgaactattaactattaataaataacccttaaatacaactccggcaactaaaagaacagacgtaaaaatgtaactaaaattcaagcaccaaaatcccctcttatttgacgctagcagtgaaaatctacaataggcaggaagaaatcttttaattctccgaccacaagaccaaccgaccaacccactctctcctccggctctgtcgcttccggttacttcgccctcttggtcctggatttcatatcgatcatcgaaaggaacccgatctggcctctc

SEQ ID NO: 16713 - DNA, 412 bp, Oryza sativa
ttaagtcacctggcgcatgcaagcctatcagattctatgctctcaagttgcacctacaactattgattgaaaagaattctactcttatgggtaaatgctcaatatccaagtgggcttacaaatttgatcatgaacaactgctttgcggattgtctcgcgtctctctgattaatggtatttatcccccccaatattgcaagttttttacgtccaaacaaagtatttacttggctctaataacaaatcaaaaaggctagcctacgctcttccttagatcccttcttttactccgatagtattgcagatcgcaatcgatgcagagaaaatgaatgcatttccatactattataaaaagtctgtgtatgaatagagaataggatcatgtcacatgacttattccatttctactcta

SEQ ID NO: 16714 - DNA, 342 bp, Oryza sativa
cttccagatcgagcgggtctaaaaagaatcttaattgaatacactaccgatgtaacacttcttacttttaaccctaatgtgctgcacgtgataaccgaaatgatcccaggggggtacatgcataactaaatattggaacatgcatgcgcgttcttattactaactagctatggtcagcacgatctggacttaattaatctgtgccgttctacactaaaaaaaatgcacgtggacaccatgccagcctatactaattaaatatgtgctagttaaacaataatatgcaataggatccatcatatgtgtgcggctatcgacacgatggattaagtgcctaacttc

SEQ ID NO: 16715 - DNA, 442 bp, Oryza sativa
gttggtgatctctgccgagaatcacgaagaagcagtataaggtgttgataatggtgagtgagggtgttgtgctcaatgaatcagccaaccagccatgtttcctgaaccacgagaatattgacgaacctgaaagcacgacgacgagcaccacctacacaacacgtcaacacacagctccccgaaggagagagctcgccggtgaaggaagcagcgacggcgtggttagtagcggaaggggaaaacactcttacagttacagggggtagaggatgagggtgcgggcgtgcggcgctgttcaccggaatgcgtcgtgagaactgccgcgcgctggccgcgaatcaatccatgagaagggatgtggatacggatatgggcttttacttctggacgaaattgccccttgctaattggtgatatctcggtaatcaacttttaatcctca

SEQ ID NO: 16716 - DNA, 469 bp, Oryza sativa
  unsure (1)..(469): unsure at all n locations
tgacctaagcacctgagctgcagcttagggatataagttatgtacaattgctttttatgcatcttgaactcttgtttctttggtctttgcactgaatcataaattgagtgagggctgatggatgggtttgtttgtatattagaccaagtggccttactatgcccagttccctgaagtagccatgccatggcttggcttatccagtttgatacattttgccatggtggtggtttattgctcttttagcaaagcagttgtgctggctattctttgttggacaagtttagtttgaaggcaggcatatgttctatttgtatgtggcttgccattntcataattttgtcagcagaactgggacaaacttattattgtaaaagggaagattattatttgaacaatctgtatatgatgaactgattcccgttactggtataaactacaaagacatgaactgtaacaaaactggtga

SEQ ID NO: 16717 - DNA, 425 bp, Oryza sativa
  unsure (1)..(425): unsure at all n locations
cgctgtcaatcttttttcccaacgttgtcggtgacaaattatttcaaggcaaaattccgtgtccatgtgaatgcatgcatctacagacttacggttataccaggtcatagagattccatttttccatagaccaacactgtgtttagttccacgccaaaattgaaagtttgaaaaaattgaaacggtgtgacagaaaaattgaaagtttgtgtgtgtaggaaagttcgatgtgacggaaaagttgaaagttcgaagaanaaagttagaatcaaaacagggccactcaggtatcttcttttctttaggactacactcaggtatcgagtcctgaattctagaacaagggggaatttttaaaaatctcacacattagagttcagttcctataaaagacaaggaaaaagaacaattcttgcatcacaaat

SEQ ID NO: 16718 - DNA, 452 bp, Oryza sativa
ccgaagctgcagctaaagcctgaatccctttatgcatatctggattttgatttgcagaacgaacatataggatgagtagtatctgatgtaaatataatacttcgagaaaaattcaagtattttaaaatatttataaatatgtatttcttctcttgtcaattttgatttcccctagcagatgactcattatgtttaaacactctgcccgactagtcatagccatcaagcaccgggagtcggtctaagcacttcccaaacatgcatatgagtgacatgagttcgtcattaatggaacatagtttcatgggtcggagattactactcgggtacttttgcaattattaagagcagaacataaattatcttatctctatgcttttgatatattccgaataatacttagcaccttacgttattcggtccatccaacaagcccgcaggtgctaggaatc

SEQ ID NO: 16719 - DNA, 381 bp, Oryza sativa
cgtgtcatgactgacacccgctttaagaaaaatatcacagcatccatgcgccacataatgtatgactgcctagcattggccacattcatatacaacttcacgcctccttgtactggagctcagcccaacaggtttagctccacctatactgggagtggacctgactggaccgctctcacaaaatgaactacagatgtggagctgggttttggttactccacaacttcactccagacccaactcttagagctaaattttagagttggagctctaccaatacggtcttatgtcgaattcggaagttaccgactgaggtacttccatctacaggcaattaatacccccggaattatatatcaatctgatcatttggtgcatgct

SEQ ID NO: 16720 - DNA, 474 bp, Oryza sativa
  unsure (1)..(474): unsure at all n locations
acctgaggcatgcacgcttgtgccggcaatcccttgagtccgtttattagcatggagccactagtgctcctcggttagctgaagatgacaatgacaattctgttgcaagcgacttgcattgctttgaactgagcatgcatggtcacaccattcagaataatgaccttataggaactcggcagagggtcacaagctgcatgtactcaccaatgagaaggcttgaattttccaatggcatacccgttgaaggttcaagaatctcaaccatgtcaccttgttcaatgaaagacaaggcaaggcctaatggcatcagagaacaacttaatgcttcaacaccagaaattagcccatgcaacgatgccaaaaatgctccaagatgtgcgcaggatgaaactgtcatgactcaagtctctcaaagaatgcatgatgacctgtngaagatcaaatcagaggctcctcagcatgcgtatctcg

SEQ ID NO: 16721 - DNA, 459 bp, Oryza sativa
  unsure (1)..(459): unsure at all n locations
ggaccaatattgtttatgacatgtgggcccattntgtcatctaatggcagttgtaacagaagaattaaattaaatattttaaaatagctgaggcactgaaaccaacaaatttgaagtataggcacttgattagacaaaatagaatttaggcgctcataccaacaaatttaattagaggacttgtctagtaccccctccatctaaaagtctaaggcatatttcttttgtcaccaagatcaagaaggaattaactcatccaccatgtgacaaaaccaagaaaccatatgcatgcaacaatttaatttagcacatgcagcctacaaatatgccttagactttcggatggagggagtactagataaaatgcaacagtttagacactcacaagtcttttggcttgtgaatgcataaattgtgccagcttacttttattggctagtatctctttctgcacataag

SEQ ID NO: 16722 - DNA, 434 bp, Oryza sativa
ccgctcgagggcgcggttgaacgcggccaatgccatgtcctctgcggcctgcttgctggtgaactgcaagggcatctgaacaatgaagcattatcagtacaacagtatgtctgcacagaagataccagcttctgaacaatccaccgaattggctcacgcgctcaaagcgtgctcacaagatgggttcaaaacaagttcaaattcgggattactcggagggggagccgaggaattaccttgccgagcagctgcgccatggaggccatggagtagggcacgacgacctcgaggacggtgccggacgcgccgggcacggacagcagccacccgagcgcctgcggcgaatgcgcgctttgctttagtctaggcgccaaacagtactaccatatcggatcgaatctgccggcgaatcacggcgcggcggcgcgcaagtg

SEQ ID NO: 16723 - DNA, 345 bp, Oryza sativa
  unsure (1)..(345): unsure at all n locations
atagagccagagagactgctctttttcaggnacattcttaccaagctggacatgttaaacagcgatgcacgtatcggacctgaaagctggatccctgacagtacaagcacctgaatgtatggcaagacaccaatagcaccagcaatgctccctgttagctcgctgtaagcaacgctcaagaatacaagctgtgacgtgccattgaacatgccacgtggcatctgcccgctcaactcgtatctgcttaatccaaggtacataatgctcattacattgtgcanggcgggaaggattacaccggagaggttgttccagccaaaggtcgatgatttccagcaccgtgat

SEQ ID NO: 16724 - DNA, 374 bp, Oryza sativa
cccaatcttcttaactatacatctgagtttgctgggaagtcttagcttactgcttttttaaaactaaagtggaacaagacattttactcaaagtaaccattttttttctgttcatgaatggcttgacaaaatgttcataagggtccatcgtaaattctgagtatatatgttataacttgattggaaggccctacgcgtcgggtgtccgatgcttgggggaaaaattgggcgctgacgtcagcgcccgatttacgtgccaaaactactttaaactgatttttctttaaaatacttattcaaaatatgatccgattgcaccattaaatttcgtgcgattaaatcgtcaaaacaagaccacacatggatatattctg

SEQ ID NO: 16725 - DNA, 460 bp, Oryza sativa
tccaatgcaattctctccgcgttgagtccggaggagttcaacaaggttgatggacttgaggaggccaaggagatatgggatactttgcaattagctcatgagggatcacccgccgttcgtgaggccaagattgaattattggaaggaagggttggaagatttgtgatggatgacaaggagacaccacaagagatgtatgataggatgatgatccttgtcaacaagattaaaggacttgggagtgaggacatgacaaatcactttgttgtcaagagacttctccgtgcatttggtccaagaaatccctctcttgtatcaatgatacgggaaaggaaagacttcaagaggctcactccaagtgacattcttggaagaattgtgtctcatgagatgcaagaagaggaagctcgtcaagtgagccaaatagtgaagaatgtcgccatgatcaaaaatcaagaag

SEQ ID NO: 16726 - DNA, 381 bp, Oryza sativa
ttttgcttctataccaaatatatatgtataaccggatgagacaaattattgtactaccaatctggactagggcttgatcatattcatttctatctaacatcatagcactagattctttttaaagataatagtactataatgtttcatcaaattctacattactatattttaggacggagcgaataactttataacaattactccctttgttctttatatatgacgagggttagttcacgttatatattcagggatggaggtagtaattcattctttggtacccttaaatattatcacagaatcaagtaatccgtcgtccgttcataagtttaaatagtacgtcactgcatatgtaggtatgtatgtctaacatgttttact

SEQ ID NO: 16727 - DNA, 442 bp, Oryza sativa
  unsure (1)..(442): unsure at all n locations
tattcagagtcaacaagcatatgcagaccatcctgtatcttattcagcactgtaatcagtgtcaggctgtcagcaccatcattagaattttataactgcattagtgggccagttctttttatttaggctctgttaggcacagctccagctccaactccacctctcctgtagctggagctcagccaaacagtttcagctccacctaaactgggagtggagctgagtggagcgctctcacaaaatgaactagagatgtggagctgggttttggttactccacaactccactccagacccaactcttagagctaaattttagagttggagctctaccaaatagggtcttaagtcgaattcggaagttaccgactgaggtacttccatctacagccaattaataccccgggaattattaatcaatctgatcanttggtgcatgctg

SEQ ID NO: 16728 - DNA, 377 bp, Oryza sativa
caacagtaaggatgagaagtgtctgccgataacacactgcttgaagaatacatccgaacccgatatgaactataaatatgcgcttatgtcttcgtcatttagattccaccttcagaagactcgttatgtgtaaacactctgcccgactcgtcatagacgatatgcaccggcagacacgctatgcacttgccaaacatgcgtatgagcgacgtgagctcaaaattcatggcacacaccttcatgggtatgagtccactactcagagacccttgctataactaagagcataaaactaagtatcttatcaatactcttccgaatgattccgaaatatactaaacaccgcacggtattcggacatccaacaagccctcacg

SEQ ID NO: 16729 - DNA, 430 bp, Oryza sativa
  unsure (1)..(430): unsure at all n locations
ntaccgggagatacatatctaatggcgcacaaagttttctgatcaaatgacaaaattgcaatcgactgtccaataggcggccccatataatatgacagtgtgggtaataaaacattattatactgaaaaaacactacacatcaataatagataagctcaaagattgctctacacgagaaatgtcacaaagtctctaaccacaacaaatggcatgcagcatcaaccccaaagttgacgaagacatccaatcatgccgacgcggnagtccatgtcgacgtcgccatcgacttcttcttccgacgctccgggagttgacctatggtcaacgacatcgtcatcgccatcatcgacaagagctccgggctttgagctaaggtcaaggacctggccggcgaacacgacggcgcccgacgtctcctcgatgaccaag

SEQ ID NO: 16730 - DNA, 250 bp, Oryza sativa
acgactccctccgttaaaagagaaccaggtatacttccacgaatgctatcgcctagcgaggcaaagggttgaatacatagaaagttgatttaggggatcagataccgtaaatttgcctgtgacgtttgatgaggacaacgaacgcctagaggatccggacacacctggcaccgacagcacccaaactaacgccttgcggcaatgcgctcattgctctaaaatatgcgccagataatactagcatgactga

SEQ ID NO: 16731 - DNA, 448 bp, Oryza sativa
tgaaaagttctcatcggcaggctggttgtagctattaatgtagtttaacaagagcctgtcaataaaaaaactatgcggacgtcgaaaagggacctctgagtgtatgtcctaaataaggtgagcacaaagcagcagatttaaaaactgaaaatgctagtgcacaccatagacgtgacacagtgcaacaattagcaaaatatgggtgtaagagtgaggtcctgcaattgtctcacaacacaagaggtgattctaggcttgggagagttgcatagtacctgctttgctgcagtctgctccaggatctcatccatctgcctgcgaaacaacatgaggcgcccgaccgccctcccggtcatcctccccgccaccctcgcgatcttgatcatgtcgctgcgctctaacagcagcaaacaaacagatagcattgagcacaaggagaaattaaacc

SEQ ID NO: 16732 - DNA, 221 bp, Oryza sativa
  unsure (1)..(221): unsure at all n locations
cttgttttctgggcgactgagtgatcccacctcttgtgtatgtaactcttgggatgctcaaccttgaacaatccaccgatataacacacgctctcagaacgggctcgagtactttgctagttctacatgcatgaccgagatctactcgatgggtatacnttgattgaccttcccgaataaatacctgcatgtgctcctgagctagactctttttacccttt

SEQ ID NO: 16733 - DNA, 448 bp, Oryza sativa
  unsure (1)..(448): unsure at all n locations
tggaanatgatgatggtagctctccacttaagccttctctgtcaatgtacctacaattgagggatacaaatagcagaaaaattgagctgagaagcccaagaaaataaatgttttggtaaaagaaaagatgaagtcttgaataaacctacaatcccgtaagtttgtccaggttccccagttctgaaggaagggggccactaaaattgtttgagcccaaacccctgtaaatataccccaaaaaaggactcatgtcaggcacataaaatcgtttgtttgaatttatattctaggaagaatggacagtatcagagtagtagttcttaactgagtttaacttcaatactcaaataaaagaatatgacaacagatgaatatgtcatttctactttaactcggaattttggaaacccttcattgaatagtgtaaacatgaggaaattgacatatg

SEQ ID NO: 16734 - DNA, 127 bp, Oryza sativa
agcttgctcaaccactcgtggaggaagaacacatatatataggggtgggactttagtcccgggtggtagcaccaaccggggctaaagatcaccgggatctttagtcccgggtggtagatctttagtc

SEQ ID NO: 16735 - DNA, 453 bp, Oryza sativa
tcacatgatgtgtcacgaccgtttattatccaacttgcgttccttacgtgcgtgtattattccttgtgccacgatgcaaggtacaccaaaagttgatacaattcagagtttaacaagcggaagcgtaaatagataatttattacatgggtagcgaaggcccagcacacaagaagacaaacaaaaaacagtggaagactagggcgacgaccacaggcgcttgacggctggcacgagctatacaccaaagccttcatcttccaagaactcatcttctgggtgtgggaaaaattgagcaagactgagtacaaccaccgtactcaacaagacacacccataagtgcaaaataaatgcaagggagtacaagggagccataatatatggggttagggtttgcagtaaacatcattaatagtcacttagttgctcacagctactttgtaaacacgatcct

SEQ ID NO: 16736 - DNA, 378 bp, Oryza sativa
  unsure (1)..(378): unsure at all n locations
agctttcacactgattntaattattctatgcatcatttaaaggatgtgttttagagtcgtgttgggacgtgacaccggtcatggctttacgggctaccccgcggcacgatcggatcatgggcagagctactcgaccacttcatcgtcaacttccaaggcacttttgaacggcctggtacacacttcgatctctataacatcattcacaagtctagagaatcccttcaagattacattcgacacttctgtaagcaacgcaacaaaatctccgacatcaccgacgacgtcatcattgccgcctttactaaaggcattcgcgacgaggacctaatccgcaagttcggacacaaacctgccaagactgtcaagcaaatgttt

SEQ ID NO: 16737 - DNA, 361 bp, Oryza sativa
agctcgacctatctgtgaagattatgtctgctttcagattactcttttcaagtcaatcgctataaagacatcagttatgcacacatcactcaatatactggtatatacgcaaagtatacaggtggcaaacaactctcaactaactttgctacagaggctgacgattttgtagatttggatggtgacctatgacaggcctacaatctttaactatctctacccttcaaaagtgggctcttaatttgtcctctcggaaccaacctttcttttttttttttttgcaggaagtaaactaacctttctgttacatgtttcttgaccacaacaggcatgcacatgaacagctatgaatctgcttttt

SEQ ID NO: 16738 - DNA, 443 bp, Oryza sativa
  unsure (1)..(443): unsure at all n locations
tgctgtttctgtatataaatgatagctaaatgtgctttgcagataaacttgtttttttttttcaaatttttatgccatatggggacaattatcatcctcttcaaatttcatgtttagggcatagatggttcaagagtggagaaggttttagaaaacgtgcacattgcagcaaacaagaacacagttcctggtgatgtttcagctatggtaccaggaggcatcaggatgggtaaaatctgcccctatgtggttctttttttaatttacttaaaatagatttgcaaaatctcaatatcagctccatgatcatgcaggaaccccagcactgacctcaagaggattngttgaggaggactttgctaaggttgctgatttcttcgatgcagcagtgaacttggctttgaaggttaaggctgcagcaggtctgtcaaattcctagtttt

SEQ ID NO: 16739 - DNA, 458 bp, Oryza sativa
  unsure (1)..(458): unsure at all n locations
agcttgctgttgcttcttctcaagaatcttcttccagcgcttttgatcgagcatcattgtcatgtcttgccagctgatataaataagtcaatgggcaggaaatatgtcaaccaacttgaattgcacaatgaatcaactgagtgatatgagcacatatggatgcacaatggccaggtttccatagattaacatatgactggcatgatcacatgggaaaaaacaaaaacaactgttccaaaaagtatgctaaaataatcaactggtgaatatatatgatactaaattaagatgctcaacaatgtaaaacatgaaaaataatagcattctagttcataatccatggccacacgtgcattntcagcctaaaatgtgtgaggtttcatagaatacttatgccttataacccaaacctgaacagactcaagtaatgctttatactccatccgttccaaaatata

SEQ ID NO: 16740 - DNA, 459 bp, Oryza sativa
  unsure (1)..(459): unsure at all n locations
tcggtactactattcgcagcaagaaaaactattatattctaaacgttcattaaactttctattaatattcctaagtcgccatatgacgctgctataagtgctcctaggccatcacatggtactgtataatctcaccatcgattttcatttaaattggtggacccgttatttaccctctaacgtggcatacaaatggccgagttgagtgggcccagtgtgtcataggactctatgaaagggttatagtaaattagacattaaaattgtgcttcgggctgatcttgaggggacacaactacccaattttcaaggtaatagagaaagaaagtctctacggctatgaccggcttcacccgttagtgatatttttagaatatttatatgtggatttggaaataagtgagacatanacacttagctaagtagtgtattaataatatattaagcttattctattat

SEQ ID NO: 16741 - DNA, 458 bp, Oryza sativa
  unsure (1)..(458): unsure at all n locations
agcttnctcaacatcatcaacatcggcttgtctagcttcttattctgccggtagcataaaaaccatatttactgatgccgatgcaagagccttgcctttgagcaccctttntgccttttcggcttcgacctcatcggctgatacaactgtacttttaacacgccattcttgcttagtctttgttttcctcagccgatgattaatctcttgatgcaccctctgaaattgctccctgttcctcaacctttgaacccttctcttttgattcttggtgaaaatgcctgtaggtacaccactgtgtattcctattttcatctttatcttgataatgatcttgatttaccaggcccagcctttgatgaacaggtactctcttctgatttggccgattacctctattataggatcggcttgaactccctgtatcttcactgcatccagggcaattctcaatcgat

SEQ ID NO: 16742 - DNA, 476 bp, Oryza sativa
  unsure (1)..(476): unsure at all n locations
tatagaccactcaagcttnctgtatgctgccacctgagctgtcaaatgcacatgttataatgtttttcaatcaatgcatacatacccatgagtatcacacagaaaaggttaatagagtatttatcagaaatttgtgtttcacaatttttttctgttgagggatgaatttcactccaaataacattattggaatacatttctgcctataatctaagatgcacatgttttatgagcgatttgatcatgaccacaaacatgagataatgtccataccctagttaggtgcccgtgcattacaatgggaaaagagcatttggctatgtactccttcccatcacgattatttgatccaaagtactgaagtatcccgcgccaaataatatgactcggggggcaacaaatgaaacatgcacaacagttcaggaccttgagcatagaagatataaatgatacaacctatgtcacttattatctac

SEQ ID NO: 16743 - DNA, 458 bp, Oryza sativa
  unsure (1)..(458): unsure at all n locations
agcttctcatgataattaacaactaanagtatgcaaatgaactcactctgacctgtcacttagcttgagccatccaaatcacaagtgaagtcaacaacggaatagagacctgttgcaccagaaacatctaattcagcatgtttcatatttactgaagacgtatgaaaaacggtagactgcagtataatccttttatatatcctttgagagcgtttaattatctatatgtgcaaatttgcttcagttagtttaattagttcaacgagcgtaagcttgatgttacttgataattaaccaatacaccatttggcatgctatttgagttgttgattaagctcatgaggcttgaaactaggttcaaaaccaatatgcttgtttgtgacttgtgagcacacacatgatacatatatatgtgcaaattactaaagagaacagagttgtccaatttactgtgattt

SEQ ID NO: 16744 - DNA, 440 bp, Oryza sativa
  unsure (1)..(440): unsure at all n locations
ngacattacggaccactgtgtctagtaccagggggtatcgccccgggtggaccactcggtcgggatgatccgagcggtcaaacttgattgctgtctctgaccatcgaagatattggggtatgttgggctgaacagcgttaatctcccgttcagtcaacttttgctttcttttagattcataagccaaggggccgccgaagatgtggttaagctccttgcggtggtcttagaaacctgccggggggtcgccatcgtccttcttcttcgacgtgctttgtttttcgtcggagttcttccgtgtagtcttggtgtattgttccgcgaactgcttgtagacgaaacaatctttggccgcgtggttggacttangatgatgcgggcattgggagttcatgatcttgtcgaacgtgttgacgcgcgaacgctntgatgatcttcca

SEQ ID NO: 16745 - DNA, 450 bp, Oryza sativa
gcttccaatatagtaagcgaaaagcgctctataattgcgtatatataaacacatgaacatcagcagcaacctcctcactgcaccaagaagaagcagatagcgaaaatgtcgtcgactaacagttcaggcgatccggcggcggtgcgcgtggtgggcggctgggcgagccccttcatgaaccgcgtggtggtggcgctgaagctgaagggcgtggagcacgagatgttgcatgagacggtggggaagaagagcgagctgctgctccggtccaacccggtgcacaagaagatccccgtgctgctccaccacggcaagcccatcgccgagtctctcatcatcgtctagtacatcgacgaggtctggccggcctccaatggcgccccgtccatactcccccgcgacccctacgggcgcgccgtcgagcggttctgggcaaagtacatcgatgac

SEQ ID NO: 16746 - DNA, 470 bp, Oryza sativa
  unsure (1)..(470): unsure at all n locations
tataacactaagctttaccttagttntcccatttacctttgttagtttcttttatctatacttaatctctttctactatatattcaataaaaattggcgcactctaattaagtgttgatttgcaaaggaaaaaaaagaactgcaacacataccaatgcatgcatatactattttacatttagcccatatattttttcatataattaaattaaacttgatactgtggaaacactgttgttttccccacatcaattgcattgacattttttttgtgagttttgaactgagggagcagaggcagttgtacaatagtctgccagcttaattctgcatatatagctgtccagtgcaaatgtgcaattaattggtatagatgtccaagcatcacagcaagtaaatcttgcagtgcaacacggcgaacaaaatgtgcgtccaacgcaaccatattgtacaatgaggagaagacgtca

SEQ ID NO: 16747 - DNA, 394 bp, Oryza sativa
  unsure (1)..(394): unsure at all n locations
agcttcaaactgcataactntcttccncataatataatttagcctcacatgtcaacagcctcgaatggtggtcttatgagctgcttgttctgctttctgggatcctaccaaatccagcacttgaaacttctgtgctttctatatggtatgcattacatgcaatgaataatagattcttccatttttctgttataatgtttaacaaataaatatatctggaacagcatttctactgttgtgttggtgtacaatctccctcatggtattggaacagctgcaaggcgggaccactcatttttcatcatgcttaattaacatctttttttgtacccgtcagatgtttaacctaatacatgttatattcatgtggcagtgtccgtgtctcaaatgaact

SEQ ID NO: 16748 - DNA, 479 bp, Oryza sativa
  unsure (1)..(479): unsure at all n locations
ggaccttaaaactcagcttccgtgacactaagggccttgttggcacaactctatctttagctncacccctcctggagctggagtttagccaaacagtttcagctccaccaaaactgatagtagagctgggtggagctctctcacaaaatgaactagagttatggagctggatatatgtagctccacaactccactccagacccaacttctgaagctaaatttaggagttgaaactataacaaacagaccctaactagcaaatgccataaaaaattctacacagaattgaacatttactcctattagtattacacatatctaagagtcttatatttaaattcattatattttagcccgaacaaaaaagtaaaagatctgacagttttaagggtaaaagtctgtcagaattttgtctttnctattatggctcanatataatgaatctgaagataaaatttcacatgtaattggaatactat

SEQ ID NO: 16749 - DNA, 432 bp, Oryza sativa
agcttgatgcatttgtcagatctgcttctatggatcagcgttggcaagtagaccttgtgcaatgcagagttttagatatgaacggctcatatacttcatatcatacttgtacacagcgagctgttctaatcattcccatctgattcttgggagtagccaaatcagtgcatggtcagatattaggaaggaagagcagtataatatctatgtgcagattagttctaatttaccggctattctcacacgttggcttttttattgactgagatatcatttatgttctgctatcactgcagtccaaatgtgctggtcaattcataattgatcagcaggcctggaatttgtctcaaggtatatacatggaatagtgatccaatatgagtactgactaaagcagactaatttgaatgcgaactctttactcagtgaaca

SEQ ID NO: 16750 - DNA, 346 bp, Oryza sativa
  unsure (1)..(346): unsure at all n locations
ccatgttcaaacgctgaccggagatgacatgtcctattaaccacatagttgatcgagattgtacacgcacgcgatgatttccattgactgtaggaaagcttacgagtttcaggcgtctgcaacatggntccaccgattccaatatacactacaagtatggccacatgatcatcatagttgacaatggattcttgtgcctctgcattgtaacttgcaagccatatgtaatagcgtgcacttctgtaatatataattactgtatgccccactccttggagctagcggcgtctctatgtgtgcgtgaggaactgcatatggcacatgttgctgttgctgatcatgttca

SEQ ID NO: 16751 - DNA, 449 bp, Oryza sativa
  unsure (1)..(449): unsure at all n locations
agcttctttntaattggcggctgctggcttgctgctgcgtgcatatgcaggaggggaagagctgtaccaggaaggaagcgcgtattacagggtaggatgcagctggccaggtgaccaacaaacacctgccagtgacggtgaattctgcacaaatttattttttttgaatatctgaatgattcacgcgttttttaaaattttaatgccaggctctaggcatcaattactaccaaatctgccgtgagtccccaccagggttttgcaaaatcacgcagctaacacgtgtagtaaatcttcttatttattaaaaccgtgataactatacggttttcatggttatcacaataaacatcatatcttggaatggcgataattntatttaaaatagtttggtaaacccgggtcccactatattagggtgatatgaaaatctcactatcaaaagcaca

SEQ ID NO: 16752 - DNA, 435 bp, Oryza sativa
  unsure (1)..(435): unsure at all n locations
ngctgaccttgttggagttactctgggaccaaatgtttgaatgttgntttggagagcaagtatgggtcccctatgattgtcaatgatggtgttacagttgcaagagaggtatattacagtgtttattgcgtcaaatagcattgaatttccttacaatttgcttgtttgctgtatgctatacttccacagaaaaaaaatgtttgttttgaaaagtaaaacagtctgcacatttgctcacaagtttcatgcgcaagtgtatttctgtttactattgctggttgcatttttgcacaccatgttctatcataattacctttgtgggttctaatatatgatcctctgacaagatgaactaaagtttgatagctggtcattgacttaactatagtgattgtgcaccatttgttttagtcatgatataaagaatttttcaat

SEQ ID NO: 16753 - DNA, 396 bp, Oryza sativa
  unsure (1)..(396): unsure at all n locations
gcctgctgcatgcaagcttcttcttcactggtgatctctntggtatacattggaaatggccaaaggataccatacatggatttcagtatacctttatgaataacattttgttgtttggtagcatgcatgatgggtatcaatcaaatttaacaacctttggaaaaaaataagggggaatcttctccatcagcttctcttattaaaagatttgactttgttgattagatactcttatcatggttgcaatattggcatctgttctatcgatttatcatctacttaatcctccaatctcattctccgctgtaatgatatttaagcatgtgtcataatggtatggatgcctttaatgcatgtagcatatttcaaactcataacaagatgtacttttataaa

SEQ ID NO: 16754 - DNA, 445 bp, Oryza sativa
  unsure (1)..(445): unsure at all n locations
tcctttataggttactgttattccggaattttcgnccatgggactggcatgtaaggcagtaatgactttctgttgtagttctatattatttcccaaccagatacgccctttgtatttgataataccattagacaaagaaaacatgggtctagaagtggaacaaagaaccaaatcagctagcaactgagtcgagaaagcatctgtgagatacccatcactcacttcctgcagccacacaggagtacagctagaaacagcatgcaactcacaagtatcctccgaatacttcctagaaagtgcatctgccgcagcattactgctaccttttctgtaacaaattntaaactgaagtcccagaagcttggtaaatgctttgtgctgccacggagtatgaattcgttgctcatttagatgcatcagactgtggtgatcagctaagatgata

SEQ ID NO: 16755 - DNA, 460 bp, Oryza sativa
  unsure (1)..(460): unsure at all n locations
ctgcttgcatgctagcttggaagagaggcctcgttgnntggcttattttttactcgaagacattctgaaatcactaactgactgatttctttctaagcttgggccgaaaagagacttgcgtctcgattcgactataacagatgttgttcaccaggtgatttggtggtgtacccacctcctgggtcacatcattacttctctgatcccagaggcattgcacttgataaatcggctcgcaaagcttgttgtattttcttagactctgatagggcagctgcccaggagcataacaatccgcttgcagtctggaagcctagtctatgatgcccgcagacattcctaatcacacagattcgtttctgaccactcgggtcatacatctgccacatatgctgattctggttacgattcgcacaccacaacaacttttcatcgggcacaggctaaccaatctacgcac

SEQ ID NO: 16756 - DNA, 421 bp, Oryza sativa
aatagtatcttctggacccaatacctaataatagaaaaaaataagacatcacttgctactaatagttttggatcatagataccgcacgtgctaattgagatggtgagatgattgataccagacaaagaggactggaaaatattgagagtaacatcaaatagatgcatccaatgagccaatgaagagcagtagaagcaaaagatgaggcaaatagaagttcaagcttctgatatattgtttcaccaaacaattgtgaagcacagatatcaactgaccagccaaagaacaacggccatattgcaatcacattaatgagattaactgaaatattggcaacggtgactagatttatgatccctctgaagaacagtcgcaagaaagacaatgccatctggaccattacatgtataccaggcaacct

SEQ ID NO: 16757 - DNA, 385 bp, Oryza sativa
caccacttgtcaaaggccacaaacgttaacgccgcaaggggaaagtctgcgaaatggcgccggatccaaataagggcgaggctgcgatgtccatgccgctgagcatagcccggaaggtcatgatggcgccaacccaaatttagctaagcttgccatttgtggaggacaatgagttaactgtgatgggtattgcttgccgagagctacataagctatacatggagctaaacaatgcccagccgaaaatgagggagtgattcatatttggacatcacgagcgccaaccgttcctatcagagcctgcctatataaatataagctttgatgacctcttcgacctttttatgatgcggaagatggacactggtcttctaaaatgctacac

SEQ ID NO: 16758 - DNA, 448 bp, Oryza sativa
cctcctttccagctactaagtcgcttctcaaattgttcctttcaacattccactcagcatttcttagattcttatattgtattgggatacccaagtacctaataggaaattcacctatggagcaaccgaatagtttagtgtattcttttccaaaggcttcagcttcaccaaaggaatataattcacttttatggaagtttatcttaagacccgatagtttctcaaaagcataaagcaatagtttcatgttgcgagctttctccaagtcatgttccataaagagaagcgtataatcggtatattgtaggacaggagagaccaccatcaatgagatgcggcactactcccataatttacccacctgctttggctctttcgattagaacaacaaacatgtcagctatgatattaaagagctttggtgataaggggtcttcttgtcataaac

SEQ ID NO: 16759 - DNA, 440 bp, Oryza sativa
  unsure (1)..(440): unsure at all n locations
agcttgttaatgtggaccaatattttgttcgattattacagnattttcttcaatacgactagttaatattttcttgaaatattattttcagtatggtcattgactaaaatatatcatctcgtatagagactcatgacataagtgaaaaatcatgttaaaagaggtattataacaaaaaatggaccaaaacatatcattttaaagagaatattgtaagactcaccttaattggatttaaaatgaattttatattttaaaaaatatagtcatttttgaagaataggaaaaaaaacttttgtaagcggacttcttaacaaaccacccttaaaatgatttttacagttgaacttcttaaagagctgctcttaaactaatttttatggatagttttcataaggaaaccatataanaatcgattcacgcagacttattaagtgatc

SEQ ID NO: 16760 - DNA, 443 bp, Oryza sativa
  unsure (1)..(443): unsure at all n locations
tgaagtccaacagtggaaaccatgtttagatatcttgtctcattactcattacacacaataagatcagtgtgatgtgacttacatctgcacactccatattccaataaacttcatagtatatcagatctacttacttcaatttctttttatcaaatgtaagcaaggaaaaaaaatcaaatcttattcacccagctcacctatattgttccagacttccaggttttaggcaccggttctcagtagtgatgttatgtcaaatttaaaatattgaacttcaaacttgttatgcagaaagaaaaaaccaagacattactacattccttcttgaattgatttgaaatcagattcgtgctgatctgaataattaatgttttttttattttggtgatacctcttggctggatcacccataggcatgcatttatcagtgactntccatcta

SEQ ID NO: 16761 - DNA, 396 bp, Oryza sativa
agcttacgcatgatcacggatcataagtttatgggataaatacaaattgtttcacccatgttatttcaatatttcttctatttctgaacttaacaaacatggctctaatctgaccaaaatgtggtaaaaataaaattattttggaccaaaatttctgctgttttggaaatttctgtcctatcagtgtccccgatgggaataacaaaactgaaattttgaaccctgagtatgctattaatccgttgtgcaaaatcaaaggtgcttttgatttatattctgtgatgaacaatagggcatcggagattatcgggtttgatgtttggaacttattcgcacagtggctgtggagatgaatggatttcacacgagaacatacaagtactgctgtgactttat

SEQ ID NO: 16762 - DNA, 424 bp, Oryza sativa
  unsure (1)..(424): unsure at all n locations
ggacgttatactntgtaatttattgcatcacattcttggctgatgcactcataacacttctaccaaggagtacacggacacgagaccagctttatgctactgacattcctcgtgcaagatttctgatcggtggccttaccaagctgattgtttgacggactcatggcaacaaaccaaaggcacaactatggctagggttctataatctatccagattgctatgtgatgctaaatatctgtccaattgtcagcaatagttcacgcgatggatggcatgttactatacatgctgtccagggcctgaatgatgcacgaccattacaggatgcctgtacctgtctagcacaatgaggacgtctccaccctatatgcttaacatcgtgcaatattatacatggctgtaggaagacaagcgactactctg

SEQ ID NO: 16763 - DNA, 359 bp, Oryza sativa
gctggcggccaatatgcttggactactctcgcggctatctttatcacgagtgagggacatgtgattttatgaacatctattagggaacacaaatgaccttattccgatgctacctgcatagaaaggattgcacctgatgcctggactatgctgaaggacacgcaagaaggggggactatattaacagctcgtgggagttgagactacttccatagagcaagaggacttcgggaagattcgtcattataatgtcccctttacatgccaagcaaggatatcgatctatggccgtgtctcatgctcaagttaacgagatcttgaagggtgcagcgctacatgcctatgcgccacccactgga

SEQ ID NO: 16764 - DNA, 460 bp, Oryza sativa
tcaggctatagaaatcctgataggatctagtagccttactctagagattacgagtatgtccggattgtcaccatcttctaagaatctctagctcccaaaacatgtagctgaggaacataaatacagatcactgtcagactggaacaaacatgaacatccagattaagcaccaagcataactgggtatatatcgatctgttatctgtatgacttaaggcacgggacaacgacaaggtaacatcatatcgaactagctatgccataagtttctccttttggagtgacgaacagctacatatatcaaccatgttcctgaaggtaaccgagactatgtatataagcggccactacagttctcagaagtatccagcattttgggctgtcctgatgatctgaatgagagctgcccaaagaatagagttgataacacaatgacttggttagatgttcataaagttat

SEQ ID NO: 16765 - DNA, 461 bp, Oryza sativa
  unsure (1)..(461): unsure at all n locations
agcttatctagctgaaagaaatgacagattcagccatcttttattacttgaacattttcccatatatggtctcgcctctcagaaagaataaaaccgaatgataggattttcttaaaagaatgtttagcatgttatactgatcgcaccttctccttggaaaactgaaaaaaacggccccattggctgtgatctgatgtctcaaagaagtcccgcagaaaacaaaatgcagcatatggtttcaaccactcctattggaacatggaaggaacgcaatcacagtaagtctgaaataagttatcaagtacttcaactaaataaaatgctagcaaataactaaatatacctcgttttcagataaaaactgcttgaacgaactggaatttagtactgtgtctttctctaattngaatatttntcttgctatcgagagtttngaggccagtgatgcctcatagtcaaca

SEQ ID NO: 16766 - DNA, 413 bp, Oryza sativa
  unsure (1)..(413): unsure at all n locations
ttaccatccgttacagtccaagtttgccaagctacatatgctcgaattgctcaatcaaccaatggactgaatgaaacatgacacgagtagcgaggagcacaccttagcagctggcgcacacgatgcatcataccatgccgcaccttctccaggcagatgcactccaactgccttgcctgggaacctgcaaccagagaacgcattatacaacaatccacccaagtctcgtgagtcatgactgatctcactacattagcagcagcactaatggcttaccttgaagcgagggccgcaccgacggtatcataccagcgagcaccgttcgggaactcagctccaggctatgatggcgcggctgcggacaccttgatggcatacttgctgatcgcgtntctgctcaatcatcacagata

SEQ ID NO: 16767 - DNA, 428 bp, Oryza sativa
  unsure (1)..(428): unsure at all n locations
gctntacctcttgttgaagatcgaaactgttgcagctcaacccgtgagcacgaactcgtcgaaataaaagtaaagcataaagggtggcgatgcgccgagattgtattggatgtcttgttttttttacataggactcgggtctatttatacccgagaattacaagatacgttcataacagacacgactattatctctaacaaactctaagataccataagtatttacggcagacttttacccaaacatatctctaaggaaattaaatagaatatcctaattaatagatacaattgccttcccaggactctatccatgcatggcaatcatcttgaagcacatcaacttgaacccgatgacgtacaccgagtcatattatcagaatcggttgtatcggctaaccccgtccgacttgaactatgccgacctg

SEQ ID NO: 16768 - DNA, 267 bp, Oryza sativa
ccaggcacggaggcgctgacctctgcctacgagaggtctgtcttctactacaccgacgatactaccggcgcgcgaacgacttcaagggacgtgcgcctccacacataaaacctttgtgtctatatggccctacctcacgacgactggatcggatctgtatacacggctgaaggaccggcgcgatcgggaaggtgtatgcgcgctcgccggttgatgcatcaaggcgtgaggaatcgtgtgctttttgtgtagctgacgcgatgatga

SEQ ID NO: 16769 - DNA, 456 bp, Oryza sativa
  unsure (1)..(456): unsure at all n locations
agcttgccctcctgtgccatcagctgcgctttctgcttcattacgtacctcggcttctccaaataatccggcttctccagggttctcgcccaaattcgccacactccgagctcagctaacctggggaaggcaagttgccttttcgcggggtctgatccgaagaacagccccaatccctcccccggaatttcacagccaagccaagagaattgggggcgaaattttaggctctgataccaattttgttagctactcctaacaaagacacaagaacagttggacacgagtggatacgagaacacgatagataggtttcctctcgatccgacaggatcaagccgccgccgccttcgccttcgccgtgttctcagatcatacctttcgccatcgntctcctctgtttaatacaatctcccacaacccgtgacagctgtcacagcacacgcaactcacaca

SEQ ID NO: 16770 - DNA, 451 bp, Oryza sativa
  unsure (1)..(451): unsure at all n locations
tcttcttgaacacccacttgcaccccacaggtttacttcccatanggtctctctgtcacctcccaagtcccgttagcgataatggaatccatttcactacggacagcctccttccagtagtctgcatcaggagatgcatatgcttctgaaattgacttangagtgtcatccacgaggtacacagtgaaatcatcaccaaaagacttagccgtcctttgtctcttactccttcgaggagcttcactgacatcctcctcagagacaagttcatgtgtatgttcagtttgttctggtggtgtgattgaactgngaattatttcagagggttggttcgaaccactatgtgtatccttcattggaaaaaagctctcaaagaaggtagcatcacgagactccataattgtaccaacatgcatgtccggtacctcggatttaactattaaaaatctat

SEQ ID NO: 16771 - DNA, 391 bp, Oryza sativa
gagaagaaaattatacccgaccttataggtaatctattatatatgttggctttaaaatacgctaatagtaggaagtgagctcttctattatccttgctctcaggagaacatttgtgctcttgaaatccgcgggggtgacgtctctaagcttggtcgatctcgccgaatccaataattgatagtgatgattccgatctcgtcgggggacatactccggtcaagttatatctctctacagccgaagtcgtcgagcagtttatagttggagaatccatctcttgaaccaatctcgtcaaaagcttgaagcaccaaaatcccgctacccggcgcgccacagttgacgtttgagatcgcgactacggtatttgtatggtatggggatcattattac

SEQ ID NO: 16772 - DNA, 459 bp, Oryza sativa
tattatagccagtcacaatgggggtttcactggtgtgtcatgcacattttatatgggtaagactgaataaaaaatgattatttgcatgaaatggggatgagagagaaggaaagagtttcatcctggtgaaactcgtcagcgtcgtttccaagtcctcggtaacagagtgaaacccccgttgaggccgattcgtttcattcaccggatctcttgcgtccgcctccgccgtgcgacctccgcattctcccgcgccgcgccggattttgggtacaaatgatcccagcaacttgtatcaattaaatgctctgcttagtcttggaaacgtcaaagtgaaacccctccactgtggggattgtttcataaaagatttcatttgagagaagatggtataatattttgggtagccgtgcaatgacactagccattgtgactggccttataactaagcttagatgcatg

SEQ ID NO: 16773 - DNA, 440 bp, Oryza sativa
agcttgcaagggctaaagctcaacgtacacttaactttcctttagttgatggttctatgattgtccatcctagtgagtatgatcatgatcacgctaaattttttattgctcatattataactcaacatgattacttgtttataggatggttgagcataaagggtttagtgctttgatgaaatggatgaacaataactatgaattcattggcaagaagtccatatataatgaaagaatgaaattttatggatctgaaaaggaccaactcataaaacgtcttatggaggctgagtccataaggttaactatagatatgtggacatccaatcaaaaccgtcagcatatgtttttggtggctcattacataaatgctgtttgggttctgccatatcgtgtactaaactttgttgaggtggatcctcctcacaccaatattgtga

SEQ ID NO: 16774 - DNA, 453 bp, Oryza sativa
gacctataaaactcagcttctctcggcttacatcgttttcggtcaagcgtataatgaggtatttgaatcatacacttgagtttggaatttggtattctacttcatcttctatatgcttaagtggatattccaatgctgattttggtggttgtagaattaataggaaaagtactagtggaacatgtcattttcttggtacatcattgattgcatggtcttctaggaaacagtctagtgttgctcaatcaactgctgaatctgaatatgttgctgcagctagttgttgttcacagattctttggcttttatctactttgaaagattatggtcttacttttgagaaagtacctctcttttgcgacaatacaagtgttattaacattgctaagaatcttgttcaacactcacgcacaaagcacattgatatttgttttcactttctgagggatcatg

SEQ ID NO: 16775 - DNA, 450 bp, Oryza sativa
  unsure (1)..(450): unsure at all n locations
agcttcggtgaaagagagcgaaagcgagttggatgctcgggttgtttttcccaccagcggttcgccggcgtcgganaaccaacctcgctccagaactcctgtactagcgaagcttcatcagatcgagccggtcgtccatggcctccaccatcacttgttgcttgcctgtgaccaccattgtctctcccactctgcctagtttcgatgacagcctcatcggcaatctcatgcgaggtattaacaccatcgtcgtcgtccccatcccgattttcctgcaaaagacactcaaaacgagagccacgtaccacggaggaagaaactggagccaaggtgagacgccggcggcgatcactgtcgatcctcatctcaacgtcatctcctttggagccagtccacccagcgtcgtcgccgccactgacgctgccgccgtcgccaccgcaatgtgccgag

SEQ ID NO: 16776 - DNA, 129 bp, Oryza sativa
ctcattatgacagcccattatcctggcagtgcataatcgctcggtggactgattcatacctgacaggattcgctctgaccatgacttacactgtggcgctaacgttgtatgtcaccaggtctttactgc

SEQ ID NO: 16777 - DNA, 244 bp, Oryza sativa
ctcatgcactgtatgcgtacatgtgtctagcagcgacaggagtcttggcgctcccgggaaagagaaacctcccacacatattatattatggtccaaggtaaggtatatctctcacacactcatgggagttctaccaatggcgacaccgatgtagggcacgcctcttgggcctaactcaacggctgtcccatctgttcgcacctgccctactcaagggtgaaccatctatgcatggatactgcct

SEQ ID NO: 16778 - DNA, 448 bp, Oryza sativa
tccatatacacttattcttctcttcatatccattatttattaaagctagatacattgacactttactgagaacctaccattctaatgataattccatctaaaacaatcagaagaaagattcaattgaatatgtacaatagaagtacacaattcatgccagtatacaagattctgaccaactaaacctcttctaaaagaaacattaagcggaacagatcccatgatagtggcaatagaggatgatttccttcggaatatagcatataaagatggatatttatccttgaaagccaagttatctagccatttatcttccaaaaatcttatttgtcccccatcattcacaatccaagaacccatatttaagaaagtacttttgactttgatgagccccgataaaaaatggaaatcaccttgtttcttatcaactagggttatagacttatta

SEQ ID NO: 16779 - DNA, 441 bp, Oryza sativa
agcttgtatattgggaattatagaaatttttatgtattgggcatacgccatgcgcacactgctttaacagatgtgctttattccctagaagacacatggtttcaccacacctggaaatatatggcatatgtggtgtaaaatccgagtaaataaactcataaaggatttaccaaccgcctagaaaatgaccacaatatataatcagcctaagccataatattggtcaataaaaatgcacacttacgtggcgaaaagcaatgatattgtatgcaatcaattgcttaaaaacccaaacagcaccttgacttatatataaaaaagtcagcgggacagctatataaagctttactgtttgacaccttttaagatgcattgtaccaactcctaaaaagttaagtaactgccgtataaaaggaatttaatgtattgggcacttgatca

SEQ ID NO: 16780 - DNA, 436 bp, Oryza sativa
  unsure (1)..(436): unsure at all n locations
tcggatgtgcatcgactacaccgtccttaacaatgtatgttctaaggatccttaccccctgcctcgcatagatcagatcgtcgactccactgcggggtgcgaccttttgtgctttctagatgcatactctggttaccatcagattcgcatggctaaggaggatgaagagaaaactgcgttcattacccccgtatgaacttattgttatacatcaatgcccttcgggttaaagaatgcaagtcctacttttcaacgaactactcgaatttctttgggtagccaaatatgacgtaatgttgaggcttatgtcgatgacttggttgtaaaaacgcgcaaccaagaaactntactttcagatctagcggaaacttttgagaacctccgctccgcccgcataaagctgaaccccgataagtgtgtgtttggtgtacctgcg

SEQ ID NO: 16781 - DNA, 432 bp, Oryza sativa
  unsure (1)..(432): unsure at all n locations
agctttngtcaaaccttattgagcctaatacccgcaaaagttattaaaaaactttcagtcctcattgactaagccaaaaaatcaagcaaagcaatgatagatcaagtaagcaaattgaattgataaaaatcacactccattattattatagtagctcccgactgataacttcaaggaaaaacttgatgttagcagtcaaagagggaaatacaaaagtaatgcctaagcataaaaacgacgaagatgttcaatgttccaagagttgtcgatatgagtaccgtcttcacgtttaagtcggtaagaacctggccgagtgacttcggaaattatgaatggtccttcccacaagggagataacttgtgacgatctcgtgtagtctgaaattttctcanaaccaggtcgccgactaaaaaagctcgtgatcgaacatt

SEQ ID NO: 16782 - DNA, 448 bp, Oryza sativa
  unsure (1)..(448): unsure at all n locations
tgatttttaaaattttaaacctttttaattntttattttaaaaataaacccatccaaaacttattttcaagatatgaacctttttggccacgttggccaaactggcgtggcaaaacaatattgtcacgccgctcctgctggcgtgacaacgttatttggccacgccgctctcgctggagtgacaggacaaaactgtcacgcccgctacaggcggcgtggcagtgttgttttgccacgccaggcgggctggcaaggccatatggttcagattttgaaaataagttttgcatgagtttatttttaaaatttaaaatagaaaaggttcaaaaaattaaaaaaaaatctctaagcttttaactttttgtgctcacagcaacaaattattctcaggaattcagntgatgccatgtagtatagacaaaaaanataccgatggtactttgatatc

SEQ ID NO: 16783 - DNA, 443 bp, Oryza sativa
tgcttgacattgctacatattctgaggagcttcatggtaaacgatctggggaccatatatcctaaaattaaaatactgagtctaaactaatgccatctaataacgtccaccaatgctctcaattgccaggtcacattttcgtgcttacaaaacatgcccagctggaaagcatctaagataacagatgataacaagtactaccatagttgcatgataatgagaaatcacaagtgcaactgttgaaaagctccacatgaccgatgatataagtaatcgaaaattcaataatggatcacggaatacagccgtattgttgattaccgatctgctattgattataacgtctgtcctgagggattgcgttaatgcattcaagagctatatatagcttgcacaaacttatctgtctgtatggctgagatgagaatacaactgtgccttac

SEQ ID NO: 16784 - DNA, 370 bp, Oryza sativa
  unsure (1)..(370): unsure at all n locations
agcttatgtgtgtgcttcctagtgttagtaaagcccatcatacattctctccctcgtccccgcctattcttcttaacccggnggagtattcctggtggcttcctcatctttgacggctcccctcgcttggtgcatcgtcactgtctctacctgctaaccactcactctattttatccctatcatcaataccgacccactataacaccactcgcagtcgactctttggcttaatcatcgccgccgtctcaccgcccactacgaggctaccgccactcaccgctatctctttaaatccgagtaactttctctgtctccgcctatacctcatccctgatagccaaccggtcggggtcgcaatcgttgaaaatc

SEQ ID NO: 16785 - DNA, 431 bp, Oryza sativa
tgtatcggcaaccttaccctgagtggtttgagatatttcctcttcccaatcggttcaaggttccagacttctccaaattttccggacaagatggtgtgtcaacttatgagcacattagccgacttttagctcagtgtggtgaagcatcggctgtggacgctctgagggttaggttgttccggttgtccttgtcgggatcagcttttactaggttttcttctttgccatatgggtcgatcaatagttgggccgatttagagaagcaatttcacagctatttctacagtggggttcatgagatgaaattgtctgacttgacaacgattaagcaacggcatgatgaacctgtgcacgagtatattcagagattcagggagatgacgaacaagtgcttcagcttgagtttgactgacgcccagctatgtcgatct

SEQ ID NO: 16786 - DNA, 459 bp, Oryza sativa
agcttcgcagaaccctcattgatggtggttttgcactcaatatcctcttcgccaagaccttggatgatatgcagattcctcgctccgagctaaaaccaagcaatgcgccttttcacggagtaattccaggattatccgcaactccactcggccagatcaccctcccagtcacttttggcactcgggaaaatttccgcacagagaatatcagctttgaagtcgccgatttcgagacagcataccatgccatactcggacgcccggcgttagccaagttcatggccgtcccgcactacacttacatgatgatgaagatgcctggtccccgtggagtcctatccctacggagcgacatcaagcaagccgtcacatgcgacaaggagagttgcgacatggcccacactcgcgaaatggcgtctgcccgagaggatatccgactggctgcagccacggcgagcg

SEQ ID NO: 16787 - DNA, 452 bp, Oryza sativa
  unsure (1)..(452): unsure at all n locations
ngaccttctgttgagtaagattggacaccactagctctctgggtaagatggtctaggtcccttggccacattgttgcttttttgttgaatcatttctgctgctgttgctactgctgctgctgcttcgctatggtgctgtagtgggcaaagtgacatttctgctcttgttgctgctgagctagttattagctccttttgttgtgatgaaaactttgatgctggagtggccaatgccttggacttgtgctgtagtgggcaaagtgacatttctgctcttgctgctgctgagatagttattagctccttttgttgtgatgaaaactttgatgctggagtggccaatgccttggacatgtgctggagtggctattaactactgtcatttgcttgcggacacgcttaattatgttgtatgagatgtgacgacacnttataattggtgatctgtacca

SEQ ID NO: 16788 - DNA, 455 bp, Oryza sativa
  unsure (1)..(455): unsure at all n locations
taatgcattntaatgaagccaccagcctgagtgctgttttaactaataacttcactacctaaaaagggttattctgtgcatcacccaggtgctatagccctctaaatatggtatagataaaaaagaaatcccatgtatttgttctttatgcatacaacactacagattaagcccttcaaatggataaccaataaactaaacaagttgattgaaaagcaccagcctgccagctggagttaaaccattcagccagggtgctaaatctacagcaaatttggtggtaacccgataaaggttcactagttaaaatttattgaggtacctcgagttcaataattgaaccaaatattntcagggccacagaaaatataccacaatcagatttttagcacgaatcgctaaaaattaaagaataaggaacattaatatcacctgccccaacatttacactacac

SEQ ID NO: 16789 - DNA, 449 bp, Oryza sativa
  unsure (1)..(449): unsure at all n locations
gcttaatcggcatcatccttgaggcaatatttctcttggttgtatttaccccggagagacaggcgacgaaccttgcagtagttgctatgctgcagaggtacgagaccatacngatccaataagaacaaaaagttctcctctactgatttggacactatgaaattaagaatgacgtcgtgaactctacaggtcagcacttcaccgcagtgctcattccatggctggatcaagcttcggtttatcagcacgttgaaatacctcaaccctgcttcatatacattttctcctggccttgcattgataaatccttctgcaatccatctacttaccaaactactctctgcaatttcacaatcttctggagatgcactcaagtataacaggcaacttcttatatcatgtggaagaatataataactgagtgctaacactgactgcatggtctcgag

SEQ ID NO: 16790 - DNA, 450 bp, Oryza sativa
actcaagcttggcacgccccgggacttctatcacgaggaccatctttcgacgcattttctctagttcagcaacatcgacgagggcgaggtcgcagaaggtgatagggaggacaccttcacgtaagcaggcgccacgaacgcctatgctaccatagcctttctgctacgaacttcgcgctgtttcgagtagagatccgtaacctgtaacttgacgcaaccggtagtagcatatgatgcttgcttcgaggagattgtataccctgatgtagtctgcccttgaaagaacagggtgtttgtagtttgtacaagtgcacgccatgataacagcgaagattttgcttactctcgatattgtattatgtagatctcggctaagatatattattgcatcctactaatcataaagcaatgctggtagtcagccgaatgtttcttggcaacttgccactc

SEQ ID NO: 16791 - DNA, 439 bp, Oryza sativa
agcttgtgaacacgcacctgctgagtgttacaaggtgctttctctatggcttgcccgtgaggaggaggtaacaagtgttacttcatgccttcatattaataactgtccaagttgtaaagattgggaccttgtttctccgaaccaacatattttgtaacttgttttcatatttcaaggatgatcgattacatcatttaatgaaataataagatatagatcctccgtttcaggttataagttcgttctggccaagtttgtacgagtagaaaaaaaatagtaacattttcaaccgaagataaatttattatgaaaatatattcaattattgatttgatgaaactaatttagtatatatgtgtgtataaatttagtcaaacttgaaacaattggacgttgaccaaagtcaaaacgacttattaagacaactatctttgctccc

SEQ ID NO: 16792 - DNA, 455 bp, Oryza sativa
  unsure (1)..(455): unsure at all n locations
tggagcgtatgtttcgctgctcttgtaacagctttactgaagttagtttcagggtangaaagaatcctacaaaggttttgtttttgttttctcggcggttaaattggtagatacatagagtgtagggcaattttacctgtgcattatcagagtgcgaaagtttacctttcatttctctcttttgttgctgctgagtgtgatctgcctcttggtgtttaatcgctcggtgcctggtacatgctgagctgagatggagggtgttttcctgttccagttggtctctgtgagggtcacagcgcagtgttgcatgtgaagtggtcaccatatggggcctaatttggcaccgttcacccttgccctgctaaccatgcgctacaatcttttcaaatgtttttggaaatcaattgtagcagtagcatgacggatagattgagacatatgaagtggatgtcaaa

SEQ ID NO: 16793 - DNA, 455 bp, Oryza sativa
taacaactaagcttgaggctcccatcatatacgctatcctgtatgtttctgaattcgtgcctgatcatgatggacaatcacttgcccccctttggatggatcgatggaccggattaaattgcaacctccccccccccccctatggaccacctaatcaagtgtgccccagctgctttctctgatcgatcgatgcttgcacactgatgagagaaagaaagatagagagattcaagctaacgctgtgtttacatcaaagggtgtcaagtttcagcgtttcacatcggatatacgcgacatacatttaaatgattaatcgtagactaataataaagcagattacataatccgcctgctaactgcgagacgaatttattaaacctaattaatccaacattagcaaatgtatactgtcacaccatattgtgaaatcatggagcacttaggcttaaaagatt

SEQ ID NO: 16794 - DNA, 443 bp, Oryza sativa
  unsure (1)..(443): unsure at all n locations
agcttcttncanagcatactggtttctttatgtatatgacgatctctagacagatggatcttatatgaatcgtatgatgaagtaccacatgagtggatatatatgaaaggaatccaaatctgccgaatcgctcatgttatgatcttctacatcctaggtctccgcgttccgtcatctggcttatgttcttcatgtagcattcagatcgaatgactctatgaaattacgtcgatacttctacatattatgggtaacgtaggagacatccctattctcccccgggggtcttaattaccactgcttagctttcaattcgcctctgaccatcaaattaaatgtgaataacccgtcctcctctctttgaaacaaggggcgcttccggttctgtgcgtgcttcaaacaattntgtcttctccatattaccatatctctagagtcaataa

SEQ ID NO: 16795 - DNA, 415 bp, Oryza sativa
atgcttgacgagcactgcgatactgatccagtgtggtttccagaaatgtttaaagattggtagtggccagatttcttgtaaatttatttcaaccctaaattcgggttttatgcaatttaatggaaatacttcataatgatcaatcattcaagttaagatcgatctaaaccaatccattctttctatatacatacgacatgccaacggttaaacaacttattagaaacgcaagacagccaatacgaaatgctagaaaatcggccgcgcttaagggatgtcctcagcgtcgaggaacatgtgctatggtgtatgtgcgactcgttcggatcatgggttcaaacaaataagacaatgtttgaagtatccatgatcggtaccaatgaataggatagagcttctctatcctagatttcta

SEQ ID NO: 16796 - DNA, 434 bp, Oryza sativa
  unsure (1)..(434): unsure at all n locations
agcttccctggtatacgttactgttgcgtttctatggcacnaccatctaaacgctatgctntgatgtataccatgtctatactaaaataagggtgtgactaaacatttatacataatatatgcatatatatgcaaacaaattttccttgagttttatccaatttgtttgtatcccctgttatgctctttacatgatacctactacagtactactcaacccatttgagttgatagctctatttttcttgtctagtttgagttatgttcgtgcttttgccatttttgctactttttattgtcttacgtgtatgaagttgaggtacaataatcaattagtttggttccaaacgtttcattgtccatccaaatctaccaaacatttcttctggttcaaaattgtcctgctgctcactaagctagcaaaaccttatcct

SEQ ID NO: 16797 - DNA, 433 bp, Oryza sativa
gattctagaagacccatgtgcattttacaggcttgcacccatatggacgctcaacggcttcccagggaccattccacataatcgagcccatttcactgcgtactgcttccttccagtagtcagcgtcatgagatgaatatgcctcttctatggttcttggggcgtcatctacgatgcatactatgctgtcatctccgaaggattatgccaccccttgcctcttactcttgacaacatctacaatgtggtactcctcaggattatcctcaggcgaccgaacatagtgtactatcggagcaaaatgctcgtggcgcaagacaaattcttgactaaaagagctaagggccacttaatatgaacctcattctattagaatgacgcatctctggactctaaagatgtacgaacatgcatgtcagctgctccacagtta

SEQ ID NO: 16798 - DNA, 342 bp, Oryza sativa
  unsure (1)..(342): unsure at all n locations
ctgctgcatgcaagcatttgctaccaatgttctatcggcgtcatgctatccacagancccttcgagtatgtcgacgaggagatgtttgtcgccttctaacgacacgcatttgacatgtaccccgtgtggcgccttcttgtataggccgctgtctatcatacagtatattttggcttgacgggttattttctcggcttctgcatagacctcgggcaacttcaccctacttatgaatttaatgagcgggatctgccagtctgctatagtctcgatgtcagcaacggcgcgctctgcctctatatgatgcgaacccgctatggtttatggtccgatctttcgatg

SEQ ID NO: 16799 - DNA, 442 bp, Oryza sativa
  unsure (1)..(442): unsure at all n locations
ttcctgttcagcccaatggctcttctagcaaatgctcacaacctctctccgagtgttagcggtgacgacggngaaccgaacccacgccgtcgagctcgtactccaccgccccctccacgccaaagtcctaggcgggaggaggcgctcgagagggtcgaaagatccgcgacttcgacatccacgggtgatggagaacggcggcgagatggggagcgtcgcctcctcgtctactgcgactgcagcacgccccatggcgcgctccaagctgtgggcgcgctcctacgacacccgcccattgtccctgacccggagtctccagcccaacgttggctggacgacgtggccaacttggtcatgacggcgcggcagcgcctatatgctggtgggcggtcctccgccaccaagacctctggtactgctaccaccggctccgcgtcgtcaa

SEQ ID NO: 16800 - DNA, 400 bp, Oryza sativa
  unsure (1)..(400): unsure at all n locations
agcttacgggagtactattacgagttgttatcctaaccttacaaatctatatcgcatatattgttaaaaaaataaacctatctacttatatctaccgcaatatgtactataggaaaaaatagatataagatgaaggcaacacatttcttctagaggctaaaaattctcacttaattgaagaataaaaagagagatcttggccattaaattataggattcaaaatatagcggcgtagagtgctcaatatagctgtggaaaanaacaattttatttattaaaacagaagctaagagccatatattgaatctaattgttatagcaattatagccgagtatgaaagacaagtgtgttttgttttcatgtagatattacaatcgcatacttgtacttataaaaat

SEQ ID NO: 16801 - DNA, 431 bp, Oryza sativa
tctccaaatctccctcgggtggagaagatggcactttcttaccatctggcaaatggcaccccaaaaccaccttattggggacaccaacattgtcatttgtcatctttggaagaacctccacccgggactcggcaccaacattgtcatttgtcatctttggaagaatctccacccggaactcggcaggtgggatacaaagcttctcgctaatagcttgagaaatcaaagctgcagaaatcgcgtcggcattgaacgtgatcaacatcgactggtatccccctgcactctgtgaagagtaggcaacagggacagccctctgtgaagctgatgagaagtggcctgaagaagggcaccaccgagcgaaatggccttatccccaacaacaaaggcaacggtgaggatgagtgcaagccgcgacacggtgatcagct

SEQ ID NO: 16802 - DNA, 447 bp, Oryza sativa
  unsure (1)..(447): unsure at all n locations
agctnngaaccatccagatcaaagatatattatcgtttaactgagcgctagacaaattacacacaccaacacccttccacttcatatagaagggctaacacaatggtagacatgcatttgtccgtgtgttcataacttagtatgttggtattatctactcaattaacaatgtggcactaaaatgtgctcccgagcggcaatttttctattgggtctaggctaccataattgaataaccatcagatcatcaaatgataagttccaaaaatgtggagcttttccttgactctggtggctgctaaaatcacaagataaatatgagacttgggagacccatttgtttgagaagatcacatagctagtatttcagcctgctcccaatacagaatgctacttattagactntagtatttacagaaaggaactataaagcacctctgaaagctg

SEQ ID NO: 16803 - DNA, 451 bp, Oryza sativa
  unsure (1)..(451): unsure at all n locations
tcanaattagccaagcatctcattcgttgaacaactgtttgggcatcaaatgacagccggttcgcagagggtgaaatcctgatgagcctgcgctttgcatagtagtaaaagatgtcactttttaaacaaacagcatcaggcaaaattccacattatcttgactacgtatctacgtaaacagggaaacagtcctttgctattaactctacaaatttcataatttattgatccatctagatgtagagagaagcatcaggccatcaagctgtaaccaatttaacattctttagaatggtgactcaaactcctatggctgatatccaagattctggaatcccactaggacaaatttaatgatatgggttaaagagatgatacacactataggtgagtgaaaactgttaatattaggatgctctacactaaataattataggtcaatacaacattg

SEQ ID NO: 16804 - DNA, 399 bp, Oryza sativa
  unsure (1)..(399): unsure at all n locations
agcttggtcgtattgctgtgcctctatctatccgngaacgnaggacaccccggattcttcttctttttcacgagcttgtggagaattactttgctgcactgcttcgtcagcttaaccacctctgttgttgggagcggtctcttgttgttgaggatatatttaagataatggacatatgttcgtacttgcatagcattcaacaacggcacgttgatgtggatcttctggattacttcaacaaaacgagcaaattgctcatccactgacgggttcctaccccgttgaggaaacgacagcaattgtgtgtcgcaatactcctgcagtacgggcttttctggccgaacctcttttgtagccgagttactagatggcacttcttctgctattccgctagtttct

SEQ ID NO: 16805 - DNA, 353 bp, Oryza sativa
ttctatcgatatacgcatctaggagcgccgcgccattattatcacttatatcttgtcatcgcgctatgccggactttactaccatcgggattacgtcgaggccaatagagcacgcgagcgtgcccatgtaaggcgaataggtccattcggcggatgaatatgattgtgatggttcttgtgatactgtgtcgcgtccgaatgattgtgaatgtgattatttttgcgattgttgaataccttaggaaagtctgccactagctatgctctcaatattttattatttctgtcgattttttaggtctgtgaagggtctctcttcagacccctcacaggtattgatcaccatgtacgtc

SEQ ID NO: 16806 - DNA, 401 bp, Oryza sativa
  unsure (1)..(401): unsure at all n locations
gagcttgagctctttcagatctttgttgtttactatgtaagaaaccacagcatcccttgttctctcattcatgaacatcatgttatccagagctctgctctttaacctcattgctaactcggcgaaccataactttgtaggcgaacttcaacgacaagttcgaccaggtcatgaagaagtggggaggcggcgtcatgggcttcaagtctcaggcgaagaccaaggccagggaaaagcttctcgctaaggaggccgaccaacggatgacctatattatattcgccccccgccgttgagctcgcccttgaggttcatttttcagtggaatgattttgacgaagaactcagtttgcaccatgcgacagtgcttgggntttctgaagtctacgttcatatatttt

SEQ ID NO: 16807 - DNA, 439 bp, Oryza sativa
tatgagatctctgaatctcacctggggttcttctcgtctgcggccggcagggcgaggattcagcctgtgtcaccgtcaacttcacgacgccggcgcccaccgacggccactggatcgcgctcttctcccctgccgatttcgagtaaactcgttatccatctcaagatcaagatcgatcaactgaacattgttagcttcaaatttcctaatccaatctgacgacccctccactctgtgtgtgatgctgcagcttgatcatgggagggaagcatagcagtagcataatcaatgcagcaggtgaagatgaagcacctgctggattacccatcgctcccatcaaggatggtgattacttgctccggcatgataatactggcccttttagacatgggcgagatcaaactttagaatctttaattatgaatcatgcttaatatat

SEQ ID NO: 16808 - DNA, 464 bp, Oryza sativa
  unsure (1)..(464): unsure at all n locations
accttacaggcacctgangcatgcaagcttactaaagaggaaagganagctactatatccatagcctaactcttccgaagacttccggactcctgattcctattataattctattccaccagctaaatactactaaactaaacttgagaggaatgagacagctgttgcttgaggtgtgtgtgtgaagtgagaaggtgaggggtttatatagcctcccaatgacggctgcgatggttagaatggtcggaaataccctccaaccgtcattgggagctaatccacaccgtcgagaggaaaccctgcatccagcggcgatgagagaggttcggccgaacctgtggctggcccaaccagaccatggttaggctggcggtcttctctgatgttcttctctgcagagatgtgacatatggcccactttgtcgtgtcaattctgagttctgtgcccattcatacacaagtct

SEQ ID NO: 16809 - DNA, 169 bp, Oryza sativa
gatactcagcttcgaccgctatacgcatcgaggcgtgggtgccatttcatcacttctttcttgggattggtttatgccgggctttacaaccaacggttcgacgtcggggccaatagaccacgcgaacgtccccatggaaggcgtaaagttccaaccggcggtttttatt

SEQ ID NO: 16810 - DNA, 463 bp, Oryza sativa
  unsure (1)..(463): unsure at all n locations
acctgaggcatgcaagcttacctctaacaaactctaagagactatatgtccttgttgtagactntngcccaaacatatctctgagagatttacacgaaatatcctaattaacagatacaattgcctatctgagagcttatcttcatcgtggcaatccctgtgaagcactttgatcgattctagaaacaaccttgaaaccatcttcatcggaattggctgcatcacttctatcggctgtatcagctgtcctctatccgatccatctcaaccgatgccttcgcagccgatgcatactttgttttttaaaaccatctctttatctaatccgcctcgatcctaatgtcgaacctggttcacaacttaccaaatttggtcgtcaacaccgccacatgacacttctacaaacgctcctagaccgccacatggcaatgcgtaatctcaccgtcgattatcatttaaatcg

SEQ ID NO: 16811 - DNA, 463 bp, Oryza sativa
ctaagcttatcgacccacgaagcagctccgcttaccttcttataacgattattgctggacgctcgccgcatccaagaatggaacccaggaggcgaaggcctcgccgaacagctaggcttatagagcttcaacgcagaagtccacgaacgactatcgttgcacggacaaggttcttggtagtgggggagaaaagacgccataacgacgcatccaaggaggggatcgacacctaagggcgccgtcgtcgtcaagccaaccaaaggctagccaaggctttcgcgagcaattttcatccaaaaccacacaacccacctacacaacgtacatcgccggacaaccacatcgtccctctagcctccaagcatagcccaccacacacagctcatgcaggctcgccctactgcgccgccaacgtgtgtgagggctgtcgttgtcgcgttggggcggcttcgtgcccccaact

SEQ ID NO: 16812 - DNA, 417 bp, Oryza sativa
  unsure (1)..(417): unsure at all n locations
agcttataanaaagaaggtagaggagcattctttaaggtgtgttgttgtgttgtcagaggctttatgggctcatcggatatctaaacatggtgcgactcaagtaacaccgtatgagctagtctatgggtaggaggccgtgttacctgtggaggttaatttacaagctcttagaatagccagacaaaatggtttgtcggctgtggattataggaatttaatgatggacaggatagattacgtcccagaggaaagattgaaggccttgagagaaattgagaaggaaaaattaagagtagctagggcttataacaagagggtgagggaaaaatcgtttcaaataggtgaattggtatggaaaacgattntgcccattggaactaggagtagtaaatttggcaagtggtcaccgagctggg

SEQ ID NO: 16813 - DNA, 459 bp, Oryza sativa
  unsure (1)..(459): unsure at all n locations
gcttatgaatntatatgaatntaagtttaagtntcacttttatctgagctttttctattagtcacgctagtttaaagattcaaatttgaataaatccgagaaattgtcaaaaggtactgttcctaattcattatttttattcctaaactgtatccaaaactccaagtgactgccatgtggggtttaggattgtatttgctttcctaccggattattattctaaagcaaatcctgtgaaccattgacaggtgggcccggctgctctctctcgttctttcttttcccgtcgtcttctacctccagccatcggccgagcagatcacggcgcggctaggcccgggcgagggcgacctagcggcggccagggaaggagcggaggagctcctgcgaacccccgcaggcggccaatgcactcggcggcgcggggacgaacgacgcggcatggtcgtcattggcaac

SEQ ID NO: 16814 - DNA, 400 bp, Oryza sativa
  unsure (1)..(400): unsure at all n locations
agcttnctgtgtgtagagagtagtgtgtattcgcttgctcttttttcttcgncatcacgctgaatgattagcggcatttgggagaaaaagaacacaggcaacgacctttccggcttgccgatgtcactttcttgatcgttttacaaatgacgcggatcttatgtactttccagcgagtttagtcctggtaactagtccatgctatagtgtctatctcatagttgtctaaacaagattggaacaaatcaaatcacgcggtgctttccgtgcatgtcgatcaagaatttaaactctgttaggtagagttatgtacccataacttcactatcacatcgacaatcatatatcaatgcatatcgatgtactctctccgtccaaaaaaaaaaacaaaccctgattt

SEQ ID NO: 16815 - DNA, 395 bp, Oryza sativa
  unsure (1)..(395): unsure at all n locations
gcgacgccaggaaactactgttggttnccaccgtantcaaccccggaggcaaattatgaaccacgaaagcgaaaatccgacaagagcgangagcacaatgacaggcgacgtaccatccggacatgaacttcgtggacgcccagctatgcacaaccttgtgaaacgcctgagaatcgacaaaaacagagagaactggagccccgtttggaatcatgcatgacaggttctataggcccttcttatcaaaaatggtgccatgctgctagaaatacaaagattccgcggatgaaagggtgccggacctataggcacgacttcgccgaaatcgcaggggctgaagcagttgaaggtgtgtgccctaattaaggtcatagtcaggccagtgacgatgacaa

SEQ ID NO: 16816 - DNA, 77 bp, Oryza sativa
accacctatatgaccttatctgatgattgatctaggaaggtcttaaggtttatctcctcgctggtttaccattgacc

SEQ ID NO: 16817 - DNA, 220 bp, Oryza sativa
accctcttctgaagcgaggtcttgacagacactcagactgatccctcacatccgcataaactgagacggagaatcacattctgctatactgtgtaacactcaccacgcctggcaacacaacctgaattctattgactagcctgaccttggccacatcccaagatgctgactctacgactggtggtctaatacgacgggccgcatgtcatagcacctcata

SEQ ID NO: 16818 - DNA, 445 bp, Oryza sativa
acactataaaactcaagcttcgagacggcggacacacagcgttttatcggacgtttttctgcccccgccacgaagcgggccgatggcgtcccggcgcatcgactggctggcggacagcgctcgtgagtcatcgtggctccctcgagcggtccagccagcgagggagatcagaaactcatgatgcgtagacgaggctagtgaccggagcgctcaaggccgcatatgcaacgatcgcgcaccacagtcggcgcactgatgcacgctggtcacacgttctcaacgcgagcctgagtgtttaccatactatcggagcatgtgtggagccaaaacatggcttcgatatccagaatattatacgcacgattagttatacatctagccctatctgcgacatacgcacccttctcgataacgtatttcacacacggacgcaaaactcttcact

SEQ ID NO: 16819 - DNA, 401 bp, Oryza sativa
aagtcacctgcggcatgaagctagggggcactctgtactgatttatgttccaatgccgggtccaatttctcattataacatccaaaattcccacgcatattacatcactgacagtactaagcactaatcatctgatcaaatacacaacaatcagtccctagtgaacacgaccagaatttcccagaaacagaaaaatttccccttcgatgaacatcaaatatccaagcaaatgcaatgtgcattctctaaaaaacgaacatcaacaatcaacatacggctaaccaaatcagacaatctgcaggccgttcagtagcttaatctgcaatcaagtgcacagctatcttaaccggatgaaataatcaggtaaattctggacatccagctgaagaaagaaaaaagaa

SEQ ID NO: 16820 - DNA, 397 bp, Oryza sativa
tacagacgccggttaagatgcttcctgcttactataaacatgtccggtcattcgagaacactctagttaccaaatcttttggtctacattgtgttaaattagctggggcaaaccacaaaaaggttaaagacgaatctcactgtatatttcagtatttcatatacatccttagcgctgtctttgtcgtatacattgtcggatgtgttccctgactctttaccattatattaccgcccaggttcgctttgtcatcatgggaaatctgatctgctctgatcattccatccataggcgttttgatctaaaggctcgtttcttggccgacaactgacaaccacaaactgagattgacactatcaactctgaagatcttgtctgaatttatattagactgaaa

SEQ ID NO: 16821 - DNA, 442 bp, Oryza sativa
  unsure (1)..(442): unsure at all n locations
tgacattacggaccactgggtttatgtccanggggtactctcccgggtggaccactcggtcaggatgatccgagcggtcaaacttgattgcaatctctgaccatcgaagatattggggcgtgtcgggctgaacagcgttgatctcccgttcagtcaacttctgcttccgtttagactcataagccatggggccgccgaaaatatggttgagctccttgcggtggtcttgaaatccagccggggtgtcgccgtcgtccttcttccttgacgtgctttgttcctcgtcggagttcttccgagtagacttggtgtactgctccgcgaactgcttgtagatgaagcactctttggccacgtggttggagtttggatgatgcgggcattgngagttcataatcttgtcgaaggtgttgacgcgcgaacgctgtcgagaagagtgagc

SEQ ID NO: 16822 - DNA, 96 bp, Oryza sativa
ccgagaacaagggagctctggatgaacgacacagcacagcctgggagcctctcgctgggtatgacaggcctcccttgcctctctcacacaaacaac

SEQ ID NO: 16823 - DNA, 444 bp, Oryza sativa
  unsure (1)..(444): unsure at all n locations
ngcaatttctggtgtagaatagtgttgtaatcaattatgtatcattgcatttacttgatattctttttaagtgtataactgataagtgccttcccctaacttgtttattttttcaatctcttaactgaaaatctgttattaatatatttgttaaagcatttgatttctcttggtcagggttgaagacggttaaatctataacacggattgtagttatcctgaacatgttctatgttgcaattctttcacaattttgcactattgattgccatacaaggattntggctatacggtcttctgcttcacataactattactttcacaatatcagatgttctgcaatatcttctgctgcttgacataattaagttaaatagttagtctatctcaagattaacataatctttcttaatctaaatgaattattattacaaattcacagtg

SEQ ID NO: 16824 - DNA, 235 bp, Oryza sativa
cctcttcgcacggggcgatcacactctccgacgattcaaataacatattttaggtgaatgggccacggttaaaaatttttcttgagccggatgaaactttatatgaagaaatggatattattgaaataatccattatgaatcataatgatctcctctaaagcatgcttaaattcctgggaaaatgtcatttctgtgcttaaaataaattaacttgagcatgtagaaaatttggaa

SEQ ID NO: 16825 - DNA, 443 bp, Oryza sativa
gtacaacccttcctctataaccaccactataatttaaaccttatatagaggctcttttgtagagacaattttcaaaatgcctctaagttttgaagctctatagtttagagacactttcaaaatcgcctaaaatatttttactctagacacactttagagacatttttatcatactttgttaaatttatcttgtagagacatcttttcggcacttaaaaacttgcctcaaatgtaaaggcatttaaaatgatgtaaagacatttttccaaatattaatatacatcaagtaattagatataagtaacacaaattacatatttacatgcaattatatgaggttgagatggttagtgcattgaagataaagatggtcaactcaagatgtcatgagttcaaggattgctaagggataaataaagatggtcaactcaagaggtcatgag

SEQ ID NO: 16826 - DNA, 353 bp, Oryza sativa
cgacacttagacatggactgggtctacacccgccgctcacctggcaaaatgataactccgaaatgtcctttgccaaaacatcatataatatcacgatcattttttaaaaaaacgaaggcgaaacgtagccaacgaatctctgctgcgatgtgtgtacgcgctgaaatgctactaggggggggatatctgcacgtgctaactagctagatagtattgcataacgagatatatacaacaacactgaagactgatatatggactccacttacgctgtgatcgatagctgggattatcaactagacctcatacatggaaaacaaaaagactcggtatcctatcactaatgacgagcg

SEQ ID NO: 16827 - DNA, 398 bp, Oryza sativa
caacaacatttagcctttggtttatgatatacctgagtaatgcaacatatcgaatttgttcgattttcttgtccttggaacaaaaggattcctgcttacaaaaagaatcgaagttcttgtgccgaactggcaatgatgcatgatgattgggaaaaaaaaatcttgtaccaaactgccgaatgctacttctaataatgcaagccacgtgcttcagtgctctcaccgagaatcgtgttctgggttggcatcagattaatctaatcacgcccggctaataccgaccttagccgcaacaaaagcctctgaaaatagatcggatcgatcactcggagtactgatttgtttggctcatgcgtctcgcccattagcctattctcactcgcgcaaacttaacacgt

SEQ ID NO: 16828 - DNA, 444 bp, Oryza sativa
taacatatttaattacgtttatatcttaatattttggcagatctaacatgttaatcaatcatgtaacgtaaaagtagctaaatcagggaagatcggctgaaaccccaatactactctaatcggcaactagaaagcaggctagagattaatattctaagcacgatttagtagatcaaacttaactgatgcagcactaaatatgaaaaaaaaaacaatatctagacaatcaagccgctggatgtttcatagagtggtggatatcctatataatctaagccaacattgctatttaacctaatcggctgccttctaacaatagatgttagccggttgtaggttaaataacaatattgtcgtggattatatagaatatatgataactcggcgaattacatagataagattagagtatcatacagatggaagcactaatcctgagaacgc

SEQ ID NO: 16829 - DNA, 454 bp, Oryza sativa
  unsure (1)..(454): unsure at all n locations
agctntgtacataactaatatggnanacctgatgttnttctttttcctgtatatttttttgcaaataaatcataaatctcttagtttcttcatttgtccatttccatctccaatttacatgtagttttgagtgcaataaccaagatggcaggtgttataacatactcatgttgcaattttttatttttggtctgctttgtgaagggaagttgaatttttatgtgtattcactgccactgctaacctgtgtgtaaaggttttccgctactatttttctttatttgtgtggtttctataacttacaattgcaattcaatattttgttcataaatctcctgagtcaagtgaactttntaccttaatagtatggtcatctccagtttcccatgtaagatgatattgaggggcatgatataggagggtggggccataaccttggaggaatgggtgcata

SEQ ID NO: 16830 - DNA, 449 bp, Oryza sativa
  unsure (1)..(449): unsure at all n locations
tttgcggtcgtcagctacattnggttgtgacgtgctaagttctttccagcgacactctgacatggactgtttctacagccgcctctcacctgtcaaaattattattcggaattttccttttccaaaagatcatataatatcagtatcattttttaaaaaaatgaaggcaaaacgtgttcaacgaatttctgctgcgatgtgtgtacgtgcttaattgttactagtagtaggatatctgcacgtgctaactagctagatagtatttcaaaacgagatatatacaacaacactgaagactgatatatggactccacttaggttgtgttcgatagcttggattagcaactaatccctcatacatgtaaaacaaaatgactcgttagcatataattaattaagagcaggtataatagcagattataaatcagctataaacatattttaagaag

SEQ ID NO: 16831 - DNA, 452 bp, Oryza sativa
  unsure (1)..(452): unsure at all n locations
tgctctgaatggtgtcttcgnggttgtgtgtcttcttagtgaaggccaacgtctccttttatagaggccagggatggcgtcgcctgtgcctcctgcttatctcttcgctactgtatcttcacgggagctggctaaagtcgaggcctttccaccgaaagttttactcttcacagtgatatgtcattcaacgcaccctatattgtccccttatcctttatagggcgtccttctggattctttcttgggtaatcttctgaatttcttttattcttttattcttcattcttttattcttcttccacgcccaaattgttgatattctattatcaatatatattgaaaaacatatttagcttatattaatttattcatctnggtgcccatggccaccaagatccattgtgtccaaatcagaaaaagaaacttctaatttctcatctactggccttttt

SEQ ID NO: 16832 - DNA, 456 bp, Oryza sativa
  unsure (1)..(456): unsure at all n locations
cttgcaagtgtaaagtgtaaacaggattcgnttatgttaagataattattcatcatctgataaatacttggtagttgactccatatttcactgcttttgatttggccatatcttcttaggataggttccttatattcattataacacagatgatttgcgaaattacttattgtttctatgcaaggccggtctaggtccacatgtcaatgatgcaatgagtggcacttctgtaggtctgttagttaaacttatttgcaaattggaatcatactgtacaaagttaggtcatcttttggaactcttaaaatttgagatgtgtaatacttgcttggccaatctgtgaagtgtaaagtcataatttttctgtagaatttgcatatattgtaaattttctgttgcattccatgacttgattttccttggctattctgagaaaagttntgagttcttccatga

SEQ ID NO: 16833 - DNA, 454 bp, Oryza sativa
  unsure (1)..(454): unsure at all n locations
agcttcagtctctttggttaagcccatttcgttccctcattacatcagcaatcacattggcccacggtcgttgctgagctgttccctgtgactgttgttgcatgggctcgaactgaccatactgagatgcaaactgaggttgagccagtccccctggctgatattgggcttgcggggaaggagactgatattgataattcaagttgccccccctggtaattatgaaggatcggttgaatattacgtgccaaatgctcgggaacaacttgaggcattactgtgtcatctggctatacgtggtgaaccaagtgttctgtgacgacttgatttaaaaattgttgtataggctgtccaccangcgtcacaagcccggccgatgcgctcattgagccttggtgctgaatcggctgaccgatttgctgtcttaatggcgtctgctgaatcngccgcggag

SEQ ID NO: 16834 - DNA, 458 bp, Oryza sativa
tcactgcttatgctggctacacttatgatgcacgtgttatcttcacattcttcatgttgtaccttcgtcatatgaggactacatacttactcaccacattctgtgcctggctatgttatttgatatgcattttgatgaggatcatggtaaaagaaaggttacttcagtgattgatgtgggtctatgtaaaccaggtagtggaaccatgcttaccagatcagtcaggggaagagaccgcagacagactatttattggcgcagcgctgattgatcttctagatgtttatagagtatgcataatgctggccctactgaatcaagcatctcgtctcattttgaggaaattggatgctgacagtgacagtctttcattccttcccgccacggagaaagttgcctaacatggattcatggctattcctactggcttgacatagatgatgagctttttccttttc

SEQ ID NO: 16835 - DNA, 413 bp, Oryza sativa
  unsure (1)..(413): unsure at all n locations
agcttcgcagaaccctcattgatgggggctgtgcactcaatatcctcttcgccaagaccttggatgatatgcagattcctcgctccgagctaaaaccaagcaatgcgccttttcacggagtaattccaggattatccgcaactccactcggccagatcaccctcccagtcacttttggcactcgggaaaatttccgcacagagaatatcagctntgaagtcgccgatttcgagacagcataccatgccatactcggacgcccggcgttagccaagttcatggccgtcccgcactacacttacatgatgatgaagatgcctggtccccgtggagtcctatccctacggagcgacatcaagcaagccgtcacatgcgacaaggagagttgcgacatgggccaaactcgcgaaatg

SEQ ID NO: 16836 - DNA, 455 bp, Oryza sativa
tgaccttctggtgagtaagaatggacaccactagcttactgggtaagatggtctaagtcccttggccacattgttgcttttttgttgaatcatttctgctgctgttgctactgctgctgctgcttcgctatggtgctgtagtgggcaaagtgacatttctgctcttgttgctgctgagctagttattagctccttttgttgtgatgaaaactttgatgctggagtggccaatgccttggacttgtgctgtagtgggcaaagtgacatttctgctcttgctgctgctgagatagttattagctccttttgttgtgatgaaaactttgatgctggagtggccaatgccttggacatgtgctggagtggctattaactactgtcatttgcttgcggacacgcttaattatgttgtatgagatgtgacgacacttataatttggtgatctgtaccattt

SEQ ID NO: 16837 - DNA, 412 bp, Oryza sativa
agcttgcttttcttactgagccttgtactttatgtttgcataggacgtagattgctgcactaactctggaagctgcgccacctgtaagatcctttccatgacgaggttttgtacgtatggctgagttgttgtgtgccgtacagagccaactggggtgctgactatcttgtaccatgaccgtgagcaattttccaatccagtttttcttctgcagcaacacagatttgagcaaagatagatttactttaagatcaaccagaatggcagtcatgtttctcacgcagcgttacaataacataattgtctggagtctgaacttgggatatcagagtatcagacttcagacagttatttgcgcacagcactacccgcagaatataccttcacggcttcggctctggatcaaccgatc

SEQ ID NO: 16838 - DNA, 443 bp, Oryza sativa
  unsure (1)..(443): unsure at all n locations
tgctgacagttgttcgtgtgcaccatgttgtttatttttgttgctacccacgtcatttgttggagctacctttcctgacattctgtgatggtttcatattttgctggtgcaggcggggtggtcaatcagcacaacttgcccaagaactgaacctgtctttgcaagacttggtggtgatctgaaacaagcggggaggttcattcatactagtacaacacagtgagagtagataactagacatcattctttttggcaaaaaacgcgccagcgccatacagtttttgtagcttgttgccatagctntgcaattgagctgtgtaattgtgttttgacttggcttttgattcggcgtagtcccctgttgtacatgtgagcttggctgtgcataatctgtaattaacatttgttacatggacagccccggatgagggagaagcaagttc

SEQ ID NO: 16839 - DNA, 396 bp, Oryza sativa
agcttgtgggcgacggtggtgtctctttctctcattgatctcgcattgtttgttcgtcatctcgaccgcgatcgatcataagagagagctacagatcatctccccagcagccattttctgccagtgagcttcagttgcaatggagccactgaagtctacaggtaccaaaagaggccaagttgctgagcatatgctttaggttcatggatcttgctcacctagtcactaatgttcctgtttgataagcagcccttctgcaaaatgtgcttcaactcatgatcatccattcacccaatgtcagcttattgggcaggcaaatttccctttatttttaatcccaaaagaagatgatatttttttcatccatcacgaaactgaattgatgccatgcaagtc

SEQ ID NO: 16840 - DNA, 442 bp, Oryza sativa
tgactgcaaattcctacacgcctggacgacggactttctcacacgatgggaactcgtatgaaagctttggcatcgaagctaagctgaagctcgccgatggaggattggggatgaactggggacagacatgtcatcttcaggctcttcatttccaagctctggaatcagcgattacgtggtgatggccatggtggccattgaatgcgacgaggaagacgaggtcgtctgggatcaacagagaggtcgccgtcgtgcatctatggcggcacatgcggtcagtggacggcgatctctgctcgatcgccgtcgtcagttactctcagttttcgtcgttatggggaggtgtaattaacgtgtgtaagtgagcactgtagtgctgcgtgatctcgacgaggatcttcgtggcactgttgccgatttgagacttcctaaaatatacaat

SEQ ID NO: 16841 - DNA, 398 bp, Oryza sativa
agccgtttttttgaggggggtcaactactcaactagcacattaggaaaaaaaaaacatagctaattaattaagtgtgacgcgtttagttcggattaattatgcacaaaatgcgcatgaagtctcgatcgagtttctcgctcgcgaacaatttggcgcaatcggcaaggccgggacatagactgtaattctcggatgcgtcgaatacccgtttctgatgttatgagagaaaaaaaaacgaaccacttgctgaattattaaactattgatagtgtctcatttgtccgagagtgccagcatttaacgagagtatatatgtgtgcgtggtctagggaatttcttatcttactccagactttaagagtcgcttggacatatgcaaggtcttcgatcgtgcact

SEQ ID NO: 16842 - DNA, 455 bp, Oryza sativa
acactatataatactgcagcgtgcatgacaagagcacttgaaattcgatcaggattactatatgccaacgagacgtgtcccataccaacatcaggttatggcccagaccatactgtgccatgaagcccataggtccttcccgacaccacccccgcgaatccacatgtctctcggcatcaaggctcccctgataagctagctactcagccatgggtgtgccattccacccatgtggtcgtacttatctgatgtttggatgaaattccaaggaaatcggtccttaagtgcgagagcgggaaaccgtacacccggtacgttccccagtccgcggatctggaaattcatttagttcgcaagcaccgacccaggtgtctggttttccaaatctttcgtgaaacccaagttttacccaagttgctattcagattataagtttgaaggcatacgtcgatact

SEQ ID NO: 16843 - DNA, 458 bp, Oryza sativa
agagatacctgcggcatgcaagctggagaaagaggggttattcatactttatcaaagcggagaggagactgatcagctctcatggcaggtggtagtagtatgatatgagtaggacacaacatcactagccaaaatggtactactcacatatgcacactgtagtaatggtgggagagagatattgtagctagatagacacattcctcttttgccatgagttggagtcgaaagttcactctgaaaaaacagaattttaaaatcttcagtactttggctgccctcctggttgtgcttattctcattggcgcgcttttcggacccagaaattctaccataattgatcgctaaacttatacgttatagcccgacattttttaccgtacacagtataaaatcatgtgtttctaggagactagagctgtgaacatgctgagatattgtagcatgtttgcactcgg

SEQ ID NO: 16844 - DNA, 463 bp, Oryza sativa
cgacactataaaactcagcttttttgacacccattgctttcccaggttttcacccatagggtcgctctgtcacctcccaagtcccgttagcgataatggaatccatttcactacggacagcctccttccagtagtctgcatcaggagatgcatatgcttctgaaattgacttaggagtgtcatccacgaggtacacagtgaaatcatcaccaaaagacttagccgtcctttgtctcttactccttcgaggagcttcactgacatcctcctcagagacaagttcatgtgtatgttcagtttgttctggtggtgtgattgaactgggaattatttcagagggttggttcgaaccactatgtgtatccttcattggaaaaaagctctcaaagaaggtagcatcacgagactccataattgtaccaacatgcatgtccggtacctcggatttaactattaaaaatct

SEQ ID NO: 16845 - DNA, 358 bp, Oryza sativa
  unsure (1)..(358): unsure at all n locations
agcttataaccaagctcttacaagttcttatcacttcttgcggaaaggtgatgtacaccgacttatccaaccaccccaatggagttcggatgtatcgatgccttggcaaacacttgctgtactgctgcgatcagatctatggagcactgggtatgcttaaatatgtagcaaagggataacaaatgctcaaatcacagaacgctaagatgactcacggttcatagacaagtaccatgctggtcctangctacaacgtactatagacgctagcctagacacaaactatacctcaatatagcactaggaacaactcatgcacaactctgatatatgaacgtgagctcatacataacaatat

SEQ ID NO: 16846 - DNA, 404 bp, Oryza sativa
gaattgagggtgttatttgggcttaacaaaaaaattcaagacatgcttgattggcaaaaatatacatctctttctcatttgttacagcttgcttgcaatgctgaaagtaaaatagaggaggacatgaataagcaacatgctatgttgttgtcttctattactaaccatttgcaggaagtgcataatcatgaaaaggaggagagagacatgatagagccgctagtcccattgatcacactcaaagtcgaggcacctccattatctgaaaagggcatcagaggttaactcaatggtgctgaaattaataaatgtgagtgtgttgttaatgaattgaattcgaccactctgtatgctatagcagagcaaccattagtggaaccaactgctggaattcctttgtcaca

SEQ ID NO: 16847 - DNA, 435 bp, Oryza sativa
  unsure (1)..(435): unsure at all n locations
agcttcagctacctgccgatttgtggttattcccacgtttaacattgcagatttaaagccatatttgggagaagaagatgagttagagtcgaggacgactcaaatgcaagaaggggaggatgatgaggacatcccttccaacgatacaaccacgcctattgcacaggaaggaccaatgactagagctcgagctcgtgaacttaattatcaggtaaagtcattcctagctaatcatacaagttcttctcagaattgggtgctactaaatggttattgtgatctacttgttgttaggaatatgggagaggaaccaaatcgcaagcagcactatcagcgctgatttgatgaagtcaatgctcttcactccggagggcanacggggcaaatgagtactttgtggaaagatctcgtcgtctactttcagctatgtgtggc

SEQ ID NO: 16848 - DNA, 437 bp, Oryza sativa
  unsure (1)..(437): unsure at all n locations
ntgccgcagcctccctcggtatcgcagctgcgaagtgaacctcgtccacccctctgttgcctccgttcgtcgccggaaaatcgttgccgccgtggacagtacctcgccgcccttcgaagctcgtcgccggccatcttctgtcgccgtctgtcgtcgcgtaagtgttggtaaggaccgtcgccttgcgctcttcctcccggtgccctccatttgcattattgtgccgtggttcgccggcaaccgcgctcctatgttgttcaccggtgtagtttatccctagggtcttaatccaatctaacctaatccgatgtctgtctagcgtagtcgtcgtctccgtgtgttgccgccgggtggccatcatcatctctccctctccgatcattttggttcggtgagacttctattcgtgttccctcggtttaggtttaatctctcat

SEQ ID NO: 16849 - DNA, 375 bp, Oryza sativa
  unsure (1)..(375): unsure at all n locations
acctcccgacgggaaagaggaggaacacatgcttgctgaagcaccccatttctcgcaaagctttgtcttggttctgatgattgcccagaactagaagaaatgcttaatgattgcaatggcacccgagatgaatcactttgacctcccaacccatggcctacagctgccatgccattttgcatggacgacgagctactgtcaacagcaccaggcatgtgcttcccgtgttccacaccattatgcctctggatggaataagagaattgaatgaaagatcaactaagcatagacaactccaaaagtagaatggtgacatgtccagcaagtgatgtgcacaactggattcacttngcattgactctgcttcactttcaa

SEQ ID NO: 16850 - DNA, 442 bp, Oryza sativa
  unsure (1)..(442): unsure at all n locations
tcaccagcagccgccatgttcgacagnaattcgtgtggtgagctgctcgcaggtctgcgagatgatgggagtctcacctgatgaacagctagctcttcttagaatataggagaggcagtcatcctatggaatatacaaattgttgcttggacccttcttcctaggtagtgttcgagcagttggcgcgtgatttatgaacgtgcgcttttgggtgcaagacctttcggctgtcgatgaaaaactctaactttttttgcactatcttagtaacattcggatgacctccttccgtcatctcggcatagaacaaacaaactgtaaacactgcaagcgtcactacgttggaccatagaaaataaagcaatcccttttcaaagcagcaaaggggaagaagaaatcgatcccaaccacaacctaatactagtccagtgagatgccagag

SEQ ID NO: 16851 - DNA, 410 bp, Oryza sativa
  unsure (1)..(410): unsure at all n locations
agctttacaggtctactttacgtgcaatttatattggtggtcagatctcccaaatctctgatccctccaaagatttcttcacgagaagataaaaggaatcatgatatactttaggaatcatggtagaatacttttggaacaccgtaatattttggtttgggttacatgggtgcagtatccttggataaacaaccactaacaagtactccctccgtttcacaatgtaagactttctagcattgcccacatacatatagatggtaatgaatctaaatacatacatatgtctagatatatgtgcgcaatgctagaaagttttacattgtgaaacggatggagtaaatgtatatatacctccattccatcccccattgtgatgagcagagcatttgggacgacnggcacatcgt

SEQ ID NO: 16852 - DNA, 446 bp, Oryza sativa
tgatcaactatctgaaggcccaatcaagtctaacattgatcggcttgaggctcacaagattgaactcttagcacaacttgaagaatgcaacgctgaactggatatggagcacaaaaagctagccgatctcccaaagtctattgaagaacagaaagcaagactcaaatcggccattaagcatgttgctgatctgaccaagtctctgaaagttatccctagaaccgacactcaagatgcccaagccatagaagaagtagaacagattaggcagaaggctatatcggccatccagcgatacttatctcaataatctttgtgtaataggacttagaaattttgtaatcggctaagacactctgatactttactgtcttaacaatcctttgtgtcgattgatatgactttgaaatttgctaaaaaaatttgcattgcattttgatatatat

SEQ ID NO: 16853 - DNA, 457 bp, Oryza sativa
  unsure (1)..(457): unsure at all n locations
agcttagcacttggaaaagaaaaaaacatcttatatggtggaagattaatccttcttaattcggttctgtcgaatcttcccatttttatgttgtcattctttgaaataccttgggggtaccgcanagactcgacttctacagatcacactttttttttgagtagtgacaatcaaaagataagtatagattgatgaaagtggacttggtgtccagaaccttgatatcaaaaatagatgttttctagccaaatgcctattccagctagtcaacggtgaaagcctatggcaggacctcttgcaaaacaaatatttgaagggaaaacctctcacccaaatatctcataaacctgngatatcccaattttgggctggtttaaagcgaataanagcccggttttttcgttntggttcttttagacacaacaatgggacatatgtaagaatttgggaggcttca

SEQ ID NO: 16854 - DNA, 463 bp, Oryza sativa
  unsure (1)..(463): unsure at all n locations
tattccccgtataggttggcttgaccggtatgaagtgtgctacttttgtcaacctatcaaccactacccatatagaatcatgtcctgccgacggtctgggtagaccggttataaaatccattcctatttcttcccacttccactgtggaatcttcaacggttgtaacaaaccggctggcttctgatgttctgccttgactcgctgacatacatcacatagagccacatattctgctatctcacgtcgcatactggcccaccagaattgttgctttaagtcttgatacatcttagtgcttccagggtgaatggaatacaaagtttcatgtgcttctctcatgatagtatccttcaacttcttattttctgggacgcaaattctttctcctaaccacacagttccgtgctcatcttctacataaccgatggctnttcctcttctcatggtcttctttatttcttg

SEQ ID NO: 16855 - DNA, 471 bp, Oryza sativa
  unsure (1)..(471): unsure at all n locations
agcttcgattggactccagcctggccatctttattctgtcaggtcacataatagtacaacacaagctaaagcctcctaacaatataagatcagctaaaaattattgcgcaagcagattatctgagaaaaaagattgtgcacacaggagatgagctaaaacaacatggcaaggagtggagtacatcttgtcaaagaccatcgagatggctgtgtgctggctaagctggcttacaattttcggtgaaaaatatataaacaggagaatctttgagtcaagctggagcgtccgtccctgtcaaactccttaaaggagacaacatctaccccgcatggcctgatacccttcctttccccctaatttaagttaatttaatggggggagttagtgaaggatcagattagaaataatgcatcacgcattgcatgccgcgtagtattttatcactatgcctaacgccacggantcttttt

SEQ ID NO: 16856 - DNA, 477 bp, Oryza sativa
  unsure (1)..(477): unsure at all n locations
gacacanactcaagcttatcgccggccggncggccacccaacctcgcgcgatcgattgttctgtacggncaagctagctaagacgagctatggccatgctcgggaggaagagagggggatcgtcgtcggccaagctgccaccccacgccgaggacccgtgtgcggctcctccgccgccggaggccggcctcaccgccaccgacggtgggcaggaggtggccatgtcgcaattcgtcgcgcagctaggcatgtgcgaagcctccgctcgagtagcgaaagcattttgtaagttgtaaccaatggatggatggttgaggaatttgattgttttttcttctttntttgggtgcgtcttggcatggcagacgaggcggcgcggaagaggctggacagcatgaaccagaggctcatgtggctggagcagcagatggagacgctggaggcggaggtcgggaaagccagctccgccgactgatg

SEQ ID NO: 16857 - DNA, 465 bp, Oryza sativa
  unsure (1)..(465): unsure at all n locations
agctntaatttcttnttttggtttggatttaattcgggtatttgtgacttagggttcttcccccanaaatttagggttcttcatttggggattttaggccgactggatccggcttattggggatttcggaaaatttcaatcttgtttattcccttctgcttaacactggggaatttcaatctagtttatccactattttccccaatttacttcttaatccactgttcttatatgataagaacctagggtttatgagttgggaacaacgagagttttaatctagtttatctcattcgttctccgcttagtaaaattcgagagaaaaaaaaatctctctctgattgaatttcttcttcccttactgatttctagccgaagctatgatttacttaagcatgaaccctaattcgacctaattaacttaaatatgacataatgctcaactcanagcaactttaagaacta

SEQ ID NO: 16858 - DNA, 434 bp, Oryza sativa
  unsure (1)..(434): unsure at all n locations
taaagccatgaatccctcttatgcatatctggatctggattctgtttaacaaacatataggatgagtagtatctgatataaatataatactcgagaaaaaatcaagtattttaaaatatttataaatatgtatttctcctcttgtcaattntgatttctccgagcagatgactcattacgtgtaaacactctgcccgactagtcatagccaccaagcactgggagtcggcctaagcacttcccaaacatgcatatgagtgacatgagttcgtcattaatggaacaacgtttcacggatcggagtttactactctggtacttttgctattattaagagcagaagattaattatcgtatctgtatgcttttgatggagtgcgaatactacttagcagcctgcgttactcggtgcatccaacgagcccccgggtgct

SEQ ID NO: 16859 - DNA, 463 bp, Oryza sativa
  unsure (1)..(463): unsure at all n locations
agcttcaattaagaaatagcatttctattatgtggcttttctcccttgctaataaaatcagccggcatccttccactggccagcgaaaaaaaaaagaaatagcatttcgaaatatatctgtggattatacgactttacccatcaaacacatcataaattggctaaatatgatggttgcgcaaatcatttaaataaggcataaagcagcccaactttatttctttaaaaatcaaactggttcgtttgttctagtgggatctaaggggaaaatgttgaaactaagtacttattcactcaacagaggtcggagatgaacctaagtacttatttatccatgatactgaataagattgagcatattaaatataagaactgattagtttagacatgaaaaagagttntggcttcatacaaaaataacagccaatggttctataactcctgaatacaggctntcagaact

SEQ ID NO: 16860 - DNA, 466 bp, Oryza sativa
ctaagcttttatatagttccaaaatattatcatggtccctgtatgacattttcagtggatcattcttcaatatgagatatagattactctttcgaaggaccgtttttcactatcaaaatatggattattcattcctgtgattaagtaaaaggagtgaccaaattatctgatccacatcattgcttgtagagcctaccggtcttctagttgatgctgctatgaagcttgtgtttgatgttatctcagaagtctctatccatgaaaggagagatgctcttcttatggcaagtagacacgccctaatgatgggggtgactactgttgttgatgttggaagttatttccctggaaagtcagaacagcaagtctggcaagattttacaggtatactgtgccacttgctttatatcgctattctgagaaatgcaactcatatatgaaacatcctttgtgtagatctactcac

SEQ ID NO: 16861 - DNA, 491 bp, Oryza sativa
  unsure (1)..(491): unsure at all n locations
cggatccttnagtcacctgcggcatgcaagcttcggatgtgcatcgactacacctttcttaacaaggcatgtcctaaggatccttaccccctgcctcgcatagatcagattgtcgactccactgcggggtgcgaccttttgtgttttctagatgcatactctggttaccatcagattcgcatggctagggaggatgaggaaaaaactgcgttcattacccccataggaacctattgttatacgacaatgcccttcgggttaaagaatgcaggtcctacttttcaacgtactactcgaatttctttgggtaaccaattaggacgtaatgttgaggcttatgtcgatgacttggttgtaaagacgcgcaaccaggaaatgttactctcagatctagcggaaacttttgagagtctccgctccgcccgcataaaactaaaccccgataagtgtgtgttcggtgtacctgcgggcaaacttctagggttcttggt

SEQ ID NO: 16862 - DNA, 457 bp, Oryza sativa
  unsure (1)..(457): unsure at all n locations
ngccagacttgcacatgaagatngtctctcattgtatatattatatgtcagcacaaaccacacatatttgccagtgtttttcttcttctgttacaacatttcaaagaagtaaagtaactgtcgctgatgtgtgcttcctttcttggcctgaattgtgaaggtgcatggctgagtatcttcctaacttggaagaaaatcttaaaatccaggtactatagctttaagttttgcatgtaactgttggtcttgactgcctgctcttattgttgatagtattactactttacatcgtagtgtagttgtcatgttaatggaatgactaatcatcctttgaaaaatagtgtgcggaaaataagtgaggattgaggaataaaagaaaaggatagacagtagatctgatgctattgttgaattgtttaagtgattcaagcaagaaaaaatttcctgtatttcaatc

SEQ ID NO: 16863 - DNA, 456 bp, Oryza sativa
  unsure (1)..(456): unsure at all n locations
agctntattccctttcctcttctttgttttttcatagccatgcctttccctccttttctcattttctttttgccaagaatttttctaggagaagaaagcatagtctaatgtaggagtttatttgaatggaatttttctggaaagccaacttccagtgtagaagcttagcttaattgtatatgtggaaaacgaaaatggaattgaccccttaatcatgagagtatgaaagatatctaacacgagtcacataaatttgacaaagctcaatataatgtaaagcagtcatgtggatgataaggttcatcaaagatacttttgcatatggccttggtgggtatatatagaatgaagtcaattcgaggattgagcctttaaaacattgttattatgaaaacaaattccccagagttgtaagaagagtcgcaagaattcctttcatcttagatcatctcacat

SEQ ID NO: 16864 - DNA, 455 bp, Oryza sativa
ttgcgcaagaaagaccctgccggaggggcgtacggtcttttgtcatgaggcgaaagccttgccacgaaaggcatgggtttcgccaagtatcgaaccttgccaggtgaaagcccaccgagccgacacgcctttcagaggcttaaccaaggactgggccgagtcacttggcccattacgagcccttcgagcaaaagacactgtacgcccatgaagatgtccctatcataaaggcaaccatgtaaattctcctgtaaagcctaaaccctaaagggagagtctgtaatagggctataagtagccccctatggccatataacaaggggatctgagtaatttttacaaagcaatacaattgtctttacttccaacaactgttaaacgaaccacgtccttcgacatgaggcagttgtcgattcgacaacagctggcgccgtccgaggggacctccgagcaca

SEQ ID NO: 16865 - DNA, 463 bp, Oryza sativa
  unsure (1)..(463): unsure at all n locations
agctcggatgtctgcggcggcatatctcttttatattcagctaattccttctgtagacggtgcaccttgctcttcaacttgcaaatcttgcctcgattccagatttccctgtcatgagctgctttgtctcgctccacacttactgcatccatagcactaagcatatgcaccacatgcaccanagtggcactctcttcaccatcaggacaggtataggttccataatctagaccatgaggcttgtgaggatgatattggaaagcggatgaatccaactcttcttcaaagtgttgtcgcaactctccaatggccaccaaagctacttcttgacacgcatggcaatacgatcttcctccagcttcgaacttaatagacggaaggtcttcactgtcacttgccaacgacacccgaacacgacacttctactcgtcagggtcatgggaaatctgacgatactcgggag

SEQ ID NO: 16866 - DNA, 455 bp, Oryza sativa
tcgctgctggaggtgatattaatgtgacctctgtatactatcttcgatcatatcacttggatcataactgggaatagctcccacgaacaagcaacgcagatttactttctttatgttcagattactttccgctattctcttcatgttgtcatcattcagcattcaacgtattcctgtgcaccttccgccttgatgtgttctttcccattagatcatctcccaagacatggcgtcgcctggtaaccggggcttgcacttttcactccgtgtagcatctgataccgagttgaagatttcactccttgccttcatagaaacacttttacctaggtcatcttgcttacttaatgacaaggtgacttgttgagggggggcaattactatcatgggtcttctttgagcgatgcagagcatgtttatgtttatcaatcacctttcggcctacttctttcatg

SEQ ID NO: 16867 - DNA, 445 bp, Oryza sativa
  unsure (1)..(445): unsure at all n locations
tctcttgtcctttcttattctacgcgtttatttagagcgtcaacatggccgacatggacgttctggactaaagcatatattatgcatgccactagctactggcgcacatgtcaagggcaatatgtgaaaattgtacagtactatctttttcttttacctatgacagtacatggtcatgtgatccctttttagtntntatgtgtgtgtcggtcttaaagcttttaagcagtagatggacatgtgtgcactaaaatatatatatagtaacaaaatatatagtagtagtaccgtctagagcaagtntaatagtgtatagccaactactaactccaattcatctatagccaatctagtagctcattcataaatagntacatactacactattaatatctggtcctacctgtcataaacacattgcgtcttggagtccgtgctacagctg

SEQ ID NO: 16868 - DNA, 446 bp, Oryza sativa
ctaagctcggtttatcacttttgatcaacaatggagagagatacctgttttcactgatgcttagactctcaaggttcttgggatggggaaggttagagtcaatatgatctggtcactctgggtttgaacgagtaccctccagtgtggttgtgggaatagtgattgtcatagaacggatgcactcatgtctgtcgctgattgctttaagcaacttctcgaggtgacttttcttagcattaataaccacacctagcttcctcagctgccatagctttccaatatcttccaaattatcactgcgctgggccttgacattagatagtacctctatgtttaccatcttgtctatcctgtgaggaatatgaacgctagtgcgaaaattgtttagactcgggtcaatgtgaccagcaagtacacgcttcagcttccagagcaggacattaacc

SEQ ID NO: 16869 - DNA, 463 bp, Oryza sativa
agcttctacagaaatctgaaacagctttttcagtgagagactccaaatcccgtgcatgagccacctcacacactccatcatcagtaacctcgtaacacatctgcagcgtgagattcttcaaacatgggctttgtgcaagaaagcgcatcccgacatcagttaccgcaacacattgcataagctccagtgtctccaggaattgtgcacatgagagagcctccatcccttcatcatcaaagaagttagcaccacgtagcacgagatgacgaatcggacaggactggaggagtgtcacaaggccatcctgtgtgaaggctatctcagatggccaatcaggagcacaaccataaaacataagctcaacagcttcaagcatatgagatctcagggctagagcattgaggctgtcatcagtcagtggtgtcctagccattacgcctgtgcctccaggtatttcacagag

SEQ ID NO: 16870 - DNA, 455 bp, Oryza sativa
tagctatagctatggttgtagtacaaaagattaattatattttaaagggtaattagctgcatgcacatatatgtcaatgcgccttaattaatcttctttttatgcatgcatgcatgcatgcataagcgcataagcatgattaatctagtatttacttccaaaaaaaaataaagataaaatatatatgattgtctccgtttcaaattacttgttgttttacttaaaaaaattacttgtcgttataactttgcagtaagtcaaacatttctaaccttcatcatcaattctctagaaatttatacagttattaccataataagatttattttctaaattcattatatatgagaaatattttcataatatataattcacatgttaaactgtatacgaatttttgaaaatttatgatgaatatttgactctatacacagctaacatgaaaagggtttttt

SEQ ID NO: 16871 - DNA, 453 bp, Oryza sativa
  unsure (1)..(453): unsure at all n locations
agcttatgttgatgatgtagtcgtcaagactaagcagaaggatgacctgatcgcggatttagaagaaacttttacaagcattcgtgctttcaagatgaaactaaacccggaaaagtacatcttcggagtgccgtcagggaagttgctcggatttatggtatctcaaagaggcatacaggccaacccggagaaagtcaacgccatcctcaacatgaaaccgccaagctcccaaaaagacgtccaaaagctgactggttgcatggcggcactcagccggttcgtctcacgactcagctagcgggggatgcccttcttcaagctgctgaagaagactgacaattttcagtggggacccgaagcacaaaaagcctttaaagacttcaagagacttctcactactccaccagttntggcctcgccgcatccacaagagccgctgctgttatatgtgtc

SEQ ID NO: 16872 - DNA, 383 bp, Oryza sativa
atggtgcactagatgccgcttgtcgcctagcgaggatgatgtaccgcttgcgccatactataatggcatggcttgcgtctcatagatgtgtctcaccgtctcctccaaggtagtccaactcgaggtccttgtacgcggattacactagctcaacttcgatgctcgagtatcctactggaatcggcctgcaaaggtaaaaccctgaaggggccgttgggatggccattcccgacgccaccttcacgtgatgagaggctatctattattaatcaacctaagcagctgcttgcggtatgtacaagtcaaaaatcatacaactactagcataccttgattgataagttcttgaacggaatatgccgctcacatggtgtccgctgagt

SEQ ID NO: 16873 - DNA, 459 bp, Oryza sativa
  unsure (1)..(459): unsure at all n locations
agctnggggagttntgttaacggtcgttattgatcagttntgaccgtcaatattaccaaaatagaagagaactagtgatgcttgcaatgcatatatatgttagaataataatattccactaatattaggtttactaacctttttgcagagaataacaataaagtggaggagaatcgacatcaacacagacgataaatcaatcggacgaggtcgaaaattagacttatgtatgaatgagccaagaactcagaaatgacacaaccaataaggccaaaattcacaagtctacggaggagagtaataaaggaggccgccagccgacgatgggccagattggcccagcccatggttcggccgaacctcccggngcgccaatggatgaagggtttggatggacggctgggattgagacccaatgacggttggagggtattaccgaccattccaaccgtcataacc

SEQ ID NO: 16874 - DNA, 375 bp, Oryza sativa
tgacgcaaaacatcgagaggggcccagaccgaccgagaacgtaaacagaattccactcactctcgtatgggtcggactccagccctgtgcgagtcgggcaggtctttccctcttgtaccggctgaatctggcgctgtacgggcataatgtgtgactgattccagcgagaatacataatctctttttacgctgcatataccgaacaacaccgatattgtgacacccattatacagtatagatactgtgatcaacaccgacttcacaaactttggtaactccaacatcaacctcgattctattaagaactacataccagaccttatttggtacatatcccttatcataaggacctgatcaaaccaatccattgacac

SEQ ID NO: 16875 - DNA, 465 bp, Oryza sativa
  unsure (1)..(465): unsure at all n locations
agctntagtacttgtgggattgttttcttgttataagatagatccagtgtacattggatatcactaaattaggtcatatcatttgtttagatatagggaattacaggatatccattatgtcaaatattgacccgaagttaattatttaaacaagaatatggattaatttatacaagtaactctatctgtaaatagttgaagacattgcaggaagcagcacgaacttttgtaaaaatatgcatcatgcataaacatctcgcaaaaaggggcatattacacttctgcaatgtgtaaccatgggtaagaagaaaccattcaacatattttcttcacttgtccttttgcaaaacagtattcggatttcatttgttcaacaagaaatcaaaatgtcatggtgcaaccggcaattgaagatatcaagatcaagatacatatgactttntatatggaagaaaatattgctat

SEQ ID NO: 16876 - DNA, 414 bp, Oryza sativa
accctgaaactaagctaagtcataggtttccaagcactgtggcagagaagctctgtttcatatatatattagagagctcgctagctattctttctcaaagaccgcgcaaaattactgcacaggtatagaaaactattctactatagaaaactattctaaactctcgaggggatatcttataatcgtctgcatatcactcaaatacttagaagaaaattaggacaacatattaatatgtgatatatcacttcacaaatatacagcttaaaattcaatttctacataccgcaacaaagaaacaaagtaaactacaactaattaatgtatattcaccatcgaatttatttgtttcattgcgacgcctacaagctgaattttaagttccatgtttacagagtaatatatcacatgttc

SEQ ID NO: 16877 - DNA, 461 bp, Oryza sativa
agctttgactgcgcgacagtccgcaaggttatttatggaggtgttgtggacggtgcaccacttgccggtagggcgctccctgctgggaacgctggcctccttctttttgtcgctcgcaggcctcccctttcgggtggcccgtgaagcgccctcgacggcgaggacatgaccctcgtcgtcggaacggactgacctcttcttccttctcctatcacgccgccctgactgagcggcggatccgggggcggccgaagctgccactccggaaccggaggggttccaagtccaggcctcctccttgcgagccactcggtccgcgagctgaaaaagctctgcggtagtctggggctctttggaggcgatcttttcgagcatgcggttgtgccgcacaccccccctgaacgcgtagattactgcgtgtgcagggatgcatggtatggtattgcggacttgacaaaacc

SEQ ID NO: 16878 - DNA, 462 bp, Oryza sativa
  unsure (1)..(462): unsure at all n locations
tatagccaacatagtattaanatataggccaatggtgttcttatttttggggttgaatttcattgtgtttggtttcattttcaaagttaaatccaagaaagtaaatagcagtatgatgggtcaaacctgtataagtgcaatctattgatgtatatagaaactttttttatgataagtttgagtgaggtaaaaaaaagaagtgtcatgattacacagaacaaacgaagatttttttttcttattgatggatattttatctctatgaccaaacatcctaagaaaataaaccgaaaatgatggtagtggtagaagttggaacatagaatgaacctgtcatcccatcgggaaagacggccgatcaaatgtgcaattacttcatgagctgatctaggtgtttgacttccaccagcactaagcaactcctgcacagagttccacaagcatttaagatgaacaattcac

SEQ ID NO: 16879 - DNA, 468 bp, Oryza sativa
  unsure (1)..(468): unsure at all n locations
agcttgcgactactccttactgagataaacttgttggattcagaatctggattgcacatcttcaataccaaaccactggcactcaagatagagatttcagaatctgtgacggcactcaatatttgtgaagacacaagtacacaacaggaagtgctcccaaaaggatcataccaacatttaaacgcatccaaaaactgtaccacacatctttactgacagtctaaaactacttctggtgatgagtatcattttcataattttgaagcctacacaccacagacactgcaatatgtaaccaccaggcatgaacatcaagtggaattatactacactacacacaaacatacacaaacaagcctacacacacaatctgtagttctgtactatcaagcatgaacatagaactgtactactgtttaaacactgaattttcagaatgtcattgcagaagcaaagattntgcagcaa

SEQ ID NO: 16880 - DNA, 459 bp, Oryza sativa
  unsure (1)..(459): unsure at all n locations
ctttcanatcctatgaaattcctatggaatgacacattgtatgtggtatttggaggaaatttagcaagagctccaacctcttggaaaatttcctttcagtctatctctctcattcgattcctgcatttttcctgcgctccaatcaaacgaccattcctgtgtttttcctgtgttttgcaatccttcgttttacacttcaattcctatcagaatcctgtgtttttcctattcctctattttttctaccctgcgattcaaaggggccctaaacggcaaactagtttctaccggtatgtgtgtgtgcaaagaatgtgtactgctcatcgatcgatcgatcgacctttcgttttcaggaactggcactntcaccagttggactccactttgaaagctcaatcaaactgttgttacttgttagttccaaaaatttgcaggagatctgggtgtcattgtattgag

SEQ ID NO: 16881 - DNA, 468 bp, Oryza sativa
  unsure (1)..(468): unsure at all n locations
agcttcttatgaataattgcctagtttgttagttttcttngcccagaggaataataatacttactatgacctacatacatttacatcagttgatgatcgaacaaagagtgtgctgcaaactagatgagcctcccatacctcttggtgcattacatgatgacccaccaacaatgagaaggaggtcggngtcgtccatcagaaatttcactaagtggattgagaatgagcctaaggagaagtggtctctattgttcgacaccgatggatctcggtatggcataatgacaaccaatttggcagaggtgtacaactgggtaatgcgaggagttcgggtacttccattggttgctattgttgaattcatccttcacggcacgcaagcctactttaaggatcgatacaagaaaattggtccatccatggcagataacaacatagtggttggcaacgtagtgacaaagtacatgg

SEQ ID NO: 16882 - DNA, 469 bp, Oryza sativa
gacacaatacataagctctgctataactgtcacagcgccaagacctagcatagactgtttttatcttagcgccagagttgacatctaacggcgacggttctgaccaccatccatcgtgaccccaaagataactttccgagattgaattcatagtggtgttctgaggacagacaccattctctccactcatgaagaggcttcatgaccacaaatggcatcatgcaatattctattccacacaagtggagattttagagtctagccaactgtattacatgtcccagtgctccatagacacgagcatcgatatgcgaatagacatgggatactcacaccgctatgaatgttctctgtacccgctcttcgcgactgacctcacatgagcctcatccctcacatgagacgcgcatggaaaagctcttcaataactccattggcttacccctccatgaactaaagcctatgcact

SEQ ID NO: 16883 - DNA, 439 bp, Oryza sativa
  unsure (1)..(439): unsure at all n locations
ngcttatcgaacaatgtctctgatatctttcttatgtcacaaataactcactgtgtgtaattcatggaattgtcaccactgagctaactaatcacgaggagggctaatgaatatgtcatcaaggctctggattactatatgcattcacaagtgaataaatgagttaagtggaaagattagtacctaatgccatgagaagatagtcaataacatgtacctaatgccaactttccttttctcggatccaatcccaagcagtgggaaattgaactatttgccacttttagattggtcaattatccaaatgcccttttaggtttgcacttctttttctcctcttaaaagatgtcttcttaactatttgtcactcttacctacgtggcatttcaacatggcaacggaggggtagaaactggtgtggcgcccactagtcagcctc

SEQ ID NO: 16884 - DNA, 461 bp, Oryza sativa
tcgtaattacatagataaggccatacttctgagagatctgttattttcagaaaattaaaaaaaataagatctatgcggtatctaacatgggatacttcctttagagtgcaagatattcacctgcatggccacaggaaaatcatcctgaaaatctggggggaagaaaagatcagcttgcttcttggaaaaccctggtttccctgaaataaatgataggaagaacgagtgaacagaggaatgatttatccatgaacatttattcactgttaatggcctacaaggagaagaatggggtggaatatagaaccatttgcagaatagcactgactacactaaatgacaaatgtgtgtttgataaaaggcattctacttatttcttactctgctagaaacttgaaaatagaaacaaaacaaatcttgataatttccagagacaaacctggctgggcacccaattcaat

SEQ ID NO: 16885 - DNA, 471 bp, Oryza sativa
  unsure (1)..(471): unsure at all n locations
cggacacataaaactcagcttgtacagttggaagngtttttgagagaaatttaaatctacttcaaccgatatgcccttatgcacggccatacataacatagaaatcacacgtggaaggggtgggcaattagctagagcagcaggtgctgtagcgaaactgattgcaaaagaaggtaaatcggccactttaagattaccatctggggaggtccgtttggtatcccaaaactgcttagcaacagtcggacaagtgggtaatgttggggtgaaccaaaaaagtttgggtagagccgggtctaagtgttggctaggtaaacgccccgtagtaagaggggtagttatgaaccctgtggaccacccccatgggggcggtgaagggaaagcccccattggtagaaaaaaacccacaaccccttgtggttatcctgcgctcggaagaagaactagganaaggaaaaaatatagtgatag

SEQ ID NO: 16886 - DNA, 434 bp, Oryza sativa
  unsure (1)..(434): unsure at all n locations
agcttacttgtttcatttaccacagaatatttatatgtttacgagccntacgcactaggacgtagtgagccaatcaatatgtcctagtgtgtaatagtgctaatagtgctaccaaattaagcctggtgatgattgtatctgttctaatattgctaccataaaccatcttgtttaaaaatgtgtgaataataataactgcgaagaacttggagcaattcaataattcattctgtaactggggaatggagatacaggccacaaaagaaaaactgagtggcgcttacctttgatgctagcatcatctgaatcactatcatcagaccatatctggaacaagaggggcatgcaacatatttgcttaaaatctgatgataatatgttaagtgtattcttgtctgatagacaatgagagtccttactgcatcatcactgtt

SEQ ID NO: 16887 - DNA, 436 bp, Oryza sativa
aactcagcttatctctgcctgcaagaagtaaagctaacattttcttatgctaataggcgaacaataacagtgactgtactgaactaggtaaccacaacatcatggatatggagataaatacttcatgtctgatcatcttaacagtttttctttactcctgataatgtgtattttgaaaaccacaacgaagatgtccgaacagttatttactggaatatagtttacaaaagtacaaaatgtcaaaatgaagctcattttctgtgtgaggatggcaatataaggacagctcttaaaagaaatggacaggtcctagtacgactattttggttaaacatgtatatcatttcactgatgcgtacttatgagtatcattctagcaatcaggacacacgtaaattctacacttcatcacgctacccaacatcaatcaactgag

SEQ ID NO: 16888 - DNA, 459 bp, Oryza sativa
  unsure (1)..(459): unsure at all n locations
agcttcgccgctgcatgcatgggatttgtatttgcgaagngaagcccggccacccctccgttgtcgccgcacatcgccggaaagtcgtcgcctccgtggccagtacctcgccgcccttcaaagctcgtcgccggccatcttccgttgccgttcgtcgtcgcataagtggtggctagggtcactttgatctcctctttctcccggtgccctccgtttgcattatttcgtcggcaaccgccgctcctatgtcgttcaccggtgtactttatccctagggtcttaattcaatctaatccattgtctgtctagcatcgacgtcgtctccatgtgttgccgccggttcaccgtcgtcatctatctccgatcgctttggttcggtgagacttctatccgtgtcccctcgggttaggtttcaatccctcggtcatgtcggcgccgctggtgctctaaacctagcgc

SEQ ID NO: 16889 - DNA, 428 bp, Oryza sativa
taacatataggtgacacaatagcccacacatgttatctttttcaagcttgccacccaagcgacacagcagtttcgacttcactacgatgctaccccaactccaaaaggagcaaacataaacgatatcgatgaaggacatcagcctaagctaccaaggaaccagttcctgcacgcagctagcatcaacaatcctataaaaagattggagtgtgtcaccgttgccaagttttgtcgcacccctacaacgaagcagctccgactctacccagcagtacacaaataagaatgatgaacacccgccgtagagcaaggaacagaaccaaggcagcgaaggcctcgtcaaacaccctaggcttgtaggggatcagaggcattgcaggagtccaccaatgctatcgttgcacgcggaatgttcttgctgctacgag

SEQ ID NO: 16890 - DNA, 456 bp, Oryza sativa
  unsure (1)..(456): unsure at all n locations
tgcaaatcatgcttaanaatgattttattatcagcatatnggaagatagatgaaccatcatcaaccagatgagggaccactccagaaatttgaccattaccttttgctctctttattaatatagctaacatattagcaactatattaaaaagaattggagataatgggtccccttgccttaaacccgtatatgtttgaaaatttgatcccacatgatcattcactttaatgtgaacaagtccactttggataaaagaagaaatccaatcacaccttttttttgcgagaaacccttaattctcaacgtttgttgaacaaaagaacattttactttatcataagctttcttaanatcaaccttaaaacgtacaccactctttnntccggcacaactcatgtacgtttcatgaaaaataaccaacccctccataacatttctcccaggtataaaagcta

SEQ ID NO: 16891 - DNA, 438 bp, Oryza sativa
taaactgtagaggctcaacattctgccttgcttgttttttttcatcacgaaaaaattgcaccgcctgtgggttaattttcaaagtgagctttctaaacaattgaaaacagtttgcgagcataccttaattgggtgtgccagcaagagagttcattctcacgatcgatgagacaattttttgcagacgaatggtttctttcaaatcctacatggaatagctggattctataaattaaattaaatctttataacaaaataaaatgaaccaaggacacgtttcccaagaggtgttgtgtcataggagatcattagctctagattgtctctatgggcacactccctgtaaggatattagaatgatcaactatcgcttgaattaatgagggaaaagaaacgttgcacataatccatatattccaataaagccccacttaattt

SEQ ID NO: 16892 - DNA, 479 bp, Oryza sativa
  unsure (1)..(479): unsure at all n locations
atcttaagtcacctgcggcatcaagctttttggggagaaaaagatttttcttggtatggcattccaacgtaaagcagagctttcttagcttcgattgtgagcataattaacagattagatgaaaaaaaaggaatgacgagcgcattttctagaagccatagcatcatatagcagtaaaatttgaaacttcatttctgagctgattntttgctttactcatcatagtcaagttttcagcattggcttttaaactgctaataatatggatatagaagttctgcccatagcttaaacgatcatagcataatacagntgaaattaaaaaattaaaagtcattaaccacacatttgactgaattttgtataacatacaaatcgcggccacccatgtatacgtttttcatgtaatcggnggaaaaaaaacggaaacatgattaccgtaggttgatgaggaggctggactagtaatgctcatgcac

SEQ ID NO: 16893 - DNA, 457 bp, Oryza sativa
  unsure (1)..(457): unsure at all n locations
cggaactgagccttctttttgaacggtctggatctgttttattagttaggntatagatcgntaacccaaaattgtcattgcttgccggcatggcctagcaagcaagcagctagctagccgtacttattaaacagcacggacgtgattagcacgtggtggagttgaattaaggagatataaaacacaccacacgtgtgagttattcacgggaacggaaataccacacgctaatatttctgctgcgtatgtacagagcagaggcgcagtgctgacaagcttatctattatatactaaaagtccattaaactttctacaaacgctcccaaactgtaacgtggcaattctacaatcctagatcgtcatgtggcatagtctaatctcactggtaattntcatttcaatcgatggaaccattattctataccgctagattagatatatacatactcattattt

SEQ ID NO: 16894 - DNA, 485 bp, Oryza sativa
  unsure (1)..(485): unsure at all n locations
gacccggatcttaagtcgacgcggctgcagctttcttttggaattgacttctctttgtagtaatacaatagcattacttgttactactgtacgttactacagttctatcacaacgttactataagagtctagtaaagacaataagctttgcagtaacaaagtgtcttgcatttcttgaatattattactacataaactaggaattgaaacaaaaatatatgggttaaagcctcacatgctaaccgtatacttgttactacacaaaagtagaagcgttactacataataggtgcatgttaccacttccaagtagatatgttactgcatgataaatgcagtgttactatgtcatttttacgagatgaagttcgaataggtgggccataggtaaagtttgtaggtagctntgagcaaggtctgattgatgtaggagtgttttgaataattttatacatttagtaaaaccatgttactgcatgtatata

SEQ ID NO: 16895 - DNA, 468 bp, Oryza sativa
ggaactaaacactcagcttaaggcctagggccggcgatcgcccgatggtctatttatggcccatgagcacccttgacgttatgtaaccctgtaaacgtccctttcataacggcaactatgtaaattcctcaatacgaactagaccctagaagtgagaatctgtaacggggctataaatagcccccaagggccatgtaataaagagagagaaattcaagaaatcaatatacttcgtttctttccaaccaaggccaacgatagacaataactcccccccgaacacagcttacaactttcatcgtactgtgctctccaaagagcaactcttctcaaaatctcaaaacaaaaggtgctgagttggaatcccattctaaggattcttgtggttccggggaatccagctacaggagaaccaggaacggggagctctctcccttttccgcccgactctttgatcttaaacttaac

SEQ ID NO: 16896 - DNA, 357 bp, Oryza sativa
tcaaagtgagctttcacaacaattgaaaacagtttgcgagcataccttaattgggtgtgccagcaagagagttcattctcacgatcgatgagacaattttttgcagacgaatgggttctttcaaatcctacatggaatagttggattctataaattaaattaaatctttataacaaaataaaatgaaccaaggacacgtttcccaagaggtgttgtgtcataagagatcattagctctagattgtctctatgggcacactccctgttaggatattagaatgatcaactatcgcttgaattaatgaaggagaagaaacgttgcagataatccatatatttcaataaagccccacttaa

SEQ ID NO: 16897 - DNA, 462 bp, Oryza sativa
  unsure (1)..(462): unsure at all n locations
gcttatgtgtgtagaaagtttggatgtgatgtttgtaatggaaagttggaagttaggggtagttggaggagaactaaacacagcctattatgaaatcggattcagagtcgtcaacagaaacaattctacggttcttgaagaggtaccatcaggtatcaaaaatttagtgtaaaatttaatatctcatagtacctttgatacctcatagtacctaggtactaagaggtaccaaatttacaatagaaaaagtggtacttcatggtaccttctcaaagaccgtaaaattgctcgttcaataaaggtttatgtctaggagaaaagggtcggnggagatcatcgggtctagaggaatggcattggaaacgaggaaatagccaagccaatcctttagccaaactaaatattgattattaaaatntaagcaaactaatttattngattttttttcaaagcaacttctat

SEQ ID NO: 16898 - DNA, 399 bp, Oryza sativa
gcgatatgaacccgaggatgtttatagattaaaaacactttatcattttcataactatgcgattaattctaaacactaactcaaaagcaaatgccctgaatatataccaggctaaaagggaccagacagttacttgtgttagatatacacttgatcaaacagcgtgttaaactgctgttataaaaaatcagcgcgccaaaattataaaagactatgctaccgacgacgtataactcatcttccgattttcctaatacttactatctttttcaagaacggattaagaaagagaatgtatattgccaaacggtttacatatccaaatggtttccatatacaaatggtttcctaattcaacaagtgagagaaagtgaaatggattacttctgaacgactttg

SEQ ID NO: 16899 - DNA, 467 bp, Oryza sativa
agcttcgtctccgtcaagtgtgtcttgagcttgtctgtcctgccaagcgccacctccagcacctctgacttgagaaaatgagaagcgttgtcacgtgccaccacacgtgtcttgtataacccttgcttaacagctgcaaataattgtaatatttgttactatcatgtaattagtacatttacactggtttctactatagtattatactaacggtattatcaccggtataaatgatattaattaagcgttaatttataagttctaccgttagcggagaaattatcgtactaccgataattgatatggtggtataaatagatataactcattggaatagaaaaataaatagtctagattgattctaccgccagtagaagacattgtaaaatgccgcttgtatataattttttgccaatgatatgaaatacaaaacatacgcacacataccaccacacaaacacaccaat

SEQ ID NO: 16900 - DNA, 462 bp, Oryza sativa
ctggggagtagggtgttcattgcccctgtggaacgtttattttttctatctatcttcaagtgagctcttgctcgaaaatctggggttgaatgcctgcacgggtcacacagctgcacttaatcgatcaggaatgaccaagcaacacaaaaacatgggagaaaacatctggataagagaaaaagaactccatccatatctagcatgtcaaatcgaaactagaatactagattgagcaggcaacaaagtaacaaccgagtggctatctcacctaatcggtcgaagcaagctttgctactaattgttatcaaggcccacgctatcaccaatttcaccatgagtagcgtaagcgctggctgcagcgacctctcaacgctgcagtcctactcacgaacacaacaggaacccaacaccgaagaagtgaagatggtggtcattcgcatattagtgtgagcacaagatagt

SEQ ID NO: 16901 - DNA, 458 bp, Oryza sativa
agcttgcagtgatgacacacaattcacactctttatttagagagagagagagagagagagagagagatctgcaaaattgataagagctaagagcgaaaaagaagacgggagccttacatggagatggagaggctactccctttggtagccaagaaagacttgcctatgtgttttgccctgtgatggctcatccatccatctatcagacgtagcagatttgcagtggcagattaaagggtttcagatagaaattcttgtgatggatgtgcaatgtggctgcatgggccggtcttcttggctagccagagtggctctcatccaccatgccaggccactcctcttctgaatcttcagcctttgtgctctctctctctctctctcaatgcatacggaatatggtaatgttcatcctgatctctcacgatcttactttttctctctggtcaattcattgctat

SEQ ID NO: 16902 - DNA, 347 bp, Oryza sativa
gctgcgcaaccataccatattacaaagttttttttataaccgactcgatacgctacgtccatagtccagcagaactcttctatattataaatcgagacttaaaaatgctgtgtgtgcaccggagatgctatctaatctattatcgtataggcttagctggatgaaatcactatggaattccttggatatttttttagaaatgatgagctgcattagagctgactttattaaatttcatggaagtctttaagaaatttctatacactgtttgatttcaaagcaatagctaaatcaattatcacaatggtgttcaaaggaagtatacccctcaaaccatactagaaaac

SEQ ID NO: 16903 - DNA, 428 bp, Oryza sativa
  unsure (1)..(428): unsure at all n locations
tagaacagnctctgcttgctcgattagactctgtcccatgtggcctcgcgggcacacagtaaaaagcacccgtcttgactaattttgccaatcacgtgcaagtactactgacttttagtttgaaggatcaaataagttactgacgaggcagataactggatacctccaagtcaatgaacagaggacatcaaacgcatagtatcacctgttgcatttccagagcatatgccagcaatatttgtggtatttcttttgcccaaacagaaaagtcactatgtgtatctctataaaaaggtgtatcatgttgaattaacaagcatgaacacctgtttgctcaacacaatccatatttacccatcaacacctattggtcatcatgcaaatcgaggtacancatactatgcatctacataanatatagtattata

SEQ ID NO: 16904 - DNA, 321 bp, Oryza sativa
  unsure (1)..(321): unsure at all n locations
ctaagcttacctcgggaatcgggcccgcttggagcagattattttttactcctacctcgccntccgcaactatacctcctaacttaccggatgttggacaatgtggggagccccaactgacagaacgaagcattgcaatgctacctacttgccagcatgcttaaacactgatattcctgtgaaagaactgtgagaatatagggtgaaatgttagatgcgagcgactgaaatccattgactaggtgagtgtggaattactggtcttcttcccctatcaatctacaatgcacacggattgcgcgcttgcagaccgccatgaat

SEQ ID NO: 16905 - DNA, 462 bp, Oryza sativa
  unsure (1)..(462): unsure at all n locations
caagcttgcttcagcagctggtaaacgatgttatctgtattggactccgaagagtctgatccagaggtaaattttaactgtttattgaagcatcccctattctaataaacccctgcccttttttgaccaattcttcacgcacataacttttaccaattctcattggttgtcctagtggggttgctggacagcaaaccatgagctaaagaagccatctatcaatttgttgtttccaacaattgacagagtgaaaaatggggcttgtggaattcagttatccaggcatttgctttctcttcctgacgtagatttctcttcttgtaacttactatttgcatattttaccaataagagagatcatattgtatgtgcgttatacttgatgtgcttgtaagggtgtagccaagtcttcttttccattntgtgcctaaagctgcatactatccttgtgtgctttagttc

SEQ ID NO: 16906 - DNA, 454 bp, Oryza sativa
  unsure (1)..(454): unsure at all n locations
aatgtcgacataaaaatggctataccagattgttatgttttccgatatttctggtgcaacgntgttgtacgacggtccatcttgatatttgtcttgcttgatggcatatcaattgcccaagatattcctgcttgccgaaaatgtcgttgcaggctcgtctattaaacaaacaaagaatgtatcccacgcacacagtgcacgtaagtttatggtgcatacgtcgtttacaccatctaacaaattttaattaaaaaaaatctaaaaaaaattagtgcacgtatttctaatagtatggtatatacatgcacacagatcatatttaaatacattaaatactagttcaaaatataaatttctaacatatatatactcttgaaattatcagttctttttttcttttcttatgactaaaatgtaatgaatntgtagttgatactttacagagatatgaata

SEQ ID NO: 16907 - DNA, 464 bp, Oryza sativa
agctttgcgcgagataggatggtggatattctcttttggatgcttggagttctcttcgagcctcagtactcatatgggagaaccatgctcactaaattggtcatctttgtctcgattttcgatgacatctacgacaactacagcaccttggaagaaagcaagctgttcacagaagcaattgaaaggtcaattgattaagtttcttcttttaataatgaaattcattccgaacttaatttgtttcaaagaagctgcatggagccaaaattcttgtctttaacttgaatttaattcttatcaatgattgaaccataaaaatataatagatgggatgaggaagccgctgaagaacttccaggctacatgaagttcttctacaagaaagtactgaccaccatgaaatccatagaaactgatcttaaactccaagggaacaagcatgtcgactatgtcaaaaacctagt

SEQ ID NO: 16908 - DNA, 455 bp, Oryza sativa
tcgccatcactatcttaatgctgtcaaaatgggcatcttcttgataatgatgttgtcaactagaactgttggctgttgctgaaataagtagtgcagtgggtcgctgtctgacagttaaatatggcagcagaaaatatttccttttgctccacctatgtgtttcacttactgaattgtatgacttacactatataaactgcaaggtattgctttcttcctcattttcagccactgaaaactatgagatgtcttcttcttgacgactctttagacgcgaaacattcccatggctttacttaatattatgcaacaaaaaaaatcttgattcttaacttgtgtgttgtgttgcatttgttatatccagatcgaccttcatggcgacatatctggactcctaagagcgcatccgcttactcctttagtttcactgcaccaccttgatcatgtatatcctc

SEQ ID NO: 16909 - DNA, 441 bp, Oryza sativa
  unsure (1)..(441): unsure at all n locations
gcatgcaagctntacaagctacgaatgaatttgtttcttaagcactgggaaatagaaatccatcaattacacaatgtttactaaaactagggcccaggtagattactgatggatatcatggacaggtcagtttcttgcatacgtataagctaatagatgttggtcggttttctaaaaacatgaaatagttttaaatttaaatacatgacatagctgtgcacaagtcgaaaacaagaatctgatgattgagattgcaaactcgaagcccctttctcccttcctaagagtaaataaaaaatgagatacagaacttcctctgcctctgcatactctctcttatttaacatgtacagataattggaatgccatatntattacgaaaacagtatactgcatcataagtaaaaagtggtggttttgtggggagggtgatattttctc

SEQ ID NO: 16910 - DNA, 435 bp, Oryza sativa
  unsure (1)..(435): unsure at all n locations
taggtcataaataaaccacaccactctacaatggaggcttctagctgntntttctattttggctcctaggttattatatattagctggtgttaaattttttattcttagatcaagaactttcatagtttggaccttgtaacaacaaaaaaaacacatatatactctaatctcctggtgatcccactatcaacttcacactctcatttttcaacccccggggcgaatctacatgataagggccggtgtcaggcgacaccgacgactttcagtaaaacctatagcaaaactacttatccatatattacaacaccatgatctaaacataagtaacatactatgacgctgatagacatgctatgacactaatgaatcgattttctggatccgccactgccccccctctcaaccactgaactagacgcacacgcaccgat

SEQ ID NO: 16911 - DNA, 457 bp, Oryza sativa
  unsure (1)..(457): unsure at all n locations
agcttgncattgaggtgacacatcattcttcttatgtatcgtcgntgagcttgccacccaagcgacacggcaactttgacttcagtgcgatgctacccaaatgccaaaaaaatgaacaaacataatcgatacccacgaaggacattggcccatactaccaaggaatcacttcctacacacagctagcatcaacaaccatataaagtgattgcagtgtgtcatcatttttaagcttcgtcgcaccccagcagctaagcagctctgactctacccagcagtaaccaaataagaatgatgaacacccgtcgtagagcaaggaacgaaaccaaggtagcgaaggcctcgtcaaacaccctaggtttgtagagcttcagaggcattgtaggagtccaccattagcgaccgttgcatgcgaaaggttcttggtgctatgagaggtcaacgctagaacgacgct

SEQ ID NO: 16912 - DNA, 385 bp, Oryza sativa
agccgccaagaactatgtacgtcacagccgttgggttgtgccggataacctgcctgtccctacggcgtactggcgaagaacaatggcacgccgagatcatgagagctttgtcccaaatttcgagaaagagatgctgtggaccacaatgctcgagacattcaccctttctgcgggtacagaggacaaagtgaaaatgtggactctaaagaaaatggctgaacaatctcagagcttcaagggagatctgtaccataagtatatactgaaggggcagacaccgaacttcgacacattccctaagcttacggatcactgggaccagttcgttgcatataagacaggtgaacaagggaaggcgatgatggaaagaaacaaagataatgcc

SEQ ID NO: 16913 - DNA, 347 bp, Oryza sativa
cacggcaactttgacttcagtgcgatgctacccaaatgccgaacaaatgaacaaacataatctatacccacgaaggacattggcccatactaccaatgaatcacttactacacacagcttgcatcgacatccatataaagtgattgcagtgtgtcatcatttttaagcttagacgcaccccagcagctaatcagatctgactctacccagcagtgaccaaataataatgatgaacacccgtcgtagagcaaggaacgaaaccaaggtatcgaaagcctcgtcaaacaccctatgtttgtagagcttcataggcattggatgagtccaccattagcgaccgttgcatg

SEQ ID NO: 16914 - DNA, 459 bp, Oryza sativa
  unsure (1)..(459): unsure at all n locations
agcttataataacgtagatatattgttttttgtatatatatnancacattgcaacaactaatgcacgtgataaatagttgctaatacaaaacctgagagttcataggaaattcgattgcacaaaatatactactttctccgtttcataatataattcattctaacatttttcatatttatattgatgtcaataacttacattgtgaaacggagggagtataatctagctaaataataaatttggaaaaacaaacttaaaaaaaatcaaacatattaccactgacacagacgcaactttaatcatagctagctacttataatgttttgggagtaagtacgtacctacgttgtgcacaaaccacagtcacgagagtacttaaccgttatttttgtcgaaaaanataaggagagcattatattacaccatatgcatggcaaaagaatagtgaggcacacaca

SEQ ID NO: 16915 - DNA, 440 bp, Oryza sativa
  unsure (1)..(440): unsure at all n locations
tcaaatntatagntgaagaagtaaattgtatcttatatttataagtataagcgaaaagataatgtggctaatccttgcagcatttcaactaggggtgaaaacggtaacggtaattaccggccgaccggcgttcgttttcgactttctaccggccgagccatatggaaatggtaatcgaccgaaacaaatatgaaaatggtaaaaaatatggaaatgaaaatggaaatgattttgctgttataccgatcgtttccgtatttaccgtattcttgcggaaattaccgtttcttataatatggtaattaccgtattctaaatatgtcgatattataggacatgtttatacttgacccacagcttatagattgaatgactgttcaataaaatctctaacttttgtacatggctaatatgaagttaatttataatgtatatagtat

SEQ ID NO: 16916 - DNA, 455 bp, Oryza sativa
  unsure (1)..(455): unsure at all n locations
agcttgagcctacagcaatcattcttactctctngttataccaagggagacctccatcgtcaactgcctaatggctgcatcatttgtcaacatgaacatgttgactcttctatataaaccatgacatatctggccagatcaattgccagtctgaacatgtaagccatagtcgtcactgtcaagtgtgaaaatcaattatcattctaaacatgttgagtctgacataagccacaagagatctatcaatcctacatccaaaaaatgtaacaaggttcattgctaaaagcacttcatctcactatggccaaaaaaagtatcatgagcaatttagtttctttttccatcaatcacttcctcagttcttagtagtcgatttgtcatcacaacctatgcagccaggttgacgttgcctgatatatcacatcgacctgagatactcaattgtagcaagacat

SEQ ID NO: 16917 - DNA, 434 bp, Oryza sativa
  unsure (1)..(434): unsure at all n locations
ttanacaaaacttgtgacgagtttggaaatgtttgttctttctaatataacgtacggagacatatacagcagcaaaagcaagaatctcaaagagaaatcaagtaatactaggcgtgccacaagcgttcatgatgactgagaaacctaacaccgtcggttaacctacccaatttaggaactgctacgaagagtaaacatacgtgttacctattccaaggaggcaaacaaataatcacgaaaaaggagagaatccctacggcttcagctgttatcaactaatgatacgttacttcttcaaccatgaaggtgggatactgggattcatatttgcgaagatttacatacattttttaaaactctttttaaaagcttgctaaaattcaacaattaaaggagagatggagtggagcagtcaacgtgagtcacgtcgtcat

SEQ ID NO: 16918 - DNA, 463 bp, Oryza sativa
agctggccgcttgtgctcgctgccatattgtttgtgatgtcgcccaaagacgttgctcgctggttgctaccttgccgctttactgcggcacgtcagcagacgtgcagacggtaagagcaagtataataatagtgagctataaatctactataaacttatatggagaagagaggtaacaaaaaatcaagagggttggctctcatgcaagagctagcttaacataatctccaagacaaattcattaaatatataagtgagagatagagagaagtgaagaaaattatagccaaccttatagccaatctattatgtatgttagctttaaaatagtctaatagtaaaaagtgagctatactattatcttatactattatcttgctctaagcgacgagggccaaaagccgagcgacgagcagccgagcgtcgagctggacagcgagacggtgagtgcgagtgcgagagc

SEQ ID NO: 16919 - DNA, 459 bp, Oryza sativa
  unsure (1)..(459): unsure at all n locations
ntaattcccatgtgatagaaaataactgaacatgccctatttttttgtgcccttggtgatttatcctcaataatgcagtgcaggtttattactgatctgagatcacctatgcggctatacctgcgccagtaaacacgtggatatgaacccccaaaagggccaacattatgtgtcgccgggatacacgtcagatggaaagaatgattgattaacctgctcccaatctctcatgatgtacaaaaggggtgcgtttagttcacgttaaaattagaagtttgattgaaattggaacgatgtgatagaaaagttgaaagtttatgtgtgtggaaaagttttgatgtgatgaaaaaattgaacacttgaagaactagtttggagctaacaaggccgagatggacaagttatcttcagtgtctgaagaatattcattcagtgtgcttgtgtgctgacgaacactat

SEQ ID NO: 16920 - DNA, 452 bp, Oryza sativa
agcttcatcttggagccatcggtgaacttctatcttcatctatggccgattgaacctgtcgccgaaacacattgcaatcattagtagagtgagaatgagaatcatgccacttacaatatgctcgacgtttcaactcttcttgagaaggtatgatatggtctttaggtaatctaatttgtttctcttgcaaaagataatataaaatcttatcacacttggccacatcaaaactatatttaacctcactttgccgatctttgcgaggagtcggcattaggttagagcaaacaaaaggcttatttttattagtccataaccattcggcaacataaatatcatgatcaccctcttcctcactatcactagcctcagggtaatcaaccacattaacattagggtttttgtcaaatggtctagcaagttttctattatccttaacccggctttcttga

SEQ ID NO: 16921 - DNA, 450 bp, Oryza sativa
  unsure (1)..(450): unsure at all n locations
tccttctgattgctggttgaagcggatgacggacttctgttttgtatcgccctccggaggttgattgcccttggctcggcctggagtaagtcggcgagagacacaacttcttccatctacgacaattctttgctgaggctgtcgatgcagagagtggttgctatgatttattgccgagtcaggtgcagcaggaggagcattggtgcattgtttctgctgtgggttctgattaacacgaggccttacgggtacggcgtttgctccagtaaccacaatacgattggaatgtctgcttcgtgtaaattggcggtaatgtggaggtcgattttgccttggttggggacagcttttggagtaatgcccttcttcactgcagttgtaacacacaataactntcttacactcgggttcttcatcttgtacttgatttctcagctgctgtattggaac

SEQ ID NO: 16922 - DNA, 462 bp, Oryza sativa
  unsure (1)..(462): unsure at all n locations
agctntgacgatacaggcatcacaaatgttcttatgcgattgtgtcacttcatccaccgtgagtgctgtcatgtgtgaggagatttattcgtcccaaagggtgccctagctacaagtgacgaattcaagcaactttgggagtagagtactgctatgccataatgtaattagatggcgtatttgaagtgacaatgtaaaaaaatattgtaatatatattttgacaacacttttcacttatgcaatatatgtagatttctcagtaccaaatgcttgttaattctaataatcttcctacatcaatttctattaaataattaaaaattaatttatgggcaaattattattgtatcaaatttcaaaattttctacccatcttcacaggcggatgtttttttttntgcaggcggccgctttctattttcgcaggcggacctgtctagctaacgtccaactgcgaaaat

SEQ ID NO: 16923 - DNA, 452 bp, Oryza sativa
  unsure (1)..(452): unsure at all n locations
tctcanagctggcttcatcagagaggttctccgtccagagtggttatccaatccagtcatggtgcgcaaggccaacgggaagtggaggatgtgtgttgacttcaccgacctcaacaaggcgagcccaaaggatcacttccatcttcctcgaatagatcagcatggcgaaagaggacgaggagaagacaacattcatcacgccgtttggtgtattctgttactttaagatgccgtttggactgataaccgtaagaaatactttccaatgcacggtccagggagcacttaacgatcagcttgggaacaatgtcgagacctacgtcgatgacattgttgtcaagaccaacacaagcgactcattgattgacgatctccgggaaacgttcgacaacttccgacgatatcgcctcatgcttaatccagagaaatgcacgttcggagtaccatcgggc

SEQ ID NO: 16924 - DNA, 465 bp, Oryza sativa
  unsure (1)..(465): unsure at all n locations
agcttcacatcatcaagcacaggtcgtgcctttatatctntggtgaacactacatccccacttatgtactctaactagtagagtactcctgcttattagttactccctccgtctattatattttgggatggagggattagtcttttaataaatcttaatttggttaatcctgctgtattttgggatggagggagtagtgttttagtaaatcttgattntgttattcctgctgtttctgcaaagctctgtaattgacatgcatgatttgaaggatgcgattttagtgtctctatgattttgattcttttatcatgctgcataagcgcatatagcattggatcatctcaggcaatgtgaaaaacttatttcttcaatcatcattgggtaaatgtgcaatttttgtgaaaaacccatattgctgcatgtaaaagtatgcaatttttaactgttaacaaacatatactc

SEQ ID NO: 16925 - DNA, 370 bp, Oryza sativa
  unsure (1)..(370): unsure at all n locations
tcgcctcgacggcgcgtggagcatgaaccaggcggacctgngctcttgaacgacgtggcggctgcatttgccaagcgagatcacgcgcagccccaggtctttctccttgaatcggggagtcgccatggcgcctccgccgccaacgtgggcctcgtactcgcgtttcctctgcacctcgccgacgattccatgccacctgaagcgcactgttatttcagaacactccgaaacacggggtgcggattgcggaaggaacggtgatgtgatgagaaggagccgtacctgtcgctgtgatcgccggcccaaagtgacgacgacgacgacgacgacgacgacccgacgacgtgaggacgccgcggatggggagggg

SEQ ID NO: 16926 - DNA, 321 bp, Oryza sativa
agcttcgctagatttagatttccgtagcttttttcttttttatgaggactaagcgccttttatgtaagtatttatcgctttagatattttgatgaatctgtatattaaattgtcagtttgtgtacctgggctgattcctggacaaggatttaatgtacaaattagttcgaatattactcgtgaatttctgggcgtgatattatgcgagcgagggccgccattgagctacgctattaagcattgcaacgatgatgtcatcaagtcattgctcgagctcgctgcatggtcgtcaactcccgcgccagccccatcattaccacc

SEQ ID NO: 16927 - DNA, 465 bp, Oryza sativa
tagcatgtgtgcatatgcgggcgtaagatctcgatcatatattatgtaatatatctacacaagtcacaaaatttgacaaagttcaatgcaactacgagtgaccgaatattatataaggttttcaagtgcaaattatatttggctgtggtaggaataaatatatcaaatgaggaactttgaaatttatcattttgaaaaacaaatcatccaaaatttaaatcaagcttggatcaagatttaagcaactctatttcactatatcatatctcacaacagcttaggcttaaatcacgcagtgtgcaactcacatctctcaggttcccggataatggttggctaatcattatttaaaacttgagagagtacttaactatgtacagatacattagagatataaagcagagcacatattcatcatttcaatgtggagaactaggttttcttacctagcatggtaaaatctat

SEQ ID NO: 16928 - DNA, 342 bp, Oryza sativa
gcacatgatgtgactatccattggaacaggaaattatgatgaataatgagagcagagtgcaccatctgatactcagacgctgatgactggacaacgattcaaagtcaatattagccgtgaactaactcatgaaccgctaggcctcatattatgtgagcgaaggccaccattgatcttccttacatactattggctggaatgatgtcattctactatatgtaaagaattaccgcataggccgtacacgatctatttataaaacaaactactgccatgtcatacatgatctggcttcttcacttgtactgactacgctagaagggtcacatatagcagatgtaa

SEQ ID NO: 16929 - DNA, 453 bp, Oryza sativa
tagcatgtgagcatatgtgggtgtatgatcctgtttattatatttgaaagacatctacacaagtcacatgatttgacagagctcaatggaactacaagtgaccaaatattatatgaggctttcaagtgcaaattatatttggctgtggtaggaataaatatatcaaatgaggaactctgaaatttatcattttgaaaaacaaatgatccaaaatttaaatcaagctaggatcaagatttaagcaactctatttcactatatcatatctcacaacagcttatgcttaaatcacgcagtgagcaactcacatctctcatgttcccggataatggttggctaatcattatttaagacttgagagagtacttaactatgtacagatacattagagatataaagcagagcaaatattcatcatttcaatgtggagaactatgttctcttacctagcat

SEQ ID NO: 16930 - DNA, 434 bp, Oryza sativa
  unsure (1)..(434): unsure at all n locations
agcttgantgcataggtgatgcaacatcttgtatgacatccagaggctgtctctatttctactgcaaaacttgtcctgattcttgcattcaaaacttgtggtctattgttgtaacattttgctgagatgtacagatctttgttgtcataatactgtgattattattctggactatggaatgccattaggcttgttcatcaccgctggttaacttgtatctgttattaatctgtgattattgttctggtctatgttatgcgctataatctgtatctctcaagaaattgttcacaattatgctttcttagttatatttagaacatggtcaaaatacgttttcttgttttggcttgttaggttgctatcagtagttggtgaacaataacagcctttatatcttatcttgtcactgtttgtgaatgtgcttgagatta

SEQ ID NO: 16931 - DNA, 247 bp, Oryza sativa
  unsure (1)..(247): unsure at all n locations
tgccatgggaaagctgatgcacatgcctgtgttacatcatcaggtgcccttgcagattagttgtgaagaagcacgttgtgatatatatatatagatatatatatatgcgcttccctagatatatctacatatacgcatagagacgtatacttggactgaggaaacatagaaagcgctccctcagctgaggccgcttttagctgctcctcatgatatatcgncccgcagccaaaagaatgcgtgctac

SEQ ID NO: 16932 - DNA, 399 bp, Oryza sativa
  unsure (1)..(399): unsure at all n locations
ttgctgacaaccaccaggcgctaagttatatgttggcatcggtatcaaaggagattctgactcacgttgtcaatatagagacaaccgctgaagcctagagggcaatcacaacgatgttgtccttccagtctcgatcgcgtgctctgaacacgcatttcgcgttgtcgacaactcgcaagggtgacctcagcgttgcagagtatatccggaagatgaaatcattggcagatgagatggcatctgctcggaagccgcttgatgacgaagagatgatgtcttatattctcgctggactcgatgatgactatgagcctgttgtgtccaatctggttggaagggcagagccggctcctatcacacaaatctattctcacttcaagctttanagcagagctagat

SEQ ID NO: 16933 - DNA, 451 bp, Oryza sativa
  unsure (1)..(451): unsure at all n locations
tatcattactcttttntagtagaaaagtatgcgatttatttctcactaccatgcgactactggcccacatgtcagtccctgttcgtaatttcttagctctgcactaataatttagaagttgagcttgatgttcgtcttaccaatggagccattagcatggagtcctgcatgaaggagttggacgtcgtcgcggtggctccggccatcgtcgtcgccggcgccgtggacgccgtcggcaggaacgtgaagtccgagtactggtgctgctcgtccttgacccctccttgcacctggctctacggcgctatcgccgccgtcgccgtcgccgttgtaatccacctgaacaatgcgcccgtcgtcgtccgcgatgggaataactgatacaaacaccatggagctcaataatcagccacacatgccggggccatttggcgaaggaaatgggatgctc

SEQ ID NO: 16934 - DNA, 460 bp, Oryza sativa
  unsure (1)..(460): unsure at all n locations
cagctntaaagatgcatggtggggtagatgttatatctaaaaaagtccgctcatcgnttgatcatggcatatgtgctagtgacttagatacaagacagaacatatatggcgtcaaccgttatgcagaaaagccttcaagaagtttctggatgtttgtttgggatgcattccaggacatgacccttataattcttatggtatgtgcattgctatctgttgcagttggtttggcaacagaaggatggccaaagggcatgtatgatggcttgggtataatactcagcattttcttagttgctatggttactgctgttagtgattataagcagtcactccaatttaaggagctagacaatgaatagaaaaagatatttatccatgtaaccagagatgggcgtcgacaaaagatctctatatatgacttggtagttggtgatatagttcatctgtcaattggaga

SEQ ID NO: 16935 - DNA, 444 bp, Oryza sativa
tcgtcatcatcggctgcaaaataatcagcaacgctcgtttcttcgttgaactccggtgacaaaccaataaaccattgtgtggagtatacgcgaacaggacattatgctcggtgttttcgaccaccctagcgccgcggatgggcggcggctgatcagcacgttgcagcctatgcagcagttcggcgtcggctggctgccggcagtggccgtacgtgacggccatcaatgtcaagcaaaacacagctcgctgttgctcggacatgacgatggactgatcactggccatccgtgagcaattccgtggccaatcatagcggcgtcctccgtctttctacttgatcaccaagcgcgtgggcgtgggcaggatgagacgatgagtcctccatagtagacatgaaacgatctatataggagggggtggcgaagtggagtaggattaatccg

SEQ ID NO: 16936 - DNA, 463 bp, Oryza sativa
  unsure (1)..(463): unsure at all n locations
agctntgcagctntctctcggtcattgtgtgagtagaaatggatggtactgctgagtcaaaagttagaaatgcttatactagtcccattctccgaaatataaacgactagtctgttcataaattaaatataagttttctatagtaccaattttccaatccaactcctacatctgccccgttttatagctacttttacccattgttagtattaaaggtaaggtaaaaaaatatttgctactgtattgtataagtagtagttaagatgatcagtaagtaggtgaagaaataaaatgagatatttgttatgacaggtatgtagagaagtgtatatatttaagacaacatttgaaatgctacaagttgatatactaggttgtacctgtattatttcatgtatttgttgcttcattntaattatggtcaagaaaactaatgagctgtcaaatctcanatgtataaagg

SEQ ID NO: 16937 - DNA, 437 bp, Oryza sativa
  unsure (1)..(437): unsure at all n locations
acacataaatactcagcttctcggttctggnctctgcccgacgcaattgtgtctatctcgagaagattcgagctatcgagcggatgcgcccccctagcaaacttatggatgtgcaatgcgtcactggttgcatggccgccctaagtcgtttcatatcaaagctgggagagaaggcgctacccttgtttaagctcctcaagcgctcggggccgttcacttggacggaggaagctgaaaatgccctcgcccagttgaaggcgtatctcagctctcctccggttctagtcgccccggagccaaatgagtccctgctactttacttagcggcgaccccccaagtggttagtgcggcgttagttgtggagcgcgatgaggacaatcctcatcctgcgcacccctactccgtgccgactcggnccgggagcangcanggagga

SEQ ID NO: 16938 - DNA, 454 bp, Oryza sativa
  unsure (1)..(454): unsure at all n locations
agtcacctgaggcatgcaagcttctccagattctgaaaagtcttttacttaccaagctatatnctagaatcttaagcttcccctaaatagggccataataaaaatcagtgtgttaccgagagtatgaactgtgtgcttacatagcaggaatttggaaaaaaaaagcctagtttatccaccatttgttttggttgggaaacaatgaaccaagcctgaaaanttgataaattgtcccttttcaaaaggtcatttcaaaactaaatcgcgcatatatacttcagccaaaaataaaccgcgagcttagcgctaggtccgttgacgttgatctcgtgcccatgtggcccctacaccgatttccttgccgacatggcatgacctcagcaccaaatgctatgctcccaaccttagctccagccctattggcttggctttgaggtatgggagtttatatatc

SEQ ID NO: 16939 - DNA, 289 bp, Oryza sativa
  unsure (1)..(289): unsure at all n locations
aatgtgcatacacacatgcaaccaatcaatttctattggattaatccatgcaacatttaaaatgtgaattaatttttatcgcacacgaactgatggacgaccttgataggtgaaacataatttccacatgatgtacgcatatcttggtgttattggtcacgatgttatttacttacaggagatcaaattacgacggaaagagnattatttctataatcacctactatggcaccagataacggtgatttcttatgtaacatttactatagtgcacttcaagcatataatc

SEQ ID NO: 16940 - DNA, 467 bp, Oryza sativa
  unsure (1)..(467): unsure at all n locations
agcttaaggttngttctaagcacttatgctttttctttttatagagaccattcattacaactgcaagaaacttaagaaatgtggaacagcacatgaatgtagaactctccacacgagtgtaggttttgtggagctcttataccagtttttcctattagctctatccatttctgggtcattactttaatacttttcagttgttcacattatctattgtcttttgcatgtattagttcatggattctcaaagttcatttcatacaggatgtagcccttcccaagagcaaatatgaagaggatgttttcattaataaccatacaaccgtatggggctcatggtggaaagatcatcagtggggctacaaatgctgcaagcagactatccgaaatagctactgcactggcttagctggaattgaggctgctgaagcatcggctgattcgatgaaagcaaatatggcccgcac

SEQ ID NO: 16941 - DNA, 468 bp, Oryza sativa
agcttattttacccccttcaacgcatcactttgtctataatatacctccaacttcaaaaatcagcaatttaacatcctctaattatcaatggtggatacattacacccttggtggtttgtaggctggttttggtttagtagctcaccacgtgtaaaaaagtagtgggccctacatgtcaaggccacctctctacacgcacaaaacagcttgggctccagcgaaagggaggggaagaaaagagatgagatgcaccggcgatggcgaggggatccaacggctggaatcaccatttaatcgatggtccacaagatcctcaatagaccttcgttcattgggttccaatttctcagatgccgccctaacaaccatcctagtatccatctcataattcttgatcgcatagatcacccattctgaaatcctaatcacctttactaacggaaggagtatcactccataactataca

SEQ ID NO: 16942 - DNA, 450 bp, Oryza sativa
  unsure (1)..(450): unsure at all n locations
nggatattgactggcttcctattcgcacggaggagcggtattgtatgaggaaatcgaggcggatgcgggctccgatccaacgtcgacggcggcggcggcggacggccggactggaggccggagcgccggaggggagagcaaaacgcgaagaggcactcaaaagaggggctaaaatgcaaataatcaggatccttgtttgtttgcattctggcccctgctttggatcggatgtgtgggcctagtatcgaccgggccacgctaaccttgggtcgggccgctgagacagttagggagcgacagaaagttcattctacatccctagacattacgctgagtttgataaacgtccttcaaccacaaaacagcgtacagaggattcaataagacacgtaggtgccatgtcaactcataataccaccattaatccgagggactcagttcacactagta

SEQ ID NO: 16943 - DNA, 466 bp, Oryza sativa
gcttcataatatcttaaacttctatggtgttgtttatatatgcattaatagttacatctctatttcaggtgaactatttgttcaagtttaagttcaaaattacagctaatatctccaatgaggaacaaaacataatatccacactaatttctttaatcaaggattaaatttctgggatgttaaagtcccttaaaaacttgatgtgcataaaaggcaacatcaagttgcggataatgaaatggaaaaagttacccccctacactattctggaagtacgaattacccgctcaattaaaaaaccaaatattcttcaccctcaatttttcatacgggacagatttaccctgatagattttggagcggttttgtttctatgtgacagtccagttagtataaaaaattataaaaaatataggacccacatatggtaaccaagagaagaggccgaacgaataagtgggcctat

SEQ ID NO: 16944 - DNA, 454 bp, Oryza sativa
  unsure (1)..(454): unsure at all n locations
tggagaagatgtcttaggtggagtcctggcttataccttagtttatcgcctgtgaagatggagccgtacgcccgctagtccgctgctgtttatttttgattgtcaagccttaaatgcctttgtaataatgtaaatattatcgatataataaagatgggtcttttatatcatgttgctgtggtgtaccccggcttttcctgggacggngattaatacactagcgttctggaaaaggcaattttcccggtcgcgacatcctgcaagcaatcgaagaacaagcaagaacaagtaggacaagcactgaaattgcactatcaaacacaatatggtggggttccgattacaagcagacgggcggtttatccaacacgcgcgctgcgagctggtagcaagaagctatctctatcatcaaaacccgcctattcttggcggcgactagaggtataaaaagagg

SEQ ID NO: 16945 - DNA, 466 bp, Oryza sativa
  unsure (1)..(466): unsure at all n locations
agctngacagagagctgcacagggctgcctatgttcttcctttccccatctgctccctctttnttcatgagcatgatcccttgtaatggactagtcaactcaatcaggactagtgcacaagtcaatacagggatgactcaacttgactttatgacttatacaactatagtttacaaacaaccatgtatttattccttctttttcatcttgcccaccccccccctccccccctctgttctgacagcaagatcactgagtgcctcctgcagtaggcagagccaacaatcttcctgagggggccatcttggcaactgccagtatgaacatgtgttaggtaaactgtggtgccatggatgccttccaacacctttctgccggttgcagtcgcacctcaccatcgtcctcccatagcccattgacaggctgcaattgttggagcaactccatccncattgcaagcaaataa

SEQ ID NO: 16946 - DNA, 454 bp, Oryza sativa
tgaagaaatatctcctctacattgtgtcttatcggcatgtctttccgattgggagttggcccattccaaattgcctggccgagcttatcggatggtagaactcataagaaacctgaatatttctcccttgatggatactaacaggaagaatgcacgggctaatggtggcagcgaagatttctctagacttttgatatttctcatggttgatgtcttcaaatctgaactctgccagcagatctaaatccgtcgagtctgcatatggaaaccaaactcgggcattcttctgaaatccatcatagaaactgaagaaccagtccttcagaaactcagccgataactttgctccagcattggctggtgtggatgcatactccccataggacatacacctgcagtgggtacgctcttctccatcattgtctgtgatcggctctaatctatggaattcaac

SEQ ID NO: 16947 - DNA, 448 bp, Oryza sativa
agcttcagcaatggcggataccaattcgtctttttatacagaggggggaccgtccgttatggaccaccggaatataatatgagaggaatgctggatgttctcatttggaagatgaggctctgctcctgcttggtttggaatctggattgtcactcttgtccgtgtcggagttgttgtccctttgggaatccatttcggtgctccctccacggttgtgcttacatcttctgtgctgcttccatacaatttatctgatcagtatggcatgaatcatgtgccacctaatatctggagtacaatgctacgaacagagttaattcatgactgccacataatcacgtgaaatgtttcatatggaagtaaagaaagaactaaagctaaacatgcattaagacaacaatgataaagtccttatttcctgtaatacagtaatacataccccacgagg

SEQ ID NO: 16948 - DNA, 378 bp, Oryza sativa
tcgaggagataacgccactccgcagcgctcgtctgctcttaatctctctctgcatctctcgatctctccgctcgtctcctctcgttctctccgatctcttctcttatcttgtatgtgtcctctcccagccgcggacgcggcggcggcggccgcgcactcccctccaccagatccggggtggggcggcccaacggcggcggaggggccgcatgcagcggccgaggggaggggggaagccgtggccggatgagaggcactggcagcttagtgaggacaccctcccgtctcgaatctctacgtgcctgcggccggcagaggcagcccagtggccgaatggatgggggatgcaaccacgggatgagaggcggcagtgccctc

SEQ ID NO: 16949 - DNA, 446 bp, Oryza sativa
agcttccatagagtccgacggatgcttcttcttatatcgctctacacagattagcagacatgtctaactggcctgacatgttttctcttttatggattgacggaatattaagttatcttgaagctgtatgaaacattttggcattacctgagatcaacatgtcaaacgaattgtacactcaagtagttaatgctcacttgagagctattgcaaaatgcatttcgcttcaaggaaagaatgcaactctgcctacccatgagattggatcacgtacaaagacactatatttgcagaatagatctggtcatgttgttgctaaaggtatcatcaataggcagaacagattacattcactgaaatcaagacttatactatcactgagaaaatatgtcaatgtttcatcaaacatgcatctaaatacagctgtgctagtcattgaaagagca

SEQ ID NO: 16950 - DNA, 432 bp, Oryza sativa
tagcctggacgtctacgaaagcactgtctggaacattattttcatgaaaattacttatacgggtgtaatggtagtccatctagcttgcaccggaaagagaatgatataacacgaaatattaaggggctcaatagaggagcttgattgtgctagcaactactacttacttctagaccttcgttctgcacatgaatgcacgagttgaacgccgtgctgcagcaaaagtatctacgtacttatgatgatctgtcaagcgatttatgaattacttccagattctgaagatatctaccttgtttgtagaaccataattcattgaggataaaatgtatctacacctttataatcatgagatggatcagttggaagcatgcgttagtccagtcaatatagcattacatcctatactaaaccaagttaatgcactgagtg

SEQ ID NO: 16951 - DNA, 462 bp, Oryza sativa
  unsure (1)..(462): unsure at all n locations
agctagtatcaaacattgcaaatagttgcttttctttataaatacaacgaaaacatgcacaacatgttcacacatcacactcactcacacaccgcttgacctccgcagcacgggaaatgtgctaccctgtgtaccctagctagccatctgtcctatttaccaatttcatcccacaaaatctagattgtttgagctacggttaataagaaataaaacaaataaataaaataatcaaaatagattgaatatacttttatacttctatttatattactagcacgtagtccaaaaaacaaggttgaaaaatagagaacaatttaaagccctaaaatcaactctaaaattaaattgtaaaaattcaaattntgattgtggcttgtaaaccagcgagaaaatttatcatgaggcggtagtaagtccaatggtaatatgttactagcctagttgttagcacaatccaat

SEQ ID NO: 16952 - DNA, 470 bp, Oryza sativa
  unsure (1)..(470): unsure at all n locations
tacgcgacctatnaaactaagcttcatgggctctgctgtacattcttggactattttaattattgtgagtactctcacatacataattacaatcgcacatgagcatttcaccattagtgtccccacatttcagacttttccctactccaagcctggaaaatgtgggttgattctgtgaatgccattattctgacatgattggtaaacaaactaagtagatgcatctatgctctagaaaggcatagcagatcaaacaggcatgagataaagcagataattttgttttctttttctgggaattggagaaatgaatttcatgtatcagcataaagatgttgaaactgccacagcatttcatttttcgaaacaagtcctctagaaacaaacagttcagcattaactgatacctagttaaagaagaatgcatggcatcacgatgtttgaaggaccaatggcgactataaaacata

SEQ ID NO: 16953 - DNA, 460 bp, Oryza sativa
  unsure (1)..(460): unsure at all n locations
agctcgtggaggcagcacatatgatatttttctatcgcacttgntcttntttatttttttctgtttgagcggactgagaatcgataacttttttttttgacatgtgagaatcgatagcttcggtcattacgcggcgacagcgctgatttcatcggctaattacgttcctaatcgagtggatagatggggccctaacaccgctgtcccgtcctcagggctgggccgttcatataagtttaagttgaactccctccatcgcaacaaaaaccaaaagagggctgctaccccataaaattccgttgctcctagtagtcacgggataactaaaatcccgagagatttaatacgcatcgtcaatttcgtggggaggcccacgctatatatcctgcgattccatcttatccaatcctccctggtaccttgngtaagggaacgaggtggtacctagtacactggtatc

SEQ ID NO: 16954 - DNA, 453 bp, Oryza sativa
  unsure (1)..(453): unsure at all n locations
tgaaccgtgcagctaacaatgtagcagctgcttattattataggtcatggngaattgatgatccgtgaagcccacatgcacagagacgaggcggtatctcttgcaatttatgttggatcggtgatctggtcctcttcactgagccgtttgctggcattggagcggtccccagaagacagaggtccagccagcgaaaccttgcaaacaacgcaatacctcctcttcaggttccggccaaatcagtgcggtctgtctgtgggcacacgggggggttcatcgtaccaagccaccgtgcagtggccgcaaacatgaaccaaaatgtaaacaaaggggaaggtaaaaagggggagagatcttccgcagctaggctgtttgcaagaaccaaacaatcagcacggcatgtgccacggtgtaagtttttgtagtggtgcgtttaagaccagagcgcccaca

SEQ ID NO: 16955 - DNA, 448 bp, Oryza sativa
gctttcttaattaggtgaggctggttgtttgctatatgttaatttgagagtggattgcgagatactttaaatttcgacgagtccacaaaaatgggtatttgtattggtcgaaattaaaaatattctgtttggatagaatcacaatttggaatcaaatatcaaaattgagttcaaattaatacggtgcgtcctactactacttatcgtactttggacgctaagatgtgttcttttgtgctctttggtgatagattttgacatggatctatgaatatggccagcagcactaaattaaaaggtgaggagaggctggataagcccaaagggtgcccccacgtctctccgtactacaatgccgccgatcctattatcatcaatggcaaagggattgatccctttgagctgagtgaaggtatggataaaagaagagtggcttcaattcttcaaa

SEQ ID NO: 16956 - DNA, 384 bp, Oryza sativa
tcagccaacacatcgaaacaagaagtaatgatgggtttgttttcttttacacgactcacccaacaagtcaaaagtgagagcacttaaatgctttcttgggaaaggctgattcacttcaaaaagctgcaaaagggttggctgttggtggaggcagcactaaatgcatttgggggtggctgatgtggtgatgaaggtgctgctggttgcggtggacgaaatttggtggggttggaagaggatttcgcggtgaatatcgtggcgattgtggcaccgggatgaatataaatgaagcgatggtggaaatgtttgctgtgaccatatcgcgagcagaactcgaaactctgaagactaaactactagaaccagcgactcaaccaatcgatg

SEQ ID NO: 16957 - DNA, 458 bp, Oryza sativa
  unsure (1)..(458): unsure at all n locations
agctntattgtagatcatggatcggtctttgttgtcaacacgaaaagagctcatccaacgttcttgaaggaagcagccaaatttgttgagctcacaaaggcacatgctgcgagggagaatttgaggagcattttttgcccatgtaaagtttgtaagaacgagatcttgctgcaagatccgaatgaagtattgtcgcacattgtagaacgaggatttaagaagggatacgagatatggacttttcatggggaagccggtggtcgtaacgaagagttagatgatttatgttttgatgatgcagaaaattntataatcgaagacatgtcttatggaaacatcccggaatacggtggctcangtatagagaatgaaggtattgattntgaactggaagatatgtngcggcacgttgaaccagaggtcctaactggtacaagacgcgggttggacaattggga

SEQ ID NO: 16958 - DNA, 439 bp, Oryza sativa
  unsure (1)..(439): unsure at all n locations
tgactntgttntcattaatgaagagccgattagcttctattgttgcttccagattagctctctcgcgcatgtctgctattctttgttgcgccctttccagcttgaaacgatgttgctctagatatacagccagggaaatgatgtcggcttcatcttctgggatctggtggtggatctcttcaaacctggccctgattgacccgcagccagtaaccaaggaatccaaggaactccctagccgttgagcaatatccatgagtttggtcttgagatcatcatcaagagggaccaaggctccactggtggtttcctcttcttcttcatctaggaactgtttaacgtcaaaggaaaacatattggccaagacctgtagaaaagataaatcgggattatgggcaaagaacatatcgcagccgatatgagaagatttaatagtact

SEQ ID NO: 16959 - DNA, 453 bp, Oryza sativa
  unsure (1)..(453): unsure at all n locations
agcttaattataacataagaagatccttctgtattgattccatgaagtcttctttcagctctttgagttgcgatgtttctatcgatggccaacatgtgacagctcttcatttcttagttcatactctaagtagagaggtccctttgcatcctacaaatggaagtcctgtatttgacaggaacgcaacagttgcatttcagttacagagagaaatttttatttacccaactgttcaagtgtataatttcttgcagacagacatacatgtgattctgaccgactgtgaaccaggtaatgtcttatttatgaacatgtaattgtagagaactatattctcttattgatggaagttaagaaagcgatacacttatggnggtactttctactacaatgcagaanataccagagatgataactntgatattattggcaagcaggcaacaatcacaagtg

SEQ ID NO: 16960 - DNA, 288 bp, Oryza sativa
acccatacacgatgcaaaatggagtctataagtgtcaatcttccaaacaagcaaagcatattaacggctctgcgattctgtttactctccaacggtttcaacctgtcgatgagcccagtatgttcgtaccggagcatcacgtcgccggcagacgcctgcgtcgccgactagatctcgcgcggtcatccttccgctgccgcttgatgtcacggcgaagcggcggcgatctatactgcgaaggattctgcgccgttgcaggtcctacattctcagggagggcgcgtgctc

SEQ ID NO: 16961 - DNA, 457 bp, Oryza sativa
agcttgatgcatggccgatctttatcttattttgttctaagttgacatacatgcatggtgatgggggtccatttttctttcttcctccccaaccgagtccttcccttcatccttcgcttcacaatgcccctgcaaaaccaatgagctacacaccacatgcatgcctgtgtaccacgtacgtacacgccatcggactcgaagccagcctaaaaagaagcttcccatgctctactagtctagtactgcactgacgcatgcagctctctaaccacacatcgatcaagcgatgactactagtaacagtgatcaatggagagaactggaagatcagaattcagaaagagatcgatcatgcatcatgatccttttgaggaatcatgtgagctcggttgttgtgttgagcaccaaagccgatcaacaatcacatgaaagacagcaaaagggagaagatagaaca

SEQ ID NO: 16962 - DNA, 451 bp, Oryza sativa
gacacttaaaactcagcttcggggttcgagagtgaattgagggttttttatcattgacccgcccgcttacactgagggtaaggcataactgtacttgacaactggattgtcatctggttaaatttgagattaaacaaaaaaggtgaagtacttttaccgatggatcaactggaattcccataagaaattgctaatgggcatcttagtactaatgccttctttagagatttccacttgaatacttgataggatggccaaaactttgttgactttaatctgctgtatctctttagtttagacaagtctcccagaatcaatgctgacggatcagctttctcccctatgatccaactgacaaactagcttctttgggtacatgtcagcttgttgcagaaaccatttcagaaagttattactggttataccgatacgcttagaacttgaaactata

SEQ ID NO: 16963 - DNA, 467 bp, Oryza sativa
  unsure (1)..(467): unsure at all n locations
agcttcanaatntctccaataaagaggggttgttatgttttaatttcttgcgaaattntnttagtgataatatacaaatcggaggtgtctaaaaggttagtaacttcattcttcaatgttttttgttgttataatacttttggagctatgtttcacacattttttttttgtctctaaaacgttgttgtaagttgatgagagagaaaatttttgtggggaagatgaatatatagaaattttgtttgtttacttaaaaagttttattctcatagtttaaaatataatgaaaattaatcttaaaaatagataataaaataaattgaaaattaaaagaagtacaacattaatattagtttagaacttcaaaaataatataatacaacattaatattagtttagaacttcaaaaataatataaaagaaattgtttgtggattactttataattattaattcgatgagtaatg

SEQ ID NO: 16964 - DNA, 302 bp, Oryza sativa
gtgctgatcaggctagaattgacatagtagatagcatcccagacagttgtgaatacatcctagcattcgacagcttagctgagtcagcgtggcggacaccgcacaaacggactattggaggaacagaccctatcgacgtggtcgtctcctagtggacacggcacccattaaaatactaatgatctgcagaaggagagaaagagatcttttgagatatgggaaatacccctagacacagatgtcagctctcccagatgggctctctctcacccacaagtgtgtctctatgaggcaaccatggc

SEQ ID NO: 16965 - DNA, 464 bp, Oryza sativa
  unsure (1)..(464): unsure at all n locations
agcttggggctggtagtaaaacatcgattttttttttgagatagagttcgatcctcaactatttctcgcgatatcttcttacgaagttttgttagggcatctataacagcctctggtttaggtgggcaacccggcaagtagacgtccacaggaattaacttatcaactccccgaacagtactataggaatccgtactgaacattccaccagtaatagtacaagctcccatagcaatgacgtattttggttcaggcattngctcatataatctcactaaagagggagccattttcattgttactgtaccggctgttaaaattaggtccgcttgcctaggacttgatcttggtaccaatccataacgatcaaagtcgaatcgtgagcctattaatgaagcaaattcaatgaaacaacaactggtaccatatagaaggtgccataaactagagagtcttgaccaatt

SEQ ID NO: 16966 - DNA, 456 bp, Oryza sativa
  unsure (1)..(456): unsure at all n locations
ntatgttcggcgcagtactaatactggaacttatgagtatgtatttctctatcaatcaccatctactttagacatatcttgtgaaactcttttcaaatccaaaagtccagtatcttcctacaaattagtgaattaggaggagctctttgtgccgaaaaagaaagagcagggcaatatttcaaacttgcattcgaactgcgaaatatttatacaaaggaggagagatcaagataatgcagcagggttggatatctaattggctagtcaaacatgaggtggttcatagatctttgggcttctatcatcgaggaatagagactttgcagataacagcacaggattgggattccattgctgtcattctatatgtatatgggtacaattatttacgttcccaatgtgcttatgacgtngcagccggtggatctttagctaacgtgtatcatcttacgagaa

SEQ ID NO: 16967 - DNA, 457 bp, Oryza sativa
tatctacatacgtaggctcaagcacgatatagagtatagatttgtattgagctgagtcgagcttgagttgatctttgaggacagacacgctcgagcttggtttaatcaaagaccgagcatattcaacttttataaaaaccaacttatacaagcatcaaacatgttacaatattttcatactaaaactcatgatactgcttaaaaatgttacaaaactctcaaacaaaagaaaatctaagagccactttagatctttatactatagttctctagtaggaaaaaacctttgtattatgagagaaggggcctgttgatagagctggatgaagaggcgacattgaggtacgaggtagattaagagttatgactaaattctaagctagcctttttaacaatgccatttcttattaataaatatttgctatgcgcaatattacttgcaacttaccgctatgaa

SEQ ID NO: 16968 - DNA, 465 bp, Oryza sativa
  unsure (1)..(465): unsure at all n locations
agcttcagactgacttatttgcacatgatttattattttccaattaagagtacatatatttcatcacacactggagctagtctaggatgcatttctcagagcggtagttatgcttgtcgtactgactgctgagccacttcatgatcaaattccacggttactgttattttctgtattatataatctaagatcgttagccatttattattctgcccctctgcagtatgtatctttcccatgcaatgtactttataatggaacatttataggtcattgtgccccatggtgaagctgttactgtagagagctttctggcttggagagatcgttttgaagctgaattggcgctacagcgtgccaagtaagattctttatttagctttcccttgatgtcatcatggagtcatcttcacaaatggcaggctntcttatagcatntgatcttgaaatttcaagtgccaaaac

SEQ ID NO: 16969 - DNA, 461 bp, Oryza sativa
  unsure (1)..(461): unsure at all n locations
aaactaagcttggctcaaaaaggtgtgacgaatatgctactaccaattcttttctatctatgggtctatgcaatgggacaaggttattggtcacttctcttggtaataggatggtagagagtgtaattttaactgggacaaatattggcgagacaacattcataccacgaattgcacttaccaccacaagtcctaagtggccttttacgctttatagaagacagctccctgttcgtgtttggtatgcaatgacgattaacaagagccaaggacaaaccctttcacgagtcagcgtgtacttgaaaaaacctgtgttcacacatgggcaactatatgttgctgtttctagatcaacatcaagagaacgtcttaggattctcatataggatgaggacgaggcatgtngtaccaaaaccaacaaatgtgtttaccaagaagtactgcnagcagtcacatctatg

SEQ ID NO: 16970 - DNA, 446 bp, Oryza sativa
agcttatatattgtgtgatcattggctgtttcttcttttaataccattttaatgtttgtaagtgcagatgatatgcagccttgatggtaaggattgtggtgtttttaagtacagtacatgttgtcagtaaacactattcaaaagattgttgttgtcattatgatttgactcgaatcttgtaccattagatcacttcttctacttttctagtgagccagcggtagtgctacataagggtcggagatcatgggcttagtaggaagcagagggtgtgagtgaccctatcatgggaggtggaggtggcagcatggctaggaaacaatagtgccataggaatcgtggggtcatagctaggatgttagtaagagatgtaagtgactgctgtgaagagattcaacatgttatgacctaaagaaaggatagtggattctagtagcggttgcata

SEQ ID NO: 16971 - DNA, 458 bp, Oryza sativa
cttggaggagatgtcttaggtagagtcctggcttataccttattttatcgcctgcgaagatggagccataggcccgctagtccgctgctgtttatttgttattgtcaggcctgaagtgcatttgtaataaggtaaatattatcgatataataaagatgcgtcttttatatcatgtttgtgtggtgtaccccggctcttcctgggacggggattaatacactagcgttcgggaaaatgcaaattttctcggttgcgacaaacggctagaaaactagccgttgtagcgctgtcagagggccccatcggcctggccggtcagaccgagccgaccggcctcggctcgatctgaccgaataccgctccgtcggctctgtatcaaccacctcgagcaacaccatcccggcctccatggggccggtttgaccgtgcatgtgccgtcggtcagactggccttatgc

SEQ ID NO: 16972 - DNA, 376 bp, Oryza sativa
  unsure (1)..(376): unsure at all n locations
agaggacaaaangcaccaccanccacaacacccacaagacgaaaaacagacagnggctcgaaataaatacacacaaaatgaaaaacccgcaaaaaaataatgtaggacatggacttatggttcgcctttaactgttggttctgttgagcagttgcagctcgaagcaagccccagcttgaagctcaggattcagcaacgtcaccaccttccaaatgtatcagatcaaacaatgatttctgaatagataaaaaaatcaatatgctaggtcgccggtctccaaaaataaaaaaatatctgctcggtcaggcctgtcctgcacggcgaaaatttggatcgaagcatgcgactgaagatatggcagctaacacatgaacct

SEQ ID NO: 16973 - DNA, 456 bp, Oryza sativa
aaaactcagcttcatgggaccacgactctcggggacgtccatttatatttatacctaacacatcatctagccaatgttagttaatcaatcacatttatgacagagaaggctgcagttgcacatcaccagaatgcagtcacacaaactacatgcacagaccaagaaattctgcgtaccagtcctggtagcatctgatgcacatattatgggtgcagttgggcaacaccactttgctgttcatctccatgcaaatcccgcactcctcttctctctcggcatcaatttcggataagatggttctttcatcctcatctctccttctgtacctctccatgcacacgggcctctgcgttttgtccttcgtatcagtaatctccctttgcagttgcagcaaagaacgacatatcacagctggtccagccaaccatataacaattccaatcaataaaacaatgc

SEQ ID NO: 16974 - DNA, 369 bp, Oryza sativa
atcgcccattcttagctaacaagtgcctgctttgcttaaccacacactgcagaaggcaggacgttaatacttgtcacacctgaagaactgatgctgccactcatcctgattctctgaaccacccaccaacgacctaacatgccacagcggcatatgtgttctggtatgcacgactattgcgaagttcgaacatagtacctagatgccctgacatagcatatatcacttgatgaacgccttacctatgaatcagcagctcttctatatgccacaccagcatacgtcgactctggctgtgctggtccagaacaccatgcatgttagacagaagaggctcagaggtagatgccagttcatcatgatcgacac

SEQ ID NO: 16975 - DNA, 449 bp, Oryza sativa
taataaattcgtcttgcggtttcagagcggaatctgttatttattttgttattaaactgcgtttaatactttaaatgtgtttccgcatatccgatataaccactaaacctaaatttttccctaactaaacaattcctaattaaatttcctagctttgtcttcaattcctgaaccagttctacctgtgcgagtgatacatgcgtccatgacaactttcataaaagactctaattactctaagaaagagactaatcaaagaaaacaaacacaggcagcagcaaagcttaggacacattgagaggaggcagccatagaagaaagactccatggccggccgaccaagctcttttctccagtcgcatccatgtggagttcacaatgtttattgcaagactatgtgcgatccgtcttggctttctcaaccagccacatatttctttgtctttcct

SEQ ID NO: 16976 - DNA, 462 bp, Oryza sativa
agcttaaaggtctgcatagtgggatttcttctctgagagatgagctacgtagcatggaggctgctctggaggacttatcacagttggaggaacccagccagcaagtgaaggagtggatgcatcaattgcgggagctttcttacgacattgaggactgcatcgatgtcttcgtgcaacaccttggtcaggatgatgctcatgatgggcttattagcaagattattggttggatcaggacgatgaaagtttgccatcatactgcagggcagattggtaagctgaaggagcatgctgtggaaattagtgaccggcgtaagaggctcaaattggacattgtcccctccagttctgcctatgtgcccattgatcctaggttgtcggcattctttgaggaggcaggcagaatcatacgtattgatgtcccaagagatgagctcatagagtgggtcaccagtgacacca

SEQ ID NO: 16977 - DNA, 476 bp, Oryza sativa
  unsure (1)..(476): unsure at all n locations
acgcgacacaagaaactcagcttcatatactgggtgtaacctagcaatagttatttatctattatatgangatgcatggccaacatcggagatatgaatgtgccctaatcagcgatcgctttgagaaactggccttcaatttgatccgcgcaattatcacgtggggacaagaaaattcggtagggagccacctgtacaaagtttggtgagggccacgtctactgctagctcaaagagcgtcgtcaacgcacaattatgtgaagattgcagcgcctacaagttataccatccaaaaaggaacaaatttggtatctgctccagtttgtaaaatttctacctctgttattggctagttggctgaaacatatggtgtaaatgttatagcactacgtatatagttctaaaaactgtcgagttaagtggtgccatcccacttatacaaattcaggatttctataattattacgccacatttg

SEQ ID NO: 16978 - DNA, 421 bp, Oryza sativa
ttccgcaaatcgcactgacttaacaactgtgttgcctcaagctgttgaccggcatacatcaggatttgttcgttcataagaattccttcctcctgttcaatctccgccttgatgtcagcaatactattcgatttcctcatattgagcttggtggtctttccaacagagggaatccttacagatatttgaatagcatcagtgacatataggtcaacagaagagttggtcatgatgttataatcagcaagcttatcctcattcttcaagtgcattccagcaaagaacatctcttgcttgctcttgtcaatcccctcaatagcactgagtttggatttgatctgatcgactgtatcagtactattcacattgagggtgaacgtcttcatcatcttcacatagatctgcacaaatattggattta

SEQ ID NO: 16979 - DNA, 236 bp, Oryza sativa
ctggggttgtacgctatcacttttcttttttctcacagaaactgtgtcttcaagctatttgaaaaacatatcctatttgggactacctttgcgaaagcataagggagaaatgactcacacaagataatattgacatgcaaaccaactagttaagggcagactcaatgaccatgaatggccaaatacaattgggatggcataagaagtccaccaaatagcggtgggcagcatggtcg

SEQ ID NO: 16980 - DNA, 462 bp, Oryza sativa
  unsure (1)..(462): unsure at all n locations
ttaagcgacgcggctgcagcttcatatcaaaaaaacatttttttttattgtacgagctgnttttacacatccggttccgaactttccgatcggagaagttaatgggtcaagagagaggaagagagggaggctgggccaatatcggtgggccgtatttaggccgggccattttatctgggcagcctgtgctggcgcgggtcaacgtggacccacgcatccgaggtggcaaggggcgggtcctttgggccgacgtggcaccaccacatgggtgtggaccgggtcttttgatggtgacagcggcttctggagggaactccggctcggacgtctgatgtttggaaaaaaattggacactgacgtcagcatgacgtcaatgtccgatttacgtgcaaaaactactttaaactgactttcctcttaaattacttatccaaatcatgattcgantgcaccattaaattc

SEQ ID NO: 16981 - DNA, 450 bp, Oryza sativa
  unsure (1)..(450): unsure at all n locations
gggacttttattcatgcactaactgccgattgatttttattgtttcctcaatatccttgcactcctgatgatcggctaatctttgcttggctttctccagcttgaattggtgttgctcgagatagacagctagagtaacaacgtcggctagctcatccggaatttgagattggatctcatgtagccgagtcctgattgacccacaatcgaccactagattgtctagtgatgatgcctctagccgatgagagatgtcttgaagttttttcttcacatcatcagaaagaggggccaaagctttgttagtggtgtctttttctatttcatcaaagtaatctttgatatcaaaagataacagatcggctagggcctgcaagacagcaatntgaagacagttagatatcacatggatatagccgatctaagaccttgtgttaaagaaagacttac

SEQ ID NO: 16982 - DNA, 451 bp, Oryza sativa
  unsure (1)..(451): unsure at all n locations
agcttggcattggtgtggccttgatttttatgcccttcctaaagagcttgagtgcttttcatttgtgtagattcagagtatggaaaaccaatcaagaaccaaagaagaaaacaaatcagtactagtttttattactgttgtttccaaaagtagctatttcttgtcaaatccacttctccaccaaatacaatttatagttctcctaaatagatagcaacaatctattcaaaaaaaaaaagatagcaacaggttaagatagctatgtttattttcctattctctgatcatgttagttggaatgcttcatgattggttctttggattntgtgttgataatcgatcccgagtattattctaggttacgttatactgcatgtacttgtatttggttatcttgttaggattctttgtgatatgtgggctattnttagtaccatggatgtgacatatt

SEQ ID NO: 16983 - DNA, 451 bp, Oryza sativa
tgcaatagaaatagagaagcaaacaacatccaactatatttgttatttagcaatatcagccgcttctgcccgttgtttcagcgcttccattttccggcaatcttccttaacattatcgtagcgactccaagcagcatatattatgtagcccaccagcatacatataacaaagacccctgatggtgtagtaattgcagaccatgaaacatgaagcttgtttctgtatctgctcagatttatggccaatggatgttaaaaaaaccgatcgttctataatataaaatgggaaaaccaacgatcaattcacacaaatttacctgcaaaccatctgatgctttctcaatggatcaccaaaatccaacgtataggtgtgtgatggtgagggaataccaagaggaacctcagatccatacatcacaagagggtctgagtggtttgtgacatcataaac

SEQ ID NO: 16984 - DNA, 465 bp, Oryza sativa
  unsure (1)..(465): unsure at all n locations
agcttgaatagcatcacatactcgccatcttgttcntttatcggcgcgccgcatggcatcgcagcgtctccttcttcttcggcatcaaggtccactcggtggctcactgctagcacagatggcgggcggggagtggatctttcaattcttcctcagcgactagcccgacggtgttgctagctgacacaaccatttcctgaatggcagatatcggcgtacggtctacctgtcctcctccggtacggattcccttctcttatctctcatctagcataaatcgaagataatgttctgaatttaggctaaatttatcacatgttcgtttgggaagttcgttcaaagattcatatagaacccagcacatttctcgaatattggtgcctgcagagttctctctctatctctctttcaatgttgccttctgatgattctcactctgcgccaattcctcttatggaaagagag

SEQ ID NO: 16985 - DNA, 440 bp, Oryza sativa
  unsure (1)..(440): unsure at all n locations
gaccctgaaactaagcttcacgagtgcatggccaagtgcagccacaacagctcatgcangtcctacgnatatgcttatggcaacttgaccaaagccgacaccatgtccgatcagtcaaggtgcttgctctggactgaggatcttgctgacatggcgagggcaagccttggtgacaacctatacctgcggatagccgactctcctggtatgctcaccatttcttgacctgcagagacaacaaaatcttatatagtctgcacatcacattaaaagcaacatccatgcatacttatggtttagaaattctcataattatgtatacttctcttgataggacacacttctgaagataatactaagaacagatatctagtggtggctttagtcacaattatgacatgcctgcagatgctcacatgcatataccttgtcaagaaatg

SEQ ID NO: 16986 - DNA, 478 bp, Oryza sativa
  unsure (1)..(478): unsure at all n locations
gtcacctgcggcatgcaagccttggccttctatgaattaagtagacttcnattctttctgttggacgtaagctgnctgttcaattctggattgtcgtggctcgagaatcttgtagataatggatagaaattcggcatctgtagactgtagtcactgttctaggttcctattaagatcattgtttgttagtattgttactacatganaatcggtgtgatcgaggctatatatctttcatcttctgaatctttagggacagcattactggtgtgatgtgagtgcctgagtgagtgagagtgagagtgtgtcctatttgcggactgaacacataaagaatttgcaaaagttaacaatctgtttctccatattgcatcacgatatcacatcactaattcactatttgttggtggtttgtactacgcatttgcaaacaccacgtagctagctagatcaagctagatataacactcaatctgag

SEQ ID NO: 16987 - DNA, 455 bp, Oryza sativa
  unsure (1)..(455): unsure at all n locations
ctaagctggatctgaatttagacaacgtgtatagaaggcctatgctgtcttgccgtctccgcgcccatgtgatgtgatcattcgcgngcaacgcaactttcagttgttatatgggcgcattcaaagttccataacaatttatgcaatagcatataaaagtatatccggagaaatcttatggcaagatgactaagaaagttatcacgccggttcagtgtcaggttattatttttttcgttttatattaagtccaactcttataagcctaactattggtgtataaaaaacatagtactatcttcagcacaaaacatatatattatcaaagtatattcaatattagatttaactaaactaatttagtgtgctagatgctattaaatgcgtttatgaacttgatcaaatataaaatgtcctcataaatccaagccacttattgctatatgatatagagc

SEQ ID NO: 16988 - DNA, 433 bp, Oryza sativa
  unsure (1)..(433): unsure at all n locations
ccgcacacctctcttttgggatcagacaggcgaacgncaactggggggaacagaagnattagcggcagcacaacacaaagtcagaaccatcacggaaagggtgaggactgctcagtctcgacagaagagacacgcggacaaccgccgaagggagctcagcttcgagacaggagattacgccgaacttcgtggcactccgctccggggagcacaccgctctcagacgaaagggcaaggggcaccacgcttcgtgggaccacaccaaatcttggaacgaaggggagaagctgcttaccagctagaacctccatccaatatgaccggcatccacgacgtggaccatgtggcccaatcaaagaagcgccaacgggacctgaagaacaggccgattcggaacacatcgacatccaggacgacctaacacacgcggaga

SEQ ID NO: 16989 - DNA, 269 bp, Oryza sativa
  unsure (1)..(269): unsure at all n locations
gaaactaagcttccacaagctgcgcagccacgcgactcttcctgacgtgcgtcngtcaccacttcgagctgctcgtcgaggacgtcgcccacatcgagtttgtccatgttcccttccctactgcaatacactgtcgtcatgtacaaccacgctacgtacctcgtcgccactgccgccggctgtctcgatgacgaaaggtatcatgcctaattctcacatgtaccaagtatggtacctaggtatcaggtatcatgggtactaggtatcag

SEQ ID NO: 16990 - DNA, 458 bp, Oryza sativa
  unsure (1)..(458): unsure at all n locations
gcttctgtctcatatcttcttctgacctcgtagtacttttcctcctgcaaaccacttaaagcaaaagtacagagtcagaaatatgatcatgtactagtaataatgtaagggggtgtttaaattcagggggtgctgtaaagttttggcgtgtcacatcagatattatataaggtgccacatgggtgttcgggcactaataaaaaaactaattacagaatnccgcagtaaactgcgagacgaattactgtagcaccacattatcaaatcatggngcaattatgcttaaaatattcgtctcgcaattcagtcacaatctgtgcaattagttatttttagcctatatttaattcttcatgtaggtgttcaaacgttcgatgtgatatggtgaaataatctgacgtgggatctaaacaggcctcacttgatcatttgaagcttgtcangcgactttatctcta

SEQ ID NO: 16991 - DNA, 402 bp, Oryza sativa
catggatctgtcgacattaaagtttgtgcagaactacccccatgatcataccattcattaacatccgctacaggtagggtattcctagagatcaatcatgttcagataccaatacgtgctatgaccattggaccatacatgcttcaaatgatatcatgatatgatcagactaaggtggaagataaagtgcatagagtttattctctatacctgttattatcattaggggtagtatatctctctcgctatatgtaataaatacgcacaaccatcgcgtggctactctttaagaataaggtcatccgatattacaaacgagaggagaagaattattataggtgggagactttattctgccatgtccttcagattcttcagatgcccagctttgctcaacgatca

SEQ ID NO: 16992 - DNA, 455 bp, Oryza sativa
  unsure (1)..(455): unsure at all n locations
agcttagaaccgaatcgaatgcaacaagtttttcttttgttctgtttggntccatgtgcatctctttcctatgaggccaaggagcgtgatatatgtgtttgaacttattgtacactgctgttgattgtcattntattccctacaaacggttagtggacagtaaatacccgagagactataaataattgaaaagattttatcatagcctcaagattagttgttcacatccacgctaaagagaaattgtattcaaaacttaagaagcgtcgagcccaaaagtttgccatttatttttttttgagagacacttcttttgttcttgaaaacatttttttttaattntttttgttcaccaaatttttgtttaagcaaaatctcatacagggctgatgntaaaatgcatgaacataatcaaaagatggtgtgctcctcctttgcatgttagcaatttactg

SEQ ID NO: 16993 - DNA, 464 bp, Oryza sativa
actaagcttggagcagtatattccaaatttccctcaaatctatttgtctctcctcttcctctctctcccttctggacttttcaacaagtacctagcatgcgagaccgaggtcgtcgcttccaagccgacaacgccaccctgcccgcaaatcccgctgcaaggctgcacaaagccgaggccgcctctgcccgatgccctacctcgatgccgcgcctggcaaagtcggcctcgtcgcgagcctcgccaacccggaatcgccgccccctgccactacaagaaatttggccttctatgacaaaattcatatgacaaaacacattttagtcacagtagtgatgcctttatgacaatttttctttggatgacaagcgtttgtgactaagttgtaatttagtcataagaaaatgtcaccatgtgcctttcccattctttgtgacaatagttcatgacaaaagtgaataaat

SEQ ID NO: 16994 - DNA, 415 bp, Oryza sativa
ttgtagctgtgctatcataccgaacatatgactgcagatcttacaatcacctccaagtgctctatgtccctatcgggcttatccacacgaagctcacatgcgagaccgaggtccacagtatgcagcctacaccgcgcacctgccctgatattccgctgcagggcgtgccaaaggctatgccgaatctgcgcgatgtattacctctatgccgcacctggcgaaacttgtcatttcgctagcctcgaccacccggatacgacgtctcctgacagtgaatgatgtttggccctctctgacaaaattcatatgtcaatcacatatgagtctcagatgtcgatgcctttatgacgatggatatacgcatgacgcacgtttaggactatgttgtacgatagtactgagaaaatgtcatcct

SEQ ID NO: 16995 - DNA, 460 bp, Oryza sativa
  unsure (1)..(460): unsure at all n locations
agcttagttaacttgatctttgacggttcttgtattactttccatccccgcaagttcatgttaacttcttctacttgtccctcttccgagaaaacatcggcctgtagtgcttcacattcatccgaggtgaagatctctttgagaccagtgatactggagctagataaaacattacaagtggcaatgttttctgcagtcgtgacatgggcatcttcttgcatttcttcccgattttgtgcagatttttgcccccagctcggctgcataaattgcgctaacgtcgggagtgtataagttgggcgagggaaagattcatctccctctgaccaggggacaaatcttgctggcatgcgtcgacgactcgggtcatgccacctccgtggtgccggngcaccgagcatcgtcgagtctgtgggcacgtgacgtggaagccagcgtctctgtggccggtgatgatgaa

SEQ ID NO: 16996 - DNA, 416 bp, Oryza sativa
tatcttctccggctggcctataaaagcatccacaccatctttcttgctccccacgccatcttggctgccatcacaaggccaagcccccataaaaccccatccctctctgcctcttccttgtacacatttcgacgaacatcttgtgggcgtgctgcaccttcttctccacaccaccactgcagccgatcttcgttgtcccgccgtctatcggtaagtcctcgctcctctggcctcccctagttccgtagaaactagagccccctttaatttcaccaattagcaaccgtcgccgtgccggtccggccaccgttttgccgccggtgagctcgccgtggacaagccattccggagctcctcgtagacatctcgttagtaaaatggaaccctcacacgtcgtagatactcacgtcctcacc

SEQ ID NO: 16997 - DNA, 438 bp, Oryza sativa
  unsure (1)..(438): unsure at all n locations
actaagctggctggcatctctcccagacccatcgaganncaggtganttgtgggcggaggcacgctccggggtcacccgttgccgctgggagtggatacctatcaatttttgatactgtgccatttccctccaccaatgttgcttcagcttcatgctgccggaagtagcaaagccattgctggggctgatatttcgggatttggtccctatgcagtttttagcgtgactacaactcaaatagtcacactatggttgttgatattacattcaaggattcttggagcactgttcaacagaaaaaaaaaacacggtatagctgatacaacaatggtattgtagctctcgatatatagacccttcatctgaaaaataaattgatatgatatgatgccgctactaacttgcggttctagttaggactgcatgttatctcaatc

SEQ ID NO: 16998 - DNA, 464 bp, Oryza sativa
  unsure (1)..(464): unsure at all n locations
agcttcctatcaggcgcttcctgcctacgctcnctttccaacctctgtctcagcgaccgctgagacatcgcggacaaggacaaagagcaggaagaataggaccactccaactcttgagtccatgttcactctaatggaaggcactcattcagattcagagattcccatgccccggtccaatcaatgcaacacggtcagcatcggcaagaatcatgaagcaaagcaatcgtctcggtccagcaaaacagaccagcagttcacgattcctgcatggagagctgctccagcactgcgacagaaaggagcacaaacacacacatttagcacgattctccgcaccaattaggaaggaatacaacagaacacgcaagctaacacaaaaagaacgcatagctacttccgtctttttcccccacctccccgtacgcaacgagctaacgacagcaacaaggaaagatccaacc

SEQ ID NO: 16999 - DNA, 438 bp, Oryza sativa
agcttcaatgacttagagcatagttgacttttatagctacctaactgtaatagtgcatcacaaatgtcattctgcaaataccctcgaattccaattggaagtattcgctgcaaaagcagatggaagtcatgtgtcttcaacccagttattttcccctctttatagcttagaccttttgatatatttgcaccaaaaccatcaggaaagcggacagattctataaattgaaaaaaatcttgtctctcctcttgggatagtgtataacaagcaggaggctttatgacattgctgcccctttgttgcaagtgtagctctttccggatgtttatgtcttgcaagtccatgcgagccttaagtgtgtctttagtcttaccatttatgttcaaaagaagtccaagcacgctctcacaaatatttttctcaatatgcatgacatct

SEQ ID NO: 17000 - DNA, 443 bp, Oryza sativa
  unsure (1)..(443): unsure at all n locations
tcatccgttaaaattcgactaatgtgattaatggtattttcttttgttcaattccaaactacaatttcctcttttctcgntagggtgttgttcaaactcatttcccattagcacgttttttggaacaattaaatgatattttttaaaaagtttttatataaaagtttcttaaatatcaaataaattcatttttaagtttataataattaatactcaataaattataacctaattactcaccacattttccttgccatagaaaagctcaactcatgccttagttcgaacgaggcctagattaaggcatgattacgtggtacatggccttgataataattcgactagaaaatagttccgcgctttgagtaaaatacctatcaataaatgttgatggattgatgccccgatcatagaatccgcacctatatattgtattttgagga

SEQ ID NO: 17001 - DNA, 453 bp, Oryza sativa
  unsure (1)..(453): unsure at all n locations
agcttggttctacaaaaactacctctcttttgcccaaaattatntcccgtaaatctttttaagaaatgtctaatgggaatttaaaatttgaaaaacatatacttctctcaagatatctctctgttcatccacgctacctcgcgtccctctctcctctcgcacttcctcgaaataagtgtagagcaggaagtccgatatcctttctagagatatcggatttattttatactacaaaactaaaattttagttttgggacccgtcttggactcttaggctcttagccgccatgctgaaagggccttacattctcaaccactcccattccatatatctaaaataaattatcaacgtttacttgtttgtccaaaaaaaaaaactattgcaagcctgcaaaacgcttgctctgattcgcaaataaactacttgctggctgctacaaaccgttgacactt

SEQ ID NO: 17002 - DNA, 416 bp, Oryza sativa
actcagcttgttgttagtgagcacctcagtttacatgttctatttgtttgcctggctgaagagatgatcattcctaaatttgacttgatcgaatctctttaattcctcaactggatatctgtggattggcaaatcatcatgccatcggcatcaccattgatgacctccgcaccggaacggtgagcctgttgagaaacgatcggaaatttataatggtggtgggaatggtctggctggaactatgaagctgtgatcactagtctgaagtatgaattatgaagctatttgttttgtgatgagaagcgtaccacggtggagagctatatatatgccagtggcaagtgtcctacgtatctacgctgagactagaataaggtccacatattatgacttgcgtcacatacttttgcagaatg

SEQ ID NO: 17003 - DNA, 333 bp, Oryza sativa
  unsure (1)..(333): unsure at all n locations
gcataaaganancccaccatagccgatacacattagatctaacttcatcggctatgccatgaatgtatataatctctgacttgaaataattttagacataagtgatttatacttgctcggctccttggccgatctatcccaatcacttggttcaaacatactttgaggcttagattatataaattgatatctacagccgattaagtaaatctatctctctttctgttctacttaccatagccaatccaatgcgaactacatcagcttaatattcaacgatacgacatcggtagcaaccgatccggtattgtgacggataaacttcctttcttt

SEQ ID NO: 17004 - DNA, 480 bp, Oryza sativa
accctaagtcacctgcggcatgcaagcttagcctgtagctgagaagagataaatctattgttattacttactactacaaagtaagtactactgtttaaattaattgatagtactagtttgcattctgcgaactgcggacaattggatccaagtatccaacttatcaaccggtcgcaatatcagtatactttacgagcaggagccgtgcatcctcatcaatcacctatcagtaggccctggagacatggatcgtacgtacacatacccgattaattaaatttcacaattcatacgtgatgcattaggtatacacttagacaatcagatcccctaactacaaagcaagcaggtccttagccaaacctgagggaaaggaagcaaaatgaaacctctcataggctaacccacagcgaagcaacagttgggctatgcagtatgtgtgcaccacaagcctttcctcttatttgattaaatgaagaa

SEQ ID NO: 17005 - DNA, 385 bp, Oryza sativa
  unsure (1)..(385): unsure at all n locations
tgtgccgacatggcgcacgacgncgcggcgagcgcagtgtcttctccctaagctctgacgcggacagcgtctcgtatccgacataaatatcgtgggcagccctgacccaattacgcttcttccattcattttctctctttgttccgtggctggctagagcttttcgttctaagaatgataaaccagatatgtccaaaatttcctccatctagcgtaattgccaaacgtgtggcagtaatctcccactanggtaacgggatgtggatgtaccgatctacaatcgtagacggtccaaggttacgggatcatgttgttcgcgcgcaatttgaccctttcttctaggttacgcatattcgatcgaacattcttcttctgttgctctata

SEQ ID NO: 17006 - DNA, 455 bp, Oryza sativa
agcttcctttagtagatcaatttccttactcgttattcaagaatccgacaactgacgacttgacaactctcatcggctaatctcatgacttcgaagccgatgctgactctaagcgatgactactccgggcttaccaaatttcactgttaacaagagcttgagctaggacgatggttttgtttaccggagtatagtgttttcttcctgtccaacaattgattatcaagccatgctttacaagtgttacttgcaagagaacttttatggtacaacaaactgatagtattaaccgctggaataaatgatctaatgctataaattgatttgatctcccacttataaatagatggtagtataaaattttacagggtagattcatctttctttgctattctgcaagggtcattttttgttaaaaaaagggaagtaattaatttagataaaaaaatggtacc

SEQ ID NO: 17007 - DNA, 314 bp, Oryza sativa
  unsure (1)..(314): unsure at all n locations
gcacgaggagcgncacctccggcgcgcgcccgacgcacggagaaggcggcggctgncgccgcgagccgatctccaccgccgacgcgnactgggacgagctgccgcccgtccgccgcgtcttactattcccgcccccgacgccgttcggagacgtcgcacgcgcgctcagggactccctcgaggcggcgctcgcggcgatctaccccttcgccggcgcgctggtctactcgcctgaggaggaatcgctgtacattgttgaggaggccgcgggctgcgaggctttcgggtgcccagactgaccttatctcggagga

SEQ ID NO: 17008 - DNA, 469 bp, Oryza sativa
tactaagctggatcgggaacaattctttttctggcagttgtgccgactctttgtctttctttcttcgtggcgagatgtaggaactccgataggatcagtctcggccatgtaatcgatacaaaactcaatggcttcctcggtcgtgtaaccttcaatgatgctcccctctggttttgctctgttccgaacgtaggacttcagaattcccatgtacctctcgaatggccacatttctctcataaaagctggcccacatatttttgtttgcttcactaggtgaacagtgagatgaaccatgatatcgaagaaagctagtggaaaatatccaagtgacacagggtactgacaatatcggcctacaacccatctaggtcttctggatctataatcttctgaccgatttgattgaagaaggcacaaagccgttggatcgtgtgacggacttgtggtggtagaatgcctcttatag

SEQ ID NO: 17009 - DNA, 463 bp, Oryza sativa
  unsure (1)..(463): unsure at all n locations
agcttcctggatgcatctctcgacgcgtctatctatctggtgatgcatcatgcatggccaaggatcgaggtggacgacgtaatatatgagtacgtagtacgcgcgtgcgtggagattggtgagctcgatctcgtctctccgcgctcggccacgtgtacggacagctgggagagcgaagttagttaatccgccgcgctcgcgaagttcgtaggttttgctgcggcgggaggcctacacgcgcgcggaataacgatgatggagcgcgaatattgatgcatgcgaacgtagtagcactccggcggtcaactggccagtacacgtgtagggcggcgcggcgcgacgtacgctagctgcggcggagctagctgtcgcgcgcatgtgatgtggctggcggccatgtcggctcgatcaggtttggttntttctttcccgaattccgattacggtatgtacaaagatagag

SEQ ID NO: 17010 - DNA, 447 bp, Oryza sativa
tgggctgggggcaatatatggcatgcatcatcacgtgtggtcgctttaaacggcacgggatgtcttaagccgatcacacgagattatcacgttaagccgaccgcattatcccgtgcagtcgatgaccggcccccggtggacctttttttccaggcggcgccacttacggcccgcttggaatctaccgggagcctcgtacagaaaaatcttttctctagtagtatcagttaatttcgtgagagagtttcatccagctccgctcccattttaagtggagctaaatctatttagcttagctctagctccaagagacgtggagttggagctgtgccggaacccgtcacgcgccaccactgtactgttgcagaaatggcatgcagtatatgtgccacttgtactgtagtgtggtaccaggccttgtctgaaccaaagacttgtgtttcattc

SEQ ID NO: 17011 - DNA, 458 bp, Oryza sativa
agcttcctcagatcccaagaccctcaccttctaagtatgggacttccctgtattgataattacacaaactacttagatgttaaaagcccctagatggagatatttaaccatttgccacatttagatgaggcagctcgacagaagggaagggagaagatgaaaagctaaagattctagtttattccttgctttaaaaaatagatatgggaggatttgaacttgggtgtctatctcaatttaagtagctaacaaaatcaatcttatctcttaatgaccatttgcccaccatgaacagtaaccacgaatgcatttttttttttgatgggaacgaatacatattgtttcacatgaatacaacgtgcgaacagcattaccagcctagtaaatatggcctacaggtgctgcttctaagtggtctgttacatgttgcacatgacacctactgcagcaacatgtgg

SEQ ID NO: 17012 - DNA, 148 bp, Oryza sativa
  unsure (1)..(148): unsure at all n locations
cgcattanaggtccttcgatttaattatcatataaaaccttagatatactgtaggaaattattttaatcgcattaaacatgccaaaatgaaagcatgaagtctctgttcccaataacggctggnccactttctaaaaagtcgtctggt

SEQ ID NO: 17013 - DNA, 464 bp, Oryza sativa
  unsure (1)..(464): unsure at all n locations
agcttaaagagacagagattaacagttgtttcctagccttactaaattgtaggaaataacgggaagtgattagaaccttacttgtgtgatgcctctgcttcttgtttcttcagctttgctttacttctgcctttctctctgctgaccttcctccacttctctcaactttgccaaccaggaagctacgtcgttttgagcttgatggatgcaacggagaagatggagtcctttagttttgggaactcgggcatgaaccgtaaggttcttgtggtggtggtggtcgtggaggacgtgcttttaaaatttacgaaaaaaaattaaaaatattctgttgctcttctttntggtggcgtcttgcctaaactatttctattggccgctgttaattacttcccatataatatagcaacctanaatcggatgagacatttcgtagtaaaacgaatttagataaaagagtatct

SEQ ID NO: 17014 - DNA, 399 bp, Oryza sativa
gctcgcaagaatgatctcttagcgccacttgaagaatgcaacgccgagctggatatagaacgctagaagctagccgatctccccacgtacattgaagagcggaaagccaggcttaaatcggctattaagcatgtagctgaactgaccaaggccttaaaagttattcctggaaaccatgctcaagatgctcaagccatagaggaagtagagcatattaagcagaaagctatatcggctatccagcaatacttatcacagtggtcttaatgtaatacgacttagaactgttgtaatcaggtcaacattctgatactatatcacttaacagccttctgagccgactaagatgactgtgagagatgctcaaaagaatgcgcctatatgtactgcgtgttaaca

SEQ ID NO: 17015 - DNA, 454 bp, Oryza sativa
  unsure (1)..(454): unsure at all n locations
agcttgatcaaccattaacaagtaatctcttatgtgtgagggtttggtcagggggatgcagaaatagtgcttcaggatccattacgcgttcaaggccttttgttcttcttcgcatccgttattttggcacaagtttttttggttctcaaaaagaaacagtttgaaaaggttcaattgtacgaaatgaatntctaggtcccgggatttcttaccatcaagttggtaaaaagccgcgatttattggcgattgctagaattctctatgatccattntggaaatctttcttttgtttagactattttttgtttgcgagatgtcttgtctgcaattccttatttctatcatctcatgcaaaacgaggagaatgcaaggcaagggcgagaacaataaaaggaacaaatccttttaggagggattgctggtcttcttaatcctctattgngcacaagaaaa

SEQ ID NO: 17016 - DNA, 459 bp, Oryza sativa
  unsure (1)..(459): unsure at all n locations
gcttgatggtacatgatttccctnnttgcttataagctcttagnttctttgggatgatttaactatccatctaaagctattatttactgaaagctcgtgcaaggaaggacactaaaaaaattgaccacagtgtgaaggaaagggcagcgcggcttacccattttgcgagagtatgatttttcaatatgtttagataattgaaccatccatgtgctttactttttgttcctttctacctctatgtactttagcctgttacctctgtatgcatattcagatattaaaggaacaggctcagtcagacttgaagaaagcagcagatcagcattggagcgatggtgctttggaggtctgtgctagttctctgtccttcacttcattttgctggaactagttgaaaatactgagcgatatatagctgccaaatgtttctggagtaccgatgttggtttattaccg

SEQ ID NO: 17017 - DNA, 453 bp, Oryza sativa
  unsure (1)..(453): unsure at all n locations
taatatggctatngggaaatttggaggatatgttgtatcttttcttttaatttcgtcattntgtaatttcatgtatgtatctgattgacatgcttctcttgtagttacatgcggagagttccttgagtgctcgtggcctgagaactctgcatcttcttctcaatgcaacaaaactggttccagttcctcagaaattgctgatcaaggtcctaccattatttacgtacccaccaggaaacaaactgtggagttagcaaactatttgtgcaaaactggtctcaaagctgcagcatataatgcgaaggtaaatcttctttgattgatttgtgtggcaaatgatacttgatcagtanggcccatttcctgatatatgctaattctctagaagcaatcagcttttttgtaacttacagtacatttgattatatntatttcttaattgctattcacagt

SEQ ID NO: 17018 - DNA, 463 bp, Oryza sativa
  unsure (1)..(463): unsure at all n locations
accgcatcttaagngactgggctgcagctgcatttaaaaatatgttttattctcatttgaaccatgtagaaattgaagtatgagcaaggaaactataccatgtagatgcaaagtttgacaaagaaaggggaaacaacttcaaattaagcaaatcatcactatcgcccttaccacattaataaataaagcggccgatatgctccattgtagtcatagcattctcacctttgaatttcgtgaagttgggcacctcaaatacttgcgggtatgggaccgaatctacatgttcaggatatggcctttgatatgtatgcatagctactttggattctatttcaccactattgtcacaccctanaaatctccaaattataaattttcgtttaattggaattagtagaatttaatttacaagcctagaagagaagatctaattctaattaataaattccaatataaaatg

SEQ ID NO: 17019 - DNA, 450 bp, Oryza sativa
agctctggaatacccgacgcctgtgttcttttcttgtgaaagaaaatgagttttaaaaatataactcgcgacacaaggccattcctgggcggaatacttgtgcggtcgcatctaaggaccgattcctttggaattacatccgagcatacaatagtgcgaccacacgggtggaatgggacgcccctggctgagtaaattgctaatcgggggagccttgatgccgagagacatgtggattcgccggggtggtgtcggggaggacccctgtgcttcctggcacagtatggtctgggacctaacctgttgttggtctgggacccctctcgtcggcatatggtaaacctgtgtcggctttcgaaatgccttgtcatgaaagcccttatgtcaccagacgtggccattctacacgggctgggtgattcggttagtaatgtcggtgggaaagcgacc

SEQ ID NO: 17020 - DNA, 455 bp, Oryza sativa
  unsure (1)..(455): unsure at all n locations
tagcaactacactacactagtgaatgtaacatcttgtattttgctgaagattaaactatagaagaaatataaatattcctcaacacggggcctcagtgtctcactgcaactgaccctagatgaagaagcaaccaatagagtgtccacaacattcttctctatgtgccttttaaccaggacacgctcttgttctcaatttaacaatgtattatttgtctcatgaaaaaaggtctcacctcaagcaataaacttacccaatattcattagttagggataggaagtggccattctgcatctgcttgccaggaacattttacactgttataggtaacgagattgccatattggtgataacatccactataagtttcaaccctgtagttctcaaactgttttcatatcttcctnnttttttagaaaanaagaanaaccgcagcagccataccccgacatt

SEQ ID NO: 17021 - DNA, 458 bp, Oryza sativa
agcttaaatactctaggtgagtttatggtttttctatcaggctatctgtgggctttatttatgtatgtgtgatccatacattgtactggtgttatgggatgcctcatgcaatcacataaatcaataactaggttcaatcagggatagagcaactactgctgatctaatcatatgccagtgcactggacactgattgggatttctatagttagttgttttaaccattgctatttactaaaacaattctcgataattagagtattagacatgttctaatatctacaggataccttgtcatttttattctgtatccaccattgggtgtgactgtgatcatgtaaacctcttcagtttgggtattataagttcgtaagttgacaagtaaacctcagaaactaaagtatggtaggcttggacaattgtttggttaatggaatgaaacctactagaaagctgtc

SEQ ID NO: 17022 - DNA, 390 bp, Oryza sativa
ggctataccaagtaacctcctacaaactagctttgttttttctcaattatagtttcccctccgaaggtgagggaaaaccttcacaaactttctcggagtatccacaacgaccggatacttgtgggtgacacctaactggctaggatgagaaccccccacagataacaagctcgatgatgaaggttgaacttgatcccaagtgctcaactcaattcaaacaaactctctagatccaacccgtctgttcatcacaagaattttgttcatgaacccaagcggaaagatgttagaaaccctaataaactatgtttggaaggtgtaatagctacttgctcaaagtatggtggtgggagttacgggtccattgtttcgtttattctacgaataagc

SEQ ID NO: 17023 - DNA, 427 bp, Oryza sativa
ggatttaacacgagctcactgtcaataattatagttttagttgtttaagcagactattatgtctcgcactcgctaaggaatctatgaattcatcattatagggatgctagaggcgtatcaccaatgtgaactataagtatgtacaatattattagtttccccctgttcggaatctatctagttgttttcagctccaacttcatttgcctaacatgcattatgttacctatgatggttttggtaatcttgagaatgttgtcagcaggccatctcctataacaacacttattaagtatttcgaaatgaatcgcatagatccggatgtaagtttccttattatccaaggagtttcccagaagaatattggtggaccaaggtaaaaaagtatggataaaaagaataataagacaggtaatgttggacttga

SEQ ID NO: 17024 - DNA, 344 bp, Oryza sativa
  unsure (1)..(344): unsure at all n locations
ttctggcttggaggacttcgcctgcgtttgcgctttgagaatctaagcgaatagctaggacacaatggatggttgtgttcattccggactgctgcatactcccactgtcccttattgagcttcactaccacctttgcctggcattgagtcctctctataatagtgctcttcctattcctctngtgggtcggagttagctttgatgtgccagtcttgcggcactctatggttaactttactctcctggagtttaggcgccgctttgcaactaagccagttataagagcatgtgtctcatagaatctctgtgcatcttcaagtgctgcaaatttcatttcaagttc

SEQ ID NO: 17025 - DNA, 389 bp, Oryza sativa
tttgtgcttggtatcgccctcctgaggccgattgccctatgctcggcctggagtaagtcggggagagacacaacttcttccatcgacgacgattctttgctgaggctgtcggagcagagaatggttggagctgaaggtattatcgctatgattgattgcagagtcaggtgcatcacgaggagcattggtgctggggatgatatcgtcgatgttgttgtgggagctgactaactgatgagacaatcgtaagggtgtgagctggatttctgcactcttgggcacaacacactgagatggctatccttgggcacatggaatggaccttcgcacaaaaaacatgtgaccttgcgggtgggacactcccctggtggatggtcttcttcacaatg

SEQ ID NO: 17026 - DNA, 461 bp, Oryza sativa
ggctctatgcagaagaacctgcagcccttccttgaaatactctctatcatatgcattgctgatgaggcggcttgctgagtacggttggtactcacccttgctatttatgtatcttttaggagagcgttgaagagaagcccttgtcggtacgcttgcgtatccaacaagatgatcggagtgtggtcttgttctacgtctcgttccccagttgactgcctatggcatgttatccgggacgttatattattttgtcttgcgctgttgctctctgatagttgctggcctacctgagcctaatgtaagtatttaactcttttagcctgaattcattcgtgatatgttgagatccaactatgtatgtgtgtaccaattactgatctaaggactgggacggatcaacacagaagatgtgcctattccagaatccagggtctacaacttcctggagaccggagtatctg

SEQ ID NO: 17027 - DNA, 440 bp, Oryza sativa
agcttgactcatattataactgtggaggtgtctctgtctttaaattaaactgagttaactgtgaacgagaatgactccataaaaatcgtgatagacgaatcctaagctacctaatactccctccgaactgataatacttgtctttttagacaaggatgagatcaaacttcagaatctttaattgtgaatcattataaaaatatttatctttcaaagatggtgactacatgcatatattggtctttaaaagcactttaataaaatcacatatttgttaacactcttattaatggtcaaagttgttttttatagaccatgcccttgtccaaaatgatagtaagtattatcaacccacagggatcgtatatcggagtgtatttagagcaagtttaatagtatagccaactaatagctctaatttatctatagctaatctaata

SEQ ID NO: 17028 - DNA, 488 bp, Oryza sativa
  unsure (1)..(488): unsure at all n locations
ntcaccactgtcaacttggctaacaacgcgtacaaggatgaaccgttcgttctcgccaaacaagttgttcaagtgttatacatagttgacccgtgtaacaagaaactacatgttgttcgtgaagggaaaaggagaattgttggattggacaatattgcagacgaggatgattacaaccagcacgtccatggcatatgtcaagaaatacctctagaagaggaggaggaagaagatgaagttcaatatgcacgtgtcgaccatgatgaaggattatttttgtaatttatgtacgtagtttatgtctacatgtctgttatctgtatgactctaatatgttcggaatgatcaatagtatattgcttatgaaatagtcaaataaaataattaagtgaaacacccactataagtgaaataaaataattaagcaagtattagcattggaaataatataattaaagtacgataataatgaagtgcaattactactg

SEQ ID NO: 17029 - DNA, 446 bp, Oryza sativa
  unsure (1)..(446): unsure at all n locations
agctngaggcacactcaatagttccttgctgcatctttcaaccaaggaatcacataccaatgggcagaaagattaaccaacgaagccgtgacggtatgcactacgattaaaggtacatgtaggaatttgaagacatctgaaagtctaaatcatcaggttgaactttaaaggaatacaagtcaactacgcaagaagcttacacagaatcaacacatggtcacggtcgtgaacaatccatccattggccaagatcagggttcgatccccactaccagttcactgaagaagccttttattcagaaactggtggctcaatttcagttcagagctaagcaatcattttttggggcaatattctaatatgtaaccaagtatataattcccaataactcatataaagctatatactactactagctagagattggcactttcaagataaagtg

SEQ ID NO: 17030 - DNA, 322 bp, Oryza sativa
tcccgacgacgacctccttgcgcgccgcgcacgcccaaaatgtgagtcctcgtcggacgatgccgacgaggaagacgatggggataacggcagagacgaggcagcgtcgtccgcggcgtccatgatgtcggccatggcgtccatgcccctgcccttgagctgcgccctgatggagcgaagcaagaactccggcggagacaacgagcagtctatgtacgtcatgacgtcgccggcggagagcgcggcgaaggccgcggacgccgactcgatgtcgcacgagccgagaactccggagcagatctcgtcgaccagggcgtcgtca

SEQ ID NO: 17031 - DNA, 444 bp, Oryza sativa
  unsure (1)..(444): unsure at all n locations
agctngaactgataattgcaaacatctcgtatctcgtaagcagtcaaagctaaaatcaaaataacttactatcgactggaatgttaaaaggaggaagttcagatgtcgaatcttgaggaacttcaccaagagtcaaagtccagccggatgagagaggccgaattccgagacaaatgaactcttcaactaaatctcgaacgctaaacttggagacaagctcttcaatccgagatcggatggaggaaaagttcttcgacaaattgacagcaggctctgaaataacctctggatccttgcaagaaaaaacgaaaggacatttctccatagcttttagatcggctgggattttgtggtagatccatttagattgccattttgatccccacttggttcgcatggtagagacaagtggccaaggacaaccacgattcgagcgcggcgtga

SEQ ID NO: 17032 - DNA, 438 bp, Oryza sativa
  unsure (1)..(438): unsure at all n locations
agcttgctagggggggcgcatccgctctatagctcgtatcttctcggggttggcctcgatgcctcgggcagagaccaaaaacccgagaagcttgcccgcaggtacaccgaacacgcacttatcggggttcagttttatgcgggcggagcggagactctcaaaagtttccgctagatccgagagtaaggtctcttggttgcgcgtctttacaaccaagtcatcgacataagcctcaacattacgtcctatttggctacccaaagaaattcgagtagtacgttgaaaagtaggacctgcattctttaacccgaagggcattgtcatataacaataagttcctatggnggtaatgaatgcagttttttcctcatcctccctagccatgcgaatctgatggtaaccagagtatgcatctagaaaacacaaaagatcgcaccc

SEQ ID NO: 17033 - DNA, 428 bp, Oryza sativa
  unsure (1)..(428): unsure at all n locations
ggtttgagatgaagatctagagcatctgacaaagcagacataattgttctttccttagcaaccatattgctgtaggttgtcttcagtatcaaataatcattttggagctgccttgttaacggcaaacaggttgaacagagaaaattcaaaataatagcgagccataatgttgtacaatgcaaaatggtaccatggaaaccaccgcaacataacgatgcactcctatcagtgaatgtcgacagggaggacatggttatggnggcaatccagatccgccacacatggaaagaaaaatctaactgtaacattcagatctacatagaataatttggcagacctttaaggcttctagggttctactcttcttttccagggaaagaatacaggcatggtccataaggagttaaggactatgctcaagcctacat

SEQ ID NO: 17034 - DNA, 437 bp, Oryza sativa
  unsure (1)..(437): unsure at all n locations
agctntatttgtttttttcaattatacttgcgtatggacattttctttccttttcccagccaccagttgcatattttttttaagaaaaactatcaatttttttaataatagatctaatctaatggtctaaattaacgggttcaccaatttaagtgaaaatcaacggtgagattagatagtgccacgtggcggcctangagtgtttgtaggagcgccacgtggaggtttaggagcgtttgtagaaagtttaatggacttttagtatataatagaagatagatagatagatggagataaaacattcaacttcagcaccagtacggaataagatccttttcattgaagtaaaaaaatgcagaggtgctacattattttacattagctcatgttttgatacgttgaatcttcattgaacgctgcaaattagcatgctacat

SEQ ID NO: 17035 - DNA, 361 bp, Oryza sativa
  unsure (1)..(361): unsure at all n locations
nttntgcgagctttactgcaagcaaatagatagggggaactgcttaaggggaaccatgaataaaactgggtggaaggagatcatgaatacaggggtttgaaaaatatgtggacctttatacagaaattgcgtacagacactaggttaggccgcaggcctaacggtaccgtcgttgcttctgagaagtggtgggatgacaacacgaaggtacaaaaacttcaatattaagttctgcactttcattcttgctctttcccatgcatctgactgctgccttcgttttttccaaggccatcctgaattgaggaagctgaagaacgggatgcccgaccatctcgatgagctggaccgcatgttcatg

SEQ ID NO: 17036 - DNA, 438 bp, Oryza sativa
  unsure (1)..(438): unsure at all n locations
agctngctcacttaccgatcaaggtggttggagttgatttgtgaatgcctaaaatggcctatacttacgtgaggatttgatccttctatgtggcatgaggtaaccctgggtcggcttgggaaaggctttgtcgcgaacctctgacaccggccagtgtctggagtaagttcgtgtcttgtgggtaaagtgtacccctctgcagaggttaactaactgttcgaacagccgtgcccacggtcatgggcggatgtgaggtggttcccgttgcgtagatttgtttgcctgtgctttgtgaaaagttgttgtggtgtgggaatcgtaaccagaatcagcctatgtggcagatggacgacctgagtggtcagaaacgaatctgtgtgattcgggatgtctgcgggcatcatagactangcttcccgagtggaagcggattggtgt

SEQ ID NO: 17037 - DNA, 433 bp, Oryza sativa
  unsure (1)..(433): unsure at all n locations
tccttatggcatgaccttctttggccaccccacatgtcgcatgagtgatgggagagtcatcgttgatttcattggtaagttgagtaatgatcaactaatttggcatttcatgattttcttttcacataggcaaaccatgaattaattgcaattatttgaagacagaataatcttcaaatcttcagactaatttagagagtgggacagacaaatgaatccctgcaaagataactcctctgaaggactgaaatctcttaacttcctaaaaattatatatgctacgaaaggataactattcagtacctgcatgcaagtatttgcacgattggtttgggtactaaagctctaactattcgttgacatgcatggntaatttgtagccgaggagtttgagctccctctccttccagcctncatggcgaatagctcgagt

SEQ ID NO: 17038 - DNA, 437 bp, Oryza sativa
agcttaagcctttggaaattacctgaatatcttcatccctgttgtgagatgacccataaatatccatcagaatagaccagctcataaggtcagggcaaaggccatttcgcctcatttcattcattacagattttgcgcgttctccatttgtgccacaggccttcattaaaatattatatgttgcaactgatggtctaaatggaaccactaacagagtactgctgttacttgtatgttcttcacagtatgagaagttgtcaccaaaacatcctttctgttcaagggatagagatatcttgactccatattctttccagtcataaaacaagcggaaagctctatcatactggcatgacttaacacaaccagtaaagataatattgaagcatggagcagtaggttgacaaccatcccttgcatttcttaagtatctctat

SEQ ID NO: 17039 - DNA, 447 bp, Oryza sativa
  unsure (1)..(447): unsure at all n locations
ttatgagactntgccacataactatgatcagaaacagttattgattcataatcacggcaattgaaaggtgatgctgaaacctaaaaaagggaacacttgagtgagtggtacaccagaaactaatgcatgaaaattgattctctcccagtgcgtcattatattgataaatgaaggcaaagtaaagcatcctagtactacataaaccaggtactctaacatactggaacagtacacttctggactcaagaaaaggctaaagaaagagaacctactattttcaaagaaaaaaaaatcaggaaaagagcaattagaggctggatttatttccatataattatcaaaaaaagaaggaaaagagcaatttcgatttctgggttctcattagaataccttcttaaatgcttaacactntgagatatataagaaataaatgctcaaacattaaac

SEQ ID NO: 17040 - DNA, 439 bp, Oryza sativa
  unsure (1)..(439): unsure at all n locations
agctngaatcaagagcaccaggctctgataccaattgaacgtgcagagatgtagcctagaggggggggggtgaaaaggctttcctgaaattttctcaacaattgcagcggttaaattgacagggcccggaacctcctggtgatgaacaccggaacttccgggcaggatgagtagcccagaacttccggggttcttgagtaaggaacttccgggcagcagagataaattaaactgagatgaaaaacaggtcctagcaagagaagtttaggcacacatcggaacaagatgaagatcgcagaatatcagcagattcacacaaagatcatgcacaagagagacaaagacaattttttcccgaagttcggatcacacgaatcctactctccgttgaggtgctccaaagagccgggtctcgattaaccccttggctcacttatgc

SEQ ID NO: 17041 - DNA, 475 bp, Oryza sativa
  unsure (1)..(475): unsure at all n locations
ntatgtcaagatgaagcaatcaattaatcagccaacgagtcaactctgggagtcatcaattntgtcttcgcttcaaagcagttggttaaaattaaatttacatgtctgggagtttggagtcatcaactaatcaactcatatcagattcaatgagttgaacaacagcatatacttttctctaagtgaagcatctgcaacagctatagcaccaagttctactgccatctttataaatcaagaggtgttgcatcaatcttcatcacacacatgccaacattaagaaaatacttgagcttcgatatcttctcaacaatttaatggattattgtcactgacatcatcaccagcacctctgcttcatcggctctgacattccgncgttgctaatggatgactaagacttcgcccacttgctatttcgccttcacgggtgacctactatgcanacgctgatgagcgtcttcgtcaatatcat

SEQ ID NO: 17042 - DNA, 396 bp, Oryza sativa
tatatatgtgtcacgagaacccactctacctaagtatttacagctagatatatagcttgatctggctaaatcggctcaaaggcccattaattaagggtgtactctttattgtgtagttcgaacacaactacttgtatgtgcacttgaaaacagtacgtggccatcgtgccttgcaccaagggatatattgtcgggtatttggttgtctctccacgctcgtatatattggagttatatcacaagctagtgtgtatctcaccttgcaaatatgatgatatctgaagccacagcatttgaaataacaacaatgcagctatatgaggcatttcataacaaaaagctgctcttattaaaagttattcattccccatagaataatccacacatagtacatat

SEQ ID NO: 17043 - DNA, 399 bp, Oryza sativa
  unsure (1)..(399): unsure at all n locations
taggcacgaccattctcgatccgtcgacgtctgtcatcgtttatggacggactgtagtgcgtgagtttgtgattntttcaatgtctaagtttgcacgagtactgtgtaatgatatattgctatcgctacttcggtggcatgctttctttgtgttccctgtgctccgttctgcaccataatcccatgttcttgtttaacaaaaatcaccagagagaaatcgtccaccataaatgtagtgagatgcgtggtcatggatgatgcacatcaaagtttcatgttcagtctggggaaaatcacttcgatataagctgagatttgattccctttttgttagcacaaatacaagtgaagcagaaaataggatgctgtgtctaacatatcatgcattgtacgccacat

SEQ ID NO: 17044 - DNA, 407 bp, Oryza sativa
agcttgttactattgtgcttttggctctttgtggtctcgatctagttgaacagagctgttctaagagcatcttaatattattcccttgcttagcagtaaccaagtattacaaatgaatagcgataagtgtatgacatgaaaaatttgcccctttatatctttgtagtttgtaataagcctgctaaattctcaatgttcatgtgttctgttcaaaatttatatgattcagaaactatccaagccacttgtgctagcgttattcataaattaagatgtcatggctgatatgatctgtgtatgtttgaatttcgacagtaatctcaaatttatacaactcaaaacttgtataaaccaccggtgctatctgttagagcttgcattttcagaaatagcttgaattggacata

SEQ ID NO: 17045 - DNA, 445 bp, Oryza sativa
  unsure (1)..(445): unsure at all n locations
ntactgttngacaccttntaagatgcattgtaccaacttctaaaaagtcgagtaactgcggtataaaaggattttaaggtattgggcacttgatcacgcgcactttggcctaagcgaaaagtgcctaagtccctaaaagaacgtgacaggccacacctgaaaatatgggctgcagacatattatgcctaggccaaaaaatatgccttcgacaccctttaaaggatgacgcatgtaacatgctcccgagtaataaatcttccgggtaatatagaccaagtgtagctcatatgaatagcttctgatctgaatgattatcccttatgggatactccaaaataaatataataattgaatcccgactggcgcaagtattcgggtgatagcccttacggggaataataatngtgtcagtctttgagcatagaanatagactcatgactatg

SEQ ID NO: 17046 - DNA, 444 bp, Oryza sativa
agcttaggacaacgcgaacgaaagtgatccgtaccaccacattcaaagcaaagatttggaccacctcttttcctgtacctaacattagtcacagcttgagaaagtctgttagataacaaaaccaggtcctcctcctcgaattgttagagttgatcatcggacatggcattacacaaagcaattgcggaaacttcgatgaagaagaatcaacatccaaagaagttgaggaagaaaccaaagcactcgacttaaaatcaactttacgagaaagaatgctcatctcatgtgttttcagttttgtgtaaagcgaatccaaagtcaaagtagacatatcaacggattcctgaatagatgtaactttcatctcccaaatagacatgtcaaaaccattcaaaaagtggcgagaaatctcagattgtgtataattaacatcataagaagaat

SEQ ID NO: 17047 - DNA, 442 bp, Oryza sativa
  unsure (1)..(442): unsure at all n locations
aattatctgcataaacatttgatatatcaaaaccatcatattaagagcattcaatccagtaaatagacatactgcagaacacaggacatctagcaacatcatacacatgttgaatggtcccaaacgtaggtgcagtgaattcatgtgtattacctgttgctccaaaagatccaacacagatggccatctttttccatgcttttcatgtcagctcccttatgtccttcagcaggtaggctattcctcacgctgcctgccttccagtgtagcataatcaagcatcaccagacctacataatgcacaccatcataacacanagcaatcagtgtaacacgattttttttcacggtgaacataattcacaaagcaatcagtgtaacacgaatttntcatggtgaacattattaagaaaccgtgacagcanagcacattattttacaa

SEQ ID NO: 17048 - DNA, 441 bp, Oryza sativa
  unsure (1)..(441): unsure at all n locations
agcttganatgtacacattcagaatgaataatttgcacacaaaatatgtataggatttggaggcatcgagaacattgatctggccaataaagaagcttaggtaagaacaacctcagcatgttcttggtaaggttaattattatattttctgtttcactgcatatttcactgttttttcttctcaagtaaattgcattgtctctaccttgactttacttgcactggtggagaaaccatcttctgtcggttggtaaagatggtcggccaaaatacacaatagtcccggttgcaataaagatatctttaatcccagttcaaaaggttagagtagtttttttatctttagtcccggttagtattaccaaccggaacaaaatatctatttctagtcccggttggtaacaccaaccggaacaaaagatctctattatctttagtccc

SEQ ID NO: 17049 - DNA, 465 bp, Oryza sativa
  unsure (1)..(465): unsure at all n locations
taagataccaatgcgagttcatactcctggaggtggcattacttcatctcactactgcccatctgtgacagttgaaatccaagggttgatttttccagccaacctcattcttctcgaatccaaggacctagatgtcatacttggaatggattggttgacaaggcacaaaggagtgattgattgcgccagccgcaccatcaagttgaccaatgcaaaaggagaggtggtaaccttccagtctccagtgccgcggaagccagggatcagtttaaaccaggctgctggtgaagaacaagaggtagcagtggagaaaaccactaagaagctggaggatattcccatagtcagagagtatccagaggttnttccggatgatctgacaacaatgccaccaaaaagggatatcgagttccggatttgacttggacctggaactgcaccgatccacaagaggccttacagaat

SEQ ID NO: 17050 - DNA, 443 bp, Oryza sativa
  unsure (1)..(443): unsure at all n locations
agcttctgctntgcttcacagagagagaactgaantttggtagtactattggtgtacggcaatagcatccaaagttttttttaatgaaattagcatgaaaagtcaatcccttcaggagaaaacaaaataatatgtcaacaaggagggtatgtatgaagtgaagctaagttgtcccattgtcaactacttgtgcaaagtcagaacaatatgttaacatttcaagttgatgtcaactgaacttttgctcccaaaagggaggctggcagacaaacaaagacaagaaagcactaaacatagcatttgacctcatgatctaattaatgttcagctatgtacaatgtatatatcagtcagtgttcagtgtttcaagttgaaaggaacagcgttntggatggttgctgctaagtaaccgtcctagttttggatcaagaagaatctataac

SEQ ID NO: 17051 - DNA, 438 bp, Oryza sativa
tcatcctaaccattacaagcaagatattgtatgaagaatggcgagcatacagattgctagactgacacgtggtggacaagaatgaccgatttgtgaccggtctgacacaggtcatgtcgccggcagacaaccatgttcccacgttgcacctgcttccggcggagtggaggtaggtatgggccatcccatcagaaggtcattcggacagcagccattgcaagtctccgcccatttatgaagagatgatagggtgatccccgaggtcagacgagtgaggacgcgtggccacactcaaaaacaagcagtgtttttagctttctagagaaggcaagccaagtgggagtaaagataggataagtccccaaccaaaaagagagataggtagaggtggtgcatgtggtatccccttgagatataaaaggaggaccttgcccactg

SEQ ID NO: 17052 - DNA, 435 bp, Oryza sativa
  unsure (1)..(435): unsure at all n locations
agcttgtgcaatttgacaatactcttgtatagttaacaatatggtttcttgtgaactgtgacttcttgtaaagttaacaagggtaaaattatggtgcaataaaggatgccgattttttctggatatcttgtgaattttgaataagaatgaacaattctgtgtctttgcatttgtgcaatgaggttgaccattaggagcaaagccagaacagggtgcaattagcattcaaacagagagaggagggaattccaaaagaaaaaaaaatagaggtgaatttgttttcttggctactaaatgttgaatctatataggatgaatttggctaccatccctccgccgccgcatgcctcgccccgccgcaacctcatgctgacccgccgccggtgacgccatgggctgcttgcacggncgcccctccaccgcagccccgccgcg

SEQ ID NO: 17053 - DNA, 481 bp, Oryza sativa
  unsure (1)..(481): unsure at all n locations
ntgcttacctgtccctgcttttctacaaattaagttgaaaacatagtatgatgtagtttatatgatggctaggacagtggcacagttgcttgcaagacaattttttcccctttcgaacaaactacatatttattttatatagtacaagttatttgttcagcccatttccaaatgggctaattttgcactttgattaggcctttgcttatatattaactctttttaacattctattggtgctgctgctgagtgccatttctcattctgagctttcagcagggcagcttgctttttaagtaagtgacatattgttaagctataggctgtgcgatagtgtgctggacaatttggacacatactaaatgatgtgatcttttcataagtaatttactttntttatangtgtangaattggtggaagcagaagtggtttgtttctgctcatcatcatttcaggtggtcaacaataggtaaccaacat

SEQ ID NO: 17054 - DNA, 435 bp, Oryza sativa
agcttaataattatgagggctagcaaatgatttctcttaattatggaaagaagatatatgagattttctttatgattgtatcctatcgtcaatttcatagaaaaataagtaaaagataaaagcctattgaaaattttcctttggttcaattgttggtattttttacgatcacagacaaaatccgcaagcgcacgggtataccgatgtagcacttcccctacggagtattccaagggtatcgaatataagggaacgtgtgtggtcagatcttcctccggttcatccaaggacaccaagcaaatgatatgccaggatagagaggatttactagtgagaaacagtgtctagggaaagcttaactttaatcctaatgctatacttcatgcactggcaacccactgttcccagatgtcgctctactacgtacccggacag

SEQ ID NO: 17055 - DNA, 395 bp, Oryza sativa
  unsure (1)..(395): unsure at all n locations
tagtaccagggggtactctccttggatgaccactcggtcaagatgatccgagcggtcaaacttaattgttgtctctgaccaccgaagatattggggcgtatcgggctgaacagcgttgatctcccgttcggtcagcttttgctttctctttgattcataagcccagggtccgcccaagatgtggttgagttccttgcggtggtcttgaaaaccagtcggggcatcatcttcatcatccttcttctttgacgtgctttgatctctgttggaggccttacgtgcgttcttggcgtattgttctgcaaactgtttgtagacgaagcaatctttggccgcgtgattggaattgggatgatgcggacattgngagttcatgatcttgtcaaaagtgttga

SEQ ID NO: 17056 - DNA, 330 bp, Oryza sativa
cacagttcaccgtctgtgcgcgcactccactgataagcggacggaatgcgactgccctgacacttacggtcttccgcctctgtacttcttggaataagttggcctaccattgctgatctatacctggagtcctgatgactggccgaatacctcattccaccaaggttatacccaccgttgcgcgaaaccagtgctatcaggctgccatgatatactatattgagcgtgtcgctgaaaacattctagtgataaagaaaatattttgactacatctttgtgtgatcagaaaacaaatgagcccacgtatcggacttgtgggcacaccatctc

SEQ ID NO: 17057 - DNA, 439 bp, Oryza sativa
  unsure (1)..(439): unsure at all n locations
agctngctggtattaattgggaattgaagtgcatctctagttgggttttttttatcaatgtgcatctctattcgttattggagctactgacgttatcatttgcttaacaaaatcttgtacgaaaagttatgaggcttcagggagagttagaagtacacattctcctaacaccaaagaacccaccctcttgcatcgtatcacaccacattattttcaatgagcaattttacggtccttgagtaggtaccatgatgtatcactttttctattgtaaatttggtatctcatagtacctaggtaccaagaggtaccaaattttacactaaatttttcgtacctttttcaatttattgcattaactactttcaccgtacttgccaagttgacataccatgagcgcactttactctgtaaaaacatctcataattaaactttatg

SEQ ID NO: 17058 - DNA, 478 bp, Oryza sativa
  unsure (1)..(478): unsure at all n locations
tctganctagtaaccggntntgctaggcaaatatgttatttgagtatggttntaaggaacatgattttaaggaacatgtactctttgagcaagttaataggcaatttagtaaaaatctcacatcttatttacattcttaaagggatatttctgtgacagacattatattggattacagaaggagtcagagagatgctagccatgacctttcttctcaggaggtgatgcttcccttttaccagtgacattttcagctntatgaactacagactgaggtggagatgcagcagtagcttcccttcctacttcttctactgactgcactaaaggatccaagctagaaaaaatttcttccttggagatatcatgatctatatactnggattaattaaactgagttcagattaatgctaccacacctaatattaacaaaaaaaagctagaaaaaatttctttcttagagatatcatgatctata

SEQ ID NO: 17059 - DNA, 422 bp, Oryza sativa
  unsure (1)..(422): unsure at all n locations
agcttcaattctccctctgaaattccagtcataattagagaagaattctaagaccctcatctctaacaccttgcaataattnttcaacatgttgccatcctcttccttaagcaacaaagaccaaagtcttgcccagtgtgtccctctgaaaattacctgcataaaagagtaagcacatgatccattaaaaaccacatcattcctacttaaccacaccgcctagcacaacgccgctatgcccacaaaaacttgattttttagcctaatgttaacaccacttagccaactaccaagtaaatgagacatattgtgcggtgggcagatgccaaaagtgaaatgtactacgctccacacatatcttaccatggggcaatcaaagaagaggtgttgtattatctcatgagacctacaaaagcaacatc

SEQ ID NO: 17060 - DNA, 457 bp, Oryza sativa
  unsure (1)..(457): unsure at all n locations
ntatctacctattattntagaaacttaaacgtttgaaactctagtatttaaactaccatgtttgtataaatggctaattctttcaaacaaaacagataaaatagggcaagcattgtaggcttagcatttaagattatgcaatataaatataatcactaaatgcccaatgcatgttagctaaaataaaatgacaaagagtgatcgtttggatcatacaaattcctaatgtttaacaaaaaaaattagagtaaaaatatttaaatcatgaaaacaatcataccacactacataataatcacgcatgcagagttatttttagctatgaaattatgttcttgttaagctatatggagtctcacacactctgcacgacaatgagctctctcatactgcgaaatcaattaagactcgagaaggcttntagaagggtnttatttaaataatatagtgcacatgc

SEQ ID NO: 17061 - DNA, 422 bp, Oryza sativa
  unsure (1)..(422): unsure at all n locations
agcttgaaagcgtgcacacaaacacactttcatattgtatgtctggcctagaagcagttagatacaacaatgatccaatcatacttctatactccttttgatcaatagcttcaccatcttcatcaggatccaacacagctgtagaaccaattagtgtggaaattggcttgcaattctccatcttgaaccgtctcaaaagatccttcgtatacttcgtttgatgcacaaaagtaccttgaggtgtttgcttaatttgcaatcccaaaaagtacgataactcacccatcatgctcatctcaaattccctgcgcatagtcttagcaaaatctacaaccaaagcgtgagtcgaacaacgaaagatgatatcatccacataaatctgaacgaanagttgattatcaccatgcttaagaacaaaaaac

SEQ ID NO: 17062 - DNA, 442 bp, Oryza sativa
agcttgataacttccaagtggaattccgtttacatggaatggattgcctgaatggtgcttctgatttcggcatccagcacctctccgcccttaccaaagtcaagatcggtatttggggcaacatttgctctgatggtatttatgatccagaacaagatatgaacaatagcatcaccaggtctgttgttagcctaatcaaagctgccatcgagaagcttcccaatcatccaactagcagattccatttagagtatgatcatggaagttgtttattggtaagttcttgaccagacctggagacattgattgttaattcatcgtcttagtttcaaatcctattattgttattattactatttgtttcttggatgctgcaaaagtgcaatatcttatcgtttaattggacaattaattcgctcctggcttgtcgctctctttcttg

SEQ ID NO: 17063 - DNA, 385 bp, Oryza sativa
  unsure (1)..(385): unsure at all n locations
nntttgactatgtacaaagaanatgtcaatgaaaatactgcaagtgaggtagttgtgcattaacatctatagagttggaaccaatctctatctttgacaatttccatgtacatacctatccatgaaagtgacacacaccctccgtttaaaaaaaaagatcaactctagctatgaatcttgacaagcaagtatccaaatttagagttagaattgagttttttatgggacggatggaatacacaactagtcatgcaaatgtgcaatgattggagccaggacaatattaccatccttgagaaattactggaaagtatatatcaaagtttttaagtataaaacttgaaaccttcacgtattaagtacatcgagggtaaaaataattagt

SEQ ID NO: 17064 - DNA, 409 bp, Oryza sativa
  unsure (1)..(409): unsure at all n locations
tatactatataaattataaattaacttcattttatccatgtacaaaagttagagatttgattgaagagtcagtcaatatgtaagctgcgggtcaagtatagacatgctctataaatatcgacatatttagaatatggtaattaccatattataagaaacggtaatttccacaagaatacggtaaatacggaaacgatcggtataacagtaaaaccatttctgttttcatttccatattttttaccatttccatttttgtttcggtcgattatcatttccatatggctcggccggtagaaagtcgaaaacgaacgccggtcggccggtaattaccgttaccgttttcacccctagatatgtgctagggctatacccgtcctctgcaacngaaatgggagggatacggatg

SEQ ID NO: 17065 - DNA, 223 bp, Oryza sativa
ctcatggaaaaatatgttcagaacctatgcataatttctagaaacccaagtgctcagatgagagactataacactaacccaatgacatgtggacccagagccctctccgtagtctaccttatagttccacaaatagatgtactcagtcatcattcatcatatcacacatgccacgatctaaagtcatcctctcctcccttccagatgcggctgtccacacctt

SEQ ID NO: 17066 - DNA, 441 bp, Oryza sativa
agcttccatgcgtgatggggagcgttagctatactatcgtcgatcacggtattatgcagtcacgtgcgggtggaactgcggatatccgagcgcatataccactttgcttaaacctccatcgatcgatcacaaggttttctgctcatccagctatcggcctagctaacatcctagtcttttaataacaatcaacttaattgcaacgccttttggttttgtgcctacaagaattatgtaggtaaggaggcactagggaggcacacccttcccataaaattttagttttaaatatgaatagtcgagattacattggcgttcagatcacttatgttatgttctcgttcttaaaatgaaagcttcatttttttagctactacgttcatctgaaacttcttaacccaatagcatgtttagtttgattttacactaatgcctaggata

SEQ ID NO: 17067 - DNA, 485 bp, Oryza sativa
actaagcttccgtcagtgagccattgtttcatcttattggcgcatcatttacagagaatataaccaagcaccagaatgttcttgcacgtcacctgaaagatcaaaccttagacaagcagagctgcaactccttccctgaattatttctcaataatgatctgcttttgaacatccgaagatgataatccacccaagggtgactttctgatcgcatttcgttaagcagctgcatcgacatgcatgcattttcaatgcccaaaataagcaactaatcactgaaactttaattggaaagattgctgcaaattaactgatgtctgtttaaactcgtaccgtttgttggctcatattctgcttcatcttgcctccaggtatctacctccgtacacgacgtggttcccatttgaagagaattccactactaacgatagtaatgcagagaaccagggaatcagactgctcgagagtacacttttgtcacaact

SEQ ID NO: 17068 - DNA, 441 bp, Oryza sativa
  unsure (1)..(441): unsure at all n locations
agcttcacttcatttcctttctcatctactatcatatacatcggnggaatgggccctattgggctgaaatacacacgcctacactcaacagtgagtattaatgaatcaacatgagcaaaccacatggctgcacaggaagatcagtaatagttcacccaactcagataagacgatgactagtttaaatcaaccggataaaaggatgtgtggtgcaaagaaatgcagtttgttctgctagtagtactgtaaaggttgtaacaatgataattcaggatcattgagtggtagatagtttgcccaaacattgttgatttgttgtttaaatatgtgttcaccaccaaattcctacaatcaatccctcgaggaaaaataaatcctacgatccaagcacacgaagacatagaagtttcaacgatagtaatcaaaacattcttagcaatc

SEQ ID NO: 17069 - DNA, 486 bp, Oryza sativa
  unsure (1)..(486): unsure at all n locations
tactaagctgagtgtaaagtgtcagcctttgggttagtgggttcttattaaccaaatcaatactttctgtgcgcaactatttggctcaccattatgcttctgctcaggaaacatgtagtatgcaacaagaacagattcaaactttgcagaaacaacttgcagttgcaacaaataaactgaaggttagaaataatattttgtcagtgctgatttacatgtgagatatgattatatgacatttgatctaattgtttacttttgcagcttgctgatgttactgcaattgaggcgatgacaggatatgaagaacaaaaggtgataataaaagatctggaagaacgtttggcatccgcagaatttcaaattgttgaagctgacaagctacganagaaactgcacaatacaatattggtaattggttcagcatactagcacttcttactaanaacaatttctctattttactgacagaagaaattnttgagt

SEQ ID NO: 17070 - DNA, 421 bp, Oryza sativa
cagcttatctagaagagtgcggtgcaatttgtttctatatgacagctatctgctaattaggcctagtttgctagcttccttttatccttacgaaagcgtgtttagtgtccgataagaactttatcttttcctttatagatactttcttgtccgacaaggactagtatctccttatgggtataaatatgtacacccggggtcattgcaatctatcaatcctcacgatcaatacacttcagcgcatcgccaccctttttaccttttctactttattctattgtccggcgtatctagtcacccgacggagggctgcatcggtgttcgatctccggcgaaggggtaagtccaatgttccgtcgtgctatgcagctgtatcgtctactcccgcgtctatcaatgctgcatcactatattcctcctc

SEQ ID NO: 17071 - DNA, 356 bp, Oryza sativa
  unsure (1)..(356): unsure at all n locations
ntctctacattaattcacagctaaattaacatatccaatatatatatctatganaaaattggaccttttatattaaaagatatggtcttgatcttttcattaacaaaactggtatttgctaattagaggccagtcttccaaatggggcttgtgtctcaactagccccaacaacctatccgccatcagaaatgttaaaaatatatatcaaattagaaaatagtattgtctcagttttaacacagaagagagcaattggtttgctttcagtacggattatgggaacaatctatcatgacattgttcaagaatcaacaaaaacccggcaattttttgaggaactccctactccggcagc

SEQ ID NO: 17072 - DNA, 430 bp, Oryza sativa
  unsure (1)..(430): unsure at all n locations
agctngctctcaatgattatggctgcactgtatgtacgccagcggatacattggcacctgccgcttggtgataacgacattatgaataaaattggtgtacgtgaaagaacttttttgctaccgtacatttctgataagtttgcgctctaaagattcatactctactgatatgtcatactttcccttacacatacttgatgccattctatccgatgatgatgacgcacatctcgttaccaaggttagctagctacagtcttctatgcacgctgctctgagtattgagctgtgatacacatcgtatggagcattcatatcacactgttgtttgatttgatggatcgcaaatcaagagctcgtcgaacatatgaaccaacttatttccgacaaggtgaatgagaagaccgtgctcctgatatttgtctgcata

SEQ ID NO: 17073 - DNA, 209 bp, Oryza sativa
tgacacgatccttaccttgaattgatgcagtagatgctttgtcttatcagtgcatagaaactgtcgtcatctgcatcttcttctacttcggcttcgcgagcccaaatcatcctaatcttctctatcttcttaaataccactcaaaaaaaagaagatagtgcagataaccgtacggctccttactataaacgcacacagtggatattgca

SEQ ID NO: 17074 - DNA, 440 bp, Oryza sativa
agcttaacaaggctaaaaaatggatcattttccgctacccttcatctatactaatataaaaaggaggagttgcccccctccaatgctacaggtcaaatcatccggactaatctgaaccgtccatccgcgtgcttctcttcctccaccacatgatttcacagccgaggattccacgcgcgaagacatcactcctcctccacccgcagctgcggagaccgcgcgcctctcttcctcgctcactcctccaagtgtcctcgcaggagcgactccccgctgccgctgcggccgtcctcctcactcgctgctcctgctccccgctgccgccgctacgccgcgccctagccggagccgccgtggccgtcctccttcttccccaccgccgcgccccgctcttccccaccttcttcttcccagatcgtgcttctcccactcggatcagc

SEQ ID NO: 17075 - DNA, 343 bp, Oryza sativa
cttgccgaacggagccgctgaagccactgagcaagcgtattattattattgtgtatggtccgcatctactccattcgttctaaaataaaaccaacctaatatcggattatgtcacatcaacacattcggtactagttaggttgttttttatgagatatgatatgaagggagtgttggctcacctgtgattaattagcatgggataaatgatgtaatcgatctttaaattctcataaccatatagcaagtaaatgtttgtttagatattttcaaaaaacaacgatagttaatttatgcatatgttgccaaatttcagtagagcagcttagtaaagaatttaccc

SEQ ID NO: 17076 - DNA, 440 bp, Oryza sativa
  unsure (1)..(440): unsure at all n locations
agcnntggggtactgctcgagttcctgtgtttacctcacaaaagaaagcaagatagtcaagtgcagtaaatttgtggaagcagcatataggaaacgaccaagcctctccatcctcagagaacaaatcaacatggaacccggattcagagcttaaccactacctcgtcaccaatcatactaagcatgatccgacgcttggtggcgacgatgtcgatctccttgggtggtggaaagagaaagagcgaactcttcctgtgttagctcactttgctcgagatattcttctggttccggcctccttcgtttcttccgagcaagcattcagcgttactggaatcattagggagaaaagaacgaaggtcatgcctgacagccgagacagttgagtcaatcttttgtcttanagactggatggaagcagatgaacgaatgcaacattg

SEQ ID NO: 17077 - DNA, 379 bp, Oryza sativa
gtgtaagctttctacaatgtgcagttgatgcaagcttaattgtgcgggtggtattattacgcactatataatttagctgacaaaccatatggcgacatgaagatttgtttgacatacctgacagcatggcagatattgaaaggatctcatttgaacagttgtattttggactgatgacaagcatctttgacatctggggatctagaggaaattcactcattgtttcacctaaaggcgtgaggtttacatcatcatcaagtgcccctaagtagttcaaaacttgcaacgccctcatcaaagcttctggtgcatgaggatccatatagtcgaaatgcactcaatcatcgattccaagcttcttcaaggtgagaaccgtctt

SEQ ID NO: 17078 - DNA, 435 bp, Oryza sativa
  unsure (1)..(435): unsure at all n locations
agcttcaagtccttgtcattgcaaatatctttttatccctgctgatggcaacttgctcaggatcattgttgagttcttgaccaagatcgattacaaaactaccagacagaccatcttcttggaaatagtggacaacattgctattaggaacagaattgtaatcttgatcattgggtacttgtagtctaccaattggctgcaccttatacacaacccaccaattagtgaggtcttgcacagatttacatgggtacggcatgtaatacacctgtgtcgcttgatgagacaaaacaaatggttcgaattttggaaggattgacgcatgagcaacctcaaccagaccatatcttggtgtatacctcactttgcttgggtcaaaccaatggcaattgaagagcacaagtgtgagaggttntctgccatcaaagctgattt

SEQ ID NO: 17079 - DNA, 414 bp, Oryza sativa
  unsure (1)..(414): unsure at all n locations
tactaagcttgagatatatattntatcgtgaaagctgagacttaatctcttgttattgattatcacctagtatatgctgaggttaatttactggagacgggatctaaaaagggagctcgaagagagaaccatgggcaacgttgctggacgtgctgcaggtgcttgtaagtattcttttctgaaaaattgctctctcaacctggatctcatttgaagttatctttgttcagattagattagacactagtaacacattagtcattctaacctgtacatcggtatgtatgggtatttcaagttagtgcaaaagatatttgagcaaatgggcagtaacattagttttacttgtgtgtactgcaattgtcaatgggcagactatgtatttggaagataaaacatagcattcagacccta

SEQ ID NO: 17080 - DNA, 440 bp, Oryza sativa
  unsure (1)..(440): unsure at all n locations
agcttcatactgctggaccatgtcgcatgcgtctntgagggcggttggccagaaaaatccttgtcgaaaagcttttccgaccaatgtccgaccggcggcgtgtgacccacagatcccttcatgtatgtcgaggaggagatgtctactgtcgtcggacgagacgcattttaggagtaccccgtttggtgccttcttgtatagatcgttgccgatcatacagttgatttttgctttatgggttatttttttggcttctgcgtcgtcctcgggcaactcttcgctgcctatgaatttaatgagtggggtgcgccggtcgtctgtggtctcgatatcggcaatggcgcgctctacctctgtagcccccgagctgatgttgagggcgaccgggctatcttcgccgcttgcctctttcactgatgggcttgtcaggacgtccagaa

SEQ ID NO: 17081 - DNA, 246 bp, Oryza sativa
  unsure (1)..(246): unsure at all n locations
ntntcttgaaaacccatttgcatcctacaggcttgcacctatatggacgctcaacgacttcacaagtaccattaaacataattgagtctatctcactgcgtaccgcttcctttcagtagttagcgtcaggagatgaatatgccttttctatggttcttggagtgtcatctacgaagtatacaatgtaatcatctccaaaggattgcaaccctttgtctcttactctttcgagtatctataatggta

SEQ ID NO: 17082 - DNA, 456 bp, Oryza sativa
ggatcttaagcaccgagctgcagcttttgaactgcaatgcctttatgtcttccagcaatatgttattgcttccatctcataatgtacatgattatctatgtcaattccctagcatgagttttgtttggttaggcagttttaaactagtatttttttgaagaacgttttaaactagtcattagcatgttatatagtaagaagaatctagtttggtttattccctggtctgtatatagtaaatgtactggtaaactatttatagctaataatttgcttgcagaaatgatgtttattttttgcctatgttctaccaatcagcacttcaggaggccaaagtttgttctgtgatatagtgaacctgaggagcttcatattgttttgccgaacagattacgaggctctgtgatgcccactcttgatgctgcttgttaggctgaatgtttgtcctttacatga

SEQ ID NO: 17083 - DNA, 402 bp, Oryza sativa
tcgcgtagtctagcggcggcgcgggcccgtccatgttttatcttctccgagcacgtaatggcgcgtgtggaacggccccgtcgacgacgagagcccgacgtacgccgtgccgttcaccaccggcgagaggtcgacggcgacggagatgaggggcctcctcggcttggccacctcgacgggcgccagcgtcacgttcaccaccgcggcgcggccgtcgtagtccacccagacctgcatggcggcgccgctgaagagcgtcaggttcttgaacgcgccgccggtggcgtcgtcgtagtagccggcgggctctgcggcgacggacaccaggccgttcacgtcgacgccgacgtggttgctgttgatgtcccggaactccgggttgaggatggtgtcgagctcgac

SEQ ID NO: 17084 - DNA, 431 bp, Oryza sativa
  unsure (1)..(431): unsure at all n locations
agcttnttgctgctctgccccccaagtatattgctgattggccttcaatcgtaataatgacgtaaaaggctctaatctaccagacaaattagaaataaaccttctaacgaaattaatcttgccgatcatctcttgcaattctgttttatcctccggaggcttaatcttcttgatcgcatcgatacttctttgggtaatctcaatccccctctcatgaacaagaaatcccaagaacagaccagccgacacaccaaaagcacatttcgtcgggttcatcttcaagccatatttcctggttctctcaaaaacattcctcanatcggctatatggtcctctatctgtttagacttaacaaccacatcatcaatgtagacctcaaccaaccagccgattaaatcatgatatatataattcatagctctntgatatg

SEQ ID NO: 17085 - DNA, 67 bp, Oryza sativa
tgtcgccgcgttctaagtgatcttgtagtgctcattttgttttttaaagccgctgcgaactatcttc

SEQ ID NO: 17086 - DNA, 424 bp, Oryza sativa
  unsure (1)..(424): unsure at all n locations
agcttcaattttataacagactgttttattatgtggttntccaattggacagaatccaagataagaacagttagaatgagaaccacaagaacctggaactgcaagaacaatgtctgggacatcattgtgcagacgataaatcaagaatattgaatataagatacaggaagatgaaacaatttcagtgtgcactactgataaactggatacacaaattcagtcattcagagattaccacaccactaacacacatactaatacctttcttgcaagaacaccaccactcacacagcttcagaagctgaaagctgagacagcaatggcgaaggagaaggccagtgccaggatggacgtcgtcgtcgccggagctggcatcgccgccgcgtttttcctcggccgcgtgtcggccggtccactgttgaca

SEQ ID NO: 17087 - DNA, 404 bp, Oryza sativa
tctccacttcatcaaaatcttcaacagtttctccaatatcgttctttgtagaccgatattcttgcaccctcttttgtaaccactctaaattagcctctttactcattatacaaatttatatggcttagccgtgctacactagccggctttacagagataggtacaaatttgccatcggagatactaataaaatcatagctagaaagatccctccccgataagtattggatattcccatgacaccactcaaaagtagcatcggccattgcaacctcggctgatgtatccgcttgaacaatttcaacatcatctccgtcccattgaattaaacattgatgcaaggtagaaggcacggaacaattggcatggatccaacaacgacacaaaataacattgtagttacc

SEQ ID NO: 17088 - DNA, 440 bp, Oryza sativa
agctggacggctccggcgctttcagcgttcctctcgacaccgaccttcacagctctgactgcattgcccagctccacagcgcaaccaacgagccatgccccgggcaagagccatccaagatcgtgccattgtcggagggcacctttgtcaccgtcgctggcaagaccagctatccgtcggctttgtgtgcgtcggcgaccatctgcggccccatcaagaagaagatcatcgaccacttccataagaagccggtgccaccgaagccggatcccaagccagagccgcccaagccgaagccagagccagagcaccccatcctcgaccacttccacaagaaggagaaggacttctttgaccacttccacaagaagcccgtaccacccaagcctgagccaaagtcggaacccaagccacagcccaagccacagccagcgcctgag

SEQ ID NO: 17089 - DNA, 331 bp, Oryza sativa
tcttactgtagacaaagatttcaccatgtttgttgtatgaagcatgggctacatagatccagtattccataagaccggccatttaacacaaaagagtgatgtatacagttttggagttgtactgctagagctcatatgtaggaagccaacaatatatggtgaaaattgtagcctcatcattgagttccaaaatgcctatgatcaagagaacagtgggaggataatgtttgacaaggagattgcaaaacaagaagatatcctaatcctagaagaaataggcagattagcaatggagtgtttgaaagaaaaggttgaagagcgacctgatatg

SEQ ID NO: 17090 - DNA, 440 bp, Oryza sativa
  unsure (1)..(440): unsure at all n locations
agcttgaagcaacatggaagaagaattgattcttagtcttctagtctttccttttgtattttggtgtttctcggtcataaaacttggatctaagtattcatatttgtaatatttggttgtgtatatccacatgtagatgtagaggccagatttatatccattatctaaaaaaacatccaattattaaaatctcaaaagcatagacagagtaaaatatgaaagttttcctgaatgtcttttttttcgcattaaacaccacatataagcatgtattatttaccaggataagactttatgttgtagcggtcaattataaggtcaagttaggcatttactagaggcatttgcacaaaagtgacattacaatctcattttgaatgcatgaattttacataattntcatagtaattagttttagttccctcgaaaaatctttaaat

SEQ ID NO: 17091 - DNA, 476 bp, Oryza sativa
  unsure (1)..(476): unsure at all n locations
taatgaaactaatttagtgttgtagatattagtatatttatgtataaacttgattaaacttaaagtagattaattttgatcaaagtcaaaatagcttataatctaaaacggatgtagtagcttgcaacattgctgctaacccatttctcccgaaaaaaaacgatgtatcttatttgcgcatgattaagtaattattaactaaaataaaaaataatataattttaaagtagcattcctgtggaacatttttaaaagaaaattacaccgtttagcaattcgggaaacacgtggaaaatgagagtataaattgaaaaaaggattgctaagctctaatcatttgaactatcattgataaggcgacaaanaaacaaatgaactaacaaaaaaatcttatggataaacatttatattcatgttattggaggttntgaagcttaaactgtaaaaatgatattaaaaaattgggattctctcga

SEQ ID NO: 17092 - DNA, 440 bp, Oryza sativa
agcttagcaactggccttggatgcttgttatattaacaatcctcagttctatgagatggcttggcacagttaatgcagaaaacagaaacgttgcaatccctagccagatgacccacatttttgcatctctgacaaaaaaatctttgtgggataggattgttaccagcacggggattggattgcagaggttgttctggctgcagcacagaggtatcacccttctctgtttccttggctggttccttatgctgaatagggcgatactgctgctttgttgctcctcgtgcagccatggttttggcttgatcccccaaagctcctcccccaatcccctgcagcgactcacctcccgttgaaaacgtcggagcttgtggctttctcccctcgccgaagtttcgcatcggccttggattgaaacgcccacgccatgcacctccccc

SEQ ID NO: 17093 - DNA, 480 bp, Oryza sativa
  unsure (1)..(480): unsure at all n locations
ctaagcttcagattgtcttgagttcccggaagttgaaaccattttgcacgaccctgtnttcacaacaaaagtgaaaacaaccaaggttatacagaggtaaatataaagcattagctcagttaatctctgttatgaatcttccccttcaacggcgctagaaatgcttgatggtatttcttaacaacattattagaaatataattcccagcaatggcgcaaaaatacttatggtatattatggttatagagtttatccgcaagcgcacggatataccattgtagcaattcacccgagagtattccaagggtatcatatttattttatcccgtgggaagatcatgtagagagaacttgactaataatctatatattacttgtgataatcatattctaagcaggggttagaataatccaacggtagagtgacacacaagcattagctacttattctcataatatattatctaagctaagtggaa

SEQ ID NO: 17094 - DNA, 441 bp, Oryza sativa
  unsure (1)..(441): unsure at all n locations
agcttctcattcctttcggagatgattcttcttaataattggcgcagcaacattgcgttcactttatctttgagcatttggaagatatctatgctccatagaatgtaccatttttttctgaccccaaggttctagactaatggcagacctgcttgagcggccataattcaggatggatctaccacaagtccacaaactagaaatttagttcagccggtgtatcaatatttgatcaaccgtgacaaatgctagtatcagatatgtgttctgcagtatgaagatcggatgattattaactaaatcacattacaaaactggggcatggcagaacatggtgtagtcgtgatatgcatcaggtgatgattgatttaatcacattacanaattgggacatggcacaacatagtgtatctggcaaaacatcagcacgagcgcacaacg

SEQ ID NO: 17095 - DNA, 436 bp, Oryza sativa
  unsure (1)..(436): unsure at all n locations
tgaatcgcctgganaccagngatctatacctatcgacttattattttacagctcgganaggaggcaccatgttcgctgtggacgctagaaattcccacattaatcggagaaaaggacaagaccagaagagaaacgtccaagtaggaatacaatctaaaaatagctgaaattcgggattaaaaataagcaatattgaaagaagtttccatataaaaacctaatacgagattaatcaaaattcgaaatactaataaaataaaatccaaaattagaaaaggaaagaagagtccaagtaagaatacaatttataaatagctgatattcggaattaagaataagcaatattgaaagagagttccatataataacccaatacgagattaatcaaaattcggaataaaaataagaaanatccanaattagaaaggaaaggaga

SEQ ID NO: 17096 - DNA, 443 bp, Oryza sativa
  unsure (1)..(443): unsure at all n locations
agctngatccgccgcggatgccttggttatttttaatggcttgcagaagttgggtttgggtggccataactccggccagggtggttaggtcaggtgtttgggtttcttcattgctggttgacgcccgacgtcggcttgccatctgtgtaggttgatggagtaagtatcctaattttctaactagctcctatggttttatcccattaagggagttgtgttgatatgaactttgttttgcaagcatggtggaataaactcatttataacacaacaacaatagatatcataaataacatcacagagtttcacaaatggtacataaatcatgatgcaatcgactgcatacatacgcagtccaaataaggttcatctaaaagatacatcaaactaatcatcaatctactcgtcaatctaggtaagagggggggtgtgtctcgcatgct

SEQ ID NO: 17097 - DNA, 402 bp, Oryza sativa
taccctgagagatcccttcttggcgcccgcggcggcgcttttcttatctgcgagccggtactcatgcatgatccaatcagtcttgacccctcgcggcgccttgccggcgtagaacacgagcgccttcttgatcccaagcgtgcgcccccgcggcgcgacgggcttgtcggcgccggtggccttccagtacccgttgccggcggcgcggttggggcgtgacccattaggatacttgcgatcccgcggggtgaagaagtaccactccctggcgccgaacagcgcgcgctcgggcagatcccacgggtcgaacttgtagagatccacctcggcgatgatcggcaccggcaggcgctgccccgccgccttcctgcacaggtagtgctccaccagctcgtcgtccgt

SEQ ID NO: 17098 - DNA, 440 bp, Oryza sativa
  unsure (1)..(440): unsure at all n locations
agcnttgtgttctgtatttttctgtacatataggtgagcttatttattaggcttggtattctttatgtagatatgtaccatgcttcgtttattgatgggctacccttcttttttctccatttagggtcatcttgctccatcttcatctgattctggatcctcagggaatgtgataattgatttctactgggtgagttacatttcttgcatgtgatgggttaattagatcgatcaattatatggacttgttctatcattagtattgtattagcgatgacattcttcacctgtgtttatatttgataattgatacacagcgatagtgtttattatttattttctctttttttgcggggaggtattttcattattttgattctacatgaatttttctttacttgtgtatataacatgtaacattccagggaatggaactatat

SEQ ID NO: 17099 - DNA, 406 bp, Oryza sativa
  unsure (1)..(406): unsure at all n locations
tctcgtntacgtgctgagggtaggtaggatggtagaagttggtagaagttgagttnttttttttgacggagggagtatgcttttagccctttacatgctagtcagatgcaagttatacacatggtcggatgcatagcaatttccatattgcaaacacacggtgcattctcaatgtaaattgacagttaacattcgtctcatttgagtaaaatacgatgccggtccttaaagttgaagcgtggtatcacttaggtctatgatctttgtaaatcaacattaatgtccatcaacttgtttaaatgaatcgttgtgtgccaaaacacgtttgaacgccctacgtggctaatcaccgcggccgcatatatgatattatacccatccgagccaatccacctcttcttccccc

SEQ ID NO: 17100 - DNA, 435 bp, Oryza sativa
  unsure (1)..(435): unsure at all n locations
agctngtggaactacaacattgacctttttgaaggtgatgatatgataaaccggcaaatcttcaagattcaaagtcgtagtcaacccatatgcatatgtgatgagcgacttgattggctgattgaatgaccatttttagtaggtgtgtcgggcgatagcaacgtttaaatagcttcttgtttcttgagaaatggaaagaaacttgttccatcatctttcttccttaagtccaaaagagtattgcacgccttggagctttcgtggtcttaagtttatcatttcaagtgtgatttttttattgattatatacacctgacagaagttatctatttgtgtctctaggttttcacatttggatcggtccctctgaagacttacttacctgatggtgacattgatgtcactgcttttagtgatagtgaagaattgaaggat

SEQ ID NO: 17101 - DNA, 456 bp, Oryza sativa
  unsure (1)..(456): unsure at all n locations
ngattgccaggntcatcttaagcaagagccaagatgtgtttaatttgtattcatattgacaacaaaaatatggatgtgcatttttttatataaatgattaaaacccagcctctacatctaaacctaatatacgcagccaatttggatctgcatatggttgaaatattctgtttaaaaaagtaaattatccatgttatccaaatttaaattctaattcaataagtaaacacacaaatttgtaggatattacacgagttgtattattcttttagaaaaaaaagcatgaatttatatgcttttcttaaaataaattattcaccgaatacatatctactttatttaagtggttntgccataagtcatgggtattatataagccaaatgnggctacgcttaacgaactgaaggaagcaatttntaaaatctgtatttggtactccctccgtttcacaatgt

SEQ ID NO: 17102 - DNA, 465 bp, Oryza sativa
  unsure (1)..(465): unsure at all n locations
tcgaccgggatccttaagcaccgcggctgcagcttntctccacaaggcatttgatataccatgcggcacaagtggtctggcagtggaagctgatataactgaagaggttttagtggtatcttcttgataagctgaggaaattgcagatccatctggcttctcacttttagctgtggttgctgtcctttcggagggagtctgtaacagcgaaatgatatcatgaccggagttttctttctcaatctcaggaccattcttcttttcttgaagggctttatgttgctctttcctcatcatttcaaacgatgctgcacagaagggtaatatgagacactgaaaatgaatccagctaaaaaattagatgccatatgttgcatgaagagggactaaccccttcgtttcctttcttcctctgctctatcctcattagaaaattcagaagacccaaatgtttcatcgttcatt

SEQ ID NO: 17103 - DNA, 472 bp, Oryza sativa
tggtcacgtctggggtacaaatactcataagcccaatcatagcactaggtttggaggttagggttgagactaacctgaaccaatgtcatttgaagaggatttacttgtagggctcctggcttcgtgcctactgcgtacccctgaccccaggtagagtatggatagattgagttgattttttttcaaattgtcagctcttttccttctcgtggacttatattgagtcgtgcactttctgtgattccttacagcagtttttaaatatatatctcttttgttgttctgcagatttaccaaagcaatttttctagcattttctcatggaagtgaacaataccatgaaagtggtgggttgcgtacgtcttgagtacaatgattcgattaattgccgagacaggaagaataaaatagatggatctgtgtatatctggaaatggtgggtctgcattcatgattacacaatacagtactc

SEQ ID NO: 17104 - DNA, 465 bp, Oryza sativa
ctccttctcgacccggatcttaagtcaccgcggctgcagcttttctccacaaggcatttgatatatcaggcggcacaagtggtctggcagtggaagctgatagaactgaagaggttttagtggtatcttcttgataagctgaggaaattgcagatccatctggcttctcacttttagctgtggttgctgtcctttcggagggagtctgtaacagtgaaatgatatcatgaccggagttttctttctcaatctcaggaccattcttcttttcttgaagggctttatgttgctctttcctcatcatttcaaacgatgctgcacagaagggtaatatgagacactgaaaatgaatccagctaaaaaattagatgccatatgttgcatgaagagggactaaccccttcgtttcctttcttcctctgctctatcctcatttgaaaattcagaagacccaaatgtttcatc

SEQ ID NO: 17105 - DNA, 449 bp, Oryza sativa
atactcataagccctatcttatctctaggtttggaggttaaggttgagactaacctgaaccaatgtcatttgaagaggatttacttgtagggctcctggcttcgtgcctactgcgtacccctgaccccaggtagagtatggatagattgagttgattttttttcaaattgtcagctcttttccttctcgtggacttatattgagtcgtgcactttctgtgattccttaaagcagcttttaaatatatatctcttttgttgttctgcagatttaccaaagcaatttttctagcattttctcatggaagtgaacaataccatgaaagtggtgggttgcgtacgttctgagtacaatgattcgattaattgccgagacaggaagaataaaatagatcgatctttgtatagtttgaaatggtgggtcttgcatcatgattccacaatacatac

SEQ ID NO: 17106 - DNA, 433 bp, Oryza sativa
  unsure (1)..(433): unsure at all n locations
agcttagcgacgactcgatacgcagtctctttgacgctgaccctcagtggtgatggtggctagggttgcggctcagtgacaatggtggcaacgactacctctactgcgagcacacgtccacatccggcggtggtgggcatgcaagacgacgccagattggcaactaccagtcggccatgctattcctcacgagcatggatctaaagatgacgacctacgctctctctcgccaactacaacgatgaccacagtgcaaggactgtatgtgatgggggattttgagaatttgtgattctgtactggctggtttggatcctgattttcaattctttntttttttgctctgaaaaatattttcgatggcaggtctctttacgcagttgtcagctaaaatcgtattttgtcggtgaccatcttagcttggttatctatg

SEQ ID NO: 17107 - DNA, 439 bp, Oryza sativa
  unsure (1)..(439): unsure at all n locations
agctngcanatacctgggaaatggtgattcatgcaataggcacattattttttctattttttactgtggcatgtcgattttttaaaatacataattttgaattaaaatactcatgttgttctgggttgtcctaatatttgactatcaatttcgataaattattatagttccatacaatgagattccaaactcttagagattcaccataacaaatattctctctgtttcaaaataagtttattttttacatatctcacacataccaataaagaactagaatacccctgctttataaaatctcaatgcaactatttcttactaacttcaatataatgattacttaaaaaagaacttattttggaatggagaaataagtttcgtaatataacccacgtgttattaagctatacagatttttttaaattaatggtacatgttt

SEQ ID NO: 17108 - DNA, 379 bp, Oryza sativa
  unsure (1)..(379): unsure at all n locations
tgggacatataatacgatcctcgtttcgaagacttgtttatgtatataatggcaaccggctctgctcgaataatggacgaacctgcccgctgcagaatggcccggcgccgatgccaatggtcgggattgtcagtgccgaagtcgccgtcgccgccaccggagccggcacgcacttcagcacgacggcgaagcaagcggnctgctgcaacgcgagcgccggctccacgacctgcgtgtgcgcaatcaaccagatcgatgatcagtagctagcacacgctcgccgccgtgccgtgccccgccgagcgcgacgcgttcacacgcaccttgacggcgctctcgaccgtctttcccttgggccggaacccgtcgagcgcgctga

SEQ ID NO: 17109 - DNA, 365 bp, Oryza sativa
acccagggctgagttcgtctttctcaaatctggctgctatgggtgacagtttccctaatgggtgtagagacccgcatctaagggacgagagcaaaatctgcacctgcgaatccatcagcatggcgccccgacatcatgaaggcctagggccaagaaactaatctcaatggaggaggatatctcctcaagttacaagagaaaaacccacaatatcaggctggcccaaatacttggagtataaaatggatctaaactaatccccacataccttactagctcaaggatcgatgtgtatgtccatgcacaacaactccctctcccagtcccgagtgacgccaccctcattttcatcgcacgaaacgtgc

SEQ ID NO: 17110 - DNA, 370 bp, Oryza sativa
  unsure (1)..(370): unsure at all n locations
tgccgttcgccttgngaacgaccaccgggttcgccagccactccggatggatgacctcacggatgaacccggcctccaaaagtctagccacctcctcgcggatgaaggcttgacgttccggggcctgccgccgcactttctgccggatcggccttgcatccggtcgtacggcgagacggtgctcaatcacctccctggggaccccgggcatatccgccggtctccatgcgaagacatcagcgtttgcccgcaggaaggagacgagcgcgtcttcctatttgccatccagaagaccaccgatccgtgtggtcttggatgggccgtcgcccaaggcaacctccttgaccgggacctcgtcgcatgtggcaat

SEQ ID NO: 17111 - DNA, 432 bp, Oryza sativa
  unsure (1)..(432): unsure at all n locations
agcttaagctaagcgaccatgtatttacattagtcaggtagtgggattcacagatttccacacaccaaccaacataagcagagagccggccatcacaaagagagccggccactgccacccccaccctagtcgcacaacaaagctaatccatttctgaatatgaggtgcatgctgctgttctcgtgtctccaacgaaggtacattattctcatcgctatatctagactccactctcaacagcctctgctgtagatgaggtgcacggggctgagtagcatgtaccaacatctcttctgcacgtgggaaattgaaggagatcagctacatcgtcagagagaagaaaataactcagccacaacagccctgcagacaacattggctccagtagtctgtttcacaaatgttccacacgatcccatnctctagactata

SEQ ID NO: 17112 - DNA, 453 bp, Oryza sativa
  unsure (1)..(453): unsure at all n locations
tacaatattgaatctcctcccccagatatcacattaatgatgggagcttctagaagatggaatggaagatgctcaacaagaacatcaaattcaccataaaagacatcctttttcttaaaggtacttccaaaagtgacatgacaagtactaaacagaatttttgcctaacacgaaaaaagtctaacaagtgaaggagctgcacaatcatcagccacgtatggcacatgatgttcgctgaaatttgtgggcgaagaaaagatgattggatgagggaaagggacctgcaaaacgaagtatctgcagggctgtagctgttggtggtatctgtctatctctgtcctaaccataacttatatgcgtccnccatgttagcccatttgttctcttctccttttgctttgtaaaaagtctgcttcttttgcgcgtaacatagcataccagagagagagagag

SEQ ID NO: 17113 - DNA, 467 bp, Oryza sativa
ttgctgaggaagatgatctggccatccgagctgttcatctttcttctctgaccaccctccaaaaatcagctgtaaacaccttgaatctgattgtagttccacccatggaagaactaccgtcaggcgaatatttagttgtgcacctaatcatcagcagcttgccactgcatgaaataacaaggtagcgactctcatcggagctgaaattttgtatccgttccaaaagcgtcaatggatggtgatgcactgccctgatcgcatgctcagcacgagatagtactgcatttgcactgacagtgtcaatgtcgtcgtcgttgatgatcccatggacaagaagctcctccttgctagtgagagcgtagagcttgcctcgatacaacgatatgtcctcgtattttctcctcatccacggataatcatcatcgtcgtcatcatcatcatcaccaccaggtcgtgacataacttca

SEQ ID NO: 17114 - DNA, 459 bp, Oryza sativa
cccgcgatccttaagtcacctgccgcatgcaagcttcgcttcttcctgcaatccgatgtttttatctagctgggtgtgattgcatgacgcgtctaggcctagcgaaaggcctacccggtggtgaggaggaggaggagttgcccatcgccggtgatgggcggtcggcgacgtaccggcggcggtactcgtcgacgtcagacgacggctccaccacgtcggcggcgaaccgcaccctgctcgtcctctcccgcggccgctgcggcttctcctgcttctgctgctgctgctgctgctgcgctcgcgctaagaatgaaaaagaagttgaatgctagtatcgatttcgattggtctatggtgattttggttgtagttcgatcgatcgatctcaccgatggagagcttgaggtccgcgatgaagcggcggtggagggagtaggagatgatgatgatgccggtgga

SEQ ID NO: 17115 - DNA, 274 bp, Oryza sativa
cacatcaaagcttcacaacacattaccggactttgactttatttgatgatcaggacatggattacgacaatgtatcgtgctaattgatgacagcggaatgcatgacgctcgccataatactggttagatatattcctatccacccgctttacatgcctaagtgatcacactatcgatatgtcatcgattatgttgatgattcgagatgtaagtaaacacggttagtacaggttgagaagattgtttcaataccttgagaaacaacaacttcttc

SEQ ID NO: 17116 - DNA, 435 bp, Oryza sativa
  unsure (1)..(435): unsure at all n locations
agctctaccggacgtataaaggggaggaggttatatctgtacatgactnccggttcgtgggtatgttcgtctcgcgagtttacttcctccgctctaaaatataacaatttagaatacgataagattcactatattagattatatcacattctattttagtttatttaattgtaggacacaaggattatatcacattctattctagtgtatttaattctaagacaacaggagcatacatgtttagctaactaagtcgtataaatttaacattactagcacacatttgaggtatgcgtgtatgggtgccgagatatattgatattgtacacgagcacgaggcgatttggaaggtggcactagcttggacctgttggcgaactgcacaagcacttaacgtggacgtgagtagctgaggacctaatctgggtgcacttc

SEQ ID NO: 17117 - DNA, 483 bp, Oryza sativa
  unsure (1)..(483): unsure at all n locations
tgaagctcacctcgataaaagcatcacccatgttctatgtatttatcatccagaggagctcctcctcctcatttagccagcatccatgctctcctactcacattcgtcgacctccagcttccttgatcccctttgtcccaaaggggttataagcaacaaccacaagagtggcggcaggccagcgacatggaggccatggcgagaagcaattcaaccgtagctatcctctctagggttcaaaattccagaatgaaattctaaaatttcgaaaatttcggttattgaaccccctgatatgatattattttttctgaaatttttaaattttttgtgaatttggcaatattagtttaaacttatagacttactacctaaagcgtagcgcttggattagtaaagaaaatcgcttctttctacacccagcgatcccaccaactaacaccaccctgtccttctnncattgtgcgttccgagtagtaattc

SEQ ID NO: 17118 - DNA, 442 bp, Oryza sativa
  unsure (1)..(442): unsure at all n locations
agctggagcacatgctaactaacaagtgatgatattcactatcagcaaaatcgaatttggggataaatggcatctaaaattgctattctccaatcaaccctaacaaaaaaataaagaaaaaacgaaaagaaataagagagagaagagaaggtcgagattttacagcatcagaacagcagcgtcgtacaaaatctcagtcctgggctaattttaattntgaccagaaaaccatgaaaattcgcaaatttaccacgatccccacacgaacaaacaccgccaagatcgcgaccttcacagataaactcccacccaactcctcaaattcaacacagaagatatgcaaagtgaagcaaaaaaaaaaaagaactccaaaatcaacaagcaacccaaataaaaggggaaaaaaagcaacgaaccagctgaatcttgcgcctgctgagct

SEQ ID NO: 17119 - DNA, 378 bp, Oryza sativa
catactaagctaagtattatggtgcaaaccgcattgatctgatgtgttttttaacactcaagaaggcgagcttgagtccttattacgacagccatatcatatgcacatgatatctaccgttgactgacccccatcaagcgaccttaacacacaaactaacaagctgaaactaaacaatcgataaactatatgggaaagacgagcctaatgctcggaacggttcctgcggacggtggagtcaaaagcgcactgctgatcgctacgtggtgcctatgagcggctactggagcctgacagatcagaatgcgcgatgccactgaggagtagcggcaaccagacttcggtaccactggctggacctctggcggctgatgctgg

SEQ ID NO: 17120 - DNA, 443 bp, Oryza sativa
  unsure (1)..(443): unsure at all n locations
agcttgccgaggtctgtctccccgcgactcgatctctatatccttagctaacgttttcggccgtcactcctaccttcaccccagctcgctcaccaaggtctcccgacatctgcctccctgcaactcgagctcaagatccatagctcacatctgtggctaacgctcgggaaagaggagaagttgcagctgaagagatcgtggagggcgacgcgttcagtggtggccggggtttgaggaggtggatggtggggtcgggtaggagacggcgagctggaaggtggcgttgggggacctgcggcggtggaaggcatctgcggagtgtgcttcggtgtcagtggacgagctggagcggcggtccagtgtcgtggtgaggcaagtgtangaggagctcgtcaggtggcttcgcgtaggaggaggagtttgtcggccgaccgcgatgcgtg

SEQ ID NO: 17121 - DNA, 452 bp, Oryza sativa
  unsure (1)..(452): unsure at all n locations
ngaccggagaagaaagctgcggcggcgagccgatcgagaccatgggtgagtcaccgtcgtttggttcggtttgacttgaccagcttgaggcccacaaggcccatacagcaaattgggcctaaaaacttcatgggccaaaggcccaacgagggtcaaaacccagaagcggcagctcgctttttccccaacccggaggaggccgaggaacacacagatccagccgcagaagcaaaacccaggagcagccatggatcccctcgccgtgctccgggactacgccgcccgcggcgacctcgacaagatcatcttctccggcgacgaggtgctcttcgggtcggagtacaccttcccggccaacgcccccaccgncttcaccaacaagcagtcgggcccgccctacccgctctttcgcgncgtcttnctcgcgcagcacaacgacctcaagcacaccg

SEQ ID NO: 17122 - DNA, 437 bp, Oryza sativa
agcttaactccaaactaagtttatttctgtacttattaattcaaaattgctaaattattttatagcaaatgctaacaagagcaacaaaacgagtataaatctatatttctaatattgaaattttaaattatgtaattttgaaaaaatagagtaatagaagaaatattagaatggattatatatgaaattactaattaagattttggcaactatcagcttcattcaaagtaacatattttatcattatccagtgaaagtaataatattttaattattagtcacagtaacccgtgcaacgcacaggttgacggctagtggttataatatttaatctatggtcatgattttacgatctagttaatcaatggccagattaatctgattaacgtggaagctccgagaaagtgctcaattagtataggtatagatagatagat

SEQ ID NO: 17123 - DNA, 415 bp, Oryza sativa
  unsure (1)..(415): unsure at all n locations
tccattgagtgggtaagtaaataggcatttcttcttaatttttcttttactgtcgaatatattctcatacagtaaattgttacgacttaaaatctaactaaactttcatcagatgatagtaattcggaatacgaaaatatctggtgcaatttgttaacagcaaagatacatgttgctcgtataaattntgcttactaatattctttcacgccctaattaattcctagtatcaatgcacaaaggatggtttatgaatgaaaaccaggtgacaatttctgtaactaaacttgtaatgtcgatgtggttntttgtctctctccangcatggaacgtacgtctatctggaggtatacacaagctattcgatccatcactgtgtgacgagtctcaactgaaggagatcaaaagatgcatg

SEQ ID NO: 17124 - DNA, 434 bp, Oryza sativa
agctctatacatgggtttatctacatttaatctttggacacatgtttcgaggtacaaatttagtatatttctctttaatttatactgttattatgtgcaaacagttgatttaactaacctgaatattcgaatttacgcatgtccttcgtatggcaggtttacatgattaaatgttgtcattgttggcagtagggaatgagctaaatatcgtggttttgtatgatctgttgtaaaatctgattgctgcttgggatcttattgaccaagctataaacactactttctgctagtccagttgccgtcaacaatccataacaaaaaatcatgatccagatgctgaatatataaaagctaaaatgtagatcaaaactcatgatcgatcgatgtatatggtccgatctttcatagcggaagaatgaacaatgtgtaactat

SEQ ID NO: 17125 - DNA, 415 bp, Oryza sativa
tgatgtgccgttatcaggaaacataccaattgtttttttcttctgaaacttgattcgagaaagcggcttcgtcaggatatctgcaagttgcccttctgtgccgatgtaactcggtgtgatttccccattctccacggcttcacgaatgaaatgaaattttgtttgaatgtgcttacttcgatcgtgaaaaatatggttcttcatcatggccagagcggattgggtgtccaccctgagatcgacgacttcagttgctgcattcctgaggtcaccgaggagccgggcaagccaaatgccctggcatgcagctgttgcagctgcaatatactcagattcacaggaggagagtgctacaactcttctgttttgagactggcagctaacaggaattttgccgacaaagaaattactcctg

SEQ ID NO: 17126 - DNA, 439 bp, Oryza sativa
agcttgacttctacagcggggcgactcttctcccaggcaattcttgacggcagtgatgaaaccaacttcgacaagacagctccaactaggaagatcttcagctctggtgtggggaaaaagagagcaagactgagtactacccactgtactcagcaagtcataccggaagaggaggtatgatgcaggatatatccaaaggaggcttagggttcatttgcaataaagcaggcatttaaaaacagtagttgaaagcagtaaaaacagatgtagtagattaagccagattaaccaatcactgtccaacgctacaccacgttgcaactggcccaaccaaccacctgaactacaccagttcatcaaactaaactaggggtgagactaatcacggtgaatctggttgatcgctcataaccacgggcacggctattcgaatagttta

SEQ ID NO: 17127 - DNA, 484 bp, Oryza sativa
  unsure (1)..(484): unsure at all n locations
actcaagcttatatgtttctgtgcattcggtttgatggagtgtgtttgtgtgatagcacgaaagccctatttcacccaaacgcccgagcaaagatagcacgcgggttctgaacttgaatgacaaacatggatgctgaaattgccctctgaactctgaaccagaaaaacaaaaacttggacaattctttgaaatcagacaatgatttgagtcttgtgaaggcaacagtgattctttatgttgggccaaaacgcataaattccgttgccgggactcgaacccgggtctctcgggtgagagccgagtatcctaaccagctagactacaacggattatgacacaataattttgtgttagaatgattactcagaaattggcatcttttcacgttattaccgacaaatgactgtatcagtcgactgcaacaagaagatagcttagattggcagaaacagactagcttagntctacatcgttagctcaatc

SEQ ID NO: 17128 - DNA, 439 bp, Oryza sativa
  unsure (1)..(439): unsure at all n locations
agcttataacatcaaaacgcaatgtttatcttctgctntccttgataacagatgcagcaataaagatgatttaagctgacataagaacttatttttccgccttaaagtgggcttgcacgttttaggcctaatccgattacatttgggccttaatggtctttcacttcttggaccaaagcctattacatttttgcttacaccacggcaaggcattctcttttttagggcttaaacgttttatacaacacttcagtaaagtactccgtactccaatattatttgcagtcaataaaactattattccaattaacaacatagcaagctcttcaagtggagttaaattaatttttaaaaaagattgaactgaaatgatggagaggcgccacaagcacaatttccaaggcatctgcttgatcagattccatttcattcctctctt

SEQ ID NO: 17129 - DNA, 145 bp, Oryza sativa
ggcacgaactcgtgcaccacggcgcgggcctccgggcacgcgcccacgagcgtgacgaggttcgggtgcctcgccctgccgacggcttccacctcgcggcagaaaccgacctcgtcgactgcgacgtcacgggcgatcatcttga

SEQ ID NO: 17130 - DNA, 439 bp, Oryza sativa
agcttgacggggccactggcttcgcctttgcttctatcatgacggacgggtattatactatctactcctaaattactgatgacgacgaaaatgaaacgagtagtacttactactattccatctgttttaaaatatagtaacctaatactcttagtattaggttgtgtcgaatagaattgtctaaatttatagtaataggttggctctaattgagtactagattagtatgatttgagatggagagactagtgcattagtagagtactggttgttttgacagcttgagatgatgaaagagattatacgtagtacaagcaaagaatcgaatctgaagctcatcgattgacaatgcagggatcagagtttcagaggctggcgctggacatgacgttcatgcatgcatccaagcacgggtggcacggatggtagccttcttggt

SEQ ID NO: 17131 - DNA, 444 bp, Oryza sativa
tgtcctcgttcttgacagtggtcaagcacagaacagatgctttcttcttgtgaacaatctgcatatgatcatttgcgaaggttgagctccgctttctactagcatctatactttcaataagtacattcaatttgagtatggagagtcaggaaatataccgatccaaggcgagctttgcccttaacgatgcagtaagggacctccatcttcctacacagggctggaagccacacaaccagctcaattggatcaacatcatgagcgatgacaaccagctgggccttgctctgcgcgagaagcattcaaattatcagtaaagtgcttgattatatgttcccatgaataagtctccttgatgagtgactaacaaagaaatgaacacattaacaagctcctgtacctgctcaatgaggtaagtcacgtgggtaagaacatacttcacaa

SEQ ID NO: 17132 - DNA, 426 bp, Oryza sativa
agcttctgaatcacgcgtgcatgtataatataataattttcagtaattcactatatccagtcttcaggtgccttgtcgcactattaaaaagtgaattttttttcaaacttccaggctcatttctataggctggtcataagaaaatctgctggtaataatgatgaggatgtcctataatttaaattaaaaccgcttgtgaaaaatctgatcatgcatatattcgtagaatagttcttaccagctagctagtgatgagtactaccactgctctcaaatatttatcatatatatatttagggcatgttcactttgatgccaagcagaatttcttatatagttaccaaaatttggcaacaaactaaatatagccacttttttggcaactctatcaaaatttggaagggtgaaaatggcatcaaagtgaac

SEQ ID NO: 17133 - DNA, 395 bp, Oryza sativa
  unsure (1)..(395): unsure at all n locations
tgaaacttgngatgaatgcaaaatactgatgagtatattatttgtgttttcatactatagacgtgctctccttgagaaatgggaacatctaaaataaggtgacaaaactgttagggagtactttcatgattttaaaatttgtatcacttatagtggtttacaagaatctaatgagaacacaatgactagatttttcagagggcttaatttcaatattcaagctgggcttgttaatgtgacatataatcatataggccaattgttcatgcttgcttgcattgttgagtgcaaaattttggagaatccaacggagcaacaagatatgctngtgcctcctatcactgatgttntgcangaagttcagaanagtcttcaaatgagaagacgatatgttg

SEQ ID NO: 17134 - DNA, 432 bp, Oryza sativa
agcttcaataaacggtttggagtctgttgcaatacaagcttcaatacaagagagacgagtaaattaaatattaatatattaataattaactattgtataaataggctattaaattgacgaagctagtagttagttatattatattattaagggactaactagctgtcattcgacaaattttagtatagcttaactggttagattctttgtggtggaaccagcccacccaggtttaaatcctagaattgacatgggtgctcgtatttacgggctatttattctttcagtggtaggtaatatacccgtcaatagcgaggcacttacacgcatcaataacttaatgggcttcaacctaactggaccaaccaacggtgctcacacgggctaaaaaaattataacaagcccatggtcaacttcttttttatcacaac

SEQ ID NO: 17135 - DNA, 440 bp, Oryza sativa
  unsure (1)..(440): unsure at all n locations
ggctcnncttttgatagtctagagactagatgcatatttcctaatgccgtgacattcaattccttgataaatgggttatgcaagtctggtaaagctgatattgcatggaaatttttggaaaagatggtttctgcaggttgcacacccgatacttacacatacagttcatttattgaacacctatgcaagatgaaggggtcacaagaaggtctgtcctttataggggagatgctacaaaaggatgtgaagccctcaacagtcaattatacaattgtgattcataagcttttaaaggagagaaactatggattggttgcgagaaacctgggcgaaatggtttcatcaggttgcaatcctgatgtagtcacttatacaacgtctatgcgtgcttactgcatttgaagaagactaaatgaagcagaaaatgttttgatggagat

SEQ ID NO: 17136 - DNA, 438 bp, Oryza sativa
  unsure (1)..(438): unsure at all n locations
gcttaacatagtactggagtcttgagacttgtgagcgttctcatcttaatttacatcatatgttatgcagctctgcaagctctcttctactttcagatgcactctgaaactgagaactgagtttgagctgacatttctgccagcttcatgtgcgtcagccgcactgacaacagcgaaaccgttggcgccgtggtatcatcgtcgcgatggacccccgaagaacctgaggctatcgatcctcgccgtcgccggaaaacaagaccgtcactgccacaattcggctgtcgtcatcctctaggccggtgacaagaactccttgaagtttcccagccagtggtagcccgaactctntcttgccatggaacttgtcgtcgacgacggccgccacgccgcagcaagccagccgccggagtgttgcgatgagggaacgccgacaga

SEQ ID NO: 17137 - DNA, 483 bp, Oryza sativa
  unsure (1)..(483): unsure at all n locations
tcgtcggcctagggttacctacatcagaaataagaaaatgttagcattttatagggtggatcatgcgactaacaagtaacaaccatgccgaattgctgtactggctgtctgaagctaagcccgtatacgaacaccaacacaaggccagccaaacaattgaatgcactattcagcggacaataggagtatattattagtgtattgctcagttgaagacttgtagcctcatcttttgcactgcaagaagtactcgtgttactcatggctaaaaactcttcacgtcagtttgtctgcagcacgtgcgtgtgtgcaggtttatctcagttcctcacaggattacggcgatgacgacgagaggcctttctcttctctgaccgtctttcgatcgcatccatctgcattcgtgcagagtagtagtcggctgccgcttctgttccaggccgagataaagtgacanaaaccacggcctgcaaattcaacatc

SEQ ID NO: 17138 - DNA, 457 bp, Oryza sativa
tcttaagtcacctgcggcatgcaagcttgaatgcagcatattatgacaacttgttagatacgctactgcatggcgtaactaaaaacataattctccaaagactggaagtgtaaacttacagatattgcagatttttcaactgcccaagctggggaaccaatgcacctgacagttgtgcatttccaagatcactgcgaaaggaaaatagatcagtcaacacacaaaatgatcacatttcttacttttgacaagcctaaaaatgataattctgtcaaaaacttacactctgatcacgctgttgtcatggttacaagttacatggaaccatgtgcatggattgaccagagtgggatcccaactctgcagcacattgttagcatctttcagactttggcgcagactatatagggcatcacctgacatcgaacataccctcaacatcagcaacatagtattt

SEQ ID NO: 17139 - DNA, 492 bp, Oryza sativa
  unsure (1)..(492): unsure at all n locations
tataaaactaagcttgccctacgtttcttcaagcccaaccttaaagtatgtactatcncatcccttgcacaagatagaatttcattaacaatacattcttcaagcaacatatttttttttggaaatagcttacgtggcactcaaattcttgagtttcctcgtatgctactaaaaatatggcatttcccttacaagacaccaaaatccaacgtgtatacaatctctaactgtaccatataacttggctgaacctgtgaaatgtatgaaatcgtatgttctacatcatatctgtataattgaacttcagcgagaaacagttaggaaaaacatntttattttttttgaactctcgaaggtaatttaagagaattcactgtgtttattaataaaacaaaacctctttgacatggatgcagtacatctgccacaccgggaaggcagggaccatggcgagaccaaaattttgaatataaggtaccaactacacggtat

SEQ ID NO: 17140 - DNA, 446 bp, Oryza sativa
  unsure (1)..(446): unsure at all n locations
agcttgnttattacgttgtggtttagattattgctaataagctaaagaattgaggttnttatgtgggcttaacaaagaaattcaggacatgcttgattgtcaaagatatacatctctttctcatttgttacaacttgcttgcaatgctgaaagtaaaatagaggaggacatgaagaagcaacatgctatgtttttgtcttctattactaaccatttgcaggaagtgcataatcatgaaaaggaggagagagacatgaaagagccgccagtcccattgatcacactcaaagtcgaggcacctccattatctgaagagggcatcaaaggtaaacttaatggtgctgaaattaataaaggtgagtgtgttgttaatgaattgaatttgtccacttttcatgctatagcagagcaaccattagtggaaccaactgctgagattcctttgt

SEQ ID NO: 17141 - DNA, 301 bp, Oryza sativa
  unsure (1)..(301): unsure at all n locations
tgcttaagccactcgcacgaacatagatangctttaccctgctcgctacagatggccatgagcctggcatgggcttactagcagcggcaggaggaccaagacaagaacgtttcgctcatggtgcccaaaccttagcacaagaccttgctttgcccacacctgatcacgtctacacgaacaccagcccctgtcaagaccgggtcgtcttccttcacgcacaagtaactgatggccctttcgcggtagccgatgccaagcctctcttaagagcctcacgccagaagagatgaatgaacggcgc

SEQ ID NO: 17142 - DNA, 415 bp, Oryza sativa
agcttaattctcatatcttcctctgacgtatatgttctagcagcataatggtgctgagaaatcaacctgagataacagctaggttgagcatatttcgctggacattatcctataatagataacttttacagtgtttgcattccagagagggtaaagatcctacgctgataatcacatgtactatgttaaaggtatttaagtattgatatacgcatttaagtactagaggtaaaaatataattttgctaggacatgtgaaaaggtagaattgtcctccatactataataggtaccgcatacgtacgctctacacatgtatcagcgtatcttacactatgtcaacgtatcttctacacggcttcttgaagattcacgttgtattccaattcagccaccgtaaggctctttgatgttc

SEQ ID NO: 17143 - DNA, 324 bp, Oryza sativa
  unsure (1)..(324): unsure at all n locations
atactaagcttgtcttatgggctnccacgtgggttagagacgctatttgtttcttatgaccaagaggggtgggactcgaaccgggcgtgcaaaggttatgactactacgtcatcgcctatcctgagcgtcaccgactaggatgcgggtatctcgccaagagagccacttgctataggaaagccatgaaaatcggggtccgcgccttcaagacataatcctgggacaccactccattgaagaacttganaagctcggccattgtcattagatgctcccttttcactcaatgactcagtcgaagttggcgaggagaaagtctatat

SEQ ID NO: 17144 - DNA, 439 bp, Oryza sativa
agcttatatcttctacatttacaattaaactgttactggtggcttggtacctcgaacattatcttgcctgcaccaacggtttgttcatgagtaaatagtttcttgctaccgattctgcagatagtcatacagctttagtcggcggttgtacatatacccttgtcacattcctctgattcgaaaattcggtgatgaactgttggatacagctagttgcttagtatcatcatggatagaagctgttctagtaggaaaatttcctgcatactttgggatattgttgtgaacaatgactgaaaattttagtgggaaatatatcttcgttaatgtgcatacaattttcttttcatcatatttactcttcctttaagctttcagtaaaaccgggctcaaaagcgaggaaaatcatattttactcttgttcatgaacctatggaac

SEQ ID NO: 17145 - DNA, 391 bp, Oryza sativa
tataattataagaagcgattatttggtactaccacctatatctattctaaaatatagctatctagcacagaatatctgtatagattcatagtactatagtactaggtaatatcaaatcctgtagtaggtagctatttttaaggacggaggaagtactagttagattatgagaatttaaaaaaaaatcgagtttcccagctctcgatctttaatttattttctagattctataactataactcatcaaaatcttaaaaaaaagctttttttttttgaaaacttcttattttaagagaaattgttagagagttttttattttaagaaaagctatagctgcagaagctccctgaacacacccaagaaaagagagaaagaaacaaccttgtgaca

SEQ ID NO: 17146 - DNA, 430 bp, Oryza sativa
  unsure (1)..(430): unsure at all n locations
agcttgaggctgtcaccaatggcatgtttatcttgaaactctagtcatggcgtttagaaatgctgtcgcttcgcggaatcggtaactgccgtttctgagagtatcatctcatcatctcttaggtccaagtagaaggccgacctgctgatgttcgtctgttcagagacccatctgtaggttgggagaggctacattttcgtttcttttgttcagtatgctatgttcagtatcctataacagcctttgcaggcaattccgacaataatatctacgtattttctgtctcattcacactgttcatgtgaatatgtgatagttgaaattccatatctgacggngaacttagggttttatttttcattactagtgaaattgaaatgattaatgtgaaaattcctcacaaaatttatgggccctttcctttggatcg

SEQ ID NO: 17147 - DNA, 382 bp, Oryza sativa
  unsure (1)..(382): unsure at all n locations
ctaccgcttttttcccggctggcgcagaggcggatgtgttctnttgcttttgtgggcgatcgcggctgatggatgcaagctcgcttatgatctccgatttggtttcgattcttttctttttttgtgagacggggaaagaggtggtggaacaaccgggagggaaacggctttttcgaacgttggtggggcaacggctctgccttcgaccttagtaaccttcatgcaggaaacaaatggcttttgaaggaatttttggaggatatccttcgaaataaataaatggctctcctaaactgctttggaattcattagagttgtctttaaatcatatatacgaatcttgaaggatttttcaaaatgacgttcaacatcttgaaaaaaa

SEQ ID NO: 17148 - DNA, 437 bp, Oryza sativa
  unsure (1)..(437): unsure at all n locations
agctntntccactgatcatgtaagattgtatcatgtatactcacgagcatgccacataaacggcatagatgacccaagtcttcataaacatgaatatcatcatggtggtcattgtccaactgtttcttatctatgcccgcaaccatattctaggccgggctattagtacaaagtagtggagaaatcacttatcttactcgcctgttttttttctctcttgttatggccataaatccattcattcagattagtcatggagcaagattttcactttttactcttcataagaagtgaaggactgacatattttttctgctatcttctttacaattcgaaagacttacattgataaacagagagtgattgtgttatttgaccgcataaataggaatatgggattcttggcgtacgcacatatttacgtgtttcccattttc

SEQ ID NO: 17149 - DNA, 471 bp, Oryza sativa
  unsure (1)..(471): unsure at all n locations
tctgttgtttagtggttgttaagttcaattaacatagtgtactgatattaaggctcctttccacaacaactatatgtttcttttgcattagaatattgaaattacattttgaatagatgtttgtaggtgaaaaagaaaaaaaaagacacaccaatgtttaaaaatttcaacggaatactatgctgcaatgcgagccaatgtagatcaataactactatgtactccatccgttccataatataagagattttgggtggatgtgacacgtcctagtacaatgaatctggacgtctatatgtgtctttacataatataaaatcccttatattatgggacggagggagtatgtgtgaggcaatctatgttattntcttaattttatacacccactattagaaaaatataaggtgtattttgttntgtaggacaagggattactaacggtccttcttaatatatattatgtgacac

SEQ ID NO: 17150 - DNA, 437 bp, Oryza sativa
agcttttccactgatcatgtaagattgtttctgtatactcacgagcatgccacataaacggcatagatgacccaagtcttcataaacatgaatatcatcatggtggtcattgtccaactgtttcttatctatgcccgcaaccatattctaggccgggctattagtacaaagtagtggagaaatcacttatcttactcgcctgttttttttctctcttgttatggccataaatccattcattcagattagtcatggagcaagattttcactttttactcttcataagaagtgaaggactgacatattttttctgctatcttctttacaattcgaaagacttacattgataaacagagagtgattgtgttatttgaccgcataaataggaatatgggatttttggcgtacgcacatatttacgtgtttcccattttctc

SEQ ID NO: 17151 - DNA, 355 bp, Oryza sativa
ttgttgtttagggttgtaagttaataacttattttattgatttaggctcctttcccaacaactatatgtttcttttgcattagaatattgaaattacattttgaatagatgtttgtaggtgaaaaagaaaaaaaaagacacaccaatgtttaaaaatttcaacggaatactaggctgcaatgcgagccaatgtagatcaataactactatgtactccatccgttccataatataagagattttgggtggatgtgacacgtcctagtacaatgaatctggacgtctatatgtgtctttacataatataaaatcccttatattatgggacggagggagtatgtgtgaggcaatctat

SEQ ID NO: 17152 - DNA, 433 bp, Oryza sativa
  unsure (1)..(433): unsure at all n locations
agcttacataattcatttgtgatcgtgatatctctaaggnagctgggtgccctcgacgaggacataagttaacgacacttcaattataaaataaaaattgtaagtagtataaattaccattttacacacactgtaaacttaatttacttctgctgactcgtggaaaacatcagcaccttgacctccatgaacttctctaggaagaaaaaccaattgtattcagaagtcagaactagaatatctctgatagctaggtgcttgagatttcagcaataatttttgtcaatttgaatacttcgcagcaaattcagcaatattcttgtcagagctccctccttcctgcattgactccttagctttcttcatcaaccttgtagcattcctcctgtagtcctnctttctgtcaccatccatcacctcccggatgcatctc

SEQ ID NO: 17153 - DNA, 350 bp, Oryza sativa
  unsure (1)..(350): unsure at all n locations
ntcctcattggagaggtcccttgtggctgtgaacacttctcttgcaggtatcttgaatacgttggagagaatgggccaagatggtcatgatggatcggctaggcacaaccacaatggccatgatgctaatagcagcatcgcagcaagggaagaactggagtacgctactgacaccgagcatgatgaggaggtacttggtcatccacaatgacaacagcgccggcagcgccatggcatggcgctccaccacggcgggaggtacgtgataatgatgattctttangcaagatcaagtttaccattccttgctttgatggaaaatatgaccctgatgcatatcttacttggga

SEQ ID NO: 17154 - DNA, 436 bp, Oryza sativa
  unsure (1)..(436): unsure at all n locations
agctttcgcagttaggcccatatcgttctcccttattttcataatcccttcgttccattaaacaacatatttaatatgaaatgcgacatactacgaatttggaaaatatagaatgtatcacattttatttagtattaaaatgtgtcatattttatactaagtttacttttaaggacagaagaagtactaacctcttaattttttcaacaactattttaaaaatctccttagaaaaaccgctctttccccttcttaagaaaaaccttccctcatgaaaaaccggtatgattaaaactaaattgtaaatttatatcccaataaacaatacaggatgtaatcatgtactcactccctctgtcctaaataagtgcagntttgcactattcatttctaacgtttgattgttcatcttatttaaaaaattttattattagta

SEQ ID NO: 17155 - DNA, 293 bp, Oryza sativa
  unsure (1)..(293): unsure at all n locations
ctagattgctaaaggtcttgtgcctgagaaattgcttgttctcaatgtaccaaattctgtttctcactgttaacttgcactacctagacttgngatacacaaaactgaaagagataccgagttcgatagggaagcttagcaatctgcaaacgctntatctcaatggttctgtgctggagttacccagtgagaccacaatgttaactaagcttcaccatctacttatagatgtcgggcggtttgggaagtcagcgagtagcaaaataagttgcctggaacatctacaaactctg

SEQ ID NO: 17156 - DNA, 434 bp, Oryza sativa
agctcgatattggtatttcgtttactgaatttattttcctatttttgtaattgaagtgaatgtgcagaagttgtgcagaactaaccaatgtaaacatgctttcctttacatcgtaacaaacatgtgcttgttctgtttatgatttcatgtgctttaaattcagacattttttcatgatctgacttcattacattaccattcagatgtaactacagcttcagttgcgaaggaagcattggaagggcattgcatctacgatggtggctactgtaagctccacctgtcatattctcgtcatactgatctcaatgtaaaggtataataggtgtgcattttctttagtgtattatgggcatgaaacctgtttagacgatatgatttactgccatcatagaacccttcatcttgtattcaagcacagactttcctatcat

SEQ ID NO: 17157 - DNA, 343 bp, Oryza sativa
  unsure (1)..(343): unsure at all n locations
tacaaaggtagtattntgctatggaataaatttatcctatttccacctaaatgaaatgaaaccaaatcagcgagatagccaaaataattaaataaataaaatactgctgacctcctaaatgcagcatgaacacttatagcaaaacaaacttcattcagtttggatattttcacttgtaacttcacaagtcggaactaccataatgatctcatctataatgtacaggagacatggtcagcacatcggtaatacctttctcccaaaattcaaggcagaaccagaattggacaacgataattaaaaaattataccttccttggattgactcatagcacatatgaat

SEQ ID NO: 17158 - DNA, 435 bp, Oryza sativa
  unsure (1)..(435): unsure at all n locations
agcttatgcagatatgctggagattgaatgaatatattggaagagaaataggcaagggccttatcagatggcttttggctttaagattctctatgaggagggtcaaggagattttgttcttttatttaacattgatcgacctttggttgatatatatcctaatttcatgtactccataggcacaacaaaaaaggacatccatatatgcgggattatttctttacttttagtttttactattttttactatgattactggtcactggtcaaacaagggtaaaggcatatatttgcatagtataaacctattagatatactcaacttagtgtatgcaagggtaaaggaatggaacagatctgattatgaataggatatccatttttcttgtctnaggaattgagtgtttaccttttaattaccaagggttaaatgct

SEQ ID NO: 17159 - DNA, 312 bp, Oryza sativa
  unsure (1)..(312): unsure at all n locations
tgtattanacacaaggcagacataattgtaagctgtgcatgtntttcattnttttgagctttgggtttgctcataatttttttaattgtattactccaagacagatttgttcatcttaatagcagcaaaggagtcatgtgggtatataatctgaagttgaaatagacttcgatggtaccttcagttntgaattgcttctccaggttgctgcatacttgcattatttggaccctggaacatctcagctccgttaccttggcatccaactatccgacctgccactgcaaaatcacaacacttctttcgtttccg

SEQ ID NO: 17160 - DNA, 442 bp, Oryza sativa
agcttgcccttgcatggaggtataacctaatgatatcgtggtaaatctccatttggtttggcccatggatcaagccattttcacgaatcacgacgccaactagctagctgtggtccttggataccaacaaggaatgttttgaagtgcttcaatttgcatatgagacattcaacatcattttcttccatcatcccatggtccagggcaaacctccattgataagaaagtctcttctagcacctttgagcctttgaggcgcctttacaatctgcctcgagtgatcttcaagccttctagaagcctttgaggatttcggcatggcttcaaagatggaagctttcgttttgtatgtctagtgtttaccttttgcctttaactcgagaggtccgagagggctccttgcttccatagaatttttcctagacggccctatggaacaaag

SEQ ID NO: 17161 - DNA, 457 bp, Oryza sativa
  unsure (1)..(457): unsure at all n locations
ctacgtcttcttcaagtccacaaccttaaaagttatctctactgccatccctcgcaaaagatagaatttcataaacaatacattcttcaagcaacatanttttttttggaaatagcttacgtggcactcaaattcttgagtttcctcgtatgctactaaaaatatggcatttcccttacaagacaccaaaatccagcgtgtatacaatctctaactgtaccatataacttggttgaaccgttgaaatgtatgaaatcgtatgttctacatcatatctgtataattgaacttcagcgagaaacagttaggaaaaacattcttatttttcttgaactttcgaaggtaatataagaaaattcactttgttttttaataanacaaaacctttttgacatggttgcagtacatctgccacaccgggaaggcagggaccatggcgagaccaaaattttgaata

SEQ ID NO: 17162 - DNA, 444 bp, Oryza sativa
agcttgttgataaacaaagatcacagaattgttatattgtgaacaatattgactaccagcatataactccaggcccagcgagaaaagaaaatcattcattagtagtagatactagtgccaactgaattcacggttgattcctttggagcattgtgcctaattcctactccctccgtcctaaaaaaaaagacaaaccctggttttcatgtccaacgttttgaccgtctgtcttatttgaaaaaattatgaaaaaaattaaaaagataagtcacatataaagtattaatcatgttttatcatctaacaataatgaaaatactaattataaaaaaatttcatataaaacggacagtcaaatgttggcacagaaacccagggtttgtctttttttggacggagggaatacgtgactattcatcctattcttggctccaaattcatggg

SEQ ID NO: 17163 - DNA, 473 bp, Oryza sativa
  unsure (1)..(473): unsure at all n locations
ctataaaactaagctgccaccccaccgaaccgtgtccccgctcgctttattctctaagtcggcgccgggcttgcgctgccgccacttcccatgccgctaaccgttgaaccaccgtcaaagctgtgctgccgagggcttgaggcaatttaatcttttgaatttctcttcctctttgcccggaaaaatagaatatcgtctcgggtgtcctatagaaaattacatgaattttgtagtgtccatcagtggcgatgcaattttatgattcttctagcccaattacataaatttgggtgtcctgtagcaaattatgccgctataaaaatactccatantaaatttttgataagtaagaacaaactntttatatcatatctaanaataaaaatactccatataannattttgataagtaagaacaaataaatttctacacttcaacttatatatttcatcatacntaaaagcataatgga

SEQ ID NO: 17164 - DNA, 442 bp, Oryza sativa
  unsure (1)..(442): unsure at all n locations
agcttagcgggcaagaaaaaaacaattaattttatccgtataaaatttgactgccgaacactntgactctttgatttagtaagctcgagtttattttgtctacgttgaatccctttgacccatgtaaagatagtccaaaggaacattggctcacttctctttgctaaaaaaaaagcaggaagccgtcaccatcatgctaaagtagattaattcgccctatagctagctttattatcacttaatattactaactatgtttctcattttatcacttaggacatgtagaacagttattataataacactcttagctatactaattagtgctgaaaaaaaagaaagaaataggagataaaacatcgttgctacgattaacaacgactcttaatttttttaaagttaaaacttagctgcataaggatggaaagaaggaaataaagat

SEQ ID NO: 17165 - DNA, 441 bp, Oryza sativa
gacactatgaaactcagcttgaattgcatgcctccgtccagcgccatgaattctatgccctcctcatctacggagtacgagtgtggtctttgtcaaggcaagaagaacaatgtcttcgaggagaatcacgccatgcttgccaacaaggtagaagctggtggcgcctaccgccacaccccgaacgcatggcgcttcgcctaccagccaccgtccctgcaggttaccggcgaccagccagccactagcactgcaccgcaaccggagaaacaaataaccatcaaggacgacaacgacgacgaccaccacatcaacaacgtaaacatcgccctgaactcctacaactacaacatggccaatgagagtatcttcaacagtggcctcctgcaccctaacactcaagactacatttcgggttgcaaggacctttggtatggtccatat

SEQ ID NO: 17166 - DNA, 442 bp, Oryza sativa
  unsure (1)..(442): unsure at all n locations
agctntactggttgacaccttttaagatgcattgtaccaactcctaaaaaattaagtaactgcggtataaaaggattttaaggtattgggcacttgatcacgcgcactttggcctaagcaaaaagtgcctaagtccctaaaagaacgtgacaggccacacctgaaaatatgggctgcagacatattaggcttaggccaaaaaatatgccttcgacaccctttaaaggatgacgcatgtgacatgctcccgagtaacaaatcttctgggtaatatagaccaagtgtagctcatatgaatagcttctgatctgaatgattatcccttatgggatactccaaaataaatataataattgaatcccgactggcgcaagtattcggttgatagcccttacggggaaaaataattggtccagtctttgagcatagaaaatagactcat

SEQ ID NO: 17167 - DNA, 427 bp, Oryza sativa
  unsure (1)..(427): unsure at all n locations
ntagacaggttcaggccctctctcttgagaggtaataccctacgttctgtttcggggattgtgtccgccgggtgtattgattgtggaaaaagtcttatgccccttgggggcgtcctgccctccttatatagtcggaggagctaggattacaatgaaaatacctcacctcatacggttcggtattgtattgcctatgttacaatagtataggactcggactcctaagttattaccttaatacataaggaatcacgtaacttgggcctttatccgtataatatctatacatgaactacccctacttgtaatcagacaatccatgccatgtaggtatgtggtatccataatctcctgtttccattttcagagggcctctgaaaatcaaatattntatgtgttttcttaagaaaaccactctttagaatca

SEQ ID NO: 17168 - DNA, 440 bp, Oryza sativa
agcttctcttactgaaggggggagaaagattgttcttgagtgagtacaaccacagtactcagcaagccacaccggcggatgcacgattaatgcaagggggtacaaggggtaatgatataggggttaagttttgcagaaaacagcagttaaaagtcacttagttgcccaaagccattttaaaaagacgatcctaaagctacaccgtattattaatcaaggccgtgaaccctcacgaacctgccttaacccaaggcctacgatgattcagaccgaactggctacccgaccctaggtcccagctcgtcccaagccaacccaggccaaccattccacattttagttattgagcaaattttaagaattaaacactaacttgggtacattgctcggcttgcccataaccgagggcgcggctattcgaatagattatactctgatca

SEQ ID NO: 17169 - DNA, 398 bp, Oryza sativa
  unsure (1)..(398): unsure at all n locations
gggcaacaatgacccacatcagaccacgtcagtcgtgtttcgttcttgtgtggngtagcaagctnttcagtttgcatggcttgtcggtcttgctcacccgtgcacaaacaaaactgggaatcttgaatccgaacttccaacttcaccaagtgcgacctgtgacaaccatgacatgagtccttttgagttatgcttcggcatgggtcgaggcgttgtcctgacttgttcttgacgaaggtgttggagtcacctgatcacgtgggtgagagtgtgatgaccagcactatcaccttatacacgtgctattctagccacacacatgtgagatatatggtattcgcaccctatcacacaccatgatatgtgagaggggcaataacacacaatgtgagagtcat

SEQ ID NO: 17170 - DNA, 430 bp, Oryza sativa
agcttctggaactgttggaaatacattattcttctaggcatagagagaaaaacaatgattcatttaatcctgctaactttaaatgctgttatgcttaatgtctgcaagtacattcattatctaacaaccatgtactatctggtacattgttttgtttcaagctcactggtggaatgtctggagatcaaaagcaccatatttgcaagggtctgctacaaaaattctaaacttgacatgcagctcttcatgttgtgaaagaaattggagtgcatttgaatgggtaacattttcctctcattttcttaatcttcatgcattatatatcaactccttcccccttttaaatgaattagactagtgacctcattccatgtctctctttatactcacacaaagaaaataaacaagctaattgttcataggctaaatg

SEQ ID NO: 17171 - DNA, 294 bp, Oryza sativa
  unsure (1)..(294): unsure at all n locations
tggaagagtgngatccagtgagcgagacgacgtttttatatttgggtgngagtgacggacatacaaggtgaattgtcttataagcgccgcaaacgccatcatgagaggatcaagatcgtgctcgccaaacgccagactgaatggctgagactttggatcggccgaacctgggctacgcccatatggtctgatacttggcccatctgtcccctggacctccattatatatatgcacaagacatgggtgtgaatctcgggcattgatgctaaatgcacaatacatacatgcaggga

SEQ ID NO: 17172 - DNA, 437 bp, Oryza sativa
  unsure (1)..(437): unsure at all n locations
agcttgtagactntntgttccactgcttttgttgtggcgggtaaacgggcacgcccacgggcgatgggcatgggcaacaatccttacccgtaatgtagtaatgggcatactcatgggtacaaataatctcacgggcacgggtatgggtaggcactacctgtgcctgtcgcgctcgattgccatccctagtgaagtccctcgaactgctccagcgatcattggcgtaggggaagtagtcgtagcagtaagaacgccagcttgatcctgaaggggtcaccggcgatcacttgcggcgtagcagcggccttccggtcgccacctacactatcccggtacagccacactgttggtatttcttaacgacattactagaaatattcattcccagcaatgacaccagaaatagtcctggtatatttatgattacagaagtaatc

SEQ ID NO: 17173 - DNA, 476 bp, Oryza sativa
  unsure (1)..(476): unsure at all n locations
nggtctgaagttgttgcgacacccacatccatattatgttctatggctaaatgatagtggagatatcaagattgggcatcgggtgaaagtttcttttaagattggtgaatatgaagatgaggttttgtgtgatgttgtgcctatgacagtgtgtcacttgctgctgggaaggccatggcaatttgatcgatcatcacggcattgtggtcgaacaaatcaattctctatcaagtggaaaggaaggaattttgtgcttaagcccatgacacctcaacaaatcatggctgagcatatgcaaaagagttctgaagttaggatagaaagtgagaaagaaagagagcaaaataaatttagtgacatccacaaatcggtgagcaagagccacaagccaaatatgagtgataaaaagaanagagagggtgagaactttgtgactgtagccaccanatcagaaatgagagatgtgagaaataatc

SEQ ID NO: 17174 - DNA, 439 bp, Oryza sativa
  unsure (1)..(439): unsure at all n locations
agctntgggctcaccgcttcaagcattcttatagatcgatcctccctgcatggctatccatcttttcctctccattaagtctgttgtaaatctcttttattttttccttctttgcgtttctgtttgttcggcctctggcccttgtacagtgtttatttgaatttggtcttattctaattcaggtggggagcttatcccccccggtgatttacctaaaaaaaaatgaaacaaaatttaggggccatttctgaatttgttgcttggaactgctcagcaaaatacactgaacccagctccggccggagtgctgggcttgtcatgctgtgatcacacacacgcccttactagctctccctctatataaatctcatgaactctactcttccattatcttaaaaataataatatacgcaaacaactctctcctttgagactttga

SEQ ID NO: 17175 - DNA, 368 bp, Oryza sativa
tcgtttagtttatgcaattctgctcaccaaacgaactctggaaaaaagaacaaaaacttgtggtgtgctactgtatgcaaaacatcaccgccgtacgtacgtgacggcgatatgcacacaacttgaaaaacaactaagacgtcaagtttcaaatacgctcataggaaacgagaaactggaactaacgatcgaagtgaaaaaaaaatgtcatatcatccagatacaatttcgacttgcaacttgcacacaaattttacaaacaactcccgtcccatgttaatcacaggcggttaatcaaaaaacatcgaaatgtttaacaagtgaaaaaaaaaacaagggaaaccatgcaaccaatggtgtcccacgcg

SEQ ID NO: 17176 - DNA, 396 bp, Oryza sativa
agctgccttacatgggaaatccagcgtgttctctacctatatatgcccccattttcatttcagcaatcgaagtaataataatagattattgtcaacttaactgtactagatcgagctttgtgattactactacgaaaatagattgctatatatgggcatgttcaccaaaatttgacaatatttctgttcaaaaaaatttagcaataccaaattttcggtagatttggtagaattgtcaaatttcagtaggatggaacaaatatgctgtgccaaatttccctatgcattactaatatttagtagtaacaaattaaatacaattaaccatatatttatcaattttgcaacagtacgtacctcgctgggcaagccattggcgatgacccacttgttcat

SEQ ID NO: 17177 - DNA, 414 bp, Oryza sativa
cattacgcgaccttagaaactcagcttctaacttatcaaaatcttaacgggttaccaatattttctttgtagaccgatattcttgcaccctcttttgtaactactctaaactaacctctttactcattatacaaatctatatggcttagccgtgcgacactagccggctttacagagatatgtacaaatatgccatcggagatactaataaaatcataactagaaagatccctccctgataagcattggatattcccatgatgccactcaaacgtagcatcgcccattgcaacctcggccgatgtatccgcttgaacaatttcaacatcatcgccgtcccattgaattaaacattgatgcaaggtagaaggcacacaacaatttgcatgaatccaacaacgacccataataaca

SEQ ID NO: 17178 - DNA, 443 bp, Oryza sativa
  unsure (1)..(443): unsure at all n locations
tctcanatccaacctacgatgcatggccgcgcattcgtgttgacttgtataaaacaaaacataaaatagacaaattaatgccaatttgatctacatgaattgaactaattggtgaaaatcttataacttattttgcttcattcttttgtcttagatattaatgatttttcttgcatcgcatcaattctttaattaagtgcttagattaatgatttttttctctatcgtatgccataggattatgaatttcttcgcatattattgcaaacataagcaacatactaaggttacagtacatagttggtttagaagttatatttcttactattaaatntatttntttaagggtcaagttgattacggttttcatttcaacagtataatagatcacagatatcatagggaaacgagacctaagatacatgtatatcatctctggctta

SEQ ID NO: 17179 - DNA, 435 bp, Oryza sativa
  unsure (1)..(435): unsure at all n locations
agcnttgactacccaacaaatacccatctcttcggtgcgaagctaggccggaacaaggtcactggcttaaaccgccgtcttgtttccaggaaaaactctgtagacccagcttctggcatgtacagttacgagttaactgacaacaatggttctaccaggttcatccttgcagctctcaactcctctataccatattggtctagtggagaatggaacggacattactttggttccataccagagatgacaggtcaacgcttaattgattttacttttgtcaacaatgatgaagaagtgtacttcacatataccttactagataacgcaacgatcatgcgttttatgctggacatctctggtcagaccaagatatttttgtgggtggagcatgtgcaagattgggtaccaacctacaccaaccccaagcagtgtgat

SEQ ID NO: 17180 - DNA, 434 bp, Oryza sativa
  unsure (1)..(434): unsure at all n locations
tgcatcatcacggctgcgacggcaggacgtacgcaccttatcactaatctgaattgtaaaatttagaatacattcagatggtatatatatatgcatataaaaaggaaacgtctaaattcatatacatggaaagcaatcaatccaacgtaattatatacaatcacattcaaaatccgtaattcatttggaaatgcatgcatgcaaatgaacaaatggaaaggtacgagataacctgatacaaatatttcttatcgggttaaacccgctaatttgattaatactcagtttttatttgcacggatggaacggtggatgattntggagcatgggcaccatggaacactaaacaantgtaatatatatatatatatatatatacatatatctatatatatatatatatatatatatatggggacatatcctatgcacac

SEQ ID NO: 17181 - DNA, 438 bp, Oryza sativa
  unsure (1)..(438): unsure at all n locations
agcttagatccctctttttntctactctctagagacatcaatgtcctcatcttcctcctcgctgatgagccccttgcctcatcccagggacactgacaaatggcatgcacctccttgttccttggatacagacatgatggtgagctccacacaagttatgggtagaaaacttttgaaattttgagtagaagaactttgattcgaaagttcaagggtttgatataaagtttttgagttttgagataatagtcttaggttcttaattagaagtgttgcgaccaaaatgatactctttccattctaaaatataacaatttatagcatttaaaatttgtcctaaagtataacaaattctccacctatattctcttttcaatcaatcacaaccttattccattcaagtcgacatgcttttttaatacccgtgtccaacctatt

SEQ ID NO: 17182 - DNA, 332 bp, Oryza sativa
  unsure (1)..(332): unsure at all n locations
tgttcgcgtcgtggcgagcgagcagcacgttcgtcttcttgttgaatgctcggcttgtctccggttacatggcgcagttcgtggaagacagcgacgatgacgatgttgtcgaccatgaccgcatcaagcccgatgccctggacgacgagtcaagcagcctcgtgatgttgtaccgcgtgtggcggatggcggagcacgggaacgtcaacggcctcctcgccaagcggccctcttcgccgccggccattccgccctcaccgccgtctcgagcgacagtggctgccggagccctcttctgcgccgccactccgcccacaccgncgtnccgagcg

SEQ ID NO: 17183 - DNA, 480 bp, Oryza sativa
  unsure (1)..(480): unsure at all n locations
atggctntcgctagcggntaattgtcggagacttctgtctctttcggatacactgnacatcatgcacgaggatcacggccaaagccggtagtcattccgttctagattataaattgttttgactttgtcaaaattaaattgctttaagtttgattaagtttgtcaaaaaatagtaacattttcaatataagataaatatattaaaaatattttttcggggaaattataaaaatattgactctaatcattgactatattttcctataaacttagttaaatttaaagtaatttaactttgatcaaagttaaaataacttatactacgaaatgagggagtatgtactcagcacaattggcaacatcattccccgcacgatctcctacccccaatgcagacgactgatcgaactgaacaacattctctcctctgctgatactgtggatggcgaatgtcatattcagcagtaccccagttttatt

SEQ ID NO: 17184 - DNA, 441 bp, Oryza sativa
  unsure (1)..(441): unsure at all n locations
agctggtcgagctcttctcgtatggcttgttttttatctggtgcaaatctccgcagtttttgctntactggctttgcatcgggtcgcaccatgagtttgtgctcaatcacctccttgggtacccccggcatgtcagacggctgccaagcgaacacgtcagcattgtcgcggaggaaggtgatgagtgcgagttcctatttctcgcctagtgatgccccgatcttgacggtcttgtcggggttggcactggagagtggaacgatcttgattgcgccgtccggcttcggcgtcttggttgttttgctcactttcttgggtgattcagctgtggcgggtgggctaggcgtgtgctcgaccatgtcgaggctccgcttgtcgcattgtactgccagcttagcgttcccttgaatagtgattgntcccttcgggcctggcatcttg

SEQ ID NO: 17185 - DNA, 446 bp, Oryza sativa
  unsure (1)..(446): unsure at all n locations
ctatttgatagaatatctctgacatattcgtatggtgctatacttgggatctgttggggcagcaatgaacaaggatgctttaaagagcttgaacataacccatatcttgattgttgccagatcattaaatccagcctttgcagctgaatttaactacaagaagattgaaggtaaccacatgccagcttggtttatcagattaagttgcttgcaccatataaatttagaatgtgttgcttgcaccataaccacattacagtttctcttcataatgaaatgaagtgcagtcctgcgttttcaagaataaaaaaagtatgtttggttcaaacaggtctatgtacttgagagatgcatatttatattcctacagctgcatatgtgggtcagcttaaattcaattgatcatggaatggcagcctatcaggcgctcatgtggctntgatgtg

SEQ ID NO: 17186 - DNA, 309 bp, Oryza sativa
  unsure (1)..(309): unsure at all n locations
agcttgcttcagacgatatatgagaagtattattttgtctttgctacgcacactnctacttgacttcttttggtgtggagtacacaacactgtcctcgagaacacttagaacttgactatttgcttgtattattgcgctgcacattgctccatataaggggatgactaccttcttgcaatcactcacatgccatactctaattctgacacactctctttcattgtagatatatacgatgaggatatgttgactacttcactgaaagtatcaagttgatcacatccatcttgaaagtcatctacactata

SEQ ID NO: 17187 - DNA, 266 bp, Oryza sativa
  unsure (1)..(266): unsure at all n locations
tatagatactcagctgcttagatgatgtaagtccactcgtactcacgtatgttttcctatctggcnttaagaagcaactcagaaagatattccaagtcacacttgttctatctaagagtttatcgtctccccacgcagttccacccgaagggaacactattgctcatcttgaaatattgctcatcttgaaaataatggagcgaaaacccatatatgtagttattgacggataagctcctggagtgtacatacctttttgaagagat

SEQ ID NO: 17188 - DNA, 431 bp, Oryza sativa
agcttcttttgaacacccacttgcatcttacaggttaacacccatagggtcgctctgtcacctcccaagtcccgttagcgataatagaatccatttcactacgaatagcctccttccagtagtctgcatcaggagatgcatatgcttctgaaattgacttatgagtgtcatccacgaggtacacagtgaaatcatcaccaaaagacttagccgtcctttgtctcttactccttcgaggagcttcactgtcatcctcctcagtgacatgttcatgtgtatgttcagtttgttctggtgatgtgattgaactgggaattatttcagatggttggctcgaactactatgtgtatccttcattggaaaaaagctctcaaagaaggtagcatcacgagactgcataattgtaccaacatgcatgtcaggtacctca

SEQ ID NO: 17189 - DNA, 365 bp, Oryza sativa
  unsure (1)..(365): unsure at all n locations
ttatattaacatannaaagttataagatcatatctctgttataaaacaccaccaccgccgtccgctagcccagaataaggcaatgtagattatttgatctactgacataagttcttagccatctatgatcaccttaatatggaataattagggtcactgactgttattagaagccatggatgtcgtagttgccctgaggttgtcgatggctagagtggatgtaaaggcagtggatgtagaggcagtagtcgtatcagctgcggtcaccggcttgatcctgaaggggctgctgcaatcaactgcaagatgcagacatcttttggggcgccgcctgcactagtctagtaccgcccttcgatgaccct

SEQ ID NO: 17190 - DNA, 435 bp, Oryza sativa
  unsure (1)..(435): unsure at all n locations
agcttctaaaggcccagttcacgcctgtgttgttcacttgttcctttnttttttttcccaaggactagttttttgtgctcaaagttggtggggttatcagtttggaagctgccagaaataagccatgggtatattgatttgttgctgaaccggcatcatctttttagcttatgcttatcagcaaaaatttgaatttttaatcttaaatttgaagccgattttaaggttttttcattgatcgcgttccggtgcgtgtccgcctgaagctcttggtcgctgatgcgttggccaacaaccgctggatccgcgatctccatggctccttgggagtccaggcaatcttgcaatacttgcagatttggtcgttgctgcgaacaacaactctctcagagggccatcatgattctttcatctggaggtgggagagttcggggt

SEQ ID NO: 17191 - DNA, 439 bp, Oryza sativa
  unsure (1)..(439): unsure at all n locations
ntatgttgaaaaagccaacgagtacgccaaagctgaatactccgtcaccgcatcaaagcagtcgggtcccagttggaagccaaacaagggtacgccggctacgggaggaggtggaagtaacaatcataaggaccgcaagcgtaagcctgaggaacttgttgcaaccgccactcactcttctcgacagcgttcgcgcgtcaacacgttcgacaagatcatgaactcccaatgcccgcaccatcctaactccaaccacgtggccaaagattgtttcgtctacaagcagtttgcggagcaatacaccaagactacacggaagaactccgacgaagaacaaagcacgtcgaggaagaaggacgacggcgacaccccggcaggatttcaagaaccaccgcaggagctcaaccatatcttcggcggccccctggctatgagtcta

SEQ ID NO: 17192 - DNA, 441 bp, Oryza sativa
  unsure (1)..(441): unsure at all n locations
agctggtccaagacattccaggccctgattagactatagagagctagggagagaaggggtgcacttcacgaggcattttgtgggaattcaaagcagtggagtgagtcagctgtggcctctctctgagcgaggaaagtgagagatgcgcgcagctagcaagcagcagcagaactgcaaagcccttcactggctcgagcaacgtaaagacaggccgggggctggacgtagagtagcgcagttattgggcattagggcacccgctgtgccaaatggggcatgtcaccataaattgccattactgcccctgtcctcgcttccctgccccatcgatccctctcctcttcaaaaccctcgcatccttctcctttcttgcccaacgatccatccattgcaacgcgctgctagcatgtggtatcactgctagctgctgctctntcatgg

SEQ ID NO: 17193 - DNA, 466 bp, Oryza sativa
  unsure (1)..(466): unsure at all n locations
ctaagcttccgcttttgagtaaggccgattggtacacatgattgctctggatcatcacggaccagcctgtccgttgtacgctcgtagtcgtataataaactcaacagatcacggacgaaccgctcgtgatagtcggacgttcagagagtgatcgatgatcatacatggcaaagaaagtttactgatacaatcacggagggtttatgttcgtcttcttctccacaatgcacaatctcgactccgcccttatcattggggtgaatccactagagataggccgccgcaagtgagatatcatattgtaagttatcttttacatgattgcagggaaacatcacgaagtcatggctctcactcgcaattcgttcgtgttatgcttaccgatcaagattagctgattactcaatanatacacacacccaagattcagnctgaccaagaatcacggtactacttatttcaccgc

SEQ ID NO: 17194 - DNA, 447 bp, Oryza sativa
  unsure (1)..(447): unsure at all n locations
agctntntccncttctccgaaatggttctctgaaccccaaaatgccaaaccgaagaacacattgcataacattgcaaaatgtcaaatccagcggaaaagataaaagtgttttttctttttgctcagaaccaaaaaagcacgcagctcgaagtccaaaagacaattgtgaaaagaaaaacaaattcacgagctcctcgagagaaagagagagagaaagaggggcattacttgttcatccgcatgaacacaagagaggtaaacaacacgtcaaaaccacgaaaacaatgcgagcccattaaatcccatgggcagtacaccaccaaaaccacctccaagaatcagcgtgtgcggtgccaaaaacacacaaaaaaaatcaaaagacccccaaaaaaacaaaaaaccaaagcttttggaaaaaaaaaaagaataagaataaaacaacccacg

SEQ ID NO: 17195 - DNA, 423 bp, Oryza sativa
  unsure (1)..(423): unsure at all n locations
taaagccgtttgatgtcccctcagattgcataaatggtttctcttggaaatgtgttcacatctattgctgttaggacaacatcatttttctaacatttgatctgtaatgtgatgcttcttgcaatttatttgttaagtgagcaaacaattgttgcatactctgattaaaagatactacatgttatgtggtagttatatatgtttctaattagattttacacctgcaggactctccttttcttaatttcgtcaaatctctctcccctatatcatcatctcaacctctagatgctgtaccaaatttacagatgatcaagtcatcagatttggttcatattccttcaatcttcaccccgccagaagttaattcacaaaagggatccaagacttcaanttggaaccctagtcttatttaactgattc

SEQ ID NO: 17196 - DNA, 440 bp, Oryza sativa
agcttccttgttggatctaaacattgatatgattttggtctgacctccgtagattatccttgaacatatcacttggctcgtaattgggaagagctcccaagaaaagacatcttatattcactttctttacattcgttttacttgccatttttctcttcgtgttgtcatcatttgacttcctgcatattcctttgcaccttcaaccttgatgtgttctttcccactggatcgtttgtgaggaaagcacattgagcagtaactagtgcaagtgtttttattctgtgtagcatctgatacaagccaaaagttcgatcgagctttggattaccactattcatgttacccatcttgacttcccggtcaagtctaataatttcaatccttgtctttactgaaacactcttccgtatgaccatcttgcttttgtgcaacttctcctt

SEQ ID NO: 17197 - DNA, 424 bp, Oryza sativa
  unsure (1)..(424): unsure at all n locations
nttgtacagattgcttcaaactcatcaaccatgttctgcttgctagcttttgtacagattgcttcaaacttatcaaccttagtatatctacacttgatctcacaagtttttccattatcacattttcctgaaacatagtaaaagtaaacaggataacctgtacctttgaaacagtacaggatctgagttgcagagatcaggtcgcaagagcatcaacacttaatagtagtattatctttaccaaaggagcaagtgcagagtgtatcggtttcatataaaaacttgatcatgtcaaaatcaagtgtggttaccaaaaaaaatgagtacatctgttgatatcaaaagatgaaacaaggaactgatagtatttgcctgacatcaataactcgaaaatgtagcanatatgtgcagaaaattgacatca

SEQ ID NO: 17198 - DNA, 434 bp, Oryza sativa
agctttacacatgaaactatttagtggatcgcttaacccgtaagatagtattgaatcgatctactccttttgttatagaaaaacatagctcattttacatcataatgatattttattctttcaaaatttttatatttctcgtcatacaagtcatatactcatattaaacacaccaagaggtgaagataatgataaatcaattcagtaaattctatcctatcctttaaagtacctccatgggtttctccacaatctgcatgtataagcgcctttaaggtggcaatacaaaatcaatagcctttcttataataatatgattaaaagttattttttttctaataaattattattgtaagattcaggttgactaggtcttttcttcaaaataccgtagggtttcacatattaaaaagaagcgctatactagatatgta

SEQ ID NO: 17199 - DNA, 230 bp, Oryza sativa
tcggacctaaaaaccttacaacatcacggagtatgtaaggataaccatctaaaaccccgacattgacgaatcgaacctaaatacagacgttcgacaagagataaacacctaaaacgaagcctttaataacgatacgccgactacgagtacattgttcgattctaacgaatctacgttttctccctgagacaactcttgaagtggagttgaacgacggctccagtaacaac

SEQ ID NO: 17200 - DNA, 389 bp, Oryza sativa
  unsure (1)..(389): unsure at all n locations
agctttcatatcttgggggttggcgaggcccttcgccttcttgggtcgctntgttcttgcggtgggcaacacgctcttcggctgtttctgcttatgaagtcggagctgctcgctgatggatgcagcgacgcttggcaacgatgacatgttgcagtctcttccagggagttggtgctagccgtgtgaatgaagtggctctttggtggcttggctgatgtccattgtaagatgtcggagatgcttttcgctttggcaactttcgcttcattatcgctgcagttgtgaagccggcgctgctggatcgcttgggtggttagctcggcaatgataacacctcttctgtgaagtcgaagctggtgtgttgcttttgtgttagattggcagcaaca

SEQ ID NO: 17201 - DNA, 352 bp, Oryza sativa
tattaactcaacccgacaatgtattcttcgtcatattgtctgattcggctcaataggctaaccctgtccaactcggactttgctgatcctgatcacagctgattcggacttcagccgattcttactctatttccgaaacaatcttggatttagattccgcttcaatctgatctctatctttgatactcagattaccaaatttggtcgttaacacatgcccaccaagtccagaatattggataatgtttcgaatttgccatacgtcgactccgagagaaatccgcacttgccgttttccgaccgttacacagtgctttaaatactaaccgttgtccccgagatatctcacaca

SEQ ID NO: 17202 - DNA, 418 bp, Oryza sativa
  unsure (1)..(418): unsure at all n locations
agctnttaaccaagctcttacaagttcttatcaaagcaagcggaatggtgatgtacaccgacttaaccaagcaccccaatggaggttggatgtatcgatgccttggcaaacacttgctgtacggctgcaatcagatctgtggagctctgggtaggcttaaatatgtagcaaagggatagcaaatgctcaaatcagagaatgcaaagttgaataatggttcaaagtcaagtaccgtgctggtcctaggctagaacgtactagagacgcgagcctagacacaaacgataccacaaaatagcactaggaacaactcatgcacaactctgatatatgaagttcagctcaaacataatagnattntctcttttctttctttcttctttcttcttttctttatttttctttccttttcttttct

SEQ ID NO: 17203 - DNA, 352 bp, Oryza sativa
gggcgatgacggaaggagcagcaaggcctcgtctgatatcaaaacgcggcggcgagctcgggcttcacggtgacaacgaacttcccggggtctccggcttccgagagatggctgccgggcttcctctccttgcgaacccaacggcagcagcggcgaccgaatgcgacgatggacgacgaagaatggcacggatggagcggcggccggcgcttggagagagaaagagagctcgaggaggggcggctagggcacggagaaagacgggacttgagcggataggcagaggaccactagggggtgctttatataggcacgggagctccggtccaggcccaaatcgacgagagatact

SEQ ID NO: 17204 - DNA, 403 bp, Oryza sativa
acagtgagtcacaacattacgggcagttcttgaactgatagtagactcgacaatcttctataacttctgcagaaaatgctcctgatgcctaactcactaccatctatcatataccaagcgaataaactcatatgtcccctttcacttggtgtggaaaagattcatgcgtgcgtgtatcactacatactgtacaagatagaatacgcttctttagatgaatgtccaacatgcggtgctagccattacaaatctaatagcattactggcctaaaaccgtctgatacaactgatggaactcatagataaattccgcaactcgtgatgtgtgtcccttcctgtcatagaacgaattaaatggatatactcatatacgcgagatgtggaactaattgcgttgcatcaa

SEQ ID NO: 17205 - DNA, 224 bp, Oryza sativa
caagcaacgagctgagctaacaaggggtgacttgtttttttttaaaccttcaacggagttttaaccttggaagaactaattggtcacccaagtttcacactaagctgtagcacatttacgattaggtatttctttctcaatttgacatttactttatcgcttccatattgaacacttatactattttctcactgattacaacgctatcatacattgtcccggac

SEQ ID NO: 17206 - DNA, 356 bp, Oryza sativa
atttgatacattcatactcagtcataatcagttatttcatcatcagagttattactactcagcggatggtatgggtagcggaattgctctacaacgatcacttgcggtcttgtcagccgcgtattgagcattgctgataagaacaagagcatcttcttcgcttgtcccgtctgccaagacataaatggcgtcaatttcaatccttgggtacaaagatatggcatcgccaatgccatgctaactgccatacctacagcttttttgatattcctgaaatgtacatccggagcaactctcagcttgtcgaagatttcggttgcgtcgagtgcactcggaccacttgtattgaggaacat

SEQ ID NO: 17207 - DNA, 363 bp, Oryza sativa
acatagacctcatcgagaacaagacattctgatggagataccatctaaaactatcaaacgaattattcaactggatatgtataatagaggcgcacaactcatgccaagaaataagattctgaccaactaaagctctcctgaaagatacattaagcggaacagatcccataatagtggcaatagatgatgttttccttcggacaatagcgtataaagacggatatttatccttgaaagccaagttgcctagccatctatcttcccataatctattgtgttccccatcattgacaatccaagaacccatatctaagaaagtacttttgatattcataagaccagatcataaatgggagtcatatt

SEQ ID NO: 17208 - DNA, 471 bp, Oryza sativa
acacttaaatactaagcttctttataactggcttgctatatgaattatccatgatgttcacatctttatgatgctcgcatcatattgtacaaagcaatcggtatatcactcggatcatgttgttcggggattcacgatgcatatgctatatattaatattaagtcacttggttgactataattattaaaaacctttcagttggttggattatttattccttgactatatgacttgtttgttcaactaaccacatagtcgggggctacacctattaggtgcatctagtcgatgcacctgactttatttttcagccctccacagtcttctgatttggtaaaagtactcgggagatcatggcgaacatgattgaagcactaggctttggagtaatctagtccgagagaagattatcttttcgactgtgaaagtctcacgggctactgtggagatatgggtaccctatacccaca

SEQ ID NO: 17209 - DNA, 486 bp, Oryza sativa
  unsure (1)..(486): unsure at all n locations
agctntatcggctagcctctatcatcgaattctgtcgataggttttggcttcgatatcaagttagactatgcagtgtatctaccatcttggatgagttttcatcaatttgattagatcttatgtttcttttcatgcttaatgttgcatcagttaggttcgatctgttaagtactgtcttgaaacgttctatctagctctttctttgattactaatagagatagcatcggagtttcagctgatcttacctgatttagtcttcttgtttccttatttggttctggatcatctaaatctgccccttatatcgagatctcatccgtttaaagtatgttaagcttcttatcagtttgctagcttacttttgctcgtagattggnttcagtggtgtatatttcatctgcgctggtatcttggtataaggtggtatcggagtattagccgatacacgttaggtttaccccatcggctatgctgtgagcataca

SEQ ID NO: 17210 - DNA, 444 bp, Oryza sativa
  unsure (1)..(444): unsure at all n locations
tatcctcaccggcgcacacttgtagagggtcatgcaacctgcggtggcgaagctgttgtctcttcgcctggtgacaggcgaactgttgtctttgccgctttctttaccgccggacttcgcctctcgtgcgacgactttctgccgtccgtgctggaaatgtatgaggttatgcttccccagcttagcccttctgtgttcccgaagttggccgtcttcacgtggatgtgctaaacatgcgggttcgtgtcacataccatgactttgggtgtttggaaaacatggaaatggtggaagaagtaaaataaataaaacttttgtttaaaacttatatgcttgcttggttgtgcattttgtggtgtatgcatatgctgtatatgatcatgttcatatttaactaataccaatggatcanagaaaaattcttggaacaactcanaaatctgg

SEQ ID NO: 17211 - DNA, 415 bp, Oryza sativa
agcttggccaggtcggcctcgtcaccaagatatccggtattgtcttcgccaaccttacacgggtcgggaccgatggtcgaaatgagtgccggtttgcgaggagccatatatggaaagaacggaaaaatcaaaaggtctgggaactatctagcgagacgtcgaaagctcttgaccgcggatgggcacaacgggcggctgggaagatggcgaaaataatcaagggtaaaagtaaaagtgaaaactggggggaggggggtatatatagcccaccagcgcggcttttcgcctaccacccaatcaaaacctgccacgtatgctatgggtgtatggaatggtaatttcccatcggcacaggccaaaacagtgaaaggccgaagatagcaaacggtcagcccaatatgcccaacactgttca

SEQ ID NO: 17212 - DNA, 432 bp, Oryza sativa
  unsure (1)..(432): unsure at all n locations
tactaagcttcagtgtgagtcttagaggatgcaggcggacttatangtcttcttcttgctacagctggaagccagatgaccaaattttaagcagcgccaacatcgaaacggctccctgcagtcgacgatcttatgctttgtactcaaacaacggatacacttgccttccatgtgttgaagaaatcttgcttttcttgaatgcatttgctccaggttgtctggtgtagtgaatgcggagtggtttctccacctgcgttttcctttgacctctttccaaggattctctgcaacttgaatgtctcctgtaccttgcgctgatgcagagagatcttgggtagacaaatcgagcagacgtccactctgcaggatccttatgtcctttgctactgcccctgaaaatcttgagggaggctgcactgcaatgaaatctga

SEQ ID NO: 17213 - DNA, 393 bp, Oryza sativa
  unsure (1)..(393): unsure at all n locations
ataccccttattacaactggtagcagttgtgtcatcaacacgtgacagtcatgagactttaggtttgttaacatcttctccttcgtgcttattattcgcttgatattcgtggaatatccagacggtacctttatgctctccaagcattcaaacatactttccatctctgtcttgctaagagtgtagctggctggactcaagtaatggcttcctttctcctttggctccgggtgaaggtcgctgcgttgttccatatgcttcagatcattacgtgcttccagtgtatctttcgactttctgtatacacctatgaagccaagaaagtntacgcaaaggttcttattgatgtgcatcacgtcgattgcgtggcgtacgtccaagaattcccaatat

SEQ ID NO: 17214 - DNA, 463 bp, Oryza sativa
gacccttgaccaatatgaaatcatgtgtgttttcattagaacacagccagcaccgtaacctagtatgaaattttgatgattgcaacgtgcagggtaatataatctcagtagaattttcaaaaaaaaaatgattatgagatgaaattgttagttacagtatactagcataatacccgtgtgttgcaacggattctaaataacattcatcgacataaattaatattctgaaccacatatcaatattggacagaaagaagtatgattaaattaaaatcctaaccatatatcacaattggactgaaggaaatataatcatggaaataacaacatgaaactacaaataactttccagaatcataattcaatatcatgaaaattatgtaactaaatatgccattttttacatctagctgtaaataattcaatattataagttacaacaagtgttaatagatcaaatagt

SEQ ID NO: 17215 - DNA, 397 bp, Oryza sativa
  unsure (1)..(397): unsure at all n locations
agccnntagatgcttcattataatacctttttgttgtttaagatgactgntaataatggacgtcttctgcttcatgttattagggacaaatggactggtaaaactacgggctatgcctttgctagttttgctaatgcgtccgatcttgctgcagcattgaaagagatgaatggtataagttcatgcccccattccctgtcaccatttgcctggattatcgtcgcactgcagatatgattaacacatctaacatcatgcaggtaaatatgttggatacaggccaatcaaactacgcaagagcacatggaagaacagaatcgactacgaagcattacagaagccgaaagttggtcccattgttatttagaaaacttctcttctctgcaaaaggtcatta

SEQ ID NO: 17216 - DNA, 462 bp, Oryza sativa
acatcatcctaaggatggattggttggctaagcacatttgtcttatagattgagccgaatagtccatcaccttgcaaggacctggaggaaagcatgtccgctttacctcttacacccctaccgcgagtcggtctatcctaacctgtttacaagtcacctccttggagtctgtgcccatagtctgtgaatatcccgacgtatttccagaagaattaacatgtatgccaccagaccgagagattgagttcgccatataactggcaccaggcaccgtaccatattgctaaaagaccctaccgaatggcagctaatgagttagcagaagttaaaagacaaatcgaagaattggagagttaaggttatgtgcgacctagctcataccctgggggagccccattgctcctggtcaagaaaaaggatggctgtgagagaatggttatcgactatatagcactaaatgaa

SEQ ID NO: 17217 - DNA, 461 bp, Oryza sativa
actctatataatactcattctttgaagcacactacacgctatggatgcagctgagcaattgtctttgattatagctaatcctaacgagcggatgcttgtcaaatgactaatgggagaagtctacagtacggctcactcatttatatgccaattatgatgtccgactcgctgttttgatggacaacgctctccacaattatatattgaactacttctcttccgatgttgcaaatcacaatgtggtggtttactgactaaaggatattcagttattcatcattcataaagtactggcttatgcctaaaagtatcattgatactaatcttggttcttccctcccatgtccaacactataacgaatggtcatgtatattgcaattaactggcaatggtaactagtgctgggtgttatatcacactgtgctttcacaaaaggcagtatacttcaatcaagtatcta

SEQ ID NO: 17218 - DNA, 442 bp, Oryza sativa
agcttcttggacacatcattgatgctgttctattcaggacacgagttcaactctccaataggtgagcctcttctgttctgctgattactaccaagccaataccattgggtttatataagaacaaaagaattagtgatctccaaaagtagttgtcatatgtacagaaaggtgttgaagaaactagaatcatgggaatgtatatgtgatgctccttttatttttcctacaatgatgtggctatatattcggtatggatgtggacagggctgacaaacaatggaaccatccatgtagcctgcaactttggcactaactataattaatgctaattactcttattatctcttatgaagacatatcacacgagatatttggagcacttggctgattattctctagctatacacacatattctcattgatgactaggactttatactat

SEQ ID NO: 17219 - DNA, 479 bp, Oryza sativa
ctcagcttctaaattatatgtacttcatctgtattgccgcctatttcttcatatattcagttattcataaaaacaccacatctattaaataacttgtttctgcttcatagacttctacaaggtctgcttgtgtgttttgttcgttgtataaaatgcggcagtttcgacactcatgtctacttctaattggtcgctgaagcccctccaactcaagagcatggcatgtcatacactaaccatggatcatattgaacctatttttacatatacctcgctttctatttaaatggcattgattttataatgtcatgtgggatggattcctattgtacttatcctattgttatcctatgtcatctatagcttgtgaaataattgtactggatgattggtttacgtgatgcttggatcaattatcacactatgggtgtcacattaacattagtccttaattatatgattgattaccaccatggtat

SEQ ID NO: 17220 - DNA, 305 bp, Oryza sativa
  unsure (1)..(305): unsure at all n locations
agcttggtgcaagaaccctcaatccaccttatcataagctttttcaaagaccaatttcaaaataactctattctttcttttcctatgcatctcgtgaattgtctcatgtaggattactactccctccataatattccttccaggtaagaaggtcgnttgtgagggacgaatgaccttttgagctactatagcaattctattggccattacttttgtaaagatcttaaagctaacattcanaagacagataggtctatattgcaattcgattagcttccttttgttgtggcaataaactaatgata

SEQ ID NO: 17221 - DNA, 480 bp, Oryza sativa
  unsure (1)..(480): unsure at all n locations
tgccctatttgcaggcgtgccatgcaggatgtcgtcgttgtccatattattgcatctgatcggcgccacttgcgatttttgcatgttcgtgcatgatcctgataccttcccaaaacgatttatcagagcggcgaatgcactcacgtcctctttggtcggattaatgaagacagccgcatcatccgcgtacatagatgtgtggaagcgcacagctctgcctcacagcttacttataactcctatgtcggtagccttgtctaatatgcgctagagggggtctatagccaagatgaagaggaggggggatagggggccaccctgccgcaaacccttcctgtgtctgattgtttcgcccgggattccattcanggtgatccttgaggtggaagtggacagcagcccgaatatccagtcgcgccatttttacgggataccactattttggaggagcgcaagtatgtagtctcatctgatcgagtc

SEQ ID NO: 17222 - DNA, 417 bp, Oryza sativa
  unsure (1)..(417): unsure at all n locations
agcttctcatctgcttcaagcgaattttttttgtaattaatattatttttatggaaaatagcaaaagtagtggtcaaccggggaaaatcgcgaaagtaggtccctgtcgaacgggtgcagttcgatagggcgcctatcgaacggccagagcgcgactggcgaggagatcggaaggctgccgttcgacaggacctgtcgaacagcccccgttcgacaggcagggctgtcgaactgcccctgttcgacaggagggctgtcgaaccgtcgaactggcgcagttcgcagttcgacagggtcgcgttctccatttatttgtaataaagtattttttttaataatatngtaatttatttagtgtgtaagaaaggaannatattttgtaatggtatatgtatatgatatanggttttgataatg

SEQ ID NO: 17223 - DNA, 217 bp, Oryza sativa
ctcgtcgccggtagcgccgtcgccgaaccgcatcgtcatcgacttccgggtcgcatcgccgagggctacatcgatcacccctcctccggcgaattccgacatctgagcccgccgctcgtcgtgtgccggtgagccctttcatatacgccgtcgtcggccatggatctcactcgcgtggacaccctatgtgactctaacatctctcattttctctctt

SEQ ID NO: 17224 - DNA, 300 bp, Oryza sativa
agcttctcccaggttttgcctaggttaatgtataacacgcctgaaggataatatgcaaggatagcctcttgtcatcaccattgttacataatcaagaatctatcgcttatgagaatgcagatgaaggaggcctttcacattcacgttttcttcaacaacaaaagagatcattacaagaagcatactttacctcgtcagggtgctgcattaaacaataaatcataaagggaaaaaaaccatgatccagggcacaagtttcagaaataggagaagttgccgcatgtaacatttgtgagaaat

SEQ ID NO: 17225 - DNA, 451 bp, Oryza sativa
tctcgaatatatcgtggaagaagattatgatggacatatcttactatagtcataccaagttacatacgtagataccttgaaaatataaatcttgtatatttggcttgcgctctttgcgtccccgagttctctgtggtcaatcacaggggagatgtgttatatgtacatcccccgagagacaagtgccctgagcgtatcccttgggggctgcacctaaaggcaaatatgccccgagaagtagtagtgtcgcttggggtccaatgtgtgcctcgggaactaccctctgggtgcaccctgtggcgataactcgggtatggcctgcgagggagatcatctgaaggcatatgtgccttgaacagaatcagtctcaatcaaaatccgatgtgtacctcgggcacttgccactggatgcacttatatgttgtactctggcacgacccgcgggtatggg

SEQ ID NO: 17226 - DNA, 284 bp, Oryza sativa
  unsure (1)..(284): unsure at all n locations
agaagaggaatcgacgcgagcagtcgctaggccgagaatttgagagcaatgatctatcaccagcaccctgtcactgattgggttatatcatgttgcacagtacatgcttgatgggctactgagagaagagacagaagcatattattagccagatctttacatattcccacgagatacatgataagatagaatactggccgtcttcagatctatagccagctacacgacgaactgcaagaagtaatgtgtgcatgagangtgtgatcatatgttaatgttataag

SEQ ID NO: 17227 - DNA, 501 bp, Oryza sativa
tactatagcttgtcatagtggtgacacaacaacccacacatgttttcgttgccgttgttgcctcccaagcgacacagcatcttcgacttcactgcgatgctaccctaatgcataagaacatgcgttaacgatacccatgaaggacatcagcccaaacaaccattgaaccacttgctacacacagctagcatcaacaaccttataaaaggattgcagcatgtaatcattgtcgagcttcgacgcacccctacaacaaagcaactccgactctacccagtagtaaccaaatatgaatgctgaacacccacgcgtaagcaagaaacagaactatgaccgagaagacctcgtctaacaccttatgcttgtagagctttataggcattgcatgagttcaccaatgacccattgcacatggaaggttcttggtgccacgagaggtcaacgccaaaacgacgccttcaagaatggaaacgatgcctaatggcgttgtcatcactatgc

SEQ ID NO: 17228 - DNA, 469 bp, Oryza sativa
tcaatccaattataataaaagcagaagtttttgtgactctgtctaccataatataagctggaccatcgaacggtctttttttgaaaacagttttttttaaccgcgctagattaagcggaactatttttgatataaggcaatatttaaaccgccaaatttttattgtccaacgtgtttacagtgaatctgtgaaattatccggctattcttgcatgacaggcccttataaatttataggcatatactacgattgggcctggtcgaaaggccatcatccgatcgcaattctgaataccccacataataactgtatttaaagatagcacctattttttgcacattccctttactcactctaaccttatatatgtgaatacaacaattaccccctaaaatgtcttttatggccatattgttcaaggacacttaaaatcctatttttgaattccaggtacgcaacacttataga

SEQ ID NO: 17229 - DNA, 390 bp, Oryza sativa
  unsure (1)..(390): unsure at all n locations
gcttgcatttntatgagggtttccttgatcttgtttgttggaatacttgatcaggagaaaaggagggcatttggctttggaccacgtttggaggacagatagtttgttctaacagattgcgagtcagtatcaagaagtttagaagctggagtaaactggtaggatctgcgaagttgctcgttccaaaggtgattttgtttcagcccggcgatagacgttcattttgttttgagatgggcacccaagaaacactttgtttttgtttggagtgtgaatactgtttgatttactgtagagctgagctgcatgaagttgaaacaaggtcaattcatgttttacttgaaaagaagaggttcatattcttatatgaagatcagnntcattatcact

SEQ ID NO: 17230 - DNA, 352 bp, Oryza sativa
  unsure (1)..(352): unsure at all n locations
acaattataaacctacactagaccctatattaagatcctatttagactacgttattgtgccattatatagatcacaattttagagaaaatctggtagtggaacggagtcaatcagaattacggatcgcgagatatgaattgtggaagatttattgaaatttctggacaatgagaaatattttgtggaacaaggggaaaatgatgttttttaaatttatagaaataatattctcaagaatattattgacagtcattgacatgcgggaccaatgaaaatgattcatggaattttggaataaagaattgaattatggaacaaggggggataggaaatcaatganggatatatact

SEQ ID NO: 17231 - DNA, 487 bp, Oryza sativa
ggagacaacaactgcacagcttgcaagaaaatcatcggtatggtcatatatccctgcaagtttttcaatgttccatcagaatattcctcaagatagaaaaacataaaccatcatatatctactactatgaaatacatgcatcatgaacccttgatgatgaactttttttttttgtggggacttgctcatgaatccagcaactgctagcgacaataatacttccagcacctgattgtatagtaaatataaactagtaccagatcataaaaacaagcacctattgcttgggtatatgatacttagaaaaaagaagaaaaaacagagtatgaaagtgatatatgctgattccaaatttcctatagataatgcattggttaaccttcacaaacaaaagaaatgaagaaggcacgtgaatcttctatatcatttacaaataagaaatatataccttcagcccattcgattttattgcatttcaggtatctct

SEQ ID NO: 17232 - DNA, 418 bp, Oryza sativa
agctgtacagattgaatatgactattgccctgtttattttatctaataattattacgagcacgttttacaagccgttaattattgcgatttttatattaaaaaactattgaacacttttttgggctattttttcaaatttttaatatttatttcgattgtttatggccttaagtaattgtcatgaaattagaatacgtatgtcaaacggcgtaggggaaaaaaaggaatatatgcaggtttcactttttttggtgaaagtagccggtcaaaaacgtactctctctctctctttgtttgacaaaatgttaatgcaccatgttatgtatggcattacaatgtcaattctacgacggtgcaagggattgaccgtgcaatgcttgttccaatggtcctctagcttccttgatgatactagct

SEQ ID NO: 17233 - DNA, 422 bp, Oryza sativa
tatgattactgtgtgcattcacacatctgagtgtaggaaaagattcattgccatggacgcatgctctgatgcaggacatggaaatggaagatactatcgtcatgtttataattaggtgcctcttaacattgccactcatatgcgaaagtcatctctaatatgattctgtatatgccccgtgacgcctgaattgttggtttggccatgctgtttgtttgtaaggaaaagtgctacttaaaggcatctttatacacccagtttaaaatttgcacctgtaaactgtaaaatgttccaagcctatgtcatcatcttccttgtctattatgcatttctatactttaacatgtaatgcacgattacgttttgatttaacttacttgaggttctttttcgtgcacggcatactgacagatgacataaca

SEQ ID NO: 17234 - DNA, 400 bp, Oryza sativa
  unsure (1)..(400): unsure at all n locations
agctntatgtcgagagtgataacatccctaatccttaatactagaaattntcactcctaaactatataaaaccgtgcaatttatatcttatagcagtactgatctctagtttcacttacgtggcatcctagtaacaaaaaaaaaaattataggacccatatgtaagagagaagaagaaaatgtagggtccacatctcttattntttctcttttctcttttcttttctactctctcttatcttcttcagcgagcctgtgaggccgtcggtggcaaaggggggagaggtggttcaacggttctgggagagagggggaggtgtccggtgagcccgtccgagctctgtcaccgcctttgagctcatgcgaagggaggagggaacggggtatatgtatagattga

SEQ ID NO: 17235 - DNA, 480 bp, Oryza sativa
  unsure (1)..(480): unsure at all n locations
cttacaattcttgtctactgcgataaggaaaattgcttgcaaactgtgcaccgcatttatgcagtcaacggtcttggatgctgctgctagtgcctacatgatggtccaataacaaacaaagttcagacatattgaaaatctttgacatggatgtgtgtactctttctagtgtttgaactttcttttgggagtgcatgagaatgagtagtggaaaaacaattntcatggacaaacaatttaacaatttaatcagaagattaatataccattgaagaaaacatgtttgagcaaaataatgctgtcctatgtgaaccgcctttacaatgttttttcctcctttggcacttacatccatgctattacaaaaactggccctctgtgatcaacgaggaaagtccataagtttccaaaaagcagcataaatatgattcagatgcatgntaaagaagctcccttctntatcttttatttgtcacaaat

SEQ ID NO: 17236 - DNA, 395 bp, Oryza sativa
agcttcaaccacaccgacttctacttcatggtgggccgcagctccaacttcggcgcggccgacgcgttcggcgtccgcaccggcgccacgccgcgcccgtccaactacgaggacgacgcgtccaagcccaagtacccgctcccggcgtcgaatgcggcgcccatggcgggccactacccggcgccgaacccggccgtgtcgtctgcgcccaatggcgccaagaatgcggccacgaacgggcaggccaagggcgaggacctccacatgttcgtctggagctccagcgcgtcgcccgtgtccgacgtcttctgcggcggcgcgccagactacaacgacgccgcggcagtcaagtcctcccgcataagtagcaatcttttatcttcaccgcgtactat

SEQ ID NO: 17237 - DNA, 452 bp, Oryza sativa
  unsure (1)..(452): unsure at all n locations
tgagccgagatcaacacttgtgaccatccggttgaaccatgtttatgccgangtcttgtctatcctttgtcaatactttattctcatcacaagtttgacttcattcttgccaacatgacgatgtccttggcttggtgaccactaacccatggtgtcattcattatcctcatcgtagtgggacctattccttttcacacctcataggagaatattagcctcaacaaatcggttgtcatccttcacttgatgaccaaccggctgcatatgaaagatatggatatgttcgttgagtattcattaacatcacaagtgtcatatactcgtatgcaatctcaagtgcaaagatccgatataaataataggtgaacaacatggatctataacatgcacaataaatgtataggatttgctccccctaaatatatgcatacaaataaatatacatgagatg

SEQ ID NO: 17238 - DNA, 290 bp, Oryza sativa
  unsure (1)..(290): unsure at all n locations
tattatgggcgcattaaacatcagtatccggacagaacaataacagataagcggtgactcaaagctatcacctgcaacttacaggttaacatttcacttatttttaccacgggttatgtggagttgatgggtggcactctaactgtggtcagccaagagaatgaaggatcaacattntcatttgttctggcttgcaaaattcctgttaaggaggatcacagtgatgatccagatgatatgcccaggtctggtggtgatttcactactagtgatatagaagggtctttcat

SEQ ID NO: 17239 - DNA, 454 bp, Oryza sativa
tatggatgtgcaatgcgtcacatgctgcatggccgccctaagtctgttcatatcgaggctgggagagaaggcactacccctatttaagctcctcaaacgctccgggccgtttacctggactgatgatgctgagcgggccctcactcatttgaaggcatacctcagttctcccccggtcctggtcgccccggagccagatgatccgttgctactctacctggcggcgaccccgcatgtggtcagcgcggcgttggtcgtggatcgcgacgaggacaacccttactctgcgcatccccaccctgcgtcgactcgacccgggagagagcatggatgagaggcccccgagtcgaacggcggcccgaggcccccgactgccggagctggccctccgcccgcttgtccgactgtgccatgcgcccccgacccccatgacggtcccgatgccactgcggga

SEQ ID NO: 17240 - DNA, 350 bp, Oryza sativa
  unsure (1)..(350): unsure at all n locations
agctcgcccctcggatcgcgggtcctcnccttagtattgctcggcgcggggaagtcgcttaccacatggagctgcccgcctccttgggcaacgtgcatgatgtgttccatgtgtcgcaactcaagaaatgtcttcgagtgccatccgagcaggccgattcagatcaaattgaagttcgcgaagacttgacctacgtggaaaggccagtgaaaatcctggacaccatggagcgcacgatcatgaaccgtgtaatccgtttttgcaagggccaatggagcaactacgctgaggaagaagctactacgctgaggaagacgagatgaatgcagcccatcccgatctcttcgtta

SEQ ID NO: 17241 - DNA, 438 bp, Oryza sativa
tataaaaaggggtggctttcaagctggataaatgtatgggtctggagaccaatgatttatacacgttcaggccttcttattaaagaagtaataccctactcctgtccggggatgaatccgccgagtgtttatcgattgtatgatttagagaaaaacaacattctgcccctaaatgcacccggacccccactatatatatgaaggagttcggattacaaaagataatctatgtccctaactgaatacagtcgtgaccgactaagtctcaacgtgcttccttgatatacaagttaggaaacaaacccaggatacacatatgatattctatctatactcggtatcctatattcaattcaaatatcatcgccgtatatatatgggatatccatattctccacaagtatttattgttatatcacattctcaaatagaatcatg

SEQ ID NO: 17242 - DNA, 458 bp, Oryza sativa
cgaggcagagaagagagaggcatgatattgcaaatctgtgtgttctggtaggggcatttggcaagtgtccgcatttggtaatcaatatgtagtggatttgaacaagcacacttgtgggtgtagaaaatgggatttaactggaatcccatgtttgcatgttgtttcaactattcaaggtttcaagcaaaggccagagagctatgttgatgacatattgacaaatgatgcatatgcgaggacatattgtgggatgatttatcccgttcctgatgagacacagtgggaaaaaactccatttccagatgtagacccacctgtggctatgacacaaccagtgaggccaaaaacaaagagaactatagcatctgatgaacctacggttcaaggaaggtcgggtgcaaagacaacaattagatgtagcgtctgcaaagagtttggtcataacagcagaaagcatg

SEQ ID NO: 17243 - DNA, 497 bp, Oryza sativa
  unsure (1)..(497): unsure at all n locations
gacccgngacctcttagtcacctgcggcatgcaagcttaacaccctgctctcatttgaacctttcctcctgcagcaaatcaggtattactgtacaatacattatcatcctatattttgtcccatcatacatattttggaacatatattgtattattaattgtcgttgggattgcatgcatgactacaatatatatgcaggttgagataaacccctattgccggcagaacaaactaagggagttttgtaaggagaaagaaatccagctctgtgcctactctcctttatgagcaagtggcactatatggtgcagcaatgccgtcttggactggcctgttctcaaacatatcgccgtacagaaaggcanaacgggtgcccaggtacatatataatgctacaatacggtttaattttggatcaggtatgataaactataatttcagtgatgtaaagattatttatatgccacaaaatattcttaatatctgggtattgaca

SEQ ID NO: 17244 - DNA, 490 bp, Oryza sativa
  unsure (1)..(490): unsure at all n locations
tgagtttcttgttaaaactgaagtgaagacagagttctctttcaataactctgtgtcgtgaatcatgcgttcatgagtgtatgatttccttgcattatttgcttacgatgtttgatttatgagtaatattctaatttccttttatatttattgtctatacatttgttaactgaatcttttcttccatttatcatatcattctgttaagttgtacatgcagcagtgagtaatgttttttttttaggaaactccaacctcacagtacttggtatctaactggtcttttggttcacttgctacaggacaaagggaatatgtggcactgcatgcgttctgccatctcattgttcangtaatgcatgtttatatttttctttcttggtaaatatcttttccagctgtttgaataaaaatctttctgttggatgtaaaatgctatttctgtatacaaaccttctaaatattctaaactatacggatagttcaccac

SEQ ID NO: 17245 - DNA, 299 bp, Oryza sativa
  unsure (1)..(299): unsure at all n locations
ataaacggntcatttggtatgagtacaagaatgctaatgccaacgcggatatttagttctcaattcctaattccagagattgttaaacctggatatatttcanaacagaagaaacggactatccctgctgtacatcttacctcttagtctaggtgatttatacaaagagaactttgacggcacaaaggtccctcgatttcacctgaggagaggttgggatagttataagtattaaagtattgcattgcggagtttttccctcatcttgtgcagatctatatactctatgaggtaagtcg

SEQ ID NO: 17246 - DNA, 422 bp, Oryza sativa
tttatttctggctaactatgtattccctatgaatcacaaatgaatgttgttttggacatattcacaatcaatctatagaaacattatgtatcaatatactttaaaatattgcgataaatagatggaattcatatgaatataatgatctcaataagaaagttcaaaatatgatttgttgaaacagacatttatggtgtagggtgcattttggagactgtgttgatgtgccatgaatctcagcaatatgtgattacaaggctccaagcttcataagatatcaacataacacgtgcgatgaaatataatagaatatgcactggttcatcataatgagaagattcgatttacgttgtgaacctcacatctattaagaagttaagcacatccttttacttgtggattgttcgacctgctattactcg

SEQ ID NO: 17247 - DNA, 361 bp, Oryza sativa
gctctttgttctttatgattaagatcggattgatttcgaccggagatgcaaaggttatcactactatgccagcccgaatcatgatcttcaccaacttggatttgggtctctcgaaaaatcgcgagttgcagagatgaaaaccatgaatatgcagatcccgtatatgataacagaaaccgttgataccaccagagtgaagactaatagagtctggtcttttggcattctttgctcctttttcactcaatgattcattcgaattgcccgaccacaaattctatatgtctattcataaggcctcgttgctaagtgctacaagatctagtgcactggaactcgtggctatggacccgaatccttt

SEQ ID NO: 17248 - DNA, 435 bp, Oryza sativa
  unsure (1)..(435): unsure at all n locations
agcttaagagtaagtctatcttcctctctcatttcttccccatgggcgaatccgatctttcaatcgtaaaaccgggtttaatatctcccttaccttcaaaaaccggtgtaaatcgacttccaagacagtatttagtccggttttagcttatgtggcgtccacgtggcagtaaaatttatgtggggcccacatctcagttacattatctatttctcctctcctccctcgcaggcagccacggagactgaatgggactggcacggcggaggggactaaagagcctacgggtgcggcgcgtgggccgctggtccgtcgcggacggagccagaacgtcgccgctgcgaccaccacagagaggtgcgcangtgctgactaatcgcgatgcggccgccatcgctgtcgcggccactatcctttccgacgctggactcgtcg

SEQ ID NO: 17249 - DNA, 490 bp, Oryza sativa
tcatatgtgccatacctcatctcaatgatcttttgtttggctctccatgcctttgcatagcttatggtgtacttgaatttgttctcgatgtgcctaataattgattttggttcaaagccaatgttaccaacaacactgctgtacatctcacttgccacaaaagctgaagtgatgtttcggtgatacttctccaccccttgtaagtagcacttgtgctcggtcacaatgctaactttccaataatcattccatttacccttatatgcatggacacgccacggacaatcttccttcatgcacctcacttcatacacataatttgttgacttgaccaccctatactctctctgcaatgaaactgcccaatgcttcaccgactccttcatctcatccttatgagcataccttgcaccctcaattacctcgttctccttatactcccatggtacatgatcaccctctgatataacatgtccagagaagtcctcat

SEQ ID NO: 17250 - DNA, 420 bp, Oryza sativa
  unsure (1)..(420): unsure at all n locations
agctntcgntttgttgcaataatcttacaagcaagatgcatgaccctaatcatggttcaacatcagctgtctagaactctttgaaatatcggtatcaaaaaaatgagaagaactctttgaaatatctagaagctaaattggctggacggtcatgtcctatatatgatagcatatgtacgtacatacatagtatctacaagtatttggtgttggttagctcagtgaacttggttgtggctacaggtaattaaaactatccatcgattttacttgcctttaattttcttttttgcttttgcttatataagagttaggcctaggttntataactgataacaatgagctatgtaatatttttatttgcctagatgattcatctggaccagaatgtgtatcaacacaatgcctggagttattctt

SEQ ID NO: 17251 - DNA, 464 bp, Oryza sativa
  unsure (1)..(464): unsure at all n locations
tcggctggatgttttttcaaaggtcgcatatgcttatctatatcattactttggtgattcagttataaaaccactcggatggatgtttaatataccttgactatatgtttagttttattcaactaatcacatagtcgggggctacacctaattaagtgcatctattcgatgcacctgattttttgttgttatcccttcacagtctttgattcaagtacttgggagaccaaggcaagaataattgaagcactcggattatcattctaaaggttacaagaaaagattatttcgccgattgtaaatgtctcatgggctactgtggagataatggataccacatacctacacatgatgtatatccgactgggtatataggtaccatatatagatagaatatctttaaaaggcacggagtatattcttaacttgtgtatcaagaanatacccgtgaccctagtcagtta

SEQ ID NO: 17252 - DNA, 455 bp, Oryza sativa
  unsure (1)..(455): unsure at all n locations
agctntgccattgacaatgaaagtctcctgattgatgtgtatatgtggcagatagctagcatttatcagcgtagtgcgtcatgatatgaccagattttacactaagattggacattgttggaaaactttcttgtgcaagctctctatagaatattttaagtgcttcttgggcccacaggctgggccgcaaggtttacggccgtgacagcaatctttacaactacaacagctaaagacatgtatcagcataagactgcccaactgcaatcagccatcatgtacgtaactgtctgtgtgcacacacaagagaatgcttgcgagtggtataacctgctagttaagggatgtggatgtgttactaaacaggttcttcaaattatttatagtttacttatctatnggtagttagcatcacattttctctgccattatgaagtgcagtgcctacatgctca

SEQ ID NO: 17253 - DNA, 270 bp, Oryza sativa
aaccttgatgttgtgaaaactgcgatacacatgatgggtaatgatgccgcaaatgatgttgatggcaagtgtgctaacttctgttgacagaaatgctaacatttgtgtacatgttactatcatttataaacctgtcattgtgcagatggcgatattgtcgatgcatctgccgataaaagtaagaataagacagctatagctgtatctgactgcgaatcaatggacctggacaaacctttcaatgtggctgatgaagctgagcctggaact

SEQ ID NO: 17254 - DNA, 342 bp, Oryza sativa
agcttaagaaggagagtgtttgacatatatgttcatgtacaaattgaatgcattgtaaatcttttagttctttatctgaatgtattattgaaattggtatagggtgcactgaaagaaaagaatttcgatataaggaagacagcaggtggaaaatcttttactgcagttaacaggagctacacagcaactgtgtcgaaaaacttcattgagatccatctcttttgggctggcaaaggcacttgttgtgtacctactcaaggtcactacggaccgacgatctcagcattaagcatcactcccagtaagcacaatatttttatgtgactgcaactatgattatat

SEQ ID NO: 17255 - DNA, 487 bp, Oryza sativa
tgtgctgagcgacgacgaatgcgatgacaacaattaatttgtggataatggatcacccataatactgccgaagcacactgctccgaagaagaaaacatctatccgccccatgccgaagtttaaaaagtcctctaggtataaatcattcgataccttattcgctttgacatgcttctcacatgaaaacagtattgaagaccaaataaacttgcaggaaaccatccgacatagatccatccggaaaggactccgatccagctaacacagaaacgagttcctccaaagaagctgggccgacttctgatgaccacccgactggcgcttatgcatcaaccgacaatgtaaacctaagtgaccaacccccgactggaaaccattcggcggaagcggaaactgcagccagccaggatcccccgactggataccagtcagaagcggaaactgcagccagccaggatatccctgaagttgaaactcatgctgacgc

SEQ ID NO: 17256 - DNA, 260 bp, Oryza sativa
agcttatcatgtcgtcaacatcttgtaccatacgaagaccatgatcgctgcctcgattccagccaactccgcaagcaccctcaccccgattggtagccgagtccctcacttccgatctcatgattatcatcagccaagcctcagcatcaccggcacaagatctaatcgcaggagcaggggtcacgacgaacgatctgttcactcgccttccgaacgtcacatggagcgccgagttgaacgggctcgctctccacctcgtc

SEQ ID NO: 17257 - DNA, 459 bp, Oryza sativa
ggatgatcaagaattcggtctgaaactcaaccaagtgcttctgattcattcagccagtcatgctctcgaaagaaggaactagttctaagtgacgactaagccgatgatactaccatgatgcctgtagaccgatagacaaccaagatactaccataacaggctactccaaggaagaaaacatcccgtcgccctgcgccaaagatcatgaagtcttctatgtacagctcatataacgatctctcttgcattgatgcgcattcattgcggcaataatactgataatcaaatttgcaggaaaccatctgatatagatccgtctgggaaagactctgacccgactagcgtggacgcaagttcttccaaagaaaccgggccaactgacgatgaccgtccgagtgacaatcagtcggcaaccgataatgtagaatccggtgatcaaccaccgactggaaaccattc

SEQ ID NO: 17258 - DNA, 487 bp, Oryza sativa
tgtgaagcgtccggagaaagaatacagatgactgctgttatttattgatgatcatgatgccgcggttctcgtcgccctctccaacagccgcgccgacgcatccgccatctcgggcggtttctggggataatttacggtgagcccaccgcgggggagcagcatggtcatggtgagggttttcgtggggtttactggagtatctcaccgtctccggccaggcggatccgcctgcttattagtacagcggtacagcctctttaactactggagtagtacaatgcttcttttcaatttttttataagtcaacctcctttaacttcttttcaaactttgatcaagcttgtatgaaaatatatcaatacttttaacataaaacaaaaactatcaaaacacattcaatgatcggtttaagtaaactaatttagtattataaatgttgtacacttttctatgaacattatcaaacttttaacaagttctaacttt

SEQ ID NO: 17259 - DNA, 471 bp, Oryza sativa
  unsure (1)..(471): unsure at all n locations
ccgtcccggatccttnagtcaccgcggctgcagctatctgttaatatgaagtaatttttcttaagtattcctgcacgtttgttctatacaagtgtttatgctaaggaccctatatgagaaacctcttcggtttgttctcgtttttagcctgcatcttgcatatgcgtctggagaatctgtatccgtagagaagagttcccttcgggtggaactgcctgtggagacgataaactcttagctagaacaagtgtgacttggaatatcttgttaagttgcttctaaaaagatagataggtgaggcttacggtgagtaccgagtaggactttacatcatccgaagcaagcttctgaggctgtctaaatatgattcgccaccctgcaaagatcctaaagttaatatatctctcgaagtgaacagtttcgaacagtgatttatacacgaaactgaatagtggttttgaatagtaatca

SEQ ID NO: 17260 - DNA, 480 bp, Oryza sativa
tacgttaatgcgaaatggtcttttgtacaacaaacatttgttgtagatcgggtctgattaattctgtgatttcaagtttaactatgtgtataatatctttttttaatatttcaaaaggggttcttcaaaaaaatgattattatagatctcgtttattttggccacgagatgattattaaaataagtatatatttacaagacaggatattatatgccaacccacatattagatggatcctggagttcataatttggaagtctagaataaatgtcttttcaataaattgtcatttaatctaataaatgagcaaggtgtttggatcggcttattgtaaagaaaatattttaataatcaatcaatatgtcaagttgatatgaaacaaggggattcccattttttatcaagtctcatgaaaatataaagtactttattaaacatgcgttccctgtataatgaataatgttttacatgttatattt

SEQ ID NO: 17261 - DNA, 314 bp, Oryza sativa
agcttatcttcgctgatggtgcccatgatcctaaagaacggcacacatggatgcctactgcagaatggtggtataatactacttatcacacatgcattgcaagtgcacttgtatgaagccatgtatggagagaccccaccacatattggggtaatggcgtatcctggcaatgtttcacataatgcaagagcaactgtacagccaatggaggatatgttggcaagattagaataaaactctgccaaagctcgcaccagaatcaaatagcttgttgacagactcaagagtgaaagacaattcgagttaggggatat

SEQ ID NO: 17262 - DNA, 338 bp, Oryza sativa
tacaatctgtattcctaccacatctaccatgctccgatatttcctgaaggccaaaccatggtccataaatgctgcacctgcgagtaccatgatatatactgcttgttgacaagaataacatctattgaagtattgcactatgctgccttcatacacgcgtggatagtaaccaatgatcctgtcacgggcgcactccaaccttgaacccacgctcttattatcaaatgtcaccataatatcctcatacatctccatatcagaaatatgcttaacttaactgcctatgttgaacatgatcgttatagagttaccatacttgactatgatcctaacatgaa

SEQ ID NO: 17263 - DNA, 476 bp, Oryza sativa
  unsure (1)..(476): unsure at all n locations
tctacgttgatcatagatagtaccgatgaagcttcttcctgtccaagaatttgctntggggatagaatagtgaatctgtttcggcaagatgaagatctctattggaaattaaactgcagaaaatcactgtacgtcacgctgcatcggagaaggaagagatatatgatgtactacctcagttcagacaaaaacagaatgtagcaatccaggctatctagcgttagtttatatgctttcaattacgaaagcagatgacaacagaatatcataactaatttggaagcccagtggaacctgcaacttatagataataactaatgcgtcctgagactatcatggtgttgacgtatgagtgcccggttgttaaatggcgctcccattcctaatatccaatgacagaaaactattgacatataatctagataatgtttgtgcagatctagctacatgcttaaccgcctttgatacttaatatg

SEQ ID NO: 17264 - DNA, 418 bp, Oryza sativa
  unsure (1)..(418): unsure at all n locations
gcttcgatcctgtcngtgtcgntgttggacgccgttgttcatgtgtttcggcccacattagtactcataagatttggggcaaaagtatttactaatattcatgcattttcgtgccaaggtaagtatttatgaaatttaggaccgaaagctaaaattccttcattccttttttatccaaggataatactcatgcaatgttaagcctaaggacaatactcatgtgctttggggcaaaggctaaaattcattncaatttggtcagaagttagtactcctgaaatcttgaatcanaatctaatattcatgtgtttcgggccaaaagagagaatttatgcactggtggtgccaagatttaaaaaacgagatttagagagacgtttctccaattaccttntaagaaaataatatgagcatgtta

SEQ ID NO: 17265 - DNA, 490 bp, Oryza sativa
tattcaactgggaaatagcaacagcataatccagtctcatttgcatgtactttgagtttctcttctttcgttagcctatcactttagcaattgcatgatgtacttcttgtgcataatatcatctaaactttattaattagctaacttggtgaataatgtctttacaggagaacagcgagtgggttgaatggcagacaactgccctggtcaaacgcaatgaggttgagaacgtttatcattgggcctgtgggtaggttatcaccatgttttgtgatgcttttgtgattgcgtacacttgtcttcgctgacttttggctatcaatgctttgtgctgcagtcgtccgacttctctacatgatcgtggtagggatagcgatgatgatgacttccgagacagggactatgatgtggcggcacttgctaataacctgagccaggcattccggtatggaatgtacagcaatgatgacattgaagaagtgattgtctg

SEQ ID NO: 17266 - DNA, 441 bp, Oryza sativa
  unsure (1)..(441): unsure at all n locations
agcttaattaatggttgctgcctttgttctatttctggagaatangtaagtgatcaagacaaggaaaggaacaagctacccgattagaatttatgatgaaacataagcaactgcaaacattaatcaatattgtccaagttaaacaggtgaaaatgtagtgaatttgtcaatctgaaacaccatttgaattttgaaactagttcaaacttcttgtaacttgtaagaacacttttatactaaaaaaataaaaacaataacagctctaacaaacacatatggtaaagacgatttactacaaattatcttatcatctattccctttgtcccaaaatataacaacttctagagttatctttttttctgaatataacaactgtactcctccgtctaaaaataacaactttaccctctgatttgtccaaatataaaagttcataaatt

SEQ ID NO: 17267 - DNA, 322 bp, Oryza sativa
gaatgcacaatactggactagatctgtgaacattataggcgttaaactttccgaagcagatagatgaaagctacaacctttgactactccaccgtggtataaagatcttgtaaggaacatgaacaataatgttcaagacaattaactgtcgaaaattacctgaccgcgagatcacatgaacccctgcaagatcccaccaccaattttacctggcaatggagacatgtggttacttgaacaattcaagaacgcattataggaaaaataaaaaacagcagctcgatgatctcctccctgtcaaattctctctttattaatcttc

SEQ ID NO: 17268 - DNA, 495 bp, Oryza sativa
  unsure (1)..(495): unsure at all n locations
gatccctaagcacctgcggcatgcaagcttcagngactgcggcggcgacgtcgtctatcttctgtgactgcggcggcgagctaggacgctctgccgctagcagattcgagcacagaagtgcggcggctatctgcggcagattgaggtggccggcgagatggaccattccttgtacacgggctcgtcgtcaatgcgtaacccagtcacatgcgagttgcacgtcgtgaagtgtccgttatgcggtacgcagttggaagcaaagacatcgttgacccctgctaacccaaacaagcggttcgtgaagtgtccaaagcttgagcatgtaagttttaggcataatttgccttgtaatctagatgcatgaatcctccatttgacctcttggcttgcagatgctctgtacctcgcgattcgctatatggaattgcacttcacctctttagtactgatactgctaatgcattttttatgttcaccgtctcaatgttcatcaac

SEQ ID NO: 17269 - DNA, 442 bp, Oryza sativa
tgcctggaggagatcttggccgacttcggaataccggatgaggcttatacctgtttctttgccgactggtttggatccgagtctaagatagagatcttgccgaattcgttggtgatgaagattatgccgtcgaaccgaaacgcctgcccgggatggtagacgatgtcatcgatgccggatacggaactgatcgcactaatgggcgaataacttgacgcttcccctacctggtcgcgtcaactgtcgttaacagattacggcgattataaaagggggtggctatcaagctagaaaagtggatgggtttgaagacaaggaatattatacaagttcatgccttcttattcaagaagtaataccctactcctgtcctgggatgattccgccgagtatattattgattgtataatctgggagataaacagcctcccgataggaaccc

SEQ ID NO: 17270 - DNA, 428 bp, Oryza sativa
agcttataaatgacttgcacattagaacaatgcctatatttggtactacaagtgatcacaaagaaaagcgaataatatgggacaaatgattacagagaaagccagcaacgtttgatcactcgtcttattcaaaattttttgaaattattatttattttatttataacttactttattatctacagtactttaagcacaacttttcgttttttatatttacaaaaaaaatataactaagacgagtggtcaaacgttgcaagcaaaaactcaaaattccttatactgtgggacggagggagtaataatctagtacagtagtaataacactgttattgtcatctctcctagctccggcgagcctcgtctccacggcggccggcggctatccggtcacagattcctgatgatctggacgatctggtcgagct

SEQ ID NO: 17271 - DNA, 485 bp, Oryza sativa
  unsure (1)..(485): unsure at all n locations
cgacactattatactcagcttggtggggnaaagctggctacaaagtcggcgactaatcgtatatgcatttattactgtggagaaagaatcctgagtcatcgtacacatgttacaaagtccctgcacatgcaaaaccatcggttcttatttatcaccgggatacaactagaaatagctatactttgataggcgaataaatatgatcagttgatagaaatggagcctcgctatattgaccaatcacgtaagtggtgagatcactgcagaaaatatgcttgattggttttacgtaacacaaaattgcttttaaagtctctctacatgttgtaacaggtaaagtgaatattcagctggagctagaaaacattctatggcatgtgaaactaacacgcaaggatgtacagatctttgcgtgtgtatgaaactaagctcacaatcaataaatccagaatctatatgaagttgctccaagatcatgttcactc

SEQ ID NO: 17272 - DNA, 468 bp, Oryza sativa
agcttagaagcgacttcactgatatgtggtccccttccctactgtaggtcccgcgccacgtcagctctcgacggcgctcctcctccaacttccaagtcgccggagcggcagttgggccagttggcctgggcccacttcaccccaaccgaaagccccccatcaaactgacatgtggggcccacccaaagcctactatctccgcgactaccggactggcagttgggccagttggcccgggcccacttcaccaccacccgaaagccacccatcacactgacatgtgggcccccacgaagtcacgccgcctccgtcttctacctccgcctcgtcgtcacaagtcacaagcacaagaggcgaaagcgcggcgccgtcgcggagaggagaggagggcgacgagggggaggcgattcccaaaccctagctaccctcaccgccgccgccgccagcagcgatgatgtgctacgcgct

SEQ ID NO: 17273 - DNA, 472 bp, Oryza sativa
ctcagcttatcatgtaaacgactagtgttcatttactcaaaacagttattatgataacagtacatataatcaacaggacattaataaatttttattcctttgttcagatccagttagaaagtgcactatacccttctacaagaatggcagtacgggttccatccctgggttttcatttctctccagcacgttatcataggttaatggaaactttcaagatttttcaagataatgatagcgacaaaaacagttcagatcttgcacatttgtgggatcaagctgactttgagggatggtcatctcttctcacatggaaggatgcacttttctgttctcttgaactggatttgtaatccgtggtgcatgtatcatgaactgggggcataagggattatgggtagacacagtaaactttgcatgaccttattttgaaaaatgaacaatggccaattggcatatgatctgacatctt

SEQ ID NO: 17274 - DNA, 296 bp, Oryza sativa
  unsure (1)..(296): unsure at all n locations
agctttngttgctcgagctgttcttcttatgtgagtataaattctacgccaacgaccctatatgagagatgctcttcattaatgttctcgnataccaccttgcatgcagcgacgaaggagaacctttatctgttgaagaacggttcccttcgggtgatactgccttgggagacggacgaatgtttatctcatatgaatagacccaagaacgggattagggtataagcttaagctgctccttcgaccaaatagtttagacatatggcgacgtcagagaggattacacatctatcatt

SEQ ID NO: 17275 - DNA, 492 bp, Oryza sativa
tgacgctcgatgatgtgacctgatgacagattacagtttctctttatactgtgtcgtatgactgttaagttctgccctactatcacactttcatggtgcagttggataacggaaaatggatgatggcattgtgattgacattgtgaaatgaataagagtttacgattaaacggaaaagggtgaatgaatggttaagatgtaactatgggtggaaatcattgtcctttgacatttgccaaacacctccttatggattgatgactataactgcgcaatatatactgttagcaatcatagccatccatattttgatcttacgattcacattcgctactatatgatgtataatagtaatatttttactacagtgatatgcattgatatgagtcattgatttctcatcatgtggtgctgacgtggtgtttggatctatgcactgaatatttgaacatttatcacaattattgaatgtggactagtgattgaactaac

SEQ ID NO: 17276 - DNA, 365 bp, Oryza sativa
agcttcacatagcgaggttgagtccgtgcctaatatgcgcgaagatgacatcctcacaaaggcgctcggaaccaaagaacatcctggccgaactcggggaattggtagcgatgtgccctggaagcatggactccctcagtacagctcccaatacaggaaacggaaagtctccaaggaagagagggacgctcgtttgaaggccgaacttaatgttgaggtcattcaagaactagaagctagcatgaatgcaagggtggaagaaagggttaacaaagtcctcgccgacatgaatataccccgagtcacaacaactgctgtgcaaccaacttctcgtgtacaatacgacgcgagttcgcacaacatat

SEQ ID NO: 17277 - DNA, 486 bp, Oryza sativa
  unsure (1)..(486): unsure at all n locations
ctaagcttactatgtaggctcaagctcgctacagacttgagtcgttctcatgtcaagccctggtttgctgtgagcttgaagctgagctcaagctcggctagttcgagcttcgagctcttctcaagcctgcctggtggtgcagtgaaatactataacagattcatcccattcacttgaaaagttgacactgtgatgcatgattagatggggaaagtaatgctagtgatcctacgttaaagcaagccacacactattaccagtactagccatgctctttttgggacatggaataacaaatgcatgctccctccattaaaaaaaaaaagacaaaccttggtttccgtgcccaacatttgaccgtccgtcttatttgtgaaaaaaatatgaaataattaaaaagacaaatcacgcataaaatatttatcatgtgttatcatctaacaacaatgaatatacaaattatcaanaaatttcatataagacgga

SEQ ID NO: 17278 - DNA, 340 bp, Oryza sativa
  unsure (1)..(340): unsure at all n locations
caccgccgctgcaacttgggaactcggcttcctttcactcctacctcgatgggcatcggtcgggtttttcctgccctcgtcggcgacgacaccacccggcaagcaattcttctcggcgactacacaaatttcacccgcaacacgtcactatttacattgcttacaaagtgaataaaaagaaaccttatggcattntttctccggacggcgagagcggtaccgacggtttatatatagaaaaatgtggttcatttcacgaagaaaacataacgagaccataccaaatagtttactttgtgtcactgtgtgatgaanaagagagacgtgtagagaattaccc

SEQ ID NO: 17279 - DNA, 458 bp, Oryza sativa
tggtgattaagaatgctctgattcttgtgcatagatgttattgtcttaaaaaggtttaaattgtgatacaaattttgaatattagaaatatttatattttgaaatatacggaatattttttttcaacaaatgaagtactaaagtatgtgtattgccgatataatacatcgccatttaagttcctattgaaaatgtgaaagatttcacttatcactatgaatctattcctacaaactaattcaagcaaagaatctggtaagattagtgcatgtaaacaatatcattatacaggagcaaaaccaaaggaaaaaaataattaatagtactccagtaatgcactgtatcatttgagataacaaactgcaggtctcgtcctggtacgggtacccgagaaatgtgtaatgaggtggtgcctcaaggcaatgatctaatgtccacgagtccgtggtcccacccgg

SEQ ID NO: 17280 - DNA, 406 bp, Oryza sativa
  unsure (1)..(406): unsure at all n locations
agcttaaagctagtaatggctggtcggactatagttttacagaactccttgagctgttaaaggatctgttgccagaggggaacaatttacctcagacgacatatgaagcgaagcaagtattatgtccgttgggcctggaggtcaaaagaattcatgcatgtccgaacgactgcattntgtattacaaggaatacgctgacttggatgtctgccctatctgtggggcatcaagatacatacgagcaaagagtgaaggtgaaggaagtaagtcaaagaggggaggcccagcaaaggtggtgtggtatctcccaattgcggagcgcatgaagagaatgtttgcgaacaaagaacaagctaagcttgtgcgctggcatgccgaagaacgganagtcgatactatgctgat

SEQ ID NO: 17281 - DNA, 338 bp, Oryza sativa
tttttttgtaaatgccacccttgggaataccttctgctcctatatcgagccctgttgacaactcccgtttggtaccgtctttttctgaacaatgaatatgggaataattgctcatcttgaaacactggactgtacctgaccttcaaataactttagcacttgaataagtactacttttataagtactgtagcttacatacaaaattagtgctgggaaacctataaatataaatttttgtcattccatgcatgcctattttctcattgttgactgaatgttccatggtcaaacattcttggctggcgcgaaagcaacgtcacgtaaagatgtgcattat

SEQ ID NO: 17282 - DNA, 205 bp, Oryza sativa
attcaaaccatggcgattacttgtgatggatgcattctcattgaagttgcatttctttcttctttatttgcaagcttgttgcttctgaacggggtgcaatgtttatgatatatttccccctggtttacttgtgtaatgtaatgataaattgctacctcgtctgatgtactgacgttatttttactggttttgcctcactggattt

SEQ ID NO: 17283 - DNA, 470 bp, Oryza sativa
  unsure (1)..(470): unsure at all n locations
tggattctttattctacttgcgcattactacttactttacattccatctgaattctgctgtaccacctttctaagtacgatcattttcactctcatctataatgcacgcacgttaatgtttattttgatcaccatctctatcccatatatgtgatgctgtgcaaaaactgaacaatggatagacgggtgggaggcgaggagatggcggatacagccgccgctccgcaccccacgtgcgcggatccagctgcgctggggtgtgtccgatgtggatgcgggcggcatgactgcggatccagcgtggttcttgcacgggtaatggcggacacgactgtgacgagcgactgcnggcgggatgcgatgcggcggctgatccgggcaccactctgtcccacgcacacggcgcgacctccgcggcggtgagcctatacatcgatggatatggatgagcagcatcgtgcaacttcatg

SEQ ID NO: 17284 - DNA, 382 bp, Oryza sativa
cacactttcggtgcgtagattagccgatagatgtgctgaaaacggtatataatcattgcccgcaatcttaaagattccgctgttgacataaacaaaaccaaaagattagaataaagaaagacatatacaatgatacttcaaagagaaataccaaacatcaacgatatatacctccagataggttcatcaattggttgtatacaatgatagaactgtctcttgatagactctgcggcaattggcatagcgactttgggtgaatctttaatatccataggagttttgtcatcataatcatcctcttcatcaacatttacaatatatcgtctccgcttcttattaagccttagattcttataatcttcacactcatctctatcat

SEQ ID NO: 17285 - DNA, 456 bp, Oryza sativa
  unsure (1)..(456): unsure at all n locations
tgctcaataatgggttatgatggtgtcaggcccaatttccagtttagatatgcatacctgttgtacagaaaggagaacattcataagccaccacaatgacattcatcacatttggccctgtcaatggaccagattccttgttctcactatcatctgcagagcttactgcacctgcatctccaccagcatcatccttagcttccaacggttcagcaacaccgacgtcttccttcttgtccagtgcagccttcgattccacagcttgtgcattaccatcagcttcagccttggaagcatgaactgacgggtcaactttgggtttagacactggtgcatcatatttggtagctctgctcacaacctctccattttgcttcgcaacggcatgtttcacgtatntgggtgatgaaactgaatcctcaacatgatcagcctgaatgcatatacaccatcact

SEQ ID NO: 17286 - DNA, 371 bp, Oryza sativa
  unsure (1)..(371): unsure at all n locations
agctttccagaatagatggactaattattttataatcntcctaacaaggattattttttggataatagcagaacagtgttgttagacaatagaatgatgctgattgctgaaaactaatatgtcacgcatcgcattagtgtaaggatttattacacatgcagatatgacatgttcaacaccaaaataatgaaacctatataaattttagattaatgccaacgtacaataggataaaagaacccttaaattggttcacttaccctaacttatagtgaaatacacaatactaaagacaccaccctattctaaccctattctaactagtactccctccattccaaatatttgacgccgttgatgttttaaaaatg

SEQ ID NO: 17287 - DNA, 473 bp, Oryza sativa
ctatatagtaatggtttaagagacgtgaagcatgctgcttattaatggtttcattccttacgaaagaagagaacatgggcgtgtacagcggtgttcaatgacgagttctctccattgccatgaaagtaaatttggtgatgacgtggaaaagagataggggaggaaaggggaatcattgttgctacgcatatcatgaattatatttgctcttatcatttattaaagaaattttgttgcattatggtgataaaaataggaaagaatagtaataaattaatgatttttgtgcattacaatttatagctttcgttgtctcatcttatcttatgaatattatctctatgtgaaatatacttatctttatatgcaatttccatactctatctctgtcttaaactatcctcccacactgattagtacagctcattattactgattaattattattatctatgtaactttaaaataattta

SEQ ID NO: 17288 - DNA, 391 bp, Oryza sativa
ccgacatatcccacactttcttgcatgatttagatgatagatgtgctgagaatggtatataatcattgcccccaatcttaaagattccgctgttgacataaacaaaaccaaaagattagaataaagaaagacatatacaatgatacttcaaagagaaatacgaaacatcaacgatatatacctccagataggttcatcaattggttgtatacaatgatagaactgtctcttgatagactctgcggcaattggcatagcgactttggttgaatctttaatatccataggaattttgtcatcataatcatcctcttcatcaacatatacaatatatcggctccgttcttagtgggcctagattctataatcttacactcatcttatcatgttc

SEQ ID NO: 17289 - DNA, 264 bp, Oryza sativa
gctgcaaagttcactgctcagtgtggttatttacattgtttctgtttatcaattgctgctagacaattgaagttgtatgtcttctattatctagggaccatttctatcatgcttcatggcattgtaccattcctcttgctacatgttttttgttctcatgaacggaaaatacgaaaatcaaaatcaggtgtgtagtataatattttgaagtacgagaaaatgcatgtaaatgttcgttaacggtatttcattgtcgattgtgat

SEQ ID NO: 17290 - DNA, 405 bp, Oryza sativa
  unsure (1)..(405): unsure at all n locations
agcttgactgtgtgtttgctaagaaatattgtatggtagtacattctgacgaaagacataaatcttccttctatatccaaaggcttgatttcacttgatgaacggcatgaaagaacagtttagatctattaaggtgtcagttcatccatacaagcaaacaagatttggaccttttttgaatcttgaaaagcatatacanaatttaggacctactccgtaatcatttaagtttgtaaagtttgctccacaaacagaaaatatctgtcaagaatatttcaattcatttttcctactaaggttgcacagattttctagcacgatttcatcctccctcaataaaggaaaggagatttccccctttccattcactctggtagccacatgttaatatgggttggttgaaaa

SEQ ID NO: 17291 - DNA, 496 bp, Oryza sativa
  unsure (1)..(496): unsure at all n locations
tcagacagttcagtgtcaggactctcctcttgctcttgacgttggacgactgcgccctcggcttcgacgaggatgacatcctccgtgacttttccattctcgtcgtcgccgccgagccgctccctctcgcctccaccggcctactcggcgtgttcgtcacctctgcatcggcggcgctcgcttctccgagctccctctcgatcgcctcagcccgcattgcgatctcctcgctggttcgccgcgctttcgtccacgcctccgccgccgccgccttcatctcggccaccgcgtggaccacctcggcgcgccccgtcaggtactcgtactcgaacctgtggatcgtgaattcgtgacgttcctggacgacgagctccgcgacgtctcggccgcggcggtggccagcgtcgcgctctcgacgatggccttcatgctctgcgtcgncgcgggcttcgacgcccttgtcggccagagctccctcaccgactctctgatcctc

SEQ ID NO: 17292 - DNA, 488 bp, Oryza sativa
  unsure (1)..(488): unsure at all n locations
agctgggtatcatgttgccgagttcatctgttcttttgctcttcgtgctntgtttcatactccgcggccacctcatagcattcttgaacctatcatgtagcacgcaaattcagtttaaaggtggcaatcccttctaattaaatcgtaataaacaacaatgaacagatgaacacggaaagaatcacaattatttgtacatttgctaaaattatttgtatggattcaggttcagtttacaggaaggtatataaaggaagaagactctgcaatcaactctgtttcctgagaaacaacacacccataaccccatgcatacttgaacagtgttgttttactgagaaccataattaattgatacgggcaaactctgcaggcttcattactagtatagatccttgtcagtaaaaaaaaaaacagttattttaatggattcaacaagagatcccaaacagatgaggtaaagtttgactgacacaatttacagatca

SEQ ID NO: 17293 - DNA, 423 bp, Oryza sativa
aacgaccaccgggttcgccagccactcctgatggatgacctcacggatgaatccggcctccataagtctcgccacctcctcgcggatgaagacttgacgttccggggcctgccgccgcactttctgccggaccggtctctcgcccggccgcacggcgagacggtgctcaatcacctccctgggaaccccgggcatgtccgctggtctccatgcgaagacgtcagcgtttgcccgcaggaaggagacgagcgcgtcttcctatttgccatccatgagaccaccgatccgtgtggtcttggatgggccgtcgcccaaggcaacctccttgaccgggacctcgtcgcatgtagcgatccgctgcctctgggcggtgggggcagatgggccatgcctctcgtcaccacccttgggcttggatgcagc

SEQ ID NO: 17294 - DNA, 470 bp, Oryza sativa
  unsure (1)..(470): unsure at all n locations
agcttgtgaagcatgcccttgataatccatattattttgaggaaaaagaacacacctaagtcttttgcttcataattatcttgtcgataaaaatctattctcatacagatnttaaaagaagaaattatagtacaaaaatccgaagaggactaaatccgtatatactccctctgttnttaatagatggtgtcactgacttttgaacatatgtttgatcatttgtttattcaaaaaattcatgtaaatgtataagatataaatcttgcttaacatactttgagtgataaaacaacttanaaaataaattataatcacataaattttttaataagacaaatagttaaacgtttgatatanaatcaacggcattatctattaaaagccgaaggtagtatggttcattggaagttaccaggatatatctggtctgactcatatgtaaaatatttcatgcactaccggatatttat

SEQ ID NO: 17295 - DNA, 466 bp, Oryza sativa
ctataaaactaagctgctgttgttgtcaacagaattatgtcattgcatctgcaattccttattatatatatgttagtctttattaacaagttgcacttgcattcaaagcaacaagaattggcattaacccacaatctcatgatgtcgaacttgtctgtgtgacagctgaatcaattgccacacttcctttcggctttcgccacatcaaggtctactagatccttgagtgccttcatctgcaaacactaaatgccagcacaaaatagttttctgatacaacaaaactcatatatcacaaaagcaaaacatttcaaaatcatgaccagaccaagcaaaaatgcattctcagcatatgaaaatcataccatatcaagtacaaggagtgccctcagacggtctccaaaacttagctgcacaatggttgcatcatgatctcatgacaactggttgtggcacggcatcatca

SEQ ID NO: 17296 - DNA, 450 bp, Oryza sativa
  unsure (1)..(450): unsure at all n locations
cctgcaagcatgcaagcttgggctgtaaagacccttgttcgttctaaaataattcatttgaaaccataatacttcgccttgaagattgtagtgactggagcaatgcaactacaatgagagtggtgatgcatgtttgcactttaaaactagcttttcttatcaaaaggtgctcaatgacattctcatggtctcttgtgattccacattatttgtaccttatttactgggttactatgtttaaacaaaaggcgtgcttactatatcaagttcaaacttcaaacgttcaacacacaattattttgttaacctgtaagcagtgccagtaagctatgttttgtgtttcccttcttcatactgcacgctgatcctgatcttgcnaagactgttctattctccacaaaactggacactaataatttacagtntgcacgagcctctgatgttgaagtc

SEQ ID NO: 17297 - DNA, 119 bp, Oryza sativa
cttagtttattacacgctggtatctgctcttcttattcttaatcttgaacgtaagtcatcataatatcagcccatttcacagccatacacactaataaatgatggaaaaagtacaccga

SEQ ID NO: 17298 - DNA, 495 bp, Oryza sativa
tatactcaagcttctgcattatataccgaatatttgttatatatatgttatctcaccttacctatattgaccttttttacctgtaattattctttaacctctcgtggaatcaaaatgtgaattgcatgtctaacattgaatgtaaatatttgtcatgcctgttatttgaagtatttttggtgaatgtattcttattatccactaagcctcaatcaaccatgttcgttgatagttctaagtgcattgacgccacattggcatacttgtatagtcgtttacttatgcacatgaacaattagaatatctatgtttaagcattgaatcttaaatatatccacctgttaccacattatttcttttagaatagttgtaccatgatatttcaacatatatgtgggttcacgacaacttattgttagttgcttatgattggcgtcaaaaggtggaggaatatgtgtattttgcaataatttcaaatattgctataagaacata

SEQ ID NO: 17299 - DNA, 459 bp, Oryza sativa
  unsure (1)..(459): unsure at all n locations
caagcttggtgtggatgatacataggccatatgcataaggagacctgaagaagagaagaaagaaccttacaggtgagggttctcatatgattaactcgtatatcatatttgttaactttagttgctctattttttttagtaaatcatcttcaaactatgtcagggaggaagatgaagagaactacctggagaacatcgaggatcggaagcaacaggaaaaatctgctcattacattgacaataaaggtaacatatttccctaaactgtcatttggatttaaattactgccccacacccttcttttctttntataaggcttatcttgattaatgattaaggagaggaaaccatgtgagagatattcgaatgactatngctgttgtacctgaatgtcttggaaatatgaaagataatggtcagtgatcaatgtacacatagaatatgtgataaatgagtgt

SEQ ID NO: 17300 - DNA, 492 bp, Oryza sativa
tgtcgcaagatggtcctccttcctgctactcatctctcttctctcctgcaaggctgcaacgcaacttccaatgcttaatggcgatggtcagtcacacaccgaggaaaatgaaaagctttgcagtgcatagcatgtagttgatgcgcaaagaggagtgagttcaggatcggttctcttgaaagttcagttcatgatcgatcgatcgattgtcacatgaagaacgataacaaaagtaataataataatggagactccctctgcaggtggtagacccgaaaataatacatggcccatggagcctactgggtacacggatgaataatacaaccacgcatcacatgggtagagatggagagattagacggtgagaattcgcattatgaaaagatctaccccaatcgctagcttatccctcttgttaattagtgccgctctaacctaatcgacaggatatactagtcattagtcaaatggcacaccatacacgtacac

SEQ ID NO: 17301 - DNA, 382 bp, Oryza sativa
gtcacctgcggcatgcaagcttggagtagatcttggccgtgttcttattaccgaacggggctgatacctggttctttgccgactggttaggatctgagtcgaagagagagatcttaccgaattcgttggtgatgaagttgaggctgccgaaccgatacgcctgcccgggagggaagacgatgttgtctatgccggagacgtgacccatctcactgatcggcgagaaacttgacgctacccctacctggcgcgccaactgtcaaaacatgatttctgcaatacttactgggggtggctatcaagctagacaagtggatgggtttgaacataatgaatttatacacgttcaagccttctattcaagaagatcaccctacttctg

SEQ ID NO: 17302 - DNA, 495 bp, Oryza sativa
tgactacccatacacaagcactccgactaggggggttatcccattaagttcaagtcctagaagaagcacgcgaatacctcatcactcaaattaatctaaacgtacaaccaacaaaaatggattccagaataataagagtcggcacattattaaaaataatgtactgtcaagccaaaaatcaatcctatcatactacatgtaagacatattcaaaagatggcaacatgtagttaaatttcagcataaagcaagttttggttcacaatacttttgcaaaggagttgattcaattaacaaaacaaatttgtaaattcatcataaataacatcatatcatcataaacatacccttgttgtcttccttggcaacaagtcatataatcataatcatactcacacaactcatcacatatcatccatttcaatgccaagtttcacatacacaatgtattacacaagtctatactcatgtgacctcaccaaagcgctcatgact

SEQ ID NO: 17303 - DNA, 475 bp, Oryza sativa
  unsure (1)..(475): unsure at all n locations
tcttagtcacctgcggcatgcaagcttctctccaaaatattngacttatgtgttataagagaggccgaaagagtcaagaatgatctgtttgccaacttcaaaatctgaactaatcggtaaacctccaataggcaaacccaaaacaatatgaactgattctttggagagtggaatgactttatctctaacgatgatatcacaagaggtgacatcaactctttgtgccacccataaagcatatttatatggcacgggacatttttcaaagagtaagagagttttgaaacaggttttagaaataatctctctctgatgttcagacaatgaagttagcacatgagaaaagtatntcacagaaaaccttgtcagtttagtatctatagttgcagcactcttcattggattcttctgcaaaagagaagaatatttcattaaaaaagattctacatacattctgaaataattaagacaacta

SEQ ID NO: 17304 - DNA, 488 bp, Oryza sativa
tggctggctggtgcccttaatatctgacatttgaggtgatcattgccatgtttcaatgtgtaacacgtttatttctaggttattcctcttttaaaataatagaaggttttattaatcaacgaaaacatctaatctctgcagcaacaacaacaagtacgcaacactattaaagagagaaaactagacaacatgacatatcatgttgccttgtgacaccttactagggctgtcaaaaaagctagagactcgtgagctgctcgagctcggctcgagctcttaacaagccgagcccgatcctaacctcaagcttgtgagctttttcgagccgagctcaagcttttcacgaagctagatgtatatgtacttttattttttatatgacagactagtaggttaaaagataaattagtatacatttatctaaaacattagtatgtgtgggattatatattaattgtaagttatcttaatctttgtatttagtatta

SEQ ID NO: 17305 - DNA, 329 bp, Oryza sativa
agcttgttcactattgctggtccatccttgtgaacatgataatgatgctacacaccatggtaggagtaataaatacactcttgtgcataatgggaagaaaattattctgctacctttgacccctgctgaaattgtagaagctgataaagagcgagctgctagtttgaaacttgatgaatctgaaaatcagcaagtggctaaatctgttcttccacctaaaaaggataagctttcacctagttctaaagttgagggaattaaattgaagagtggtgtatgcttgcaatgaaatgtgacattgctgaaatttcagatgatgacatgtgcta

SEQ ID NO: 17306 - DNA, 403 bp, Oryza sativa
tatccctaagtgaccgagtttatagacgatgcggcatggttgtttatctattaattaagaatagtgtgttagtttccttttatctttatgaaagtgtgtgtattgtccgataaagactttatattttccttttatatttatggtaatttctttcttgtccgacaaggacttgtatcaacccatgggtataaatatgtacaccccgcgtctatgtaatctatcgctacgatcaatacaattcggcgcatcgtcaccttttaccttttctactttattttatcgtccagcgagagtttgcacctgacgcggggctgcatccgtgtttgatatccatcgaatgggtaagtccaatgtttcgttcgcccacgctattgtctcattacatctgcgcagttcaaggatg

SEQ ID NO: 17307 - DNA, 363 bp, Oryza sativa
  unsure (1)..(363): unsure at all n locations
gacaatggtccgcacaatcttatccgcatcggacacagctgtaggccagataaaaccttgccggtaagctctgccgacaatggtccgtgcagcagcatgattaccacaaataccagaatgtatatccttcaacaattgtctcccttcctccaaagatacacagcgctgcagtattcctgatggacttttcttgtacagctcagtctcatgaataatgtaaagtctgctgcgtctgaaaatccgctcggcttcatttttgtcttgagggagttcttgtttgggcacaaattntacaagaggttctctccagtaggcttcaatcatgcttacgccttgagtatccatggcttcgactatctcttt

SEQ ID NO: 17308 - DNA, 462 bp, Oryza sativa
taactaaccaacccacatgcataccgactaggggtagacccctatttagaatcatcctatagaatcaacgaaacccacaatacttagctatctgcagcaaaatctaaacaacatataaataaagcaagagttagtacattaaacaaattaatgtactagcaagaccacaatcaattcttaatacattgaggctctaccatgatgccttcacaaacattttcaatgtatttaaagaaaacattttgcaatatgtatagcataaagaacatggcatggtgtcaacataaataaataagaatcatttcctactaccgaaccggtagcaagaacataataccatgtatatcattctcatcatcatttcaaaagattcgaattctaaaagcatttataaaacatatacctaaacccatgacaattcactatgccgctcatgatcaattgcacgactaatttattagt

SEQ ID NO: 17309 - DNA, 340 bp, Oryza sativa
agcttagacaattcttcgcatgttgctccatgtggcacattgtggactcgaccttgtcttgttcttcagctttgtgcacaccttttcacatataatcttccaatcctagatcctatctactttctccgtttcaaattacaatagttttttctaattgagtttaaatctgacatttcaaacttcggttcttagattctagaacacggttttataatatataatttacaacatatattgtatatatttcaaaaattgagtatctataggctactccttccatttatattacttatcaattggttgtcgctgcacattgcaaacattttaaaaagatttttct

SEQ ID NO: 17310 - DNA, 428 bp, Oryza sativa
ttttctgtcctccacacccacatcaggttgtacacagcccatatgccatccttatcaattagcacgacatcgaatgactgattgattcaaaaccatgaccgagcataaacccaaatctatactctttgctgaaaagtacaggttttattgttcacgctcgtactgaataatataagtttcctacaattgatcaactctttcacctgtttacaattgatccaactcgactaacaattttgcttcctatccttacataatggaagaatctattactcttcaaattaatgagctcctattcgaaaagattacagagaaatgattgatctagagtcatgtgacataataaattcggatgaacgttgggttaatatctttgcgttattaacaaggtatcggacttgaattattacgatatgctacactaacgt

SEQ ID NO: 17311 - DNA, 396 bp, Oryza sativa
tcccgacgtggatgatcttctctttctgggtgatcacggataataatgtcgcgtgggtaaagcgtaccccctctgcataggttaacaaactgctcgaacagccgtgcccacggtcatgggcggatgtgaggtgattcctaacgtagtcttgtttgactactgctcgtgaaattgctgttgcgaaaaggcgttccatgtttgaaaaatctgcatctgatgggatcagctaggcccgggtgtgcgtttgaaaagttgttggcccgggtggccagttgaaaagctgttggccaggtgccaaccttggtgctatccttaagactgacacattgcacatactccgaccggacgagacgccctgtctcattcgtgtcggtcgagaagcactcacttatactt

SEQ ID NO: 17312 - DNA, 422 bp, Oryza sativa
gcaacagcatgcatttgaatatgcacatgcaaatgtgttgtgtttttcttatagaaaaggaatatctaatattaaaatgtgatatatcataacactacgaatgtggatttttgagaggactatgtctgatcgtgcgttgtctcatagttcacaattatattgtaatcccgctcaaatttctcaaaatatatcaccgctcggctctgatgccatacacacgccattcagtgttttggtctatgtcataatgaccaatcgtaagcatactgaactttgataaagtgattcgaatattattgataattatcggcttatcaacggactgtgccaaatacaatgcgcttgttggaacaaattttgattataatcaggatttgtgaaccatgcgttgatataacacacctaacgcatgacattctgct

SEQ ID NO: 17313 - DNA, 463 bp, Oryza sativa
  unsure (1)..(463): unsure at all n locations
cctcagagtcacctgcggcatcaagcttgcactctctgaactagctacttattgtatttncaatggaagactcatcggtgtagcttataagctgtaatgcatcgaaggctgaatacctgcatattgtaaaacaaggttaagtaacttgattttgtgcctagcatcaaaagaactataattgtacctagtaccttttcttacagttagggcatatatagtgttggattgtatttctgctgtccaattcatctttcaactttntcttcatgcgatgtatccgataccttacaacatcacagatctgtgtttcataaaaaatgcatcttatcaaacacgattcanatatgatgacagaataagatgaaagatgaatgagaatgattangttttgtagttgtagtcctcaacagatcaaagaccttcattacttcaaacaataaaataactcaaatacttgcaacat

SEQ ID NO: 17314 - DNA, 389 bp, Oryza sativa
caatgttggtgttacatgcactctccttgttttaactccactttcttggaacacaattatctcatgatacgctcataatgtgtgtggtggaataagcctatacttttttgacaagaaggggattgagggtgttcattctgataggtttgtactaacaagtgctgtcaatgcttgcattgaacttggatttttaaaggtggtatgcaaatacatggctacgcctatcgtaatgccacagtgacagagacatcagtgatccatgttgtgattgaactataatgcaatgtctccagactgtcaacaacttgtaaactgttgactgcattgaatacactaatcttttgtattggacaatcatgatttctgggtatttgcataactatatcaat

SEQ ID NO: 17315 - DNA, 422 bp, Oryza sativa
agcgtattacagactgcacagatatatattctgatgcttgatgcaaatattcaacctagaacaactaatcagcagcgcggaataccttccgatcttgaatgggcgtgcctttgacagcaaccaaagcatttataggaacactctctgggtgtgcatgctaagtaaccagagtatgcaacaatcctacacgggccttctctgcctctccaagaccaataattccacctgctcacagagcatggcgcttcaggttatacatatgaatcattaagtgcccattatggcccatatacatgcagcagacaggctccctatggccagtgaaattgcacatcaacagtacccgcatggctactatccatagtggttgttcagataggagatagaatatatcgatgtgttatctatttgctggatcatgg

SEQ ID NO: 17316 - DNA, 488 bp, Oryza sativa
tgaacacaaacttctcaactgtgcacatgcgctttgtcgtatattatgactacaaccctctcaaccaatccctggattgttgtgagaaaattatggttattcactagttggaaaagaaaaagaatcagcacaaattatttctaaaatgctcttcacatgaacaccaagagactgttcgatactgtaactcaggtttgaaataagctcacaaaattgttgccatacttccctccgcacatgacagaaactataccaaactccaagaatatgcataatgagttaaggtagaactatgagatccatacattagcaagtttccctattattctcataaattgcaatgagttgtgataaccaatcagccaatgcgatataaaaaggtataatcaacaccaccacagtgtgcacaaggataatctcatgtctgtcagacaggatacatagtatactgcataatttgcgttgcttaaccaaaatgaattcgatat

SEQ ID NO: 17317 - DNA, 501 bp, Oryza sativa
  unsure (1)..(501): unsure at all n locations
atcctcttagtcacctgcggcatgcaagcttgagaagaatggatggaggcctagacgaactatctttgtgtgtagntgggatgcagaagagtttgctctggtatgtccttgatcacttgttctgaattgcttctttatcagaaggttgtgtattgatgcggcacactcaatgtctcagatagggtctactgaatgggtcgaggacaacatggatatgctggcttcaagagctattgcttatttgaatgtggatataacagtgtttggccctggaggtttaagccccgggcaacccctcaacttgatcagttgatcaaagaagcaagtaaaatggtatttaagctttactccgtctttccttttttacaaattggacagccagattttgtgtttgattaagaagtataactaagaccgtcattttgaaaagagagggagggagggagatttctttgaacaggccaatatctagtatatagcagcttactaggcacaaaatca

SEQ ID NO: 17318 - DNA, 408 bp, Oryza sativa
  unsure (1)..(408): unsure at all n locations
cacacctgctgtgccaaaagtgatttatttgctgatgcagctttccaatcaaccaatgctccattggaggcagcaacggtttctcacactcaggtttatactttactaatagcctgttttttaccatgattcatttctcatatccctaaatgtctgtgaaaactacttactcaaatatgttaccaagaaagtggaaaaataccccccttaagattcataatttgcatgaactatattgctgaaacttgaaacttcattcattatatgtttgcgtccatgtatattcaaataaaatacttggggaattcgaaatacatgagttcattattctacaactcattatttattttcaatatcatgtatgacnaattcgattgttgctgcagactgcttctgtgattcattact

SEQ ID NO: 17319 - DNA, 408 bp, Oryza sativa
  unsure (1)..(408): unsure at all n locations
gagatacctgaggcgtgcggctggctcagctggtgcagggtgctgactcagggttgtctacacganactgcgcggagagacgcggcgggacgctgacgccctctttcgcgcgaagggagatgacgctcgctcgagtggccttacctcatcacctaattttaaccgcgaaaaaagagcgagccgcaattatgtacttggtgttaatgctagaagaaaaagcggtggctcggaattgagacgttggatgaagaaattctaacctatacactagtatgagagatgttattcctcgatctgtgttgcgcccgccacaaccacgttcatttccgagagttgggatggaggagatagactatttttgccttgctacctggcacctgtgacttgtttcatcaatggatagatatc

SEQ ID NO: 17320 - DNA, 334 bp, Oryza sativa
actgcatagagaaggagacaaaccttgtttctatctgaaaccacaactgacttgtgaatgctcgtgagctgtatgatgcatcgctcgttctctatccccaggatagagaacatttgaggaactacttcagcatggagctgatagtgagagacatatctcttgttgcccatacgattgcgcttttaaccatgatgaagaaccttatctgaatgttatttgctgacataacattgaatatgcacatggtcacgtgggaacatcacaaacagcgaatgctatatactggcgcactcgtaacgtgctctgtgattgcagtgccctgcacattcaccac

SEQ ID NO: 17321 - DNA, 354 bp, Oryza sativa
tgcagaacaaacaattattcatactcgtcttgaaaatgaacaatgagaatagtgacagcgcattctgcgatttggagtagaagggttatgagctggcctcggttgccggccatgcaacacaattctatcattgcaatgaacctcctgcaagagaaaaaatgttacatgtactgcaacatgtataaaaaaaccttgcatggagtagatgactattgcagcaagatcttccataaggcaaaaataaaatcatgtccattgtgtcaaccagggcactgtggcatgcaactattgtataacgtctacagataagaagttaccaagaataggtggtatattcttatctcttttatcgta

SEQ ID NO: 17322 - DNA, 422 bp, Oryza sativa
tacaatctcaattcctcttctgaacttgtgctgcttgctttgtcattgcatgatgttgcagcaaatcttacaatatgacattttggtacagattataactgttatgcgtgtggtcttacaagaagtcttgaatatgtatgtgcttatagcaatatagatgataatactcttaattcttaaaagaactttgtgcttaaaacattaagctctgaacttattacttgtacaatagtaacaagaaagcctttagtattgagatatgtcactggctatctcggttattttttaactgaaagatgtatatgcttctttcttttgaggaacttgctgatgggtgaacatttctaactcttgttgtgtatctcgggtggaatgaacaaccgtctcgatggcaacaatggtaatttgtaatatataaggtt

SEQ ID NO: 17323 - DNA, 482 bp, Oryza sativa
  unsure (1)..(482): unsure at all n locations
tgtgttagtagtcacattaaaacatagaaactaacaagcgtctatatttaaccttctagttaaatgttttaagactaaattgcattggctctacataaacttgtcaggttggtgcaatttaatatataaacttgtataatggtcttatggtgcacggacatgtataatacatgcaaaccaactacaaaatgatgtattgtgactaatatgcaagttacagtttgattactatgtcacctatacacatataatttgcattctatttggtccttcattattttttattcattagatagtccatttatattatatatatttttagttggacaacgaacattaattattctatcatcatatgcatatgtatgtcatattatcatgacatgcgagcttagataccacactaatcgacattcaacacatgtatnttagtatggtatgtttntttagctttagcctgcatgcaccaaacaagtttatta

SEQ ID NO: 17324 - DNA, 488 bp, Oryza sativa
tgtggacaatgctatccgtcaagaggagcagtgtaacataatgtaccgtaagaagaaggcagcccagttcatgactccccatgggaagtgtcagaagcctcgtttcacgatgggacatcatggtggaccttccaccatgattatccggcagcaccgtccctaccacccgggtaatttcaacaagaacaacaacagtggcagtcacagcagcctcaacccgactccaagtccattaatgattccagctcagtcagatcagtcagatcagctagctcatccagctctgccagaacagcccaagaggttgggagaaaaacccgaactctgcttcaattgtaacaaacccggacacacggttggaaagtgcccgaagccaagacgtgccggacccaagttcgttcatgcccgtgttaatcatgcatctgcagatgatgcgcagtcagcaccagatgttatattgtgcacattccccgtcaactcgacaccgg

SEQ ID NO: 17325 - DNA, 406 bp, Oryza sativa
  unsure (1)..(406): unsure at all n locations
agctngaatatgtgacttaatctatttaatattgcacattngngagagaactcttgtcgctctgcctttntatgcagccagagcaactgagcaaaatatttgatgtttgtggcacacctgatgaatcaaactggccgggtgtcacaaaaatgccttggtacaacaatttcaagcctccccgccaactgaagagacgtgtaaaggagtactttatgcagtaagtattatactcgtattgtttgaaacttgcttggctactcttacaggttacttaacctttatttgttttcagatttgacaggcttgctctggatctgcttgaatagatgtttacactaaatccagcacaggtatattttcttcttttagtttgcttactctgttgacatatgatatgcccgtacct

SEQ ID NO: 17326 - DNA, 458 bp, Oryza sativa
ttgcgaataaggtggaatatggcaatggaaatcatggttgttatatgaagtactctactttcacagcattagaaatgccattatagatatcataaacatctgactaacctcatgatcaccaccctgacctccttgatgaggaattgcaccatgatgaacaagaggatgaacaagaacatcatgcagatttttaccatccggacgaataacatcagtaatatcgagggtgtgccttcggaacattccttttggaagtacctctttatgcccattcaaatacacttcagctgaatagtttattccacgaaagtttaaactcacatgctggtgtccagcctacggatgaaacattgcaataaaaagttcaatgtgtcagcaatgtatcacaagaactacacccctattcagtatattgttacagtgtcctcgttcctgttatagtcaaataccacatacat

SEQ ID NO: 17327 - DNA, 364 bp, Oryza sativa
ctacacaaaggcgacgtgtgaaagagttaacttcgtagcataataatgagttcatgtgaaacgagctgaatgccttctcggctggctcacagctgctttatggcgcgaccaatgcgagcttcaccatctatgtattgtaaaaaaaagctctcctccaaaaatatttaatgcattttttcacatgcatgatcacttgattcttacatgatggcaggatttttttgacacatatgagagaggtctgcacccctcgttatatgatcacctgccccatgttaaccgactatgtacgggacaatttttccggacctcaagacaccctgtgctgcctggtatgccacaaattcttatgtacagatattct

SEQ ID NO: 17328 - DNA, 411 bp, Oryza sativa
  unsure (1)..(411): unsure at all n locations
atcctctnagtcacctgcggcagcaagccgacttagcagcggtcgactcctctcccaggcagaacctgacgacagcgactaaaccaacctctctgagatggctccaactgagaagaactttatctttggtgtgggggaaaagagagcaagaccgagtactaccccctgtactcagcaagtcataccggaagaggaggtatgatgcacgatataaccaaaggaagctatgggttcttttgcataatgcaggcatctcatagcagtagctgaaagcactaaaacagctatagtaattatataatattatccaatcacttgccaacgctacaccacgttgcaacatgctcaaccaaccacctgtactacacaagtacattaatttaaactatgggtgagactaatcacggtgaa

SEQ ID NO: 17329 - DNA, 495 bp, Oryza sativa
  unsure (1)..(495): unsure at all n locations
ctcagctttccgaaatggtccgtgcagtagcatgattaccacatattccataatgtatatccttcaacaattgtctcccttcctccatagatacacagcgctgcagtattcctgatggacttttcttgtacagttcagcttcatgaataatgtaaagtctgctgcgcctggaaatccgctcggcttcatttttgtcttgagggagttcttgtttggtcaaaaaatttatgagaggttctctctagtcggcttcaatcatgcttatgccttgagtatccatggcttcaattgcttctttcctgtgcacggttggttcataaagatgctcaacgaacacatcatatagggctgcttcccgttttgaaccaaaattggccagtgtatcggctgcctcattgttatgtcgaatgacatgggtgagctcgagtctatcgaatntatcttccagcttgcatacctcttgtcggtaagcggtcatattatcatctagacatg

SEQ ID NO: 17330 - DNA, 334 bp, Oryza sativa
  unsure (1)..(334): unsure at all n locations
agctacgaccatggatattctctccttgtcatggnggacttgatgggaacgggctctgctatcctttcatcatcctcgaacaccttatgttggcttggcattctgtcgaacaggttgtgtgtgctagattcttgaacaccccccttgcccaattcttcctccaccttgcaccgctgccttcctaagacctccatgatgagaaaacccacgaaccgagtatctctgataccagattgttagcaaccttcttcactataatcatacaacggtacttctcatacaacttggaagtgtttgactagaacacggtagaataagattagggatacaagct

SEQ ID NO: 17331 - DNA, 377 bp, Oryza sativa
  unsure (1)..(377): unsure at all n locations
taatcctttttcgaaagaccatttgccagagcttaacttgttttaatttgcgaaaggactcgcacgcatcgtgtcacttgggacggtgttcggcacaactggaaaccacgctgcgaaagtggagtgaggtgagtgaatgcgttaactggtatgggacggngacgtggctgggttgggtcacgtgggtggaggatgaatcgaaatccgatgtcagcttggcgtggccgcgcaaagtcgaaatatctcgcgcttgttgctccacagttgttgacatgtggcgcggcgccgatcgaattgccggctcgcgcacggctttgtttgctctgctttttccacctttttgcgcgcacgtcataacgtgtggctgtgttgtctcg

SEQ ID NO: 17332 - DNA, 416 bp, Oryza sativa
cggaccaagcacgagatgcactaaccggtcacatacactgcattccttaacagaccgcggttctttagtatactatgtgcctgcatgggtgcttggaatagaaacaatcgtgttcaaagtttgtatctcgcgggcgcggcaacgtctgtagtggtaaaccgatgggatgaaagatatatctgcagacatacagttggacctacctgccagtttttcttcttgtgattctgagtcatttgggtgctgcttatataagccgcaacagcttattgttagggataaaaaatgattcgcaagtaaaaattactacatgtgtccttagtgattataacgccaagctgaaaatacaactacattgaaaaaaaatcaaaaaccaacttttaaatcaatttataatcaagtttgataagccttaa

SEQ ID NO: 17333 - DNA, 367 bp, Oryza sativa
tgctcatttgttcatgttattcataatcgaagttgtcgtctgaccctactttcactacatcgtgagttgttcatttagaaaaaatagaataacatgtatttacaagcccaaatgactaatatgacactgaatacatcaaccttatcctcaaccactcatttgctcattctttatcccgctctctctcctctctctgtacaaagcgcgatgggcatgaggagcggtggcggccacatggcaacagctgtggatggccctcggctgcttcgcggagggtaggagcgatggcaaagaggcaacattgagtcgccgacaaggaggaccgctggcggtggtggaagatgcggtgacaactcggcagagggga

SEQ ID NO: 17334 - DNA, 394 bp, Oryza sativa
agcttaacaggacggtgataacgggtgctgtttcatcatattggattgccctcttcattctgtcgtctatgcgcaatgaagtgaaggaaaagcttcgcaatatgtaacatctacgtacgagtagtagttttttaccgcctatccggtgcctacatatttatatatatagtactcatgtctcaatgtgtgtgtattcttaaaaaaaaaaagaacataagacgcgaatattgaagaaagatctaatatcaaacaattagaataggtgaggcttcgaacccaaatcatcagccagaagacctttgtacgtttctctctgctcgtgaagttagatttacgatcgagttataaagagctgccagtcatgtcctatttattaccttatggtccttatata

SEQ ID NO: 17335 - DNA, 285 bp, Oryza sativa
tttacatgatcaaaaatttccctggcctctacttgctattaggagcatatgataccatgcatggatagcatcatgatgtgaaaacaatgaccggaattcataatggaatgcatttttgcaagattgcccaacattatttctcgcttgttatatttaaatggctatgataatcacaattttttacaggtttcagatgtataaaaccatcgattgggaatatttcgataatgatgcttacatgcaccaacatagcttctatgaatcacagactcatcccctgaaatt

SEQ ID NO: 17336 - DNA, 274 bp, Oryza sativa
cttagcccagatctatttcaggatgggtgaccgaccgataagtttgcacttcccacgagtgaaggctagccaaaaataaaatgtatttattcttggattatactcatctgtaacgggcattaactatcatctgtgatgggctataattagtgcccgtcatagataaaggtcatctgagatgggcgctatttgtggcccgattgatatatgtcatctgtgacgggctatagttcgactggtcgtctgggtcatagctatcggtgacgggctttac

SEQ ID NO: 17337 - DNA, 435 bp, Oryza sativa
actaagcttctactgtgacaaagatttcaccatgttggttgtaggatgcattggcttcatatatccagtattccataagaccggccatttaacacaaaagagtgatgtattcagttttggagttgtactgctagagctcatatgtatgaagccaacaatatatggtgaaaattgtatcctcatcattgagttccaaaatgcctatgatcaatagaacagtgggaggataatgtttgacaaggagattgcaaaacaagaagatatcctaatcctataagaaatatgcagattagcaatggagtgtttgaaagaaatggttgaagagcgacctgatatgaaggatgtagcagaacgacttgttatgctgagaagatctacgaagtgtggatagggaaattatagtctatgtactcagcgctgtgaggagaatactat

SEQ ID NO: 17338 - DNA, 417 bp, Oryza sativa
gcaagcttgatgtctccattgtggaacctggcttagctattcttatctcaagggtgagtcaattgacgatgtgccctgtgttgaatatatagtcccacattagttgtggaaggacacaagtgacctaatatataagtgggggagcccctcacctcactatctagcttttatggatgggaaagaccctttacgattctacaccctgcttttccaatctccatgccaaatgtaatactagctttctactacacaatttacaatcgattcgaaagcaacaacaaagatcgaacaaattcagaggccggccaatcagccataaacaactgagactgtcctctcacttgccgaagcaattgctgaatgtcatggccaacctcttcgaccccttgaccatgagatcaagcttggccaccgtgc

SEQ ID NO: 17339 - DNA, 412 bp, Oryza sativa
gacacagagttcttagacgcatatgtcggcgagtgaaactgtcttatccatttcttaagaagaaaaaaataagagcaaagaagcagtatcctcgcagcctagcatgccagtaagaagaatatgtggtcactgaaacgccctaccagcttaatcgtggacaggctaacatggaggacagggtttgtctttgtgggtacaaatagtgaatgcataatatatacaggttgtatgttctcttctacctttaccctgccgagtcatctggtagcaccaatatattactcacacattcatgcatgccatggactcattgtccatatgccatgattcatgcatgccatggactcgtcgaacagatgcatgtgagtgcatgaaccccagccgtcagataatatattatgcatatatgctc

SEQ ID NO: 17340 - DNA, 388 bp, Oryza sativa
ccttaaaactaagcttaacgaatttctcagctcataaaacgttccataactagatttgctattgatgctagagcggaagctgaccagcattatggcccatactgggaacagctggttcttgaaaggtgcggcttgcatgacccccataacatacaccatgatggcgtcagtcacagcatctatgaagctcaacatggatcttttcatagcgaagaggaaaatgcccgagaagagcatcatcaatgcgtagagcgatatgaggaatgcgactatgactcggattcgaagcaagatgtagttctcctgattccatttgatgagaaaatttgcaatatattcaccaggactcatttttagtcttcccacagaaaagtatgtagccaaaaat

SEQ ID NO: 17341 - DNA, 319 bp, Oryza sativa
  unsure (1)..(319): unsure at all n locations
agcttcttctccacacacagaatctatgttgttgataacacagctcgatcggtctgaaagcgttcatgtccactgatgactcagcgatttctgaatcacctgaaatcctgaatataccttatggtcagactgcacgtatcaacattntgctgtgagctcactgctgaaattgctgatgtaccgagttcgacagttataaaagggaaggggcatggagacagaccggtatatgcaagtgggtgatgagcattgaagatcttcagaacagtgaaaggacaaaatacaccaaaatcgccgcccaaactcaaactatcttatt

SEQ ID NO: 17342 - DNA, 483 bp, Oryza sativa
  unsure (1)..(483): unsure at all n locations
agatgccacatcattatgcactaacaattatctcatttatacatcatgcaaacatgctatatctttatatatttgtttaatttaagagctcttcaaatacaaacatgttaaattatcatctaacgtaattcacagaatatttcaatgtatatttgttatgtcttatgatatcctatatacttatatagttcatcctcacttagttagtgtttatatgattaatctatggtacaaattatctgtctcctttttccctctaattaagtcatatcacatcaattgtttttagcctttagatgattaatctacggtcaaactatctctctacctttcttattgcataaagtcataccaccttatnttttacgtgtgaatcaccattccacatactatttaaatctaaattatcataaaccacattaatgtacttaatctgatgttatctagctatcttacacgttatttttgtaattggtatcatac

SEQ ID NO: 17343 - DNA, 417 bp, Oryza sativa
  unsure (1)..(417): unsure at all n locations
agctngatggtacatgatttcccttttatctgactagctcttagnttctttggtatgagttaactatccatctaaagctattatttactgaaagctcgtgcaaggaaggacactaaaaaaattgaccacagtgtgaaggaaagggcagcgcggcttacccattttgcgagagaatgatttttcaatatgtttagataattgaaccatccatgtgctttactttttgttcctttctacctctatgtactttagcctgttacctctgtatgcatattcagatattaaaggaacaggctcagtcagacttgaagaaagcagcagatcaacattggagcgatggtgctttggaagtctgtgctanttctctgtccttcaacttcatttgctggaactagttgaaaatactgagcgatatat

SEQ ID NO: 17344 - DNA, 394 bp, Oryza sativa
ttgcttttaatttcgacattttgtaatttcatgtatgtatctgattgacatgcttctcttgtagttacatgcggagagttccctgagtgctcgtggcctgaaaactctgcatcttcttctcaatgcaacaaaactggttccagttcctcaaaaattgctgatcaaggtcctaccattatttaccgtacccaccagaaaacaactgtgggatttacctaattttttggccaaaacgggtctcaaagcgcgaacatttatgccaaaggaaatcctccttgattgatttgtgggcaaatgatacttgatcaaatagggccacttcctgatatatgctaattctctagaaccatcaactgttttgttacttacagtacatttgatatatttatttctt

SEQ ID NO: 17345 - DNA, 312 bp, Oryza sativa
ctaaacttgatatggtttttttgggcaagcacgacatactaacttgctcctaaaaaaatcagcacaatcctttcatatatgtgaaccttatttcataggaaaatcttataaagatatcatttataggtcttgcggctcaaaaggacattgaaacttgctctccttcggtactttaataaaactaccaactttaaacttgggaaaatattcccaaacttttttgagaaacacacattgaccgttattgttcaagcgcccatttggtaactgaagggtaaatatttacaaaataggacatttttcaaattctcc

SEQ ID NO: 17346 - DNA, 446 bp, Oryza sativa
gggcgtttgtccgcgccggcactgtttgcgttagctgctatatctatgctccgcgtgcggacgtgcagagtatggggtggcatactgctacagtacatgctacgcgctgtgccgcggatcgcgacggcggcatgacgacgcgcgctgtatcaacctcgataaatcgtcgcgattggtatgagagggatcggagggagccaatgcaagcttgccggctgtgcgcgatgatggggtgaaaacagatacggaaattcccgatcgaccgaacgacgttttcgtaatatgggtactgattctgaccgtactttttcttaattgttaaaatatggattttcataatttcttctacatcggattaatatcgatactgagtaggttaaatgataaatatgttccattaccgatcgagtattgtttccgactgttttcagcccgcgcgtgcaccc

SEQ ID NO: 17347 - DNA, 414 bp, Oryza sativa
  unsure (1)..(414): unsure at all n locations
tgcacacaccagctaggttgcttgttacatgaccnaaatatttattctgatcgctctggtcatggagtatctaatatgtatactagattaaattttattcatcttgtatctatatatgcatagattcaagtagtatttcaacttctaagaaatgtcatctgcaaatcattgaaaactttatttcgcgaaatactaaaggaaaaagaaagatactttcctattggagattatgcacaaagacaatttctattaagtttatattgctcaaacatatcatggagtgttaagttaccgcggtattctatcgcttaagttagaagatctcacacggagcctncaaatttcatgggacggccctgagttcatcaacgagactgtttatattatgtaactttggtcaagtaaagatatatg

SEQ ID NO: 17348 - DNA, 483 bp, Oryza sativa
ctcagcttgagctgatggttacccagttgtaagcatatgttatttccaattgcgtgatttatttaacacggactatccacaacctacggtcatgataatatgatctaccaaatcaatgattagatatttctgattaactgtcgaatctaaatggattaatcataacttgtcaggattaataattctaaaatttgtatttagtaaatatcgacttgtatttgatttgaagtctcaatataataatagtatttttatttttaatagctagcgtggtggtccgcgcagattgtgtggctagcatcattacaaaattttcttacacaatagtagtgaacgtactttcacactttattgtgaaagataaatactaaaaatgacaattaattttgaattatggtaaacttgatcaaactcatacttataatattttgactaacatagtaatttctatgtctatatagtaaatatgatgtatcctttaat

SEQ ID NO: 17349 - DNA, 444 bp, Oryza sativa
acaagcctacgttacctgcagaatgcaacggactttctgctccaaaacaacataacgtgagtagtaaagtgactttcctttgatatactactatcacatatggccgtaacatgatgcatcctgtagctgtttaccactataaattaaggggtcaaaacgagctgcggttagaccatatatgcgcttatctgcaagcgtgcttacagacaaaaccgggtgttttggggcggtatgctatcacgaactcgtgattgaaacaagttaacgtctgatctccatctcaagccgcccaatgcataaattattgctcgtggtcatcgatggacggcccaaaattccatgccaaattctttccaataacaattccatgtgaatgatttattggcaccaaatgatgtgatcttctccaacatgcaccacctacagtactagtgtgccatcagt

SEQ ID NO: 17350 - DNA, 360 bp, Oryza sativa
aatactatgtgaggtactatattatgagacagagaatgatcatatttctgtttctggtcacaagaaaaccacccgccccatttacatttcaggccatctacttgccgagatctcctaacttcacttcgcacgatccgagataactgaggggtgccctcgactagtcaactcgaccgagtaatcgagaggtgaccggagatggcggcgatgcgatcaactaagcgctagggtgccggcatgacggccagcgaagctctacgaccggaccaagagcaaccgaagaggcgatggagaatccgatcttgccattcctctacaggtgctctctccccactatcccctccgaatcttcttggatac

SEQ ID NO: 17351 - DNA, 212 bp, Oryza sativa
  unsure (1)..(212): unsure at all n locations
acccccaaaatcggagctattcgttgggattcttattcgaatcgaactcgttttcgagtttatcttcaaaaccgagtttttgatttcccggatcgatttcttgcgggaggagtccgatctcttcaatccaaggctataaataggacccnctattcctcctctttcgtttgccccctctcccgtggtctctcgtgctccgtatctgcgtcgcc

SEQ ID NO: 17352 - DNA, 347 bp, Oryza sativa
  unsure (1)..(347): unsure at all n locations
acccggatctctaagtcacctgcngcatgcaagctttgtattatacatgggcctgcttattacaaacggatcgaagattcggagatggtctggctggcccgtttatcttgttgggatggatacggaaatcataaaggtatgtcctgacggaataacacccaagatcaactttatgtacttttaaggcccaattcaacttgtgcaatgtgacttgaagaagatgggcgtgcacatacatacacgtctttgcacgaatcgacgcgacaatgaatcaacaaatcatcatgattctattatatnagtcttccacggtgggcaaatttatttctaccataaatatggagata

SEQ ID NO: 17353 - DNA, 480 bp, Oryza sativa
ttacggaacttaaaactatgctttgtatctgcagtgcatttgcaacgagcactttcatatgccgactgtctcacctcatctccagatgccttgtcctcaatttgcatgggactcgtaccacgtaatggtgggaaagttggttgtccttttttgttcagacctcacctcaattggtggtagcttttgatgatccagttcagctggttttggctacattggtatttgtcttgtttcttacgctatggcactcgaactgtagcattggcagtgagttttttcccttgtttcttttaaattggattagctatctctgtattgcttaagagaaacatacagctggcgttttctctaggtaaattaagaagatatttgttcttctgttcgggagtggattctattcccatcgacgatgggataccctctcgtgtacctgtacctttcacatttgatgcaaataggtgtgaaaaaatcttgaaaaaa

SEQ ID NO: 17354 - DNA, 341 bp, Oryza sativa
ctcatttgtcttggatacaggatcctgactgagttatcattctatttggtggggtgctgcttctgctgaatgaatgctctagtctgaagagtggttgattcttcttcttccctcctttcttcttcttcttcatttaatatttaaatgaaggatgcttttaatccaccaagtattagttttgactacctatttaagcaagtgcaagtacatgaagatacttgggcgcttgatggaacgaatactggggtggggacctcttctcatctacacatgactttatgcacttattgaaagcctgagaacaatggggagtaactatggacctatactatgccaaatgg

SEQ ID NO: 17355 - DNA, 489 bp, Oryza sativa
tgcatatacatcatatgacagccatgatgtatgctactgtatttggaacttcctggcttacatgctactttcatctcaaacacaaccatgtatgaaattggtctcatcaccaaaacatgttctttttttctgaccaaggatgctacccgacttacactaaaagctagtaacaagagttcatcatcacaagaacaacaagccaaatctggcaacagataattacatctcatcgatggctgaaataaagggataatacctactgaaccttagatcttggtgcagtgctgacataatgtgacactaatacacacgctcatgtggactcaatgagaacttgagaagcagagcatattactcagatgagttatgtttgcataagtctctgctgcatggcatcgatgagactgataaaagcaagcctccatgcattacagaataacagtgctccataccacagtcaaacaccaaagacagcttctgcagttactg

SEQ ID NO: 17356 - DNA, 417 bp, Oryza sativa
gatccttaagtcacctgagctgcagcttgttacttctctatcttactattttatatttccattaagaagcctgtccgattcctcacaaagtggcaaaaaatatggttcgtataaaattaatgaacaaatgagaagaaaagtacgatggacgaaaaagagcacggcaaataaagtccaatttcttttagcttttattccctatatatctcttctctatctctaatctaatataatctaaaagagaaggtttcactgtacaactaacaagaagaaaatacgagagataataaaaactgttaaaaaagcgtgagatataaaaagcataataacgcgtgagaacaaaatcagataaaaaaaggctaaaataggtttccgtcgtccgtaaataataataaagaaacatgcgagaaataaacg

SEQ ID NO: 17357 - DNA, 457 bp, Oryza sativa
  unsure (1)..(457): unsure at all n locations
agcttaccaagagtataatctgatggtatgtgaaattcagtcggntacactttcggatatcaatgactcttggcagttcatttggggttcaggaatctatacctctaagagattttacaagctctcgttctggtctataactccccctgtgacctttaaatggatctggcaaaacaaagttaacatgaaaattaaggtctttggttggttgcttctcatggacagaatgaacactagtgacttgttggatagaaaacattgtgctcccttgggcgcgtcgatttcttgctcctcgtgtcaggagaacgctcgagaaaccagagagcatttgttttttgactgcaactttagtaaagggtgttggaacaagttgggatggtactggaactcttctttggaatgtaatcaaatgatacatacccagcgctcctctttctcccaacaatgtttcatggaa

SEQ ID NO: 17358 - DNA, 390 bp, Oryza sativa
actaagcttaacattgcggccgatctgagtcgaataacatctgtgaatcattcgttgataggccgctcctgcgttcttcaatccatatggcatggtgatgtatcagtatgccccaaacggcgaaataaacgatgtcttcaagcagtcggattctttactctgatctaatgatatcccgaatagcagtccaagaaactgagtagctctcatccggcatgtgagtcaaccacctggccaatgcgatgtaacccgaaatgatctttatggcaagacttgttgacgtcggtgtaatcgacacacatgcgccattgtccggtcttcttccgaactatgactgggttatccagccagtcaggatggatgacctctttgatgaagactgctgctaac

SEQ ID NO: 17359 - DNA, 314 bp, Oryza sativa
gcaaaggcgacgtgcgagagagttataatgggaacataattgtgaatcatcacgaaaccagtgactgcctactggatggcctacaactgcatgagggcacgaccaatgcgatctacacaatctcagattctcttaaaaaaaaaatgactctacgtcgaacaaatcattaatatagcatatagtttacacagcatgatacacttgatttcttactacgaaagatatggattttctttgactactatatgacacggatggtctgtcaaccacgccgatataaactgaggaccgaactaccacgttgagacacaaca

SEQ ID NO: 17360 - DNA, 409 bp, Oryza sativa
  unsure (1)..(409): unsure at all n locations
agcttcnggcaattcggcgaagattaaactattcggataaataacagaattaaaacaaatacaggttaaactaagtatattaggcataacaagcgtttcgttcttgtagagtagataattggattttgattgagttatttttctaagggaaaaaggaaaaggaggattcaaaatccttttttcttcggactttcccaaacacaaaatacctccttgtattcgcactctcaaatgagagtggaagaaattcgactttcatataatatcttaatagaattccatgtaatgatcaatgcattttttggattctatattattcgcatgtctagaatcctaccaagagatatacccccacttttatgtaattgaagtaggattgacgaataagaaaataacataattactgtta

SEQ ID NO: 17361 - DNA, 348 bp, Oryza sativa
  unsure (1)..(348): unsure at all n locations
tgaattccataatcacaacttctattctatgtaagatgctttaggaacattgggaaaggaacccattgtatgggaaaaactncaagaagtatgatgggacatactgtactgttgaataataccctaccctgcatatattatgcatacatgcctttccaacccactctatttgaggggcgtactttttgtctacaacccattagtgtgtaaatggttcaattgcagtcctttgattgtgatcnaatggctggtcatctacccttatacttggaaactcatgccggaagctcgtttactatggtatctcatatgaatcttctatcttccgctattggggatcctatttgc

SEQ ID NO: 17362 - DNA, 261 bp, Oryza sativa
cggtcggcgacagcaatggtggcggcatatctccggcgaagaggtcctaaattaacttgaggaaatgggttcatggggttcccaggagcatgttggcgcaagggtttggttcgagactcaccgatgcagcgacttgacgggtgcgggttggcggtcgcgccctgttctgccgacgcggagcgtgacgatggcgcgggcgttcccggcgaatcagaaggttatggtcttctgctttgggtgtggaggttgagagtggtgtgg

SEQ ID NO: 17363 - DNA, 312 bp, Oryza sativa
cctgcgacacggtgttctgtgtttgtgcaacgtgcatagtgcttgattcatatctccacacataacaagtggatatctgcaggtgagtctgccttctttatttattgcacattgttctggttgaggccatgcacggaaggaattgagattgatactggagacgcgcattatctaaaaagctaacccgcttcacctactttgcgactgcatggcaatttattatcagaattatgctccgttctaaactccaatggcataaatgcttctaggattctgctacatgcttatcaaaacggattactgtgtgtttaa

SEQ ID NO: 17364 - DNA, 282 bp, Oryza sativa
acatggacagaagtaggtctgtatggagagaaacttgacgcacgattgtaagatgaggcatggtccgatgctgctcgccttataaaatatagtctcacatataatatgagacaaagaatagaccttcgacgtgagggattcatttgattgcattactaagaatggaggcatttatcggatggttattgggtgatcaattacttatagattgaatttgaagccctagctacggtgtgagatagatagtacttaattgtctcttcctacctatttcttgtgcat

SEQ ID NO: 17365 - DNA, 425 bp, Oryza sativa
  unsure (1)..(425): unsure at all n locations
attgcctctatcacaaaatatactagagaagtgaagctagaanattgcttcacaactccactccaatccaattcttagaattaaatttagaaattaaattcctatcaaacagagttgaatatcagatcctgacatgcgttcgtgcgtgcatatatgcaaattgatcgatccacccggccgatcgatcgagatcgacatgattattggtcgatgcgatgacgacgcgacgaccgatatcgatcattaattctgaattcttattgatcgatagtgtatcatcgattgattggtcctgtcagccaatatgagccatctgctatcgcgctatctgtaccaccctgtcgtcggtgtacgttgatggaggtcaaagattcgcaagcgatggcgtaactcgcgttttctagctcatcatcgtgtcatgctac

SEQ ID NO: 17366 - DNA, 286 bp, Oryza sativa
tctcagccattgtcttctcttggatctcagctccacaatgcatacatgccaccattgctcccacatgctttgttacattcctcatatcaccgtgaacattggcaaagacatgcataaaagggtcacttgacaatgtattgtcatggggtggtgcctttcttcctcttttagagcctgagccattgaataatgctacatcaggtgcgtgtgatcgatgcttctcgagctgcagtgaatcatgctcctctactgcaccgatcgatgtccccgacgcgttttagaactc

SEQ ID NO: 17367 - DNA, 465 bp, Oryza sativa
tcatgcctcgcctcacctcgcctgagtaccagccatctatttttcttacgcccggttcccactatatcaacatggccgcgctacgggagggaggcaatagcaccgtctcatgaagccaatcaagaaactagacacatggacatgccatcgccactaccaccagctgttcgacacggtgaggcagctatagcttgggtgctcacaaaggcggaactacatatagccatgggggttcctatgcacccgggtgaaaattttttgtaagctgtaagtatccatctttaccatgtcggcaccccgtcgacctaactttgtgtaccccaagcatccaatcaggccgagcaagggcaataaaccaatatagacacatagtgatgagtattcttgtgggcatagcaagtttagatcggctgttaagtataacactaatcgataatttgacaaatgtcatgcttagagcccaac

SEQ ID NO: 17368 - DNA, 456 bp, Oryza sativa
  unsure (1)..(456): unsure at all n locations
ctctaagtcaactgagcatgcagcttgacccaaccttttcgtcctttatagtagnagtagaccaacactcactcgccgagcggcaaaagtctctccggtgcttggcattgtacaagctcctagtgttgagtttttggacccgtgcatgccgtgcgtattattcctagcactacctgtccggtcggggcgttggcctgggatggccgaaagcggctgcacacgtgtctcttgccgatggcgggagacgtttctgccgaccttcgtatacataaaccagaaccatgtggccgtctctgcccagatttactgccgaatgaccggctgctacatcggatacctgtcaggttacgagctactgtgaaaacatataagttcttaaacaattgatagatgtgtttatagtgttccaaacctattttatgcttgctttggtcgcgctgacatatgccaatttag

SEQ ID NO: 17369 - DNA, 400 bp, Oryza sativa
ctcccgacgtggttgatccgcacgagctgtgtgatccatgttagtaatgacgtgtgggtaaagtgtaccccctctgcagagggtaacaaactgttcgaacagacgtgcccacggtcatgggcggatgtgaggtgattcctaccgtagtttggtttgactactgcttgtgaaattgctgtgtgaaaagggggttcggtgtttgaaaaatctgcagctgatgggatcaactatgcccggatggccgtttgaaaagttgttggcccgggtggccgttgaaaaagctgttggccgggtgccaaccttgtttatattcttaagactgatacattgcacatactccgatcggacgagacgcactgtcttatccgtgtcgtttgagaagcactcacattattgtttc

SEQ ID NO: 17370 - DNA, 263 bp, Oryza sativa
acagcaaatctcttctgaatccttgtgcagcagtcatcatcgagattccactgactaagaagagcacgccggtaataagcgagcgcctcttgataggctccaccttgctctcaaagttctgggagatgctcgacagaattactaacggcttccttgagcctttgttcaaccatgacatcgggtttgccacgttggaatatactttcaccagcatcaaggacacttttacactgttgagcaacctctgcaagtaaatgtgttca

SEQ ID NO: 17371 - DNA, 467 bp, Oryza sativa
  unsure (1)..(467): unsure at all n locations
ttcgcctccgccgcgggccatgtgacgcgcgatgatgccatctccgcgacnaggaggatgatgcggccgcggcgccgctcctcgcctgcgccgcgccgttgggttactctgtccaccgccgtatccacgccggcgacctgcacgtcctctccgccgcgttcctcttcgtcttctccgcctactgcgccgcgcataacctcgagagctcggtcaacaccgtgagtgtgccatctcgtccctcctcggtcctcgtactcgtcctcctcgtcgtcgatcggtcgagctgatctcgatcgccgtctttcctgatccgtggatgatgctggccgcatgatggcgacctgtgcacggtgtccatggggattctgtacacctccttcacgctcttctcggttggcgcgtcttccgtggtacatggctcggtttccatcgcgcgctcgtcgtctgcaccatcggcttcgtcatct

SEQ ID NO: 17372 - DNA, 311 bp, Oryza sativa
agcttcgatcctgacgatgttgttttgttcgccgctgatcatgtgtttcggcccacattaatactcataatatttggggcaaatatatttactaatattcatgcattttcgtgccaaggttagtatttatgaaacttacgaccgaaagctaaaattccttcattcctttgttatccaaggataatactcatgcaatgttaacctaatgacaatactcatgtgcttcgtggcatatgcgtaaattcattcaatcttgggcagaaaatagtactcctgaaatcttgaataaaattctaatattcatgttgttt

SEQ ID NO: 17373 - DNA, 389 bp, Oryza sativa
gaaactatattatctcgttagcctatcactatagcaattgcatgatgtacttcttgtgcctaatatcatctaatccttattaattagctaacctggtgaataatgtctttacaagacaacagcgagtgggttgaatggcagacaactgccctggtcaaacacaatgcgggtgagatacgtcatcattgggcctgatggtagggtatcaccatgttttgtgatgcttctgtgaatgcgtacacttgtcttcgctgacttttggctatcaatgctttgtgctgcagccgggcgacttctctacatgatcgtggtaaggatagcgatgatgatgactttcgagacatggactatgatgtggcggcacctgctaattacctgagacagacatt

SEQ ID NO: 17374 - DNA, 118 bp, Oryza sativa
ctccatgacacctctaccctttcttttcttatttctcatataaatcaacaaaaccctcagtttacttcatttgcacctcgtattattcatgttcaccccttttactggtcatcttact

SEQ ID NO: 17375 - DNA, 457 bp, Oryza sativa
ttaagcacctgagctgcagcttccccatttctgtactcccgtcttttctatgtgatcagtgatcggttggttaagcagacaaataggctacttatgccgagtttagttccaaactttttcttcaaacttttaactttttcatcacatcagaacttttctacacacataaacttccaacttttccatcacatcgttccaatttcaaccaaacttctaaatttcgagtgaactaaacacacccttacatgatgtatgttaatatgcatatgtaacagtgtagcaagtcttcttttaagcatttttattaagtacttcctctgtcgtatattaagattatttttagctcatcccatttatctcaaaataaattgatctttagtaataattatatcaaagtttataatagtaaagaataattgcattggaagtagataaagtgataaatagttatattacg

SEQ ID NO: 17376 - DNA, 330 bp, Oryza sativa
  unsure (1)..(330): unsure at all n locations
gtaatcacttttatactcactcgccgcatgtgccatttgactcatgacaaaaactatgcactctgaatcaacatttactcctatctagccatcagctgagaattcaaattccgtcgcatgatattatacactactaagagcgtctaaaattacatactaccgctacaacaaattatcatccactattttcaataattagagcaatagtttgttatactcaccagtttttcatgaatatgcctgacttttcacggtgatgcttctatctgtcncgatgaatattcttgttccaattgcacagtntgtgtataatgtaactactattacgca

SEQ ID NO: 17377 - DNA, 64 bp, Oryza sativa
ccctcttccccttttccccccccccaaggccttgtcttaactgaccaacacgagcgaccggcaa

SEQ ID NO: 17378 - DNA, 439 bp, Oryza sativa
  unsure (1)..(439): unsure at all n locations
agcttatcaacttgggtcatgcttatcatataatgccaacgtggttttgcccctgctcatctagttatcatgttaatttaggcaaaactcactcgtccttgaaccttatctactcaagcaatcacaatacacaaggaccatgtgaaataattctttgaaacattaaccccacctttatatataagaatctagaggtctagaacacgttgaactcatgcaattttgggagctgtcgtatcacttccataatgagattgtaattgaacaaaacatgtttatcctatctaagatgaaatgtttgcaatctagacatcatntttggtgtctccattactaatcacatcaagagtgacaggcattctaaatttcaccaccccaccattccaatctgacatgtgatgatccacaagaagaaatggtcattcctacacgactntac

SEQ ID NO: 17379 - DNA, 423 bp, Oryza sativa
  unsure (1)..(423): unsure at all n locations
agcttgntctcaaacatttatcatcttatatattctcataacgctgaatgatgaatggaatagatggacactcttgtaaaggaggagtggtctgttgtataatgtgcccggtacaccagcgacgtattattgaggtggctgtaaacctctgctcgcgcattcttgggctatggactgcttgcactgctccaatgactggaagatgtggttgaaatcattgcttggtaggtcattgagaaatatctggacctccatggtgctattgttcatagcgtttttattgcttattgccatgactacttctgagatcagaagatgtgtgtctgcaccataagagcagcccaggtcaataactaccatcgattgaggttgaagatctgngcatactnctttaatagcatttccaatcattgccttacttgt

SEQ ID NO: 17380 - DNA, 328 bp, Oryza sativa
gaaaaaatccagtagcacaattcaatcatagcagtatgacttccaagatacacgcagcaatactattaaggaaataatgccataatggcaatccattgcgggacatagatcctgcaatgctgtgcacctggcgcaacaggtgcgacacttacgtagcggtgaggctcaatgccctgtgggggctaaattcctccacgatctcttttagataccacaacaacttttcttagtagtaatctcggaaaaaatgacgacgactgaatggtgtaactctctttactgctataactcaacttgtgactcaatagcctctataggcgattgtttt

SEQ ID NO: 17381 - DNA, 429 bp, Oryza sativa
agcttggctccaataaagaccacaagaattgttatagctccccaccacttgtcaagggccagaagcgtgaacgaggcaaggggaaggtcggggagttggcgccggagccaaaaaggggcaaggctgcgacgtcgatgccggtgagcaaatcggggaaggtcgtgagggcgccagcccaatttgagctaggcatgccattggtggaggacaatgtgttagctgtgatgggtattgcttgccgagagctacataagcaatacatggagctaagcaatgccaagcggaaaatgagggagtcatccatagttggacatcacgaccaccagccgttcctatcgtcgcctgcctatataactataggctctgatgacctcttcgaccttttcaggatccggaagttgggacactggtcttctaaatgctactcct

SEQ ID NO: 17382 - DNA, 365 bp, Oryza sativa
agcttacattataatggcgagtatgcttattgtgctgttcgtgaacaacaaaaacatggtggtgcagaacgtggcgtcggtgaacagcaagttcttccacatggcgctgctgcagtgcagcggggcgaagatcagcggggtgaagatcagcgcgccggagagcaacccgaacacggacgggattcacattgagcggaacaacggggtgtccattcgcggcaccaccattgcgacgggcgacgactgcatcttcattgggccggggaacgacaacatcgacgtggcgcgcgttcactggtggccggggcacgggatgagcgtgggcaggctctgccggtacgtccgcgaaggggacgtcacgcgga

SEQ ID NO: 17383 - DNA, 405 bp, Oryza sativa
actactctcgttggcttgcagatcagccaccgaaatcacttttcgtcccccacactaggagcatggtccgctgtgcgcttatcgtctatgagtggaaaagccccctattaactctaacctcgccgtgctgacgaaagtgaaggcttatcttaagcgactagttcccatctgtcgccgaccaagagcgtgtcttactgcgaaccccagtggcaccggcgtgtggacgcaagacacctcctcccgtccgctggtactcacagaaacagagaaggctacctacggccagcccacgcgactgctcctgtgccacggcagcccaccagagccagcatggagcgctggcttaccagtcgcaacatgcccggcttcaacctgatgcctaagagcccaaggcgcttttttagc

SEQ ID NO: 17384 - DNA, 424 bp, Oryza sativa
  unsure (1)..(424): unsure at all n locations
agctnttagccatttctgtctaagccctgtctgataggtagcacacagcacaagcatgcatctcaaggatcaagaaagtacaaagcgattggacaaaaaccaaataaataaactcccaaaggagcgatcggaagatacgtatcaccgccctcggaaaaaaagttcagaacaggcatctatcacctgcgtccaactcgatcgatctaccaatcgaggattttttttttaaattctttaattgataaaattagaataccgtacccttaacattattttttaaagaaaataggcattttggccttggcagagcaaagttttttgttatgtacatataatgctacatagacgacgtggaaaaatgatttagatatactacttccattttaaatggacgacgtcgttgattttacatataatgtttgac

SEQ ID NO: 17385 - DNA, 112 bp, Oryza sativa
agatattatgggtgataagtgagacgcgaaatcatatgaggtgcatgttgaaagatctgtagtgatttggcaatttacgtaaattattggagggggagtttattgcgtctat

SEQ ID NO: 17386 - DNA, 425 bp, Oryza sativa
  unsure (1)..(425): unsure at all n locations
agcttatgccattntcaatccaatcgaggattttatgcctgtcatacctgtactcttttttctattagcctatgtgtggcaagctgctgtaagttntcgatgaaatctttactactctgtctgccaaattgaatcatgtattcattctaaaaaaattcgaaaaatggataacagccgacaagtcttatattatgaaccttcgattctaaaattcaaattcttctacattgaatgtatagctgcagcaataaatgtggatcagcctttctactccctgcatctacgttgagcaagtatctttaggtaaccgcacaatacctaacctaatttattgataagagtgcttattatanatcaattcttcgcaattttttcaaaaattgatttttgcatttttaggtgtcaaaataaacaaaacccatcct

SEQ ID NO: 17387 - DNA, 418 bp, Oryza sativa
  unsure (1)..(418): unsure at all n locations
agcttcgcgccctccgcacagatcggnggttgtgttaattctctgcggcgcactttcaggagtactgtgccgaactgggcgtgaggcgcgagctgactgcgccctactcccctcagcagaatggcatcgtctagcgtcgcaaccagtccgtcgtcgggacagcccggagcatgctcaaggccaagcacctgccgggtatgttctgggggggaggcaattactactgctgtttatctcctgaacagggtctcgtccaagagcgtgggtagtgagactccctacgagctctagaattgctgcacgccggcctttgaccacctttgcacattcggctgcgtcgcccacgtgaaggtcaacacctcgcacctcaagaaactggatgaccgcaccaagccgatgatcttcgtcggctatgaac

SEQ ID NO: 17388 - DNA, 359 bp, Oryza sativa
gacagcatgatgcatagaatttggaagactataacaatctgaatctactttaagagctatattgactacctctccaaaatactactgttacacatgtttcaatcagtttattaattatcagtaatttggatggctcataggtgaacaagcactctatgcaccctgagtacgacatggttatctcttgtctgtacgcgtgtcaataagcaaaaaacgtaatactctcttgccgataacgattaggtgctaacactttagttgcagctatattaccaacgatctcacaattcatgtgtcagtggtgtagtctcttctctatctactgaaatctagcaacattgagagtgtctactcatgct

SEQ ID NO: 17389 - DNA, 438 bp, Oryza sativa
  unsure (1)..(438): unsure at all n locations
agcttgatggcatactagtagaaccttgagtatctagttcccctacctagcgcgccactgtcgatgggtgatacccgtagaccggatatagagtgtataggggtacgctggtacaaggatctacgtattacgacatcaagcaatcaaaagacaggaattatactgggtcaagccccttaacaggtaatagccctaatccagtcgatatgggattatatagcggaaaacacatgttacaaaggaaaagatggaacttgtcagatccggcgagattgtagtcgagttgattcgactagctctcgacgacttggctcctcgcaggctccggcttcatagactgtgtgggttgtgttggctctgagattcgatccactatgccctctccgngggatccctcttataccatatgtctgatgctctccgagtatgactcgaaca

SEQ ID NO: 17390 - DNA, 344 bp, Oryza sativa
tctcttctgctgcggttgcatcgcgggcagcgctgatgcacatggatttagtgcactgcctgatgcacacggcgaccgtgatttgttgctccggaagctgacgaatttgtctacgcacggtgggtaccagcgtagccgccacacaggctgcgttgcagtgctatacatggcctttcgttccgatacgttacaagtatataataataactacattaatacttaatatcattagacactaactgatatgatagctaatttaatagtaattcatttattatataaaatacgtagatttttagccggtttgtaacctcaattgattaatgtgttatgaagtaaaatac

SEQ ID NO: 17391 - DNA, 453 bp, Oryza sativa
  unsure (1)..(453): unsure at all n locations
atcttaagtcacctgcagcatgcaacttgcccggttgttcagaggtttcttcttggggctgcctanacaacgcctccaaggagataaatgacgaaagcaccgccgccgctgtctgtcaaggtctcaaagagaaccgagactggtttttcacccggcagcctcactaaagggcatgggatggcacgacaatgcccaaaaaaaggagtgatgctctgaaagccatcgttgccggcctggctaaagccgggctaggtttttacctgccgttcgcagcctgcttatccatcgctaacgcaccaatgctccaaccgccgtctaacctccgccggcggatgggcacccgcgccttctcgcacacaccacaccggtctncgccgtcggcccgcactttctcgcgtgccagtctctgcctcggcagtgccgacgctgacctcgacgctgccattggtcgta

SEQ ID NO: 17392 - DNA, 427 bp, Oryza sativa
agcttgacttggagtgaggaggctaggttatcgatgtctgccctgctaaaccaaaggaaggagcttctttgacatatacccatggacaattcaaggcataatgtccttgctctctacaatcatgacaaaaggggacctgctcttctggcattggaagcgcattgacctgtgtggcaaaggatcgatcaaacacacactgattttggtcttgacttccaaccaatggtagctgtgaactaagcagcatgcttggaatggaccaaaggtgtgccctggttaactctcttgaggccagtggtggattgagttggaaacttaagttactggaggcatacccgctgacattctttcctttttctctgttaaacatctgtgacagggattgaggtgagagaggaaacaagccaggatagaatagaccataact

SEQ ID NO: 17393 - DNA, 346 bp, Oryza sativa
ctgtgactgatgacggcagtttattaaagttactattccttgataggtccaaataacaaagtttttggaggctaccaatgttggcaggcaatatttcaagagagcaattggagagaattagactctgcatattttgaagtgtgtggaaagatttagggagggatataataggaaagcctgagacatcaagataccccagcaacatcagtcgacgaatggaagatggcaagactggattgcttggagtagattgctcttcattagacaatccactcaggtccaatatacgtatgtaactggtttgagagaatgcctttcagagaagttgcatttcatgacattctct

SEQ ID NO: 17394 - DNA, 202 bp, Oryza sativa
caacataactcaaattatgtagtcatgataagattaaaatcgatagaacacctgctgaacaagagaatgtcattgtataggaacacatcaattcatattaagtcaactaagacttcaaattaatggagctgaaccagatattttttaataagctaacatctgtgaaataatgtagtccagtaagactaaactaatcaatgtc

SEQ ID NO: 17395 - DNA, 212 bp, Oryza sativa
acgcgtggaggttgaaaagaacatcccttgcttgcgctctacaaaccctgaggtgcatactaacaaggcttcaatatgaaaagaacgccttaatacatggagcgtggatcaaatgctacacagctgcaatggtatgttggaaccaaagttggtaagcggtctaagttgctagaacgcccgattagatgagtgtataacctgtgccaccccat

SEQ ID NO: 17396 - DNA, 374 bp, Oryza sativa
agcttgaacacctgctcctcgtggtgcatcttcagaatcccatcctgctgccaaagatcgaggagggagcactgcctcagctcgtctctctcgagctgctctgcaagcatctgcgcggcctctccgggatccagatcagacacctccagcgtctcaaggaggtcgcactcgattctcgagtgagcgagggcaccaagcgagagtgggaggcataggccaggaggcatccgaacaggcccagcatcttgctcctgaagaacagttacagtactgtcctgcctgacgacactgacagattggatgatcagatggacggggagcttgctcgggagaaatctgcacctgatgatgatgctggcaaccaggagcagatt

SEQ ID NO: 17397 - DNA, 286 bp, Oryza sativa
  unsure (1)..(286): unsure at all n locations
tcgctactgattcgagtgtgactcatnacaacgctgattcgttggccctactcatacatgcttggtanatatgaatggagatgtcttgtgtgtanatctcgcttattccatcgntgattttcgtaacaccagcttatattgtctcgtgttctgtcanaatgcagaacgctctgcagatcatcattcccacataagatagctcttgagttcatggctacctttttctcatctgtgtggtgggagatgaacatacgtaacgagaggtatgcatattatctgcgatctc

SEQ ID NO: 17398 - DNA, 296 bp, Oryza sativa
agctagcgagcgagcacaatccgcgcattttctgcatggttggggctcatcaccgttcatgcatgtgtgctctcatgccagcgaacctgcgcgagagatcgcccgatagatcgatcgaactagtcgggccgcactagctagccaactctaatgtattcctgatcatcatttgactcgaacttaactaattaatcatgagtaattcttaatcccaggtcatggaaaagccacgatagtgattattgctctttgcataattaattatataagtcctacatatatgtgtacctcaatct

SEQ ID NO: 17399 - DNA, 424 bp, Oryza sativa
agcttagctttctcgtatgcactatttccgattggcctgaatgggggcttcaatatcctttcgctcccgtcgatcggctatcctttgctaggccttttccagcttgaattgatgttgctcgagatacacagctggagagatgatattcgccaggtcatccgggactaaggcttgaatctctgcaaatcttgcccgaattgaaccacagtcagctaccaagttgtccaatgatgactctagccgatgagagatatcttcaagagttcttttgacatcttcatccggaggagctagggtcttacttgttgtttcttcttctgcctcttcatcaaagtaatccttgatgtcaaaggaaaacagatcggctaagacctgcaagagagaatattgaagacagtctaaattaaagctatattaccgatct

SEQ ID NO: 17400 - DNA, 380 bp, Oryza sativa
  unsure (1)..(380): unsure at all n locations
agcttgaaagagactttcttgggcctggtaacatagtttgttgaccttnttttttttaaaaaaaaagaaacacagtggttcatacacgcaagtacactcatcctataaacacagcatacccttccccaacaaaaacttcgagagagtgagacggtatatcaagattgataaaatcatcaaaggtgctatgctatagacaggtacctcgcttatcactggaataataattaatcgtacgtacgagtgctgccatgtcaagtttttgagttgaatttgtgttggttaaaaaaaaatataaccagctgatttaccctcaatttacttgaaatatagtaggtctcaaaaattntacatttggtatccatgtacacaaatttcat

SEQ ID NO: 17401 - DNA, 154 bp, Oryza sativa
tcattctacatcttgagtcttgtcttggtgttaagacttgctcgttcacaatgcaagtcatttagcaatttcacatcatattgtgcaccacatgaatgtgaaaatgcttaatgctacactgagtgatagacatgctatctggtttcgatgcgct

SEQ ID NO: 17402 - DNA, 441 bp, Oryza sativa
  unsure (1)..(441): unsure at all n locations
agctntccaacagaactatgtgacctcctactctttataatagatctcaactcgttctggtttttctttggagatagtgatggaggtgttgaagaatgatcagatgggatgatatcaacaaccacacaggtggtgtcatctttcagcccacttgtcttcagtgcttgctgtacaatatgaatggatctcagttggatgatcaagatagtgaagcattccatataaagtaagatataaacaagaaactgaaaccacacgtgaaactaccttcacgacaagctntgcagccagctctgcaggcaatcctcggcatgcctgagcagcagcttctgaagacagtgcatcccaaattccatctgatgcaattattagcctccctccagcatttgatagctacaatttcccagagtgaaaagcatacacaggtaagttcattgcgat

SEQ ID NO: 17403 - DNA, 373 bp, Oryza sativa
tgccttatgaagttatattgtgactttttaaaaactatgtgctcgtgggccacacgacaccaatcgatattcgagcgatactgatctgcgtcacctgtggactcgattctgctttgacgcgatacaatattaatcacgtgttgtgaactgaaatgggtggagcttaaaccgacaggggtcgggttgaataaagaatgaaatccatgcgggtggccagggacgtcgatccattatgacatcttggactataactataaggcaccaagggatgaacctgctttacttcgttagaactcctgcatgtggaccgggcggcgcaacggtctgtagaggacaactgtatacgacaggtgagtgtttgacctaagcatgt

SEQ ID NO: 17404 - DNA, 376 bp, Oryza sativa
ctggcacgagacgcttgtcgacattcctacatgaaatagtctcccgtaagccaagcaacagcagcaaataaagcatcgcaatccttccttaaaaggtagtgattgtcagcgcacttaaaaaggcatacctactaagttgtgactttatgaaccaacaagatcttgtgctgtgacgctgtagaatagaagaaaaactcggttataagtgccagtcaaataagacgatacctaaagaactatctactcgataagaacttgcctccaaatatctggtttcctttcccaccttacgtggcaccttgaatgccccaatagcttccaaaacaccggcaagttgctggccttctttttacctactcaacacaatgcgtcacag

SEQ ID NO: 17405 - DNA, 346 bp, Oryza sativa
caaaaggttccacaccaaaagtcctcataagacttttcttgctctctgggatgcgcgaagcgtatgaggagggctaaagatgatctcaacattttaaacaagatggcgcatgaccctgcctgcccccatgcgatatatgaggcgcgaccttcctactatgctcgtgagacgatgactatacggtgtagagtaaggctgaggtgtcacgtgctgcatggagcatcgcataagccttctggttcggaggttcttgctctgcttggtggagaacaaacctcagaacccataccagccggattcggctgatcttatctgatacacgtgtgttggtgttttcggaggagac

SEQ ID NO: 17406 - DNA, 402 bp, Oryza sativa
  unsure (1)..(402): unsure at all n locations
agctctgntaggcacttattagtcttttgtaccttttatggaaaaagtgggtgtatggttcttagttatttcttgcatataaattactcttgttgcaaatgttgctgctcggaactcctttctgtcataaatttaaaaactttgatcaaatcttcttctaaatgtcaactacttatgactacgaagtataaatattctgctttttttgtctgaaactatgctacaagttgggccaaacctcacctactgcgttcgttcatgcagatcagctgtgcttttaagtatcaccgtaaaatgagcaaacaattaacatatgattcattaattattatgaacttgacaataagtttattgaaattaaagaagatatattatattatatatatagatatgtctatatta

SEQ ID NO: 17407 - DNA, 432 bp, Oryza sativa
agcttcagaaaatggtgactggtgagaactcctatagatcgatgtatggggtaataatccaagagttgaagcatcgactaggtttgtttcatgattttagggtcatttggatccatcggtcagccaatttggcagctcattttttagcgaaagaatgttgtgctaacgaagttacttcgacctggttctctgtttcgtcagagagtttaaagtcccagttagttgaataaagtgctagcaggttcctctaaataaagtttttacaatttgaattgatttatgggtttgtctcattatagttaactaggaagctagcccgcgcatacgcgcgtgcatgtttgtttaatagtggttgaaattttattacgaatgtttatttttgactctatttaaacatgggtccttaataactggattggcatattagttgaa

SEQ ID NO: 17408 - DNA, 193 bp, Oryza sativa
tggagatcaacgaggactaatttctatatatcaagcttgtgttgcccagtatgtgacgctcattatatggaaagttactcaaaataaaaactacaatatgcaatcgcttgtgctcggtatttaactgactttattaaccctttacaaaccaactgcacatccaaccctgcgattttactatctgcttaaactc

SEQ ID NO: 17409 - DNA, 418 bp, Oryza sativa
  unsure (1)..(418): unsure at all n locations
agcttnttgggacgctgcagctggagattattatttcgcaaaaccaatcagtcgtcgtcgaacgcggcgggcggaagaagcgaatcgcgtaacgatttttgctaaatttgtaaccggccatggatccgaggcgcatccactgggagagctcgtctgaggacgtgacgaggccgctgctctcgctgcacgacgacgacagcgcggcgggccggcgctcctgcgccgcgctgaagtcgctgctcgccaacaagtacctggcggtcgcgtcaggccccgtggcgtgcgcgctgatctgcggtctcgttgacctcggcggccaccgcgccgcgcgcaacatgctncgggtgctcgcctgagtgttcctgtggtggaataccgacgccgtgccgctcgccgtcgcgtccatggcgccgttgtt

SEQ ID NO: 17410 - DNA, 420 bp, Oryza sativa
  unsure (1)..(420): unsure at all n locations
agcttctgtggccaaaggtgccaataatgaaacagcagcagctcctggactatgctatgtggatcttcctaatacgcaaataaagaaggtaatatcattgccacttaatttctttcaaagtttttgttgctgttggtgctctacttctattaacagtttctgatattatttcgtcaagttactgcaaaccgcctgctgcactccaagcaaaccattcctcactactatctgacagttgatactcgtgttgacaaacttattaagtatggtttcaatcaaaactttgttcaaacaatttagtattttatcaacctgtacccaagaacatattttgtgaacctctggttgattactagatgaaccatttgctctttcttttttttggngggggggaagcctcgtctttttttgcaccatatt

SEQ ID NO: 17411 - DNA, 309 bp, Oryza sativa
  unsure (1)..(309): unsure at all n locations
aatgtattagcgatcactaataaatagttatatgtactanaacatatactgtgttacagttcagatcaccatcctgcctattatgccaagagccaaactgaagctacatgttcatttattatgatcaacattggtggaggcngaatctgctttcgacatgcatctagtcagttagatatgtctggttgacaagtgttttgccggccggcagatngccaccacattactaagatgataatatgtactggttgacagtgtacctactattattcaagaccactacctgttgtataccaggtgtggtttaca

SEQ ID NO: 17412 - DNA, 406 bp, Oryza sativa
  unsure (1)..(406): unsure at all n locations
ctaattatacaaagcaccacgttattagcttctaataatctaattaagtgagagtacaccactggtgagttgtgacacccaccttgatcgaaaccctcctccactacactcgccggatggttggtgcagacagcagcaacccaaccgctcgtctgatctgccttctgcttacctttcttccctctcacgcgacagagagcaatctaccatgtttgctactgcaaatttcagagaagacgacactgaccagatgctaagagctactaactcttttgttagtgtgccaacctctgcaatgtggtcatcaatcaaagcatgtatatgtgtgtaccatctttgcanaaaagattccaaaatcaaaatgcctagcatgtaagtccaacgactatgtgcggntttgatgttt

SEQ ID NO: 17413 - DNA, 363 bp, Oryza sativa
  unsure (1)..(363): unsure at all n locations
acctttcaaaacctgcggcatgcaagcacaaagaagcaagactctttttattttattttcctcatcacaaactcacgcactacttctntatactagataacctttgacctccccctaaaggagaatgtcattaatagggagtattcggatatagacgattcaagatgaaaacaacaaggtggatatcgggtaccaacgatttgcacccccctgagcttgtagttatgaggtctgatatgacatgatatatgaatccaccagctacagacatctgttgcacttaccgtgtggccactgccttcggcgctttctcagtatgcacaaatgatcttacgacttgtcacgagagggatcgcctcattg

SEQ ID NO: 17414 - DNA, 425 bp, Oryza sativa
agctggtgatgagacttaccagagcagcgctcgtttctattgaccgacgacggaggcgagtggcgactaacggcgggatggcggcgtataggagcttcttcccggcggcacggcggcgggcagccggtttgtcggacacccacactaaagcgccgatcagggtcaccccggcaaggaaggtcactgccagggcgaggttgtagtaggtgttggcggcgaatccacccgtcaccgccggctcgaacgctgcagccaaagcggtggccgtggagacagcggccaggccgagtgttcccaacgccgccgcgatcttcgactcggcggcgccgtcgtcggccttcgcttcccggagagcagcggcacccaccagtagtagattatatgcggccattaatgtatctcccttttggtgatctctatatctc

SEQ ID NO: 17415 - DNA, 391 bp, Oryza sativa
  unsure (1)..(391): unsure at all n locations
agcttngaacaatactaaaagctgcaactcgtctgttattccgatcttcctctgattcaagagctaccagttccttcttcaactccaggccaggcaagagccgagaagggcttcccaaatttttcccgcggaggagggagaattcgcgagtccacgacctcctactcccgagcggcctctgactgaaaaggatcgaatttatttgagtttggttttacatgcggatctggaaatgcaagaggacctagaagaacgttgctccttagatgtatgcagctgaggcatcctaacgaatgaacgatttgaaccagttccccaacctgctttctccccgagaaagcctttctgagattaaaagaaaaaggcttgaaggttctgggatcagtgatag

SEQ ID NO: 17416 - DNA, 274 bp, Oryza sativa
tgcgagtacgccgcacctcggtcaggagtgtgatgtctttctatctcaactagatgattaccactcgtatgctaccattatgtttcatgtactgctcacgagtcacttgcaactaaatgttgatatatagacactttctctacacggtgctagtgtcattaataaatggacagactgaacctaacacctcacacctcttataatgtaagacggctgagcataccacattaactgcatgagctgactctcgatgcctggctctacgcacatctgc

SEQ ID NO: 17417 - DNA, 442 bp, Oryza sativa
  unsure (1)..(442): unsure at all n locations
gcttgacatttaaagatgccacatcattattcttaacatgatgccacatcatcatccactaacaatcatcacatttaaacattatgcaaacatgctatatctttatagtttttgtaatttaagagctcttcaaatacaaacatgttaaattatcatccaacataattcacacaatgtttcaatgtatatctttattatgttttatgatatcctatatacttatatagttcatcctcaattagttagtgcttaaatgattgatgatgtgaccatggctactatggatacgaccattgctcacatcatgaatcaacaagaagacatcaagatcaagtcctccatgtgctgcaatctgattcggccacgtgttacattgctgacttcanacggccgccaaatctacatacatgctccgtttagagcccgtgagtactagatggaa

SEQ ID NO: 17418 - DNA, 206 bp, Oryza sativa
tgtgtcagtggttgattcatgcaattatcttcgcacaaggctcgtatgctaagatgatattataatagcgagccgccgtcagatatactacacgagaattgcttatttgaacaatgtcattatccgattcttagctttgatcagacttcttatgtcaaataggaaagtggccgaattatgaataagtgtgagtctctcttacacct

SEQ ID NO: 17419 - DNA, 445 bp, Oryza sativa
  unsure (1)..(445): unsure at all n locations
agcttaacatgtaactgttccacgtcattatcttctatcaattattatctagagtattttaaatcacatgcaagtgtaccatatcatcacccattagcaattattatttagagtattttaaatatcatgcaaacatgacatatcaattataattttgttgtatttttaaaactcaatatgcaagcaatattaaatcgttatatatctctacaccatttttacattattgaaacatatacatctaccatttcactccataaatcatgggattagctaaaaagctgtcgagtattttttaagaaaaactntcgaatctaactacattatataatttcattagaactatactataataataataacttgtatatatgtattaaaacaatatatgcaactttatatcttatatagagataacaatttagttatagtgtagttacactat

SEQ ID NO: 17420 - DNA, 226 bp, Oryza sativa
  unsure (1)..(226): unsure at all n locations
agtcttcactgtgctaacagcagcgcgacaagtgccctggaggaacgacactgtaaatatntgtgataatcgagagtaccacactactatcgctactcttacgtaataaaagtgccatcatgtactgtanttcngtgattagtcaactggcacgaccagaataatctacctaatcttcagggcgtgtcaatcgatcggangcatcatgcagctttgctaatacatg

SEQ ID NO: 17421 - DNA, 408 bp, Oryza sativa
agcttccggaaagcgatgcgagactacgtctgttggtgcggtttactatgaacatggagctatttgaaatttcaaaacggcgtgtgcattttacataatagtcactggccgtggggcccacaaatggggtggtgactggtgagtggaaaaaaccggacgaaaataccggaccgggccaccggttgaactcgaaaaaaccggactgtgcccgtgaaagcgtgtgattctcatgtcctgttattttatctccctgatcctgatattaaatttgtaaattttgttgaagtggttatggttggagtcgcgttattgcgttgggcgtttaatacgctttcataaactctagtaacgagttataaataaactattcttatgctcgtgcgttgttacgggtctttaataacgtga

SEQ ID NO: 17422 - DNA, 441 bp, Oryza sativa
agctctaaaagtttaaagcttattttggtttattgtcgcatcgttcaaacaagacagtaaaagaaatgtcatattgcaccatatgaatactgcttaacaaaggctgcttaaaagggaagttgtgcagcggatttttacattagcagttcagcttccctgttaaaaaaaaaagtgtgattaaaaaaaaactgacaaagaaacagaacctgtggtaacataataagttaaagtattcttactgcgaggggtttctgcgtgttgctttcctaagctttaagataaatggttttgaactctatggcacttggagagctggctccctaaaattaacgaaaaaggaaagtatattgaaagtcatgctcccttccgttcaaactattagtaattttaatgttggtcaaatcaaaccacttcagatttaactaaaattggagataaata

SEQ ID NO: 17423 - DNA, 402 bp, Oryza sativa
  unsure (1)..(402): unsure at all n locations
agcttaatatcccgcggaagaattttgatgttttaagagcgaagccgccatagaagaaatgggagaagaccacagcctcgtgtgtatcgggggtcggaaaagcctcaccgcacgctggccgccacccgatgatttccttggcagggagaacgccgtgcgccaccatcttcttcaagttctcctccgtcacgtcggatggcgcccattggccttcaaagatttccttctcttccgccattgattttttccgaatgcgttgatttgattcgagggatggctagggagacgtgatggattgacgcattggatcacgggaaggattttgatgaacttttccaatgtggattcgagtggaatggtgaaccctagtttgccgtgcagctctgactgtacanggagtgg

SEQ ID NO: 17424 - DNA, 324 bp, Oryza sativa
ctggtagtggtcgagcaagaagtgtgcttgcttttagtcttcgctggagacacctctctgacttgataccgatggtatcgtgaattgcgcctacttttgactcgacgaggtccgatacaattgaaatatttccagcgactacatagacaaatgtgactatagtatactggatctataccaaagttgtgcaacttacaagttgagtcgagcacgtgcggaattcagatgagtgatggatgagtagtcggcgataaaaccatcttacagtaagtaacggtcattaaaataaactaaagagttgttgaaacagctttgcaaatgtca

SEQ ID NO: 17425 - DNA, 434 bp, Oryza sativa
agctttatataattaatacttaatttattatattctaatagcttacctcaatcttttctattcctctcttattaaacacagcctttaacgtcgatgcatctctattagcaccatccaaagcaggagcatttctgcaatgaccaaagggctaaaagaaaaaagaaaaaaaaaaggcaaagctatgagatcagaacggttaaagaatcaagaatcagtcatcgtactgcatatgtatggttagtggagtgactcaccgtggaggcgtggccgtcgttgcgatttctggttcttctaaccagtaagtcatccttgtcaaacaccgacggcttctctacctgactacgcttttcttccctcgccctgttaaagatgcttagtgtattgtctgccgggcggagcggcgagttccactcgccgaactttggcacggcgga

SEQ ID NO: 17426 - DNA, 274 bp, Oryza sativa
  unsure (1)..(274): unsure at all n locations
tctatgggggtgatggacttcaagagctgcaacttagtgtccatatattaccaatttccgatatactcgatctatatcatgatccaccgctatctcatataatataagcgctggtgatacaatatcaacactcatggtaatattattctgatattgtnggatgtaattacacatatcgggtacactatagtcattatcgagcttacttattttcagcctccagcttctattggaaagactggaatatgcaaatatgaacctcgttgagaactat

SEQ ID NO: 17427 - DNA, 335 bp, Oryza sativa
agcttgtattacacataccatctatgtgttcttgtccagctcctgggccagtgaccttggaagcattacaaccacattgtggtctaaccaacttcttctttggagtctggacaaaaaacttatgcttaccattaacacaaaagtggacctggagtgtgcaactaattgatatgtacaaagaagtcaagattaaatatcacactcgctttatctgacgatcaataacaaaaaatggataacagatggaagatcagattcaagtagaattgttgacatcctgtgtagacccccgcttatataacaagaattactcgtgtaaactgtaccattttcct

SEQ ID NO: 17428 - DNA, 189 bp, Oryza sativa
ctcatctagctgcacgtcgatgtactgcgccgcgcggtgacctatatcatcatggcatccgagtggcttgattcatggcaattatcttcttcaaggctagtctgcagtgtacgttattacaatggcaactggcgctagattactctcgagtaatgacttatttgagcaatatacataatccgattcgaa

SEQ ID NO: 17429 - DNA, 414 bp, Oryza sativa
agcttgcgaaatttgcagcatccatgcccttgtttgatatcatggagaccccagttgtaccatcagtccgtagtgattgcagtcttcacgacagttgtagaacccctgaaaaggatagggggtctaaaacaaatcctatgagaagaacaatcccttcagggctcagtgacaaaaccagcatttttacatcctttagtgagcttaagattaaggaagaacctgatgatagcagcattccatcattgagtgctgaagctatgactgcctttagctcaactcctttggtttgcaatcaatctgcacctataaccctagctgaagcgtttccacttactggtaagaggtcaaccttacatgtttattaactactatgcagtctttattcgtcatttaacgaagatgttcatggaaata

SEQ ID NO: 17430 - DNA, 218 bp, Oryza sativa
cttgtgactgtggaagatattacaaaccatgtctgcttctatctgctttatattacccgatgctgatgtgctgtgtgcaggatagaacttgtcagaagaattgagacgaacagaatactgactaaagtaacatgatgcaagctgataaagacaaacttgtattgtaacataactaaatgcatgaagtcacttgtattgtacgactagagatggactgt

SEQ ID NO: 17431 - DNA, 435 bp, Oryza sativa
accggatcttaagcaccgcggctgcagctgggagagctacgagaatacttttggtgagaagaccaacaacaacaagccgaagggttcatcccaagggaggaagctggacaatctcaggaaggcttttcaacaagtttgtgctgccttcgagccactaagtgatgtagatggcgaaagtggagatgatgataagggaaacaacatctccgatgtttgcttcatggcgcgtggtgaatctgacacagagtatgaagataatgaggtaagtgctcttgaggaagctattaatattttgagtgacaaaaataagaagtgtgagaagatgtatagaaaacaggaatctatcattgaatctcttaaatctgaaattgctagactaaaatctcttattcctaatgatgatgattgctcacatcgtgaggttctaatgaatga

SEQ ID NO: 17432 - DNA, 457 bp, Oryza sativa
acctgaagctgcagcttacatcccctataatatttgaaactatttttatatttctctcagccaatagaaccccgctctcctaagcaaccaattcatcttatgggccgattgataagtttcacaaattccttcatgcacttctgccatagccactttagattgatcataatctaagcacttcaataaaacgccatctatatttcggcgatataaatctccatcaagcaatgtatatttgaacgcttgccgccgaatcttccgatcaaccttaagtgtaagatctttcaaatatctaaccaaaggaatactccaatcctcttctgtttcctgcgcaaaaatgttcgaatttacaattaattcggccttagaatcaattgcggcgtgcccctagctctctttccagaaacggtcagaccggctgtgcaatgccagtcaaatcgcccctagtctgtgattt

SEQ ID NO: 17433 - DNA, 440 bp, Oryza sativa
  unsure (1)..(440): unsure at all n locations
agctntccgtgaagtacttgcacgcccattatcttttttctcatgaagtcgtggcggccgtcagaagttggtgctgccctgcagtcctaatccaccccgcgcgaatcctcttccctttggatcctctccatcggtcctgagtaaaacacgagtgcacgcgtcttcggggtataaagacgacgaatatgaactcaagaaagaactcacctgataatttagttgacgtgcacgagcgcgggtaataggaccatcatgctatacatggggggacgtggatgtatcgatggtgttgatgtcctcatcaattcatggcaaaaactcactctgtgattcgcgcggcgaacttttgtcaattaatgccaatattggcacacgagggtgcgatgttttgtactggaagcaaacaggttcaaaagagccaaaacatgaatgttggactt

SEQ ID NO: 17434 - DNA, 223 bp, Oryza sativa
ctaaatcgtgccgtacggtacatcacacatccggatcggtgaacctctgggagtctaggccaacggtccatcatatccacgctggaacgcctgtgattgtacgtattcgtacatgcaacacacccgacaacagactgttcagctatgacgtcgagccgcgcgttctaatgcacactggtgaccaccgcacgctgtgtaatcaaatgtgctgtgaacctaacta

SEQ ID NO: 17435 - DNA, 441 bp, Oryza sativa
agcttgctgaagcataatctgacagtgaatctatttgtgatattggcaatgcctctggtgcgtgtttctggaaaatgccaagagatgtcaaaaataaggttaacaggttggtattccgatccatgttgctatttattaagttgaagttaagttttggatatataagttatttcgttgaaatgaacaggtggtctgtgcccaagccacgctggtgccgtcctgaagatgctgaatctgatgatgatgataagttagcttttgatgatactggccagcttcaatacagttatattttgggacggaaagtcaagctccttcgtctcacaatccccatatcggttccgattgttgaagctaaatccactgatggttagtaaattgtcttcatgaaccttttgcaacaattctgttgactgttgtgctgactggtctctctccctg

SEQ ID NO: 17436 - DNA, 248 bp, Oryza sativa
  unsure (1)..(248): unsure at all n locations
tgtctaacagntttatctatatgactgattatttttctttctctgcangctactgacatgataggacaagatgctgtgcgattgcttgtgagctggccgttgagcttatctatatatcttcactgactcaactcaacatgaacatgctgtcatggataatcaaccgctcttttgtgcaataggatcttcgctgacattctaccactttactctaatcatggttggtcaagctgtgacaagtttctata

SEQ ID NO: 17437 - DNA, 408 bp, Oryza sativa
gagctagcactattataggacacgcaccttatctctgtatctccctcattgagtgtggagtcaacaaagctctaactgtggtcacaatgggtccctacatatacatagaacaagagcaggcggcaacttcaataagctgtgtttgttgaaaaactgcatttataaagaaaaacgtctcttacctgcagtccacacacaactatttgatctccttcatggagtataccgttgaccaacacaacatcaactgtagtaccatgaccttcaacaaccttgacttccagcacgggacactgaaacataaacgaaataagaatgcatgctcttataatgacaagtaaatttatgcaccgtacctggacttcatcaacgaaagtaagtctttctttcatcgtcttttgtgcccat

SEQ ID NO: 17438 - DNA, 114 bp, Oryza sativa
aatgtatagaatgctacgattggataacaaagtaaatgatatggagggaaaagtagacttgtctctctcgacggtaacaaagaaatctctatggagtgtccatcatcacttatt

SEQ ID NO: 17439 - DNA, 265 bp, Oryza sativa
gagccctccagacagccccaagtgagagaaggacacacgcaagcgaccgccggagggaagacagaggaggcggcccacacgctcaataaaggccgccaccgacacgaggaggggagtgcgggccggccactcgcacgacggggacgggaagaaaggagacgagcgacggaaaccaagccgaggagaaacactctacgcagagccaccaccaccggcctacaaaccgatgaaagagccgggaacccaagacaacgggagcccgcgc

SEQ ID NO: 17440 - DNA, 234 bp, Oryza sativa
atctatgtgatgcgttccagctatctccaatcactggaaaagtcaaagactttccccaagattcatactactacgccaatatcacacaaggaagccccagagcgagcatacttctttgtgcgatacagccacttatattatatgacatggaaaaccttaaggggcagaaacaggtgcattgacatagacagaattgtcttcggaacaacgtatcaatctgctccatcactaacc

SEQ ID NO: 17441 - DNA, 385 bp, Oryza sativa
  unsure (1)..(385): unsure at all n locations
agcaagcttgcagcagctttagggagccatggttatctgggttnatatacctaaaagggagattatcacgacagcatgtgagaaacttttgttaatgaaagcaaactactcatagaacaaggaatttcatttcttggttgcgatgaacaaaagaagaatataatatgcacgtgatacccatgacggaagaggaagtcaataatcacaaggttgcaatttggcttgaaaaaatgtgtcctccggataatatttgcagcatgtggtacagggattaatctgaagctaccaacctctccatctgcaagagttggtagaagattcattaaatattttcatgctagagtaccatttatagagaacagagaagtatagcatggttggggtc

SEQ ID NO: 17442 - DNA, 428 bp, Oryza sativa
  unsure (1)..(428): unsure at all n locations
agcttaagaatacaataatctgttattgcttatcttgcggtctcaaacttacccgtaactatcactgaactggaggagcatgttaaacataataatngggaaaaggaaaggcttctcgaggatataaaaagacaagaagatttgttgaaccaagttaaggatttgttcagcaagaaaaaggaacagttcatggcttatatcactcaaccaggaatgttacaggtgaacttacaatttattctgttattttcttgactgtactaatttattagtaatttattgtcatccggagttacagttagataatgaatagaattctctatttctatgaagtgccactgtagcaagtacacatataggtcgcttgcttctaacaacggaggggaggccggactgctggaggtgtctgctacagaatctaatacact

SEQ ID NO: 17443 - DNA, 374 bp, Oryza sativa
agcttaattgctaatgtttaataatacatactttttttatcaattatttaattggaaaaagaattaaaatccttcattctaagtttgggccgaatataaaaaagtttatattttctcccttttgtctattcaatgtgcctggcctagtttctttctccgttgaagtccattttgtgtcctccattcggtggcccaatatgccggcggcatgacgcgggagcagttggagccgtccgatcgaatggacggtctagattaatcctaacctaaataaatacacctaaaccctaaccctaaccctaggattcattctccccctctcccccgcccgcaatctcctcgagcggaggcgggagtagcgcccaccacccttc

SEQ ID NO: 17444 - DNA, 366 bp, Oryza sativa
caaaaggacggatgtggtttggaggtcggaggatcagaattataagcaagtaaataataataacaagtcttataataaaaaacgaaattgaataagtaatcaataacaaataaacaaatctcacgagaatagatcatactaaattgcaaattctaatgaccgtcaggaccctataattaataatctatctggtgacataattgagttataactttcatttgatctcgattgtgcatacctgtcagaaaaaaaacaagcaggcaactccatatccttctgcttaaacaagccacacaagaattgtcacatcataactgagcactgaaataacctggttacttacgttgtgacacgcatgtctaaaaa

SEQ ID NO: 17445 - DNA, 437 bp, Oryza sativa
  unsure (1)..(437): unsure at all n locations
tctaatcacctgcagctgcagctttcaacacttcgggggggttcttctatattagcttgaatttcctggttctttgaaaagaattcgaagtgataatggtggagagtttaaaaatgcttcatttgaacaattttgcaatgaaagaggtcttgaacatgaattttcttctcctcgtgttcctcaacaaaacggtgttgttgaaaggaaaaatcgtgttttggttgagatggctagaacgatgttagataaatacaaaactcctaaaaaatcttgggctgaggcgattaacactgcttgctatantttaaatcgagttttcttgcgatctaaactaagaaaaacttcttatgaactttgatttggtcataacccaaagttcacatttggtgttttggttcaagagtttgtttgaatctgtaattggaaagttgagcacc

SEQ ID NO: 17446 - DNA, 218 bp, Oryza sativa
aacaatgccattccatgctactcgccagaatctaactactggggcgtgttggctgtatgaccatctgaggaacctacctggtacttatgtcattgatcttgaggaaagcagcggaatctcaactcaacgttggttagagctacaacactaaatggggaagagtaacttgccaactgaggtctccttctgcaactatggcattataaagattaacctcc

SEQ ID NO: 17447 - DNA, 445 bp, Oryza sativa
  unsure (1)..(445): unsure at all n locations
agctaggcatccttgtactcactagtactctcatggatctccgccaacttgttccaaatctcatatgcggtctcaaggttgctcactctatcgaactcctcttggctcaaagagttgaacaaggcattcatggcttgggcattgagttggaggttgtggtgatcaatctccgtcaagggtgtgccggtgatggcaaagcctacatccacaatactccaaatatggaagctcatagctttgaggtgagtagacattttaattttccaagtggagtagtttgtgccattaaacatgggagccttccctacatggttcacctcgttcgacatcttctctttaagcggtgaaacccaatcaagagagaccaagctctgataccacttgtaagatcgagatgtcgactagagggggggtgaatangcgatttaaaactaaataacaccta

SEQ ID NO: 17448 - DNA, 183 bp, Oryza sativa
tctagatagtctcaagtagtgctcattcatggagtttatacacaatatatttaatcgagagagcttcttattgattaccataatcgtcgattgtaagacattacttataaactatgctgagatcatattcaagacttcacaatatgctctaagcatacggacatttatgataataaaccaatc

SEQ ID NO: 17449 - DNA, 448 bp, Oryza sativa
  unsure (1)..(448): unsure at all n locations
agctntacagcgggtgagatcaccttatatgtcttatacactacactntgtcacacatgggaaaggcaaaggtgcagacgtgtattgtgcatcgggcaaaaagagaatttcggacactttatttattagcaaacaatagatccgatgattataataataagtccaccagttctagtgtaagttaaattagttaatatagattttaaattgttaatttaatgggtacacaatataatggtgtagaccttattttgaaacagtgaataatagaccaaggtaatgaaaagtagatctgatgatttatgtaatggggccatcagtttatgtgcatgtataaattaattaatatagatattgggtatttaataggtacatatcaatataattgtggtgaaattattgtaaaatagtgcattatttgaaaggaagattctttgctatatgatgg

SEQ ID NO: 17450 - DNA, 161 bp, Oryza sativa
cgacgagaatcactaaagatatggacttgcattttcaatcagttaagcacgatattacagatactagataaacttttcaattcaatctacctatgagatgctctctcacaatagaatcgtctcgaactgggctgtatactataccatgaaacttgatcgta

SEQ ID NO: 17451 - DNA, 300 bp, Oryza sativa
  unsure (1)..(300): unsure at all n locations
acttcacgcactctgccatcgcaatatatttttantagaccgcctccacatctagcgatgaacgatgcatcccagccaattctcttatgattagaattcctactggtcttagaagagagaatatgaatagtactttacgcgagactcattttacttttgttgttccaataagaccgacagtcaaaagtggaacataacaactcacaaataagcttactttgagacggaggtactgagtgtgaacagctgtccagataaaacattatacttgatatatccagggaccatgcccgtactcct

SEQ ID NO: 17452 - DNA, 61 bp, Oryza sativa
tagcgagcacatttcgaattgcgaattcataatcaaaattcgatcgccgaaggcatcagcc

SEQ ID NO: 17453 - DNA, 449 bp, Oryza sativa
cttaagtcacgcggctgcagcttaattggcttattaccacttattttccttgccgctctctgcaaaagactaaatattttcttcttggaagtgtctgctagtgcttcatgtgctatattcatggtcaagtcttctttgcttacatgtttacatttcaagctgtgataaagcagttcaatactacgggctatgaacattcagacgctgttgtaattgatgaagttgaattacagagacatcaacagcttgagaaattgtacacttctactcgttctggaagggtaaggaaggagaattgcacatagcataaaatacatacctatgtaatatgatcagctggcagcaaattaatcttgcatttatgttattgatatatcgctggtgtatctcattcgacatgtctgacttattcagttcattacacaatggttttaagacattaatacaga

SEQ ID NO: 17454 - DNA, 434 bp, Oryza sativa
  unsure (1)..(434): unsure at all n locations
agcttantttttaattctacaacattaattttcttccgtactatagcttataatcacaacaacatcaatttaggcaaagatttttccaataacaaatgtatccatagggagtacatgtctcatcacttcactttccaaaaacgtatcatatgaattacttgcttcaaactgtagataaacttcttgatcaatctaatctatgtacctttccaaccatttgcctgctcttaatatacaagggtggcgtgtttcgatatggacatctccattcaaaatcaacatcgaaagtgatcttcgctgaatttgctactcgtacaagagcaatcttctcttacgaccatggttcaatctgtgggaagcccgtgtctgaaactgttcactctgttacgtgatgtaagagtatgtgcctgtgtgtatcttctgttgtattgaaa

SEQ ID NO: 17455 - DNA, 301 bp, Oryza sativa
tccagatgctagacgtaatactgttcattgttcatcataagacacgtggtaacatcgcatttctaaatcttcaaccgttatttgtttactttcacataagcttactattatctacggaacgccgccacaggtacaagctgctcataagaaagagctgaaatgtacaaccacctcttatcatgagcctcatttgttcaaagcagaccattgcgacatgcaccggttattagagatagaatgtgatctgcagaccgtcagtggcggctgtagttgagtatctgccacgccgctcttttttaac

SEQ ID NO: 17456 - DNA, 402 bp, Oryza sativa
ctgttcatgactggaggactcaaatatgctctccagctcacagacctcatagcatatgtcctgctcagcaattatgaaagggaagaagccgttgctaaatccaccatcttcaacctgaaattaacgatggcattctagtaaattcaaaggttgtgactgataacagacacatgaaaacagcagacatatgaaaagctgtacctccacaaatcctctccctcttgaactagggagaggacaacagaagttcagatattcaatatcatcatgctcaacgtcatcaactatattatcggcgtcttcctggaatatacaactcccttcatatgagcaaattagcctcgaaacatgagatgatcaatctttatatgacaagtaagcttaagcaaacatcaacctatg

SEQ ID NO: 17457 - DNA, 195 bp, Oryza sativa
tctctcttcccttctccagaatagtggtttcagttaatacagtagaccacctctccttcattagagatacagcactagagagtcctcttatgcaccttaagcctaataccatatggccagtcactatgataaaatataatatagaatattgtgatgcaaagtatgcttgttataatataaaatctcacaatacag

SEQ ID NO: 17458 - DNA, 436 bp, Oryza sativa
agcttatcgaagacaaatatacctaattgttctcattggatgacctagctgagggaaaagagatcttatctcctcgagtagatggcgccaccccaaacaacttgcattgtctgcgagaagcatggtaaaagaataggactagccattgaaccgctcgtggtccggttcatcggctcaccggttggatagactgggttgattgctgaactggccaaagctatttagcatacaacatgattttaaacaatgtggccaccctaccaacctatgtttgactccctaccgctccatcttttttcctcattttctttaataaatcaaattgggccttaagatgcaaggtggtccttcctaggtgggcccatctgttggctgaaccgcctggtcataataccccaagtcaaccatttttcttcaaatctacctagttcacctg

SEQ ID NO: 17459 - DNA, 249 bp, Oryza sativa
cccttgataaattgtctgcagggactggtgcacacggcttgtgagggatggtgcactgatggtcactggaagcatttggcagctgcttatcccacagcactatgggattggagaatatgcttggtggtgagctagaactcaggtaaatgccaacaatatagatacagtcatgaccagattcatgctctaacagtcatactgctaaccatgagtatcacaatatatgtctatttatgatgccgagtcagt

SEQ ID NO: 17460 - DNA, 427 bp, Oryza sativa
  unsure (1)..(427): unsure at all n locations
cagctgtgcctgtnaggagagatcatcatttattattaatgtttgccgttcgcggtacataaaatactcagccagggctgctcccgtataaagagcgaggtattgtaatgtagcaggggaatccgccatttcagctactacaatagtgtattccatggccccctcttcatggaaagtagctactacttgagctacggaggatgctctttgaccgatagctacataaacacatattacatcttgccctctttgattgagaattgtatctgtagctactgctgttttgccggtttgtctgtccccaataattaactctcgctgaccgcgcccaataagaatcatcgaatcgatagcaataagccccgcttgaagggagttatatacagaacgcctgtagatatacctcgagcacgagattcaattaaac

SEQ ID NO: 17461 - DNA, 316 bp, Oryza sativa
tataaacccgcgcactacacgatgttttttctctccttttataaccgtacattctcttagaagagatacgttaccaatgaactcatctgaacgttcccatttctctatgaactcatacaaggcaaattttatccaactatcatgcgattcgctgtatagtggatccgttcgagagatccgtcaataacataacagactgtataaatgatatcatccgatcaacttgcatccttgttttaacagagacatgctggcacatcatatgtaaatccacactttcgtgaaaaaactctttattgacaagtctgtctaaatg

SEQ ID NO: 17462 - DNA, 446 bp, Oryza sativa
agcttactaacacgacagcaaccgtgcatatttgtttatcttaaatcaccaaatcatcggtcgcgcacagcaaagcagtacaaacacaacatgaacaggaaaaccacagcgccacaaggcagcagaaggaaagaaaaaaaagaacatctgaaagccgcagcaaaacgccgcgaaaactaattccaagatccagttgtcctccacgcacctgatccgaccctggacaccccgcgatccgcggagccgtccttgcgcgcgttcttggagtcagccccgggcttcttggcctccccctcctgagccgatccgaagcacaggaagcagctcatccaagcagaaccttccccccaaaaaaaaaaaatccaaactttcgcttcaccactctccccgccgagcaagacaaaatggggtgttggacccctccccgatctgagcgcaccaacctc

SEQ ID NO: 17463 - DNA, 376 bp, Oryza sativa
agcttcattcatactttactttgttaatattgtttccagtgtcatcatatctgcagatagaagaacagacttgagccacctgataaatatataagttcaactagaggggatggatcaaagttggagagcgtattgaaattttctgaagaaaaaaaatggcattgacaatgtcacatcataactttaactgtaagcctccaagacatgccaaaacctatgcatgtcaaaagttactagttgtgtcatgcgggttacaattgcagagtgcagactaaatatcaatcagattgaagagacaataacacaagggtaaggaaattcactggagaacactagaattcagtacattttgtcctatccaaagctcatggcagta

SEQ ID NO: 17464 - DNA, 244 bp, Oryza sativa
  unsure (1)..(244): unsure at all n locations
ctaagcacgactagggatgatgcatctcanagtatgaatagaaacatgcnatctagacgatcaagcaattagacacttcaagatgatagatgccttagctatctaatctacaagacagttaccgaaccacatatacctaagcgacagcaccgataaactaaatgaaagctagatagatagcaagacatatgtagcatgacttgatatcagctacatgttaagcacatgtagcccgtaggtggca

SEQ ID NO: 17465 - DNA, 439 bp, Oryza sativa
  unsure (1)..(439): unsure at all n locations
catgcaagctcgagaggataaagagtctttctttgttctacgacatccacggtctaccggagggagaggactggaggagagaagttggatacgattaaaaaaatatttaaaaccattacattgtccaaatccacgaggtaaagacatcctttttgtgaggctgacaggtatggcccacatactgcgcgtgggggcctaatggcaatgttcccttttcgtaaagaaaggtgattttgcaaaaagaggcaggtgattgtgctaaaggctaaagaggctctctctctctctctcttttgtacgacactcctttcgttgaagatacgattcctaagaatgcccttcttttgaacaaattgtaggnggcttgaatttgaattcttatctatttcgaaatttcaaacttctttacattaaaagctaagcaccctcttatatgctt

SEQ ID NO: 17466 - DNA, 422 bp, Oryza sativa
  unsure (1)..(422): unsure at all n locations
agctnggtcgatctcgcctgatcgaatagtctatggtgatgattctgatctcgtcggaagatgtatttggacaggttggatctcccagagccgaagttgtcgagtaacttgttgtcggagaatccatcgtttgaacccatctcgtcgaaatcctagagcaccaaaatccccctacctggcgtgccactgtcgacgtttgatgtctcgactacggtatttggacagtatggggatcgttggtgctaggatatatgcgagactgaggtaaaagagatggagacagggatttttatacaggttcgggcccctgagttgtcaggtaataaccctacatcctgttggccgaacccgtattgtcttattaccataatcacccagtcaatatgtgggcagctattaactgtatcgacatgttgtctgaa

SEQ ID NO: 17467 - DNA, 444 bp, Oryza sativa
  unsure (1)..(444): unsure at all n locations
nagctcaaattacgagatagagtttagttcttgaaacagcacagtttaaatttatataaatatagcatactccaggcatatgttagaattaatcaataagcgtagagtcactagtacagatgagaaataataaagaaatgattaaaagatcatattagtaatactacaaccggatcacctttggctccatcaggctcttcccatttggatgagcgaatgccatcaaatgccgccgttgcctgaaacaatttgaaaatcaatattgtagtctaatgatgatgaatgaacataagagaatgcacaggttgcagctcatacaattccaattgggagttgttcaccacttgcaaagacagaacctgaacagagtctattgcctcttgggaattggtgaccttttgtgcanaccgcattactcttgtaattactcagtatctcatcaac

SEQ ID NO: 17468 - DNA, 360 bp, Oryza sativa
agcttcgggtggaccagtttgtttctatgttccatatagaaagaacgttttcgcaatacaaatgcattcaaagcgtttcttaaaaaaaaaattacaaatgcatccacacgtattattcaccacgaaattatgttgaacaggtacggttttttttagagcgacaggtacgtcttttgattggtctggttttgtattcaactccccatgtttcacatgcatttgaattcataaaacagattagaccgggacaacacgctactaccatctaaccgatttttcatgtggttaaatcattttttgcaggcggatgggtggtccacctgcatgtattttcgattgcggacacttatgtcatccgac

SEQ ID NO: 17469 - DNA, 337 bp, Oryza sativa
agctttgagagtcagtgggcgtctttctatgtaacggaggagaacctgtaagagatggtggcgcacggcgtgcttccggcaaatgagatcatcgggtggcgtccagcgtgcggtgaaacgtttccgacccccgacacacacgaagtggtggtattctcccatttcttctatggcgggtttttccttccgacctcaagtttcttccgagggattttagatttctatgggctcagtttgcatcacctaaaccccaattccatagtccacatcgccaatttcatccatgcttgcgaggcctttctggagattaagccgcattttgctctattccgtcgca

SEQ ID NO: 17470 - DNA, 132 bp, Oryza sativa
catttatggatggacgtgcacgtggagcattaaaagtaatgacttatatcacaatatataacacatataatatctatatataatatataatatggctgagcaaatcatacatatccggtatcgaattgtata

SEQ ID NO: 17471 - DNA, 364 bp, Oryza sativa
  unsure (1)..(364): unsure at all n locations
cagcctgcttagctggagtattttgttctgctctgctctgcttcaggcagacgatccattttcttggcgtcaaaaagcatgagctttccctcagctctacttttgttctcgcgcgatatgcccctgagattctatctgctgattttctttgaaagagaaataaatgattctgctgactagtagtccctaattaatcataaatggtggaaccactgcatgcatccgttgataaaaagatatgtggcacggatgaatgcaacggtaatgtttgccgtcagccaaaacggcatacgatgtgaacccggagggggggggagggtntctcgcctttctggcggctcagtccatattgctttatttctat

SEQ ID NO: 17472 - DNA, 382 bp, Oryza sativa
  unsure (1)..(382): unsure at all n locations
agcnncatacttctctctactttttcattctcatatataataactcttctcacaaaattatgatctatagtaataagaataagaatatcattagaaatgtggaatgcaagccaaaatcacccatctacattaatgatcatgttcgaacagtataacttaatagaagatcaacaccattcatccatcattngagaggtgtttcacgtcttcaaaacctgtttccatanacatatttaatgtaagaatccatttaagaatcgtattaaaaaataaacggttggtttaatataataattgaaataatctcaaattatgctacccacatattggtatataagatagcaatatttgcttctccccagatcttatcaccgaaaaattt

SEQ ID NO: 17473 - DNA, 423 bp, Oryza sativa
  unsure (1)..(423): unsure at all n locations
agcttccccaaacaagacctaagatagcttgcttctttgcatgtgaagatgggaagcaaganaacaaagagaaattcttggtcgggcatagccttcgatacgagttaaagggaagaggatttttgtcaatatgaaacaaatattgcgcggattaagaatgcaagtgggtaaacccaaatccgcttatagacaaaattaatagataacccacgggttacctactaatttgatctataaataggtttatgaatcgatccacttgcatctctaggtgcagcaaaccagaccacgatgcggaaacccgtgggttaccacttatttgacagataagtatgttcgcgggtcgatccacttgcatccctagtgtggactanagggtccacctggtgtctgaatatacccatttctaaattccattgcaac

SEQ ID NO: 17474 - DNA, 185 bp, Oryza sativa
  unsure (1)..(185): unsure at all n locations
gctggctcgacntaccaacaggccatgacaaacttcgttttattgtgccacacaggttggaatactctattcagcggtgcttatcatgcaatcttagtgtgagctatggtcttgcatagtgagcaacattgttctcaacaatgacgtaacctatatattactatcctctcaaatacacctattta

SEQ ID NO: 17475 - DNA, 411 bp, Oryza sativa
agcttcatcgtcttcaaataaagataattgatggtattatttacctcctggaacagagccgaatcctaggtggatgcctaaagatttgacggctactcaaaagagaaggttgcaacgtcttcgggcccaagagctaagagagaaaagggccaaagagcaaagggataaaatgtttaatgagttgcgaccaccaccggtatggatgcctaaatccatagagaaggcataacccattgatgtagaggagaaggaagaacaatcggttgataaaggtgaattgtctccaaaagaagacatggatatcaacatggtatgtatgttgcttatggagttttgtgctatggatgaagccgaggttgctcaattctcattatgtcctaaagacgccggttttgagaagcccgatgagtc

SEQ ID NO: 17476 - DNA, 409 bp, Oryza sativa
agctagcatacttctctctcccttatgtatatatatatttgggtaagacttgcgagtacaatcttgtacttaacccggtgtctgcaatttcaagagaggattccggttatgagttatgcttcttgtgtgggcattgctctgctgagggtggcgagggcaatgagtgatctcttgcagcttggctcttgcccggttggtttgccctagtggggttgtggcaccaccgattttatcttttgcctatgaactctaattgagacttctgctgctatatttatgtgttgtatgttgggatcttggaccctattatgtgtcatgtacctgctgcactttaaccctattataggacttgctatgtttattaattgcttgcgatgaaagtgtgaagctaggcgcatttctacggact

SEQ ID NO: 17477 - DNA, 198 bp, Oryza sativa
gttccttgcctgccttatcttattagtgctttttgcttctgtgatctcctctcagactgctgagctgctggatataccacgttgcttgatgtgggggagtagacactcgctgatggacaccgatgaacacctgttactgcaagatcttggtctcatgaagcatctgtggaagctgaattccaacaagctctgttgaga

SEQ ID NO: 17478 - DNA, 380 bp, Oryza sativa
  unsure (1)..(380): unsure at all n locations
agcttgcaagcaactcctttatgtttgatttcttttgcggcggngatgactcggggactgaggaagagcaagctgcttttatgaaagaacttgagcggctctacagggagaagcttatggaattcaagcccccgaagttctatggtgaagggttgaattgcctcaagttagtacaatgaccctcttgtctgtatgttagaatctgttatgtgctatggacatgaactaatcttatcttgattgtaattttctttataggttgtggagacaagtgactgggttgggtggctatgatcaagtactcattntgatgccttattgaataatatctgaccatctggcgcatagtgtcttttggattacttgcttgctattatgca

SEQ ID NO: 17479 - DNA, 148 bp, Oryza sativa
  unsure (1)..(148): unsure at all n locations
aggtttgaaaaaattatcccattccttgacgctcttcttataactgaggggcgtagtnacgaggcttcaacgtgctgatggtcgccttaataccttgggagcttggtcaaatgttcacgtgaacggattgtgggactaaatttggaag

SEQ ID NO: 17480 - DNA, 384 bp, Oryza sativa
  unsure (1)..(384): unsure at all n locations
agcccaacaggaagataggtggctcttgtttttactttaatgcatgttagctatattataaatgggtacatcttctttctattgcaacacatgatatgacatgctatatgtatgataagctcttatacattaatgaacataacttctatgcttgatgaaatcatngtcacaaaggggagaagtaatgcgaaatttttggagaaacaaatgatttgacaagagctcgtcgatagcgaaattatctttttttcaaaagagagaaaagttttcttttgaatttttgagcacgatgtgtaacatttgtacgaagtgagctntttaccacttttgttttatgtttcccaacaccaatacatcttgatgggcttgccaatgtgctcatca

SEQ ID NO: 17481 - DNA, 213 bp, Oryza sativa
tgaacggatgctgtgactcaacaacggtatggctgagctcgccatattattttgcggaaaagtattttaagtagatgcttctctttttaacacgggtctaggtatgaaggatcttatcatgtatagtgtaccctgcccgcgttgctattgtctatacagggataattgtatataggagccaattttcttctgtctctacctgcgtgacgagat

SEQ ID NO: 17482 - DNA, 432 bp, Oryza sativa
agcttattgagttttgcggacgtcaccgtctttctgtatccacggggacgtacattagtacatatgctaatttcgaaaaataaaagtacgtattttttttatagaagcacatatgccagcatgacgtcaaaaccccttctctctctgtaaagcagctagctgtcccagagtacccaactgcattttttttttactaatcacttctactttcgatattcccttactcccctccattttcttcggcttgttgatactccctccgggttgataatacttactttctatgtttcacaatgtaagtcattttaacatttgtcacatttatattgatattaatgaatctagatagatatatatgtctagatttattaacatcaatatgtatatgggaaatgctcaaatgaattacattgtgaaacggagagagtatta

SEQ ID NO: 17483 - DNA, 255 bp, Oryza sativa
  unsure (1)..(255): unsure at all n locations
atactccggcgtagtgcgatctcttaattctagacaactcatgatgctggttcaagacaaagaatgtctgggtaatgcattagattctgatacgtgaaaatgtgcgtgtacttctttctgtgattttgaagctacatcctgttgagtaacaactgacttacatgatcgaaatgcngcttaatcntcttgtttaatggtgatgttttttcaccattttacttcatataaacatggacaaaatcgatctatctaaat

SEQ ID NO: 17484 - DNA, 419 bp, Oryza sativa
ggatcttaagtcgacctgaggctgcaagctagtgtggacagtgcagtttatgtttctgccagccagtaacacgtgcaagctaatagccactactctctgagtcacctttttcttaatctaaatttatgatctgtcgatcgaacaagtgcgcattgccgcattggtaatttgatatggctcttatatgtgcgaaatacgtccattgggcgtgtcccgatccgccgtcaaacaacagagcgtacccacggacttatgcaccgtcgcaccgaccaactagctctccgcaagctgtgttcgatcggtattactcgctctgtgttacaatatggcggatgtatcttattgacataacttccaataacatattctaaatatcaaatatttcatagtatatctcactaatgtagattaaccttcaa

SEQ ID NO: 17485 - DNA, 408 bp, Oryza sativa
  unsure (1)..(408): unsure at all n locations
agcttgaagaccatggcttgagttctcactttttgttgntagtttccaaatccaacgcatgaaagattgatcctcttccgttagtgattattgaatccagctcaaacaccaccttataaaggaactgtacactgataatgagctcgtcaagattgccctgatgagagaagaaagacagggctgggacagatggagagaacgttgcctcaaagtgagaccaggtataaacttagccggtccaaaatgaaaactttctcttatccttagccaaacttgcaaaacaggtaaaaacaagtgatccaatgttcaatgcactctcttttaanaatataaaattctatttgaatttttttaatcttgatatgtgtatcatgtagcttatcaacgtgagcgcgtgagccaacttaa

SEQ ID NO: 17486 - DNA, 317 bp, Oryza sativa
ccatacatgggcaggcacagtgtctgatcacagcctaagataccatgtgtgacaacgcagcttgtcgacaagcgcttgaaacctttttgtaagcctaagctgtggtggtacaccctctggaatctccatggtgagccctatgtggcttcttgctgtcatgatcgatgtcacagctcccatgcatatcatgctcatcttttcattaaatatatactgcagatgtatagagcacaacataacttgcaagaccatacagcgataactgtcttttttgttttattcgcaagcgaactcttgctgcatgctcatggcgatac

SEQ ID NO: 17487 - DNA, 230 bp, Oryza sativa
  unsure (1)..(230): unsure at all n locations
gcaaccaaaacttatttacatgctcgtcattgttgtcttgattntttataagcacgaatacagnctctacaacctattgtgacagccaggagcctcacacaacatgatattgcattttgcagcaacaacctattgagattatgcaatattgctatctgtcacaggttagctcatagattattatcattattattattatcattatgattattagtattaccatgattatg

SEQ ID NO: 17488 - DNA, 290 bp, Oryza sativa
  unsure (1)..(290): unsure at all n locations
cgcgcaaacggtcgcgtcgcacccgattctcagcagcaccaccaccggtctccatttcctccccagaatttctcgttcctcagcccccacccgcctgtaaaaagcggccgcggcggcagtagggtttcggattcccaccccgcgtgcagcttaagcgaaccctcctccctccgttccacacgccccaagtccccgctctctcccactcacctcctcaaccttcttctccgntggcgncgcccgctnncgcatgggcagggggaagttcaagggcaagcccaccggccgcc

SEQ ID NO: 17489 - DNA, 410 bp, Oryza sativa
atactaagctgaacacatcaggggcattgctgatgctccaaatgtcttcgtatacgataaattgaattcataaaactatatccttctaaaatatatgaatttttaccttggatatgggtattaagaatgtatgtggatttaaatgtggaatgttgtgattgtttaagaaaatgaagtaagtggagaatttcaatggtgaaaggttatggttggttaggaataaaatattggtgaagaatggatatatctcacgatcaatgttacatgatagatgtcattatatttcatagtctaaggagtaccattttaaaactatgagatggctattgcgcttctttatatcttcttctcttactataccaggtgtatgacaggcccctgcatgtcatggtgctagcttaattaaaaaa

SEQ ID NO: 17490 - DNA, 365 bp, Oryza sativa
tgggggggcttgtttatttcatgtagtacaagcatccttagatgttctatttaaaaatcgtacatggttttcaaattcattttatttttaaatatggatggtgttttaaaattattgtatttttaaatatggaaggaacaaaataatgtatgcacgatttataggttaggtttttaaatctattatatttttaaatatggaaagaacaaaattatgtatgtgggatctatagattaatagtcggtatagatctacatatttcagtttttttataccctctattatgctacataattatgtatgcagtattgttcctcataggaaaaaacaataaaaatgggaagtaacgggattcgaacccttga

SEQ ID NO: 17491 - DNA, 468 bp, Oryza sativa
  unsure (1)..(468): unsure at all n locations
catacatcacatgatgaattatttctaagactgggcatcttnaaagcgtgtatgacgaactggcaaagtggcactcgcttcttttctttctgcttactggtcacaggcgctgttccagtctttggttttagctcgatgatntaatgacaatgtccgtctactcatcttggatgcaatcacgtaattagttctcagcaaccattgatagaattcctaccttgtggtgagtaaccaaccaagtatcatccatttattagtggtctcacgttaatagaaaccggataaatattggtagtactgtcacacagtcaccaactcaccaaccaaacgaaatggaaatatctctatactagtactaaagcaatagcattatagcattaacataagaagtctaccatttgtcgcaccattaaagaagtccatttcatgactccaggacatgcgtacagcactagatcgtgtgaagct

SEQ ID NO: 17492 - DNA, 431 bp, Oryza sativa
  unsure (1)..(431): unsure at all n locations
agctttttctgaannatgattcaggtaacgatttcttattattaaatgctaactaatcatgcataataaaacaaaacacacatgttaaacaataatttgagttgtattcgaaaaaagatggtggtatgcacaaaatatataatagggctgtgtgtgactatgaggtagagcaaagagaggtgattggataactaataaatgattgaattggatgaataagtaagttcttgatcctaatggtgttatgtttgtactaatgtgatttgatggtttaaaattgttgatgatatggcttcttgcatgtcttgctttataggagtaaataccccttagtgggtaccaactatataggaagatacgattgggtgggttatctacttatgcacatctaacctacactaattgaatagacaagtaatcatgagctatta

SEQ ID NO: 17493 - DNA, 490 bp, Oryza sativa
  unsure (1)..(490): unsure at all n locations
ctgtataggttgaaacttgtgctgtcttttcaataatcgtgtttatgccttccgctcacttttaatgaatttgagattcttgataatatttgttctccatgtgtgatcatctaagtatatacttgttcttaggtgcaaatctcaaaacgttattgaggatatatgaagtagtggatgttgaatgaccttctcaatggatttaaatgcctcaccattgcctgaggaagatgaacagccttatgaacaacaggtcgaggttgattttgcacaggaggagcatgttgagtctgctgttgctacaatgcgaagggtactacatgacactcatcctgcatttaccttttggttccatctagaagggtcctaatgatagctgattatntattactgaaatgcaaactgtacattntatcttcagcangttctcttagttaatatcgttagatgatgggaaacaactcggaagtttgtaatggtggtttacatatgt

SEQ ID NO: 17494 - DNA, 473 bp, Oryza sativa
  unsure (1)..(473): unsure at all n locations
ctaagcttcagccttcactgcagaatgtgtaaaggtgcaagcgtgttctgttgtttgcacatgtgagatctgtctatagcggtataatagcctaattgtgtatatatgttagccctgaagcgtgtagatttcctcacccaatacctcggtcgccttggcgcgcanatctttctctaattaaaaggctgttcttagtaatgggaaatggaaaggaaatcttgagtgatgctggaatgctgggtgctccctttttccttcattgagttcagctggtgatggcatactcgtttctgtcatctggcagagaaggcactactgccccaagtgacccatggtatatccagaaacagaatgctccatcagtccatctgatgagatatgtgtgaagaggttttaactgaactgattatagtgctgtgaagcggcttagcactatgtaacatatgttgtatgcaccatgtatcatgtatgat

SEQ ID NO: 17495 - DNA, 432 bp, Oryza sativa
  unsure (1)..(432): unsure at all n locations
gcttgtgaaaacctatctggaaaaaatattcttttgcccaagagatggagatagaatcttcagataaaaacaatggcaagccacaggctgatctcgtcatgctgccgacttggcaatctgtggattcttcaaattgaggacaagataaaaaggaagcttttttttttaatctataattccctgtagtttgtggctcacgcattgctctgacttatacggcacanatttgattagaaatcgttttcataccgagtgaggtggcttgtgtagacggctccataggatgctnttacttcttttttttttcttctcttatctccagctgtctgaatacaaatatactcaaagttgagagtataatctcataattactctaacatatgagttagctntattccacaaatacttaaagattagaggaaatacatgaag

SEQ ID NO: 17496 - DNA, 444 bp, Oryza sativa
  unsure (1)..(444): unsure at all n locations
ctcagctttcctgttagnccatgaccgagacaagcaaggtgctttatctctctccgagcgttagcggcgacgacggngagccaaacccacgccgtcgagctcgtactccaccgccccctccacgccaaagtcctatgcgggaggaggcgctcgagagggtcgaaggatccgcgacttcgacatccacgggtgatggagaagggcgccgagatggggagcatcttctcctcgtctacggcgacggcagcacgccccatggcgcgctccaagctgcgggcgcgctcctgcgtcacccgcccgtcgtccctgacccggagtcttcagcccaacgatggctggacgacgtggtcaattaggtcatgacagcgcggcagcgcctatatgctggtgggctgtcctgcgccaccaatgcctctggtgctgctaccacccgctccgcgtcat

SEQ ID NO: 17497 - DNA, 418 bp, Oryza sativa
  unsure (1)..(418): unsure at all n locations
agcttggtgatgccatctgcgtgggagattatgtgcctatgaagtgttcgatgaaatgtactgagagtgacaataagccactgatggaacaccccaagagaaacccatggccacctgcctggtcaggatggaagaagtgatatatgacctggactacaatcaatcatcatgggatgagattctatttcgtcccaccctggcctccaccaagtctagtaagttctttggcatgggtgcatttttgtgttggagctcttatacttcaaagggtggttttatcaaatgaaatggttgagttggagccctggcctccaccacatgaagcaagtttcagaattttgcctttccaaactagtagcaggaaatgttgcaattatgtcactgctntgagtataattgcatgggatgagaagaggac

SEQ ID NO: 17498 - DNA, 446 bp, Oryza sativa
  unsure (1)..(446): unsure at all n locations
actgtgctgtccaatcactcctcagacgaagtctttctccattgtaagattcatcgctgcattgagaagcaatagcttgaatatgacttactgttgctgtagccgtctgaagaaactgaacaagaatcacattttcgttgcagctgccgtcgtctcctggcgcattcatgttggaacagagttgctgaagcttgtacttgatggattgccacttgactgggaactgaacaatcgaataagccattgatgctgaagccgatgcctttaaaatttgcagcttctcactgcattctgctaccttcattcctgcactcctgttgngatcaaaactggttcttggagttggagacatggaattgaagatatgcagatagtagtttttctggttagtaaatgataatgataagggtcttatagctctagtggtctgcaatgtatatgcaaag

SEQ ID NO: 17499 - DNA, 316 bp, Oryza sativa
agcttgggaattgatcgaagttcgtggctcttatgatatatccgaagacattaactcttagcacaattcgcaatccgttcatttgcttcgcgattgtgaagtctatttccgaatggaaacgatgtgtccaccgtgaccgagttactttgaaagtagagagataatttcctgacggtgattaatacaccatataataacttttgaacctgatgatatcttgtcttggagtcggctaaaactgcgcttactaaataaattggacggtggactattttaatatggccttcctcttcatgcgtgacaaccaagaccgtac

SEQ ID NO: 17500 - DNA, 369 bp, Oryza sativa
  unsure (1)..(369): unsure at all n locations
tggggaggatcggaacaacgagcgagtcttgtgctgggcttaacactacatgcaacatagctactggatgttcatcatcaatactacgtaccatgtatttgtaccaataaagtgaattaaaatcatcttaaattataataaacttggcaatgataataagagtgatgacatgaaatgtaaaactaacacactacttantatggatggcgacaagtaagaagagcctatacatgaggctgagatgccgacgggattgtgccaacatcgagcctaccggctgggatcctgactccgacgcaccacccaccaacatatgagttgtatactcaggactcactatgagtagtatatatacagtacatgagtctc

SEQ ID NO: 17501 - DNA, 378 bp, Oryza sativa
  unsure (1)..(378): unsure at all n locations
taatcctctttaattcgggtctgacgaatcttcccatttttatggttgtattctttgaaataccttgggggcaccgcanagactcgacttctacagatcacactttttttgtgagtagtgacaatcaaaagataaatatatattgatgaaagtggacttggtgtccaaaaccttgatatcaaaaatagatgttttctaaccaaatgcctattccagctagtcaacggtgaaagcctatggcaggacctcttgcaaacaaatatttgaagggaaaacctctcacccaaatatctcatatacctgggatatcccaattttgggctggtttaaagcgaataacagccccggtttttcgttttggtctttttacacaacaat

SEQ ID NO: 17502 - DNA, 486 bp, Oryza sativa
  unsure (1)..(486): unsure at all n locations
actcagcttattcccgataagttggtttgaccgagatgaagtgtgttactattgtcaacctatcaaccactacccatatagaatcatgtcctgccgacggtctgggtagaccggctataaaatccattcctatttcttcccacttccactgtggaatcttcaacggttgtaacaaaccggctggcttctgatgttctgccttgactcgctgacatacatcacatagagccacatattctgctatctcacgtcgcatactggcccaccagaattgttgctttaagtcttgatacatcttagtgcttccagggtgaatggaatacaaagattcatgtgcttctctcatgatagtatacttcaacttcttattctctgggacgcagattctttctcctaaccacacagttccgtgctcatcttctacataaccgatggctnttccttctctcatgttcttctctatntcttggatatcaagatcattca

SEQ ID NO: 17503 - DNA, 356 bp, Oryza sativa
agactccggagcttacaaaggggagaaaatacatttcctgacatcaatggctggtaaaagatagtggaagttgtgttttttatttaaggtttgttctggtctaacaaatggtacaccagatacgtacctagaggtaccaaatcaattatgatagtccgtttatgatgggcaggatgggtagcgaccttgtaacaaaagagagaatatatgctgctcatttattttcctccacgtgtcatgtgaggtccgtgcagcaccgaagtcctttccccacctcatctctctctctctcagcggcgcatatatctcacagcggcaccggaccgcaacatctccccacctgcgctatttgtcgt

SEQ ID NO: 17504 - DNA, 410 bp, Oryza sativa
  unsure (1)..(410): unsure at all n locations
gttcatatcaaatgggacactatatgatcttctccataggaatctgcaaagcaaatgtgtattaacatggtggaatcgcatcataattgcccttgaagctgcaagcgctcttgcctatctccattgtgctgcctcggtaccaatatttcataaagatgtgaaatctgccaatatacttctcgatgataatttcactacaaaggtttcagattttggtgcttcaagatctgtttctattgatgaaactcacgtggtcacaatagtgcaaggtacatntggatacttggatcctgaatattatcatacaggacaattaaatgagaagagggacgttcacagatttggtgtaatacttattgagcttataacaaagaagaagccaatcttgctcaattcaattggagaaaagc

SEQ ID NO: 17505 - DNA, 426 bp, Oryza sativa
  unsure (1)..(426): unsure at all n locations
agctnttttggcttatatgagatagatgtattatttcaccactaaacttaggacattaaatccactggcttataaatcatataagccaataagctgacttaaaagtctaggccaataagcctaagcctaaacaaagagggccgtagtgtgattgcataattccctaggtcatgtgttaacttgaactttgtatcacagtgtggagatatattcgttttgatgtatagatcatgatatggtaatctgtgtgccttttctgtctgaaccatattgaatatcccctgtgtcccaaaatataagcatttctggagttctgcatggtgattaaggaagtatgtggaattaaatgggagatggttctcatttgttgagatgaggaccttgctgtcatcccagtctcagctggagaaattaaacggtagatgg

SEQ ID NO: 17506 - DNA, 318 bp, Oryza sativa
  unsure (1)..(318): unsure at all n locations
cagagctccactaaccaaaatctcgcgccattagcttcgcctcgacgaggtgaatccatttttccccttgtccctctccctccaccttgagataaaccgacaccaccaccttctcttatagccggagctgagcttntggcgccgcccgtccggccatctccctcttcaccttgactagctaccaccctccccggatgcgcgtcgctcgggaacatggtttgccgccgacgtcgccgcctttcgaccaccgagaagccgacgccccgctggcctctcctctctcttctctcggctcactgagaggcagagaaagaagag

SEQ ID NO: 17507 - DNA, 484 bp, Oryza sativa
  unsure (1)..(484): unsure at all n locations
acgcgtctcatgtgtagagacaaggctcatgttttgttctgtctcagagngtgggtaaagtgtacatccactgcagtgtgagtaaaccatatctattcgaatagccgtgcttgcggttattgagcatcgggacatgtattacacttggctagactttaaattcttaacttgtgtgggatgggttattgcatgatgaatatttatggtggacgtcctcagaaaaccatgacgactcaatggcgggaagctatccttgtgatcacaatggatggtggacagaaccgtcgctgtttaaatacaaacactggtactagaaattgatcagtcaatgctaggtcttaagcttgtgaaaagaattacaaaattngccttgcgcataagaaccatagccatcccntgaaatacccctatcatatgcattgtcgatgtggtggcttgctgagtacggatggtactcacccttgcaaatataaacttaatcaga

SEQ ID NO: 17508 - DNA, 375 bp, Oryza sativa
  unsure (1)..(375): unsure at all n locations
cctggagtacaaccgatgccatgtgaggtgccagatttccgactacctaatgaaagaacaagagaacctaccgaaggggtgggtttttttcgacgatgtctgaccacagaagaaaatttctcccctttttcccaacgttgccgccgctcgatgtggcagcggcagcagcagcgtcagatgcctcctgngcgactttctccttcagcgacgccaccacctgatggtccacaagcggcccgatgatatcagtcagagggagagcctacgcttcatgaaggcatattgtgatcccggaagaataatgcacattgaccactgagtacacttacattgatggcagcatcgcgctcggctgcccctttctcgcaaggggga

SEQ ID NO: 17509 - DNA, 476 bp, Oryza sativa
  unsure (1)..(476): unsure at all n locations
ctaagctataattccaccatatctaaaagcattatactatttttatatggcctcaagtttgctcagaaatatgcatcaattaccatcatttgcctgaaggggataaaagaggaaatcctaacatgaaaagagcaagtgcagatnatctgttcttatgcataaaacaaagaacaacgtgtagatactctggtcttatccacacagaacaagtgtagaggtatataaccactgaatcaatcatgccaatttaaaaaacagcagcaagggtacagatagaatgttattgacatataacagtagcagcaggagtatatatgccacaggggtagcaacagcatggggaaattcacataaacagcagggtgaaaaagatgccacagtaagaccaatagcagggcanatatagtccacatgggcagcaacaacaggtgcaaattaactaanacaacatgtctagatagtcttctcttatcaat

SEQ ID NO: 17510 - DNA, 428 bp, Oryza sativa
  unsure (1)..(428): unsure at all n locations
agcttgggtgctctattctagattatacctggtattgtttccaacattcattccaagctgggattcgatcattcatttcttgggccgtacgaagggcagtcgcctgcctacccctccttcgcatgtggtcttgtaaatcaggagatagatcgttagctaatccctgcttaaaataattctgcatgtacctagggaacgtgtcctccacaagctatttttttaaagagaatntagtccttcacgtttggttattaccttgttaattcatccgtccatcttatttaaagtgtagttatggttttccatgttcaacgtttgaccgcttatattatttaaaatttctctgtgatntagcattttctctattagattataaaatnaaaatattattctatacgtaatttatttttaaaatttttaataagacg

SEQ ID NO: 17511 - DNA, 481 bp, Oryza sativa
  unsure (1)..(481): unsure at all n locations
cgngtagcatatttgcttcaagtgagccatatggcgtcattgtttccttgagctctggtagaattaacatttttatcatcttatattacattggctgcttagtcgcagagaactattaaatccctgagtcaaagtcaaagaattgttgtggtgttgcgcaactccagcctgtattggtattagctgcgaaacagcgttctattagttctattgaagtactatgccctttctaccataactttcaagtttcaacactggtgtagttgtagaccttcctatgtcttttggtgggaggtgtctaactactatcatatacttatagntgttgccttctatacatcgatcatcatcttgttgtgatacaacatgttcagagtcttgacttacaattaatataatgcttttaagtatggtctccctacctcttgcatgttaaataaatattggtgactgtattcatgtattatgctgtatctatact

SEQ ID NO: 17512 - DNA, 342 bp, Oryza sativa
cctagtgcccacgtggcgctcttctattgtgtgtcgggcccatgaataagtggccgtcatctcctgtaagcccgattggttgtgttgtcccgacccctccccaatgtcgccacgtggatggggttaagtgaactacaatcaaataacattaatctcttgtttatatatatacttattctatacattatattaatatattattagattacaaaatttttatattcctttcatttatttagatttcactacaatttattttatttaaggttttcttactatctttttgaaagtctatactgattccacgtcaaatatattacgtcctatttatctctgattctc

SEQ ID NO: 17513 - DNA, 425 bp, Oryza sativa
  unsure (1)..(425): unsure at all n locations
ggttacgctctagagacatctttttttacactaaacagggntccatcaaaatcagtggataagacaccatatgagatatggacagacaagcgtcccaatttgtctttcctaaagatttggggctgtgaggtctatgtaaaacgtttgcaatcgaacaaactcacacctaaatcagataaatgcttctttgtggggtatcccaaggaaacggaaggatattatttttataattgggaagagggcaaagtgtttgtcgcctgacacggtgttttcttggaaaaagagtttatttcaagaaaggttagtgggagcatggtttgacttgaagaaattcaggatacaccgganaacgcttcaacgtccacacaaccacaacaagctgagcaagatgttgttcaacaggttgaacaagttgttgttgaacc

SEQ ID NO: 17514 - DNA, 441 bp, Oryza sativa
  unsure (1)..(441): unsure at all n locations
ccgttcaacatctgatgacaatggattagtaagaaaaatcaaatgattcttgaatggcaaaaaaatgtataaatatgactatcctattcgacataggcaggcaatgtgactaacactttcccatctcagtagcctccgtatagtgcagcagtcacaattattattatagatnttggaaatcggcagacctaatattaaatggatgtaaagacaataatttaatcagatccaaacactttcgatgagaggtaataccttactcatgattgaggaagtccgatagtatccatcggttgtatattgatctaacgatttgatagtgcttatctcgctatatgttcttggagggctccctatccaccttatataggtaggggatagggttacaaagagaatcgaaaacctaatcggatntggtattagttgtaatctatatatgat

SEQ ID NO: 17515 - DNA, 376 bp, Oryza sativa
  unsure (1)..(376): unsure at all n locations
gctgtctggtcaattctggattgtcgtggctcgagaattttgtagataatggatagaaattcggcatctgtagactgtagtcactgttctaggttcctattaagatcattgcttgttagtattgttactacatgaaaatcggtgtgatcgaggctatatatctttcatcttctgaatctttaaggacagcattactggtgtgatgtgagtgcctgagtgagtgagagtgagagtgtgtcctaattgcggactgaacacataaagaatttgcacaagataacaatcgtnttctccatattgcatcacgatatcacatcactaattcactatttgttggtggtttgactacgcactcgcaacaccacgtagctagcta

SEQ ID NO: 17516 - DNA, 454 bp, Oryza sativa
  unsure (1)..(454): unsure at all n locations
tggatctagaattctagatcaacgtgttataatatttctatgttgtccggcagtttccgcgtccatgtgatgtgatcattcccgtgcaatgcaactttcagttgttttaggggcgcatccaaagttccataacaatttatgcaagagtatataacagtatatccggagaaatcttatggcaatatgactaaaaaagttataaagttggttcagtatcaggttattatttttttcgttttatattaagtcaaactcttttaagtttaactataggtttataaaaaacatagtagtattttcagcacataacaaatatattattaaaatttattcaatattagatttaacgaaactaatttagtggtttagatgttattaaatgtggttatgaacttgatcaaaattaaatagttttaanaaatcacagcaacttattgaatatgaaatagagcga

SEQ ID NO: 17517 - DNA, 430 bp, Oryza sativa
agcttcacaaaatgcaccaatgttcagttattattgccaacctccttttagctaaagggaaagacacctttgaatcttaaggagaaaagagagtttgttaccctagacaatcacgatcttaaaacagaaagataacagagaatcacaagaaagcgagatcagcgcaacggcatgtacaatggttgttaatagcggactcttggcgttgttaattaggaatattcgttgacatgaaagagcgaaagatgagagacaaaacatcggtgctatgggtaacaacagctcaacaacgactcttagcctatataatatggaaacatggttgcatgagggtgaacaaatggaaagaatagtaataagaagaatatttttgagtaagatcattttcgtctcaactaatgtaaaaacatggtctctaaataatcttgta

SEQ ID NO: 17518 - DNA, 491 bp, Oryza sativa
ctcagcttatgaacacgccttgtaagttgcatgaacgtttttcatggagattgcgactatctattcattataagctcttagatcatggagattaggactaattgttatgtgccacgcttagattctgagataatgtgaagaaatattcttgggataacatagtctatcttatataaggcatctgttacagacagtgaggacagcattgtggaccaagcaagattgtggggacataacccgtgtgagtgcatactagattcccagtttgaaggaaagggcacacttttgtctaggtttccttcctgatataccttgattgtgttattttctggtgcttgaaagtgattggtgattagtgtgtacgaccaattcaacatatcctattgcacctcacttgtattatcttattgacaagtatagacaaaccctgagataaaaaagggttcatcatatagacatgatatgaactcgagaagaaatgaaggtagttg

SEQ ID NO: 17519 - DNA, 429 bp, Oryza sativa
agcttagctccggtggcgagtttacaactgttgtttggctaatggtcgaacacatataccaaacaaaaaaaaaaaaccaaaaagtgagacatgggctgatggtgatggtgatcggtttctctttctactactattgttctgtgcatatatgtaacgtacctaagaatgtaaaatcctgaaagttaatataatgaaataatggtcatagaaccttctgtatttggatttctttactttttttggattttccatgtactttacttcctccatcccaaattataattatagggcatagttttttttaaagaaaatcaaactcagtaacttttgactaataatcataccaaccatatatatgctatgtattatgcacgttgtgttaatatattcatattttaaagtggtttcatgttatgctaattctatatt

SEQ ID NO: 17520 - DNA, 337 bp, Oryza sativa
  unsure (1)..(337): unsure at all n locations
agagttactcctcagaacaaaacttaatcatgctttgcggtgccaatgcctcccaagttgcaagagctctccaacgagtgaactcaatgtattgcaggataagaaccgctgaaagcagaggtataataggttgtattccattgccactcattnccaatttcgatgaactggtcaggatgcaaagaatgaagatatgcgtttcaaggaaatgtctganagacaaagcattgattctaatgcaatgttggatgcaaactagtagttatatagatgcagtangaagtccaagctgacaataatgtgtgaaggcaggctgggaggataaaanaaaatcctg

SEQ ID NO: 17521 - DNA, 435 bp, Oryza sativa
accaagatacgagcctagaacagaacctgatctattatttgttataccatgttcatccgtctctacaattacctttccttgcttcagttggtccaagttttttacattaaaatttcctagaacctgtcgtacctccccatttggccctacatttatgaacagttcagctatgggtgataggaaaaatcatatatatagacatatataggaagaaaatatgaaacttacagattatattaattggtcttttggctgcaagaggcaactccgtgattatgtcatcattctctgaaaggtcttgctcactatcttctgtgggttgtacattccctgcatcttgagcttcgagatgcatattatcgtcattgaattgtgcatctgcttcatctagagcttcaaagttgtacagcaaagtttcttcttcatcttgcacat

SEQ ID NO: 17522 - DNA, 68 bp, Oryza sativa
agcttggagctcattcaaagaagatcattgttgtgggaggggggcgactcctataccacatcgacaaa

SEQ ID NO: 17523 - DNA, 477 bp, Oryza sativa
tacctggacagcaatgtacaagatgcagcacatgaatgttctttcatttcatcagaatcattcatatattggcattctctgcccatgcaatcaacaaattctcctatttctgtgcttacgctatataaataacacgtttatcttgatgggttgcatgaatttatctattgtggcaagcacagttgctagagttccataaacaacacgattgctccaagtggaaatatgaagtgtgattctgtatatcataatgtctttttgctggacacaatctcttgggtagcaagcctgtatattgcacgtcattgcaattgtgaatatcttatggatacatgcatatgttgtatccttgagccacatgatatgcagttatccaagcacatctatacacactttgtcatgtgatgctcatgtgcagtattccagtttctgcacaactggctgattgctgcctatacatgccctgctctattttct

SEQ ID NO: 17524 - DNA, 294 bp, Oryza sativa
tgccgtaacgaaccaaacacataccttagaaattgtggcataactaaagaggggcgtagtaaagtgtggcaaacaaccaaacagcccccgagtccagatcggctgtccccaaagtggaaaacagcgcgacgcaccatggggaagaagtgacggcagcagcggcaacggccgcgaaaccatgtttgcgagattggatttgcttgactatggcttggatattcttgaagttcttatgcttgctatatgctgagaaagaatgtgtctaaatcgtgccatcttatctctccttttttt

SEQ ID NO: 17525 - DNA, 135 bp, Oryza sativa
  unsure (1)..(135): unsure at all n locations
tgctcgggctggaggatgaanaagacatatatatatatatatgtgttgtactttannccctgctggtgttatgaaacggtgctaaagatcgccgggatctttattcccgggtgtgtacaccaaccgggactatag

SEQ ID NO: 17526 - DNA, 350 bp, Oryza sativa
  unsure (1)..(350): unsure at all n locations
tatgacnaaatcatgcttaatttaaaacaatctctgccaaatgtgcttcttcttctacatgtagttacactccggaacacttggaggatcttctctctttcttatccctgggcctgaatgctaattagatcaaattcatgccaactaaattattataagatatattcgagagtaacattaataaaagtcatacttttctccaacaaagttgatgaagttaacattctggacaccctttaaatactaacggtgtgttcgtcgaaaactttcaatgaacgtgcctaaaatcatataacaaattcaagttgaatattaaaatgaatatctactaacaccttcttatgctaaaa

SEQ ID NO: 17527 - DNA, 410 bp, Oryza sativa
ttggaacatcattattattgtgtttgcaacttgcattattagagtcacacacatattacatgcttggcctccggttgcgtgccataccgacggacctacgcagtagtcgcacctattcctggaagctgtactaccctgaatccttgtcgctccaaccttgtggtactttggtatccgtgctctttgatcgtgtataccaattgtctcacatacacacgtgattagcgaacaattgggaaatgggtttgtgaagccttcaaaacccgacatgtggagtcggtgtgtgtaaaataaaatgaatcgtgaagactctcgatgctgtggtggtgcctgcgtggcgctgtcacgtattttcatatattgaccgatttctgtgggaatctcatcaagcattatcaaagtgcaaccac

SEQ ID NO: 17528 - DNA, 490 bp, Oryza sativa
  unsure (1)..(490): unsure at all n locations
catagcncatnatactggctcttagtagagtcgagttgttttatgntggccagggccggccctagccctatgcagccgaggcgaccgtcgggggcccatgatggtgggggcccatgatagtggggagccaatacctaatactaatagtctaagacctgactatggcctatctgaaagcagaaacgctgaaacgagaggagttggagcatcatcgcctcgtcgcccgatcttggatactatcgatcttaataccgctatcgatgaatttgcattaagagatactcgaagaagtatcttttcattagaaacaatggatatgacggtgttctttccttcatcaatgtaatgggattagttccaaggtataaatatattgttattttggttgattctatctctcgataaataccagatatgttaaagttaatatatagatgtatctgctttcgtgtacaagaatatcagcgccatatatatataaatatatata

SEQ ID NO: 17529 - DNA, 465 bp, Oryza sativa
  unsure (1)..(465): unsure at all n locations
tctaactgctttgctccataccatcagcgtatgtaacagttttttttttcagagcatttatacgggtatgtaaaaagtcgcgcaaagcgcgactaatatggctagtatatttgaataagcattattggactgtaagttttgtgtgttctcatttccagactcgtttggttaagggatagagactgaacacaacgaatatatatggatagtcaaagaagttgattatggctaaaccaagatcttgcccaagtctactccaatattaccacgtcattttttatccatagaatgtaagagaattaagtgattttttgtccatagaaggtaagagattaagttatgcatatactggattangattatgtactcctgacagcattacccttaaactgacatagctgctaatccagaagaacttctgtaccataagtatttgtcgaaagcttattgatctactttatatgc

SEQ ID NO: 17530 - DNA, 150 bp, Oryza sativa
tgcaacggaatctctcgtgggacgtggctcgtggctcgtctgctacctactgtatcttttgagcaatccctttattttctcgcatggacactgaaatgggacttcctgaatacctgatactccgagtatgagcctaaactctaattaaag

SEQ ID NO: 17531 - DNA, 503 bp, Oryza sativa
  unsure (1)..(503): unsure at all n locations
actataaanactcaagctcgtcgcatcttacacagaatgtcaccttgcatgaactgatgtttgctgaggctacgacgaattctagaaaggtaatcatgtctgtccttatatatatggatcggatgatgaggatgatgactctgatatagctgccgccgaatgggtacggagcaaaaaggttataccatgcccatgggtgaagaactcacggaaagaggagaggtatgactttatatcaccaaggctgacaaaatttttgacttgctactccgacaaaagcaaattctacttcctaccggtcatacaatcccatctgttgaatatattgggcatcaaaacggattgcnagtggcataattctgtgtctcatactactaatgattgcaaggtcttcatgtancagatccacgcatctattgaaggaggcaaaatcatgtttgatgattctaagaggccgatgacagtggatggcaatcctttctctatcaatatggngcatacaa

SEQ ID NO: 17532 - DNA, 283 bp, Oryza sativa
  unsure (1)..(283): unsure at all n locations
cacgcctgctagctgcccacacaatggccattgcgatccaagaaaattccctatgtagcataaaagaagttgctcttctcactctagcacccaaacttcaaaagttctctatctaggaacttctaaaatttcccttccctatatagcactttcattagtttttacacttgatggtgttaagtagcaggagaaaagacggttctgcccttctttagttntcagacttgcctgtacatgatcattgggattttaggtgtaccntttttccctttctctgttcaca

SEQ ID NO: 17533 - DNA, 431 bp, Oryza sativa
  unsure (1)..(431): unsure at all n locations
gatgtgcatcgactacaccgaccttaacaaggcatgtttctttgatccttaccccctgcctcgcatagatcagatcgtcgactccactgcggcgtgcgaccatttgtgttntctagatgcatactctggttaccatcagattcgcatggctagggaggatgaggaaaaaactgcgttcattacccccgtaagaacctattgttatacatcaatgcccttcgggttaaagaatgcangtcctacttttcagcgtactactcgaatatctttgggtagccaaataggacgtaatgttgaggcgtatgtcgatgacttggttgtaaaaacgcgcaaccaagaaactgtactttcagatctatcggaaacttttgagaaccttcgctctgcccgcatagagctgaaccccgataagagtgtgtttggtgtacctg

SEQ ID NO: 17534 - DNA, 426 bp, Oryza sativa
  unsure (1)..(426): unsure at all n locations
gcttcttatagccgatttgctatgtgaatttttaatgaagtagcccactttaaggtacatcatattttacaaagcagtccgtatatcactcggatcatggtattcaaggattcacaccgcatatgctacatattaatatcaagtcgctcggttgactataattatcgaagccactcgggtggttggattatttattccttgactatatgcttggtttgttcaattaaccatatagtcgagggctacaccttgtaggtgcatctaatcgatgcacctgactntatttttcagccctccacagtcttcagaattgataaaagtactcgggagaccatggcaaagatgattgaagcactcggatttggagtaatctagttcgagagaagaatatcttttcgactgtgaaggtctcaggggctactgtgg

SEQ ID NO: 17535 - DNA, 481 bp, Oryza sativa
  unsure (1)..(481): unsure at all n locations
tcctgaaatgaagacatgcagttcgaggctaggtcttcatatgtatttgcttggtgaatacccttttactttgtaacgatacaattcttggttcctttgaccctttctcccatatactttccatttccttgtcttcaaaattgtaatgctaatcatgcaggatcaagcaatatatttaacttctgttgaaagttgtacccaagtttgttgtgttaggagtacttanagacataattcccatcaatgggaagggttgccatgacaaatcacttgctcctttcctgatntatgctagttggtacgttagaacctagaatgctagaactgtggtagtgatctcagttaactttgcaactgggcatttgtgcagtgttcttagtacttagtactgctgtatgaagctggaagttaatgtctgacatgtactgactaattcaagtgtcttatcttgtttgttcttaacttgcaaccaacactatgc

SEQ ID NO: 17536 - DNA, 427 bp, Oryza sativa
  unsure (1)..(427): unsure at all n locations
agcttctagaatcttttagcctttgtatcctttcttcttccacctcaaaagcctccaatattgcaatagaatcaattgctccttgtactggattggtactattacttttgaaactgctattgtttcaagtaagtgaagtgggtctctaacaatatatttcacacaagatgtctgaacaacgtgctgaaacacaccttggtagtggtagatgtataagtatttcaaaactcgtacaacagcggngattattacttatattccccttaggagcacatcacanatacaatccatcaatcgtgtataagaatcacactagtagtagtaattcatactcagtattatcctttgctctgcttcagtgatcagtgtcagcagctagcgttcaatgtcgccgccctcagacctcggcgacgtggccgccgccgga

SEQ ID NO: 17537 - DNA, 414 bp, Oryza sativa
  unsure (1)..(414): unsure at all n locations
gcttncatgcgattctctccgccttgagtccggaggagttcttcattgttgatggacttgaggaggccaaggagatatgggatactttgcaattggctcatgagggatcaccagtcgttcgtgaggccaagattaaattgttggaaagaaggcttgaaagatttgtgatggatgacaaggagacacctcaagagatgtatgataggatgatgatccttgtcaacaagatcatatgacttgggagtgaggacatgacaaatcactttgtggtcaagagacttctccgtgcttttggtccaagaaatcccactcttgtatcaattataccggaaaggaaagacttcaagaggctcaccccaagtgacattcttagaagaattgtgtctcatgagatgcaagaagaggaagctcgtg

SEQ ID NO: 17538 - DNA, 294 bp, Oryza sativa
tacactacgtccatactctcctctattttaccaaccgtctatttaacaaatatcacattttatcattctaatccagatcataaaagaattcattctatatatgtaattgagccccaaatggtaagtaaactcatcactaagcatggctaagcatttttatagactagtgacctcaaacatcattcttaatatgacacaatggattgttcctaaggtttggaataatggttaaggtcttttgtggagttcaggtgataatgtaagttaaagagttgatctaacatattttacaag

SEQ ID NO: 17539 - DNA, 472 bp, Oryza sativa
  unsure (1)..(472): unsure at all n locations
actcagcttaataatattgaatgggcacaggaagaaagtaccatcgtctttctctatcaaactaatatgtcgcaatgcacgggtattntttctagttaatataaacaagagataattgattaaacaattacgattaagcctgttgtcaattagtcgtgcccactactaccatgacagttaagaagcctgttgactgttgtcaatcaggatggcatgcatctcagtcagtcctcctcgaacaggatgccactcatgttcagcttggcaaatagttcattggagagagcctgtgctgcttccagatcggcgaagtatgtgccatcgaccatgtagcagccgttctcgtcgacctcgtcacggaccttggcctggaacacggcgaactcatcgtccttcttgtcgaggaatgcggacagctcctcgcgctgcgcacggaccttggtctcgaacgcggcgaagtcatcgtcgtcgt

SEQ ID NO: 17540 - DNA, 425 bp, Oryza sativa
agcttagcaagggagaattaccaaaagattttttctattgcatgaacgaccctagcccaagtttccacggtctgccaatgagcagctcagtcagaactagcccagctcaccaaccagctcattctatgagatccagacggacaggtggtacatgggctcggccacgtggctctgatgatgggtattcaaggtcagtggtagagactcttcgctgtctgtgttttgtgttcccgagatagtcgttatcgataagggaaaacgtgttacgcatgtcgattcatggatagggtaagggtctggagatcgggataaagacgacatcactcttattgacgccaagcttgtcctgattgctaggagattcagatcaagctagacctaacattcttattttgtattgcttgattataatggggtacatcagt

SEQ ID NO: 17541 - DNA, 330 bp, Oryza sativa
tcatgcccgaggaattgaactgtgactcaccggtgatgtgtgatatcgaaggtggagcttgacggccggaattggtgaagacgatgccgatctccaagctcgctgcaccactgccaggggttcatgagggatttaagagaggacactgatgagatgttgatggtgcggtggctcggctcggcttcctccggttcgacggcgacgaatacgatgtcccgatggctgcgcccagtgcgcgctccatagcatcatcggcgaggcttgcgtgtccaccaaaccactgcatgaaatgggatgaaacttacacggatggactcggcgtggagaggc

SEQ ID NO: 17542 - DNA, 345 bp, Oryza sativa
  unsure (1)..(345): unsure at all n locations
cttctggggcaactccctcaattgacatggatagtgctgaaatttgaattttaccgggtctacttgaatccctatttcccttatggaaggggcccttttttgataatatgttttccagtgccatctctacttctctcattgaaggccgttctcctcctttcaatntagtacacagtgcagctacttcatggacttctccatcttcctcctccttgacttgaggatctattatgttaataagggttccttctgagagcagcanaataaaatgtgaaacaaggccatcaccatcgaacgtgtcaacaacaggtttctttcgagtaagcaactccacaagaagaactc

SEQ ID NO: 17543 - DNA, 213 bp, Oryza sativa
actcttagctcgctctcctgccgagatgcgctttacttcatgtactaagaggaatatgatggctctgactttatctgcatgctcgacttggttataacatcaattatggctcaagggattataacatcctcttgatgagaacaatgcactaattggctgttgtgatgtgctgaacatcgcagcataatgatgggacccttgacgaagactcaa

SEQ ID NO: 17544 - DNA, 267 bp, Oryza sativa
tgaatcctcatattcaccttattttttcttaaaacataatctccactaacatccttcttcaatcacgcaacatctcaagtactttggtaggatcatcgagacatttaatacactatgttgatgttggaattgcgagaattatcatccctaatttgatggaaaatatgaccaatacacacatatgcgcgtgaatacaatggaatagtcatccatataccttctccacatgaaagacaaattgctaacgaaaggccgcgacatgttatg

SEQ ID NO: 17545 - DNA, 311 bp, Oryza sativa
tcacattgaatacctaaacacatgaaacattaaatatagattaaaactatacacacggattatgtataaatcgaagaccaatcttctaacctaattgcgcatgaattgatatatggcgctccgcaaacattaacaataacggattaccacgcttaataatttcgcccgcggtgccatgtccaacaattatttcagagctagaatataatttaagtgacttattatagaatttcttaaacaccactatacatttgtaggcggaagcatcacgtgaaaaaaagactcctcccccccttctctgcgcgaaggct

SEQ ID NO: 17546 - DNA, 395 bp, Oryza sativa
ccgaatgatactttatctttcacttgtgaaactatttcggttacacctatgccttagaccggaattggtaataattctctccctactagtcctattgatggtgacaaaaagaaagagaaaagtggttgtattggggaacttccgcccaagaataggataaataatgcgaaggacgaagatcgtaaggtacaaaagatgagtcatctagttcccaaaagaccaaaaagccgaagctcacttttgagatgcttatggctaagtacaagaaaggattagccagtcaacgatttgataaccaaactagtgattcataaagaccaaaatcatctcgtaggaagagatttggtcaaacaccaaagcaatcggagccatcaactataccaacttcatacaaa

SEQ ID NO: 17547 - DNA, 419 bp, Oryza sativa
  unsure (1)..(419): unsure at all n locations
tctactaacaatggcagggatacgcaagatattggtgatagctgtgctcaacatcgacatcttcgtcgagacatgatgagtgatcaatatgaccattatgaggtaagtgatgatgttctatgtaaaatcaaatctgcactgccttatttcgaaggaaactatgatcctcatgcttacattaatcgngagctagcggttgatagcgaatntcaaaagcatgtcttgtctgataaacaaaaggttatgtgttcctctagtggtttaattaaacatgcttctaatgattggaaacatctgtgtaggcataacaaaataccacaatcatggaaagacctgaaacgatatttcagagatgtttatgttcccatgtattatgctgacattntgttcaacaaactgcaatgtntaaaacaagatac

SEQ ID NO: 17548 - DNA, 264 bp, Oryza sativa
  unsure (1)..(264): unsure at all n locations
gcccgtctactcctactcctactgtcgtcacgtcggtcgatagttctataagtgttggaattgcgctnttgatcatattttaaagcctaactaccgtgactatctattatctatcttctattatatactaaaagtccattaaactttctacaaacgctctcatgccgccacatggcgctctaaaaacgctctcaagctgccacatggcgttctaataaaatagagaanatcctagaaattctgaaaaaaaaatctagccctcaa

SEQ ID NO: 17549 - DNA, 503 bp, Oryza sativa
  unsure (1)..(503): unsure at all n locations
ctaagctggctcgnngtttcttgacgtacaagctgatatccgtgcctttttgaacgcggaattcagagtgcttctcccactcgtgatgttcattgttccattcacaagacaaggactcacgacctttcgagctataaggtctttctcaatgccatgaggacgtcacctcctaaggtccaacagtcgtgaatctctcttagagatgcggacaaggaacgaggagcaaccactacgagccattcgttggggtaatcgatatcgatccccacgagccatatgtcttacatctgctcgaagatcaagcctcatcatcaacgagtacaccacgcgatgtatacgctatcgatgggacttgcacgtctacacgcggcaatgcataagcggaggatcaattggctacgccggcccagcacatcaagaccatcaacgcaatactgagggagaccncttatgatcccatcctgaacgctgatctcgatcagtggacagaacgactacgggaa

SEQ ID NO: 17550 - DNA, 335 bp, Oryza sativa
ctatgaaaagaattggaacggactggagttactaatgaagaaaggatgtactcttgacaaaggagcacaggttatccctgggcagcgggatataatccagataaaggaaatgcttaaactaaactaagacaacttatgaaacacaattgaagaattgacggtaattcttctcagaaacacaggagaattgtgcttcatttcagtaagaagaaagaaaacttacaaaggaggaatcaagaggaccatataagagaccacactcccaaaagtaagaaacgtgccacacacaaagtgttgaccagatcacccagaaatagactaaccatccggagcaa

SEQ ID NO: 17551 - DNA, 481 bp, Oryza sativa
  unsure (1)..(481): unsure at all n locations
ntatcgttctatgatggttagctagctgtaccttaccgcatctatgccagatatcatgtttagtgtttgcatgtgtgcacggtttcaagccgctcctaatgagtgtcacttagtggccgcgaaaaggattctaagatatttaaagcattcctctactattggcttgtggtacccaaaaggtgctaaatttaagcttgttggctattccgattcggattatgccgcgtgcaaagtggatagaaagagcacatcctgtagtttccaaatgcttggtagatcccttgtgtcatggtcatccaagaaacaaaactccgtaaccctctctaccgccgaagcggaatattgttcggcgggtagttgttgtgcccaattgctttggatgaaacacatcttgttggattatggcatatccttcaccataaccccactcctatgtgacaatgatagtgccataaagatagccaataacccggtccaacat

SEQ ID NO: 17552 - DNA, 506 bp, Oryza sativa
  unsure (1)..(506): unsure at all n locations
acctataaaactcagcttggggtagatgatgaanaagttgagaaggtggagacagtttgtagtttgaagaaaaagtcgatagtctgtgtgtacgaaagctntcgatgtgatggacagctaaaaaattgggggaactaaacacggccttattgcgttagactgtaattataattatctcaggactgccatgaaattctcatatcccgatttcatgggcgccatgacgaatagcatccgagcagatgaaggcttgttatctggtacaacatgcacggcaatatcgaattttacaaccattcaaaacaatcctaatgtcacggttaatagcatatacaaagcagaatcccatngaataggtagagtgctaccaatggaccacctatacaagaacaaagatatccttctaaaaagaaaagagaaccaaaagttacaccatctcagcaacatacacccaacccatcgctcacaacatgtgtatgacatgagcacaatctcaatttgactat

SEQ ID NO: 17553 - DNA, 429 bp, Oryza sativa
agcttgcaaaatctgtagtcatgttcaagtattgtttgataatgagattctttttcgctgacctagagtgatttcttcacaccctggctaaaccagagatcaaacctggccaccaaagtgccatatcatttttctgcggtcaataaaaatcatcactccctgctttgatgatttctctcgctggcactaccctgctatgatgggaacccattgttgataaatctgatgcaaccaaactacttccgacattcctctcttgttcgatattaggttagtggggctaacctagctctccctggttttccatgcagagaggagaagaaataagaaccagagaacattatgggcagagtgaacacaatggatcttcttgacaggaaacattgcaaacctcccagtgcttctctcctatgtcaatcctgtcaagct

SEQ ID NO: 17554 - DNA, 247 bp, Oryza sativa
cgtgggacccacctgtcagactcgcatagaaagtaattaattatggtggggcccacgtgtcataactcacccctcttcttcctcctttctccccatatcccctctcttcatctctctctctcctcactgaaccggtggaccggggcggcggcgactagagcgggcgatggacgagacggccggagcggagcaagtccggaggcggaacggtggtggccatagcgggccggttgaacggggccgccgg

SEQ ID NO: 17555 - DNA, 430 bp, Oryza sativa
  unsure (1)..(430): unsure at all n locations
agctntgtatgaagaaatgcaactgctntcttatgtctgatataagccctgtttgggggagcctgtcccagctgcagcttttgccaaaagctacttctgctaaaagcttgcccaaacagtccacagctttttgaaatatgaactaagaagccagaagctggagaagctgggtttcagagcttttccagattctcagaagctggctaccaaacagctgcttctcagaatctaaagctcccccaaacaggcccatactctgtagatgtttcagtttcaattttgcgtctcattcatgcataccttgatgcattgtgcatngaggttctgtagattgctaaatgcaactaaggtgaaaaatcaagaccaatatatatttacatgaatggatgtgattgatatataaaatgaactcaggtagcagtataagatc

SEQ ID NO: 17556 - DNA, 464 bp, Oryza sativa
ttggtggtcatctaacccatcacaagcataggccaagttcctatcacctttgacagaattaatatggagctaagccaacaaaaggaatggtacatctattatcaaacagcttaaaacgtaatgatttacaagtaagggagcatactggtaaaagaaatattggctctcatattactattgtaccatgttgacttatatatgagtacccagttatttggttgacatatttgagttgatcaaagaagagatatagtaacaatcctattatatactaaatatttagtgatacaaaaaaatgatttaataacattacagtatcatattcaacattataaataattctagtgagagatttttcttttgtgtttatagcacttatgtatctctatgattgttcaatccctgttatttcttttgcagaaacatgttacatgaagttccaaataatcaattatgacccttcc

SEQ ID NO: 17557 - DNA, 456 bp, Oryza sativa
  unsure (1)..(456): unsure at all n locations
ttctcgagtgcttcgacgtcagatagcttcgcactattatttctgtttgatngactgcattcctgatctttcgattctctgcaagcgttcgatctttgattcttcgacacttgctccttgatttcttcatgattgataggcttctacggaatcttgggcttctcttgaatcttggatgcttcagctctcgcataatcatcttccacaccatttgccacgctcgaactggtggtggcgccacgtttattggatccttgaggcttggcttctttaacagcggcgacgcgagctccatccgactccttggatggaggcggcgatggcgggagaaacggctgcatcacgcgcttattgctcggtaggcaaaccgacaccggagcggcggagttcttcggngacggaggcgcgcgtgcgctcttcttgtccgagatgctcggagatactgcggcgtctctc

SEQ ID NO: 17558 - DNA, 413 bp, Oryza sativa
  unsure (1)..(413): unsure at all n locations
agcttcccggttagctcgctgttatctttttctctgcattngnaatcttttctattcttgtaagacgtggatctgtatgtcaacaattgtcgtttgtgtaccctggctggtcctggacagggattcaatgcacattcagcttagaaattctggttcgagaatttctgggcgtgacatgctggtatcagagccgaccttgaccgtacgacaagccaactggaaaccctaagagccctctgaaccccttctcatatgcatatgcccttttgcacttggaatttgttttgggaaaatttggagtcttgcctctttggcttgcgggaaaaatcttggtcgatcattgggatcggattatattttaaaaaacacatgagctcagcctanggctatagaataattttacttggagtata

SEQ ID NO: 17559 - DNA, 463 bp, Oryza sativa
  unsure (1)..(463): unsure at all n locations
tcagccactggcataacaattttgagtntcagaaagcatattattcttgcccgccgcccaaactctatgacatttcttaatctgctttcgttaatttgtttatgtcacgtacaaatacagttcaatgttgtttataggatctcgatactaactacaaaggagtaaattcttcataagtatgatttttgggcagcctgggtaactctggttcagaacatgcctgactaactgtgctatacctgcagatcttgtgaacgtaataccactatttcagcggacactggaaggtatgaaaaggaagattgttgagaacattgacgatcaaatggattggaacgtcaatggacaccacaagcggttagcatcaggtaatccatattcccctctatctcgccacatttcctgtgcgtgcatttgctcgttagccgtaatctttactcactaccttagcaccttgcctcgc

SEQ ID NO: 17560 - DNA, 429 bp, Oryza sativa
  unsure (1)..(429): unsure at all n locations
agcttgctgatgattttcaaccggtaatatgtatcatatcacatttcattacagtattgccatctgcaatctcttgttatcacttgctacaactttcaaactgattatgccatttcttcttttttgctagcctgaatcacgtgttcttcgggcacagatgctgcaccaactgattttccatcgcttcaacctagcaccatgcatccactctgccataaaggaccttcgtcctcttgacaacggtgaaggaagctcccactagtgacaccgctgttaagtctttgttgatagttaccactgctcgcgaactttangacatgtactaatggaaccgatgtggatgagactacttcattttgttaatgttaatgtgggtatcttcttgtaaaaatattgtgcattcatactggccgtttcgtttcatatgtg

SEQ ID NO: 17561 - DNA, 505 bp, Oryza sativa
  unsure (1)..(505): unsure at all n locations
tactcagctacagaaaatatgaagtgcccacacttgttgagaatggttgctcacaagaatggatgtcgggtgaagactccatctcctcaagtgatgatgaggagctcccaacaccatccacatcacctcattgcttaatgacaaatggtaagaatgaggtaaagaatgattctctcgatagtattattgaaaatacttgtgttgntgatgatgatggtgatgatgatgaaccttcatatgatgatctttctgacatgcttatggaggctagtaaatacattgtcaaagagaagaagacaaatcaaattttagagaaaactcttctctctttgaaagactcagatatggagctaataaattcttataaggaactctgtgattcttataagacgataaaggaagcttatgagtctcttctcattggcaatgcatttagtaagccaaaggtggacatatgcatcacatgtaatctaattgatgatgatatgccatgtgtagctagctc

SEQ ID NO: 17562 - DNA, 433 bp, Oryza sativa
  unsure (1)..(433): unsure at all n locations
agcttctcaaaaacctgacaaaaccatcgatatccattgtagaaaaattatctttgatttgtttccatatcggcaaacctttatgagcaaagaacgacaactgttttataagcatggaaatcctattcaagcacattaccatatcgtacatagcagcatgtttcactgcctacgagcaaaaaggtgaatattcggagggccagcaaagtaaattgccaacaaacaaaactttgaactaacagggaaaagtggaatatggaatattggaactgtaaatgcgcatatcaacaactggacattggtatagattnttagaactagcataaatgaatganattgagacttacaatgcatatatgattgcgatagtcaaaccatccttgaatctggacacagctggccagtaaggaagactgatcaggagagaaacaga

SEQ ID NO: 17563 - DNA, 507 bp, Oryza sativa
  unsure (1)..(507): unsure at all n locations
tactcagcttagccttagtggtaatccaacacgtagctgcagctcttacgctttttacctgaattcgctcatgtctctgaccgagctacagaaagaanaaaaatccatctgaaattaatattcagacaaaccgattcttcacttgttcagacaattacctgaattcagatcgatggcgtatctgtgacaaatctttctggaattactatattgagatgaaatccgcttcaccgattaatcttatcttagtacggtactagtttagtaattaccgtggaagatctggagtatcatgaggtaaaaagagatggacatgcatgcgtatacagatgttactttgaccggtatatcagttccgtcgtcagattaagctcacgtaaaccttttttaagataagaaaaaacagagggaaatctggtcatggcgtgacagtaattagtaaataatntagtctcccgtctaatgcatacgtcagcgccaatcggcgtcgtccacgtggcacacttg

SEQ ID NO: 17564 - DNA, 364 bp, Oryza sativa
  unsure (1)..(364): unsure at all n locations
attcccttcatggatatctgcaagaagcacaacgccctgttcccgaagaatgcacttcaagaggattccattagccgcccgcccataaaaggtcccttctaccagcacgtatcgtttggagatgtgatggaacgcgtcactcccttcgcggtcctcgggtagagtcttatctgtgaggtatgcttggatctcggcgatccaagcaatcaatctaagggaactgggagcactcccctcgggtcccgaggcctggactcccgacaggccttgtggccggtcangcgtatccgtctcccctaaagggtcgggtcgcgccgacggctgtgcaagcctttcttcaaaggcgcccggtggggtctgggct

SEQ ID NO: 17565 - DNA, 435 bp, Oryza sativa
  unsure (1)..(435): unsure at all n locations
ctgatgactatattctctttatgaagtataaaaatgaaatcctcattacctagaatatgtgcgcacgtcgtcgtcatgagtcatggtattgagatggttataattacaatcgaggacttatggaaggcaagaaaactaagctcgttctagctagatcactagaaaacaagcgtgccgacgcttgtttttatagcccttgcattcgttttcgtgttattaagaagcattatgtttgttgcaaaaagacgacatcctcaaatttccatatcataagctattaaattgtaaatatcatatcgatagattnttgatgaaaacttagttgtatcttaattggtatagatatgtagcttgggaaaacaatgataanatatgtataatggagtctgtgtngattattaaaatgacattatgttacatacaaagttaatataa

SEQ ID NO: 17566 - DNA, 467 bp, Oryza sativa
acttaccttgtactttgatgttctattctttattcaaattaatccaaaaacttgtgctattaattggataaatgtcttaactccctcctttcacttgtctttagatgccgcgctacaagcctgagtacttgtttggtgtgagggatttgtccaggagttgcgtacgatgtcctttgccatatgatctgggactgctcctatttatgctcaaattcctcatgatcgtcatgaagagaagtgccgagtcaaagtcaccttgaacagtaatagtgaagatgtcccctcagtgatgttcgaagctagaggaagaaactacaccatgcatgtcacgacgtggcaaggatcgccataggagagctctcgatcgctatagtgatcagttggccgacactggatatctgttccatcctcgccactccatggaagtgaccgcggagctaccttagactgaggattgagaatatgct

SEQ ID NO: 17567 - DNA, 336 bp, Oryza sativa
catctcgacaacgatcatcacgccaacacacgagatccgaacgaatgggcgagacgttgaagcggcacactcttacgcgcctctatcatcatctccctcactagcatgtctggatttcctttaataatagaaattgtttatatcctcgacagtcgacaattcgacatgtttaactcggtgaacatttcacatttggcatgtctaaggattgagcgttgctcagttggtgtgctcatagagagaggtagtgcgcgagcgtctagtcacaagtcacttgcaaggcattaacacgtgtcgagaaatacgtatgcatatgtgcgtagtggtatgtgcaca

SEQ ID NO: 17568 - DNA, 442 bp, Oryza sativa
  unsure (1)..(442): unsure at all n locations
tcttctcgtgcttcacatcgtcaagaagtcaagcgaatattgatgtatttgaatcatccacttgagtctggaatttggtattctacttcatcttctatatgcttaagtggatattccgatgctgattttggaggttgtagaatagataggaaaagtactagtggaacatgtcattttcttggtacatcattgattgcatggtcttctaaaaaacaatctagtgttgctcaatcaactgctgaatctgaatatgttgctgctgctagttgttgttcacagattctttggcttttatctactctgaaagattatggtcttacttttgagaaagtacctctcttttgtgataatacaagtgctattaacattgctaagaatcctgttcaacactcacgcacaaagcacatngacattcgctntcactttttgagggatcatgttg

SEQ ID NO: 17569 - DNA, 331 bp, Oryza sativa
agcttaacgacgtgggtattatggagatttattgtgtagcacagcggctactctccatggagtaggaaactctgtctgcagcgaccactttcgtgccgattctatggacgattactggatcccaatgattgctcaatacatgaaaatgatgcactgttacacgcctatatacatcttcgttctacataagcatgatcggactgctgtaacactataaaatgaaagtatgcttacactgaacaactcgaccatgtaagtcgagaacatttacgcctgcatggctacgattgacagccacaaccgcgtgcgatactgaagagctgctcagctt

SEQ ID NO: 17570 - DNA, 427 bp, Oryza sativa
  unsure (1)..(427): unsure at all n locations
agcttgatccatcataagagctcgatcctcgttcttttatctcagncacccaccacatgagagaagaggcctccattgtagagttagtgtctatatagaaacctcatcctatgtggtgttttgggggcttgggacacatgcaactttgagtattcccactgctcatgtcctaatggtccgtttggttggtgcctgagcaacttgcctgagagctacctgagaaatctatcaatttagcctgactgcagcctgaaacaatgtctatttggtttgcccatgtgcctgaggtgtactaatgtgtatttaagctttcaaaagttacgttgtcaagttgttgattaagtactaactaacgggcaaacaatatccatggaaatatagaattaattacgcatcttcgatgcaaccaaagatttctaatatgtat

SEQ ID NO: 17571 - DNA, 499 bp, Oryza sativa
  unsure (1)..(499): unsure at all n locations
actcagcttgagcatatttgacaatcttatgagcatgaaacactttctattcannatggggccttgggcttgcagaatctgccctaanatatcctgatgattcccaccaggcataccatctgcatcatgaatatacaaacaaaggaagacatgcagttcagcacaaatttccaatgccataaaaccaataaatttaaactaccaatttggcatcatacgatttctcaaccgtgcttgggcaatactgattggccatttgaggtgcaagcagtttcttctgcccattatgagtgtcttgatcaataaaatcttcaggattttcatcctccacagctnttcccctatgtttcttctcaaccttcttgagtacatctaaagctggctgtgcctacagaaaccaaagcagtgtgacgaaataagtaaagtcatctccagcaaccatttcgtttcatacaaatctggatcaactgtacattcgcatacaaattaaagaattata

SEQ ID NO: 17572 - DNA, 485 bp, Oryza sativa
  unsure (1)..(485): unsure at all n locations
cgtctttcgctcaagggtcctgataaagatagaacccctatattcggaagtacgcttgaaggtcatcatgctattgctgcatcatgttggtgaagttggcgaactgagcatcagcagtttgttaccattcttgcgtctgtgctatgtgttccgtgaggttgtactggatctctcctgtctgcatatcaagggtatccattctcctagtgatttcacccaagtcccaacgagaggaactcgagcgacattcacttgtagatggaggtactccacttgatctgtggggttggttgtcctcccattgtatgtgatgaggtgcatgccatcggtcctcattggcacttgcccagcttgagaccccgatgctatggtgtggagtctgggtccatccgggtgcatccncagttggttcctaacctgcctcatacatctgcacgggtgtagaggatgatgaactntcttgtttgttcctttccatgttgcgt

SEQ ID NO: 17573 - DNA, 435 bp, Oryza sativa
  unsure (1)..(435): unsure at all n locations
cctattagctaaatccttttgtacttgccgatacatgatgtacgcgcgactaaatgaaagcatatgaattagagaacggaattacagcctntagcgaactctatatatattgtcttgtgatgggtagctatagttttcaaaaaaggaaaagggccaaatatatgtcctgaactctcggacgaaagtctctatagtatcctgatccaaccctataaactttgtcatatcatcaatattatccctaaataagatggttcttgatcgtagctctatatattctggaaacgtaaatgaataactttgaataactaatataacatatttgcatatgatcaattgttaatctatcaatatatccttaatcatatatattattaatatgctgctactcgcttataagtaagaagtaataaagatctaacttacatacgactt

SEQ ID NO: 17574 - DNA, 430 bp, Oryza sativa
agctttttcccaaacaaagtcgatggcaatattttcatggcagcatgggcccctgggctaagcactcacaagcatagatagatgtggaaataggcggttacccagttcaaggctcactagtggtagtacacaacaccaatgtcacattgtttcaagttaatgttcagcaaaaagcaaatgaccaccaaacaaagcagctctcaaaagactacaacatcctggactcccaacatatgagcacacaaacaggcgatgtgccataccaaactcatggcaagcacacttagcaataatacaacacgccgcttagggcttcggtttaattgaaacagcttggttggaccaggaaggaagatggagactgactagaattggaggtgctgtggagatcatgcagctatcccatttcgttggttcaaagttctgtcag

SEQ ID NO: 17575 - DNA, 461 bp, Oryza sativa
  unsure (1)..(461): unsure at all n locations
tanggaatattactaataatgggatatggatcacaattttttttatctagcaagcatgctgcactatagtgctactaattgtccaatggctgaaccggcttggatctggaagcgaatttgttgaccagttctaaccactttcattgactaagctaagctcacacactccattgatctccttctgtgcaagttgcaagtatgcaatgctaaaagccacacattgattgtacaccatgatcagccaccactacaacagtggatccaaccatggagattttagtggatggctcaccacacatcccactatatgtgttcagggataaactctggtctccgaattcttgaacatttttctcactgatagtatggttaggccctggttagttcatataacaaaaattttctcgctgcacatcatacatgtatggagtattaacagtagaacaaaacaattacacaga

SEQ ID NO: 17576 - DNA, 190 bp, Oryza sativa
aaaaccagcgaaggaaaaagaagaaagaaaacagccaagccaagaacgtcccgagagccagagagcttaaagcctaacaattcaaaaagggccaaaggggtgcgaaataaaagaaaaaagaaagcggaaactaaaaaaatacgcaaacaagaagtaaaaataaaataaaaaaaacgtcgaaccaaacacc

SEQ ID NO: 17577 - DNA, 194 bp, Oryza sativa
aagcatctctatcactcattacaacaatagtatgtacctaaacaactaaacataatagttgaatttaggtatcatagcattcctctctcacatacacacgacataagtccccctatactattactatgatacgggcctggctccttatacaagttaaagtctaatgtgaaaacacgttcattcacagaaccaat

SEQ ID NO: 17578 - DNA, 425 bp, Oryza sativa
gagcttgagctggagcacagtccccagagcttctcttttatatataccaggtaagggcttaaccactcaacaattcggaaatttggttaagacttgtctctggtctgcaagaaaggacgactcggcttcgtctcttggtcaagcagcgcgctgacactttgtcatctaatactgaactggactactagtcagctacgaaaatatactatggattatcgctcgtgcttaagaatggtgtgcgaacttggcgaatgtctgccgatcaatattgcggctcatattgtgtcacaaataccgctctcgccgcaattctgtcgacgtactgaccgtgctgatcttaaatacgagctctgaatcgacagtgacttaaaatattactcttacacttgtgcatccgcacgcttcatcactgaagtgattaaccc

SEQ ID NO: 17579 - DNA, 474 bp, Oryza sativa
tactcagcttcagtcaaaatcggcacccagcgggctaaaatcactattctatcttgctgaacgaataaatagaaccttgagcacaaataagcattcacctcatcctcattctatagatgcagcccaaacagtgggactaaaccaataaatgctgtgaaagaagtaacctctcgagcccaatacgcaagaacatcccagatcagatcactaagcagagaaccaagaaacgaacggaggaccagtgaatgttaccgctcagtgtcttccaagtcgaggccttctgcgcggcggcggagcccagacagaacagcagcagcagcgacgacccaagaacggagcagccatggctgcctctccccatcgaagaacaccaccagctgaaccagcggcttctccaagaacagggagctccaagctcacctccaaccccgagatgtgggcgaaccgtatgcgaaccggatgcgaggcgaggag

SEQ ID NO: 17580 - DNA, 464 bp, Oryza sativa
  unsure (1)..(464): unsure at all n locations
tactaagctgagtctgtaccctgtaatgcccgaagagccgagtgccctattgttacgaatggngatatatgggttcttgttctcacatctggtcgccgtaacacgacaccaaccatgcatncactctgccatcggtcgaaccgaacatgaagttctcctaatagtacattattgcttgtgaccggctgcttaattcccaaatcatggctttgttccccggtaaaaagcaccattccagtaggtaaaaaatattctaaactcttaagggacattcactccttgtttcactccttggttggacgtcatctaaatgattataatgaaactgtaaaagaatcaacacaagatattaatatgtgataaatcactctagaaacatacaatgtcagatttaacttatacaagtaaaaaaccaattgtgattgtgaatatgtgttaactagccataggttaatcttttttac

SEQ ID NO: 17581 - DNA, 266 bp, Oryza sativa
ctattaaactcagctgtgtgtatacccacgggaatagatgcgaagttctcttatatctaccgaggatcaccgacggttgtgtccatgaagaaccagtagaaagaccactctggatgcatctgtctgtacacagctgacgtgaagcactccaactattactattaaccgcgaaccttgtctgcacgtgtgtagagaccatgatactgcatagcacaaacggtcgcacatagatttcacaactacagactgcctactgtatatctttg

SEQ ID NO: 17582 - DNA, 446 bp, Oryza sativa
  unsure (1)..(446): unsure at all n locations
cagctggcaacacatcggggcgctttgttgataagttatatgttcaggcatcagntccgtccgtcgaactttttgttgatagagccgaagtgctcatggcatactagcgcatgtgctcgagtgcttcgacatttaccccctccaagagttcgagtgacacttcgcgcccctcttcgcccgcagagaacatcacccttggtgagatactcactagcattgctggtgtcatagcctcatcagcttatagacgcatgaacgtgctaaacttggtcggtcatgttgtggtcgttcgaaggtgcgcgataaccgatagcatttgctctggccatttgcccttcacttgcccctcgagccttatctttaacgcatataggatctttagtacttgtacgttgagccagcccatacgactgtgggagcgctatcgacgcgaacatgacattcag

SEQ ID NO: 17583 - DNA, 424 bp, Oryza sativa
agcttatctcctacgctctaagaatggatcatttataatcaccaccggcttgccgtcgtcgccgccgactggtgtcctcacctatacggttgggtggtcacaccgccattgttgggcgtcgttgtcttcactgaccggccgctgactggtgtcttcgcctatacggctggttggtcacaccactgttgttgagcgtctacttcttcaccgccggcttgccttctccatcgccgactagtgtctctgcctacagggctggcctattatgccgccgttgttgggcgtccacgccttcaccgaccggccgcctcgtccgtcgccgactggtgttttcgcctatacgattggttggtcacaccaccgttattaagcgtctacgtcttcaccactggcttgccttcgccgccgccgactggtgtcttcg

SEQ ID NO: 17584 - DNA, 438 bp, Oryza sativa
  unsure (1)..(438): unsure at all n locations
tctcgggttcttggtctctgcccgaggcattgaggccattctctagaagaatcgagctattgagcggatgcgcccccccagcaaacttagggatgtgcaatgcgtcaccggttgcatggccgccctaagtcgnttcatatcaaggctgggagagaaagcgctaccctttgttaagctcctcaagcgctcggtgccgtttacttggacggaggaagctgaacatgccctcactcagttaaaggcatatctcagctctcccccggttctagtcgccccggagccaaatgagcccctgctactntacttagcggcgaccccccaagtagttagtgcagcattggntgtggagcgcgatgaagacaatcctcatttcgtgcacccccactctgtgctaactttggcccggagcgagctgggaggagaggcccccgagtctga

SEQ ID NO: 17585 - DNA, 381 bp, Oryza sativa
  unsure (1)..(381): unsure at all n locations
gaataatggccaagatcatcagatcgtgaagcatacgacttaacttaatatagctcctaaattcaggaaataaaaccctagctaggagcaattgaacaaactgcatgcctttcactggaagcagtaactaatcaatggatgattaattagcactaacctggtccacctggagatatattagacgatcgcctagctcctcgagaggctagagaggaggagagatcaggctcaatctatcgcaggagacgagaggaggatgagatgattatataaaccgcactcaggccagcgccgtatacgacgaggaggagccagctgcaacgcagatncgctgcaggattgctcgactgacggctgggtcaattctgcgaaaagacaaac

SEQ ID NO: 17586 - DNA, 250 bp, Oryza sativa
  unsure (1)..(250): unsure at all n locations
ccacgccgtgaggtacagaacaatgatgactcattcggtaagattaaactcacaattcctgcttttgatggtaagtatgaccctgatgcttatctttcatgggagtntagcagtagatcaaaagtttgcttgccatgatgttccgaggacaagaggattatggctgccactagtgaaattaccgattttgcctctgtttgagggagtgaatatcgtcgtactcatataaatgcttcgccacctacttggg

SEQ ID NO: 17587 - DNA, 398 bp, Oryza sativa
  unsure (1)..(398): unsure at all n locations
atgaatgcacaatactgatgagaattttgtttttgttttcatactatagacgtgctctccttgagatatgggaacatctaaaacaatgtgacaaaactgttagggagtactcttatgattataaaattcgtatcacttatagtggtttacaagaatctaatgagaacacaatgactatgattttcagagggcttaatttcaatattcaggctgggcttgttaatgtgacatataatcatatangccaattgttcatgcttgctcgcattgttgagcgcaaaattttggagaatccaacggagcaacaagatatgcttgtgcctcctatcactgattgtttcaggaagttcaaaaagtcttccaatgagaatacaatattgttgaatgtacttcatcac

SEQ ID NO: 17588 - DNA, 442 bp, Oryza sativa
  unsure (1)..(442): unsure at all n locations
actcatttagacatattttttctttcaaatgcgctacaatgcatggagtaggctcttattactattgtggtcgtggacatacagntttctgtttaccaaatgaaaatagagtaatgttggttcatttttgtaggcatggaagcacggcatgattgttgtctggcgatcagcaaggcattatcatcatcacatcttcctcatgaaccaagcctttctgaactcattggaaaggtatcctcgtaaattccattgttttctgatcttgctgttggattgtgaatagtgaggtgctgaccaccaaagaaaacatcttgtgacagttgaatgatagcggtaataggggtccttatctttctgagaggaatcgtgtggagccacagccggcggttgttccggcagagagggtntaactctttacctgaagcacatgccggctaacctt

SEQ ID NO: 17589 - DNA, 423 bp, Oryza sativa
agacttgtcttgaggcatcacagttatattttttatcttcccggatatctggcatggtgagaactggggcagtggtcaaccttttcttcatttcttgaaagctgacttcacaagctgcagaccattgaaatttcttttccttctttaacagctcggccataggtctggctagcttagagaatccttcaatgaatcttctataatatccagctaagccaaggaagctgcgaatctctgacacattcttgggcgggttccaagcaagtacagctgcaaccttgctgggatatacttcgacaccgttggaggagatcacgtgtccaagatatgctactcggtttaaccagaattcgcattttgagaatatagcgaatagtcgatgatccctgagcttttccattatcagcctcatgagttcagcat

SEQ ID NO: 17590 - DNA, 431 bp, Oryza sativa
ccgaatattcttgttttctactatcggcgacttgataactcccatcggctgattccgagatgctgtatccgataatgattctaagtcgatgacgtctttgtcgattaccaaatatcactgttaacaacatcctctcacacttcttaatttttgcactcacaatattaatagcttcctcaatagcactcacctcattatattcatactctgtgtcagattcaccacgcgccatgaagcaaacatcggagatgtactttcccttgtcatcatctccactatcaccatctacatcacttaatggctcgaacgcggtgtaaacttgttgaaaagacttactgagattgtccagcttcctcccttgggatgaacccttcaacttgatgtgttggacttctcaccatctgtgtcttctcttttgcctctcccaagct

SEQ ID NO: 17591 - DNA, 431 bp, Oryza sativa
  unsure (1)..(431): unsure at all n locations
agctttggagacatttattnttggaaacatgtgttctttataatccatacctatattactagctgtttagaaattacactaagcatatatattctgtgtactcagtaaataacatgagtgccacttgtggtgtgtattcttaaaaactacattacatattgattacatatatatgttaaggacagagggaaaacttataaatcgactagctaattattactgaagtcttgcaaaatgttatgagaaagaaagtgcatgttgtttttggtttcctttttgaggtttcttccctctagctagtgtaagggcttttggaaactaatttctccgaaactntcaaggatattccatcgcacaataattaccaactaattaaggtngcttagctaagagtgatttcgataagcanaatgctttccattagctaagtg

SEQ ID NO: 17592 - DNA, 486 bp, Oryza sativa
  unsure (1)..(486): unsure at all n locations
tatgccatcgatgtcctcctatggcgatggaccatgtcgatactatgtagtgtgccgagatggcttngatcgccttaactcgctagagattaacaatcctctgtttgagaagcgcccccatgacatgaattattccgcaaagcatctatatgagaaagagacttcaagtactttcaagaagtaccctgctggcttaggtaatacttcacttaaagatattagaaattcatcaagaggaaagctngaagatttcaatagcattgttgttntggagccaggcttatggaaagtccaagagtcggggaaagccttttgtacgccagacccctctcacatcaataagaatttcaggagagagatgcagcagggctgattttctttgcagaatagagggaggggttcaccaaatcttttagacactgaagatgttgatgtgtctagaatataacgagacagatacttgagtatgaatgccgtagattcact

SEQ ID NO: 17593 - DNA, 351 bp, Oryza sativa
atttacaggcaactattcgagccagacagataaccatatgactccatccatacttattgtggggctacgaaggcagcaggagtcaacaactttgttaaaaaagaagcggggggaccaacctatcagaagtcctcccctctcacctctctctatcttagcttcctcattccccaccttctctctgcctcttgctccctagctcaagagtgcgggggtggctggcccgtcaagctcgccggttggcctccatctcggtagcacaataagcatactgccattgtgacactctcccacacgagctcgcccgatgcctgacggaggagctggcgcagaggaggagcccaacctcgc

SEQ ID NO: 17594 - DNA, 184 bp, Oryza sativa
aaaacctatggcgcttctcgggcagacgtcaagcttgttcggaacctgctctcctatcgctagggatgcgggacgggaggagtagtctacgaggagggcgacatgaggggcaaactagatgttcagtggtgtggagaggggtcggtatataaaaggcgctgacagggctgacactcatcggaac

SEQ ID NO: 17595 - DNA, 373 bp, Oryza sativa
cctctcaagtgactcatcttcaccggaatcgaccttccatgagaaaaataattctagtgcagagatgcttgacaacatgaataggcttcacatcttcataatcgtctttccgattaaggttctcctttcaacttccatagtgcatcttctaattcgaagattctcttctggcgaagaacgagcttacgattggtgcctttgcgataccgggcaaagcgagcttctgtatatttcaacatcttggcggtgtcactatcttcaggttgagacatatcttccatttgttcaaccatcttctatagcttggcaattttctcctgttgggcatgcttctgatttaaggcttgagtcttggaatcaatgtggaggtcat

SEQ ID NO: 17596 - DNA, 496 bp, Oryza sativa
  unsure (1)..(496): unsure at all n locations
actcagcttcctgatgctactctggctccaccnagcagcatggctaatatgacgaggagaagacagcgttcatcacgccattcagcgtattctgttatgtcaaaatgccgtttagactgataaccgcgggaaacaccttccagctcacggtccaaagggcacttaatgaccagcttggaaacaatgtcgaggcctacgtccatgacattgttgtcaagacaaagacaagcgagtcattgatcgatgacctccggcaaacgttcgacaacctccgacgatatcgtctcatgctcaacccagagaagtgcacgttcggagtaccatcgtgcaagctccttgtcacgcgcggaagttttccccttgttcatgctttaaaatcttgtacataaatcgtctggagaaattggtttaattaacctacagatgagttccttaattaatgaatgcatataataattggaagtggcattgtgggatgtttcttgagttccacatg

SEQ ID NO: 17597 - DNA, 265 bp, Oryza sativa
atcgccactcgacattcctctcagctcgccgccccgaatcattagcttgccgccggatctgacgcctttggactcgtggccaacgaatcccgcggcgggaggaaggagagtgtgctgaatcccgttggattcggccgcctagaggccggcggacactggatccaaccgccttgaagccaaaggccgcccgatccacagcgcagcagtggcggcggagacggcctcagccaagagctagcagtggtggaggtgaccgccacatcct

SEQ ID NO: 17598 - DNA, 487 bp, Oryza sativa
  unsure (1)..(487): unsure at all n locations
ntnttatgatgntggtgacagagttctattagaaagtactgttgcttaactgctttctaacaagttttcagatggtggaactccctctacgttgacaatacttgtctttttggacaaagttatcatcaaacttttaaaatattgactataaataatatctaaaatatttgtcttaaaaataaggtgaccatatatgtagtgtcttataaagtacttaaataaaataatatatttattgatgttgttatatatattctaataaaacatagtggtcaaagttgtttattggagactgtgtcctttcccacaacgacaagtattatcgacccggaggatatacttactttgatccaccatattcatttgcagaattgtaagagagatggcaatgtgactgatcaatcgaatgaacagaatctgaagacggaagtggctagcctttgatagacatgagcatcttacagttcactccagcatcaagtgcaac

SEQ ID NO: 17599 - DNA, 429 bp, Oryza sativa
  unsure (1)..(429): unsure at all n locations
agcttctcagccgcactctggctaacatttttttttagtnggcgctgcccacatattatttctgcagaagatgtgatgctatccactctacgtagccacgagatcaccccattcgttggtgtcttgccatttcgctctgcaatctcaatcttttggcggacttcgttgctcctcgcaagcatattctcggttgccaccttgagattcctcacaattgttcctttcttgaaagcaaaatgaacagaattgagttaatgttaaggattggagctaagctaagattaagtcaaaatatcaaagacaaattacagttgaactccagtaaagagttatgtcgttccttctcttgttaacgctttgtttcgataggagtctctttccttgcctgtgtgtggacagggtctggtgatcattnttcaatgctcatgt

SEQ ID NO: 17600 - DNA, 493 bp, Oryza sativa
  unsure (1)..(493): unsure at all n locations
cgctccctanngttgtgntcaagccaattaatgaacttgtttataggngtttccaagtaatctagtatgcagatgacactttaattctcctcagagcatcacagagagaaggtttttgttttaaggctttgttgaactcttttgcacattctactggcctcaaaattaattaccataagtcctatttctacccaatcaatctgtctcatgagaatgctgagctctttgctggtatacttgagtgtatcataggtacaatgccttttacttacctgngtttgcctatggggacaactagaccatgggtagtggactttgcaccattggtagacagggttgatagaagattacagctagcccacattttttgccacatggaggcaaactcactttgatcaactctgtgatttcctcaatcccaacatattatatgtgctctntgtagatgcctgtctcagtggctaaagctatagatactgcaaggaaaaactgt

SEQ ID NO: 17601 - DNA, 57 bp, Oryza sativa
tattttttttttgcggcgcgctcatgtgggctttacatcagtaaacttgtttggcac

SEQ ID NO: 17602 - DNA, 243 bp, Oryza sativa
tacaaaataagttggtttaggagtcacactctaattgaacacgttggctaattcatgtatgtcatgactatggcctgtagctcttggtcggcgatgtgcacttattccatctatttaatgccggatttgcttacatttctttcacttatgacagtctagattacacatatgtagcatatttctgcagggtgcttctagcattgttctctggagccttaataaatctatctctctatgaacagc

SEQ ID NO: 17603 - DNA, 477 bp, Oryza sativa
  unsure (1)..(477): unsure at all n locations
ggantagctaactattatacactgtataagcagaatcttgtttttgaagacactcagcatcaatgccattcctcctctttgaaggcaagaatatagttaatagttcctaagcactaacctgataaattattatcttcaggttgctgcgaaggtcattggtgaagttcacgcactaattattttcccagttgtgccatactntatcctcgctatcttttatatgttctggntttctgccacactccatctcttcagctctggtcaagttctccgaaatgactgcaatacagattgttgctcatatgatctgaagttgggcaaagtaaactgcgacaactgcttggggtacagcatccattacacccctcatattggtattgccattcttttccacttatttggctgttactgggcaacccaattctctattgcttgctcttcaaccgtgattgctggatcagttgcttcatactattg

SEQ ID NO: 17604 - DNA, 283 bp, Oryza sativa
ctttccctaagcaattcgtcggcacatatcgcacttgtggtcactggtgctgggaaagctggggcagtgcataaggcattctcagataagcaaagctcttcagacttgctggctgttgagatggtttcacagcaagagggagtgctcacttgggtcactgacaaaccagcagtgtcaatgctggccagcatctgaagcccactgtgttatataagtttgaaactctgatccgaagtataaaaagttcaggggattttcattttattctctgttgcattagtcc

SEQ ID NO: 17605 - DNA, 360 bp, Oryza sativa
gtagcatagatttgtcttggaaactacgcataatctcatattttagatattataaactcgcctcgaagacagtaaaaataaagccgagcttcctatatttttctatactgttaaccggagggagtagttatttacccaatgccaattgtcctttttacttctctttatacaagtggtattttaagtttaaactttgtactattttctttgtttgaagcacctaacacctaccccctccgtcccaaagaaaaacccaatccggttggattctttttgggatggagtagtacttcatgttcctctttgtatttggtttctatcattaatattcgcgcccatgcttatttttatatataatac

SEQ ID NO: 17606 - DNA, 486 bp, Oryza sativa
  unsure (1)..(486): unsure at all n locations
tatatactccactagtttaaccgcgtgagcttcttctgtgttccaacaagtctgaactctgaactttacgatgaaacacttcttcctacttgtgtctttctgaatctttatttaggagcgacctgcttggaccggacgacaaccacgcanagatcgatgtaagcagcattgccaatatggacaaccgtgagatcattgagttgcagaggaacgttattaaaggtaagagaggatataccttttttcttcccttctcgtctggcgtcagcacgtacgtgtgctgctccatgtaatgtacaggtgttcagtgactgaacttctctgaattatgatgcagagcaagacgacgaattggacaagctggaggagacgatagtcagcaccaagcacattgcgctggcgatcaacgaagagttggatctgcacactanngttgatgaagtatctcagtagctcctatttgaagcatcgttctgaattaactgg

SEQ ID NO: 17607 - DNA, 374 bp, Oryza sativa
cacacaccacacgcataaaattactatgcttgcaaaacttggtactaccagaatgtttccctaatgattcaaggagccatgcattagtctggatgaaaggtcgatatatatggagaaggcgatattcgtcccttttacctctaatgcaagactctcttaacattccatacctattgttgatgatattctaataacacaaaccttaaatctagacatgaatgaagatatatgggaggaaaacatatctctctctctctgactctgactctgactctatctttctctcgatctcttaatcttgccctgtgtgtatgcgtgagtaaacacacaaacacacacacaacccacatttcctaagcaaagtacaaacttag

SEQ ID NO: 17608 - DNA, 419 bp, Oryza sativa
  unsure (1)..(419): unsure at all n locations
tgagaagcttttcttagagaaatattttgttcctgaggatctggnacgtntgtttatagcaattttctttaattctgctaattttccaagtacttaaatgtatttgatcatgggctacattgtctacttttagtaaactgtaactgtagttttgcttttccgtgagaaattgtatatacccttgttctggtttttctaaagttcaatttaaaaaatcgttatgaacaaacggtcctttacactatgttcaagtaggggtttaacttacttcatgcaaacattattctttgagtgtctacgggtctatggcgacacccaatctgtatacaatgaaaatgtgcaatgttccttattctgatttccatgtgataaaacaaaccctttaaaggancaattgggctggtacccttatggttgat

SEQ ID NO: 17609 - DNA, 443 bp, Oryza sativa
  unsure (1)..(443): unsure at all n locations
ctctgntattatccatttgctccgtgacgacgtgacgttgatgcctgtcgctcttgcagacacagatcatatatatcgggaggaaaaaagtacgtagcataacgctcgacgtctgtgtaaaattcacccctgtaattgacgattcatgagtcgacaagaggctcgaattgcagatacggtggtcgatcaattaagctaggaggatagctagtgcctaagcggccaaaatccaccgtgcaattcaggatatatattggttaagagtaatatagttgactaagtggctggggctgtatgccaagatagactttatatagagatgacaaaccttttaagattaagggccgggtctgattgacatgtaacgaaggtgcgcgatagcacaaccccctaaaatttgggccttaaagttccatgtttacttcaaacaatgatctcgtcta

SEQ ID NO: 17610 - DNA, 484 bp, Oryza sativa
  unsure (1)..(484): unsure at all n locations
cttcaacaacagnacgctatgcagcgatactaatactatctctcctatgcacagcacagcctgaagcagtgaagcttgtgaaggatcaacgacgacgcagtagttcacgatagcatctcctgtttcaccaccgccatggcacgcactgtccctgtgcatgcacatacatgttgactcgagaaacacactgaagaatgggacgcgcgagctgcaccatgtcgtgcgtacgcatcgacgatggcgtgcatgttcaccctgctggtactggtacagtatgaccgacagccggacggccggcaagatgggtggacagtggtggacgcgctgttcccggtattcacaatgtagaaattctacagaaaatcttctatcgcccaacctatcttngacctcaacagccacacaaattctttgcgaaattgatgatgtaccactactagttaggtntcagacattcggcagacacactggcatagtggcatgc

SEQ ID NO: 17611 - DNA, 489 bp, Oryza sativa
  unsure (1)..(489): unsure at all n locations
taccatccactatctagccatacaataacagatggaagatgtttcatcatactgcgggcaaacaatggtccatcattccatcaatntgcagcaaccaggcttattatgaagaagttccagaatactggtcgggctgctcacaacagctacttggaatactcaagttcaagatggaaattggcacactccaagggattcagccaacataatttgataaaaaaagacgttataagtatgaataagaagctggcatatacttcggctagtagcattgcaacgcaaacagtatgacaaggtaccacgcattgtttaagagctaagacaaagacaaaactgatgcatccaacgtaccataaagagagcgaacagcagcagtcagatagctatgagaagagaactaggagagggataactagaatggacagaatggcatccatggtgtccatgacgttagtcgaccctctgcatcttgctctcgccggcgtcgtc

SEQ ID NO: 17612 - DNA, 441 bp, Oryza sativa
aactataaatactcagctttcaagtctacttaaatggacctagccacatgtctatatgtattctggagggccataatcatcgattgactatcgagtccttttctgtccacggagccacgtgacctctttgggccgaataagccgtgtatcaagttgggtccactagggatgagtcctatggctggagaacaaccccagcactggcctgtggacatgctcctcctctaattatagccttctccggcgcccaaaataatcggcgtttggttagatcaaagaatagcatcgttgctttgctgagttcatcctgtgatcggttagatacaccatattgctttgtactgaaccccactctgtacttctggtgatcaatccaaatccttgatacggaatacagtgcttgaccatctgtcttgctggtctcgattgatagacgaacaa

SEQ ID NO: 17613 - DNA, 434 bp, Oryza sativa
agcttctgtgcaatcaccacaggacatcaatgtattttcgcgacgaaacagagcagcaggacactaggactggtgaggcttaccaagatgcaccagccccagatgctccacaaggtactgcaccatttgaattaatcctttgtgaacataaatccactctgctaggtagttgcctgtatgggtctctaatgtacattttctgaaaccatgttagaacatgcccactgctgatgttagaattattagagtttctcagagctagatattttcttatgacaagtgaccagtgaaagattctgccaaagctaagtcaatctgttgcgttgcagacaaaggttcacctcgctctacacaaccgcctccccctgttgaatccagtcaaaaagagtctaaaattgccgaagatagtcaaacccttttaccgcaagcatccg

SEQ ID NO: 17614 - DNA, 403 bp, Oryza sativa
  unsure (1)..(403): unsure at all n locations
atggaaacgcacatcttttgtgttggtagcaattagcataaccatttgcacccttctatacagactgcacaacacgacttcttgaagcttngagcagcaaaggcacttatgtacctttctcttcttttggtgccttctagtaaatccatagtccgaaagtgccggctcgtctacacccaccagtactcctagattattgatacagaaaggcaatcgagcgagctgaaactctgaaagcctctctgaaactaacttgtgtcgcgatctgttcgtctccttgcaacctctgaatcacatgaacaccacttgagctatctgcttgctgcctgaacctgatgagagaaaaaaagtgctgaagagaggtaaaccaagtagtaagtcatgtgaccttgtgtcattcaag

SEQ ID NO: 17615 - DNA, 322 bp, Oryza sativa
  unsure (1)..(322): unsure at all n locations
ttttttgnnaagagttttttttangaaaaaaaaaatattggtagaangnggnaaaatatacaagtaattaagtaaaatagcacttggttattaataataagagtatggtatatcgactattggtatcatcataaataaagatatttaacaagaataaatgacaataataatattaaattttaaaaagacaatggcaaatgttaaaaaataacgggtaaacattaggaggagttaaacacaaccaagcaacatgaataaaggacaggaatgaaattatgaaataaacccataatgacttcaaattgttaagataataaattca

SEQ ID NO: 17616 - DNA, 440 bp, Oryza sativa
tgtccataggcgacagaacgatcttgctgccggaagtcttccctgcggcagcgttggccggacgaccaccgtcgccgacttgctcaccacaatgctcatactatctctatgtctaggctctagctcgatctgagaataagttatgacaagcattacggatcatgtatatatacaaccatacatgccggagttagccctcttaaagtgctatcttacctctatgccgccgtaagagaatccctcgccggccacggttataatgatacaagaattttcctataatgtggacaaacagaacgttgtattgacgacagatatgcctctaatgtgggaaaaacagaaagcctaactgatcctctacacgggtgttgcatcagtctgcaggtcaatatcctatacgaccctcacgttatgaggagttttcggcgcacttgatgaat

SEQ ID NO: 17617 - DNA, 489 bp, Oryza sativa
acacggaattaaaactagcttccactctctcttgaaacatgtggccctttttcttctggtagcgaaataatgttgacaaaaggatgttatctaaaggtcatcctgtcatgcatgtgtcacataacagcaagaagacctctaagaaagttacagctcactcaaatacacaaagggcaagggtaatggagagaattgaactctcagctcacagagcaacggatatcaatccgtctgtcataccatttgacaacacccccttaggctggcaggaaagacaaaagcgggttgccaaatcgccaaaataggctgactatgacattacccaatatccttcctcccagatggttttagaacacactatttaagaagacataaactaccttcctgtaaaatgaaagagatttacctgaaatcataatctggatacatgtggctaaaggtgagaactagatagatcaattgtctccgactggaatgagcagcacacac

SEQ ID NO: 17618 - DNA, 388 bp, Oryza sativa
  unsure (1)..(388): unsure at all n locations
aaaaacnaacnacaaacgggggggacaaagcaanaaaacnnctaaacctacaaattgggagccaaagcattaaaaaacagagtatttttaatagaaagcaataaccatatttcacaaaaccaaaacaagtacgcaattgaagatctacaatgtgatggcaatgaaaaaggaaaaacgattttgaagaacaaactagaagcatttttccggaaaaaaaaattaaactactagcgagtaaccaatgagaattagaagtaccaagtgaaagcttttgaatccacgaatagaagcgccaaaggattaaaaaggagaatacttaagtaaagctttagaatacaactagaagcatcaagtaggaaaacaagaaaatggaacaccaaccaccatg

SEQ ID NO: 17619 - DNA, 276 bp, Oryza sativa
  unsure (1)..(276): unsure at all n locations
cttcgccctcgatctgaggaacgtcaacgagagaggaaatgcgcaagacacgggcgacgtaaacaggttcgggccgctaagaagcgtaataccctactcctgtgttctggtggatctgtgcgtgaaggaatacagagaggccgagagcgaaagagagttcaggctgtagaaacccttcgccagagtccccactccncttctttcctctctctcctttntttctaggcctgngcctnncttttatctggtcaggggtcaccacatgggcctctagct

SEQ ID NO: 17620 - DNA, 435 bp, Oryza sativa
  unsure (1)..(435): unsure at all n locations
tcaagctggggataattagtactagattaagcatgcgcttattcttgtcttcttctatgggccatcgaatacttcagccgatgtacacttataacgcagttgaattgaagggataagatcgctcacatgggaaaagataatggaaggctctccttattttaccaaaagaatatgagtgacacctacatgatagcaagctcaaacaggataaacgataaaacataaggaangggcaaggttctttctatttagcctgaaaatataactctcgaagcctttaacactactcaagaatcgacttttcgaacaacactcctctaagttgcaggcgaactataattgcctccctatacagaaatcgctccctcgaggacatatcaagacccgcatgcaaaaaatcatttttggtaggcgagcctaataacagaccacatg

SEQ ID NO: 17621 - DNA, 345 bp, Oryza sativa
  unsure (1)..(345): unsure at all n locations
tgtatcgggaaaaaatctctgattatcctcttttactttttgactttgggacgagtgattcatataagtatacagaggacaacatttttcatgtgaactactattatgcctaaataatataattatttttatgttttgaccacaaaagagacacatttcagtgcttggacagacaaaaacataaccttattcaaatgtaactaanaattgccatcagtcgtaaatgggacgtttatgctttcaacaaaacacaagttcttaatatatctgcagagaagtttcatcatctgtctccataagtattaaatttctccagatgatctctacaactctaatgtgcttata

SEQ ID NO: 17622 - DNA, 445 bp, Oryza sativa
ggtggacaaagctatccgtcaagatgagcagtgttactttttgataccgtagaggaaggcagcccatttcatgactccctcagggaagtgtcacaaacctctgttcacgatgggacatcacggtggaccttccaccatgattatccggcagcaccgtccctaccaccctggtaatttcaacaagaacaacaacagtggcagtcacagcagcctcaacccgactccaagtccattaatgattccagctcagtcagatcagtcagatcagctagctcagccagctctgccagaacagcccaagaggttgggagaaaaacccgaactctgcttcaattgtaacaaacccggacacacggttgtgaagtgcccgaagccaagacgtgccggacccaagttcgttcaagcccgtgttaatcatgcatctgcagaggatgcgcagtcagca

SEQ ID NO: 17623 - DNA, 290 bp, Oryza sativa
  unsure (1)..(290): unsure at all n locations
aaaataaatcaataaaacataattagcttataatgataaaatattgtactcttcaattaccacacttatatactccctccatcccaaaatataaggcacaaccacttttctcttatatctcataatataaggcgtgtatgcatgcatacatttattagcacctcttggtccaatagaattganttgttttaaatcctataccatcaaacctcccaatcacattgtttgcatgcatcaagatgatccaaccaagaagatgattaaatgttatcttggtctttgtgttatga

SEQ ID NO: 17624 - DNA, 479 bp, Oryza sativa
  unsure (1)..(479): unsure at all n locations
ggtttcgtcgggtcttccaaagcctatggatattgttcattatggcaacaatggatccacagttgctgactcagccgcacaggcattagntctgctaagtactgggagtgaatacaacagggcaaccatccttgataaaattaatctggaagagcttgtcggcatgctctttgatgcttccatggagcaaaggattatgatagcacatctgcttaaacatttgcggacgtattcacgcccaggttatggaaaccaactgaagatagtaattgacggttctctgccataggtaaattctgtcatatagttgagtttttgcctaagattggaattcgatactaaatgttctgcatcaccataccactgaagaatagctgaaatatgtgtcaatgaatacaatttctctgaaggtaaaataaagtgttcgcgtgctataagtgtccgtagtaaactatctattctttgtatcccgtacatgt

SEQ ID NO: 17625 - DNA, 381 bp, Oryza sativa
  unsure (1)..(381): unsure at all n locations
agcttggcaataaacccttccttgtactcatacatgacaaaatcgntgtacttgtcatagagctgaacgcaagaaactcatcaggtactgttcaaatgttcatatatcatcacaaaattaaactcggcataccttgttacgcatgtcataaacataagcctcgacagcattctttgtctccttggtttcttccattactctgtcctgaagagccaattcatactcattctcagaagctttcaccaattctttagaccccagtgcaccatanaccaatccagaaactggaacatcatatttcttcacattctttatcaatggctcaacctaaaaaagaaaaaccatttcaaaaaatatgtctcatataaagatgggcagctc

SEQ ID NO: 17626 - DNA, 410 bp, Oryza sativa
  unsure (1)..(410): unsure at all n locations
tagctaccatcctccctcgccttggtaacaatgatgatattaagggggtggcttggcatgtcatcgatgcaatcattcatggccgccagttcgacattgtgtctctcatgatgcaagagattgccatctcccaggagaccttcactcatggaatctattatgccccttacatcatgagggtgattcaagacaagcttggggctgctgggcaaaatttgaagaagcacaagcagtacaagccccgccttcagcttggagctccccgtgctcctatggcggngccctcctctcattctagagctagctcaagctcagcacctcttccttctccttggtatgatccaaaagctgtctttatccacagcatgcttattttggaatgcaacccaacgagcacttcaacccggtac

SEQ ID NO: 17627 - DNA, 435 bp, Oryza sativa
  unsure (1)..(435): unsure at all n locations
aactaagccttgccgaccaatgtgcgaccggcggcgtgtgacccacatatgttttatgtatgtcgaggaggagtcggctgccgtcgtcggtagagacgcatttgagaatgtccccgcttggcgcttctttgtataaatcgttaccgaccatacagtagatctttgctttacaggatattttctcggcctctgtatcgtcctcgggcaactcctcgctgctgatgaatttgataaatgggatgcgccagtcgtttgtgggttcgatgtcagcaatagcgcgttctgcctcggtgacctccgagctgatgtctggggtgttcgggccaacttctgcgctaacttctnttaccgatggttttgtcaagatgtccagaaaggtgccgggctcgagcggttctcgtctggacgcgcgtcgtgctaagtcgtctggctcga

SEQ ID NO: 17628 - DNA, 418 bp, Oryza sativa
  unsure (1)..(418): unsure at all n locations
agctttccttctgtgacaaaagctggtcatgccctgtttactgatttcctacggcattagtagggaaagagcgctgtgggccaagaaaaccttgctgagcaatgttgaaagcatatggataccgctgctccgtcgataatggcaaggacgcaaaatttcaaggatacaaacataggatggtcgcccttcttccagctaggccatgcagtaccaactattcatcttgcaattatctgccagccatttttccatctattcctttctctctctttcttttttgatctgatgaatcatgtagcccatcagcatctgtacaacctgtttagtcttgcaaagctgcaattcagcatagaagtagatgcccatgttatctgtgtgtacagntctgagcaagcaaatacaactcaaactgaaccct

SEQ ID NO: 17629 - DNA, 416 bp, Oryza sativa
  unsure (1)..(416): unsure at all n locations
cacttgggaattatatgctgccatattatcatagttattttttatattaagcagctctcataacgctgttgtgtctttgtgtgttaatgcatagtgcttttgcaagttatggtacagtatggcttcacggaaataccgaaaaagtatatcctgaagaggtggactcaagatgctagagattcaatcccaaagcacttggaggagtcgtacttgaatgataaggaggcggcatcatcgagaacttatcggaacaccctcctgcacaagtctgcacttgatatggttagacttggtggtactagttcggaaacatatgagaagacagtggaagtgtngacaaagctgattggagaacttcatgtcatgtgtacttcgcaagntgtatacaacaatgaaattcactgccgagatagaac

SEQ ID NO: 17630 - DNA, 464 bp, Oryza sativa
agcttaaattagaatttctcactgtaaatcatatatgttaaaacacttataaaatatggcatggaaaaagcgctattgatttaatttaaaaataaaagaattcataaacatatccttccaaagcaggtgcgagagaggataaaggggatatgcagagctggagatggtagatggtgcaaataataataagatattgtaaatttagtttaatacacaaaatgtaaattaaagtttgctataaattgtttattacatgccaaaataaattggcatctgtaagtgttttaactagactcttcctagctaatttattctctggaactttaaaaagtaaattcaagcacaataaaaataatatagagaacggttatcatgactatatgtctatatcgataataaattcctcatgcacctaatagtaagtttaatagtatagccaactattagcttcaattcatctatag

SEQ ID NO: 17631 - DNA, 439 bp, Oryza sativa
  unsure (1)..(439): unsure at all n locations
tctcgggttcttggtctctgcccgaagcatcgaggccaatcttctataagatacgagctatatagcggatgcgccccccagcatgcttagagatgtgcaatgcgtcaccggctgcatggccgccctaagccggttcatatcgaggctgtgagagaaggcactacccctatttaagctcctcaaacgctccgggccgtttacctggacggaggaagctgagcgggccctcactcagttgaaggcatacctcagttctcccccagtcatggtcgccccggagccagatgagccgttgctactctacctggcggcaacgccgcatgtggtcagcgcggcgttggtcgtggagcgcgacgaggacaaccctcactccgcgcatacccaccctgtgtcgactcgacccgggagagagcanggacgagaggcccccgagtcgaac

SEQ ID NO: 17632 - DNA, 369 bp, Oryza sativa
ctgcagcttatcgcttcaataagaaatagtttgcattatttacctcctggttcacagccgaatcctacgtggatgcctaaggatttgaaggctactcataagagaatgttgcaacgttttctggccccagagcttatacataaaagggcctaagagccaaaggataaaatgtttaatgagttgcgaccaccaccggtatggatgcctaaatccatagaaaaggcataacctcttgatgtagaggagaaggacaaacactccggtgataaaagtgaattgtcttctaaagaagacatggatatcaacatggtatgtatgttgcttatggagttttgtgctatagatgaagccgaaggtgctcaattctca

SEQ ID NO: 17633 - DNA, 429 bp, Oryza sativa
ctgacagtttccttgctatacaaacacttagttgctatatttttttgctttggcgaaactaaccggcgggtaatattcttgtcattgctaacccccgccgagataattcgtccttgctccattgtacagaatgagaatgtgattgtcttgtatattcaacgggttcagctcttcaccaagccatcatgaagagactaccactccttcatcatgcgatgtctcgatggaagaccccgaaacttcgcgacgtctcttgtacgacaccgacctcgaacttgtctgtgatcgggagaggcacgcctactatgtgcagagatttgctgtggtagatgagcctggatctagtgagcttactttgctatttctgagcactttgacagaacaagaagattgaattcctttcacttttccataacgagacgcacttac

SEQ ID NO: 17634 - DNA, 179 bp, Oryza sativa
ttaaccacctgcggctgcagcctgggtgcatatgaagtgttactttttgattgcgttttctcactgcgcgctgtcatagcgatatttgttcagccaactgattataaaatctgcaacacgatcccttagctggtgccatagatgactaccgtgatttgtgtacttggacttggatacga

SEQ ID NO: 17635 - DNA, 403 bp, Oryza sativa
agcttctctggcttgtgaatctgtctatattcttaccaagaaatgggggtatttatgcttacttgtttgagggcacaaacgccttgttaattacctgccttctttggatgcccatagctagctaagcgcaattaattaatttcctgtaaaaaccacgcggtaaatcatttgaaatagcaccctcattcctgttcattttatgagtttgttgtttggtatgaattcttatgcttccttctaatacatcgaagcacaaatcgtttatttgttcgtgaagaaaaaaaaatctttgaaaaagtgtcataacatattacaataattcgagaaaagatcactcaccagcgtgagtattcgagctaaatttcacgtggaatttaacagcctttgtgtcctagcttcaact

SEQ ID NO: 17636 - DNA, 430 bp, Oryza sativa
  unsure (1)..(430): unsure at all n locations
tatcacggacctataaaactcagcttcttcaagagttgctccgcataagctacagcttagttgttatcttcccctgatcctacgacgtcgtcgacgatggccagcccggacccggagctaagccctggtggcagcccggcctttcgttttaagatatcgatatcgatcgaatagtgagaggaggaataagcgtgtagggctatattatatgtgtaataatggaagataatacagctatatttataagcgcanggagaccgaaagctggtcgtccctacggaaaaaccgtccttatgatcacgaacgccggcaagcgccaaaaaagctgtcggtgtcataagcgcagcttgttttgttggtgtggccttgtgttggctcagttcactggagtgtggaaagcacacgcatctacacaatatgtgctactccc

SEQ ID NO: 17637 - DNA, 388 bp, Oryza sativa
agcttctatatagctggtctgctatgtgatatttcaatgatgtatccaactctaggttacactcattatattttacaaagcagtcggtatatcacttggatcatgttattgagggattcataccgcatatgctatatattgatatcaagctacttggttgattgcaattatcaaaaccactcggttggttggattatttattccttgactatatgcttagcttgttcagctaaccacatatgcgggggctacacctattaggtgcatctagttcatgcacctgactttatatttcagcccttcccagtttcatatttggtaaaagtactcgggagaccatggcacagacgtatgaagcacttggctttatagtaatctggctccagag

SEQ ID NO: 17638 - DNA, 434 bp, Oryza sativa
  unsure (1)..(434): unsure at all n locations
tagatgcaatcaaaccgtattccacggatctctcttggttgtatcgtctacctttgctagagcaccttaacctgtgggaaatcgaactcagtacagtggtcaattggcctcaagtggtgaacatgattccattttgagggtccttggtctaagtggttgctcactcactagtgccaaccaatccctcccacaccttaaccttacgaatcttgaggagcttgacctctcctacaactacttggactcaatcgagtcttgttgattttggaacctaacgagcctcaagaaactcaaccttgatgctattggcttgcatggcctatttccaaatgtgctcggagacatgngttcactccaggttctagtattatcatcaaatgacatgaccatganaacaacanatctgaccaccctgtgcacttgaggttctacac

SEQ ID NO: 17639 - DNA, 465 bp, Oryza sativa
  unsure (1)..(465): unsure at all n locations
agcttgtttatggacatgaagctgtgttactatgggaggttagaatcggctcaagaagaacggagttacaaaatgatttaacagccaatgaatattataatctcatggccgatgaaagggaagacttggttcaatctatattaagagcccttgcaaaggttaccaaggataaggaacgagttgctcgacattacaataagaaagtggtgcccaagactttttcggacggtgaacatgtatggaagttgattttgctgattgggacttgggataacaaattcagcaagtggtcgccgaattggaaaggaccgttccaaatctataaggttgtgtctaagggagcttacatgttgcaaggactcgatggagaaatttatggacgagcactaaatggtaagtactcgaagaaatattacccaagtgtttgngttaatgcatgatcggctgatattgccgatacatgat

SEQ ID NO: 17640 - DNA, 412 bp, Oryza sativa
gctctttaacataattacggagcagtagataattctctgttttattataaatacatgtgatatatttgagtattataaatctaaaaaaatagtatattcaaactcaaaagtagttatattcagactcatagtactagaatatatcacattctatatcaagactaatagtattataatatatcatatcatatactagatgcacttagggcattcgcaatatagcgtaaaactaatacataagcaatacaatatcttatttagtcatctaataatatagtggaactagttcatagtaaagaaatagcaaaagtcacatataagcatatgaatatggtatgagaagtggctctacttcctcgctagtcctaatactatttgccatcaatatacattgtgaatgctaccgcgtcac

SEQ ID NO: 17641 - DNA, 426 bp, Oryza sativa
agcttttcttctgtgactaaggctggtcatgttctgcatactgatttcctactgcatatagtgggaaagaacgctgtgggccaagataaccttgctgagcaatgtcgaaagcatatggataccgctgctccgtcgataatggcaaggacgcaaaatttcaaagatacaaacataggatggtcgcccttcttccagctaggccatgcagtaccaactattcatcttgcaattatctgccagccatttttccatctatgcctttctctctctttcttttatgatctgacgaatcatgtgtcccatcagcatctgtacaagctgtttaatcttgcaaagttgcaattcagcatagaaatacatgctcatgttatctgtgtgtacagttctgagcagccaaatacaacttacactgaacccttctatccc

SEQ ID NO: 17642 - DNA, 440 bp, Oryza sativa
tttgaacacttgtgaattatatgcttccatattatcatatgttagtttgcatattaagcaggtctcataacgctgttgtggttctgtgtgataacgcatagcggttttgcaggttatggtacagcatggtttcacggaaataccgaagaagtatatcctgaagaggtggacaagagatgctagagattctatccccaagcacttggaggagtcgtacttgaatgataacgaggcgggatcatccataacttatctgaacaccctcctgcacaagtctgcacttgatatgagtagacttggtgggactagttctgacacatatgagaagacagtggaagtgttgacaaagctgattggagaacttcaggtcatgtgtacttcgcaaggtgaaacaaccaagagaatcactgccgagatagaacaattgggaagaaacctac

SEQ ID NO: 17643 - DNA, 409 bp, Oryza sativa
cactctataacaatatgtgcatgtgaaaaacgcgctactcgatttgaatttaacaaataaaaggaattcataaacatattcttccaaagcatgtgcgagagaggataaaggggatatgcacagctggagatggtagatggtgcaaataataataagatattggaaatctagtttaatacacaaaatgtacattaaagcttgctataaattgtttattacatgccacaataaattggcatctagaagtgttctaactagactcttcctgctaattttattctctggaactttaaaaagtaaattctagcacaatataaataatatacagaacggtgatcatgactatatgtctataccgataataaattcctcatgcacctaatagtaatttaatagtttagcaactatt

SEQ ID NO: 17644 - DNA, 409 bp, Oryza sativa
  unsure (1)..(409): unsure at all n locations
tgacagacctgtctagggctcggctaacaattctgaatccatactttagttagttttaagcaagttagccttctctctctctctctctnttcaattgcatatgggacgaacaaaggaaatctatcataaatgtggctacaaatcaaacgtgtgtctatcttgatcaatttatctaacttaagctatggtaaacttaaataaattgtgtctatcaagcaagcaacccttagtagtagtaacatataaagagcgatatatgattgtattgtgatgagacaacaacattacaaaatgttcactacggttctctctttatatgatggaacaacctgatccttattctaacaaaagaaataagtaattattactataaaggttgcagcaccaacaactacattccacattcaat

SEQ ID NO: 17645 - DNA, 392 bp, Oryza sativa
agacattatattggactcttcccgttttgaacccagatgctctatatttgaagacccaattgaatcgaagtgcccagggtttactaatttgaaagacgaacatgaattatctgggttttcaagttctctgtcaccctgtgctgggtcatacatggctgctaagaatgaagtcaatgattcccttgcaacgcaagcaggatttcttgctcaaccaagaaacccaggtaaattgcccatgatgccatttccactgtccctcttcttgcacttcctgtctttgactagatatattgctggtagatgcatcgcaatttttctcacaattactatcattagttacttcaatagattctccaccacacattttttggcatctgagatgcgtcatatct

SEQ ID NO: 17646 - DNA, 410 bp, Oryza sativa
aaaataattagccagcataataggtttcagctaatattttaaggtcttaaagcagaccagcacataccctgttaccattgtatttaacaacaatgttcttgtgtgtgtaaaggtaatgcttattttcgttgtttttgtcagtctcaccaacaaaacctgctcagaggcaacttgcatgttattcaagagaggtagagggtagatagtgttaaagcaaaagaaatgtcatttaagtttagaatttgttaccccataatggaagatcatctaggcggttggacaatagaaagcaatgcagagaaagttggactaaaagaatgtcattactcagaaatgacaaatagcatacacaataagaccacaatgctcaattaaatgcagagtcatacctatgaagagtcaaaccaata

SEQ ID NO: 17647 - DNA, 287 bp, Oryza sativa
aaaaagcggggggaaaaaaattaaaattaagtattgcgaacaagtttatagatagcgagaaggaaaacttagtgtaagggatattacatagagaaacacactaacgaaaattaaagaagtaaacacattaaaaatagttaaaactcacaaatagtgttaagaatatctggcgaatatttatgattttgatgaaaaagaatctataatattgatgctgcattatgaagaaaattattgtggcggtttttgactatgatatggatcgaaggatgacctgaccgggccaa

SEQ ID NO: 17648 - DNA, 237 bp, Oryza sativa
ggctctgggaggcggctctttctttggagagtggcgttttgtgggcttggccattagtggaactcggtggccgcgatggcctagcataagtggaactcagtagcggcgacgactaatcagcactagcggaacccccgcggtcgctgcaatggccggcgacactcctggactgcgtggagagcggtatcgggagcagcggaacctaacaactgctgtgacagctgctgccccatcctt

SEQ ID NO: 17649 - DNA, 393 bp, Oryza sativa
  unsure (1)..(393): unsure at all n locations
agctntgagagtcagagggcgtctcccgatgtaacggtggataacctgaaagagatggtggcgcacggcgtgcttccggcaaatgagatcatcgggtggcgtccagcgcgcggtgaaacgttttcgacccccgacacacacgaggtggtggtattctcccatttcttctatggcgggttttcccttccgacctcaagtttcttccgagggattctagatttctatgggctcagtttgcatcacctaaaccccaattccatagtccacatcgccaatttcatccatgcttgcgaggcctttctggggattacgccgcattttgctctattccgtcgcatcttcttcctcaagccccagccaaataaaatcaaaccgtgcgtagttgggggagcc

SEQ ID NO: 17650 - DNA, 397 bp, Oryza sativa
  unsure (1)..(397): unsure at all n locations
tttgttattttaatctcaattaagttggacggctaaaaatattggacccactgaattacataaaaattgagggatggattntattagcgtcacgtggtagcttgaaagcattttatggattggcacgtggcagtgtgagagcattttaagaaagttcaaatggacttttagtattcaacaattaatataaaacacaattattaaattatctaatattattaaattattataaattatggtccttgatgcaataattcaataacataatccgggttatcgaattctggtatagtgtctccgtttcacaatgtaaaactttccagcattacccatattcatatagatattaatgaatctaaacatatatgtgtctagattcattagcatctatataaat

SEQ ID NO: 17651 - DNA, 430 bp, Oryza sativa
  unsure (1)..(430): unsure at all n locations
ctgcaagncttactactacgagtacatgagcgtgttgtttatatattgcccaaattatcatgctcacgatcatcctctagtctagctgtggatcatacttcatatatcactgactgctaatgccgccatgcctgatataactaatcattcatgagctaaaatattaatcccaagggaagaaccgggcctacatgtcgtggatcatatatatgattactacgttagcttaattagaaaggatacgcagacacatcttataactgaaatatgcgaattacgctagctgcgctanatattgatatgacggctaattaatcattggtactgatcatgaaccgacttgacgctgaaattagctaagctaataatatgccttctacgggctgcggaagatgattatgttcttgcacagnacctactgttcctccct

SEQ ID NO: 17652 - DNA, 410 bp, Oryza sativa
  unsure (1)..(410): unsure at all n locations
gatctctaacaatatcaagcagttttactatttttggacccncacaaagacgcggaaggaatgttatcactcttttgaaccgcacacaaaagaaaactatggctaaaataataaacactaatgccattgacacaaagctaggcgtaagatggaaacagtaccatggtaccacgtaaagagcatgtccacgggaaaaggacaaaacggagggacaacaggagtcatgaatcatgaaccaccctctttttcttcacaggcttgagaatattgataatgcatctttcattgctgatgacattaataccctcaaagacctcgctggattttcctctcccaacatttctgacaacttcataatcatcctgctcactgctcacagagatcataaattcagatacccgttacacgat

SEQ ID NO: 17653 - DNA, 345 bp, Oryza sativa
caagcgggggagaaacaccggaatattttatatcttcagccgacgaaaccaaagaagacaagcccttaataactcaatgacccatccaaggattagttgatccttgtgccaacaaaaaaacaaagtaattcagcagccacaagatcacatcactgtttacgattattcatacagcacactgattgtctagttccaaatttcttaacttgaaaatttgcgtgctgtcatcttctcagattcatacaaaatgtgattgatatggctccttgactgactgcacaggaagaatcaattataagatatgttcaaaccatgtaaaagacgcaacgatgagaagtatcatcc

SEQ ID NO: 17654 - DNA, 365 bp, Oryza sativa
  unsure (1)..(365): unsure at all n locations
agataaattttttttttatatganagatgtttgagaaccatgcatgtacactggcttatggtnngntatatgaaaagcactataacaaactagacagggatttctcacacttggcagtactgcaaattgttcctaattaaatcatgggttccatataacattcttggatgcggatgaagccacttggtcaaaccggtttgttaatattttacccatttgcagcatatgttcgggcgattaaccacgccatgtgactatggcagcttgatctgttgctacctctgcgccactgagattgatcgggctttttgagtcactcaacgataggccaccaggcagccgccaccctgccattggttttggcg

SEQ ID NO: 17655 - DNA, 467 bp, Oryza sativa
  unsure (1)..(467): unsure at all n locations
cggccaccgtttcttccacctcattagctcctaagaagtcttatcgtgatatatganctntaagattattttaggccgtttttaaagacgtcttcttagacatgaaaacaaggctggttaacgaatatgattaatcttaaaattctaaatgagatgcaacttttcttctttcttttaatgaacaaaaaacaatggccagcgggttacaagtgtttactctagaatcagatggacattgactaatttatttatgataaatatttacacattacaaacagggactagcacaattggaattggaacatctcatctcactgtgggattctgatcaagacggagtagatatcaacctataatagagtacctacgcagctagtctaagctcaaaactttcctttggatagagtgctatatagcacagtgaacttatcttttagccggagacaattgcaccggtttgatagaca

SEQ ID NO: 17656 - DNA, 451 bp, Oryza sativa
agctaggataactactgctattatgctattatgtttcattaccatgtacgcgagatattcatggatgactttggatatgttcggcacgccatattaacgattgtgattgcatggatgacttagtatatgatgagtcaacagcaacctcttggattacattatttctctatcgtcaatcttttggtcgttgatggccaactgtttctgagcagaaacacccactcctggcggtttgtcttgcatgatacgtttaacaatagttaaagtgctgtcatccgatagtaagacattggctctatagaacacatggatcatccattatttctaatattctctttatgcctcgttggctagttgatatattgtatgaagtcctgacctgctaaccatccttgtgaccttgtgagctgactcacacaagaaacttcctaccgtctataactactgctgt

SEQ ID NO: 17657 - DNA, 444 bp, Oryza sativa
  unsure (1)..(444): unsure at all n locations
ttgccttaactcttgcaaactctgctaatgacgaatctttttatcctccgcagcctatttctggtcgaatacccttaatggccttatgatcaatcaacgaccaatgacttcaaccttgcttgatgtcatcatgattactggattagatattacctcatccgccaaccctatgagcttgaataccaagaacacttttgacttcaagaccaagagcataagtggctggtcaggctatatcgnagcatacatgggcaaaggacctgtcacccctcgagaacatgcggccttcctactaatgtagcttgagaaattcctgttctgcggatcaagttgtggccctaccgccaactggcaggtcctagccgaatccttggttgataagaagcacattccattgtgcaaatacctgctcggctatttgtaccacactcttgagtatgcatc

SEQ ID NO: 17658 - DNA, 428 bp, Oryza sativa
agcttctttatagctgtttgctatgtgatttttcaatgacgtatccaactttaggttacactcatcatatattacaaaacaggcggtatattactcggatcatgttattcacggattcacaccgcatatgctacatagtaatatcaagtcgcttggttgactataattatcgaagccactcggctgcgtggattatttattacttgactatatgcttggtttgttcaattaaccacatagtcgagggctacacctattaggtgcatctagtcaatgcacctgaccttatttttcagcccttaacagtcttcagatttggtacaaggactcgggacaccatggcacagatgatcgaagcactctgctctggagtaatctagctcgagagaagatcatcttttcgattgtgaaagtctcaagggctactg

SEQ ID NO: 17659 - DNA, 274 bp, Oryza sativa
aagacacccacaggcccctgtttattctcaccacagacaacgcgccaagccgaacaaataccaggcaagcccaatagaatcaggaccgaagacccaaaagtggggaaggaccgagagcgaatgagaacctctacaggaccactaagggtcacccacaagagcacgcggagcaggatggcgcgcaccgcaaggcggcgcaaagaaagactttggcagagggagacggtgtcgaagcaccggatcgctcccgagctggagatcatccagggaagga

SEQ ID NO: 17660 - DNA, 449 bp, Oryza sativa
  unsure (1)..(449): unsure at all n locations
agcaagctggaaagtgcacactagctattaagctaacatatatatgcacaaaatttccatctcttccttccctcaagtaagctgatttcttttttttttctgaaatcctaagcaagcatctcctttcttcttccttataaagagtgagcactgaattaatttggttgcatctattaggtcaagcagtagaaaagatgcagcacatggtttgtaattgagtgcagactacactgagccaagataagcatttagtgtcagaaaactccatatgaggtctacaacgattccaacattttgatcatactataaaccatttacatttgttaaattgtgacaacgaaaagggaaaaanaagagaagaacgtggccatgcatgcacggtaacaaactgggaagcatattggagaactgcacacatatgacttgggagactattgtattagttttat

SEQ ID NO: 17661 - DNA, 450 bp, Oryza sativa
  unsure (1)..(450): unsure at all n locations
tgtagattggttctaccaattaagctcagtgtaacctgtttctgtttacatataggccattggtcagataaggaaatggctcttctcgagcaaggaaaagatggcgccgtcgtcgccaccggcgatgaacatggcttgtgcgagacagggacgccttcggcagcgttatgaaagatgctatcgccttgtctctgggtatgtacttgagtagctaagctcatgcataacttctgcacatttctaggagatgacaactgcagactatatatagcttagttctctcttctctccagcactttcatgtagtcacatgaaatcacatgctaattaagatgtttagaatgtcaagaaagagatgcgtgctgaagtaaatgaacaattaatgacatgatttagataagcttagagaacaattgcattattaaanaaaaagatactagctgatagcta

SEQ ID NO: 17662 - DNA, 417 bp, Oryza sativa
  unsure (1)..(417): unsure at all n locations
tgcctccatctactnccacttcgggatcgcgacactatttttgttgacccccagaggcgatggtacttgttattggcggcatattctttgattctttccatcatagcttgcccttgtagacctggtttatatgcaacgaacttcgcccagtgatcccttagcattgggaatgtgtcaagatcagcgtctgcccctctaggatatttatctggtcagatctcccttgaagctctgaaactgctctgcccttatttttatagtccaccttttcactttgtcctctgtacccgcgggaaaggtgaatgctcgagcattgtggtccacagatctcttcttcgatctgggaaaagcttcatgactctgtgtgccttgttttgtgcagtacactgactgacagcacgttatccgccaaaccaa

SEQ ID NO: 17663 - DNA, 381 bp, Oryza sativa
  unsure (1)..(381): unsure at all n locations
tgcaagcttgagtcctgngacgacagcgaatggtttactgttaccgcgcgctgtataccatagtgtaagactatgctacatgctcaccacagtctgcatataccacactttcctatgattgagcacccgtgcgatcaaccttatctgtcacatgcacgacaccaactatacgatctctactcatggacgactgcagatacataggaattgtgtatcgccctagagaagaactgataataccgtctggcgagaataaagtttacatcttgcatgacgtgatgtgcgcttaaacctaatactatactggagtgtatcatgatggatgctcgaacctgctcataactaataaattgtgtctcacttggttgcacttaatataaa

SEQ ID NO: 17664 - DNA, 326 bp, Oryza sativa
atcactatctattgcagtgatgcgcgcattcttcagagccacatattggcttcggctttgggcgcaaccgtgaaaaagtgatgaagatggagagcttctgaaagttatatgtcgtaagcttgagacgacggctatgctactctttgccaactatggatggagattcacaaatagactcaaataatctgagtgctccttatattggtctggtcattctttttatgtgtaggtgtgtgattaattctatatgaactacactctgtgataagcgctagattgtaataattggctgtagcatctgtgagcaaaggccgagatgtcatcta

SEQ ID NO: 17665 - DNA, 434 bp, Oryza sativa
agcttggaggtctcccgacgtggctgatctctactgtctgtgtgatccgggttagtaatgtcgtgtgggtaaagtgtaccccctctgcagaggttaacaaactgttcgaacagccgtgcccacggtcatgggcggatgtgaggtgattcctagcgtagttttgtttgactactgcttgtgaaattgctgttgtgaaaaggggttcgatgttgaaaaatcagcagctgacgggatcagctaggcccgggtggccgtttgaaaagctgttggcccgggtggccgtttgaaaagctgttggccgggtgccaatcttgtttcaattctaaagattgatgcattgcacatactccgaccggacgagacgcactgtcttattcgagtcatttgagaagcactcacctagtcgttttataaaagaagtcaaataaaataaa

SEQ ID NO: 17666 - DNA, 417 bp, Oryza sativa
atgacacaacgaattgttctgtctataatgtatggctatatttgattgtaacatgttaatatcattaatgcagcttagtactattttcagcactaaattcagcgcaaagttttcttaccgtttgccgcgatgttcgatgtcattttcacaagagcgtataaacattatataattttagattcacctaacggttcatttttgctgtcaaaatgttacagaaacgaaattattggatgtattacttcttaataggtaatatccatggcaaccttgataactaagggactactgtctacttccaccggttaggctaggctaatatgaaaactgatgcacatccatgttctaaaaaaaaaaacagtacacatccatctcttcatattcacagtaattgagtaattttgggcccgatacata

SEQ ID NO: 17667 - DNA, 484 bp, Oryza sativa
cctcccagtcacctgccgcatgcaagcttcaaagatacttaaccctctagccgatttcattagcacctcgggttctgcatgacgtaacatttcctctaagtcgaatttgtcctcaatagaaccattgtcatgcaccatgtcttcaacttgtgttggaactacattttcaggcccgtccacttgttcttcggcatgacctgtccatatttcgtacttgtccataaatccacgagttattaagtgcttcttcactataaaagcatcgtcaaagtcccaggctatttcattcttacagtcagcacatggacaaattatcttcctcatattgttcttctcaccggtgccttggtaataccaataaatttagacacttcgtttcttatggagacaataacctcgggcaatgatacatccattcccgacttttcatatctcttaacaaatacacagtaaactattgcacaactaatactaaatttgtaag

SEQ ID NO: 17668 - DNA, 410 bp, Oryza sativa
  unsure (1)..(410): unsure at all n locations
agcttaattaaacanaaccgatgagctcctgctctttggaccgaagcaactgagaagcagatagtcaaactgattgaanaaagaaaaggaaaaatcacagataagggaggtcgtccttcttggagaagaagtagctaacacaccatttgaaaattacaaatttgagccaaaaagcaaacttgacatggccctataaataaatgtatggtttagccaagaatacaggaataatagccaaaaacactctaaagcaaacatggccgatccggttaagctcatcggcgcttttggcagcccattcgtgcaccgcgtcgaggcggccctgcagctcaagggagttgcctacgagctcatccacgaggacttggagaacaagagcaacctgctgctcgctagcaaccctgtccaca

SEQ ID NO: 17669 - DNA, 296 bp, Oryza sativa
  unsure (1)..(296): unsure at all n locations
ccttatacaacagacatcttgacagcattgttgtggccagacacattcagatcctcttggatgatccactcatgacttccgtggaatttaagacacaacagagtgttagtgggctgtggaaaaaaatagcttaagacagttcaacagtcgatgaaaaaaataatgatatttccttgattaaactttactgtcactaacanagttgatttctatttccaccaaacatacatgaaaaccatacaggttggtttgaagtgcttaacttaaatggccactacacagacatatagaggtaa

SEQ ID NO: 17670 - DNA, 412 bp, Oryza sativa
  unsure (1)..(412): unsure at all n locations
agctntctctccctgccttaatttcatctattatctttatcgaattctgtctaaaaattcaactaagaaaatgcaagacttatattatttgaacgagcttaagttatgcatgggcaaccaccttcgaacaagcacaaaaagctttgtcctgccttaattttatatacaactaacattctggcccgcgcagattgcgcggctattatcattatatttactctcatataatagcatatatgtcttcttaatgtattattcgaacatattaaaatgacaccataactttaaattttgtactaactgtatgaactactaatgtgtaatattcatattggtatgtatatacgcgttacttattaagtatttataatatcacattttagctatttgtatatcatattcttatatggac

SEQ ID NO: 17671 - DNA, 432 bp, Oryza sativa
  unsure (1)..(432): unsure at all n locations
acgccatcgatgcggtgcggaccaacttttttttttattatcctggacgacatgcagattccctccaccgagttgaagcccacgaatgcgcccttccatggaggcatcccagggctatctgcaacaccactctgccagaacactctgtcgaacacctctggtgctcgggagaacctccccacagagaacggctacttcaaaattgctgatttccaaacagcgtatcacgccatactcggacgcccggcgttagtcatgtttatggcctgtccacactacacctacttgatgatgaagatgcctatccctcgaggagtcatatccctgcggagcgacatcaaacaagccgtcacatgcgacaaggaaagctgctagatggtctanacccgcgagatcgcgatcgcccgagaagacatccgactggctgaacca

SEQ ID NO: 17672 - DNA, 367 bp, Oryza sativa
  unsure (1)..(367): unsure at all n locations
agcttaaaataaccaaaccatttcttctttatagctcgacccggagtaagtgcgtatgagcacgcacatttcaattctgcgaatacagaaatgttttatacatgacaagcgcctccatactaatcaatacaccgagcgatttctttgagacaaagcaactaatcgaaagtgtgatatatacattctaacaaccaaacaacaaggaatttggaactactaatgaacaatcgacatagatctacttcgatcttgcagtaaatcgaaggctaactcatcttcttgaactccagtgatcgccgccaatgcccgcaccattngattaccgagatgctctgactggaagagctcgagccgacccttggcatct

SEQ ID NO: 17673 - DNA, 403 bp, Oryza sativa
  unsure (1)..(403): unsure at all n locations
ttgcttcanatgacaaacaggctagtttctccatctctaggaagtcatccatgagttcccaccgattggagccttctgtcacactgctcttagctcctttctctttcttgatgtgcgagagctcagagaccagagcattggcccaagattcagtgcaactttcttcattatcaacaccatcttcagacatggagggcatactatgtgggttgcttccattctgactcagtgcaccactcaagtggatatacatgttgtgattcgaagtactcttacgttggctaccagtcaacattntaacttctcagccaccgaggttgcctgctgtcttaacatacatgttacttgatgtttgcagctactattccttttggccaagcctctttagcattttgggttcatc

SEQ ID NO: 17674 - DNA, 420 bp, Oryza sativa
agcttaaagagttagtgggggataattttattgtaagataggatatgtatcatccatggcattgtaaataatattagtgtctgtttgggttagtgccctcgtaaaattttagtagtgcatgttagtgtctgtttgggttagtgccctcgtaaaattttagtagtgcaaaatcttagatatgttatggcactactaaaattattattgacttggacaaaagttgaccacaatccaaatatgtaccgtgctatattaaagttatcaaatgattcgtaggactaaatttggtatccaaccaagctatttcgcagtacataccaactatcaagttaattagcaccagctactatgagaggcttgttaacaacccgtctatttaaaaaatatataatgcatagtaaaatgttcttaataaggcta

SEQ ID NO: 17675 - DNA, 435 bp, Oryza sativa
  unsure (1)..(435): unsure at all n locations
aagtaattgctcagcaagattcttttgttttctgtctgcactgtggtaagtcaatgaaattagttgcaatgaaatgagaaccttcacgtgtgtatcatgatattaaccaagaaatagtctcttgtatactccttattaatttgagattagtaggtaacaagtcctgtcattcagtagagacaaataggtagaaaacctcgccgtaaactgttttcaaacagcacatgcttaaagtattataattcaagcatggcataaactagacttacatgtcacaatcacagctataagtgatcatgtatgctaatttagatggttcatgctatattgctgttgtaggaaatacctgtcaaccaagagcaaccaagaaatacagatgctggatgaacaagtacngctactgatgctggatgtcgaaaggaacaacaccactac

SEQ ID NO: 17676 - DNA, 456 bp, Oryza sativa
  unsure (1)..(456): unsure at all n locations
agctagttggtcgaaattaatttttataatttaagcgccattaatttggttctggtgattaatgacaaatccaattccatgagactaatattgttgtaagcatttctttgtctagtctcatatggatatgaaagtggagtgtgtgaaaggtgattcccggacttcatatgagttgagatagaaatggtcattgatggtggaactaaatcacaaggatgaaatgcatggagatcaagctatatgtatcacactttctctccatgtacatatagatatgttcatatataacatttncacgtgattgacatatgcatatgagactaatgttttatttgagtcttatctcttatttagtctatttacattgagaacgtggagatgatgaaggtatgcgtttattttaatgtatatatttgacaaatgccttctattcttgtattggataagctctcaatg

SEQ ID NO: 17677 - DNA, 424 bp, Oryza sativa
  unsure (1)..(424): unsure at all n locations
tcttgatcttacccaccaggacatcaaactgagcttgtgttttgtttntacggtctacaaaacacatttattataagaatctgctgcataaaagagaggaaagttcaaactgtcagttggcagtaccttcaacctccttcaaggctgagtccctttgcgcagctagttctactttatctcttttcaaggcttcaatctgtttctccatttgagccatcctggtagcttgcgctgtttgaaatccaaatgattgatgatacaattatgacagcataaatcaatggaacagatctgggtgattaccttttgatgaaccactcagctcgaagatggagttctggagctgtgcaattcgctcccttaattccttctccgttttcttggcatgctccttggcctcgtgtagctggctcctaacggcttc

SEQ ID NO: 17678 - DNA, 344 bp, Oryza sativa
  unsure (1)..(344): unsure at all n locations
agcttaanaggaacaattctcattctatattctccatctacttttgataagcatatttcgcaaatctgaaaaatttacctttgataggcatatttcaatacaaccacctatcctgttaatgactttctcggatttaatgcgtgactctccattcttccacacaagactggctacatgggcatcgagaaatgtaaatattaatgaatcgcttgtttacgaggaataactagtagcatgtttaaatggatgataagtagaattacttatccttgggcattgtgccaagatgaaatatgattatcaaaagttcatggagggagtatgtcattgcatctaatgctgat

SEQ ID NO: 17679 - DNA, 312 bp, Oryza sativa
  unsure (1)..(312): unsure at all n locations
agcttgctcgctctgatggacttttttgtatttggctgatgggcattggnctttcagttatgatactgtcagctagtactcaggcatgtatgcttgtgaagttgaatattgatcaaatttcagaacaggaaagagccagttcaagtttcatttccgaaaaattctttgcttctgcattggttgcaattcgggcagcaagtttcctatccaatagctatatatgtgagttcgtcagatataccaacctcatcaaatattataaatttatttggtgcacctgcttattcatgcatctatttcttgtgatgcagt

SEQ ID NO: 17680 - DNA, 407 bp, Oryza sativa
actcagctcactggagtctttctccatgactaactctatttttatgtatcgcatgagccgacacgacacctagttaatttcgctcgctccaccatcaaaacttacttggtggggggcatgtgtttgatggtattttggcgattatatgtgtacacaagacttactcatgatggacaaagcaaacaatgcagttgtatgttggctagcttatcatttctacacaatgctcggccatgtatatacacgcaaataaatgcatgcacaggcagctgggaatatatatacttggattagcatatgtgcatgtataattaaccaataactagccgcgtgaagattggctggtgaggcaatcacgtgcatgcatgcatgtactacagtagacggccgtatgtgtgtgcatgcct

SEQ ID NO: 17681 - DNA, 302 bp, Oryza sativa
agcttgtcttgaaatttatctcaccgagctttatgaggagagcggtaacgattgaacatggaatttttcccaccacaattatgtctagctcgccgctaactccattttttcccatcttggctaagggggaggtctccatgttcttactagtggagggaggaaggaggacacgggtatttcagtgctatggtggacagtcggcggcacaacaagtcttgtgcgtacacccactcacataaagggctgactgtgaagatacctcttccacgatgacgactcagcgcattgtgtgggctttccat

SEQ ID NO: 17682 - DNA, 346 bp, Oryza sativa
tctcaaatgtagactttagagtcatactcctacctattaccaagctgaattaatattgtgatacccactgtaagttttatctaagaagtggtgggtgagtgaaagggacctggacacggactccatcaattcactgaaacgcaacacaaatcaggacatgcttcctaattccaagccattgtccatttgtccacagtgatccaactaaacctggagactttggagtaaaaacctgcaagaatgtgtgctaccacactacagtacaactactgcttgcattgcacccatattgctcgaacatagaacatgacctatggtttgattttcctttattttgttgggaaaa

SEQ ID NO: 17683 - DNA, 462 bp, Oryza sativa
  unsure (1)..(462): unsure at all n locations
gcttgagatgganacgaccaaataaaccacatgcacaaagtttatttctaatttaaccaattggattaagaactaatgcattaacttatttaagtaataatggcatgtttagatccgctgtcaagttttttcaccctatcacatcgaaagtttctaaatttctcgcgaaactagggataggaatggtccgggctgacccaccggcctcattggcccgtccgacaaaattgagtccaataggtaagtaggtcggtccaaaacccaaaacattggttctaatgggtaaaaaatattgaaataagagtttacaatctatataaaaatacaatttataaaaaagacaatttggaatagaaaataaagaatattagtagctagccgcgtagtttgcgcgggccaccatgctagtttcagttattttcatccatctggctctagctaaggtgcctcaccgatgtgcat

SEQ ID NO: 17684 - DNA, 343 bp, Oryza sativa
  unsure (1)..(343): unsure at all n locations
cctgatggtgatgtgggcgatgcacccgtgggagcgcgacgcgcggctggcgcaccacgtgctccaccaggcgcacccggcggncatcgtcgtggagatcgcttgcacccggacggcggaagagctcctcggcgctcgcaaggcgtaccaagcgctgttccaccactcccttgaggaggacgtcgcctaccgcgccagggacaagccctactgcggcgtaagcaattcaacaaacacctcgagtgcacgtcgtcgtcggtgcgtcgacctctcccgttgatctttctctgtgtcccgtgtcgcgcgtggatgcaactgctggtctggcttgtgagcgcgtacc

SEQ ID NO: 17685 - DNA, 415 bp, Oryza sativa
agcttgctagttgtgatcaaaataactgtgttttaattgatagagtaactgtctctcattcgaagatcataggatttacaggctttagaagtgacacaatgaacagtgaagcacagcaaatggtcctagtgaagtcatcactgaaggtgttgcagatgctgacaagcattgaaggggaaatctgcaaagcactgcggtacaagatatcgaagcatcccttcttgttaagaaacctcgcagatatcttgtgagacaacatctgagaccaagaattaaccaagcttgcagtaggaattcttagaaacatttccattgatggtgacacacggcacgagattgggaacatgaatgtgctcataaccagactgatgaaagcattccctgacttacatagaacctgcaacacagatgttga

SEQ ID NO: 17686 - DNA, 386 bp, Oryza sativa
  unsure (1)..(386): unsure at all n locations
agctgaatgcaacggctcatatagcttgtgccgtcnttgaaagtcctgcagatgaaagccatgtatttcctgctctgaatgatgaactgaataaaattaaaatggtagcaatgctagctgtgtccatgtcaaactgaaccacagatttcggatatacattgcacggaattatatatttggcccatagagcgcgtggtatattatgataacaggagttagctcctgtcaactgtgacaagcctggagaggataaacactcgttcttcttttttcttttatgtgtgcattttgtgccaataggagagatcgatgagtagttcacatatggaggccatgctacatggttcacacgtatggtatactatgggcacttgactgattagctg

SEQ ID NO: 17687 - DNA, 397 bp, Oryza sativa
  unsure (1)..(397): unsure at all n locations
tgctaaccagacagcaagggtaattaatctccggctttgtgtactgctcgagatacaccaagattctcaggaatctcagaccacatgcaagcgatttgcctcgacattcagtcgatccaaacacgtcgctgccttgggctttagctctggcctcagctaccctcctcttcgggaagctcccgtggctcgatcagtgcagccgttttggttgacatggatgttgctgtagcatgacaaattaatccaatccttgcaagttgtagccgagttgctgaatggctcgacgggcagccgtactcacgtcggcgtcgcgtgactacgttttcgacgctctcgatccgcgggtntatgctgctctggaactgtcgcgcgcacagattatttcatatcaccttcg

SEQ ID NO: 17688 - DNA, 433 bp, Oryza sativa
agctaggtaaaccactgtgcaccctataactcatcaagcaattcatcgataatagggaggggatacttattcttgacagtaattgcattcaaatgacggtagtccacacaaaaccgccacgtgccatcttttttcttaactaacagcactggagaagagaatgggcttgcgctaagctgaattattcccttatccaacatctcagtaacctctgattctatctcatccttttgggcaggggtgtaacgatagggtcgcacactaacaggttgagccccatgcagcagaggaatagtgtgatcaaatgatcgggaaggaggtaaaccagatggttatcaaagataccagagaattcctgaaacacttgctgcacactggttggaattaactcctgctctatatactatgaagacacataactgaacaagataac

SEQ ID NO: 17689 - DNA, 390 bp, Oryza sativa
  unsure (1)..(390): unsure at all n locations
actacttactcttttggaataaagaaataatatgtgggggcaaaaggttcacatgtttaccaccccatcgtctctatatttactgggaaagacaaatgatattataacgtcatatggatcatttttaattaccaatatatatagaatttaagagatgatatatacagaaaataatgatcatagcaagctaatcattattnttcgccaactaaaattctcgtgccacaaaatgattcatccgattctaatttcttatattttgtactcagcagcagtagtaataccattatcatcaagcctatggtcacatcattcacgccaagtgtccaagcacctactccgaagcttcttgctgattaaattatacggtaatggagctgcttactgatg

SEQ ID NO: 17690 - DNA, 361 bp, Oryza sativa
  unsure (1)..(361): unsure at all n locations
agcttaccacacgctactcttgtagtactctttccatattataatatttnaaagtatgacgctgttgactttgtaactaatgctcgaccattcgtcttatttaactgttctatgcaaatacaaaaatacttatatcatgcttaaagaacattcgatgataaatcaagtcacaataaaataactgataattacataaattttttaaataagatgaaaggttaaacgtctgttaaaacagcaacggcgttctacatctaatacggagggagtgcttgcttaacttctcgcgacaagcagaggcacagcactgaccgtctataatctggcctacttcacggtaaccagtcgccatacatgaagc

SEQ ID NO: 17691 - DNA, 376 bp, Oryza sativa
  unsure (1)..(376): unsure at all n locations
cgacttcctttacagtatctgtggagtatatacaaaccaatatctctaatactctcacatcggtggctcatcatctctctccttacttttctcttccaccttgtcactcaatttaatgtggcactcttagagacagccacataaaaaattattctcgcaaaacaaanaagtttatgcatgaactaattaatgcttcaaaattngaaacgatcgaacgaacggacaatgtactccctccgtacttacaaaggaagtcgntgtggatagcgataccgtctccaaaacataactctgacttttttctataaaaatatctattaaaaagngatgtatgtatacttttataaaattatttttcaagacaaatctattcata

SEQ ID NO: 17692 - DNA, 446 bp, Oryza sativa
  unsure (1)..(446): unsure at all n locations
agcttctcccgctgtttccgattataagtctatttgactttagtcaaagataaattattgtaaatttgattaagtttatagataaatatagtaatatttataacaccaatttagatttattaaatctataattaaatatatttatcttaagttgaaaatgttactactttttatacaaacttcgtcaagcttagagtagttaaactttaaaaattaaaataacttataatagagagcactagcttagctatagctagttcctgcctgccatnttacacagcggcagctctgactctagctgcgcttgcgtatccatgcattttctccctacgtgattcaacatttcggccaatcaagtctaggtccaaaatatatttaacacttacatnttgtgtcgataatagaaatgatttgcattctagttttgataattatatgataaaata

SEQ ID NO: 17693 - DNA, 369 bp, Oryza sativa
  unsure (1)..(369): unsure at all n locations
gatacagattatataagccaataagtggacttaaaaggctaagccaataagtctaagcctaaacatagaatgccttcagcgaaggggtacacctcgatgaatgccaattttcagaaaatagatgcatgacttntttcagctaaatgaatggcacaatggaattcctttgattataggagcggcactgctttgctaatgttntgaaagaacgganaacaatgagtgagagatacatgaatagtccgctgcatgatatcaatatgcaccgccaacatgttcataatatgcataaagcaatgcaatggcgagaagattgagacagtgatatgaatcgtttgagtcttatgactacggatgattggaatatgt

SEQ ID NO: 17694 - DNA, 393 bp, Oryza sativa
agctcttgcctacatcagcgattctactgttgcatttagctgattagtggacgacatgaacttgctcgattctgcacttctaattcacaattagctaacataatagcacgctgcatttacgaatagcattggttggttgctcgttgttttgtggagtagcgtgtctattggccaacggataaaacaagtatggatgcatggcagcttgccaattatagttagagattcacaaatatatttcaataacgtgttctccttatcttagatgagttattttttattttaagtgcatgctctcaatgtttgttgactacgctcttttttagtgaactttgtaataatgcttgagctcgtttgacaaagaccggatttctatccattcttaaaaattgg

SEQ ID NO: 17695 - DNA, 401 bp, Oryza sativa
  unsure (1)..(401): unsure at all n locations
tttctggcaagaaaatagggtggcaggtcatcaactcatgatggatcagcaagcaatatcactgcagtcttataatattaaactcccattttccagaaaaataaaatatagcgcgctgtgaactcatagagttgatcttgtaagatgtaaatgagcaacattcagtcgtcatacaggaaatcgaaagaaattaagatataccctgctaaagaagataacctcggatgaatcctcaaacaatcataacaaagccaagaatcataattcagtcataatgaagccaagaaccctaaaatccagagtacctcggatatgagattgacttcagtggaggtgtgagcagtagttgaaactagntccgaagaacacactatattgccaaagataaaaagaacagagac

SEQ ID NO: 17696 - DNA, 357 bp, Oryza sativa
agcttgtcatgttaggctatatgcatgcgttatttggaattaagtgcagcggttgtacgggttaattcaaacatatgtatgtctagattcgcagtactagaatgtatcacatccggtagtagattatttttttatcggacacaaggagtctagctcatagaaagtggctagcaagctggccccacattttttatattctgtcctacgcacttaaaagcgggctgtacctgtatttgtgactgggttgctccatcatcaccaagttgactaactccaaaggtcacgttaacaaaaccaatcaaaacactatcgagagaatcaaaatttatcggttttagtcattaaagggttgagata

SEQ ID NO: 17697 - DNA, 365 bp, Oryza sativa
tctaagtggcggctatcgctgcagtccaaggagggtctctcttgttctaaaaggctgcagcactggcagcctactcacatgagagcgcctcgttgtccagatcgtgtttctaacaaatactagtggagacagccctatcaggcagacagtagtaatcataaccaatcttatctctaacgctgctaacactacatgatccggactaatctagtactatggccagcacaacctatagcctcatttcaaacaccaacagctatattgaagggtccgcatgagctgctctcatgagcctggcacgctgacccctcataagccttctaccagccgtgatgcatcatgcatgtgactcgaagagaatattt

SEQ ID NO: 17698 - DNA, 388 bp, Oryza sativa
  unsure (1)..(388): unsure at all n locations
agcttgctctatggatggatctanggcatgtctatcatcggtcagcttggtcttctttgacttagctttcttctttggagccggagccgatggatctacacccgatgctctagtttttttctttttaccggcattggctggttctctaatgagcccttggagaagagttgaagtcttgggggcatgatagccgatgacagggggagatggcccacctccatttggaattagacctgtggcatactctatatctctgccactattgctttggtgtggaggagaagattcttgtgtctgctaaacaaaagggaagattagtcaagttatgaatcggctgacaattgttcaaatagaactaatgaagtctacgtgtacctgaaggataata

SEQ ID NO: 17699 - DNA, 380 bp, Oryza sativa
  unsure (1)..(380): unsure at all n locations
tacttgagaaagagtgatagttgcaatagggatatatgtttagtgtttatntttcaacctatgtacttgtaaagatgttgcattataaatcgtatgaaatcatgaaatttgattgttgatttgaacttaagtgtaatatctttggttcatgaatatattttaatgcatgcttgctatattatagatgggttcatcttctttttattgcaacacatgacttgatgtgctatatgtatgctaagctcttgaatattaatgaacataattcctatgcttgatgaaatcattgtcaaaagggggagacgagagaagagtctttttttgagaagtcttgaaagagaagagagcatgtttttgtgtcaagggggaatttctttctt

SEQ ID NO: 17700 - DNA, 421 bp, Oryza sativa
  unsure (1)..(421): unsure at all n locations
agcttgactaagaaataaatgctggacagttcaactttaccgtacgctacccagcattactgtacactactcccatcccagtttaaagacagcttgaggtcgttcaagatcttattcctatgttttgttcttctaactgctgatcctatcctttagtggccgcattacattgctgccttacaaaggaaacgctctttctttcaattaaaatttcagaacttcataactcagtaaacataactcgtcttactttttttttcctagggaatatttatgcttgtctctggatactttagacttccttacgacattccgaagcctgtntggagataccccatgcagtacatcagcttccattactgggcgctgcaggtaaattaaatcccactctttgacaggggaaacacactaaatttttatc

SEQ ID NO: 17701 - DNA, 460 bp, Oryza sativa
  unsure (1)..(460): unsure at all n locations
tggcgatgccaccgngcgaggatctgaatagatccctcttattatatataggaactactctaagaaactactaatcgacttatattgctgggtgaattccttatagaaagtagaaactgtccctcgacttatagtgcaggacatattttgctagcctcaccattgcattacaaaaacgtagttggagtgaggtgcagtagttagatcaaggaattggcgtgacgggattatgagataaaggacaacaattaaaatttagacctgctattctccagaatttgcagtctttactacagcttgtaagttacaaactactccaattntcaccagaagaacctctctcggggccatgagctacataaatttgttactcctatttgtgtttggatcagaatcttacacagtaagattaaatctgctgcacttaatcagaactttagaccaccgagaaatgagatat

SEQ ID NO: 17702 - DNA, 274 bp, Oryza sativa
ctgcactagctaccacagccgttcgctttttttttggcgacctttctctgcgccagccacttagctaataacacacatcaatgaccatctatccgttattctctcgactatgagcttatgagtcgacaccgacaaagcactactagtgcgatggaccgagccatattcgacaagcatgctgctgggccgcttggaaccgggaagtcccgtgagcctaaccggacagatatcatctggaggcatcccacagggatggcgaccccccaagacagat

SEQ ID NO: 17703 - DNA, 430 bp, Oryza sativa
agcttaaatcgcagaaacaacagtgccatctagtatatctcatttctagaaaaatctgggaagttgaacggtgtcaaacagagttaccgttgaatttctacgaatttccaaagattaaatgatttctctataatttatttattaaacggcgagagtatattccatcggaatattccactaacgcggacagcccaaggactggcctacctgtcggcgaatgatggaggaaataggcgcgggcccgactattatcagctcgtgatgaggacaccgctacggtgactggattttgtcccgatgtttcacggtaccaaataacaactaataacaaatatcgagaatttatagtaaccgcaatcaatagcagaattcaattcacccgtgttcttcacacaatagatgtgacgatcttcatcagatctcgcctttc

SEQ ID NO: 17704 - DNA, 366 bp, Oryza sativa
  unsure (1)..(366): unsure at all n locations
atgacggagatatcgctcaaattaacatcaccatatggccaattgatatgtctcaaccaggaatgtcactcatctctaccacatacaacctctcagatgttctcatggagccatcattcatcggattctcctctgtgacaggcccaaacaactttccgcactacatttttggttggagcatctgcatgaacaagccctgctcaaacatngatattgccaaattgccaaagctacctcgccttgccccaaagcctcaattcaacgtctgggtgatcctacttgcaatagctatcgcagcatgcatcctttctgggggcatcagcactggttttctagtacggagaagacagagatatgctgaactgc

SEQ ID NO: 17705 - DNA, 469 bp, Oryza sativa
  unsure (1)..(469): unsure at all n locations
agcttagaaaactacggtggctaaacacattctctaagcagcgagaaggggctgagccatgctacactcccaacagatcccaaaagcggcaacaacgccagctaaagaccacagatggcattccgagtggatggactccagaaccactgagactgtagagaaagcagagtcgaaaaccctataattccattccttccacagctgccaagaaaccaggagcaccagagagtcaaagccggcgcggagatgctcacgtaagcatgccctgtaggacagccaccggtcctagaaccagctgcacacggagctagacctgccgagcaaacacgcagtcgaagaggatgtggtttgtcgtctcaagatcctgagcacanaaggggtaggccgagtgactacgatgccatgcttctggaggagatcagccgtccagcggcattgctggaatgtaaaccaatgaagaacctacatt

SEQ ID NO: 17706 - DNA, 440 bp, Oryza sativa
  unsure (1)..(440): unsure at all n locations
gcttgtgcaacctatanggctagcaaggttttctaatccaccataaactatatatgtactagcctgtgacaggtgggctcggacacaaactctctctctcctctagagtctagtgctaggcattatgttaagtatctggttctaaggccttaattgataaaaaaaaaggccaaaaacatcatatcaaatgtttagacatatatatggagattaaatgtgggaaaaaccaactgcacagtttgtatgtaaattgcgagatgaatcttttgagtctaattacaccataatttgataatgtggtgctacgtacagtaaatatttgctaatgacagattaattgagcttaataaattcgtcttgcagtttacaggcagaatttgtaattggtttgtattagctatgttaatacttcaaaatgtgtcgtaacttaaaaacttaca

SEQ ID NO: 17707 - DNA, 369 bp, Oryza sativa
  unsure (1)..(369): unsure at all n locations
gtatgacttatacgctccacccgatgttgtttctacagacggnctaatacctgattagactttgagtgaaactttcttgcacaagacttgcaattcaaagcgtaatccattgttcaagctgggaataaatgtagcttggagttctaaggggatgttcaaccttaattggtctccatcgaaccgctggtatataaacagtacattggaaaaggcaaatctcagcgggattttgagatttgggggggattgttggaattaatgaatgggccttagcccactcgaagattaattctttggaaaatcaccaaagcccacctcatgggatggcatgcatgtggagtttagtaccaccttgcttattctatgaga

SEQ ID NO: 17708 - DNA, 461 bp, Oryza sativa
  unsure (1)..(461): unsure at all n locations
agcttgagcaaagctcatacttagcgacatgtttagtttttatcatcatatcagcaggattatcatgagtacttatcttacatacctntggcttaccttgcgcgactacattgcgaacataatgggacttgatatcaatgtactttgtcctcataaaacatctgatctttagtaaagcatatagcactttgactgtcacaaaacaagttaatgcaagaatcaactccacaaaactcagcatacaatcctttccaccaaactgattcttcacatgcttcaacaatagccatgtattctgcttcagtggtagactgggccacaacaggctattatgttgcctctcaactcatagcacaattaccaatggtaaacacataacctgtgaatgaccttctcttatcaaatctgcagcaaaatcagaatcacatattcaacaagcgccttatcagctctgccacact

SEQ ID NO: 17709 - DNA, 469 bp, Oryza sativa
tgatggtcggcacatcataacggaagtggaagaagatggtctttctttgccccggccgaagccgccaagaactatgtacgtcacagcggttgggttgtgcaggataacgtgcctgtcagtaccgcgtactggcgaagaacaagggcacgcggagatcatgagagctttgtcccagattcggagaaagagatgctgtggaccacaatgctcgagacattcacccttcctgcgggtacagaggacaaagtgaaaaggtggactctgaagaaaatggcagaacagtttcagagcttcaagggagatatgtaccagaagtatatactgaaggggcagacaccgaacttcgacacattcccaaagctaagggatcactgggacgagttcgttgcatataagacaggtgaacaagggcaggcgatgatggaaagaaacaaagaatatgccgccaagaagatgtaccatcaccact

SEQ ID NO: 17710 - DNA, 407 bp, Oryza sativa
  unsure (1)..(407): unsure at all n locations
agctnggaggtctcccgacgtttctgatctctcctggctgggtgatccgggttagtaatgtcgtgtgggtaaagtgtaccccctctgcagaagttaacaaactgttcgaacagccgtgcccacggtcatgggcggatgtgaagtgattcctaacagtagtttgtttgactactgcttgtgaaattgctgttgtgaaaaggggttcgatgttgaaaaatcaacagctgacgggatcagctaggcccgggtggccgtttgaaaagctgttggcccgggtggccgtttgaaaagctgttggccgggtgccaatcttgtttcaattctaaagattgatgcattgcacatactccgaccggacgagacgcactgtctcattcgagtcatctgagaagcactcacctagtcgc

SEQ ID NO: 17711 - DNA, 337 bp, Oryza sativa
  unsure (1)..(337): unsure at all n locations
catgttaatatcattaatgcagcttagtactattntcagcactaaattcagcgcanacgtttcttaccgtttgccgcgatgttcgatgtcattttcacaagagcgtataaacattatatatctttagattcacctaacgcgtcattcttgctgtcaaaatgttacagaaacgaaattattgtatgtattacttcttaatatgtaatatccatggcaaccttgataactaagggactactgtctacgttcacctgctatgctangctaatatganaactgatgcacatncatcgttcaaaaanaaaaaaagtacacatccatntcttcattattcaaa

SEQ ID NO: 17712 - DNA, 243 bp, Oryza sativa
  unsure (1)..(243): unsure at all n locations
agcttagatctttcttcatgcacttgttgttggttggctcggatataggcctcaatatcgctgtgctctcgccgttcggctagtcttaacttcgctttctccaatttgaactggtgttgctcaaggtagacagcatgagtaaaggtatcggctaactcatctgggattgaaactngaatttcgtgcagccgaactctgattgtgccacagtcaaccactaagctgtctagcgatgatgcttct

SEQ ID NO: 17713 - DNA, 374 bp, Oryza sativa
  unsure (1)..(374): unsure at all n locations
tactccaaattgcgtgctcccacctagaaaaagaggagagtaagaatgggttacaactgtagaacctgaaactgaaaaccaggttacccagctagactcattcaaggcagacaacgcaaacatagatattcaacaacaatataatgcactgttgctatgaaacgatgaaagcaatgcatcttggttaattgcatgtatggccaggcacaggaaccatttgcatatatggtcatacgaaccattcaacaaactgacgcatgcagcttccataattacaaactttgatgatttcatgaaatgccgtactccgtaaagtacaacaatgangtcaaatggttacaaaggcagcagcaatagtaaatacgtgagctgtg

SEQ ID NO: 17714 - DNA, 383 bp, Oryza sativa
  unsure (1)..(383): unsure at all n locations
agcttattacaacattaggtttgattttatcggcgcagntacatacactgataacgaaattacttttctattggaagaaggatggtaaatttattgatctgagtatttaattgtagcacatggcatgaattctgtgtaacatttacaagtgacaacaggaaaaacagcaatttgatagcaggaaaaatattaccaggaaaaccagtccttttgattcgctaacagattcacttgatctcacaatagcttgtttggctgaaagaagtcataaaggacgacaccaatagcatagacatccaccttatgagaaacctcaccatatcgagctctgaaaaatattgtcagaattttccaacacaaagagctattagtgatcactctat

SEQ ID NO: 17715 - DNA, 368 bp, Oryza sativa
  unsure (1)..(368): unsure at all n locations
cgaaacaaagtgccgtctccaacgagcggcgatagtacccacctcctatgatggccgttgccagatcaaattcagcttcctattccatattttaaggagttaacatggacatgccaaagatgaaaatagtggcaaagtacgcttaagcttaacatggacatggcaaggatggacatagttatctaagcaatttggactacggatggaatntgctcgatgtgtatgacaagaacagacttgacaattgaattgacaaataaagaacactttntctcttccttggaccagtgagatcttaacatcaatacattttctaagacgcctggaatatgtaatgcagagaaacatgagctttcataccagcaata

SEQ ID NO: 17716 - DNA, 425 bp, Oryza sativa
agcttttcctgataacattgatctgattattgatagcatccttcatgcaccgaaagtgccgtgagattgtctgaagagcaactgctgtgtaaggcttcgcagatcctggtccagctaccacatcaaacgatgaaaccacggtttgcatttggtggtaataatgcttgtatttccggtccacctgaaatatatattcttttgagttaaaatgatttgccaatcaattaactaagattactgtgctataagtaaactgtatatctactcttgtatacatataccaaggatcagtcctataaaactattgatactgtaatctcaactcaaagaaattggggttgcactcttgtttaaaagaaagagatttcaaaacaatagactcctagagtactcacctcattcaacattgtcatcaattttgccat

SEQ ID NO: 17717 - DNA, 348 bp, Oryza sativa
  unsure (1)..(348): unsure at all n locations
cttcctcacctctcccttcactctgtttaaccttcttctcttctctcttctcgcttactccacgtgtgttcctgctgtctatctccttccctccctcccagactcgtcggggctctttgggcttaagctattgatagcaagtagtgacggctcggatgacgacaacaaatccaacggcgtcattctcgggagagacggattagttgtcctttggcctanaaggggctatggacggctgatgacgagctcgaggatgataggaatgggagctatggtttccggatctctgttttataattctttttgccaaaatttgtttgtgcagacaagcagnttaatgttccatat

SEQ ID NO: 17718 - DNA, 364 bp, Oryza sativa
  unsure (1)..(364): unsure at all n locations
gcagcatgcaagcntgataaaagcatctaagaaatcaaagttttggctagaactatcaagcacagcataaatacaccagcattgtacaaattgagcctccatttgtgacattcatactcagtcagagtcagtcctttcatcatcagagttattgttgctcggctgaaagacgctgttgcggaattgctctacaacgtcacttgcaatcttatcagccgcattttgagcattgctgataagatcaagagcagcctccttgcttgtcccgtctgcaatccatcaaaggagtcgattccaattctcgggtacaaggatttggtcatcgccaatgccatgctagcttccatacttccagctttcttga

SEQ ID NO: 17719 - DNA, 443 bp, Oryza sativa
  unsure (1)..(443): unsure at all n locations
agaattggaagtcgaagctcttcaccgagtttgttattcttccggcaatcatacgtcgntcgatgagtaccctcaaataaccaaagcggcgtgggaggaattctgctctctcaagaacacccaagactttagggaatcaagcgaggcacatcgcctactgcaatatcggaatgagcacccgcatcggctgggcaccgcagggtacatctgcaaggaggcaatatgggcccaagaagatgcagccgctgcagtagcgaatgtccctgccccgttntcagacatccctgaacaaagagctcgcaactgcgcgcgggcaaggggtaaggtcaacccggacggctctgtcacatttgagaacacaagtgatgccgccgtctatcatgaactggtgagtgcactacttaacctatctaatttccgctcgtatatagtataagttcgta

SEQ ID NO: 17720 - DNA, 381 bp, Oryza sativa
  unsure (1)..(381): unsure at all n locations
agctttggtgttntattgtgcattagcttttctgctgctagtgatgggcaaaactagagggtgcttcctcttctagagggtaatctgacggacctttatctcaattgctggggacaaactgaacttctgtagccgacattttggttcagtgctggacgattgtctacatctggtttggaagatgcaactagagacagctatatattgccactttaaatgttgagtaaattgcattaacggtctctacacttattatgctatgtcatttatgtccctataaacttncaacatttatgctgagtcagaaccgaaacttactaaaatatcatcccaatacaacattgtcacaagacattatggatccttactgatactgacgac

SEQ ID NO: 17721 - DNA, 364 bp, Oryza sativa
aataaagagaaaaatttatttgttttttcgtctgggcctgggggttaataagcaattagcccggtgagccatgagcatttacttacgtgtcaggtgctcgggtatgtattttactcttacgctacgaacaaacactagcacggctgctttgtgcttgttaaattaacatcgagatggattgctggcttggtgctgcaacaaaatttcaatttctctgaacaccaacattgggaattactatagagttcattgttggttcataaactaaaacacactaatgaattaacaccattttttttcgttcaccaactgaggatacgaataagcacaagcaagcatgtgtctactgcatataattcactta

SEQ ID NO: 17722 - DNA, 228 bp, Oryza sativa
ttcaggtgccgcttcggatgggctaaccccctgtaactgtcaagggaaaagattttccagtgttatgccaacagttaaagtgaatagtaggatcttaagatgatgggccttcttgaagaattgttcaaactctggaaactattcgctttctgtaacttgtctaagcagttacacttgttgtttcaactggcgagtggtttggcttgaaatggttttctcgatattttt

SEQ ID NO: 17723 - DNA, 391 bp, Oryza sativa
tatactccgccaaggaacttatgcgtgaccaggagcctcagatatttaacacctcatattttcaatttattctcaatcatccactgcttgtattagaaatctatctatctatctatctatacccatacctaattgggcactatttgtttagctcccacgttaaccagaaagatctaaccggtgattagctagattatcttatcctgaccgtaaataataaaaaactgatttatgttcaattaattaacttcgtgggccacccttagcttaaccacatcttagaaactaatactgagagggacgaggaggaaatactatttagatcgatctactttctaacgccatccggccatcagaacagaagatagaatcaagcgctttcacatccatc

SEQ ID NO: 17724 - DNA, 369 bp, Oryza sativa
ctgcagcttttctcgaaacccattgcatccttatgtttgcacccatatggttactcaacgacttcccaagcaccattagacataatcgagtccatctcactgcgtactgcttccttccagtagtcagcgtcaggagacgaatatgcctcttctatggttcttggggtgtcatccacgaggtatacaatgtagtcatctccaaaggattttgcaaacctttgtctcttactcttacgagtatctacaatgttgtcctccttaggatttccctcacgcgtttgatcattgtgttctatcggtgcaaaatgctcatggggtatgacaatctcttgactagaagtgctaagtgtatgtttcatgggaaattcc

SEQ ID NO: 17725 - DNA, 230 bp, Oryza sativa
tatctcaaccgtgtgctcattagctttcaacacgaacaccaaatgagatgggatcttggagtgaatactaaatagagcttgataatctcattttccgatgtgtttttactatgcccggtgcgctggactatgagttgatcaagataacaatgtgctaatatttacctgaaaatacatgcttataatcttataaacgaaggtacaatgatttaacaagtcttcctggtgct

SEQ ID NO: 17726 - DNA, 339 bp, Oryza sativa
ggcgtgatgttctgcgcggaccatgggatgctgtacccgctgcttcccgagatcccgttctgcctcgaatccggctgtggggccgccgcctgcgacgacaacaagcccgccggtgtctctcacttgggctctcgcgaggtgatcaattagccttcaatcgatctcaatttggtcatggtatgccgctctctaattacttggtgcttacaatcttggatctcgatcgatcgatcatgcggacacatcggcggcggcggcgagagtggatagcgagattgctgcagctgtcaccgcaaccacatgtcatgggcctaattcatggtgagtacgatgatcgat

SEQ ID NO: 17727 - DNA, 397 bp, Oryza sativa
  unsure (1)..(397): unsure at all n locations
actgcggctgcaagcttgatgacagagatatatagtttgttttacaatattcananggtactctctgcccagatgtgatgacctgttgtagataacaccatcatcaccatttagggtatacaaggacataatactgttaatttacatgaatccagaatctaattgtgcaaatgagacaatttatgtatatcatgcacattaaatccaattgactgaaagaatcaaaggaataaaccctactcagagaaacaatgttaattgactatggcatacctgatcaagaaatcttcttcgaaagtgttgggcaagcacaacaacatccagctgtgaaaccaagctcatgcatatgagattacactgaccaagcactaaatatgtgcatcatatacagaacaac

SEQ ID NO: 17728 - DNA, 365 bp, Oryza sativa
catgttagataaaaactctaccggctgcccaggcgagaccacccgaagggaacactccttcaacagataaaagaggctctttacctgctgcatgcaaggtgaactatgagaacttactgaagggcatctctcctatacggtcactagcgcagaatttaaaccaacataaacataacaaggtcgagcaacgaaagcttaataaaactactacattaccacaaaatagaatacatatgcgcttccctctacggaacccccagggatcgcacacacaaagagtgcttaccttacacaagctataatacactccctgcttcaatatactatcaatgggaactcttaacagaatcttaccactaaagcta

SEQ ID NO: 17729 - DNA, 392 bp, Oryza sativa
actaagctcgccgctgtactcctctggctgagctagccgatttttcttctcttctgacaaggccggggcccccccttgatagatcaaatctcttttttgagaacattgatagtatccgctgctatgcacattgggatagtgatcactgtatagtacttctcacatttacccttcttcccttacatatactccctccatcccaaaaaaaacctaatcctaggtttgaaccacacatgggttcaggttcaaacctaagattggtttttttttttgggacggagggagtacatcatccgtgactcatccaatataaagtacaattctataattgaacctaaacataaacttatttatgtgcactctgatgcccgcgatattttaattaaatttat

SEQ ID NO: 17730 - DNA, 215 bp, Oryza sativa
  unsure (1)..(215): unsure at all n locations
tccatatctgtcgaatcgctcatgttatgatcttctacatcctaggtctccgcgtctcgtcatctggcttatgttcttcatgtagcattcagatcgaatgactctatgaaattacgtcgatacttctacatattatgggtaacgtatgagacatccctattntcccccgggggtcttaattaccactgcttatctttcattctgctctgaccatc

SEQ ID NO: 17731 - DNA, 451 bp, Oryza sativa
agcttggacaagttcacaagagctctgatattgcgatggttgttgaacgaatagagagatctaagtaagccttgggtaggattggaaacgccttgcgatggtgtggataaggacctcttcgctgcctcaacaaagataacggtgggcgatgggaatacgacgcgcttctgggactccgcatggattgacggtcaaagaccaaaagacctaatgccgttggtctatgagatctccacaaatatgaagaaatccctgcgccaagggaaagaagacgactcctgggtgcatgacctgacccttgatgcgggttcatctatcacaatcaaccttctccatcagctagtccgcctgtgggaggcggtacggaatgtgcacttatatagcgaagagcccgatcagattgcttggaaattcacaagcatgcggcactatacatgcttcttgggttata

SEQ ID NO: 17732 - DNA, 446 bp, Oryza sativa
  unsure (1)..(446): unsure at all n locations
agcttaaacaaataatgtttactatctaatattacatatnagaatatcatcagttataaatcatcaatttattcttatatagcggcgccatactattattatatcggtacttgtttgtaagtgagagctaataatgagcaaacagaaagatttaagtcaaaaatttaatatatatgtctaaagcgtatgacatgtgatcaaactcatccaacttatatacaaattatataaaaaccacgatacaaaaccatcttangggttataaaaacggtattataaagtctagagggttgaatgtccgcgtttaaagtttaaggtgctacacggacttttattctaagttaagagggtaacttggactttttccttagaacttatatgtcaagttttcacttattcgatggttttcatcatctatttcccgtttaacacatgcatggctcata

SEQ ID NO: 17733 - DNA, 330 bp, Oryza sativa
ttgagcagaatcaatgggcctccccagcaattgcgagctgtttcatacacttgacattcataaggtcccccataaattaagaactagttcctgtgcccctaaaaaccaataaatcaaagaacatttcgtgccattgggacgcacctcctctccttacgctaactcgctgtacttgccaagaaattggacttgtcgccttggtctggaaaagaaaaaagaggatttgatgagaagctgctgccacacagaagctatgttgttggtcaatgccgcgagcaagtaataattggggggcgttttggtgggtggtggatgatgtgatggaggata

SEQ ID NO: 17734 - DNA, 402 bp, Oryza sativa
  unsure (1)..(402): unsure at all n locations
agcttggaggagtacctcgaaagctgtgagtataatgaccatatggtggatagctgcttgtggaatgaaatggatacaaatcgcgtataaaatgtgggttgaagctttgggtaaactgatactgcggaaaactattagagaattgttggggaggggagtcgcggctacgctctcctgcatggnttggacagtcttgactgacaacaactatgaatctctggttggatgaatccatctcctgacgacatgaagagatacaaactgaaatctcttgatggtctcgtttatcacgagcatggagaatgagagctcactctcagcatctatggctacttcaacggacacctgttcggctagtgacgcccagcaccaactgcttaaattttatttcatttctcacat

SEQ ID NO: 17735 - DNA, 352 bp, Oryza sativa
cttgcaagatctctagactatctgattttttatgctaactcttcactcaattactacatatattcatagggtaactatcttattccaatgtcaggaggacaagcaaaaacgctgatgtgttgttacgtaagcccggaactagatgctgtcggtgatacaataagcacattgaaatttgctgaaagggttgcttcagttgagcctggtgcagcaatagccaacaaagaaggcagtgatgttagagagctcacagaacaggtgttcacttaactcctgattgctcatttatataaactatctagatgtgggacttctgtttagatatatataatcatcggtattctctgctctt

SEQ ID NO: 17736 - DNA, 419 bp, Oryza sativa
  unsure (1)..(419): unsure at all n locations
agcttatctactactttgaccanacagctttaacttgtacaatcatctgactctcctcatgtgccgctctgcatctgcatgcaacggcacctctcatctctctctctctcatatatactcttgctacctctgcctacctacccctcatctaatcccagccgtccatttttttatccaatgaaagatagaccaacatagatgagccattgagcactcacatcagacaggagtactatcagctagtactactataggggtatagagagcactgtctaatggaattaagttgctcagggaggacgaataatacaaccccgaagcttgttggctgctgatcgatcgatagaatgtatcagctcggttctatcattataatcatcgccgccttccttaaaaactgggtagtccttgcacctatg

SEQ ID NO: 17737 - DNA, 459 bp, Oryza sativa
  unsure (1)..(459): unsure at all n locations
cctccggcatgcaagctntgcaagtatatactacataagtacattcatntttttcttgatagtgtctgatctatctggtatggtttgaacagcattatattggaatggtgcgggagaactcattaaatattcttgaatttgtgccgggaagatcgatccagtcactgcttggggggctcgggtctaaagctgtatgcatatgtttgatgaagtaaccaataataactcgattaaatccatttgtttaccaggtcatcaagagttatactgaacaaattttattgcagtaaacagatcattggctgtatttctttctaaaattctgccgaaatctagaaaaaaatgagaacagaaatacacagctattttttttgtgtaaacctgttgatgagtgattattactatctcgcctatgtgacatgggatctaaaattgttcaataaatatctaagtaatctg

SEQ ID NO: 17738 - DNA, 446 bp, Oryza sativa
  unsure (1)..(446): unsure at all n locations
aatctctaatcaatcntattactatctcttgatttttatattacatactctccattgacatgagtgatgtttcagcttgaaccctcttctcaatttcgtctttcaagctcaacgtcaggctgtccatactttcactcttctgtgtgatttctagctccagtagctgcattttctgttcagaattcttcagttccaactgtgttttaaagagctgtagctccaactcacatattttcgccatagattgctgttgttgcagaagtactgcatccttctcagagtttaaatctaagattgtgctttttaactctcttgatgtgttttccaggcctaactttgcatattccaactcttccagttcctttgttgatctgtcaagattttctgtcaactttatcacttcctcttccaactgagaatgcagaatcttaaacctgtgaagatct

SEQ ID NO: 17739 - DNA, 253 bp, Oryza sativa
tgcaagcttcagagatgtcaacagcgggattgtattttatgtcttctagatgtgaactgttcgcccgcgaagctttcgcttttatgaataaaaatgagctttccggttctctagcaagtctgatgtctcggcattttaaaacgtcagaggccttattagaagttcagaaccatggtaaacctgtgtattactcttcacaaccagggaagaatgtagaatatcactatccaaaacctcgaatacattagatata

SEQ ID NO: 17740 - DNA, 466 bp, Oryza sativa
  unsure (1)..(466): unsure at all n locations
agctagtactaatgcanaacttgcactcaataagattattgttgntgntntgctaaccacacacacagacatgaagtcagaagctcagatcatctgctcttctcctgcatatgccaaagccctccaactccatgtttcagaaaccatgacaggagcatccacacaaccaatttttagcttagtgatcagcaaagcagcattgtgtatgtcatgtcaaaatccagtgattaattagcggaaggtgacttaatccagatgcaccaaagctatactatccttatccactgaagcacccaaaaaaagtctttcagggacaaaagtgcagtgcagtgcagacggcaggcctgctcaactgtattttgaccggctgctgtngcgacactaccaagtacaccaaaccactttaatctcaagctttctttttatggtcctagatctcactggcgtcatctcttgacatcttaat

SEQ ID NO: 17741 - DNA, 399 bp, Oryza sativa
  unsure (1)..(399): unsure at all n locations
agagacgaagtcgccaatgtcgctacaccattttgtttagctatgntccttaataacagtggtccgagtgcacttgacgcaaccgaaatctttgacaagctgagagttgcaccggatgtatactctaaaaatatcaagaaagctggaagtatgggagctagtatggcattggcgatgaccaaatccttgtaccccaggattgaaattgataccattgatggctttgcagacgggacaagtgaagaagctgctcttgatcttatcagtaatgctcaaagtgcggctgacaagattgcaagtgatgttgtagagcaattccgcaacaacgatcttcagccgagtaataataactctgatgacgaaaggactgactctgactgagtatgaatgtaacaaatg

SEQ ID NO: 17742 - DNA, 340 bp, Oryza sativa
  unsure (1)..(340): unsure at all n locations
agcttcatagatagatntacaattatacattcttcggcggttagcgtccaaacatgctgatcttgtacatcttgtaacaaaaccacctcttctaccaaaacccaaatggtcaagtacttatagatgggcatatggcccgaggcccaatggcctcgccccaagcacgacaatttggtccgacccaagcatggcacggcccgactaaggtcatgcccgtgccggtccggcccgacagccgtggcgtgcctatggtgctttctctgcacgatgggccggcacggccttgcgcgaatgaaaaaaaatagtaagagagacccaacatagacttattcaaccatat

SEQ ID NO: 17743 - DNA, 408 bp, Oryza sativa
aatgaattaagaacagtgcctgttcacaatttctcggatttattcaaatttgaatctttaaactagcgtaacttgctcattctagctctgattcgagtgaaacatgaatctaaattcatctaaaatcataatctttcaaatggtatataattcactatgtaataaaatatatttataattataaaatagttaataccaagaaattagataatagtcaatttaaaaatgtgctaataaataaaatcgatattgtactgtatagtagatgtcaaataattgtctttaacatgctatatcactgtagaacccatcgtaactaattaaaagcattgtttcacattattaaagcatacgaaatgctagtgccatgtattaatatattgccatatataattatacccatgacgc

SEQ ID NO: 17744 - DNA, 312 bp, Oryza sativa
  unsure (1)..(312): unsure at all n locations
tacgctccaggaatggatcagtcagaacattattttttgttttgtctcgncagccgccgactggtggtttctcctgcaccgctgacttattataccgccgctgttgggcgcctacgtcttcaccgaccggcttgccttctacgacgacgactaggtgcttcgcctgcactgctgacttaatatgcccccgatgttgggcgactacatgttcaccgaccggcttgccttcgacgacgaccactggagattccgcctgcacagctggcctttatgccgccgttgttgggcgtctaacactataccgaccggctt

SEQ ID NO: 17745 - DNA, 412 bp, Oryza sativa
agcttgcagcagcgcggagcaattgttgatgttataccggcatataatctaataaactctgaaatttggaatccaacgggatatatacggagtatatctatatatatacacagaaaaaatgaaacggttaaatcatatacatgcaaagaaatcaattcaacgtaattaatggccttgattctacctatagcttaacaaatggtttcgctcggcactctctctttcattcctcgtagaacggtccagattaacttgtgaaatccggacggctgagatcgatcccacattccattgcccggactctgtcgatatccaattgaactgcgccgcattccaataccgcttccgacgcgctgacccggaaactgctccgcatcagcgctcccatacaacagcctcgccgatctgtccc

SEQ ID NO: 17746 - DNA, 375 bp, Oryza sativa
gcacataagtttgcatatatatatggccctgtcttacatataaacatgctttaacaaacgtggcaccttccggcattgtccagcaagaacattgattgtcttacaatatttatgcccactaagttgtactcctgaaaaatgaattatggaaaattttagctcatgaacaagaattcatgcaaggccatgagaaatgaatatctgagcccacctgaaaagctatatgctctttcatatctaggacactgagagtaagtcatatgaacaaacatcacacattctttaatattactacttacatggtatttacatatacattggttgagtacaacacagattcagttgactacctccttgtcatagacaaatcactat

SEQ ID NO: 17747 - DNA, 424 bp, Oryza sativa
  unsure (1)..(424): unsure at all n locations
agcttgtgactataaacaaagctctaccgttagtatccccggattatcatggtaagtnttctttctaataaaagcaagaaccaattcttaagatagtatgcaccttcacgtattcttggtcgctaaccattgcagggtgagattaagaacgagggtcatgcgatgcctaagaacatggtagctacatcaactgtacgctttggtgatccttggtattggaacacactccataggagaatccgacatcacacacttggtttttgatgtcttgcgacacaaaagtcgaagtgtgggggaggtcgacaagcttttcatgacgagttccatcaaccaaagccatctcggtttgagttggagtaatcctagcttgcctgacaaaaaagacaaaaaagaagatatgataccacataggacatcgagagac

SEQ ID NO: 17748 - DNA, 431 bp, Oryza sativa
  unsure (1)..(431): unsure at all n locations
gctcagaatactctaccctgccccctcggttttttttatccacaagaagcataactcgtgaccggtatgctcacctgaaacagcggcgccgggttaagtacaagattgtactcgcaagtcttacccaaaattatatatacatcagggagagagaagtatgcaagcttttgtcacaacctgaatttccggttcaggatttacaaattatttaataaattattaatagacattatattaaatgttcattaatttacaagtgaagttaaatgtgggaaataaaatttcctaaatataaagcatggctggatttaatttgtattaaattatccatgattaactatactctctgaaattntctcgaattgttagagctcaatcctaattctaatatacacgaatatttagtaatgattcacacatatataatcatt

SEQ ID NO: 17749 - DNA, 439 bp, Oryza sativa
  unsure (1)..(439): unsure at all n locations
agcttagctcgtttaatatcaatccancactctttgttttngacaaatgagttcaacatagctctctagaaaagcttgatatcttttttggaaatcttgacaaagtgctacggtgaataaacagtttgccatgcgagtcctagtgcgacaagatatggtaatcacaatttcacaatgcagtaccgagcctaacatgggatctcataaataattgcctaaaaaaccatgttaaattaaaaaagaattattttaaggcgcattgaatggccctactgtctccacaaaaatatgaagctctaatccatgagataattggacaccgatataacacagatatcataatgaacacctgaagaggctcatctcgtcatagttccgagcatttatttataaaacttccgctctgcggtccgcaatgtaaacacttttacaacattga

SEQ ID NO: 17750 - DNA, 263 bp, Oryza sativa
  unsure (1)..(263): unsure at all n locations
atggaatgaaagttcggaaaaaacactctactctgctacatatatataggacatgccgagtgngtttgcaaccaccacacgcatttctttgagggattttattatttacacacttcgcccgaagccaggagatacgcagcttaggcgacacctcttgtgtggtgaattggtagatgaacgatcaagggaggagctggagcttgaactacctagctagtgctctgtgtttggagtgtagccaaagccagcggctaccatgcatc

SEQ ID NO: 17751 - DNA, 444 bp, Oryza sativa
  unsure (1)..(444): unsure at all n locations
agcttccactttgtgaataanacctcgtgttctctctataaatgaaaccaagcacagcatcttccatggaggacccttcttctggattcctctctacccccaacaatggcctgacaccgctgccctgcatgcaacccatgcagtgttctcactacttctcagcttcgccggtggtgttgaagatgatgcctcaacggccgatgcagcgaaggtatccactangcaggtgctaagccatgtagggcaactaaacaactntggcaggtcttccttctccatctcgacaagaagatggtaatggagtgtctatatccccggagctctcttgatagaattcatcatcatgtatcnagtgttctattacaatagtaataatcagaactagtgctcttgttgtggagactactgtatcttttgtggcgactaatatttgtcatggcatct

SEQ ID NO: 17752 - DNA, 401 bp, Oryza sativa
  unsure (1)..(401): unsure at all n locations
gcacatgantatcaagtttagtgtccaggctactcattttttaagttcttgcactaaatcgcacgcacctaccaatntcttgtatcgcgggtgtaatttactcttattttttcaatcttactttactagcacgatccctcacgagattggatgatattgggttggccccacaaaacgtgttatattatcaccaaaagcaatctgctatcaagtagcacgtgaaaaactacactggactcgggcggtaaaataagcgcccacttagttctctctcttccacatatgaattaaatgatgtgacatatattggagcctacccagtcagcttatagtactttactgcttgctctaaggccgagttgtctaatgaggttcccaagtcccaacatccactcactcag

SEQ ID NO: 17753 - DNA, 437 bp, Oryza sativa
  unsure (1)..(437): unsure at all n locations
agctnggtacctgtgcgccgcatccnccacttatttaagagcagacgcagacactcggtgttcatccacaatattatagaaacagaaataagtctcacagttgtctaaccacacgcgaacatgagacccatcgaatttaggaaaattcatctttggtgtccagtgacgacgctcccccgactcatcagaatgacgaacaggtggagtaggcgcggtagtgaatacctgatgagacggtgcagagtgcacatgggtaggggacggtggcgccgaagatgaataagaggccccatccttagtaggcagcttcggaggtggatgaagaaatggaggctggtgctacggcacacgtggagtcagcggaggagttggtgacgaataagcagacgtcacctgcttgagagcccgcgcgacctgagctagctcatgctgaactt

SEQ ID NO: 17754 - DNA, 239 bp, Oryza sativa
gttcttgtgaaattacacacaccacttaaatctatgagcagttgaaatgtcaatcaattatatcccacgagatatacactataagaatttgcagcttgcattttgtcaacacagtttttatagcgtgttatagctttcgaatcacataggtgagaaatttcttcaatatatatcttagtcatatatagatgcgtctctcacatgagaaaatcgtcctcgaacatgaagctattgaaact

SEQ ID NO: 17755 - DNA, 280 bp, Oryza sativa
taatcccacccatgcacatatgctgattattacattaattccgcaagaaggtttttgcactttgcacaagcatctacaagcatgagtaattacatataaattgatcaccaaaaaagcaatcggcggagcaacacaaaaggggagtaaagctctccgtaaccacatttttcgcactcacacacaatcggacgaagtatactatatactccctccgttcacaatgtaagtcattatagcattttcatatttatattgaattaagagacccattagatttatt

SEQ ID NO: 17756 - DNA, 465 bp, Oryza sativa
cacctgaggctgcagctggaccctgctgggaacctactttctgtgtagcttcgatgggcctggtggacatgtccagcaatggagcacggaggtgccaccccattgcccgcgtttccccacagctgcaaatcattagcatgccttattgctcactgtctgggccgatatgtcggtccttctctgccttgacatcacttgttgtgatagagctgcactacaattatttggtcggtccgatttccgaattcttggcccatctgtccaaccttagtgttcttcagctgtccaacaacaacttcgaaggatggttccctccaatcatctttcagcccaagaaataagaggtatcgacctcagctaaaattttggatctttggaaactgcctaatttctctgcacatcgaacatacagagtatatctgtgagcacaccaacttcttcggacaatttcaagtctataccaat

SEQ ID NO: 17757 - DNA, 231 bp, Oryza sativa
  unsure (1)..(231): unsure at all n locations
agcttacatttatactctttgtcattacctttatataaggatgaagagtgctgaancggatctgatatgcgattgatctgatgcttcggaggcaagctacccttactatgtatgctaacattaacgggtagtcggctgcttgatgaacatatgcttgagagtgttgtcactatgttacgtcgaaattgctcaatctaaggatcactgccattgctgctagattatgtgaat

SEQ ID NO: 17758 - DNA, 451 bp, Oryza sativa
  unsure (1)..(451): unsure at all n locations
agctagaaggctggcggacaagagtttatttttcttttgtgctgcnaaaggatctgttgccagaggggaacaattttcctcacacgacatatgaagcgatgcacgttttatgtccgttgggcctggaggtcataagaattcatgcatgtccgaacgactgcattttgtattacaaggaatacgctgacttggatgtctgccctatttgtgggggatcaagatacaaacgagcaatgagtgaaggtgaaggatgtttgtctaagaggggaggcccagcataagtggtgtggtatcatccaattgctgagcgcatgatgagaatgtatgcgaacaaggaacaagctaagcttgtgcgctggcatgcctaataacggaaagtcgatactatgctgaggctcccaccagattcagtgcagtggaggacaatcgatatgatttacctggaattctc

SEQ ID NO: 17759 - DNA, 354 bp, Oryza sativa
gagtgctatatgactccactattatagcagtgaaaaatcttgacagagctcatcatggagagaagcagctcacggctgatgtgagctctaatggattgatccaacatattaaccttgtcaaattgactggtttctgttgcgaaggtgataagaggctacttgtttatgaacacatggtaaatggttctcttgatgcccatctatttcagagcaaagctactatcctgaattggaccaccacgtacaacctatccataggagttgctagaggattgtcctacttgcatcacagctgcgtataatgcattatacattgtgacattaagcccgaaaacatactttcttatgcatcat

SEQ ID NO: 17760 - DNA, 385 bp, Oryza sativa
gccactgatcagcttgatgggagtaggaattttgtttcttggtagagaaactagctactagcgactacctgcactcgagtattgtctgtccttagctactggagtaattagagcaagtgcaataatataatcaactactagctccaatttatctataggcaatctaatagatcattcatacaataggtacatactacactattaatatttggtcccacctgtcatacacacactgtgtgttggagtccgtgctacagttggctacaaatctgtagcccgctacccttctctctcctcatttatcaccttacaatactgttacagctggcttatagactgctattgtacctgctcttattagtggagatgcatgagagtgtgcgcg

SEQ ID NO: 17761 - DNA, 455 bp, Oryza sativa
  unsure (1)..(455): unsure at all n locations
agctaggaccaacctcttcaagaatagagtgtggcgcaagaggagctcaattatttggcattgatatgtgtggcaggagcttcctcggatgctgcaactatttgctggtgtaagctctttcatcctcatccttcagtacttggggtttatgaacattcgttctgcactgccagtctgcaattgattagagtagagtagccaacatttaatttgcaacataagctnttttntttccatctctgaataaggttaaacatggtagcaccagaaagttggaatgtactaaattaacaagcgaaaaatcatattactttgacttggtaaccttagtagtactcatttgagtgtttaatagtaatccgactgttaccccatgacaaacttgcctttgttctatgctntctaaatgttaattccatcaaataaaataatgcaggattggaacatcttcagat

SEQ ID NO: 17762 - DNA, 416 bp, Oryza sativa
tgctgaggtcagcaactttataacatgtgcatcacgttgttctttcatgcctgagcatacaaataacactgtgtgccctacacaggactgtaattgttaatcattaacaaatagcggtgtttatatatatatgcctggaaaagtaagaagggtataacagcacatataatcaccatcaagcagagcaagtgaaacaacacttttagacatattagatgcgacttcttcactgaactcactcctgaagacaccttcattagacttgaagtgcaagttacctagttaaacaaacatgatacaacacaactgtgaatgctcggcgagagctataagatacatgcagaaaaaggaagcaccggcaaacctgaaatcaaggactcagatgtctcttcttcattgcaaactcttcctccttt

SEQ ID NO: 17763 - DNA, 277 bp, Oryza sativa
  unsure (1)..(277): unsure at all n locations
agcttgtgtatttnttattctctcggtcgcttattggagcatggcgagcagcttgtcgtagccgtcaatcacctcactcatatggctgaatgtgacgttgagtcacgtccggaaataaccaacgggcgttcctgacgtgcgtgcattaatccttgtcccatgaagcaaggtgcaccataagttgatccaattcatagtttaacaagcggaagctgaaatagttaacttattacatgcgcgacgaaggtccagcacacacttagactaacgataaaca

SEQ ID NO: 17764 - DNA, 440 bp, Oryza sativa
agcttgattgtctcgaataatctaagacattcttcgtacacatcgtccatacaagcatacgcgagcgtctagctgttctataatgtggtgtagaaattagcgtctaccagcgagaattgttcggagtgatttgacatagctggatagtagcattcgaagtgatccacacattgatccattgactcttggctgtttacagtatctctgtactgctatgtagattcggagctttctgcttttagtttggccacactgaactaattgccccgtgtcagatagatggatctggcacatgttttaaatattctggtagttgttgctttataaggcatgcagctgatcagcccccttgtagttgtttgcagtcttgactcttgattctattatttcctcccttcttcttagatgaacctaactgctctttcgacttaattaattct

SEQ ID NO: 17765 - DNA, 404 bp, Oryza sativa
accattaaactcagctgcttacgaccctgggctagtaccaggggtttttcttttgtggaccactccgtcaggatgatccgagcggtctaacttgattgcaatctctgaccatcgaagatattggggcgtgtcgggctgaacagcgttgatctcccgttcagtcaacttctgcttccgtttagactcataagccatggggccgccgaaaatatggttgagctccttgcggtggtcttgaaatccagccggggtgtcgccgtcgaccttcttccttgacgtgctttgttcctcgtcggagttcttccgagtagacttggtgtactgctccgcgaactgcttgtagatgaagcactctttggccacgtggttggagcttggatgatgcgggcattgggagttcataa

SEQ ID NO: 17766 - DNA, 186 bp, Oryza sativa
  unsure (1)..(186): unsure at all n locations
agctagccgtttaatgacagcagtcttaattttgcatcaaaaactttatctaaatctaaattctcgtttgatcagctcgagttatatatatatactctctctgtttcaaaatgtttgacaccgttgactntttagtacgtgtttgaacattcgccctattcaaaaaatttaagtaattatttattc

SEQ ID NO: 17767 - DNA, 463 bp, Oryza sativa
  unsure (1)..(463): unsure at all n locations
tcattctccaaaagagaaacttggggaatatcataatctttttgaggaccaaaaagacctttataataagtggtaatatgcgcctttaaatttgcatcaccatttattacttggtcaccatcatgcaattgaaaaattctcgtctttctatgtttaccatttgcaactaaatgaaaatactttgcattggaatcaccttccaaaatatctttagtctttatctaagtatttaagataattaaaattcgatctacgcgcgtatcaagaaataaaataataaatccaactacaaaactgattttcttaatatgttttgttatttttatttcttgatgtacagatatgaccttaaatatatgtttatgggaatatatgacataatcgcgaactagccgtagctcagttagntatggtccttatagtagaacctatccattcttcaactattaacgggtaatgaaat

SEQ ID NO: 17768 - DNA, 451 bp, Oryza sativa
  unsure (1)..(451): unsure at all n locations
tgctgcatttcctcctgcctccaaactcttctcagcgtatgctgttggttgaaagaacaataaataaagaggaattactccctcccttttaaaatgtttgacaccgttgactttttaaatacgtgtttgaccattcatcttatttaaaaaatttaagtaattatttattcttttcatatcatttgattcattgttaaatatacttttatgtacacatatagtnttatatatttcacaattttttttaataaaacgaacagtgaaacatgtgttaaaaagtcaacgatgtcaaacattttgaaacggagggagtataataagaacaagatatgtgtcatcgttcaccaattatagtgagacgagttgctatacggctgaaggattatgtacggattatttgtggcactcttccataagtacgatgttttttcagaaactttctacatcagca

SEQ ID NO: 17769 - DNA, 322 bp, Oryza sativa
agcttgcaagtgtgtgttgaagtgagtgagatgatgttcttatataggggtaggtatgacggttggcaaaggggaaatgtctgaagtgccccgcaaccgccatcatggagtgatctgggacgtccatgccaaaacctgtgatcaacggtgatcaccatggttcggccaaaccagggggttcggtcgaaccttggctgggcccccctggcctggcctttggcctggctcctcctctgatcctcatctatccattcttcggtgttttgggctgattctctggtggttctatgaagttcacaacccaccttgtatggatacatat

SEQ ID NO: 17770 - DNA, 451 bp, Oryza sativa
  unsure (1)..(451): unsure at all n locations
tgggagagcataactttattatattctattttataaccatgcctttccctccttctctttcattnntattcttttatcaaaggacttttctttttaggagaagagagcacatgaaagcatggagaatttattttggcggtnaaatggaaatagaatggaatattgctgtgctcccagtgtaggagtttagcatgtgcatatatgtgggtgtatgatcttgatcatataacatgagaagtatctacacaagtcacaagagtttgacaaagttcaaatgaaatggcaagtaaccaaaatgtatatggtttaatcatgatggcacatttttggctctggtaagaatttatatcatatgaggaactctcaattttatcattttgaataacaaaacatccggaattcaagtaaactagtatctgggtcatatgtactcttatctaccatctcatat

SEQ ID NO: 17771 - DNA, 302 bp, Oryza sativa
gttgtctgatacctgtataataatgtcgcaccttgctatccgagagatcacgtctaatgcatgaacaactattacttgtcaagaatgtgctgcatgagatacgctgaacgacataactattattctgcatcacgttgaacttaaagatggtgttagcggcccctacacaatcagacatacactctcattcctatatataaaaggtgaagctgcttcaaccgcggggatacctatatattacaaaacagaggtgtgatatgtctaccacgcataaattctttctattgactgtccacctatca

SEQ ID NO: 17772 - DNA, 470 bp, Oryza sativa
  unsure (1)..(470): unsure at all n locations
actatacaaactcaagcttgcgatatgatatcactgggtaagaggttgctaagatgctcgtacaacatttacaaagcaatgagcttagtccataaaactgtaatttctaaatctttccatgtattttacaaatagagccccaaaagccagaagatggatgttattgataaacaacatatttcattaaaatggtaagctcaaggcaatatgataataagagaataatatatgtggtaggagaaaaataatttagcaaactcaaaaggacactgacaatcatagtgtacctgaacttcaatagcaaatgtcctggatccatccaaaacaacagccacagcaagtccagctagtatttcagaatccacatcatgttcagttaagaacatctcggttggattcagaacaggttgtagaccatatcctgacatttcaaatacaccaagctgannaaacaaacgtaaacctgcttt

SEQ ID NO: 17773 - DNA, 336 bp, Oryza sativa
gcaagctttccactgatatataattcactattggataatatatatctactacacataaataacttatatcgagatgatgcataatagtcaacttacaaatatgctaataaataaaattagcattgtacagcacaataattatctttaatatgttctgtcactgtagcaaccacataaattaagtataatcgatgtttgaagttaatggatatatacggaaatattagtgccatttattaaatctatgtccaaatataattaaaacccacgacttatttagtatttaaatagagttagccttataattttatggaaggaaaatatagatacacatag

SEQ ID NO: 17774 - DNA, 448 bp, Oryza sativa
  unsure (1)..(448): unsure at all n locations
tctgaaatntgaaacacaactntgcatagaagttacagtggattaaaatttctcattttttaatgcatatagtcaattggtgcacaccgatggggctacaataagctggctaaaataatgaaactggcccgcctaacttagtccatgaattgttctaaccttgtattgaaaaacacttttgtatactggttttgtatctccattatgcaaccaactgattatgttgataaataatctgtgtaattcaactatgaatttatattgtggctgcctatttactcgatttttaacttcatcatgaataaatttgtcattntccaggttgtccaagtttccactagctcatcagtaacatccaagaccatagaggaggctttctcgtgagtagactaacccatatgcatttttctccaacaaattgttatttgatccctttggtattagtagt

SEQ ID NO: 17775 - DNA, 204 bp, Oryza sativa
  unsure (1)..(204): unsure at all n locations
ctgcngcatgcagcctggagagtcatgagaccaagccgtttcttttccttctgccgacgagcccatggaagcaaaagactggctacgcatcatataaaagatactgactctattcagggtacccgaagccgacaaagtgatctttgcagtgaaccacctggaaagaaccgctggtgattggtgggatacctacaatgaagcccg

SEQ ID NO: 17776 - DNA, 446 bp, Oryza sativa
  unsure (1)..(446): unsure at all n locations
cttatcgatctcctataatgaaaagtaggccatccctttaactaccaatatataaaattagnttttctaagccgaactcctcccatacgcgcacatcgcgctatgcctgcgcgctcgagagagctattgggaacaaaaatttgctcccttgaagtgaggaacgagatatgcggagttggaaacctgaattattgagaaacaggttagggattctgttggatgcaatttttaaccaaattttcctaaatatgaggatagggaatagaataagtaagctgttgcccatgctttagcttaaaaagaaatccctggatgacttanaactattaatgggagaaatttgataaccctatgaattgcctcacaaacggcttaccagtcatccctcatttgaaacatactaattcttaaaacagaaacataagagactatagaattatagtgac

SEQ ID NO: 17777 - DNA, 445 bp, Oryza sativa
  unsure (1)..(445): unsure at all n locations
ttagatcgaaccttatgtgaggtgctntctgatcatacatcttctaacagtatagctccattcggtggtaaagttattattcttggaggtgattatcgacagatattaccaattatatgactaggttctcgtgcctccatagttgatgcatccattacgaattcttctctttggcgacatgttactcttcttagactgacaatcaatatgagacttcttcacggtgaccttggtgagcaaggttgcagagatcttaaagactttagtgattgggttctactgcttggtgatggtaggttgactgcgacaaaaaaaatggtgaatcagaaccaacatgggtggatattcctgatgatcttttgatcacaacatccggtgacaaaatataggccataatagatgaggtatttccgcgcttcatatataactatacaaatcattgcta

SEQ ID NO: 17778 - DNA, 392 bp, Oryza sativa
gctttacgtgacctatgaatactaagcttgttgctgtctagggacgagcgagagattgtcgagacacgattctctgtcctccgccagcctctcgagagaggcggcgtcagaactacgcgctatcgaagaccatgcgtctctctcatctaccgagtggatgtccgcatcacatggcacatctctgcagtttacataggaaggcttggaaaacatgtcgattgtcccgaggcctcactgtgatatctctcatagaacatacaattagtatctgtaccttctacgttccaaaactatgaagacaactattatgcgaggaaagaattctctagccgacatttctgtaagagcgcttgcgcgatgcaccgagtactatctaccaagcgatccccatc

SEQ ID NO: 17779 - DNA, 324 bp, Oryza sativa
  unsure (1)..(324): unsure at all n locations
gctaaggctattncttatgcttcgcctcattatagaaggaattctcgcagtcgtgtttatcatacaatggcgaatgaaatgacatcataaatcttgcctcacattccattgtgtcacaccccaatctggcaccaccgtacaacggcacctgacaagagtgtatagtangaaaaacggcgcgaaccgcttcctacgaaaccgcgatctcagtaccaatcctaggacatatcgttggtacccacggtgacaaatatgaatcattgcaatccttataataaatagaggacttatttccttatcttaggttgcagctcaagacagccc

SEQ ID NO: 17780 - DNA, 444 bp, Oryza sativa
tctcaaagccggtttcattagagaggtactccatccagaatggatagccaacccagtcatggtacggaaggccaacgggaaatggagaatatgtgtcgatttcaccgacctcaacaaggcgtgtcccaaggatcacttccctcttcctcgaatagaccaactggtggactcaacagccggctgtaagttgttgagctttctcgacgcttactccggctaccaccaaatcagcatggcgaaagaagatgaggagaagatagcattcatcatgccgttcggggtattctgctacgttaagatgccgttcggactaataaccgcaggaaacactttccagcgcacggtccaaggtgcacttaatgaccaactcggaaacaatgtcgaggcctacatcgatgacattgttgttaagatcaagacaagcgactcattgattgacgatct

SEQ ID NO: 17781 - DNA, 325 bp, Oryza sativa
agcttatatgaccctggctccagatagttgtttgaaccattctttgatgaatttcactattagttggaaaatttgtattgatagtgtgtgttcacttcaataggatgtggtctttgatgcaacaaggaggattgtgaggcctctcaataagggttcagctgttcatcatcctcgtacaagaactttgattactgttcatgatggaatcttggaggatgtagtctcccagctgagattgttgggaagtatatcagatatcgcctatatggtgcatggtcatcaatgtagatgctacaacttctataatgtctcttttaatcatcat

SEQ ID NO: 17782 - DNA, 421 bp, Oryza sativa
ggccgacgctcgtggatccgaccaggctggatccgccaccctgcgcccagtggccattgggagagaagaagccaacggagtgagggaggagaggtggcgggatccgcgcggtcgcaagacgagcctgccactgcctgagctcgccgcagtcactgtcgccactcctaccaccggtgggtccactgccgctagatctgaccaggccgtatctgccaccctgcgtcctctggttgttgggagagaagaagccgacggagtgagggaggagaggtgtttgatccaagcgatcggaggccaagcccgccgtcactcgccatcggtggatctatcccagccagacctgtgactgacagatccgcctctccgtgacctcctgccgtcgagcccaccactacttgtcctcgccgccatcaccgtcacc

SEQ ID NO: 17783 - DNA, 303 bp, Oryza sativa
  unsure (1)..(303): unsure at all n locations
gcttctgctttgcttcacagagagagaactgtaatttggtagtactattggtgtacggcaatagcatccaaagtttttttaatgaaattagcatgaaaagtcaatcccttcaagagaaaacaaaataatatgtcaacaaggagggtatgtatgaaatgaagctaaagtgtcccattgtcaactacttgtgcaaagtcagaacaatatgttaacattttaagttgatgtcaactgaactcttgctcccaaaagggaggcttgcngactaacatatacnataatgcactatacataacatttgac

SEQ ID NO: 17784 - DNA, 394 bp, Oryza sativa
  unsure (1)..(394): unsure at all n locations
tcggttcttggtttctgcccgaggcatcgaggccattttctataagatacgagctatagagcggatgcgcccccccagcaaacttanggatgtgcaatgcgtcaccggntgcatggccgccctaagtcggntcatatcgaggctgggagagaaggcgctacccttatttaagctcctcatacgctcctgcgccgttacctggacggaggaagctgaacgtgccctcactcagttgaaggcgtatctcagctctcccccagntctgggcgccccggagccaggngaanccttggtantntactnttgggggaccccgcangtagttagtgcggcgttggttgtggagcgcgatgaagacaaccctcattccgcgcaatcccaccctgtgctggct

SEQ ID NO: 17785 - DNA, 283 bp, Oryza sativa
actaagctatggggagagggttgggtaagattctgggtaaacttgagttttagatcattctttccgaattattgtctcctctaactctgtaactacataattcaatgtgtataccagaagaattagtgtacattttactggtggtagatgattacacctagattccattttctttggttgcactcaaaaattatgggtggactgctcacagaaattaaacaaagatgggctattacaaagctagaatgaatttttggaggcttaaacagaggaggaataatct

SEQ ID NO: 17786 - DNA, 443 bp, Oryza sativa
ttaaccaagctcttacaaggtcttaccatagcaagcggataggtgacatacaccgactcaaccaatcaccccaatggaggatggatgtattgatgccttggcaagcacttgctgtacggctgcaatcaaatctgtatagctctgggtaggcttaaatatgtagcaaaggaatagcaaatgctcaaatcagagaatggaaagttgaataattgttcaaagtcaagcaccgtactggtcctaggctaatacgtaccagagacgtgaacctagacacaaacgataccacaagatagcacaactctgatatatcaaaatgacctcaatgatagcaaatgagtttctcaccctttattttccttctttctttcctttcttttttttcggcgcggctttttctttaccttatatatgcacctttctgcatttctttttctgatatttta

SEQ ID NO: 17787 - DNA, 289 bp, Oryza sativa
  unsure (1)..(289): unsure at all n locations
tatatggntcgaatgatcagcagcccttgctgccataataagtcttccttcccctccaaagcaactccctgtgagccaaactccttgggaccttcatcttgttcattcagtgacatgaacaggtctttattttcctctttccaagagcttgcatcattattcttcttttgcagagtcctcacatcctctccaagagcaacctttcgagccttaatctttgtaagataggtaagctccatgcgaagatactcaatccacattcctttgattatggacaagatctataacc

SEQ ID NO: 17788 - DNA, 437 bp, Oryza sativa
  unsure (1)..(437): unsure at all n locations
tcttcagtctttggggctntcggctcaggagtcctggaatgctctgtctccttcacctttggctctgcaggctcaggctgagccttcggttcagaaggggctgcaggtgcagctgaagttgaaggtttataatccttaaacttctcaaggtcaccctcttcttccacagttacagcaatgatctaaaaggaacagtggggccataaatcaaccaagattacgtcagaaaaatttataggcagaggcaactgtaataatcatattagtaaaatgagagtcataaattggttgttctttgatcagtaaatttttacctcaccaactttgatctctttggcaccatctccatgaatgatcttagcgagatagccctcttccatgcactccatctctacagtggctttatcctagtcagcaggaatgcattcaaaggatat

SEQ ID NO: 17789 - DNA, 355 bp, Oryza sativa
  unsure (1)..(355): unsure at all n locations
tccctggggcagaccttacaatcagccaactggacagaggcctgccactgaatcggacgccaatcctaacacccacttacccaatgccaaccccaacccttggttcatgggtggaggcatcccactaaccaatgcacggcgggggaaatacaccttctccgcggcatttgggggtttgtatcaccagctcagcttccaagtacatgggttcccagatgcaaccgcctaagggcagcctgctggttttccctacggatatggacaccgccacagncacggtcatgggcacgcgttccacggcggacatgcccatgctgctgctgctccccgccatggaccgcctggcaacaacagc

SEQ ID NO: 17790 - DNA, 443 bp, Oryza sativa
gacccgagaatgaggacgtagagttgggaatcaaatcatgttgtatatactctgccatgcgtcgtcatcgtcatgcacgttacaacgttgcacacgatcatcatctttcagtggaatacgggacacgtacatgtaaggggagtatacgttttctgctcgttccgccgaccgcgtaccgtacgagacagggaggaaggcaacacgcaacgcgatgctgcaagactggagaggtagctgaacgagagtgacgcaatgagttgcaatgcaccacagcagcagcacaaactctgcacatgtgctgctgcgcaatgcagagttggccgtagagcaatgttgtgctgtactactagtctactggagtactactgcagactggactggtcgtcgccattctactagcaaatatcacatttgtaacaacgatacactggagtatgcacagt

SEQ ID NO: 17791 - DNA, 220 bp, Oryza sativa
atatgaaatgaagagcacgctctcgcgatatcatttctctactcttctcggattgcggacatcggagtaacgccggcggcgagtcccatcggcggctgtgcacaagctgctactgcatgtgcacctatatccatgtatggatcaaatggatgcctggcatgtggttatttcatgtactacgaccctcacccaatcttgatcgccgcttggagtgcttgaa

SEQ ID NO: 17792 - DNA, 324 bp, Oryza sativa
ttgttgtttgtaaagctaccctgggaaaccgttgctctatatcggccttgtgccactctgttggaccgttcttttgacaagaatatgagttttttattttaaccatggatgtcctgaccttcagttacttagtatgaaaagactactttactagtactgactacatacaaataggctggaacctataaaatatattttcattctgctgctatttctattgtgactgatgtccagttagcattctggtgcgtgaagcatgcacgtaagagtgcttatggtttatgcacacaaacagtacgtcattatggcagtgtcacttaaagc

SEQ ID NO: 17793 - DNA, 396 bp, Oryza sativa
  unsure (1)..(396): unsure at all n locations
ntcccactcctcttctttgaagaacaggtgtgttctattttactggtnagtgaaaaaatgttgacaaaaggatgttatctaaaggtcatcctgtcatgcatgtgtcacataacagcaagaagacctttaagaaagttacagctcagtcaaatacacaaagggcaagggtaatggagagaattgaactctcagctcanagagcaacggatatcaatccgtctgtcataccatatgacaacaccctcttatgctggcaggaaggacaaaagcgggttgccaaatcgccaaaataggctgactatgacattacccaatatccttcctcccagatggttttagaacacactagttaagaagacataaactacctttctgtaaaataaagaaatttacctg

SEQ ID NO: 17794 - DNA, 347 bp, Oryza sativa
ggaccttaatcacctgcagctgcaagctgggatcataccttgctttcgatgcggattgcatcatgcaagggaagaaaggcccgcccctttctcagaacttccttcaatctagccgctacctgcagatttgacctcggattattagccagatcaattagaaaagaaaccatttgggaatggccagccgtgacagcgcagcgcaaaggcgtgccgcctttgttgttctgcaccagcaggagatgcggggccttgctgcagatgatctccacactcctcaggtagctccagccatcaccagaggtggccaaaacatgcagtgccggtcgccttcattgggaccccctcca

SEQ ID NO: 17795 - DNA, 421 bp, Oryza sativa
taatatacctagatgcgacaagatcttagcataaagggttgatttatcatatcaatctagcacataagatataaggctaaatcaagtaagatcggctgaaaccacgatactacccaaatcggcaagcaaagacaggctagagattaagattctaatcacgacttataaggtcaaactcaactgatgcagctataagtatgaaaagaaagacaatatctagactatcaagccgttggatgtttcatagggtggtggatatcctatataatctgagtcaatattgatatttaacctaatcgggtgcctttcaatgatagatgttcgccgattgaggggtagatagcaatattgtcaaagattacataagatatatgataactcgacgaattacataaacaagattagagtatcataaagatag

SEQ ID NO: 17796 - DNA, 273 bp, Oryza sativa
  unsure (1)..(273): unsure at all n locations
tgcgaccaacagtctagctcactaaggtgagttctttcaagaatgctctgcatgacaacatcttttctaatataagccaacagaactcatttaggcatatccaacctgccttgcagctcacgagagtacatgcatcttcacttggagagaggttgtattggtactctcctctactttactaatggtttgttcttcccacgatctaatttacggcatctctgatcacatagactgggttactannatagtataactcacattgggctaaatcca

SEQ ID NO: 17797 - DNA, 435 bp, Oryza sativa
tacctataagagaacaccatagcagagagttaagtcatattatatgcacaggtggacggcccttgcccactctacgaaaacgttggtaaaatagaattgcatatcacaaccacgaataaacaaaaagtttccaagatgttcttggagaaaatagaatatcaccaattagatggcaaatttgcaacttgttccagttctacatgtcagatgcaagtaggtttgtaagacatcaggagcattcgatagtcacaaaagatgggatcatgtcttttccaaatattcttgtgcaccgcgaagtgagcgtagctcaactagttaggttccttgtgatgtaaccagcctacccgggtttaaatcatacaattgccatgaatgagtgtacgcgtgttgtgagtgcccgcgtgcaaaattattatgtctaggattattgacaca

SEQ ID NO: 17798 - DNA, 246 bp, Oryza sativa
ctcaaacactgatgctgcaacttatggcgggcagactattctggaacttgagcagaatgctctatcaacaccatctctttaacatatcttctgaaacttttttaaattccaaggccaaatctttctacaaattatgaattaagaggactctttgtgccgaaaagaaaaacaaggcatatttcaacttgcattccactgcgaatatttattcaaggaggagagacaacatatgcacacggttggtat

SEQ ID NO: 17799 - DNA, 404 bp, Oryza sativa
  unsure (1)..(404): unsure at all n locations
ntattgctcatttcaagacgaagagtttctataccttgttatggaataccttcctggtggtgacatgatgactctactaatgcgcaaggatacacttacagatgatgaatctagattttatgttgcggagacaattctagcaattgaatccatacacaagcacaattatattcataggtaattcattgataataaaaattgcatggcattcggtagcaaatttgccactccatctttgctatacattttcagggatatcaagcctgacaatttgctgttagaccgaactgggcacctgaagctttcagattttggcttatgcaaacctctagatagtagtagctttccaaatctgagtgaagttgactatgcagtggggaaaaacattaattcgtcnatggatg

SEQ ID NO: 17800 - DNA, 302 bp, Oryza sativa
  unsure (1)..(302): unsure at all n locations
tgcatcttcaacgaaaatgttatgcgaagtccagtttgcgcttatttcttggaatcagtatgttattactacctccgtttcacgttatatagactctctagcattgcccacgttcatatatatgntaataaatctagacatatctacaacatgcttttactttcacctcaagaaagaacatataagngtatctatctatcttctattatatactaaaagtccattaaactgtctacaaacgctctcaagcgggcacgcggactcctacaaaactcctaagttgccacgtggtgctataataa

SEQ ID NO: 17801 - DNA, 406 bp, Oryza sativa
  unsure (1)..(406): unsure at all n locations
nggccgatgccttgtgtcgggctctgtcgnnggagcttattatangttagctgttggcgtggggttgtagttgtggttttcgctcaattttccctaattaactgagcactgtaaggtttgatcccgttttctcctcaaaataggatatcttcttcttaatataaaacgtccgcaatggcctgaccgttcgaaaaaaaaagatgttgtaattaagtaattaattaagatagttaaggacacctaccatgattggcacaatgagggcacatcagactttcttagttgcgtgtgccgcatatttgatatgcacaaaactatgatgtgccacacggattgttaagtacgtgctactatgtgttttagagaaagaatgtcatatctttgtaatttgatctgtttgtcagta

SEQ ID NO: 17802 - DNA, 234 bp, Oryza sativa
  unsure (1)..(234): unsure at all n locations
tcctacctcaacaatgcttggttggactcaagtctgcgaaatcgtatacccgggttacaccacaatgccgatctcaaccgggcccccaatgactgggatcgagaacgcggtcgctacgaaccaagacacatccacgttgaagaatccacccgttgaaacggagaacggattaccgactacatccaagttcgtgaaggattctgatgcggccaggccttgtccctacaanaaaac

SEQ ID NO: 17803 - DNA, 442 bp, Oryza sativa
  unsure (1)..(442): unsure at all n locations
tctcatatgagactattatagntaagagtttgttgtgctttgctttatttatccccaaaattatttttatataatgaaataaaaaatatgtatttatttttaaaaaaacataaaaaatgaggagcattcatacaaagataggaccaatgttcacaataatgcttttatgaatgctcccgataaaaaaaatctattgtcctattaaaatttcaaataaaaactttaatttattactttttttattttcaaaatttatgtcaaaattttctgcactaattatttagtctcattagtttcataaaatgtatgtactgcgcactcaaacaaaattttcaattgctttttaagcttatattcaaacttaaagcatcaagggcaaaaaggtcatttgcaaccaaacgtaatagtaaaatgatggaaaatgtaacggtaagggtatgga

SEQ ID NO: 17804 - DNA, 238 bp, Oryza sativa
acaaagctatctatcacttttacaagagttaacatatacttatcagtatgcgtcacactaaagcacggggattatttgactgatgaaccctgatgcttcattatttttgtgctttatactcctaactcgattgtcaaaaaagatatggaaaattgcttaggaattcccgtagccaagcgcggagaatcacctagtgattcaattaagctgtgccagagaaatacatgtgctgacagga

SEQ ID NO: 17805 - DNA, 448 bp, Oryza sativa
  unsure (1)..(448): unsure at all n locations
ctctgacagagcatnccggngcagacagggcgtatccgcatgttcttgtttaaagtggacacaacttgtgttgtgtgtgtctgcgtgtgtatgtccagttgctcactgcacatctccctgcagctggctaattgctgctttactgaaagggacatgtatggttcagagctgctcgatcgtcctcactgcttatacgtagaaaaaaacggttgatcgatcgattgacaaaacggattcngcctagcacgcactatcagcggtagtagcagagcggatcgatccgtcgagttggcatgtgaagtgtcgtctgctcgtcacatgcgttgcaacgctctctctctcgctgcatcgatcgatcaccacccatgttagataagcacccaagccggccgctttcgcggatgagctgaacatatccggcaatgcatccatcctgccagtgcgcatc

SEQ ID NO: 17806 - DNA, 167 bp, Oryza sativa
ccccccaggttgttctcaccaaacgcacacaaacccggatttttagacgtcggacaaacgaacaaaacaaagctcactagagagcttaaaaaaacaattaccgtatcgaactgaccatgataaaccacgacctccataatgcgacgataccaagatcacgctaaagg

SEQ ID NO: 17807 - DNA, 436 bp, Oryza sativa
  unsure (1)..(436): unsure at all n locations
agcttatgcgagcttatatcagttcgtcttccttgcggaagtcctctttgttgtgttgcataaacctttgtgttggtcttatctggtctgtaaatgactattcttgctgcttatattttttttcattttttacatgtgtcaagntatccatgtacgagcaatatattgcttttggttgtgcagtttaagtaggcttataccgatatgtcttgactctgatgacatcaccaactagccattttaagcaatgtccatacattttgcaggccctagctaagacattgacggcaaatcaactgttctatctaagaaagcaatttgaattgttgggtccaaacaagaatggttatatctccttgcaaatttgaaaacggtaggtattctcacctttgttacttgatctaaatnatagcatgcaattgctgaaataagaaat

SEQ ID NO: 17808 - DNA, 433 bp, Oryza sativa
  unsure (1)..(433): unsure at all n locations
ccgctggagctagtgantagacactgacaactgtacctttattattcttagcaagacaccctacctcagcgcccataaatttgggagcgggtactcacacaggcagcaagttgcctaaaagcgacgacaatgcgccaacaaccatcactctgcatgcaaggcggacaccaaacaaggaagccacgcctacccgatcaggagtggtcaagaagagagtagcataaatagaggaagccaaagccggtgttcaatgtatgcagaccccggcgctctacactatcgtctctaccccgctagaggtatgggcaattccagatccatctgcttgtacacctcggaccattctctaaaggtcccacatattcaagaatgcgattctgtgattgaattccctaaacctcactctgatacagaggaagcatgcacaaccatg

SEQ ID NO: 17809 - DNA, 272 bp, Oryza sativa
  unsure (1)..(272): unsure at all n locations
gcttcaggacagnngaaccggagcacaagtgtttctttctaccacaggtaagcaacaatggtgtactgtctgacatgcttaaactttctgatataatgagcttgtacttcctcctggcgtgtagtagaatgttaaccactgcatgagtcgcatgaaactatgtaattatctgcttcatactgcattcaattacagcatgctatactataaagaagagttcatggaaaaagcgcctttttttttaaaaaaaaagaacaatgcatcatagaagt

SEQ ID NO: 17810 - DNA, 450 bp, Oryza sativa
  unsure (1)..(450): unsure at all n locations
tggcgcccgcactcttcactttgccttcgtggccagcgctgagcttatcctttcccttggctcaccttcccaccggcacttcgggcccaccccaccgctgctgccgctctagttctcccttgcaacggccgaagagggagagatgagagaaagaatgaggaggagcaagggaatgagaaagagatgatgacatatcggtcccacaatattcgtgtttgtgaatgacgaatggatcccgcatttaaaatttataatactttatgagtaccacatcaacgccacgtaggacaaagactgggtcaataccgccacatagtcatcacatcagcgaaactgctgtccaatataaggtcgatatatccgatattgtggtttagagatatgaatcannattgccactagttaagagagtcaaagttaacttattccaaccccctaaaacatgcatgt

SEQ ID NO: 17811 - DNA, 209 bp, Oryza sativa
tctgactgatcataactaactatatcggcagtgtatataagacgagggatgagtttgatattataactattctatctcatcatggtattattatccattatgatgttggaaagcgactggagaagcaattaggaagtgaaataagtctcctcttatatgagcattctcatacacataatgaaattctaatctaatcaggtgatggaaaa

SEQ ID NO: 17812 - DNA, 394 bp, Oryza sativa
tcgggtacatgcggcaccggcgggtcctacgctctaatattatgttccgtaagatgaaggcggagtctgatggtactgaagagactgatcctgcaccaaaacctacatcgggagaaaatgtgtgtgcaatgatagagaaaattgtttgcgagtttggaaaaatgactataaaaccatcaaaggggataaagcgcaagaaacccgagaagaatacgaagggaggggatagtaagaagcaagatgacagttcgaagccagatgataaactccctcctccattcaagaagcattccatattttttaagtacctcctgtactggaagatctggaggttcggcatgccatatacgtcatgcatctatagaagaatgtgtgtgacaacatagttggaaca

SEQ ID NO: 17813 - DNA, 278 bp, Oryza sativa
  unsure (1)..(278): unsure at all n locations
ctcaacctcaagtacaagaaggtaaatctgcacttcatcattcttatcatcttctgccatcatgtgctattntctagaacttctgaacaggtttgtgaaacaacttatgatgtcagaatcacggagcatcatgaaaaatatacacgagcattgtgaatgataatgaacctcgcttgctactaatgtcgcgataacacacactatatttccaaaaaccaacgcatacagagatcactctaaacagaaaacacagaataaatgctgaatatgatgtagca

SEQ ID NO: 17814 - DNA, 434 bp, Oryza sativa
  unsure (1)..(434): unsure at all n locations
tacggacgtcgtcgtatcaacgacttcttacgaacaacttctagctggactgctggagtagcgatgaagtttgagtggttgatgtgaagcantaaatagcggatcgttgttcgagtcggtgagccgatggaatggatgacagcgtcggctcatttattggcagcatacctccgctgctgcccagatttatgaaccctaacttttccagcaaagacacactgttcgtggatcggggcaagctgccgtagatcctggattaaggcccctttgaatgaaaggaaaaaccataaaaataggattntatcctataaaaaataatcctatagtgtcctttgaaataaaggattatttcctatcaattcctttgaaattactatggaatgaaccttactagagtaacttttgaggaaaataagcatgaggtctcacctcat

SEQ ID NO: 17815 - DNA, 288 bp, Oryza sativa
  unsure (1)..(288): unsure at all n locations
agcatcagcngcacacaacccaaccatttcttttcagctattccatcattgtctaaattagatacacaatccgaaccaacacttggttcgactatattggtcattgcattatcatccaacttattaaaacaatccgaaccactatttgagttcggctatacttgtgatatatggcatcattacataaattattaacacaatccgaaccgctgcttggtcacctatacatactattgcattatcatcttaactaacagtaaaactattggtagtatcttnaggccttat

SEQ ID NO: 17816 - DNA, 440 bp, Oryza sativa
  unsure (1)..(440): unsure at all n locations
tatgttngaaaaagccaacgagtacgccaaagctgaagatttcgtcaccgcatcaaagcagtcgggtcccagttggaagccaaacaagggtacgccggctacgggaggaggtggaagtaacaaccataaggaccgcaagcgtaagcctgaggaacttgttgcaaccgccactcattcttctcgacagcgttcgcgcgtcaacacgttcgacaagatcatgaactctcaatgcccgcaccatcctaactccaaccacgtgcccaaagattgtttcgtctacaagcagtttgcggagcaatacaccaagactacacggaagaactccgatgaagaacaaagcacgtcgaggaagaaggacgacggcgacacccatgcaggatttcaagaccaccgcaaggagctcaaccatattttcggcggccccctggcttatgagtcta

SEQ ID NO: 17817 - DNA, 234 bp, Oryza sativa
  unsure (1)..(234): unsure at all n locations
tgaatcaataggatcgaatgatgccatgcatagaaacaactttgtgttaanttacctcatcaaatctatcattaaactctcaaagttgtctatcaatgatgcttataaacataaaacatgtcaacatggaagcgagggaaattcttgacctttttgaataatcttttaaatcttccaactggcttgtagaagccatccatatcaacaactttgatgccatgtcaactggcttga

SEQ ID NO: 17818 - DNA, 437 bp, Oryza sativa
ctaagcttatattgatattacctcgttaagaagattggatgaaatatatctatttgtgtaaactcatacaaaggaagaagagtattatatgacgaaaataggttattttccagaggaagatactccccctgaatcctgcaaatgtttaagtcgtctcataccaattccttcgacacatttaaagaatgtggagtatggtagaaattttgtgaataaatcagcaagattatcacatgacttaatttgcaagatgtttatctctccatgttgctgaagctcatgaggataaaataatttgggagcaatatgcttagtgatgttgctcttaatataaccagtttccatctaaacaacacaagcgccattatcttcatagataatggtaggtgattccaatgaaccaatactacaagatggttatatgtggttaccatact

SEQ ID NO: 17819 - DNA, 395 bp, Oryza sativa
  unsure (1)..(395): unsure at all n locations
tgattntgctaattctgtgacttctgccttttgcttaatcagctcagcttctcttttggagagctggacagcaagaatatcaacctgcacaatattattactctaatcaaactgccaaaattaaggaatgcacctccacaggtaactggatttttataaataataattaacagtaagggaattgaaaggacttcaaattttaaattaagctatgtggagcataatattttataaacaaatacagntaaatataaatgcaggtcaagatgaaagataaacctaaagaaaattatgctttacgtacagaatacaaggaaacccaccatagatatagagtcctcaagttaaccttatttttgctgtcacacagcctctcaatgactctatacagtctt

SEQ ID NO: 17820 - DNA, 288 bp, Oryza sativa
gatggagtcagtcggcgaactttaccaacaactggatcttgtctacaagttgatccaaacttcttcaacgacgtcctcccctcgagatccgttgacagacgatgaaatgaaggcgccgttgctgcctacgccgccgatttcatctcaagcggctgctgcggctgaaggcggaagcaatatggccagtggccgcctacaagttcatgaacaccggtgaagggcactgggagtggcaaccaccctgtgcccgacttcggacagggtacgtatgaatcatcttccacatct

SEQ ID NO: 17821 - DNA, 430 bp, Oryza sativa
  unsure (1)..(430): unsure at all n locations
tatctttngaccaacttgtcagtgctttcaaggtctgtgcttgtttcgagtccagatcagctctattctttgagtcctccttaggcacaattattgcacagataatctctccataagcttcgtcaggtaagccgagaacagcacattccatgacaatttcatgctcaacaagacatcaaaccagagtaaacaagatgagtaaccttcaactaaaccattgcgctgtcttcaattagataggtttacaaagtgactattggaaactattcaagtaaaatggagactttaagtttttacctttattattgtctacctttattcttaccacacggaaagtactacgtattatcaagttctttcaaggcagtacgtttgctaataatgtctattgtggggatatttacctgtacagcactgagtcaatttctat

SEQ ID NO: 17822 - DNA, 227 bp, Oryza sativa
aggatctttaccactaattacagctcatgccgagatatctcatcacattaaatggtgtgcgcgatttagataagatatgtaccaggcactcttttgttaagaggcaactggcaagccgcataatatatataggaattgtgtcttatatagtatgatttaatatagcatcaaagattaccaccatataggtcaataatctaaatatccagctatctacaagaaagaaa

SEQ ID NO: 17823 - DNA, 430 bp, Oryza sativa
  unsure (1)..(430): unsure at all n locations
tacgagttcttgcagcctcgtaaaattgtgcctttatttttctttatatctagaagnacatgaaanaagagaagcctaanagaacttgtgaggctttggtcctgtgccatagctgaaggacattagaagagctttgtttggcaaaaatattttggtacttcggctgttatgactcgtttatccataccctaatatgtccatcgttgctggtgcttggcatgttttcttttgcatcatttgctgttcattctgctgtgtgtttcgtggcacagcacattttaagtgatttactgctagcttgtaccttntctgtttgtaatattccgatcgtgcagcgagtggtcagataatctaacctgcatgaggaacaatgaaagcattggcatcctacacctgaagcctcaaagtatggttaaaactgcaacttgat

SEQ ID NO: 17824 - DNA, 300 bp, Oryza sativa
cctgtgcacgatgaccgcgagcgcgactctgaccctggcccggcgcctctgctcgcgcccagccacgacgggctgagtaatcactgcaattatcccattatactacgggcttatcggcgacaggtcatccttaatatatctggagatcatcgtgtcgttgtgaactgtgaccttggagagccactgcgtgtctgttcctgagacgggacaactccgctgccggctcggtcgtccgcgctatcaatatgtgagtacgcactcatgaagagagatttgattgttgcattacgtttatgttag

SEQ ID NO: 17825 - DNA, 431 bp, Oryza sativa
  unsure (1)..(431): unsure at all n locations
aagctngacgcccatgactcgtcaactccacgctcttcgcctgtttctggtatggaagcagatcaagctagtcagtagggcggtcgagacggtgccgatgatcttcattatggtcttttcttatggttgagcagcttcaattcccacgagctggtactagtagttcatttgcacacgatgctatggtcgagtccagtatggctttggtctaaaacgctctctttgccatgtgtggttggaatttccacccctaaattagcttggtttggcgacttgatctaaaaccacgtcacgtcgcgaggaccgaaaggacacacatggctctgttctcatccacaacgcttggctaggaacacccacgatccggacaaggaccattatcgcctgacataatctctattttgataccaaaagcgctggagatttacgct

SEQ ID NO: 17826 - DNA, 369 bp, Oryza sativa
catataccttatataatgaagggtaaaactgacttttctacacatattaaacagtcaattaaccgcaagggtatggaaaggatcccaatcaaattttagagatatacaagtgagtgaagaaaatttaagggcatacaaaggatcggctaatatttcagggatacagaaggaattctctcatagttgaatgtaccacttgagagggcaaatttgcaagcataaaaaggggcattcgcgcatagagctacccaccacccaccggaggccggaggtgacacgatgcatgaaatggagattgagtctgtggtggcaatgcatgcgaaggaatcgctggagctagcgttctggaagtcccagattctggacact

SEQ ID NO: 17827 - DNA, 276 bp, Oryza sativa
  unsure (1)..(276): unsure at all n locations
gcagcatgcagctnaacgctcagaaacggggacataatctttattcacctgacgggcttcaattcattcatcacgttcgactgaacttgctgccgctggagtaaccatttctatcttcaatctggaatgcaagctgctcaatgtgccattgctcaatgtcaccacattctttgttgcctatcaacaagcattggatgcagctgaaagtaagcaatacgcaaggcttattatctctgttataaaacttaaagccatcttgcttgttcgcaaacactg

SEQ ID NO: 17828 - DNA, 272 bp, Oryza sativa
  unsure (1)..(272): unsure at all n locations
aatcaccataccaaccacctcgttgatgaccacctccccgtggagaatggaccggaccccatgagggacgtgcccgacgaggagccggcgcccacgccggcgccgcaggtcgccttgctgccccaggtggttgagctgtagcgagcagcggcacgaggggttcgacgaggccgccgcggaggcggtcgggcccttcaccagcgggcccgtctncaaatggcgccccaaagaccgggtaatggatgctatgtttgctgctgctgctctacaac

SEQ ID NO: 17829 - DNA, 383 bp, Oryza sativa
tcagtaagttatggacttatggtattagtaacatggatgtataaaattgtaaacagaacttaataaaataaccagctctaagattgaaacaaactaacaaagatgtgggccaatggtagttgtgttagtacaaatagtggtttgctcaggatatccccacttaatacatgtatttacatatactctttgcatttggatatattctgtgttaacataggattacattattaatgaatcacctaaatagtcaaaactaatattttacaccccaaactatccaagtataaatgcattaagtattaaaatgaggaaaaattatgttgggctagaatagaataactgccacagtgacattatcgaaagatgtacgagacattgggata

SEQ ID NO: 17830 - DNA, 384 bp, Oryza sativa
  unsure (1)..(384): unsure at all n locations
tcaacggcatgctgtattgttcatttgtcccacaatcaatgactagttctttcagtccttttttgatggaaaaacttctttactcatcttgctaatcccttgcaggaagcagatgtactgaactatatccagtcagtccttactcatccttaattggctcattgtttatggaacattntagttatttttcatcctgcaggcggaggcggtggagaagaaaaagggcggcaggggggcggcggcggtanggatcatcatcaccgccgctccgctccgctggccgcgcgctcgcctgccgacgccgtccgcccgcctttcgcaccgactcctttcgcggcgcgctcatgctcaacatgctcagcatcttcgcgggcgttaccattg

SEQ ID NO: 17831 - DNA, 267 bp, Oryza sativa
  unsure (1)..(267): unsure at all n locations
agcnagaggacaaagcgatccattatgagtatcagtgttacaaaatgaaccgagaaaggaaagcattttaattcataactctccaggggaacagttataagcctcgctatatgacgggacatcagggtggaccttccaccatgattatccggcagcactgtccctaccacccgggtagcttcaacaagaactacaagagtggcagtcacagcaacagcgagcagcacagcctcaatccgactccaagtccattaatgagtccagctc

SEQ ID NO: 17832 - DNA, 436 bp, Oryza sativa
gcttctaaaaatattggataagaatgcatactttttatataatctgaacatctggtttatgtatatagtacacttagtagccagactaagcaaaaaaattgtcactgaacaggtgtaagaacttcaatgcaatatatgtgtgactgataaagactctggtactagcctaagcaaaatggccacaacaagaacatggcaaggcaagttgtggacaagagcacaaaaggaatgtcagagggcatgacacaaaagtaggtactccatagccgtaaatattccaggtatataattgcagttgtcaaacagtctaccatatgccaggtagacccacgataagttttgtcaacaaaatagaattacgaaaataacacccagataaacttaaacaaagattataccaagatacagaacagatgcactcatctcactgaaatgc

SEQ ID NO: 17833 - DNA, 186 bp, Oryza sativa
ccagtgacatgattggccattctcctatgacattaagacttatattgcccgatgattctagcaagataatcatgctacgtgacatcaaatgaagaaaacattaactgatccggtgacgcgctcgcctctctcgcttgtgaataaatatcctgcagaaagtcatgcaaacacacattctcaatcttg

SEQ ID NO: 17834 - DNA, 267 bp, Oryza sativa
gacccaagcactgagctcagccgaatttgcccagttttattatagtgaaaggtcaaataattatgaacaagtcctaatagtgccgaccatgaataaactgaaaaaactggtgacctcatctcatgcgatgccgcataaaatactccctgaatgatgtttcaagaactttattgtggcctataaattctagaagtgaaccattccacctgtatctttccatagtccataatccaacataccattaccaatagcgtgttcatatgaaat

SEQ ID NO: 17835 - DNA, 314 bp, Oryza sativa
  unsure (1)..(314): unsure at all n locations
gaggaggacgaaagaaancgcacatggcacgccaaccaacgcaattaccacgccaagttgccgtccacgaatcctttctaaagtagggagaaacaaaaatgttgccatcaatacccccttttgcggaagcagcaagaacatgggaacatggccgatgtaacaagtaaaggcttgttgcaattgcatttgcaagcgtgatactctggccacaacgtgcattccaatatgatgtcagtagtcccaatgccgacaccactcttgtcacgaaggcgtatctcaaataacaactctctatttccagcaggccacactct

SEQ ID NO: 17836 - DNA, 255 bp, Oryza sativa
cttgttccaaagcgacactggcttgaaattctgacaatagaataaaaaagagtcgcgagatttgttacaatatttcagagaactttgcctttcctcccaaacctgacatatattccctcaacaaacacttttcctgccttctgcaccacttctctcatccggtctatcactaaccatacacttctgttttgcagagatatcagtcactaaacactcttgatactaaacacttgatagcctgcatttacataatct

SEQ ID NO: 17837 - DNA, 371 bp, Oryza sativa
  unsure (1)..(371): unsure at all n locations
tgcccgcggtacaccgaacacgcacttatcggggttcttttntatgctgtcggagcggagactctcaaaagcttccgctagatccgagagtaaggtctcttggttgcgcgtctttacaaccaagtcatcgacataagcctcaacattacctcctatttggctacccaaagaaattcgagtagtacgttgaaaagtaggacctgcattctttaacccgaagggcattgtcgtataacaataagatcctatgggggtaatgaatgcagttttttcctcatcctccctagccatgcgaatctgatggtaaccagagtatgcatctaaaaaacacaaaaggtcgcaccccgctgtggagtcgacaatctgatcta

SEQ ID NO: 17838 - DNA, 316 bp, Oryza sativa
gctgatctcctgttgaaggtccgatcatgttcaatatcgatcgacttgaagaatgtaacgccgagctagatctggagcaaaagaaactagccgatctcccgaaggctattgaagaacagaagtcaagattaaaatcggctatcagaaatgttgccgatatgactaagtccttgaaaatcatccctggaaccgatgcacatgatgctcaagcactcgatgaagtagaacaaatcagacaacgtgctgtatcggcaatccaacgatacttatctcaatgactttctatgtaataggacttaagaaattttctgtaatc

SEQ ID NO: 17839 - DNA, 446 bp, Oryza sativa
  unsure (1)..(446): unsure at all n locations
ntcttccggagcatcaggccgcgagtcgctgctccgtagataattctacggactgagaaaccagctgtaccagcgccaccgaccttcaagactatggctaacaagtctctccgcgagtttgctgctccctctgctgacaatgtggccattgggccacatatcaacatgggagacgtggatttcgacttgaagtccagcctcatcacgatggcgtaggctagcccgttctgtggcaagcctaatgaggatgccaatgctcatctccaacagttcctggagatctgtagcacatacaccatccagggcgtcagtcccaacgctgtcaggctgtggctgtttctgttctccctccttgggagagcaaagcagtggttctatgccaaccgtaatgttgtcaatacctaggataaatgctctacggcattcctctcgaaattcttcccgat

SEQ ID NO: 17840 - DNA, 437 bp, Oryza sativa
actaccctatactatggcgctgcctatagcacctatctatcatgtgatggacatatcatagacttgacggatatgtgtgtttgcaactacaagatctaattcatgtctacacgagaaaatgttgtataaattggaattcaaaattcagctcaagctcgatatttagtccatgtgtgccctctaaaggtgatatatatatatatatatatatatatatatgagcatttaccattttgtgctggcagcaatagctggtaaattgaacccaaaatagaggaactaaaggatcaatgggccttaaaagcaaccactaagctaaaaattcggacgatatgatgggagttgtgagcatcgatcgatccgaggcgagttgccgcaaattcataatccgtccaaaaaatgttgtccccatctgtgtgcattaatcatgtgcatgc

SEQ ID NO: 17841 - DNA, 278 bp, Oryza sativa
  unsure (1)..(278): unsure at all n locations
agctggggagaactaagcatacaagtctcatttactactgcatgaaagnctacacattaattaggtaatgggtatagtcttatagaaagctcacggtgcagatcatgaaaacatgtacatgcgggagaatctagtctaaccaacgatctgattctgtgtataaatatccagagtaactggtacagtgaataaggtggctcattggctgagttctgctactaaatactttcagtatgcagtttgacttgcaacagtatgtttcaacctcaggtgagata

SEQ ID NO: 17842 - DNA, 376 bp, Oryza sativa
acagcagggcataattgcataaaactgtgacacaaaacaaaaaagaataaagtttgccaaatccccatcactgaaacaaaaccgacaggtacctcaaaaccatattcatgtgtttttctgggttccacaagctacctatgagacggggttggagctcaacagaataattatatgtttagctattagtcacaggagtgcttaagatctgggcgctagcctgcaaagtcaatttccataataccaggtacaatctagtggaccctttcatgccaagatcaattaataagaaaatgctcaccaagcttctccaccagcaaaacaaattaagtaacactatgactagcaacagatggatatcacaattttttcagcattt

SEQ ID NO: 17843 - DNA, 377 bp, Oryza sativa
tcatacatgcaggacaaagtaattgacatttttggcttggataatggctgcgggaaaccggagggtttgctggggtgttggacacggtggagaaaacgctttaagaatggagagacgtattctatgagaaaccgccttctttgtgaggaagcggatttacacttccgttaagcactataaaaacgacatcttacattctcaccacgtcggtctgtattcatgtcgatggttgacctccaagccacaaaatgttggatgaattggcacccctttccatttcatgtatacagtggtttctgtgaactaccttggcggatttattttctaaagaatacccacgtctcaaataatattcatgtgtatgcaaacaatctcag

SEQ ID NO: 17844 - DNA, 138 bp, Oryza sativa
cgtggatgcagcgatcgcccaagctgtccccgccacattttctgctgctcccgctcccgtcttcgctaagaacaacagaccacaaagctctagcggcctactacccgcgcgacgaacgaaagcggagaataaaaaaaa

SEQ ID NO: 17845 - DNA, 363 bp, Oryza sativa
  unsure (1)..(363): unsure at all n locations
atgatnataatttaaggacgggaaggccaagcaaacnnngggnggattactacattgagtaccaagctgtctagctgcnnnattcaaaaatattcaaaaaggtccaagttgaacttaagaggacaacangattacaattgattgaggtcgagaaattgaagacttatgaagnttttcttgcattgaatcagaaaataaaagtaagnagaagaaggaaagtccttgtaattggtgactctgaaaaggaggaatacacttgtatttgctcaaaaattgagaaagatgggcttctttgctcccacatattgaaaattatgcttcacctcaacattatgaagaattccaaagaaatatattattgat

SEQ ID NO: 17846 - DNA, 327 bp, Oryza sativa
  unsure (1)..(327): unsure at all n locations
gcacattctgaacctgcttgttaaattatttgctatatttgtatcatctttttagctcatttgtcgttgtatatgggatatgtggtgttaaaaaattttcgtatgtaatgtgaacttccaaagtaggatcatgccactgcgagaggtcgctgaaccgcaacctgtgaaatgacctcccgacttggcaggtgttggctccactgccacctattgactcccccacagtgcccctgtcatgggcgacgaggccacgcangtcaacgcctcaagcgcagtagctggccatgctctgtgcttcgctgggatcgcggcaacccatcaattgtc

SEQ ID NO: 17847 - DNA, 326 bp, Oryza sativa
agcttggcgctttgggtatgccctctttttttagctctcttattggatattctttgattctttcttatagaaccctcaatttacatttgctcccttcgtctgaatttccttgtatccagattcttgcggctcactgttcgactaagcgaaccgtgtgggcccgtcttgatggattcaggaaccgacttcgggccaaggatgacgtgttatgccgcaagggtttgcagatagaggccctcgctaacaccttcaaggaggcgaaagccgataacaagcgactccaggcagaactggaaagggaagagaggccagagctgaggttgatc

SEQ ID NO: 17848 - DNA, 380 bp, Oryza sativa
  unsure (1)..(380): unsure at all n locations
aaataggtcaagttccatgcttaccatggatgtgcaatatggttttaatttggttctttgttctagcttcaattatctatgttccatgtgagtcatggatgtgctatatggtttttactcatattcctgtgggtaagcgctaatcacgcttactcggctntgccggcaaaatgctcggatgtattcacacttgtccgagatggaaactactattttaattcatgtttgcctggaatgggaactacgactgcctttaacttggtgtttgaaatgtgactctttttcaaaaaagaaagtttatgttcaggctttattacgcatgatgtgtatgcgtgtcttctagttccataatatacttgttgagtatttccgtactcact

SEQ ID NO: 17849 - DNA, 276 bp, Oryza sativa
  unsure (1)..(276): unsure at all n locations
agcangnggacaaagctattcgcctttaatagcatcgcaccacaatggaccgaaaaagaaaggcagttcatatcagctttcctcaggggaacaatcacaagcctcgctttatgacgggacagctaggtgggccttccaccctgatcgtctgtcagcaccgtccctatcacccgagtaacttcaacaacgattacaacggtggcagtcacaacatcagtatgcagcacaaccacaactcgactccacccccactaatggcaccagctcagtaagata

SEQ ID NO: 17850 - DNA, 405 bp, Oryza sativa
  unsure (1)..(405): unsure at all n locations
cgctntacgcanaagaacctggagcccttccttgaaatattctctatcatatgcattgntgctgggggggcttgctgagtaccgttggtactcacccttactatttatatatcttttaggagaatgtagaagagaagcgtttgtcggtatgcttgcatatccaataagatgatcggagtgcggtcttgttctatgtctcgttccccagtcgactgcctgtggcatgttaaccgggcccttatattattttgtcttccgctgctgttctctgatagttgttggcctacctggccctaatgtaagtatttaactcttttagcctgaattcattcgtgatatgttgtgatccaactatgtatgtgtgtaccaactactgatccacggattggtatggataaacacaaa

SEQ ID NO: 17851 - DNA, 292 bp, Oryza sativa
ctaagtcacctgctgcatgcaagcttgattccacccatgtgtaatcagttatgcgcttgctaatcgctgccatccactactcactcatcaatcatcaccatgctttgttattgatagctacttattataatccaattttactgctccaaattatcatgatggcttgtactagtcactggttacgtcattagctgcttgcttgctactgtcaacatgttcactagcatcctttgtgtcttttgctagtaatgtgcatctctgcttgcagaccatctatcaatattgccttttt

SEQ ID NO: 17852 - DNA, 410 bp, Oryza sativa
  unsure (1)..(410): unsure at all n locations
ctatcagtttgacctcattcttgaactccacaacctcttttactgatcttctagataacctcttcacagctacttcttgcccatcctccagcttcccctgttgtaagcacagaaacagtgaatcaccaatcacattcgtcggcaaaagttatttggcaatttgactgtttttcgtttgtctgaaaaaagggtgatanttgcgtgctgtctgattctttatcttaccatgtaaaccggtccgaatacgccttccccgatctttgtgctcgcggcgaagtcgtccgtggcggcaacgatcgccttcaaatcaagcaacggaaggtcgagatctttttcgtacactccctcttacatccagccgttgatccgtttcacgctcgaggcaggtgctgctggtcctgaccctgaac

SEQ ID NO: 17853 - DNA, 321 bp, Oryza sativa
agcatattaaccatatatactaatgtcttgtgttttattcatctgcctgagacaagtctttatctatgcaattgcaaatgctaaccatgcttttgttttgctgatcaaccacccaaacttctgtagattaaagaagccaagcacttagagggattctcgattcagctagttgttcttgcaacctggaagcaagcaaattacatctgcacttcttatgcatcttctgccacaagagagaatccttcccatgatgtcaccgcgaagggttttggctcaaatgctccccatttgcttgcaaactctgagtggtatatgaaaaat

SEQ ID NO: 17854 - DNA, 384 bp, Oryza sativa
  unsure (1)..(384): unsure at all n locations
cagagaattactagnnttttttatgtattattagcataactctntctattattcttcaaaggaaagagctaatactaacataaacaaagctaaataccaagttcatacatctttcatgcaaaatgtaccgatctaaaagtctaaacactgctccttttgggattagggcacggtataattccccagatcctcctcacttcctccaaatcttcatgaaaatgcttctcatagtacacagacataagatctgtgcacttaagaccagcttttgaagcccatgggaaataatgctggaaaaacaatgtcctttgtttctcattgaaccttgcagagcccccaacgactgaaagcatgcacataggaaggaacatctgttaaactcaa

SEQ ID NO: 17855 - DNA, 285 bp, Oryza sativa
  unsure (1)..(285): unsure at all n locations
agcttctaatgcagatataacactatatatttataagcaatctggtgtcatcatcctcaccacttcgcctcatgccttctcattgtgaagaagattattcatagaggtgcttaaccaaggtgatgttcagtgacttcatagctgactctgttgttataccacaggagaactttgagttagtcacatgggaatcactgatacccccttatagaatgtttgtcaacattgtttcaaattatgataatgagatgaactttcatcatacagacttatnnnacaagaagc

SEQ ID NO: 17856 - DNA, 406 bp, Oryza sativa
  unsure (1)..(406): unsure at all n locations
tcattgtcaaatctttggttcatgggtatacttaatgcatgcttgntatgttatagaagggttcatcttctttttattgcaacacatgacttgatatgcaatatgtatgctaagctcttatacattaataaacgtaattcctatgcttgatgaaatcattgtcaaaagggggagaagcaagtaaaatttttggatttttttgggagaagcaagatgaaaatttttggagaaacaaatgagttgaagagaagagcatgttgtttttggttcatgagggaatatctttcttttcaaaagtgagagaagttttcttttagaatttcgagcacgatgtgtacgtttgtacgaagtataccttttttaccacttatgttttatttttccaaataccaaaacattttgatgg

SEQ ID NO: 17857 - DNA, 384 bp, Oryza sativa
  unsure (1)..(384): unsure at all n locations
actaaatacagggactttgtaacaattttatgaaaaaaaagatacggttgaaaataacattaatctgaacacgccctaattaagcttccatggactcatggtcaggtacgtaccggtgaaggctggcgacgttgacgacggtggcgttgggcgtgccggcgtcgacctcgtggaagtagaagtggagatgggtcagctccgcgtccacgacgctgcatacgatgatcggcaggaggcataggacaaggagaggaaaccgagcagcggccatggagtgagctaattatctcctcgatctgtgcgtggtgtcagtgattgctgagccaattntatggtgaggaaataagaataagacgctgtgtggtctattacattgtactcaca

SEQ ID NO: 17858 - DNA, 257 bp, Oryza sativa
ccattacgaggagcccgtacgggccgactccgccccggacagtggcgcccttcttaccgcacagattttggtgattcatcagccggttggggtcgttcaccctttctggcttctccaagctcggaatcttgaacaacaccttcacgttcgcctgcgaagctcccacgccgacgatcttctgcaccgcgccagcgcctaacctggtgccttgccagagaccggcgcgcttcctcctcagcgtcttgatcttctcgatc

SEQ ID NO: 17859 - DNA, 237 bp, Oryza sativa
tcccgagcagaaataatacttttatgttgctcttctgcctctggtatgccttgcgagtcagggggacctagctagctgacagctttttacctgaacaacttggtagcaaagtaatgggccagcccactgcatttctttcccttgcagacggggtcgggggtgaagctagcctatgttttgaaaaggaggtttactaacagtgtaaaaagcacaggagagaattagatggacaacatt

SEQ ID NO: 17860 - DNA, 405 bp, Oryza sativa
  unsure (1)..(405): unsure at all n locations
taaactgagcttttttctactcattaagacgatgagtttgaattgatccaagtcacaagcttctagtttttttttccacctctactataatgaatggcggngcccactgttacaaatttctagctgaatatatataaagagggtttatggtgattgcattccanaaaaagtatagatccaacgctcctcaatcacagggaccatgttaaagatatttaagtattgatataggtacttatgtactaatgataaaaacataattttactagtagagagaaaaaggtagaatcttctctcaaattaataaaggtaccgcatacgtataacggtacccgtaacaccgtaaacctctatctgcttgatttaatttttggttgcgtggttattgagatttacttgattgga

SEQ ID NO: 17861 - DNA, 328 bp, Oryza sativa
gcttaatggtgctgaacataatctatactattttgcttgtaatgaattaaattccgtcacttatgtgctaaagtatagtaaccattattggaacctatcgctgagagtccttctgtacaagttaatttgattgctattctttgtgatcaattagagatgtgtgataatacttcacttatatcattgccacaactaggtaatgaacaagttacttttaacgcctagtctctatgtgctgaatttaaacatattgctcatattactaatgaagctgaggaacatcgaattgtatctacttaaatactttgggctgtgttctcattaatga

SEQ ID NO: 17862 - DNA, 419 bp, Oryza sativa
gctgcagttaccctgctggtagattgttctttttttgtatatttcctccgcgctgatatattggtataaagtggtatcggagtactacccgatacacgttaggtttgcttcatcgtctatgctgcgagcgtacataatcccaactttgaggcacatttagatattgagtgatttatattgtctcggcgtaacatccgatctatcccaatcattcggtctaagtgcgttccattggacggattacgtatcgttaacatctacagccgatcgagtagacctaataatctctaagttttatctgcctttgccgatctaatgtgaggtatatcggcttggcttcggacgataccttgtcggcaatccagccaatcggctaccgctgatggatttaactctttgtccttttttctatcttgttg

SEQ ID NO: 17863 - DNA, 272 bp, Oryza sativa
gatgtatgactgaaactgtttattttcttacaattcagccacaaaatgcaacgttgaaaaattaatcacaaataattgacatattagtgaagccaccagtgttttcttggcttagatcctgaaatttgataacctaccactttgttctcacttcaacttgtttaaacacataaattttcacttctacatagtcttattaaacaagaatcacccatgacatacatggcaaaacacctattgtttctttggctagattcaaattgaaaaaaaat

SEQ ID NO: 17864 - DNA, 424 bp, Oryza sativa
  unsure (1)..(424): unsure at all n locations
acaatcaaaacagagngaggtagctagctgtgtgcattgctaaatggacttcatgngcatcattacaatttacaatgtcgcaaaaacacataaacactgtcattatcngtcaccagttagacaattatacaaattccaagcattactatagtagttggacaaaatagaatttgaaggaagcacgcaaaaacaatgtgaccctttgacaagcattactgtagtagttggacaaaatagaccctttgaaggaacctaatgcatgcagcgtacacaaaaacaatgtgagcaacttgatgatatggtcacatactcatgtttcatgattcatcttgaaaaggtaaagtataattaaatctatatattaaatagtagctccctacaatgccatatatagagggatattgcgtgataagaaaaggtactg

SEQ ID NO: 17865 - DNA, 331 bp, Oryza sativa
  unsure (1)..(331): unsure at all n locations
tcccaccaatccatcatgtttccattgaaggaagaagatcttgcttgttgagtcctantttcaaccaaatgtttgtccatacctgtttcgcgaaggggcaatccatgaaaagatgtgtcgctgtttctggttctgtcccacaaagggagcaagttggactgttgtcccaacctctgatttggagattgtcagacgtgagaactatctntttgaccatgagccatccaaagaacttgcatttgttttcttgttttgctcgccaaatgaagttaacacgattgttctgaatgcttccaatgaatatgaatttgtaggccgagttggctgagta

SEQ ID NO: 17866 - DNA, 417 bp, Oryza sativa
  unsure (1)..(417): unsure at all n locations
tctcaaagctggtttcatcagagaggtatctctatctcttattgtgctagccgacccagctcatggaggcggaagggccaacggcgaaatgggagaatgttgtgtctatttcacacgacctcaacaagggcgtgtcccaagtgatcaacttcccttctttctcgaatagaccaactggtggactcaacagccggttgtgagttgttgagctttctcgacgcttactccggctaccaccaaatcancatggcgaaagaggacgaggagaagacggcattcatcacgccgttcggggtattctgctacgttaagatgccgttcggactaataaccgcaggaaacacctttcagcgcacagtccatggtgcacttatcgaccaactctgaaacaatgtcgaggcctacgtcgacgacatt

SEQ ID NO: 17867 - DNA, 362 bp, Oryza sativa
  unsure (1)..(362): unsure at all n locations
ccctcgccaaagcgctggatgttgccaagccatggcatctgtcttttgtcacttaaacaaaccatcttttttcttcttgataagctcaatcaagcacagagccacaggcctgcctgcatcggtagcttttcctgtcgtcctcgtgaggtgtgcagtaaagaataagaagataaaacaaggacgtacagagggtgtttaaatcaggatcgtagagttttgatatanggtgttgtatgagacgtttgatactaataaaaaaattaaatacaaactctgtcagtaaaacgcgatatgaatttattaaatctaattaattcattattagtaaatatttattacagcaccacattattaaatcatga

SEQ ID NO: 17868 - DNA, 292 bp, Oryza sativa
gcgcttctcaacgggagataccacaccacacttgctgggcctcccctctatgacttacttccttcaccttcactcattgctcgtttggatcttgatgccccacagatagggcagacatccaagtcagcgtatttcttgtaatacgatatgcagacgttcggacatgcatgaattcttctgacctccaggcccaacggacataatactagcttcgcttcatatgtcgtctgaagtaaattgttctcctttggcaacagatcctttacagcctaaggagatctgtaaaactctt

SEQ ID NO: 17869 - DNA, 416 bp, Oryza sativa
  unsure (1)..(416): unsure at all n locations
tnctttgacgtcatcaccgaggggatccgacatcccttgttgatatggaagagggcaccggatcaggccagtggagcgccggagcgctagatctgccgagggccgccgcctgctgtcccacgtaccatcgtcctctcttgccaccgcctttcctctacttctgtcaccgccatcatctgtccacacctccaccgccgctagccaccccgctagcacctccacggacgcttgccagtctctccctgtccggatccagccatgcaggctcggatcaatacggcgtggcgactctccacctccaaagcgcgtcttggtccctagccgtgcagcggcaccgaggggggaagaaaccccgccgctgccatcctagcaggcagccggctttgctgacggccactcangcaacgataggcgcg

SEQ ID NO: 17870 - DNA, 429 bp, Oryza sativa
  unsure (1)..(429): unsure at all n locations
atgcaaacaaaagcttagctcagctatcttgcctttactccgtactacatggctctctctggactggacagactgcatatctgcaaaatattctgcgtgcctaagaaagcctttttgcaatgccttgccgtgccacgcatgcagcagcatgatctaagttagtttctgagcttgtctacagcatatttnttcaggctttcaactcccctcattcatcctgcctgcctgtaaaacccagatctgatgctcactttgcgcattgctgtgatctgcgagaggatcaagatggcagccgaggggaatatatttaggaatcccgtttgcttctcgatgttgctggtgcatcatattctttgcatgcagggggcaagccagccaccacgcatgcatgaatagctaacagagtggttagtacacatgcctacatat

SEQ ID NO: 17871 - DNA, 387 bp, Oryza sativa
  unsure (1)..(387): unsure at all n locations
ttatacttcatacaggtgttcaaacgttggatgtgacagggtgtaaagttcgggggagggatctaaactgggcctaaatctatataagttgactattcctttactattgctggaatcctgttggctgcaagttaaattcaaagtttcggtgactgccttttgaactgatgtccccagctcgctctggttgccctattttttgtgattgctttataactgttgtctccaggctgctctgtttgccctacttttccgtactacatctagattcattnttagatctaaaatatttacctattgtctgataaaatgtttggtttacctgaaacttacccattgaattcatttgagatctgatattttacagcaatcgtttcctgatcccaa

SEQ ID NO: 17872 - DNA, 375 bp, Oryza sativa
  unsure (1)..(375): unsure at all n locations
cagcctcatggctgagcaagcaaaggcgctctatctctctctcantgtgagtggcgacgacggggagccgaacccacgccgtcgagctcgtactccaccgtcccctccacgccaaagtactaagcggggggaggcgctcgataggaccgaaggatccgcgacttcgacatccacaggaggtggaaaagggcggcgagatggggagcatcgcctcctcgtctatggtgacggcagcacgccccagggcgcgctccaagctgcgggcgcgctcctacgtcacccgcccgtcgcccatgacccggagtctccagcccaacgttggctggacgatgtggccaaattggtcatgactgcacggcagcgtctagatgctgg

SEQ ID NO: 17873 - DNA, 213 bp, Oryza sativa
gatgctggtgatggtcttccttttatagtgatgttaccacgatgtcgtgaattaaaaccactacatacttatcctagtattccatgaacactttgttcattaagttcatgtaaaatgcatgatcattgttcagcccgaacgacattaccgtgaattcatacaggccatatctcgtggtgaattcggccttcgggatatcttcttcacagaata

SEQ ID NO: 17874 - DNA, 372 bp, Oryza sativa
  unsure (1)..(372): unsure at all n locations
ttgcgcatgagctccttaacgtagaggttggcgttgatgttgtcccgcggnccagcatccgcgcggggtgcgcctcgtagatgagagtgacgcgcatcatgttccgccagaacttgagccagtatgcagactacacctgcggacggacccccacgcgcctccagaaaccccgaagcaggagcccgccggcacaaacggcgtggcagcgagctccgtcgtcgagccgcccggggactgccgtcgcgcgatctatccgccctatgcccgggagcgctgtctgtcgcagatccaccactcccgagcctggcgccggcggagacggaggcgactccataagcggtgagggaggagtaagcccgcaccactagcggc

SEQ ID NO: 17875 - DNA, 366 bp, Oryza sativa
  unsure (1)..(366): unsure at all n locations
gctcctntccctggggctggctgttttttttaatgatgcttgccaccagaacactctggatgggtctctatataaaggagatcgatatgtgtttcttaattttaaaaatattttggggggagaaagactaatatggccttggctgcgaacataagaacacatgatcatgtgacatgggattgtgaagactcatatatatgaccttggttgtgaatgagcaagaggaggggtggtcatttattgcaacatatatgatggcatgttcactttgattctatttttaaccctaccactttttttatgcaaattattaaaaaaatatctaccgtcagattggtgctaaaattggccatatatagaaatcat

SEQ ID NO: 17876 - DNA, 394 bp, Oryza sativa
  unsure (1)..(394): unsure at all n locations
tctaaaattgaagaaagaatctctattcttgcttttactgnngnnnnagnttcttaagaaaagattcgtcatacttacaatcaatacttatatgtcttatcactttaatttatttgagcagctgggaaggatacagaggattgcaatatagctgtcctgacataacgagaagcagcttaacctacttcgaatgtattttggtttcaggttcaatcaatacaatctaattggttatactaatatgcatatttacatgttctcaaatgtgcccgcagcaaagcgtggggtttcatctaggtataaataatgtgcatagcacctggatggttactggaaatttttattgttatttattctatgttacaaacatattttctcggttgttgatttactc

SEQ ID NO: 17877 - DNA, 261 bp, Oryza sativa
  unsure (1)..(261): unsure at all n locations
aggcatncagctatcagctactggtatgttnggttggagctaggctgtgttgggcaccccttcttcccaacccctcttcctttatttatacacacacgcttctcaaactattaagcggtgtattttttaaaaaaaagatgctatacaaaaggcgcttaacaaaattaaaataatctattttttaaaagaatagttaatacttaattaatcacgcgctaatgaaccgtttcgtttccgcgcgttaacattgggaaccaagct

SEQ ID NO: 17878 - DNA, 461 bp, Oryza sativa
attacggacacatcaaactaagcttgcaaggttcccaacctgtacaatataatctcaactgcatatggtagtagtcaaattatcctccgatatcaatagttggcgttctaataccatatcagtgttccccgccaaataaaaataaaaataaaatatcaggggtattaaattttttgtacatttaaacccagacacattttgttaagaaagcagttgggcgaaccatgaattgataggactcacatgtaagaatttattgttcttctcgcttattgaatcttttccacaaatgacttgagcgattctcaacgtttacaagttctgtaaaatcatgtattttatacacaatactagtaactccgtacgtgccgcgcgtccacttctagtttacattagtcttatacaatcactgatacatgtataaatcctggtaaaaagatagataaaacaaatggtacaaa

SEQ ID NO: 17879 - DNA, 255 bp, Oryza sativa
tgcacctttatggacatgcccccatgtcaagcccagttaagccatgtcaagctcactggtgggttcttattagatccttacatcaagcccctctgaataattaagatcttcctcaaggtagggtacatggagcaaaactggatgagttttggaattgttcttcttactcccactttcatatttagaaaattgaaacgaataatacaagtattccaagaaggagcacatactatcataaaggctccctttgttgaa

SEQ ID NO: 17880 - DNA, 451 bp, Oryza sativa
tgcttacctcacttgccacccatcttggaagttccgggaccggtagattcttttctactctacttggccgcgaccccacatgtggtgagtgccgccctatgatggaccctgagttcctctcgacactcaaggctgttgttggcccgatcttttcgtgagttgtgataactacgatttgggagaaacgttgacgatccgactacaaccgcacgagacggtgtgttgcgccttaacgatcgatacacctctccgtgggttgttgatcttgccggtgcagatcaaccctatatctgcaagcaaatcgaagaaacaagcgagaacaagataaaagcaatctgatattgcagataggaatttaatacacatgattagtgggggtttcgaagaacaagcagacggacggtctaacctacacgcgcgcttgcagcaagttgcaatggctaaactttaa

SEQ ID NO: 17881 - DNA, 465 bp, Oryza sativa
  unsure (1)..(465): unsure at all n locations
agaaatctaagctntacctctagttgaagatcaaaactgatgcagctcaacccgaattttataactcgtcgaaagtaaacgaaagtaaaagagtggcgatgcgccgagattgtattgaacgtgtgttgtttgattacatgggttcaggctccatctatacccgagatacaaaatatgtccttgccagacactacacttatctctatcaaactctaagataccataagtctttgcggcagacttttgcccaaacatatctctaaggaaattatataagatatcctaattaataaatacaattgcctaaaccgagagctntttctccatcgtggcaatccctatgaagcactttgaacaattctagaaacagccttgaaaccgtcttcattggaatcgggtgcattacctccatcggctgtatcggctattctctatccgatccatcccagtcgatgtacactccag

SEQ ID NO: 17882 - DNA, 184 bp, Oryza sativa
ccaactatcgatcgtgagacatgagcatctacggcgatctctctatccacattcccactctataatttagcgaattatctaaaaatacggtcgctttctttgcgtgggtgggtgtatctattcatgacgccgtaaccaacatgcctaaccacccaactaggctctctctgtgacactcctatat

SEQ ID NO: 17883 - DNA, 120 bp, Oryza sativa
ttaaaactaaccctgtgggctacgaagacttcacgatgtgcgttagctccttctctccttggcagatcacccctctgctcattgatgccaacttctaaggcgaagataccttgctgtggg

SEQ ID NO: 17884 - DNA, 436 bp, Oryza sativa
tttctgatccttagtcctggttggtaacttcttctttgactaaatatcaaacattgttaggccttgacagaccccctctctccccaatatgatcaacactttagtcctagttggttatataccaactgggactaaagaaaaaaaaagagcccaaccgcatggtggagggattgagagcgcatcagccttatctctctccctcatcctcgtacttatacaccgcatcctctctcctgcatcccccttagggtgacaatggggcgaggcggagtgtggacggtgtgggcaagaatgccccctgccccgctcctcgtttttctcccccgcccccacctccacattgttgaccaggtggaaaacctaccggcctccgtaccctcaggggacccgcgggtgagcggggccccgcaacacccagttggatgtggcgaccacc

SEQ ID NO: 17885 - DNA, 352 bp, Oryza sativa
  unsure (1)..(352): unsure at all n locations
ggatccttaagncacctgcngcatcaagcttagaagtgatgggcttgtttttttgtatttatacaggttcaggccttcttattcaagaagtaataccctactcctgtccggngatggatccgccgagtgtattattgattgtatgatttgggaaaatcaacatatgcccctagaggcacccggaccccccttatatatgggaaggagtccgtgttacaaaagataatctatatccctaacggaatatgcagatacagattaaatacagtcgtaaccgactaagtctcaaggtatttccttgatgtacaagttaagaaacaaaccgagacacaaataagatattctatctata

SEQ ID NO: 17886 - DNA, 444 bp, Oryza sativa
  unsure (1)..(444): unsure at all n locations
tgcgaacgacttcatgcatgtctatcaataagacaattattctttttctcganacaaaaggacaatccatgttcatctgtgaggagactgatcattctcttgattagagaacaacggacaatattattatcatttttttactgttacaagcttgataagctgattagacaattggcttgcaatttgcctcacaggcttgcaagctagggtagcatacatttctacagcagaccttcgattgggagaaaatgttgcatggtacgggcaccaaaccatttatattgacattgttgcgtccttcattcagggatgcactccaggtgtaatccagatttgtacctaaaaaataaaaaatattttactaggaaagcatgaaagataaagaaaaaccgtatgcaatacatggatatgtgaagatggatgtccataagaaaaatggaaaca

SEQ ID NO: 17887 - DNA, 364 bp, Oryza sativa
  unsure (1)..(364): unsure at all n locations
tctttacgctcaggaatggatcaggcagaacattttatccggccgcctcgtctgccgccgactggtgcttccgcctgcacggctgacttattatgccgccgttgttgggcgtctacgtcttcaccgaccggcttgccttcgccgccgccgactggtgctttcgcctgcacggctgacttattatgccgccgttgttgggcgtctacgtcttcaccgaccggcttgccttcgccgccgccgactggtgtttccgcctgcacggctggcctttatgccgncgttgttgggcggctacgtctttaccgaccggcttgccttcgccgctgccgactggtgctttcgnctgcacggctgacttattatg

SEQ ID NO: 17888 - DNA, 216 bp, Oryza sativa
  unsure (1)..(216): unsure at all n locations
tcgtcgccacaacatcatcatcgggcgcccatgagggtttctgttgctgctaccggntgtctgcgaggatcttcgccgtcaccggtagtcgccggcgtggtctatgggtaattaattttagagtaaatttcacaaaacttcacgttttgtagtccaagttacataaaaccacacacactttgatacttagcacgtaagtacatatattttggttgt

SEQ ID NO: 17889 - DNA, 423 bp, Oryza sativa
  unsure (1)..(423): unsure at all n locations
gagcacgacctttggagtagcttctgaagggttttttttttttataaaaaaaaactattaaactatgccagaataggattcgnatatataagagaaaaccacttgagtggtatttacgacacggaggacatactttcactaccaccaagcttatttacagcatggacaaaagattcatgcaattccggggtccatctcatccgttgtttacttgcacaggcattgctgttgttgggaggaggacttgtgacaggacaaatatcgccactatgggatgaagttgactgattgaaagcaggctgtgatgcaacanaattggaaggttgggccatggactgtaacaaaagagatccataaatatttagcattctgaccagcgtagaaacataaggagcgctatctatagcatcagggacaaaaaaa

SEQ ID NO: 17890 - DNA, 434 bp, Oryza sativa
tcaggaaggcacagattcctgaagggattatggctcatctttattatatagttccgggcgctccagcgaggaaccatgtcagttacagagtacttgcatgagttcaaccgccttgcgcgctacgctcctgaggacgtgcgcaccgatgctgagaagcaggagaagttattgtttgggctcgacgatgaattgaccaaccagctaatctccggagtttatgaggactttgagaagcttgtggacaaggctatccgccaggaagagcaacgcaacaaaatggaccgaaaaagaaaggcagctcatatcagctttcctcaagggaacaatcagaagcctcgcctcatgacaggacagctatgtgggccttccaccctgatcgtctgtcagcaccgtccctatcacccgagttacttcgacaacgactacaacggtgg

SEQ ID NO: 17891 - DNA, 371 bp, Oryza sativa
  unsure (1)..(371): unsure at all n locations
tcacgaatcttcgagaaaacccgcgatcgacgaanatctttgttaccgtaactatacgcaaacaagtgagaacctaaacaaaagaccaaaagaaagatcctatttagactaattagtagtgacattaaatagatctcaattttatggaaatactggaagttgaacggagtcaatcagagctacggattgagagatatgaattttggaagtttaattggaatttctgggcaaaggaagatatttgtggaacaagaggaaattgatttatgaaatttatangaaataatattctaagaatattattgaccggnactgacgtgcgggaccaaggaaatgatttatggaattttgggaataaggaaatgaattat

SEQ ID NO: 17892 - DNA, 401 bp, Oryza sativa
  unsure (1)..(401): unsure at all n locations
agcttattgtgctataatgctcaggagcagactcgttncttttcttaaggagcaaacaacgcgggtactatcgaaatcatctaactggttttggtctaatttcttgaagatctacagcattaaagaaatcatggttgattaaggcccaacattacttatataatgcgctaatgaagccatcgggcccaagggcctttttagacggtaaggatttaatagtgagctcaagctcttccatggtgattgcttcttcctgatcagagaggtcaaaactgctcatgcctaagctctgccaattcaaggacagctctctggactgaaacttgctcaatctatcctagtagatattgaacaattcgtcctcttcttcttgatgtgagattgcaaagccagttgatgtt

SEQ ID NO: 17893 - DNA, 485 bp, Oryza sativa
acactatcagaaactcaagcttccacgtttcgccccaactgcttgcaaaggaccttgtacaccagcctgtcgatagttgctccggtattcctcatgccgaaaggcatcctgaggtgacaaaatgtgccgaatggagtgatgaaggcttgtctggggatgtcgggcgggttcatgtggatctggtgatagccggaatatgcatccaggaaactcatgagttcgcagccagctgttgaatccacgagctgatcgatccgtggcaaggggaaatcgtctttcggacatgctctgttcaggtctgtgaaatcgacacacactgcgtttttgctggttgacttccgcaccagcactggattcgccagccactccggatggtcaatctcttgaatgaccccggccctgagtagttttggacttctgctatcaccgctcttgtcatcggtggcatttgcgcaactctgtttctggctcggatctacttactg

SEQ ID NO: 17894 - DNA, 416 bp, Oryza sativa
agcttagctttagctcggatcctgtgggttatttgatgggatgtctgcggtctttatagacaacaccacctgcccgtggggtgttgtgttgcttggctgaatgatgatgactaccgacgcgatccggatcccatgtaattgggggcacacttccttccttgacgaatcaccgataaatttcagggcaaacggtgtcgtttggaaaaaaaagaagggaactcctacacaacgggattcctgtgcaacggaagaattttaataactagtacccacggtttctcaaaccaccggagccggggttaccgcgccccggcggtaatcacggttaccgcggtggtaagcacggttaccgctcggatacctgcgggatccgtgaaaaaaccgaccaaaccgtacaaaatttatttaaaaattta

SEQ ID NO: 17895 - DNA, 63 bp, Oryza sativa
  unsure (1)..(63): unsure at all n locations
ctaagcanggaggcatatgaacatgaagccactcgcgcgtcctgtttagtttgtggaggtcct

SEQ ID NO: 17896 - DNA, 253 bp, Oryza sativa
aatcaacatcatcataacgaagaagattcatcgcttcgttccgacgcaaggcgggattagtcgcttagataggtcgttgccgtagttcgctgtgttagattgcttgtttaagtttgcttgtgagtgtgtgggttttagttgttgcttacatcattggtgggatgtaacagcatgagtctagttcttttgcttgtcaaagtgtaagatagttggtgagatagtgttaatgcaacttaaatgtaagcatacacag

SEQ ID NO: 17897 - DNA, 336 bp, Oryza sativa
ggcagctacaaacagggacatggtcatactcaggattataaacggtgttacctttaccggacctagatgatagactggagttgggctccatcggaactttgccaatctgaaatttgcaaatctgaactttgccatgacgattaccatgggctcagtcatgcatacaatcagaaccaatctgatcaagcgaggacgcctgaaagctccccttgtgctgaagaagaactggtactcaagtctactgtgttggctgaacatcctgcagttaaatcacaaaattgaactatatgaactaatctctctatctctctcttgttaagcttttgactgaaaaac

SEQ ID NO: 17898 - DNA, 400 bp, Oryza sativa
agcttctggcccagtaagttcatataacttacttggataagctgtattacgcaccagacgaaacaacaagcgataaaaccaaagacagataaagcgcctaaactataagacaagtaagcttttccagaccatacaaatgcacggcgagcccatgccaaggggttggttaagatatgccaaattccgtcaaatacacaaaatgaaacccaaccatacatgtcccccaattatatcttctaaatcatccacactaacaatccaaccctctcccccaaaaggggattttagtaaataaccaaatataacaccggggctaagggtcaaattggtaatttttcttacatctcctcccccaggagcccaggtatcatatataccgccaaaataaaagctttgagta

SEQ ID NO: 17899 - DNA, 490 bp, Oryza sativa
tacgtgacctatgaaactcagctttaatatatggccgtgatctgtcattacgtgcgactatctccactatagaaagaaaaataagaaaggatcaaattttctagtatttactagaaaagggggctttctacatagggatcgtcaaaacaacgaatttgccctatcagctgtaggaagaaaggacacttcacgagaatcaaaataggaagaaagaaagtatggcctatactactctatggatagagttctcaaattgatagagaaagcaccgtaaagatcaattagtgaccgactgggtcgatacaactaataaaaactgcttacttatcccatgatatggggcaaaatttaagaatccgcttatgtaatagagccgatccactaaggtgataagcagcggtgtagtatcagatcccaaagatagtaagttctcttttcttgcttatggggaaaaagtcttttcaaagattctatagaaattgcatatatg

SEQ ID NO: 17900 - DNA, 402 bp, Oryza sativa
agcttccacatggcctatgtcttcctcctgttctaccggctgctgagccggttagaccggccgtataccaccagtctaaccagtcagatgcaccggtcagaccgacatccggagcacggtcagaccggtctgaggcgtatgtcatactgctataaggccggcggtcagaccggcctgatggaacggtcagaccggtcacatgactgcggtcagaccggccataaggcctggtcagaccggcttattgcgaggagctggcaccggctttagattttttgttcggggacacttcaactccatctccgataggtattggcacatcataagaccctactttgatagtattcacttctgaagtcctctcctccaccttgacgcgcattccttcccttttttcttcat

SEQ ID NO: 17901 - DNA, 473 bp, Oryza sativa
  unsure (1)..(473): unsure at all n locations
actcaacttatctncacctctgataagatatatttgcatggttagtccatccgtacgcaacaagccaccacagcaacaatgcacatgacaggggtattcacaggatggctatggatcttttgcacaaagcaagattataactcttttacaaccctaagacctagcacagactgatcaaattttagcgccagtgttcatattaaacaatgacagttctgtccaccatccattgtgatcccaaagatagcttcccgccattgaatcgtcatgggtttctgaaggcggccacattcccgcctctcatgaagtggctccatcagtatataaatcatcatgcaatatggcatcccacaccaattaaaaatttagagtctagccaagtgtaatacatgtcccgatgctaataaccgcgagcacggctattcgattaaattggtgactcacactgaagagatgtacactttaccgactac

SEQ ID NO: 17902 - DNA, 409 bp, Oryza sativa
  unsure (1)..(409): unsure at all n locations
agcttcatataaataatataatgattgactctatcaggcattacccttttttatggcctctacaagatcttatggtaacatattttttaagatcctgtagtataacttttgcacatcccttaaggggaaaaacaaagataagttctatagtttgatagcaacagaaaggaatatgaacatagctatattcacctgtaataagcatgttctcccattgatgagaaggcgtgtaccagcagcttctgtctccgcataaattacatgactgtttccatccaactgaagaatttacagttacagacggatcagatcctttttcaactaaaaatataatactagcatatcatctttctataaaaaagtntatagtgatatatatttacttgcatcaagagtcctccatctcgca

SEQ ID NO: 17903 - DNA, 337 bp, Oryza sativa
gcctcacaatgcatttgtaacgaggaatttggcaccactagaacttgtgcattccgatctatgcgaaaagaacggcgtgttgactataggcggaaagaaatatctcatgacactgatagatgattgtactagattctgctatgtgtacctattgagaacaaaggatgaagcattacattactttaagatctatatagctgaggtagaaaaccaactggaaaggaaaatcacacgcgtaatatctgataggggtggagagtatttttccacgagttacttctttctgcgaaagatggaatattcatgagggacgcctcctattaccccatcaacgggt

SEQ ID NO: 17904 - DNA, 329 bp, Oryza sativa
  unsure (1)..(329): unsure at all n locations
ntattacaaaggaattagaactgccattgttctgatctgttttaaaacacttaaagagcaagcaaaaatgcttattaagacagccgtatcataggcacacgatatcgaacgtcgactaaccccaaacaagcaacctaaacacacaaattaacaagcagaagctagacagtcgataaactaatgggaaacgagcctaatgctcggaacggctcctgcggacggaggagtcgaaggcgtcctcctgctcgtcaccagggccctctgagcgactcccggagcctggcagataagtctcgccactgcctgactctgagccactgggagtagca

SEQ ID NO: 17905 - DNA, 395 bp, Oryza sativa
agcttgaggacaaagtggatctgttggagattgaactagcgcattgaacggagaagctccaccgcataaagccaggattcctcttaccgcatggaagaaagctctatttgtccctcgctaccaattggtgccaaaggtccgtgtggtggataaagaagttaccccagccctagcggatcctccggtcgtcaatgtaagtgatgatgaaggagatgaatcaaagcgcacccattccaagattgagtggggagcaactcaagatgatgaagacgagccgaacgagccttcaatcaactccgatgcccggaagacctagaatgccttgtcaaaccgttgtcttagatcgttgtgttagtttgcttgtttaagttcggttgtgtgtgtctcgcatgtga

SEQ ID NO: 17906 - DNA, 466 bp, Oryza sativa
tattgtcccagctgaatacaccgtagtctggaccaccccagtaagcaccagcatgctttgcaagcttgtggtgtgttgccaactgcaggtacgatgaattgccggttgcgagatacatccatgaaccaccccatacaaactcatcccagtagctggttgagttataaaattttgcagcatcggaaccacctgcactatatcttccacggttttgccttgcaaacttgaagagggtggtagcaccatgtaccagcttctgcgagtacgccttattgtccttgaacacaattgatgctgctgccaatgatgcagccatctcagccgcaagatctgaacaagcatggcactcaactactgggcgagggtagtcaatgtcctctggtctcatccaacaatagtgatcgttcgtgtgagtcgaaccgggtgatgttgcaccgcttcccacctgcacccaccatagaatctc

SEQ ID NO: 17907 - DNA, 127 bp, Oryza sativa
agaattgttctgctggatccgtgtatcgatattgatctattatccagatatatgttgtaaaatgcttgctgaggacgctaaacctcggacattgtgctaaagctctttatctaatatattccattaa

SEQ ID NO: 17908 - DNA, 396 bp, Oryza sativa
atcacacatatattcatgatttcaattatttaggagcactccccatcttgatcttttggccggcatatataattccattttcttaacctatatatcttaatctggctatcactgctccacaaaaagctcgatcgatagtaattcagtctttgaagaacacctcgaggttattcatataaggataacatgaacatgggaagactcgaaagaaccaagttaagaataaccaatctcccaccataaggagctgtttttgcctttccatgtgctaagttttctttgaaacctatcctccacacatttccaatcagaaattctgagttttcgatagtgtatggggattcctaaatatttgaatggaaaggaaccagaattacaactcaacagttgtctata

SEQ ID NO: 17909 - DNA, 466 bp, Oryza sativa
  unsure (1)..(466): unsure at all n locations
tcaccgctntgagtgatccacgatgtcagacttagggtgtaagatcttttataatggagaagaagatggagcaagcagctagggaactccatcacccaagggagctactatacctcttgattacagcaaacttaccattccccctcacaacattgactccgtgccttcctggcgtgctcctcaatatgatgggacacattacgccgcttggaagcacaagatgaagttgcatctaatctctctgcatccaagtatttggaaagttgtttgtacaggtgttgatgtaccccatgatgacatgaagctcactttggagcaagagcaactcatccaccgcaatgctcaagcttccaatgcatattctttccgccttgagtcctgaagaagtcaacatgggtgatgggcttgaggaggccaatgagatatgggatacttttgtattgggtcatgaaggatcacccgccgt

SEQ ID NO: 17910 - DNA, 331 bp, Oryza sativa
ttatatatacgaagtttaatcatatatgcgcacgatggacttacttatacgtaatgcgattatgagaatgtgtgtgttctctacatcatttttgagatacaagtgataatccttccggagaagtattttccaggagcatcacatacttgaggctcttcatgttgaccacctcgagagggagctcgccggagaactggttgaagctgaggtcgagccttgcgagcagcggcagccggagcacgttggaggagacgatgctgccggtgtagtcgttgtgatgcaacacgaggtatttcaacgccacgaacttgcaagaatctcctgcatgttg

SEQ ID NO: 17911 - DNA, 104 bp, Oryza sativa
actaagcttacatggcactacacaatatacttggagaaatctttttttatatctttgtgatcctataagatctcatctcttattctaatttagaggcatacgtg

SEQ ID NO: 17912 - DNA, 316 bp, Oryza sativa
tatctatgatgacgaaaggtaccaatttatatatttatgagttaaactcgacctactgagccggttgaaatagtgaggctattaaccggccagacctaagtgcaggaacatatataggtttacacatcaagttttaagaactgtacctaccaactccctgtcgatagagttgattatttcaatctgacaacgactgatgtccagcatgatgtaacaacttcccttccctgattccaacactacagatatgataataagcgtcaatgaacaaatgaaaaactgcaacatgatatgcatgtacgaaagacatattctg

SEQ ID NO: 17913 - DNA, 470 bp, Oryza sativa
  unsure (1)..(470): unsure at all n locations
ggggctctacatcatcaattggatgaatatcacatttgttctctntaagaaaaactccatcgccaactattacagataagcaatcgagaccaggcatctctcagatagctaaatcggcactagcaacgttgactgacttgacggctaacacgatatcaatctagtcgacttgccactgaatcaagcattgatgcacggttgaaagaacacaacaattgacatggatccaatcccttccaagcaataagctgtatgaaccctccccatcgaagacaaaaaatgttcganggttagacttgctgccgactgtcagctccacattcaaaactcctttggttctaatggattgccaccaacatctttgagcaccatgttcgtcttgatgagatcctcancattatgcccaacctcctaaatgtagattaaggatcaattcaccacaacccaccatcgaccatattttagacatc

SEQ ID NO: 17914 - DNA, 285 bp, Oryza sativa
ctctacacccacctcaaacgtactgtgggatacactacaattactggatcataattacctaaacaccacatctacggcaattaaaatctactttagtggttataactcaccaaagcaaccactatattttaattgattatagtgaacaatattcccgtatgctatttaggtactaaccaagagataattctctcaagataaatctaaattactcaatagaaatattatattgaattcagagtaataaacagaataaatgaaattggagaagattaccgaccactc

SEQ ID NO: 17915 - DNA, 415 bp, Oryza sativa
agcatgcagcttggaagtataaagattatcaacaatctttacatatgcaatcccattcacacataaatacatttgaaattaattgaagcaacacttcgagaatcacacaacttgttcatcatgcacttgcctccaatgaagggttggtattatgtacgatcttgtatgaccaccccctaatctcaaacaaaaactcaacaaacacatttcaatatgactataataaattaagtggtgcgctcctatgggcgcattccaatctcaaaccaaacagtaaacacctctcccatctataaacagccctgttacttcacaattaattaaagttaacacggcaaacaaatacattgtacgaaactacagaatgagacccacaacttttatgtagaaaccatatgtttattttgccattaaa

SEQ ID NO: 17916 - DNA, 365 bp, Oryza sativa
  unsure (1)..(365): unsure at all n locations
ttcttacctatttatccataagtnnactntttcattaattttttangatgctcataaaggggattaagatagaatattctctatataagttacattatttactaacttccatattcatgacatgctctcagatgaatagccaaattattttattgaggcttgacattagccatgttgatatattttaaagcgtatgcgttctattttaacttcctctagctagcactaggccctaatggtttagttgtttatctagatcttagttaatattgatgagacctattatgaaatgcaaatcgaatatccaaatgcacatgaaggactcaagtcanaacattgtttatgggagtatgtatgcttacaca

SEQ ID NO: 17917 - DNA, 229 bp, Oryza sativa
  unsure (1)..(229): unsure at all n locations
taatacccccgtcttataacaaacactaactcacttatagagctacaattttaaaatgcaaaacaaagctcatgccggtcagaatcacaaatatattgtgactccgatctatccgagatagctgaatatctaaacacgggacctatatagctaatgcatancgacttaataatattagcttcaaaaatgcatcagatctccttcaagctaccaatgggatattcaactc

SEQ ID NO: 17918 - DNA, 316 bp, Oryza sativa
gaaaatgcacttgtctctatgaaattaagtccaaaggctagacataacttcatggggtgttgtgcttctgcaccttatctttatttttcagggcctaaatcttagccaagtttggccctactacttttgcggtagggtataagtcatattgaccatgagtagcttattaatgtacagttaaagtaattgataatccttatcctggtcaaggaactgcaacaagataaaaatgaagtcaatggggcccaatttatacgatcttaaagaatgtaactccagcttatctctggagattatctctctcaaaaaaaggtta

SEQ ID NO: 17919 - DNA, 460 bp, Oryza sativa
  unsure (1)..(460): unsure at all n locations
ntagctatctatctgctncatgtgggaagtgactaagaattgcgagttaacaaagatcactccaactaccatggctcagccccaaaggaaactggtggacacaatcatgaggccattcacagcagcttcaacgtttcatcgatcagcaacaaggcatctccagccactggccatgttggctcaaatgaacggcattagcaggaggggccttctcactttcctcacctccactgcagccatacctgaggctggtgaatcaagataggctctactgcaaggtacgcgccaatttggtccgagtttgcaattgttctggtacccggttgtccaccttggatagatcatcagataatccattttcctccttgggtgtattagaggatctgaagaaatcaaaggaaaacatagaaaagaacgacaaagatgtatgcgaccttcgggtttcttcttgcacacatat

SEQ ID NO: 17920 - DNA, 414 bp, Oryza sativa
  unsure (1)..(414): unsure at all n locations
gcatgcaagcttgagctatgagaaatgcaatccagccttctatatgcgttttactattttttttccacccgactggtcatcagttatcctggtgcagtcgggagaatacttccaccccacggaccacgccactggcggtttgataaaaatcggtacttctttatctcatacgcggaccatatacaacctttaaatactttttctcaaaaactattcatccgatcaaggatctgattatttcgtatatttgtacaattaaatctttacaacaagatctcacatgatcatattttgagaaaaatattcttctttatttttcaatagatctgtgtgtaatgttgcatacaatattatttcgatgtctcgataagtatttcttaacgttntactatggcatttacaaatgttgcatgc

SEQ ID NO: 17921 - DNA, 353 bp, Oryza sativa
actcaagctaaaggacgatcagttgagccgtgccgggcaccgaatttttctgtttgtaccaaagccagccgctacagaaaagccatcacatggggtcccgggcttcgacggcacccggagctcaaaactgcaagagtcctcccatgctcatgggccaaccccgcgcttggcccttgagggccatgagaagacgatcgccatgacccggtcgccatcccccgccgcctctatgatcgcttgtgcacaactagaaggacttggaggggtcggcgccatcgtcgtacttctcggtgaggcaaggctggagctttggtgggccctcggacattccaaagactcgccacatagaccta

SEQ ID NO: 17922 - DNA, 361 bp, Oryza sativa
agcttagtgaccgtaccggatgctaggcggcttgctgatcttgtgacacgtagagcaccaccgcctacggcgtctcaagccgccgtggtaccgtttcccgtagacttttcaagcgttgttggtatagctatagctgcgatcctatccctctattcactgacaccgaagatgcactatctttatggattcttttctatactggccttgatccgaagtggacaagaacctccttttttatctttctttcttgcaaatatgtcgtactcacagtgacacgggccattctgtcttctcaacgtctgaaccacctaacagttggtaccatgtacgatacccgtccaacggtttagaaccgtttaaa

SEQ ID NO: 17923 - DNA, 469 bp, Oryza sativa
  unsure (1)..(469): unsure at all n locations
tggagtgatccgataaaagatacatatgagctaacccctttacttatgatatatgacctgccatgcccagttgagaaaacccatgtgagcaaaatgaaagtcaactggggactagataatataatctttgcccttgggaactcatgccaaaagttaaccaccaaaagtccaaaacaacactcaaaagatgaacaacactaattgaatacctattgaaagactttgtttagcaacttataatgtatggtctcatatgttgcattngtcaataaataatgaaaatgcaggcaaactttaagttnggcctttccatatgtcgcaccacttgattttctgactatatttagcctatcaagatatgactatattgacaattgtgaacaacttcattactatccagagcatttcagaccttgcaatatattcaatatctgattgcttatggacttcttgtgagtgtaaaaatgga

SEQ ID NO: 17924 - DNA, 362 bp, Oryza sativa
aaattacaaacatatctgactaaatctataaccatctggcaaacgaccccacaccccacaatccctattaaatgacctccagaatgctacctattacacttgaaatacttccctttaaagaactgaggcgccaccaaaaccaggtcgaatctagtgtgtcacttccgactagatcatacttgacatatgtacaacaacttccaccatttcgaaacagatgcttttccctgtactctgacgcgcaaagttacacccgaggaacttaaaaaatctatactgtgttagtagaaattttaactgacttagttcattgatggcatcccagaatcaactaataacaaaacaagcctctgtcccaatcg

SEQ ID NO: 17925 - DNA, 372 bp, Oryza sativa
  unsure (1)..(372): unsure at all n locations
ctaagctnnctcttccgagaacatggccctggtccaacaataatgttatatttctgcatctgctgatgcatggggaggcgcttgatgtggctagagtcttggcgtattcctgattctaattgcctttattaacgccaatatattttctccatcgatcttactgactggataccatccccctgcatgatgcactgacagacagcggaggtcactgctgttgagattgttctagcccaacctcaccacccatggggacaacatctcatatcgatctaatcagatcattaccacttcgtcattggtcacacccacacacatatattcccctgtagccgacgtagatatgacaatctaggaacattctaaccctga

SEQ ID NO: 17926 - DNA, 226 bp, Oryza sativa
tgagacctaactctataatgcttcagggcaataagccacggaccatatttgccttgataatgactagcgatctgaacattcttctcatgtctgcaactatccaaatgacatgaaagtactgatacctcgagaattatccaaaacggataaactagaaactgacaatgtggaggccatggttctttctgccataacattctaggtgttttgatagtcaatggcttgt

SEQ ID NO: 17927 - DNA, 368 bp, Oryza sativa
  unsure (1)..(368): unsure at all n locations
tataaaactcaacccgctaactggaccacaagacggaccatgttatttctctcattacagccagcgcagggcgtagagacgaaaattatgaaagatctatgccacaactggcactatggttattaggggtcagactccacctctgctcccccattgatatatgctgcaatgggcagctcaaaagatattgcaaccgcgcccgttgcagaggtacccttgtcacagggacacttttacagaatgaagtcgaccctgtcacaaacaaggaggaatatctgcgccctgcttcacggctaccttctttgctgagatcactcaagcagccctaggaatnttaagcgatacacaaacatctacaggaagctctc

SEQ ID NO: 17928 - DNA, 193 bp, Oryza sativa
agtatttgttagagcaccttctaaaatgggaatcacaacgttgaatgcaccagctcattatacaatgtcagttgctgtctgtagaaataatggtgagagtagtcctagcactaatgaacagataatgagaaaggaccacgctggctaccattgcttatataaagctaattggcgtgtgctcatggcagctggc

SEQ ID NO: 17929 - DNA, 412 bp, Oryza sativa
  unsure (1)..(412): unsure at all n locations
agcttatctgcgtaatatgaatgtaagtctccttaaggtttcctgcacgnntcgccccaccagcgtctatgctaatgaccctatatgagaaacctcttccgtctggtctcgttgttagcctgcatcttgcataagcgcctggagaatcgggattcgtagagaagtggtcccttctggtggaactgcctggggagaccataaactcttaccttaaacaagggtgaattggaatatctttttaagttgcttctaaaaagatatattggtgaggcatacggtgagtaccgagtatgactttacatcatccgaagcaagctcctgaggctgtctaatatgattcgcccccctgccaagatcctcaaggttaaatatctctctgagtgaaccggtttgaacatgtatttaaacagta

SEQ ID NO: 17930 - DNA, 451 bp, Oryza sativa
cacttagaatactaacgctttaccaaacgtcgagcgaggagcaggtatttacttctcatctggtagcggcgggaatctgtggagtatctaccggtcgccgctctcatcgccgactgcgagctaatggaggcaaaatatacctttttcctccttctaaaatcaaaactgaagaatctccttacaagctgatggatatatgggcaaattcatactttctgcattgtttctctctatttgcacataataaaataatacattcaatgtctagccagcagctaattatcatgtcttttagtgtaatgtagcaaatacgtgtttatccgtgttctatagcaaagactgtgaaaccttgaatctcggatcaaatattgtctaatttgtcagctctttaaatagacatcaactctctattgtgcgagaaattaataagataatagatacatactccctc

SEQ ID NO: 17931 - DNA, 190 bp, Oryza sativa
gcataaatacataatctgtctgagatagaaatgtgtattttgagaacttatgatggtaaaaatcactacaacacataatagatcttactaaccattccagtcggcttcatctattttgccacgacgatatacaagaggtgcagaccagatgtagtaatctccaagcctgagcactgtattaagctataat

SEQ ID NO: 17932 - DNA, 221 bp, Oryza sativa
aatcgacgaatatagatgaactaaactaaaattagggttaagaaaagagtaaaatgcgcaataacaattcttacgagatgtacttgatagtgcaacggcaagaggtgtatgatttcaaccccaaagtctcatattcaatccccaatatactcataacttttcttaagaaatatttggagggatgtctttttctccaaaatttatttttttctataacaatt

SEQ ID NO: 17933 - DNA, 173 bp, Oryza sativa
  unsure (1)..(173): unsure at all n locations
tgacatgttatcaatctttgattaaagggcaaaataaccacggagctttcatggggtgataccgcatctggtagataatgggctatctatcttgcaatatgcagatgatacgatcatctttatggaacatgatttagaagaagccaaaaacctcaaacttngtctaagtacat

SEQ ID NO: 17934 - DNA, 415 bp, Oryza sativa
tgttcgcgacatctctctcgctctacacaagtttggtgtcattatttgattgctacgccacgactccgcaggcatatgcatatgtgcgtgaagttcatcgatccaacgtgtcaagggatcacagttaaagtgcacatttgcatgccaatgatgcctaactaatcatgcatgctagctaaatactagttagggcgtgactaataaaaatatactccctccctacgcttcagttataagtgttttaattatagtcaaaacctgctttatattaactaagttatagaaaaagtagaaaattttaccctaaacaaaatttataaaatatattatattattgtttgacgaaactattaaatatgtgtgccatgaactagttaacttaaaataattcaagatggaatgaatgtgaccttga

SEQ ID NO: 17935 - DNA, 226 bp, Oryza sativa
atattgaccacagtcccttaatagtcatctctagaaaccgatgctgaaaatacccaagccatcgaagaagtagaacaaattaggcatagagctatatcggctatccagcgctacttgtctcagtgatgtcttgtgtaatagaccttaagaaattttgtaatcggctaagagactctggctctttatctaactcatcttgataatctctatgccaattcaatataac

SEQ ID NO: 17936 - DNA, 463 bp, Oryza sativa
  unsure (1)..(463): unsure at all n locations
gctntacctctagttgaagatcgaatcgatgcagctcaactctaatgctttatttcgtcgaaacaaacgaaagtcaaaagggtggcgatgcgcccagattgtattgaacgattgttaattgattacatgggttcaggttctatttataccccggatacaagatatgtccttgccggacacgacatttatctctaacaaactctaagataccataattctttgcggcagactttngcccaaacatatctctaaggaaattacataaaatatcctaattaatagatacagttgcctattcgagagccctatcttcgtcgtggaaatcttcatgaagcacctttgattgttctagaaacatctctgaaaccgccattatcagaatcggctgcattacctctatcagctgtgtcggctgtcctatgnccgatccatnttaaccgatgcagactacagtctatgcctt

SEQ ID NO: 17937 - DNA, 441 bp, Oryza sativa
ctcggattatgccgttgcacagtgtttataatagcacatctggttattgccaaatgcttggttgatcccttgtgtcatggttatccaatatacaaaactccgtagctctctctaccggcgagacggaatatgtttccgcgggtagatgttgtgcccaattgctttggatgaaacatacattggtggactatggcatatccttcaccaaaaccccactcctatgtgacaatgatagtgccatatagatagccaataacccggtccatcattctagatccaagcatattgacatacgccatcactctctaagagaccatgtttgcgagtgtgacatagtccttagccacatatgaaccgaggatcaactagccaacatctttaccaagcctcttgagaaacctgttttacacatgagaatgagttaaaggataaattctctat

SEQ ID NO: 17938 - DNA, 222 bp, Oryza sativa
  unsure (1)..(222): unsure at all n locations
ccaattttccaccaaaattaagtgatgagtaattaactagcgccaatatcagcgtcatcgatagccttgtcattgaaaagaaaacttgcacatctcacaggcgcatcgttatataatttgtcttgtgccttgaccgtctccactgatcggttacatatactactaactccatattttaatgtatgacgccggtgacttnttatctaacgtgtaactattcgc

SEQ ID NO: 17939 - DNA, 393 bp, Oryza sativa
  unsure (1)..(393): unsure at all n locations
accttaaaactcagcttggacaaagcacttgtcactggaaacttttcagcagcttatatnttattatncaannatctatcagataccctgcaggaagaaacatggattaaagaattccacccttgcttgcgatcctctctgatgtggatgggagcttgtgagatatcccttgtctgctctgtgttttcatttgggagggggcaacatgtacttttcttgattgccggacatcacaatgccgaacatgaaatatttcatgaagcaaagatttctctcaggactatatggcaggtttcctgttgaaggataaaatgaatgagataaataatttatcttcttccaagagcagcaatcagcttgcaatgaaagatcaccttaaaagtgcttctctga

SEQ ID NO: 17940 - DNA, 394 bp, Oryza sativa
ggaccttaatcacctgcagcatgcactatatctaacaatattatcattttattccagatttattcccaccgcggcctggaaccatctatgtcttcccacagaggcatgccgttacaggccgtaatgagttcttggggtatacatcttatcgtcttcgaagggagatcgtcagtacaaaacatcagatatccatccctcattttaattaagactacccagtgtaatacatgtcccgatgctcaatatccacgagcacggctattcgaatagattggttttactcacactgcagtggatgtacactttacccgtactccgcgacttgcgcaacacttgagcctatgtcccaacgaatgagactagccacggtataacctttcaataacctcacgtt

SEQ ID NO: 17941 - DNA, 434 bp, Oryza sativa
  unsure (1)..(434): unsure at all n locations
agcttgagtgggagtgaaatttgaacctactctaccttgtatttaacangcacgcacactcatctcgttgaatggntacttatatatctacctaaccaattgcgcaggattctccaacactatatgggtgatatgctgttgctcacacattcgaccatatatttcgacgacacatagaggtaggtgagacaacattgaccatttatgaggttaagtgatggatgccatttgtaacgatcaaatctgctactgtcttatttcgagggatactatgatcctcgtgcttacattaattgggatctaccggttgatagtgaatttcaaaagcatgtcttgtctgataaacaaaaggttatgtgtgcctctaatgatttagttaaacatgcttctaatgattaaaaacatctgtgttggcataacaaaataccacaatt

SEQ ID NO: 17942 - DNA, 376 bp, Oryza sativa
  unsure (1)..(376): unsure at all n locations
catgcaagctagttacagataagatatgtccgcaattcattatatcctttaaaatacgccctcaacgatgattatggaaccctaaatgacgtcttacattttttcctctcttctttactttctatanggcttgacatcattgccaatatgatttgtgtggtcttttctcgagaaaactttgtttgtatgaacatcttgatggatcaattcttagaatttacataccaaccaaatcttttatataaaatcatatagtactgtaagtcctcatgggctcattgcaatcttttatgtcctacctcaaaaaattttgtttacaatgcatactgatgcattttgcttttataaatgtttttgaataactttttagggaaaa

SEQ ID NO: 17943 - DNA, 416 bp, Oryza sativa
tcactgcaatgtggacttcagctccttgataagatggtatattctgtatctggtaatgccaaaatttgtactgatgcaatgcactattaaaaactgtctatttggagtaccacgttggtagatgagtgggttaggctacatacatttgtgaaaggagagaagcatatttagccgaataatcttgcaaatagcaaatactgaaccaaaaacatgtatatatgcagagatagcgaaaaccaatatgtatatggcactagaaatgaatgcaaattgttactctatatggggagggacaagaaagagatgatgccactttattaaagtggagtacatagctgtggaacattcaaagccgcgagacgtgagatgtttgtcatctcgcacaatgtatgaagcacgatgaattgcaacatcat

SEQ ID NO: 17944 - DNA, 390 bp, Oryza sativa
cattcggaccttaaatatcaactgcttctttagtagcttggcgattttggaattgagttacttaggggtggattgtttgggccgtattatggtcctgttacctgcctgatggattgtctccactaaatctgctggattgtgtatattgagttaaatggaaagccattaattttaagtaaattgaaatgcgcattattttaagtaaaactggaatgccattgttttaggcatttattgatatacagcttcggcgggaatacagtcaacatgcccgttgccttatggtcaacacttggtcaccggtatgcatcccaaagcctttgtattaagaatgtactgaatactaacttctccgtatctgaatactctgaactaggattgtattttgtt

SEQ ID NO: 17945 - DNA, 451 bp, Oryza sativa
  unsure (1)..(451): unsure at all n locations
ctcagctttggcggtacatctttcgtgccttcttctctaccatgattnttgttggaaaccgccgaccgttctcctatgtccgcatccgatatctatatctacgaacctgtgtatttaaattgatgctatttttaaccatactatttttggtaaagttggcaaaaaaaattatctatgtttagtttattgtcaaagttagtaaatacataagaaatcttactaaaattntgacaatattgccatcttaccaaaatattggcatttgcaaaatttggtaacatttattttagctaaaatctgagcaggccctatatctatatctatacctaattgtgaaatacgtaggagcagatacaatagcaggctattagccaactatatatatattttatagagattaacgangagagagataaacagcggactacagtattgtagtcagctgcagcac

SEQ ID NO: 17946 - DNA, 179 bp, Oryza sativa
tatgtatattacacatttgctacactactagagcgtattgacggacaaggagcgacactgatctcaatgcgattatcgacgagggcgcatcccatctcgatgcctcctcgcaaactgtttcacaagccgacacatgcgacaaatcttgcccataaagtatattttgctttcaaatggtt

SEQ ID NO: 17947 - DNA, 199 bp, Oryza sativa
acctgtgatattcgtgaagttgggcacttcaaatccttgcaggtacgggaccgaatctacatgttcaggatacggtctttgatatgtatgcatagctactttggattctatttcactactattcccgcaaaacattatcattatcttttcccacatccacatgaccgaattgtgattcggtcttacgtgataatgctat

SEQ ID NO: 17948 - DNA, 403 bp, Oryza sativa
  unsure (1)..(403): unsure at all n locations
ttgcctaacatgttgaggtgccattcattacaattaagtctaacatatatattttgaagtgtgacaacttantgctcactaaatgatggaaggactaggttgaactataacaagatagctggaacaaacaagaatccccaaaagatgcaagtcatcatgctgttagccattgactgatggaaggtatatgccaaatacttctttaataatgtaatacatgcacctggagtccaagattggttgagtattagagtatattgttgttagagacagtgatgggactgaaatttcacaagaaataaaacaggtagatttttgttaaatgacagtgaaaacttgtcattctcataaaaagaagtattgggtgagcaataatagcatcatatatgtccatctcaaacat

SEQ ID NO: 17949 - DNA, 387 bp, Oryza sativa
  unsure (1)..(387): unsure at all n locations
agcttccctgcagcgcacgcttagaaccttttatccgcgncccgaccaacaccgacctgggagtctctgttcgggtgtgactacagtgggtcaataagattgaaggagcaactcacccatacccgtgtataagatttagagtctacattgtatacaccccgcgtcggtccctgccgttaaaaaattccgcctcgcagccgaaaccttccttctccttcctcctcttcttcccctctcccgaagatagaaaaaaaatgaataaagagaagaaaaagaaaaaaaaaactcgagctcacgcgcacacgcacgcgacgcgacgcgaccccgaatcggaggcgaggccgccgactccgatcggatcgggccgaggtcgacggcatgggcggc

SEQ ID NO: 17950 - DNA, 441 bp, Oryza sativa
actcactttctcatcatatatttatatgggatttaaatctttttactaactgccatagattatcgcatgaagtttttgaggagagaacataaagaactgataaggatcggattaaattaaggtttcaaaatttatgtaaattagaatggttcctaatatagtgaaggaagaatggaatacagagaaggatgcatatggccatatgggttgtgttttacttgcttaccatttaaatactcattggcaacttctcttatgcctactcttacactactatatcaagtggatattgggataaaaatacaatccacttatcattacccaaagttcagcaaggagccacaaccagaacattaaatcttcttaactggggataaatacatgtctccctgatgcacagacaacacttcaaaagattaaccaaatccccaatttttttta

SEQ ID NO: 17951 - DNA, 336 bp, Oryza sativa
actattacattccatactgatggaacgctcttatatgactctcttaagaccctgaatctctggagataacccggatcaccttcgaagttcttataggggcccaaacacaaataaaacgagaacatagcctgcttacaatatataggaaaaaattataattatacgatttgcaaaaagattgttatattccaccaccgaaacaaagaacttagctggtcttttattttaaacggctattaccgcctaaactctgaaccgctataacacactaaacgaaagtggatgtaataaaactagtctaaaggtaaaaatgcgacattttataattttaacact

SEQ ID NO: 17952 - DNA, 433 bp, Oryza sativa
  unsure (1)..(433): unsure at all n locations
ggagactgaagactatcanaggctactgacttgtatcgtctttgaataacaaacaggcagntcaaccctgtcatggttatggataccacatacctaatagtagttgactaaatctcggcaggacccaccacataccatgtcctatacggaaacaacctacggatataggagggagttccggataaggaaagacaaccagagttctacatggaaacgacaaggactacttgaattgtatccatattggnttccctagttctacttggacaaggggacacctatgggtataaatacaagcccccctatgaggacaaggggacacacacccaccatggatgatcaacacgatcgacccccccatgagatgatcaacacctatcatgatacgatgaacacccaccacgagacaatcaacttccaacacaatcaacat

SEQ ID NO: 17953 - DNA, 371 bp, Oryza sativa
actgagctgaactgggggttgtgatggctatttcaattcccgccatttcccatgaagagactacttgctgtctgctaattccccgtataaacagttatgatcatccgtgtgcctgggctgcaagtgtgtcagatcagagtctcccactctgatggagcgcgaccttagagcacccttggtcgtcctcccacctccataaatagctaggtaccccttcaggatttctcggcttttgtttaaattaaaatttagccattgctacttacttgcagcgcgcgtgttggctagatcctccgtatgcttgtcttcgaaaccccaacttatcgtgggtatttaattcctatttgcaataatagattactcttatcttg

SEQ ID NO: 17954 - DNA, 299 bp, Oryza sativa
cgcttttccaaatcagcgtgagcattatataaatgatagaaacccagcttgctcatttggcatccttagtccctgcgatgactgcaaccggacgagctccgtgaccacttaacgaacacgatgataggggatagaccgagagagatacatagagagagagaggaatatggatgatggtgatgacgccggtcgaaggcggcggtcatggcggggctcaccggcccacggcgcggagtgtgttccggcggtggaatcccactggagaggggtggacggaggtggccgcacgactatgaatg

SEQ ID NO: 17955 - DNA, 356 bp, Oryza sativa
  unsure (1)..(356): unsure at all n locations
tgcacacgacgaagtatctctttaaattctaatcatnttttattctgcaaaagcaaattaatctagattatttcggtaggcaaggctagctcctgaactgcagttaatatgacagatgctattgctataatcttgtttgcgatgcctcttaattcctgtggtgatacaacttaatcctggaccattttttttaacaacataggatcatataaatctatttccaaggaaacttattctacaaatccaatgacatcatggaaaatatgttaatggattgtgctcaccattagctcttttttagaggcatctattgtgacacacagagatgtatatgggctatatagaatggtagatta

SEQ ID NO: 17956 - DNA, 159 bp, Oryza sativa
aattcagaggtaatcatagtctgacaaccttacgtaaggcagagttgggttttttaaggttgatagtggaaaaaatgataggatagtcaccattcctggcgctctacagaaccgcacatgagattttcacctcataccggctgctcgttcaattctttc

SEQ ID NO: 17957 - DNA, 435 bp, Oryza sativa
  unsure (1)..(435): unsure at all n locations
cccntaaatanaagggtttgcacaaagggagaggacccactctctcattcatgtagatcaaccagtgcgtgaatgatttagaccacatatgccactattaaataacatactcgaactacaactttaacaacattaaaggacagaatatggagtaaaattatccaatagctacagatgagtctaatccctcactgaacttggatgttgaaaccacaaattccatgacaatgagttcatcacataatggagggaggaattctctatgtcaaatagttgtggagaattagaagtagagcatgcatgtactagtcgggaggcaacagaactaattaatgtttcagcgttgtggatgagttaacgtctcacaagtttgataacaatgatgcaacacttactggcattactcgacctgtgaactcatccacgataagcact

SEQ ID NO: 17958 - DNA, 386 bp, Oryza sativa
  unsure (1)..(386): unsure at all n locations
agggcgatcggtctcggaggagctggagatggttcttgaacttgttgatctcctcgnccgcgccggtgacgcgcatgacgggcacggacttccagaggtggcgccagcgccgggcgagcacgcacgtgcgcaccaccttctttgactgcaggaacgacagctcgtgccgcatgagcgcgtccgggagcgcgccgatgtggttctcgccgtcgtcgaccttcaacgacgccttcttgctcttgggagacattccgatcaacactctgcgcgcctcaggcggtcagagtaagaacaaaacctgctggacgagacctcaacaatctcaccgacgcaacacgcagtgcacgcacacgctcgcgctcgcagtgaaagagatcggcgagaca

SEQ ID NO: 17959 - DNA, 232 bp, Oryza sativa
  unsure (1)..(232): unsure at all n locations
ggaagaaanngaaagcacaataagaaatttgaaattgatgcttgtcaaagagagacaagcctacttctaccaagagcgacccacagcacacggactggaaaaacagcacactatctcctgctgcaaccctgccgcttcgtctccgaaaaccaaccgctccctgcacaaaccggcaaaacaccccgtctctctagaagggtccctgtggactggaccacactgttgctagcac

SEQ ID NO: 17960 - DNA, 289 bp, Oryza sativa
aatgtgacattgctgaaatgtcagatgaagatatgtgctatttcttgattgcaaacaagccatggtttctttagatgatattgctagtgcgatacctttctgaagatcgggaaccctatggcacatcatataggtatgaatatcttttaatgtgttaaaatatatacgcatatacaaagtttatatactgatgttacatagcttattaggactatatgaactttgatatgatgtaatgaaccttgttctcatctacaacgtatttaaaaattaaaaaaaagaaattgct

SEQ ID NO: 17961 - DNA, 332 bp, Oryza sativa
ttgaaactgatgtaatacgaatattagacaattggatgttaattatgatattaagcatccttcttaatctaatgttatataaaatgtgttaataacgatatgaaagaattagccacagatcgaatgttaaagcatacattatgctgaatgaccggatgtcattatatctctatcgattagataagaaatgaaaccttcgttgcattcggctaaacccaacttggatataatctctatatgccgatacaacgtccatataactcatcggcttaaaccccgatgaaacccttattggcaatcaatggcatgttatgatttatggatataagcac

SEQ ID NO: 17962 - DNA, 188 bp, Oryza sativa
ggctcactataaagaatatttcctagttttttaaatcgatggccccccctgacgtgtagactacacgaacgatgtcatacaacttttgggtcaccagttgttcgatccacattcagaccttgcttggccaccgccagccaggatatgtgtctccgcatgaaagtctgtccgttgatgcacgtgtcctg

SEQ ID NO: 17963 - DNA, 288 bp, Oryza sativa
ggattacatacgcctgggatgcgtcgcccacgcctccgcgacagcagaagctggtgacactcggcaagaagtaagtggacgagacttgaggctcttgacttaatcggatgttatcatctcggtgcgatgatcgacgtgaccgtcttttgttgggcgcgtgcgaaggtggcgcaagatgtgtctggagcaaactccagcgcatctcctgcagtggcctcaactgaggtcgtggtcatgcccaggagccgcaaggtgacgcccaacggccctggcagtgatatctcggct

SEQ ID NO: 17964 - DNA, 158 bp, Oryza sativa
ttggagttagtctaatatgactccctggcatgcttttgagtgataaaacactcctcaaacgcataaccgggtataatagtctccggttcaaaagctcggtgcgcattaaacaattaccactttctaatacccccaaatagtcaatttgcgactggttt

SEQ ID NO: 17965 - DNA, 57 bp, Oryza sativa
ggccgaatgaagttttcacttcggtttgccttacacttatgcattgttatgcccctt

SEQ ID NO: 17966 - DNA, 241 bp, Oryza sativa
cccaatttaagaacccccataggaaagatttcgtttctacttcacgacggacaatattagggtaacacctcgagtaaatattcagatccatactagccaatgtaacacatgcttatgtgggatcaaggttggtccattttcagatcattgatttacgtacataaccgcgaacttggcctcatacccacgaaagtttttggcaaatgcagtgcacatattcgtccaaccgataattattgct

SEQ ID NO: 17967 - DNA, 413 bp, Oryza sativa
agcttcacggtcttctacacagacatgtggtttattataaattgcacactgactgaaagtgactcaacgcaagatctgttagaatgacaaactggcaagtgaaaaatactggcatcctgcgccaaattccagaagatggaatgaagaaatgctgatccatgaataagatgcagagatgtatgtagcttttgtcaaagattgttgaaacacatgaaaagaattgataaattgatgcgatcactcaccagatgcttggtgtaatttcagtggtatagttttctttttacttgaattcagtagtataatttgtccaacaattaatcaaagccccaacaacttcagtgattaattccatacttcattagtatcattaccatcctggagaacaaaaatgtatatgagaattatattta

SEQ ID NO: 17968 - DNA, 491 bp, Oryza sativa
  unsure (1)..(491): unsure at all n locations
aactaagcttattacataattattctaatgaatgatacacattttcttttcatattttggaaaatacatatttctaaaaaatatattactagagcaacttgttttaagatagtactccaagttgttaagcttattccaaaaccatgttaataatccgcgacaataataatccggttggcaatcttaatcaaacggcgcatataagggtcggttggttgatggctaagtttactatacctcactatgccacaagtgtgttatgccacacaaagtgaggctagcaatttgttagccacaagtgtggctaaatttggtaagaatttgagtctataacgcataggcccaatgactacgtaaatgaggcatgacacaagtgtgacaaccaaccaaacaatatactaacanattgtgacatgtctaatgattgtgatggcaactctttagaacccaccaaacatgcccatatatcatcgagcaaatcaaatgaaata

SEQ ID NO: 17969 - DNA, 404 bp, Oryza sativa
  unsure (1)..(404): unsure at all n locations
atgcagctttgatatctacgaattattctatttatatacgattcctacatccgctcagctgatagcctgacatcatgaaaagcaaattggcatgtgctaactatggagactaagctagaggtatggcagattgagaattgttagggttggataatgtggataaagggtgacaatattatctattatcaccatttaaatttttgataaccttgacacccatcaaagtaaccaagcagcaactaactgtagctcctcgtgtatcatacttgtataccctcaagtttcatcccatctgaaaactacttgtctgctgctagaagcaatcaggatgctacagctgtgaccaaataagctctgtttcttgagaaatnttatccaggtgcagacatgcatttgctaacata

SEQ ID NO: 17970 - DNA, 321 bp, Oryza sativa
gaactaccttactctaggaatatgtggtgaacgattacgatggtgatcgcatgacacgtacatagtgacaaccattggtgggagtgatgttggggtgcatacagtgacaatgtttgtggcggtgaagtcacctaagtcttgtgtggagggtgttgctaggaaatggtgccgcttatggggaagaatagactttcgcgtgcccatgatcaaggatagacctcatcgacagcttgagtggcatggatacccttcctctgggcgtgagcctacagtgcaatcgtggccacgggcggtggccgatatgcatcggcttctttccac

SEQ ID NO: 17971 - DNA, 313 bp, Oryza sativa
  unsure (1)..(313): unsure at all n locations
ataaaactcaacanctcatggagaagcgcacctcatgtgtccattttctgaacatctgagccagcaatgttacttgttcatctcttgccacatgataaatacgttccctatgaaaaaaataggggatcatcttactttaaaatggatgaagttagcgggaatcacaatacttgctcgcagataaactgcagaggtgaatatggaacatatatgatgtatcgacaacaagtgattgatcatgactgtcgacgggagcataacctcattcggataggatataatgagcatggtagctgtgagaataaacagagca

SEQ ID NO: 17972 - DNA, 340 bp, Oryza sativa
gggactacagtactttgctattagttgatccaatgttaaaacgacgatgtaaagacctctaaccgtatatgatatcccaataaagccggtacttacagaacgcactgtgcgccttacatcgttaagaagctgattcggcatattttgacacattgcttaggtctgttcgttcggagactacggatatgttcacctgtttgaagtttcaccgttatgggaggtttgtctccactcttcttcaaactactggtggttctctgacacatgttccttgatttaaaaatcaaatacataaccctcttacgctcagctgtcatgcctttatggtttctgtcaatca

SEQ ID NO: 17973 - DNA, 323 bp, Oryza sativa
ggacacttaaatctcactggtgccctggagctgtttttttcttctgtttggaaagccagtgtaatgctttaggatatatatgaagctaattatgtaaaagtgctactttagccatgttttttctattgttctaagaaggcgccggccttaacggctagatggtatctagtctaaactctcaaagcattttggtcccaactttatggggtattatgttttagactccgtttgggtagacattagaataatgacagttttttgtgcttctctatgttgcttcaattctagactatttatttcgtcgtaccatttgtcaaatataa

SEQ ID NO: 17974 - DNA, 240 bp, Oryza sativa
gcccttatggatcaactggatcgtttgaccactacacatcatggaagaggttaggaaaaaacctatagttgccaaacaggaggagccggagggactggaacccattcctaatgaagcaccaagtattactctgcgcaagaagcgtggaaaggccacgaaaagcttctcagagtgggtagaatttgagccaagggagaaaaggtcgctgttgtactatacaaactgttcgacgtatggtgt

SEQ ID NO: 17975 - DNA, 414 bp, Oryza sativa
catgcacacaaactatcaattacgaaaactcactacgtgaatccataccttcaagcggtgttatccaagagggggctgcaaacatccatatgttgtatgtaaaacatcttcagcagaagaaatatccaacaacttcagcaaatcacctacgatgtgatttcagatagatcagtaagcagaagaaatgcatattaaagattctctaataaaaatcaccaaaaacacaatataccataagacagatgttgtctacagtttatagaactaagatcctaagagagatactacttatgtagcagtagcctaataatactatcaataaaaaaaaagaggagcactctcctaggctctccagcataccatcaactgtctctagactagcagtaaccactagtccatggctcaggttacttc

SEQ ID NO: 17976 - DNA, 413 bp, Oryza sativa
  unsure (1)..(413): unsure at all n locations
agcttcanaatttcttcaaaaagagggattcatgctataatntctattgaatttatttggcgattacatacaaatcggaggtgcctaaaagggttgcaacttcatccttcaatgttntttttgtcatactacatttgcacctatgttttgcacacctttgtttgnttctaaaatttagctgtaagttgatgagagagaaaatgtgtgtggggaagaaagaatatatagaaatttagttcatttgctaaacaaggttttataaaatagttgagaaggaaaactctagtgaaaagtaatcttaaataatagaaaacaaactaaaatgaaaattaaaagaagtaaaacacattaaaattagcttaaaactttataaatagtttttaagaattatttggtgtaatattttatgattt

SEQ ID NO: 17977 - DNA, 456 bp, Oryza sativa
  unsure (1)..(456): unsure at all n locations
ntatgatcaanatcaactgcattaaatatttataactgtatgtggcacatactacgtacatataataattttaggtattttaccatcaaagatgggtttgcataaatagtaaatacaactcaactaaaatggatccaagcgagtaaagtagcattattgtgcattattgttcttttcttcaaatgagagaacattattgtgcatctgcacatcagactgtctcactaattaagaacaatgtatccaacaaaagatgattgttaattaagggggcaaacagaatgtaacgggatggtgtacttcgagacagatacaatactttttgtggcataacactgtcatcaagccatggcttctggaattaactctagaccctactgaaaccagaagataccaacacaataattccctatatcttaattgcaagcatggcattataatcacacatattgatca

SEQ ID NO: 17978 - DNA, 98 bp, Oryza sativa
tttttccaattgtccacctagatacatactgtaatatactcactcttgaactagaatatactattggacgctctcgtgtcttatattaaactctgtat

SEQ ID NO: 17979 - DNA, 202 bp, Oryza sativa
agttatatttctacctttctattatttactacatagtttgtaacccaatatatgtttcatcaaaaagatagattctttgtatcttttaaaggaacttttacataaaaatttttacacaaagttaccgcttagtgtgtttaaaaacgtattaattgggaaacacggacaccgttgttattaatacggaattctaaagagaata

SEQ ID NO: 17980 - DNA, 94 bp, Oryza sativa
ttttttgtttccagcggcgaggggtctaattccgcaacgaatttgctttgtggcgtttcaccatcacacgctctgacttcatctatgctcccaa

SEQ ID NO: 17981 - DNA, 384 bp, Oryza sativa
gggggagaaccaaggcagactcctcccgctcggcacatccgattctctgctcggagagaactcaattccagcacaagccaatctggaagtctttcgcccctgctcaataccactacatactgtggcaggtcgctctcaagcgatgctggacggcggaccgccttcgaagccgaggcctgtcacacccagatccgtgccccctctgcgatcaatgcgacgaaatgattgatcatcttctggtcgcatgccctaagtcccggcaactttggaggatagtcctagtgctatcggtcattccgaatgtctacctactcacgagcaatcatatcatcgctatgacagtcccacaaggatgattaacgatcatctcccacggtttgacac

SEQ ID NO: 17982 - DNA, 407 bp, Oryza sativa
agcttctccagattctgccacatcgcaaactatgaatccaccaacgggcacatgagcgcggcatggcgcggcgaagctaaacgcaacgtaccgtacctggaggaggttgttgggagggaagcgagcggcggctggtgggcgtgcgggcggcggtgcgagcggctggatggtgcaatggagcgcgacgtgcacggcgagcgacacgaagacggcggcgaggaggcccagctgctgcgccatgccgccgatcgacccaccaatgtgtagccgacgacgagctcgatcgatcgatcacgctatcggcgtcgactcgactcgccctgtagataagctggaggtgtcaggcatggcatacacgtgacgagtgggcacacacctgttatcgttagcccaagccacgtctgttt

SEQ ID NO: 17983 - DNA, 462 bp, Oryza sativa
  unsure (1)..(462): unsure at all n locations
tatcttgaaactgcaggctccagtttggccatcccaggctcccagcacacccgctcaaaaagacagaagtttagagagagagagagaatatgcggtaattttttttagtggagttggttacatacaaatttcttataaaaatgttgattgtgccacgttatgaacgaatcttgattttttttttataactcgcgactaattaaataaaatgttgaaatcattataaggaagaagtttatatataagactattttttctattgcaatgctctttatcataaagacgaacgacctgtcaatggtcatattactatataatacgctgaaacaattggtactatggattanggaaaggaannaaaagttgaatagaccttcaaactagtgagtgagtaagaattaccacctagancttagattgggtntgctcttatgtgatagactagtcaatattttttaaaaa

SEQ ID NO: 17984 - DNA, 319 bp, Oryza sativa
ccctgcaacacatacgatcatacatttgagcttctttggaaaatgcaaccgcctgtgcaactcttgtacataacctgccttgacgctagcacaaccagccaggtatctactcttctcccatcatgcgacgacgacgacgacgactaacgacaccagctgctcttctccctttatctactgctcctgacaagtatgggctgcctcgacatcgatttgccccaatctctgctgccatatacatttccccggatggtgagtgatttcatatgactgtatgctcttaaaaatgttcaaagttaccatcattaaactttaaaac

SEQ ID NO: 17985 - DNA, 292 bp, Oryza sativa
cggtagaaccggcaaacgatgagccgccgcaccgagggaatcgcgtattgggcggctacatgtctccacggaacgacgcttacaagaaggaggtgatatatgggaatgggaaattttatgaaatggcaaagcatatcaccactgttctcttgactgagtacaaaaattggaacggattatcggtctcttatctgcagcccaccgaattcgctcgtgcgaactagcatgtgaaagctcatctcttgcgatgggtgatcgatgggacgtaactctgtgtcattcagcctatatg

SEQ ID NO: 17986 - DNA, 414 bp, Oryza sativa
agcttagtgaaacatgaacatataaaatattcttcatcatatctgagcatgtctcgacgctacgcttaaattaggttgcttagtaggcgaatactccctgttgcaagcgtccgccaatgcgcgctccactccaattaacatgaatacgatctgtctcgaaccaacatggaacatttcctctaaacgcttcctcaaaaccttattgccgtcttcttcctgtgcatgacgtctaaggcatatggttccggagacctgctctccctatcgctagtggatgccggcgagcgggatggagtattctacgagtgatggcgcaatacatagtatgaagcaaaacctacattgatttcaagtgtgttgtgtgaacatggcggctcgggttatataaagataggtcgctttgatcacggcgct

SEQ ID NO: 17987 - DNA, 383 bp, Oryza sativa
  unsure (1)..(383): unsure at all n locations
ctcagcttgtcgatttgagccgttatttggtatcccccgtcttctgttttttgggaaacaactgaacatagagtctagaactgtagcctctcgtcgtcgaatagttattgcttgattgaagatatgtgttgaagatgtccaagtagaaatcctgaatattggagagccacttgttgtagtaaaataacacagcatcgcatgccgagatgtcgaggttcacaaagacgtcgnggttggtgaagtagcaaaacttgcgaagtagcagcaatagagtttgccagtgacgaagataataaagatgaagtcgctccaccatgatgacaaagtggcatcgccgcgatgaagtgaacacgagtcggcggcaacagaagcatactggtagc

SEQ ID NO: 17988 - DNA, 283 bp, Oryza sativa
agcctctcttgcaagttacctagatttgctgtccgtgtgatctagtacggcctcctttaatttggcatatggggcgggaattgagccgcatgcctgaaatcctggtattttggtcgcaatacagcttccaggaaatcaagatgatcatcaactttaaggcccttggtgggcagtttaccgtgcgtgagatttaataccaccattcttctaccgttgcgcgactcttccaatcttgcaaccgaatgtctaaccctgtccacctttgtagttcagcccaattctt

SEQ ID NO: 17989 - DNA, 476 bp, Oryza sativa
ggccgttcgccttgggaacgaccaccgggttcgccagcctctccggatggatgacctcgcggatgaatccggcctccagaagtcgcgccacctcctcgcggatgaaagcttgacgttccggggcctggcgccgcactttctgccggaccggccttgcgcccggccgtacggcgagacggtgctcaatcacctccctggggaccccgggcatatccgccggtctccatgcgaagacgtcagcgtttgcccgcaggaaagagacgagcgcgtcttcctatttgccatccagaagaccaccgatccgtgtggtcttggacgggcctgtcgctatggcaacctccttgaccgggacctcatcgcacgtgactatccgctgtctggggcgacggaggcggatgtgccaagcctctcatcgtcaccctcgggcttgtgtacgacggcgaggcagtccgcacgctgctccatacaagcgagcg

SEQ ID NO: 17990 - DNA, 294 bp, Oryza sativa
acatccgattttgattcatcggctatgaaccgtgtctaacgcattggtcttgttagcaatttcagctataacatctaatgggatctggattttcatgatatggaagaaacatgagaggaccaaataaacttgaacgatacaaatgcaaaaatgaaattacctaacatatcagcacgaccccatgcttgcacacacataagtgcctccacaagatcatagttaagctgattacgatgaggagttatcaccctctcaccagtactaaatgctgattcagatgctactgttgctata

SEQ ID NO: 17991 - DNA, 304 bp, Oryza sativa
cacctgacagtctgatacatcatgtattccatgtgtcctatctcaagaactttgtgccttctcatgttcctgttgtctctgaactaccgtccacggatcaggtggatgttgcgtctctggaaccctctgaaatttggatcgtctgttggcaagaaagagaatgctgctatgacacaagttctggtgcgttggggcactctttctccggctggtgcaacctgggaagactatactgtactgcaagcacgttttcttcagcaccagtttgtggcaacctggttctcatggggcagcatgtccaccg

SEQ ID NO: 17992 - DNA, 398 bp, Oryza sativa
agctttagcacggtagaggtgttccttctttttcgttaggcgaaaagtgctagaaatgtataggcgttcccacttactccatggcatattccaactcttttgagcagccctctattacaaacaacctctgccgcctctgcaattgcctcaaggaatcgttcttctgggaacacctggtaaggatatgacatagtatatgcagaatgtaacagattgccagaacgaaacatgcagccaaagcaggtggttgagatgagatgatctgagaatagaaaacaaacctgtgaagcctttgctaaggtgagggaaatgccaggagccccatggcaccagtgcacaaatcgatcatgcttatcctcctcagtaacagggtaattaccactagggaaccggttctg

SEQ ID NO: 17993 - DNA, 475 bp, Oryza sativa
  unsure (1)..(475): unsure at all n locations
ttaaagttaagtgcaagntaaaaactatattttaactgatggaatttcctttccagagaagaagtttgaagctatagctactactgcatgcgtaccttgtctgcgagaggcatcctttcataatgggaatcacattcaaagtactgaaaacatggccctccattcattgacctcgggctgtcatacctcgctaatgatgttgttgcatactgaccattccagttatctgccgcactgcaccagccgtagttgttcgcatcaaacaagttattgccgaccattatctcgctgtcaccacgcccagttcagacaaaaagaaccatgtaaaactctcatactcttcatgcatctgatggccaattatacacaaagaaactgacatatatatacttacttgcatgaagtgaagtctgagatggtgtgcaactgaatggctgaaagatacagcacatagtactgctcaatttcctgaccg

SEQ ID NO: 17994 - DNA, 370 bp, Oryza sativa
  unsure (1)..(370): unsure at all n locations
gcacaaacacatanatgttgtatgagcgagagatgatgttattttgctacaactctcctaatatatctggtacttatctatataacatgtttcagcgtgagcaaactggggaccactatgcctctacaattcaatgctacatgaaggagcatgggacaacaattcatgagacctaccaaaggttaagagaactcatcgaagactcatggaaggatatggtagacaatcgcacaaacccgaatgatgacctaccactgatcagggcccacactgtagtgaacttcgcaaggacagtgacgaccatgtatacccacggtgaggcattcacttcttcacacacaatcaaagaaatgatatatccgacctatgg

SEQ ID NO: 17995 - DNA, 380 bp, Oryza sativa
aactccactaggatcatgcttcgacatgtaatcgatacataactcaatggctctctcggtgatgtaacctatatagatgcttccctctggttgtgctctgctccgcacgttggactttcagaattcaatgtacctctcgaacggccacatctctctcataaaagctggcccacatatttttgcttgcttcactaagtgaaccgtgagatgaaccatgatatcgaacacagccagtggaaaatacatctccgagagacacatgggactgagcaaatccgcctgcacaccatctaaggctgttggatctattatctactgacaattgtattgaagaaagcacaaagccgctggatcatgtgatggacttgtaggggtataat

SEQ ID NO: 17996 - DNA, 276 bp, Oryza sativa
cgttcaagtgctacttctgtaggagcccggagacgggccgaggtactactgcctcacctgcgaggacctcaacatgcacaagttctgtgcccatgcgccgagcacgctctaccaccatctcttcggccgcacgttcgagcttttcgccaagccaccgcaaggacgatcggagaaaccgcactccgccgccaccggtggtggcacacgctaaagcggcggcaggtggtgcgacacctgccgggaccatgtgttcggtctcgtctaccactgctaagc

SEQ ID NO: 17997 - DNA, 357 bp, Oryza sativa
agaccacctttgggaactggaagagtcaacaaacgacttgctcttcaactatcgatcgcctgcaggcaagcaggcctcacggacacggaggctgctgcggatcagggcaaggagtgatacaagttggcaggtagacacgcagatgacggaccacctcttctgctgggacgttgaccatccaactgtagtatcaccgatgcccatgaccacttcgattgcgcaattctagctatggctcaacaagaacatcgcttgttcaattaatgaagatccattatatatgttcaatcctgatgcatgcatgttacagtcaagctgctcaagcagaatgtttgtttgcagcagtatctatgcaat

SEQ ID NO: 17998 - DNA, 424 bp, Oryza sativa
  unsure (1)..(424): unsure at all n locations
taagcgacgcagcatgcagcncacctgacagcagacngatttgttatgtctacagcagcagcagatgcgacccctgcgancnctagcgagaattccagcgcccgcgttactcatctgcttaatgaaactagcatctacaattatcgttggcactccctctggaggaggatcccacttcaatttttgtgcagccatgactcctgctctcgctgggggttcttcaaacatcgggtctctgcccttcttatcttcaacattttgtgtacaggcaacatgcacccctcataattgggcaatgacgtcaccgaaactggtattggactgtactcacttccatgcatcatctcattccgaagaggccatgctctccacagcatatatagcgggtgtgccctttctatgcggtcgatcgtgccgagcaact

SEQ ID NO: 17999 - DNA, 465 bp, Oryza sativa
  unsure (1)..(465): unsure at all n locations
ctatgaaactaagctaaggatagagtgacacacagcttaggattgcgcttactttttcctaatcctaaatatgactaagtgggaagtagaaaagaaatgtctcactcctgtacttctaagatacaacatcatagtctattctaactagtatactctatggagtataacccctttaacaatgcagcatagctaaggcggaacttaactatgcccttccgatgcatcgcaaagttaccccgggttggcgagtttcttacgacaacctatgataaccctccaaccgaagtaggatacagaggtgtatccaaccccaggaaattggatataggaatatanactgcggggaagacgcccatactgaactgtcaccatcagcgggctgctactctctcggcgaatataccccccaaataatgataagtgataccctanaccctatgcctaagtactacttaatactctaca

SEQ ID NO: 18000 - DNA, 265 bp, Oryza sativa
  unsure (1)..(265): unsure at all n locations
aagaccttgagcaaggtaagtcaccctnngatcaattgttttataattgaaaagncattatgattntgtttgcaacttgcattattacaatcacacacttaacttgcttggcctcggtttgcgtgccaaaccgacggacctacccagtagtcgcactaatttccgtaggtcgtactaccctgattccttgtcgctccacccttgtggaacctcggtattcgtgctctctgagcgcgtataccaaatatcccacatacaccgttgt

SEQ ID NO: 18001 - DNA, 349 bp, Oryza sativa
caaaaaaaaagggaggaaaaaatgtaaaaaaggaggaagaaggagggagagggaaaaaggagagagagaaaaagaaagagggaaaaaggagaaaagaaaagaagggaaagaaagaggaaagaaaggaggaaaaaaggagaaagaaaaaggggagagaaaggaaaagaagaacgaagaagaaaaagggagaaaaggggggaaaaaggggaggaaaaacaagggaaagaagaagagaaaggagaggagagaaaaaaaaggaggaagaagagggggaaaaggaagaaaaagaggacgaagaaaaggggaggagcgagcaagaaaagaaggaagaaaggagaagaaaaaagag

SEQ ID NO: 18002 - DNA, 279 bp, Oryza sativa
  unsure (1)..(279): unsure at all n locations
gctgacattcaaaggatgctagtacaacttttttttttatgtcaccacggtctgaagaagctgaattctccggaactggcaaaacctgtatgcttttttgcattgaacatgtctacctttactattaaatgagcatttacatacactccatatgcacaaggtttttaatacagagctaagttgtgcataganttcacaatttaaatttctgtgtgcttgaggcacataataagtgatttcaacatgttacaatgaatcacctaccatcctggctcttat

SEQ ID NO: 18003 - DNA, 421 bp, Oryza sativa
tctcctcggcgccgccgtcggcggtgctggagcaccaggcgtagtctgagatgaactgcatccaggagtcgtccttgtcggggtcgtcctcggcgtcggcgtcggccccaccgaaggttgatccgacggggacgtccggcggcgacggcgtctcgtactgctcctggctgccgccgccgccgctggcgagcagctgctggcaggcgccctccagcagcgccatgctgcactgcccctgcagctcctccacctcggtgcagatcgcgttcttcttgaagacccggcataacgcgtaagtgtcctgatcatgagcaacagactatattaagcttcattaacatatgaattctcagtctttccgaatggtaatgtaagcacaccgccacactgatgcatgattatatcttgtacctatatatct

SEQ ID NO: 18004 - DNA, 398 bp, Oryza sativa
  unsure (1)..(398): unsure at all n locations
cgcgacactatagaatnactaagcttgtcctaactcatatatgctagtaccatttcacttctgttttctgctgctcaatattcaaaacgcttgacatatacattgtcgatacctggagcattaagtctgtggatttgcgaaaataatcctcaagcaattcagtaacaatgcaacattcattacacttacctggacctggagctgaagctgcttcaggtactcgatggcatcgtcaagcatggaggctttgtccgtctgcatcggtgaatgaaaccatcagcacaagataaacgccaaattaactcgagagattagcttccagcaacacaagtaatagtgtgtataaatcgttgaacaaaaaatcgagtaagatacaagagagacaatttttntactac

SEQ ID NO: 18005 - DNA, 324 bp, Oryza sativa
  unsure (1)..(324): unsure at all n locations
atggtgttcatnttatacgatgtgctgagtatcagttaaattgactttatgtataatgtattatatttgcaggataatattgaactcgctgggacataattgtgttttgctgaacatatngcacataattgactttagatgattaatctattatccaaattatctctctcttatttttctcataaagccacattagcttacttttacatttgaatcatcattctatatactatgtaataattatcgtaaaccacatcaactcatataagcttatattctctagctatcttacgcattaattctacttattatagagtaatttta

SEQ ID NO: 18006 - DNA, 439 bp, Oryza sativa
  unsure (1)..(439): unsure at all n locations
ctaggtatactcattgtcaaattcaaaagaaggtatctgctttatcattttagtggcaatattttgctccactgtaattttctttatgtatgctgctgacatgaattgaattacacgaactaactgcccgatgttcacagggggctggccctgcacttaagccacatctgtcagaacttgtcagctggatgctcgaatgcttatcaagtctggaggatcaaagattgaactatgttgaggtatgctacttatcttggtttatgttaagcacggatgggtagtgattctccaagacaattaacagtttctatacctcactcatttctgaatttggaccaaagatgcatgcatgaaatgctggcatccnacttgaaagctcggagcttgcgtatactgtggttaagatcttcgatggggaacccttgatattgttaaagtt

SEQ ID NO: 18007 - DNA, 358 bp, Oryza sativa
gtgcaatcttatgtgatatgctgggcggacgtactcacgcacgtatacatgatacgcgctacgttgtgtattcactattgataaaacgtggatggttgattcaaccatcaatattgaattcaagcgaatgggatcataagatgatgacaatagcggtgcgttacagatttataccgaaccctacataacacccgaactaacaactggatttatcatatgcttcacaatacaaatcatttgaagtgggactcgatattatattctgcttcactttatctccccgatctattcctctcctagcaatattgcctggcagagagagagtgagcgtctccctggcgactgatctactcatccg

SEQ ID NO: 18008 - DNA, 294 bp, Oryza sativa
ttaagagacccgagcagcaacagaggcgggagaccgactttttcttataatgaacgaccgctatcatgtgtagtccttgacgctgccaccaggatattgccacgggaaacagaggtatgccaactcagctgtaccctcgagagatagacaccccccacaagctgcacatgggacatgacatagttgccaagtgatgaaactacagccatgagggaagtgatccgcgatacataatggagctgcataaaaccattatgacacatcttctatgcgcaacataagctgggaaaaggc

SEQ ID NO: 18009 - DNA, 439 bp, Oryza sativa
  unsure (1)..(439): unsure at all n locations
actaagctgatttctttataggcatactcctccggtggctcaagttgtgntgtggacagtggctgcaccaatcatatgacgggagagaggagtatgtttacaagtcttgatgaggagggtggaagtcgtgaaaatattgtcttcggagatgatggtaaaggaaagggaatgggtctcggtaagatcgccattaccaagaatcaatctctatctaatgtcctccttgtcaattcattaagctacaacttattatccgtgtctcaattgtgtaagttaggatttaattgctttgttaccgatgcggatgtgaccgtttttaggcgagatgactcttccatagcattcaagcgtgtgttaaacggtgatctctatctcgctgatttcgatgtggacagagtgaatccggaggcatgcttgattgctaaatactctatgggct

SEQ ID NO: 18010 - DNA, 416 bp, Oryza sativa
agccttaatgcgcttacatagacatgttgtttcactgcagtagccgaacattcttaaccgcgcagtagagggcggtgccaaagcctgagctctgggatgatgcagtgaatagcgaaaaacaaggtgagtacataatttctgactctgcatcctgagattatcaatgagcttgcagcggatatgactgatgcctagtgcgctacttacaatgctatccctacttacaatgctaaactaagatattcaagtgggtgtttacatcaatcttaaacgggaccaatggatattgtcattacgatgacttattgatccctgaagagtaccattcaattattattgcaattatcaaaacatgattattgctatttcggtgaaaactataaaatatatttatggcctatacacaatacggctca

SEQ ID NO: 18011 - DNA, 393 bp, Oryza sativa
  unsure (1)..(393): unsure at all n locations
cttcttatgataatttgcctcgtttgatagccaccatttgttttatgaataataatacttactatgagctacatacatttacatcgggtgatgatcgaacaaagagtgtgctgcaaagagcctttttctcattgggtgcttgcatcgatgcttttgtgcattgtcgacctgttctatgcatagatggaactcttatgacaggtaaataccgaggtcagatattgacagcaattgggtgtgatgggaacaaccaggttctacctatggctnttgcatttgtagagagtgagaacactgacagctggtactggttcctagagagagtgcacattgcaatggtgcgtatgaaggccaacgtttgccttatacatgatcgtcatgcgggtatgttgc

SEQ ID NO: 18012 - DNA, 391 bp, Oryza sativa
  unsure (1)..(391): unsure at all n locations
tgccaaatgttagcaacagtctgaagagatagagtcactgtgtcttgaaagtggcgaagaaggatgttacgcacgtcttctggtgaagcggatgaaagcggcatatatgagtgtagctagagcagggatgaccagaacaggcagagcttggatgggcttgcttcagctcaaattgcgccttctggccctccagaaagcataaacgaacaccangacctggcgatcaatttaagcangaaaagataagaggaataactgaagtttttcaattcagaagtaaccaaaatcacatgatacatcaattgagattaanaaaaagaagaagaaaaaagactatccagccaacgttggaggcgacttgcgtgatcgatcatcagcatccgcgagtagc

SEQ ID NO: 18013 - DNA, 392 bp, Oryza sativa
  unsure (1)..(392): unsure at all n locations
tgtcacggccacgaaccccatcgggcgagctccccccgagaggatcacgtggtgtcatttcatgtagaacagaagctgcgcaagagagattggaaggaagaggaagagggataggaggagcaagagctagcggctgctgtcaggttagtccaaagcacatgaaatatcatgaccactacaggcaaaggcgacgagggaccgaatcgagaggaggattattagcgggagcttatgcagatcacgcggctatggcgacgaattgcgcataaaaaaagaagaaaaaagaaacagcaagcaagaaagaactaggcaggcatgaacagttgctaagcacctagtagcttgtatggaagtgctctcttgatggggaaataaatagcanaagaacgaag

SEQ ID NO: 18014 - DNA, 344 bp, Oryza sativa
gacgcaccatgagcccgggttgaagcgcgcaagcactatgtacgtcacaccgggtggtagggccggtgaacgagcccgtcatacagggaccggcgagacaaagcacgggagatcagaaactcgggccagaatcgaggaagaatgcagggaccacatgcacagaagcgagcttccgcgggcagaagaccaggaaaagaggccggaaaaaaggcgacagaacacacgcaaggagactgcccccaaaaatatgaggggcaacccaacgtcgccaatccaagcaagggacaaggacaatcccggcaaaacaggggacaggagggcaagaaaaacaaaaaacgcgccga

SEQ ID NO: 18015 - DNA, 377 bp, Oryza sativa
caacgtgttggtaggaaaaaaagaacataatggtcataacaggagacataaagttgtccaaaacacaccaaactttaaatgcttgcaatctcttggcatatatataattaaaataatgttttatcaaataactgaagcgaatatgaggtgttctccactcaaaagatatccagccgaatatttgccactcttataattttaattaactagaaaaatacctgtgcgttgcatttcttatacgatttcttctgtatattcacaatcgaacaaacttacaaatcaagtcaaataaggaattgtgtatccaaaagcgaacgaattgataatccgactcatacacggatgacgtaccaaagtaccggccaaatcatctttac

SEQ ID NO: 18016 - DNA, 300 bp, Oryza sativa
aagatattggccacttgatcacgcacactttgggctaaacaaaaagtgctaaaccctaataaacgtgacaggcccacatgacaattgggctgcaacttatatgcctatgcctaaaaaaggcctttgacactttaaggatgaccatatacatgcgccgagaatatattttcggtatatagacaagtgtgttatatgaaaactttgagctggtgataatcctttgggaactccaaataatataaattgatccgctggcgcagtttcgttgatatcctccggcaatatgttggtcatctctac

SEQ ID NO: 18017 - DNA, 266 bp, Oryza sativa
atactattgaggaccaaaacatattgtgctagcactcacagaggatctacacagcctaactgcaattactgagcagactccaatatacagaccagctacttcaagattctgtcccggaatcacgcatgctagataataaacctaggaatcctcttttgttctgtccattgtgactattgggcatgggacactttttcgttgattgagccaaggcctcaggcaactcctgtttctaaggcactgctcagcttgctggtagcctggct

SEQ ID NO: 18018 - DNA, 423 bp, Oryza sativa
  unsure (1)..(423): unsure at all n locations
ctaagcttcttcagcctaagttctcacatttcggatcagaaccgttctctttcatcttgaaaggtaatatacttgcatatcactaatagataaaacaattaatgagaatgagacgcaatcctaatcctaatcataaaagacaggatatgtgaagctatacatttcaattacctggatgcatcaattatccttctcttgcctgaatctaaactagaaaggataacaacatggtctttttcaatgctgcttataaaattagcaacattatttgcaaatgaaaccaccatcccctgaaccagtataaaaggtttaaaggtgtcacaactcatgaaaaaaatcatcaattataggtgcagactgcagacaacttatangacttcaccaactaccaanattccaaacaaagagtgaaagggccaagca

SEQ ID NO: 18019 - DNA, 306 bp, Oryza sativa
ataaaaaacccccctcgcggcaaaagggagacgttttttttacccaacacccagggggagaaaaaagaagggggcaaggaaaaaaaagggaaatgtgcgaaacagatcaaaagcactaggcccaagcatacataaaacaactaagcacacatatataatcaaagcccgaacgaccacctgcctaaccccggcaacagaaaagaccaacggcacgacctgggccagccggccagccaccagccaaccatacaataaacgaacaatctaaaaaaaacactgctgggacatgtagaagcataccaggcc

SEQ ID NO: 18020 - DNA, 135 bp, Oryza sativa
tcaaagccaacagggacatattctacaagggcccaaccaggaaggagggccaacccaccggccacaagccccggggccccccgaaccaccccgggaaacaacaaggccccggaaaaaggccccccgaaaagccag

SEQ ID NO: 18021 - DNA, 425 bp, Oryza sativa
  unsure (1)..(425): unsure at all n locations
ttccatgaagtacttgcacgcccaaatcagagtttttattatttgtggcggccgncagaagttggcgctgccctgcagtccgaatccaccccgcgcgaatcctcttccctttggatcctctgcatcattcctgagtaaaacacgagtgcacgcgtctccgtggtataaagacgaggaatatgaactcaagaaagaactcacctaataatttagttgacgtgcacgagcgcgggtaataggaccatcatgctgtatatggggggatgtggatgtatcgatggtgttgatgtcctcatcatcctccccttcttgcatttgagtcgtcctcgactcaagctcatcttcttctcccagatacggcttcaaatctgcaacgttaaatgtgggactaaccccgaaatctgcaggcaaatcaatctgatatg

SEQ ID NO: 18022 - DNA, 279 bp, Oryza sativa
  unsure (1)..(279): unsure at all n locations
accttaagcgacgaggctgcagctagacacatcaactcaagaagttattattatcaacaacactctcaancaggatgagatgacatgctccgggtgaggccaacttggccatcttggcttggaagtgttcacagtcaaagggatgaatgcacctgcagggcaaactattaagtttgctaacgttaccatagcgacaatggagatggagctggaatggaactaacctactgtctctcaataatcagctactaattgggggttgatactggggccaggtac

SEQ ID NO: 18023 - DNA, 378 bp, Oryza sativa
  unsure (1)..(378): unsure at all n locations
cgctacgccttgaaatccgctcggcttcatcttatcttttgttatctctngagacgtaaaaatcgtatgaggtgctctctccagtctgcttcaatcatggctatgtcttgagtgtccacaacttgagtgacttctttctgaggtatggtcggctcataaaggtgttcgacgaatacatccgtaggggccgtcttgcgcttgaatcaatgtggctagtctgtcggcggcttcattgtcgcgacatacaacgtaactagcttgagtcctattaactagctttccaacttcgtacctctttcgatattctgcttgtaatcttaagtcagacccttcttatacttgaattcaactattgcaatctcccgactattcaccctg

SEQ ID NO: 18024 - DNA, 369 bp, Oryza sativa
  unsure (1)..(369): unsure at all n locations
aaaacaaaatattcatacaacaaacctggcttgaaaggaaggaatcattaatgttaatagggtcacacattacacttggctcgaacattacttcctacaaaaaattagggaaataaattgcagctatacaactcctcatatggtgcctaactaaaatagtcaagtagaaccagtaactaaaaactaacctcatacagttcaatatcttcatctgactgaaaccctgccatctcttgcaaatttttgcactatatcagcttgcttccctgatgctntcacaagaagttttccacatatttatntcataataacagggataatatccatgcagcttggtcacgtacccatagaagtaattaaataaataat

SEQ ID NO: 18025 - DNA, 340 bp, Oryza sativa
gccgtaccaaagcctcatatttctctctctccttagcaagctcacccttgagttcatgagaccgctctttctcacgaatgagtaatgcctcttgcctctcaagggttgcatattgatcctcaattctcccaagcaactcactcaagtgtggtagagactccttgtgtatggacttgaacaattcctcatccataacctcatcctcaacatcatcctcctcatcacttacaagatcaacattgaatgacttgagggaggaaggtaccttatgctcctttgccatgagggcaatgggagcatcctcatcacttgagtagttgaagagcctcggtggtgatga

SEQ ID NO: 18026 - DNA, 441 bp, Oryza sativa
  unsure (1)..(441): unsure at all n locations
tcagcncaagagctattgatggacccatttttttttatgttggngaaaaaatattctatccattgcagtcaaatacgaaggcatcaggtaatgactgaattggcaacacttataaaatgttcccttccccatctgaccttagataaacatggcagatggtgctggcagttcaaactcaagcatgggttacaaatatgacagagatgcatcatctatggcaattcgggagcacacaggtagaagttcaatgacgtgacagtgatgtgaacactattgcattgttctgaagcttctctcctttntacatatcaatcttatgatgaaatgcaggtagttttgcagaagaacacccaagtgataggtacatacacagcaccatggatccacaagcagccgctggtcgaataattacagtcgagagtcagatgaaagatctgaata

SEQ ID NO: 18027 - DNA, 440 bp, Oryza sativa
gaattcacttagttttctaccgcaagatagagagttttatacagcaagcataagaagcagaaattcttatcaaagagactgaattgttcagagagtactactactgttccattcgaacgaccaataatgcaacgatcatctcacaactctatccatcgctaagcacatcaagaagcgagaggagaaccaacaataaaaaacgaaggaaagaaaacaaactaattcagacagaaatgatgcagaagaagaactaacaccacagcttattagctcaaagtctcaaaccaacagcagatcgctcacctgaggcattcatgatcgttctcttccggagccaagaaacagcagctagaagaagaagatgaatcttatgtcgtgttctccgcggtcgggagggttctcggcgtcgatcagcgaactgaactggactctgaactctg

SEQ ID NO: 18028 - DNA, 378 bp, Oryza sativa
  unsure (1)..(378): unsure at all n locations
agaggtagatgatcacctccctgcgagtcgcgattggttgctcttacttgaatattatcggtatgagtgccactaccgaaaggatgagcccaacccatttacttgatgtggtagactttctgatcagctcgctgttaatgctttctcatgtatcgagacatctcgcctcaacttccatactctgagccagataaagcttcgctctgaaacacatcaaggaatatctgatgctgtcgctaggggagacactaatggacaagatgttggtataaaggtaattctgccatcaacgttcactggaggaaggcgatacatggtgcaaaattaccatgattcaatggcgtngggccgtgcctacggttcttctcacatattctc

SEQ ID NO: 18029 - DNA, 469 bp, Oryza sativa
tgctttctgattaatattactactctctctattttgatgggtaattcaaacattttactcttcactaatctttctttaagatttaagaatgggcctttctgggaccgaagggagtacgtactaccatgaaccgtaaaagtctttatactgatgcattcatctgactgacgcgactgcaagcaagcgtacggttactggcattgacgaccaaaggtgtggagatgattaacagtttctgatagttgcatgttggaagtagtagactactcgttattgtaattttttgccaattatggttggagatttacaaatagacttcaataattgtaatctccttatattagactgcattctttattgttccttgaagggtgttctattaattaaatctaccctatgtttgtcaacgctattatgtaataataggatgttcctttttgagatatgccgtatattttatatttcatat

SEQ ID NO: 18030 - DNA, 148 bp, Oryza sativa
  unsure (1)..(148): unsure at all n locations
aactaagctgagcacactaatgcaatgcatattgaaaacaactgnataaattgatagtataagggatgtaccctggtcgtcatccttggaggggttgccatcgcagcggtgcgcctttccccactgcatgcggaagcaggtgttcatc

SEQ ID NO: 18031 - DNA, 231 bp, Oryza sativa
taggacgacgacacaaatttttctctgcagaactctcgggggggaaaagagtgcatgacacactgacacgtcgagaccagacagcacatcgcaatcataacaaacaccattacaccaccaccatgacagacagcgaatgagacgcactacagacacacactgtagcaccgccaccacgagcccttccggcggtcgacaacgactgagctggacccaggacgaaaggaacag

SEQ ID NO: 18032 - DNA, 428 bp, Oryza sativa
tgcagcagcaagctctataggatagaagatgttctcttcgcactatatgcgcggccagtaaaaatgagtccttactaagacgacgcgccgaatatatatgtttctatcggcggagaaggactccactttacagatgtagcgatgcacgacatatgcatggcaaaatcttagaatcaatcggccttcttaataggccatacgtatctataaatatttgatataaatgaattaataacttggcagcctatgcccatctgattcatacctcaagaaggaagtacttatcgggaggctattccacccaaaaccggacgaaacaaatctattataaatgtactgcttaactacctagattgcaggagattatttgtaccagcgaataatacaatgcgatcaagaaaagaatactataatgtctgctaaatatt

SEQ ID NO: 18033 - DNA, 403 bp, Oryza sativa
  unsure (1)..(403): unsure at all n locations
aatctcgcctttgctgggagattactataaatttaatattcttaatattgagctaaaacaaaaatgatattaatattaacaaataaaactggtttgtcaaactatatgttatgagagaaataaatttagtagcatgtatgtgattgtagataaaatatgatatcccacgctttgattatatggatgaatatatgttaattattataaaaatgatggatgtatatatgttaaaaatattgtgaaacaaaatatgaagcaagatgattggatgttgatttatagaattcaatgaattatagatgatgttccatgcttacataagctttgactgtaattattactaatggatgatgacggggtatgtcngcatgtagagctatagcattagtggggtataacttta

SEQ ID NO: 18034 - DNA, 293 bp, Oryza sativa
  unsure (1)..(293): unsure at all n locations
tgttaaagaaantcgtctgattgaaccaccaaaattaaacaaactattagatgtcccaacgtcgtccacatgaaaaaaagaacaactctgcatatatggcaacagagttgagaagttttaagaaaaaataaagacattattcatatacccaatgtgaggaaaaacacacagctcattggatccgatatgcaataaatttgggttatcaatttacacaaatcaaatctggcgactggcttatgagagagctgaccatattctgtggggattncgtcccaacaccgtcttgagct

SEQ ID NO: 18035 - DNA, 354 bp, Oryza sativa
  unsure (1)..(354): unsure at all n locations
agacaaaccattctccgttcattgcgcgttcatattatgtcgcagggtnaattatgtcgctggcatctttgtgaagaaaatacgtaccgcaatatttaataaagccaaattgcatgttccaatattggntgagatttttctccgagtaatttaacttgattattgtagcatgtctgttacgccctttgttgcattaaatttgatttacgacaaacctaaaacatctagtaatagttttgggtaatgctnttgctactaggttttctttggccatacttgcctgataggtttgacctatgggtgtgtttagatcacatcaaaattaagtttagttaaaattaaaacgatgtgatg

SEQ ID NO: 18036 - DNA, 343 bp, Oryza sativa
  unsure (1)..(343): unsure at all n locations
tgtacagtttgggaaggggttttttgagagaaaataatatctatttcaaccgatatgcccttaggcacggccatacataacatagaaatcacacgtggaaggggtgggcaattagctagagcagcaggtgctgtagcgaaactgattgcaaaagaaagtaaatcggccactttaagattaccatctggngaggtccgtttggtatcccaaaactgcttagcaacagtcggacaagtgggtaatgttggggtgaacccaacaaagttgggtagagccgggtctaagtgttggctaggtaaacgcccccgtataagaggggtagttatgaaccctgtggaccacc

SEQ ID NO: 18037 - DNA, 406 bp, Oryza sativa
  unsure (1)..(406): unsure at all n locations
acttagatactcagctgcttgatgtgtaaagagtgaggagggtttttctttttatcgngaggaatgaccgctgtggtggttggaaaggtcggtaatactctccaacccccattgggagtgaattcccaccgtctgatcaaagccctggatcaaatggcgatgggactagttcagccgaaccctatgttgggccaaccagcccattactaggcaagccgttttctttctgcttttgacctcaaacaacgaattatgtgcccacttcattgtgtcattattggtttcctgcccatgcctccacacgtctaattcttgacagcatatgatggatttgtcaagggttttgttgccggtcttcttccattntgaatcttttctctatagaagatagaatcccgacaagtga

SEQ ID NO: 18038 - DNA, 145 bp, Oryza sativa
ttttggaaacacaactcggggggggagtggcatcaaagctgaactaccgccaaattattaagtgtggaatcaaagaacctggcctcttagaaaaagagtagggatataaaggtggacaagagtgggggaaaagtcaaccaaagaa

SEQ ID NO: 18039 - DNA, 280 bp, Oryza sativa
  unsure (1)..(280): unsure at all n locations
gtttttttttttttatctttntnaagaacagggccaggtggagcattagaaggtgatgtatgtgtatcaattcatcgtgcacatacacgtatgtatacatatgcatgattgaatgatttgtttaactagtatggtgggtgcgcagatttcgtggctactggcattacaaaatatattctcacataaagggcaaaatactttgacaanttatcatgaaaagtatatgtatgatatatagaaataatgtctatgtccaagaagcaaatgtgatggagtatta

SEQ ID NO: 18040 - DNA, 358 bp, Oryza sativa
agcttatctcttacgctccacgaatggatatttttaaatcacaccggtctcctgaccagcgcgatgggtttcgctgacggctggctattatccgcgctttgggcgttacgtcttaccgaccgtgttgccttctacagcgccgactggtgtttccacctgcacggctggcctttatgccgacgaagatgggcatatacgtctttatcgaccggccggcttgaccagctgcgactggagttttcgctgaacggttggcacttatgccgccggtgatgggcgtctacgactataccgaccggccgcctataccgccgccgactggtgtttcccgctgcctagatggcctattatgcccacg

SEQ ID NO: 18041 - DNA, 440 bp, Oryza sativa
gatccacggactcaaataatctctgtatttatatactaatatagagtattaaagatagactacttataaaactagttacataaataaaagctaattcgcgagacaaattttttaagcctaattaatccataactagagattatttactgtagcatcacataggctaatcatggattaattaggctcaatagaatcgtcctgcgagtaagaccaatggcatggatgggcttacgacatcgaactgtaaaaacttaaaattatcgtccaaaccgacgagataaggactggaaagctctagtcccatctaaacaggttcagccaagaatgactgatatataataaagttgtataccagaaataagaaaacacacaagcagctgggtacttcttggcggctcgaacttgcgagtgaagagcgaaatcggccgagcatttataat

SEQ ID NO: 18042 - DNA, 423 bp, Oryza sativa
aacttaacgggtgggaaccctagcatgtattttgatgtattcttggaacaactccaatactggtggttcggtatacacacacacccacgtctagatgagtgatgaatattttacatgtcatcactctcatttttatttacttactacatactcgtgtggaatagtcccctataagaatatcagagtgaccatggttacccctgtttgtaccaatttgcccatataataaggatataagcatggtgggtcccctttgtattactcaaatatttacaccccgctatattaaaagggaagatgcgttcatatttcactaaaagcactggaatttaatacttgatgtaagatgcattacaatatggagtatgatgtttcagtaaaagcaccgtacaaatataatgctcttgtctttcctctaaatac

SEQ ID NO: 18043 - DNA, 208 bp, Oryza sativa
aaaaaagaaaaaattttttcaaaaaaaggcaggggacaaaacacaaaccacaaacacaacaaacagaacaaaacacgaacaaaaaaaccaaagcaaaaaacaaacaacaacaacaaaacacccccaacaaaaaaccaaacacaaagaatacaacacacaaaacaagcccacgaacaaaaacacaacaaacaaaaccaaaaaaaaaaaa

SEQ ID NO: 18044 - DNA, 172 bp, Oryza sativa
catatccctcctggttaatgatcttgggtgtccaatacatctacgaagctgactaacaagaattggaaattgttacgggaaagaattgagaaaagcctaagtagctggaaagggtaacatatgtatgcgggtagaagactggctatctaacttctgcattaacaagcctaag

SEQ ID NO: 18045 - DNA, 222 bp, Oryza sativa
  unsure (1)..(222): unsure at all n locations
aaataaaggaagagagggggagttggagggaaaaaaaataaaaaaggaagtaaagaaaaggatgaggtgagtgaagaagataaagggagtggagagaaacaagaaagaatgggaaggaaaagcgagcgagntggaaggagaagagagaacggaatgatggagaaggatgggagggacaagagagaaaaaggaggcagggaagagaaaaaaaaacagaaaaaa

SEQ ID NO: 18046 - DNA, 359 bp, Oryza sativa
  unsure (1)..(359): unsure at all n locations
atcactggcgccaagatgtgatataagtcttaagcacaattggtttgaatcaatcaaaactaagacaactactatcttgngcataatacataaaatgttgtgctccattttttctccgggaatgcatagttaacttaatgctangntnntaattatnatgatctgtacctcatcgattgaaatttaccatcacatgtgttttctctatactgtttatcctttntgtaactaccatagtccatgtcattctcaccttgtaagttctaaagaaaaaagtatatatttgcctgatgcttgacatgagttgcttagctcccgttatggtataactgtattgccccatacactttctgttgctg

SEQ ID NO: 18047 - DNA, 272 bp, Oryza sativa
tgttaagcataaatacgcgcctattattttatgggtggagagagtacctgatgcagtataaaatggtttacaaactaagtcagtcttaaccctgttcagaattcttccagtatgcgtggagtcaaagaaggacattggggctcgcatgatgcactggagcatgttcttgaagaacttttctgatgttagtagcccaattattgatacatgcatggaccgagcatagacacacaaggcacttccaattgacaatgctatgtttacggcaaaca

SEQ ID NO: 18048 - DNA, 321 bp, Oryza sativa
tttatagaatggaaattgaaatcctgcgccctaccataatgctcaaggttttaactctccttgagaaggaatgccttggcctttaggtaattaaattggttctcctgcaaaaaataatcataaacttatcatactggccacatcaaactatattaacctcactttgccatcttgcaggagtcgcattagttagagcaacaaaggctattttatagtcatgaccatcgcacataatatcatgacacctctcctatatactagctcaggtatcaccactaacatacgctttgcaatggctacaagttctatatcttaccccgt

SEQ ID NO: 18049 - DNA, 448 bp, Oryza sativa
  unsure (1)..(448): unsure at all n locations
tgagctgcatcttaattcttgatcaagggccatttattattatttcctataggacatgaatcctatgtgattcctacataaatcatttaatttaaaggggccctaaacgctggtttggtaaattttccagccagctagtacatacttctatcgatgaggaaatttaatatgagagtctggaccatgctgaatctttttgtaaaggaggctattctggaaacggcatgttcatcgctttgtcaagaaaatagccgggcgagaatgacaatgtacttatgaacaataatgtgacttgtattgacaacaattagagaggaactttcaggcttcagaggtcatccctatcagacttatttacgtgcatgcttatctatctattgttgaagaaaaacaactgatatatttgacatcatgantgtgatatctgacaatcaaattagtggtatac

SEQ ID NO: 18050 - DNA, 383 bp, Oryza sativa
  unsure (1)..(383): unsure at all n locations
caacagagactactccatccactcagagcagntacgggattcagaatgacaacaagagcatattgaaaattgaaaactgacagaacaatatgacagccaaaacatgttccaacaataaccaggatatttagtcatgttagaacacaaaactgaagttcaacccgtctaaactgtagatatatttgactctgttgaggcgctgctcagcaaatttgaagcaatcggcacagccgtgtgcaattcaaatttgggctagcccaaaagtgggccatttaatgccatggccttgttgtgcctagcccagttcatctgtcgccaagttaatatagagttaggcctcaacataatgttttgtcatttgttgttaaaacaataccatatgt

SEQ ID NO: 18051 - DNA, 440 bp, Oryza sativa
  unsure (1)..(440): unsure at all n locations
tgcattttccttagggggaanncctggttgtctctgaccggatcttaagtcacgcagcagcaagctatctcccatcgaacttgatcccttttattnntggtagaactatccagagattgcctcactttgttaccgctagcgcagccacactgatacactgccagctccaaaataacatgcaaggttgacatgcaatatattcaatacctaaacataagcaacagaacaaatattcttgactaaagaaaaatgaacagatatccaagtcggtggatttaaatatttaattacgaaggtgttttatgctatacagctacaccttccatcccaaaacttatgttgggattttgggggggggggggtgtgaaactaatacttttgtgaattctaaaagtgagcctttattggtgaaataatctatatcatacttcgtgtacgaa

SEQ ID NO: 18052 - DNA, 271 bp, Oryza sativa
actatgtcacatcagaggtgcctcaagaaataggtaatttgccaagcctcccggctccaatatatcatccaatagactaggcgcgagcataccactagaaactttcaattgcactatgttgcaacgcctagatctcaggcataatagcttccaaggttcatcgccaaatgaaggtggcagcctcgctcagctggagctgctatcattcgctgacatatgctctttggagagacaccaccaaatcttggcaaactatcacatatgacaactc

SEQ ID NO: 18053 - DNA, 431 bp, Oryza sativa
  unsure (1)..(431): unsure at all n locations
tcactctctntactgtatgtaaacaaggacgagcttattttattatcgcgtaacctgagcanagataccaggtacataagcagaacataactgtatgtcagagtcacagtgcggagggacgcttcctcgcgcatagcggcgtaaagtaccacctgtgctgggagatcggcttctcgcaagcccgcaatgcacgaatcagagtaccaggtagcagctggcgttcgcttaaaccggcttaaaattcagttgacgaaaggagtatggactatgataccatcagccatcaggggaaaaggtcaagcaacaataccagttcattaacacgataacacgaaacattacataacatcgaanatgcagaggaagcacgccatatntacagtngntccttcccatcagcaccgctacatatntacacggnctaaatacgt

SEQ ID NO: 18054 - DNA, 283 bp, Oryza sativa
cgcgttgcaacacctgtgactccatcgagagcattactggcgcgaccgcgaaaattgacttttgccgaacgctatcgtgtaaatccccgttccaagaagagccggtgtacaccttactaacatgatatgaaaggcgcatctttattacatcgaaaatatttacatgattacaagggcacttcaggcctgacaaacaaaaataaacagcagcggactagcgggcctacggcttcatcttcacaggcgctcaactggtgtataagccatgactccacctaagaca

SEQ ID NO: 18055 - DNA, 325 bp, Oryza sativa
cgtcactggatgcacggccgttctttatttgtttatagagacgccaggtgagagggcgctgcccctggtaaaactcctcaagcgctacaagccggttgtatggacagaggaagctgaccaagctctctatcaactgaagggttacctcactttccctcccatctaagtagccccaaggctagaggaacccttgctactctacttggcagagactccccatgtggtgagtgcgcgcctagtggttgagcgtaaggaaggcgaacaggagggccctccgacttgcgatggccccttgactctcgggaaatagcaacacgactcttct

SEQ ID NO: 18056 - DNA, 452 bp, Oryza sativa
ttacacctccgacaactaccgagccgcgctttttttctctcgctccatcgaccggcataacatcatccgccaaggcaacgcccttctctaattcctccgcccacaccctcaatctctctcgtttaataaacaccccccattttcttttgtgcgaaatgaactttggacgcgtgcctgatgtatcttcgaatttattttatttggaaaatgtggttggacttggtactgaatgtgaattagatttgagtgaattgaagtaactctacccggcttcccctccgatgagtgccgaaaatcctgtgttaaatattgctgaatttcagctagcaatacattccgatgagtttcctaataggactttgtattacaggaacaaccgtttctcttataatttcctaataagacctctaatctcttatactgtagggctcctacatttcttctttatatat

SEQ ID NO: 18057 - DNA, 353 bp, Oryza sativa
agaacctggatcaattggcaatgagcagattatcttttaaaaaatactaaccggttttcaggcaaatcgactaaaaaactactactactctagacatgaaggaagaacaatacaaaaagataggtatttctagtcgccccttaacccgtaatatacataggggcacctaggatcagcggcccggtattaaatatactttagaatagatcttgagtgcctccaaattggttagagttcagctattgtattcatccgatggatgataatacaatggatgccaacacctgctaattacacttatataagacaaagtcactatgtgtagataccatggctggagaatatgctactct

SEQ ID NO: 18058 - DNA, 409 bp, Oryza sativa
atcgacgcagctgcagcttggatatcatgagattaccaattatttgtttatatacatccaatttcagaaatatattgataactgcgcaagaagaataagtgtaaaatttataaaactacatgtactttagtcaaactatcacagaactatagattctatataatatattataaaattacatatttaacgtaatttatcacataactatcacaaattacaagttttagatcaatttaatcatataagttctaccattataactcaaagcatagtattagagaaacccacaatatatatgtttgtgataatttttctattaaatttgtagttctgcgatatataacctcaacatctgagtattgtgataaatttatcgctaaatgtatagttttgtaatatatcatcttaa

SEQ ID NO: 18059 - DNA, 318 bp, Oryza sativa
gcacctcgtgatatgattcggcgcatatagctggaaagctcgggaagtgcactcgtgcgcgtcatcgactaaatattatatccatattaagataatctaatgtctacttaaacagtgaaatctttgtcatcctcctatgatgatgattataaaaaaggatcggtctagttacaggtacagggcttctctctccttgactttgactggattttctgtaagcattttaactgctgtaatttcttagaatgcctattgtgttttggccttgacatagcgaagatccaagcaccatctagtttattggtcgctctctatcta

SEQ ID NO: 18060 - DNA, 495 bp, Oryza sativa
  unsure (1)..(495): unsure at all n locations
tctaagtcacccgcagcatcaagcttaattgttgatcatcaattactcttttactttgtagtgagcggcgcctgcaagatctagtggtactatcagtacaaattcaattgtgcccattccttgatgattcatgtgtgcaagattggactaccatcagatcgactagccataaactcacaagcgttatatactttggctaagtagcttgatgcaatgcaatgcagcaatagtgcatttaattccatggataagtgcacgcataaattaatattaaacagccacataatgtataactaacactgtatcagctttgtaatatataacactgttaactattaaagtgatatttcactattcttattttagaataagacggatatatactgtataatacgaatgattgaacgtctggcataataccaatgacattgcatttaataaaaaagaggtggtatatctacctattnctgaccattctaaaaatgatgataaatc

SEQ ID NO: 18061 - DNA, 136 bp, Oryza sativa
  unsure (1)..(136): unsure at all n locations
gttgagctaaggtaagctaatctaaggtcagttggnttcnntccttggactccactactcagatatattcctcttcgtcttcctcctgcttctgcctgccctgactgcgtgtgtgtgcaagggaatatatggtggt

SEQ ID NO: 18062 - DNA, 341 bp, Oryza sativa
cgactgcagctgcagctctctactgaagagggggttatttacttgaatgacgacaaccacaggactcatgtgtgtcacaccggtagatgcatgattaatgcaaggtggtacaacgagtaataataatatggttaggcttcgcagtaaagagcatatataagacacttaggtgctcagagctgatttataaacaccaacctagagctacacaatattattaatcaaagccgtgaaccctcacgaacttgccttaacccaaggcctacgatgattcataccgaactggcaacccgacctgtgtcctagctcattccaagccaacccaggcctaccattccata

SEQ ID NO: 18063 - DNA, 387 bp, Oryza sativa
  unsure (1)..(387): unsure at all n locations
gcttgagcaaagctcanacttatcaacaggaacaggcttttttatcatatagcaggattatcatgaggacttatcttgcatacctttagcttaccttgcgcgactacatcgcgaacataatggtacttgatatcaatgtgctttgtcctctcatgaaacatctgatctttggtgaggcatatagcactttgactatcacaaaacaagttaatgcaagaatcaactccacaaagctcagcaaacaatcctttcagccaaactgattctttacatgtttcagcaatagccatgtattctgattcagtggtagactaagcaacaacaggctgcaatgttgccttccaactcacagcacaactaccaatggtaaacacataacctgtgagt

SEQ ID NO: 18064 - DNA, 461 bp, Oryza sativa
  unsure (1)..(461): unsure at all n locations
cgcatgctagngctagtgttcatcttaggttgttatacnattcgtctttgatcganatcacacgcttgcgtgctgcttgagtaacttgagatgttcatgcggatatccttcctcattgcgtgtaaaggtgaaagctgatcgggaaaccgaggaaaacggtcactgcgcgagctacgctgcttgctagtgcagccggggtaaaaataagataaagaacggtatagatcgcccatccactagttcaagtttattgtctattcgtcgctggaatctttcgcgacaacgtcttctctaagaaggaatatgggctagtgatcaaggaaggctagatgagatgattgcccgcacgaacgccttgttcaatgagaattgggcctggataccaagatgagaacctcataactgctgtattgccatgtacggaattccttcctcacatcgatctctatgtgctaacttat

SEQ ID NO: 18065 - DNA, 374 bp, Oryza sativa
atccataagcaccggagcatgcactcggaggagaggagcagttttttttgttatcattgcggacgccgaccgagcgactgagagatgcacacttgatctgccccacgcgtcgtcacgagcgctatctacttcctctctgtgagaaccgcgcacaactattgtgtctctggggtccgatactaattctgcttatcccctttgtgtgcgatccaagcacgaacgtcaaatgttctattgagatcaaatcgaatcagaattaagctggattcataacaaaccgcgatatatggagtatacaatgtctttgttagctggactagctaggctaaactaactaaagatggaagtgcactctttaggcctgattattcggc

SEQ ID NO: 18066 - DNA, 313 bp, Oryza sativa
  unsure (1)..(313): unsure at all n locations
ctgtttgctntgctggctgcctgacgctgctctcatgggccggctaaggccctgcattctacgctagcttgcttgctttgcttgggccacaacaaataaaccagcccacttacacttttttttcatctgaattatctgtggggcatcaaaaaaataatttctaccgtcactcangtccacatcgcgtggcttatttcctaataagccaaaacggcttattaggaaataaaaatgaatttgtgggttaaacttttagaaatgtgttatttgcgacttaaaagctaatggtgtaaaagaactatgttgaaaatat

SEQ ID NO: 18067 - DNA, 274 bp, Oryza sativa
ggaggaaaaagggggagaaaggggggaaaagaaaaccagagaagaaagcaggggagaaaaacgaaaggagaagaacaaaacgaagggaaagagaagaaagagaaggggaaagaagagaaaaaaacaaaaaaaaggaaacggggggaaaaaaaagacgagagagaaaggggaaaaaaaggagaaaaaggagaaaaggagaagcaaaaggagaagaggcggaaaaaaagaaaagagagggaaaaggagagaagaagaaaaaaagagagagggaaaa

SEQ ID NO: 18068 - DNA, 407 bp, Oryza sativa
  unsure (1)..(407): unsure at all n locations
tcgctcgcgttcgccccactcgagtagatgtctacgccagcggngaggacgactgttgttacgaggccggcgacccgggcacattggaatgagcccccaggcccccgccaatctccaattttttctttttctttcttctttttgtatagatcaacttaatctgcaatcaaaaatgatgaaaaatttcttatgttaactttattttgctatgcatatgagttgaggatgatttgtgccgtggtccttttgcattttagcttgatttaagggctcgtgctcaagtcccgatcctcaaatggctcgggtcggggctagtgcctgcggagatccacatgtcgagactggccaggccgggaacatggtgaccgagggtatgggtgaccccgatgtgggttttgccgattccc

SEQ ID NO: 18069 - DNA, 282 bp, Oryza sativa
cttacttgacaagcatgcgtgcatggcaagattatcttgtttgtgtcccacagagaaacacggtatatgtatgcttaatatcctcacccgacatgttatgcatacccttttcaaaggctgacattttaaaatgccgtacaaagtatgtctgcttaggatataagcgaacgtggacaagtgcctcaaaacatgtggatactttgacaaacaatgagagctactcccgtacatgataatacaagccatattataagtcacttgggaattattttctattcaaac

SEQ ID NO: 18070 - DNA, 345 bp, Oryza sativa
gtcatagaaggggtcatcttctttttatttcaacacatgacttgatatgctatatgtatgctaagctcttgaatattaatgaacataattactatgcttgatgaaatcattgtcaaaagggggagaagtaatgtgaaaatttttggatttttggagaaacaaggtgaatttttggagagttggtgataagaacatgtttttagttcaattgggaatatacttcttttaaaaatggggagaacgtttcttttggatatttgagcacgatgtgtacattttgaccgaagtgtgctttttatcaaacaacacaacaattttattgatttgccatgtgtcttcaagggg

SEQ ID NO: 18071 - DNA, 484 bp, Oryza sativa
  unsure (1)..(484): unsure at all n locations
tttgtggtgtcctgaaagatggagcttcttcagatttaattcatttgtcacctcanntccttnnggaaggaccgcatttgtggnaaaaatagcagcctgatatattagatgaaaaaagttcaaccacgctctaaaaatcttttaagaaaacaaatggggttggattttttgagaccatatattgattgtattttaactggaaaataggcctatataaccattgttttatgacgcataatgcactccttgagaataccactacctttttatcctcatctttcaagagcaggtttgagtttggtctcgttgtcaggaactggctgctgtctgtcaccaagaataaagtattttcaggcccatgaacttaaatgcatctcctanaaaaattataagtattcgaaacaatcactatagtgtgaacatatctttgcatcggtctttgaagtgaacgccaccagaagactgaatccataatctctcttgc

SEQ ID NO: 18072 - DNA, 306 bp, Oryza sativa
gaaccgatagctcaaactaggaaacccaattcttccggatgcacgaaaactaagtaccaaccaggtggttcattagaacagtatgactccaaacaagctatatgaaggtgagagggagagggagaggagacagaacgccctgcccgtgtaagacctcggcgcgtgcacatatataccaccccctcccggactgccatgcactctcgatcaccatcttgtgcatcatgcatcatccactgttactctgtacgggagaacgtcagacagaggagggcatggggaggggacgagcgccgtgctgcgcca

SEQ ID NO: 18073 - DNA, 405 bp, Oryza sativa
  unsure (1)..(405): unsure at all n locations
ccgtcttgctacacgttcttgcagctgccgggaaatagttttatcttccaangccgcacgtctggggattatttcaggaaagaagcaatctttcatacatggagtgaggagatatatgggttcgggatctcaggatcttacacaacgctgagtgcccaagtttcttacattccagacccatctaagttaagggtgaaaaagggtcgactccaaactaaacgcatcagaaatgatatggatgagtcataagcaggtgggaggaacttacgctgcatcaagtgtgatctgcgcggccatacttacaagaaatgcccgaagaatgcagaagttccaagctgcgcagatgctattccttctggacaggcaagtgatggtaggcgaccacctggtgaatgaacaacaagc

SEQ ID NO: 18074 - DNA, 468 bp, Oryza sativa
ttaagtcacctgaggcatgcaagctagcagcactccgcctttccctgttctttatgtactacttatctacttatatatggatatggtggttacttctctcacgatggactatggactgtggacagacaacagccgcggtacatacaacaaatgggatggcgttgcacgctccacaattcaggtgctcaaaattttcatgtctcccattgctttctatggatgccggttttaactatgacacctggtagctagtctgctgcctgaaacccatagaaactagtactgtgctattacatctgttacttgatggagatggaagctagcagccgatatgtgggactcgtactatgtagtaacagagcggcacggtgcaccttcttgtataacaatcatgtatgtctttctatggcggtggttagttttttgaggggatgtcgtcatatatccatatcattcacatatggagtg

SEQ ID NO: 18075 - DNA, 74 bp, Oryza sativa
agcttgaagagaagcatcggcccgcctggctcattgtaatctactggccaaattctaacatagaggaagttgcc

SEQ ID NO: 18076 - DNA, 441 bp, Oryza sativa
  unsure (1)..(441): unsure at all n locations
cttaatcttttaaantttttttctattcaaatttaactccacttttgatacgcacacaatccctctgcatatcgaatcttcaccaccacatgcgttactntttagcctaagtatcccgtatgatctnctaatcgttggatcatcaacttctcccaagttggactcccgatcatcacncggaacactctcccgaggcattaagacacaactgcacatgaataaacaagacacatatctgagcacaagtccctttccaacttaactcaacattagcatataacagtatagcataaattagaattcataaacatgaaataatcacgagtgttcaaagaaacaacccgaaactaactccaatcaggagccagtcgatcagatcgatgggctagccggtcttaccgcangcatcatactanaacccctattttcgtacatcattgg

SEQ ID NO: 18077 - DNA, 263 bp, Oryza sativa
gacgcaccatagacgaaaaagctgccagtttttcattgattacagtatctgttcaatcttggccgtggtggccataatgatttgattcccatgttgggcgctctcaccctaccctctgcatgcattgctcgatcgacacgagagaacagggaaactcctagtcctagatagcaaccgcacaacacatcttcttgcatgctttctcctggattgtattttaatcatatccaatgctaattgtgaaccagccatcatacatggta

SEQ ID NO: 18078 - DNA, 474 bp, Oryza sativa
  unsure (1)..(474): unsure at all n locations
agcatctcttcgtgtacctgcactcttttgtatactcggacacccctgccttctgcggtggctgtctctgcgctgacacagtcgcggccttcatagaagacaacttcgttgcgtgaggtggtaccatcatgaggactgaagggttcattatgagcaacagcctgaatgcatcgaggttccctttctgcgcggtggtcatggcgtctactaaccacagaattgtgttgttgcggcaggtatggagttgatgtgctattcataatgtctgacacatatgttggatttgttatctaagatcagctgctgtgctccttacattatgtggtttctgactgtggattatcacattgactataatgtagagaggcgtctgtgtgacacaatttatattngttggtggcttagtccggcaactgctttcattattaaatcaacttgttatgcaccatgtgttacaaagttctcatctgtatt

SEQ ID NO: 18079 - DNA, 433 bp, Oryza sativa
  unsure (1)..(433): unsure at all n locations
tgggacttcgcgagctgcttgatgtngatattgtgatctacnnaaatctacgaacacatttgtgggaacaccgagttggtaacaaccatttttttcttctaatgaaattaaataaacattatggaacttgagaatgctgacttgttttgtggctctaattttgcttttaggatggctccagaagtgctccagccaggcactggatataacttcaagtatgtttacattgaattatacatggcatatgacttgtgtgtatatttacatcgaattatacatgcctcaatgcaatcctgaatgtaaatgaagcatattctttgttagatttggtgcaaaaaatacagccatcacatttttcacgaatagatattatacatggcatactcgcatttgtattattccgggtatgcgctanttttttcatttcattgtc

SEQ ID NO: 18080 - DNA, 437 bp, Oryza sativa
  unsure (1)..(437): unsure at all n locations
tagtgtatagtggctactgccaaagtacaagggtcattaatgttttatgcttgtcgtacgtatatttgtacagtcccaagctactgtgtaaacatanatataggcgaacagttaagggaataaaagttaccttttccttcttctttttaccccccaagaagaaaacacttgaaaataaaagcaatggtcacatcgaactgctgtctagctgtgtactggaatagaagtgcagggctcagcccaatggcgtgttctcagatgcctgtctactcctgtgtntaaaaactatatagtaatttcagggttcaaaatttatattgaaatataacaacttctcaacctattcggttactctatcgtttcaatcaattataactatatcttggttcaattctctacttatntcctaaatctaattctcttcttaattcatccat

SEQ ID NO: 18081 - DNA, 62 bp, Oryza sativa
agcttgctcgggcagctggaggagttatattacatatatatatataagggcgggactgtagt

SEQ ID NO: 18082 - DNA, 249 bp, Oryza sativa
gacagctctcgaggacaagacgctggtaaagacccaaggcctggatctccggctaaagcacaagaatcgactcgccctcgtccgggaatcatcacagggaacaccttgccttaaaccatgccgatccaaatgacttcgaatgaatgcctgactttcaccaaggatgcatcaggaccactggccggagaccaagaggaaattcaccggatacgagcggctgaagactcaccgccttccatactacacaag

SEQ ID NO: 18083 - DNA, 178 bp, Oryza sativa
caggaaccttttcaggccgttcgacccaagaagaagacactgcactccctgaactcaacatcagacaacataggaaggtattctaaaatgattaggaggctccactcgatcgatagacgaaataccagaaatgaattgatcagttcactcactactgcaagagggagaagtatacctg

SEQ ID NO: 18084 - DNA, 379 bp, Oryza sativa
gacacataacatagaccaagaataaaggagccctgctatataactagctcaagctataagctcttggtggccagtctagtaaaattaacatcaaatgaaagcaaggtccttaacatgcaacaaacgataaaaattaaatggtacctcccgttcatagaaaaagagtaacctcaggccctttcgaggtgcacacttcatcatgcatcgatatttcatttgagcaccaataattccacatggaaattaaatacctcaacaaaaagataaaatgcacttacaatttatactctactcgtgagtaaaacttgtagctcaaaaatatcaatgacacactacgtacataaatcaagggactatatatccgcaggacattatcact

SEQ ID NO: 18085 - DNA, 400 bp, Oryza sativa
cccgccgaactcacgaatggggggtctcacgactccccgctattgaggatcttgcctcgacagtggtgtactagtcagttcgggttcatgggttcgaaatctcagacattctatttatttgatactacctctgcctcaaaatgtagcatcctaagatacgacgagacccatcctagaacaatgtatctagacatatctcatgtccaaatacattgtcttaggatagaatgtcatgtccagatacattgtcctaagatgagagttgttatattctgtgacgttgggagtattaagcttttctctataattgcatatgttccatataatggttacccaatatgatatagaccgctgcgatgatagaaatactccttcattccaactatgagcatatttgctt

SEQ ID NO: 18086 - DNA, 432 bp, Oryza sativa
  unsure (1)..(432): unsure at all n locations
agctntcaattccttctagttatctttcatttttctctaccacactttctgaaggcgcctgctctaaaattgtttgaattggatcattttcaacattgggcatcaagcagccaggtcagctagtttcatcaaccaaaccaatagtgccaactgctgcacagctgttgcctgatacagtggacccctcagatccatgtggtgaagtggagcaattagtcagtccaaaatttgcatcatcatgcaactgaattgatgcttcctcacaagccgggctaactgaagcccttctaacagatatgaatgagtcaacgtcagcaccttcaacagaatgatactttcgcttgagctgacccaccagagatgctgtcgttgtgcaaacttcagagntcattttatcagactggtcttgctgctctgcacatattggcgttg

SEQ ID NO: 18087 - DNA, 198 bp, Oryza sativa
actggctacctagtgtaatcaacctgacaactcaaagcccttgcgggcgctttggctcattatcaaacatactgtgtgacaagacataatcatatttaatgcgtgaaatggttttacactgacctatcactgcgtacgccactatcggagaggaccccataagacggcgatcctataaaactcccctgcctgtccttc

SEQ ID NO: 18088 - DNA, 456 bp, Oryza sativa
  unsure (1)..(456): unsure at all n locations
agcttctacctacctaggttntctcgtatactaatattntctatcggtgctgatcgatggatttcttcaccatatgtggccatattagcttcaagtttgcatgcgtgcatgagcgtgacaaggagaagagagccatatataggagaacctggagaaggagacatgcattcatgcgggaaaataaaaagaagtcaaagggggttcggagtttaatctccgacccttttgccccttatgacttccatgaaagtacagaaaaatggcgacacacctccaaggtccaggctcgatgtcgccgccgcaattcctgaagagagaaaagctaacaatggccgccgccgactgttcaggcttgcaacatctgaaaggaaagcttgcagtgtgattagttcctgaanaaagttaatagtttaaagaatggtaggagtttgaaaaaaagtaanagtttatgtgtgt

SEQ ID NO: 18089 - DNA, 467 bp, Oryza sativa
  unsure (1)..(467): unsure at all n locations
agctngcttatcggtgtggaagaataaatgagtatatcacgaatatacatagggagtctgaaccttcagagtggaggtgtcggatcggataattggacggtctgatcattcagtcggctcaagcacaagatccccgtggcatcagcgtccaccattatggtgtgaccaggcttgaactgaccagacagaattgcttcgctgatcacatcctcaaccagctgagtgacggctcttcttagtggccgagcaccgtatctcttgtcgtacccatgctgagaaatcangtccttcatggaatcatacacctctaggccaatcccaagggctaaaatcctacccttcacctcttgcagcattatattgagaatagccagcatctgcccattggcaggccagtgtcatcggcttacatcaggcatttgcgttggttgcctgaacatgtagaaatatatagcacaacgtgctac

SEQ ID NO: 18090 - DNA, 402 bp, Oryza sativa
tcgatcgagcggcacgggcaaaactgtagactgttctacgctagagaaacggacgcgcgctaagcgttcattgctggccaccgactcaattcaatcaacgcaaagggtacgtcaactgctgctcgccactcgcctatagctagccgctgctaactgatctcctgctttacaggtttgcatgagaagagagaacactgaacagatggagatgcgatcggtcgatcgacgtgaagccaagccgccagtcactgctttgtcgatctgtttccctccctcccagcagaaacgtgactacagtcgggactgtgatactggttactccatcattggtacctgaaggaaaaagaaaaagagagaagcgaaagttgcaggaatcatgcatgcaagcatgcaatgagatcg

SEQ ID NO: 18091 - DNA, 472 bp, Oryza sativa
  unsure (1)..(472): unsure at all n locations
agcttgtgtccctggtcgagcaccccgagggaggagctctcgttggatacctgcaggtgaagcagcgcacctccacctacggcccggacatccctctcctcaggctctatgtcaagtaagaacagagtaaaatcttttttatgcgactagtgatcacttgttgttcgattccacatgccttgatctttctgtgcacagtgttctatacatgttccattgatttggctccctcccaattgttatctaatagagtaagtgatagtacttacatttgaggagaatgttcgtggctgtaacaattgatagtttagttgcatcttttcttcaatagtaataaagaacgacttgcatttctgatcttgcatatcataatcaagctcgattgaactactgctcgaagaagtaagattggaccacaaaagttcgatgctttgctcaattnttttatatattatgttacaatgtactcatc

SEQ ID NO: 18092 - DNA, 489 bp, Oryza sativa
  unsure (1)..(489): unsure at all n locations
tgcccactntattggtatctgtactttgcctttcacttgagacttattctgttttttctggtatagctaagctaatctatgcttgctcatcttttccacaaaggctttgtgctcaactggtgagttttgattggctgggagagtacttgataagtcttcagataaaaacactacctttttgttcagctccagcatatgcatttcaggtttcactcctagtaattaagataatgtttatgcatgatgtgtgtctgcaagtgtgaattttggcctacttagtagctttcagttggccaagcactttgacagtgccctccaccctggcaaattaaattaactctggattaattctgcaatgcaatctgatccaaagaccctagctagttgctgatgccattataattaactctagattagctaggcacttgagtagttatataaaccatgcacattgctagagctgacatgttaagtgtacacatgcatgct

SEQ ID NO: 18093 - DNA, 444 bp, Oryza sativa
  unsure (1)..(444): unsure at all n locations
agcttctgataaaaaacgggtggttctatcttgatttgtaatatgagtacctttacgctttgccgagatgtaaggggccattttaggattccatttcttaataccatgaccaaaatgaactcccgcttctatcatctctttcaaattgatgttccaatatcttcttgtcattntttccacacttccttttgatgttttcttttttttcatcctacctctccattacgaaatttctttcttttcgaagattaagaaagagccgaaatagctcgaaataaataataattgttccgatggaaccttctacatggtataagcataaccctaatgaattaactaaacttctttttaaattaaaataaaaatagaaaatctaccctctaaccgtctaaggccaaaatctaattaaagtaaaaaaccgcttatgattcttaatcatataat

SEQ ID NO: 18094 - DNA, 444 bp, Oryza sativa
  unsure (1)..(444): unsure at all n locations
ccgcgtattttccttctgcttctggctgtctcgcaataccttctacagcttgtnctgcagcagtaccttgaccaactccaggcccaatagaagcaagacctacgggccatccagcagcaataacggaagcagcagcaattagtggattcatgatgagttcctcgtgtcaaacaaaagatatggttaaggatacaatcaaccaagaaattcatatttctaagctctattggacagaagtaactaaaaagtacaaattgaaacgataatctgaattctccgaactgcttcgagatctcccttttagtttctaatcattagagggttgtggactcattattctatttctctttcttttcaaccaactgaactttcattccatccttctttctttcctcttcgatatccttgagattctatattttccgctatcatctaattcataat

SEQ ID NO: 18095 - DNA, 474 bp, Oryza sativa
  unsure (1)..(474): unsure at all n locations
agcttccctaaaattattcatggccgaagcatcatggccacccagtaaattgttatagtactgattaatctggccaaaagatgctacgtgtatacacgttgattttgaaccattaattaagtagtagtccacgcagcgaacatctagaaccattgattaggtaattatgcaaaaatcaacaccagcatctcatatatgcgcaagaacttcgaaaaaaatgtgcaataagttgacgagtttcaatatggagtaagaactatttagcactacgaatctagacgcttatataatatcttatgttaggttgctgtgtattgggatgaaggaggtagagcacaatgacaccaactaataaaataatccaatcgttgtatcgtcgccgtgatcacgctcctgaaatggccgtcaaatggatcatttgccaactctctctgtgcatcantaattgctctaccaaagatcagttaatctttg

SEQ ID NO: 18096 - DNA, 472 bp, Oryza sativa
agcttgacgctacccctacccggcgcgccatctgtcgaaactagatttcggcaataatgaaagggggtggctatcaagctaggaaagtgtatgggtttgaagacaaaggatttatacaggttcaggccttcttataaaagaagtaataccctactcctgtccggggatgaatccgccgagtgtattattgattgtatgatttggagaaaatccaacctctgccactagaggcacccggaccccccttatatatggggaagagtccgttttacaaaagataatctatatccctaacggaatatgcaaatacagatgaaatatagtcgtaaccgactaagtctcagggtgtttccttgatacacaagttaagaaacacacccgagatacaaataagatattctatctacattaggtatcctgtacctagtccaaataccgtcgccgtatagatatgggatatccataatctcca

SEQ ID NO: 18097 - DNA, 480 bp, Oryza sativa
tgcattacacacctaaattcccgtgacttgctgagtatggtattactcacccttgctctatataaatatatatagttcctccgacctgaagctgaagataaagtgaagtgaagattagggtttcatcctggttcctagccgtcgcatgtggtgttgggtgttagtccgttggtttcactgctgctgctgttgttggtgtttcctcgttcgcgtcatcgattgcattctcgggctattctgagctgcaacctatgttaaggtaaataagtcctctatttaaattaaggattgcaatgcttcattattgtcaccgtgggtaccagctctatgtcctaggactggtaccgttatcgcggtctcgtatgaagcggttcgcaccgtttctcctacgacgcgctccagtcatgtgctgttgtacggcggtgccggattggtgtgtgacaccaacatgggcctattagtcttattttgaatggccat

SEQ ID NO: 18098 - DNA, 469 bp, Oryza sativa
  unsure (1)..(469): unsure at all n locations
agcttgttgcatatccttgatttcagatnattgctgctccagngaagaaaccttcagttgctgctatacaaaagaagacccaggagtctgacagttctgatagtgactctgattctgaatcagatgaggtaagcgaccatacaatttgtgttgcactgctatgtaagattccaagtgctcgggtggcacacagctattgcttcccttctcctgatattatgacttaatatttggagtgttgatagaagatgtttacataaaatatgtttcttgatctgactagagcaatatctacaggatgtgccgactaaagcaccagcagtagccaagataaaggaagaatccagtgaaagctctgattctgaaagtgattcagactctgatgatgaggtgggcaccttaatactgttatagtgatgttgacagaggctctgttatccatagatattttttntgtatgcaattacat

SEQ ID NO: 18099 - DNA, 455 bp, Oryza sativa
  unsure (1)..(455): unsure at all n locations
agcttctgaaatagtatatatcaatctatattcttgccttcaccataagaacccatgccttctgtaagaaaaataatattatcacattagagtttacaaaaattagacaatgtatacagccgtaaagggcaagattttgtttttggagatacctaattatactataataggtggatgtttggacttactacttatatttttatctagcaacatgttaatcaaacaatgtactaaaacatgtcttatatattattagtatgagcataaaataagtgttcgcctaccttcttatgtagtttacgtccgttgaatatatctgtcccgtgcagcagggttctttccataaatagatcaacttcaggcttggagcggaatgtttattngtattcccgatgattgtagaactacaataaaaggtattatgatatcgcaattcatgtattataatggagact

SEQ ID NO: 18100 - DNA, 133 bp, Oryza sativa
gcaaacagcaccttactgtcagaatggcggtactgctgccacatttactatcaggaacagacaagtggtcaaaacatcccaccaaggctctaaagaacgcccgcaatatacacattgacagcgactttttcct

SEQ ID NO: 18101 - DNA, 457 bp, Oryza sativa
  unsure (1)..(457): unsure at all n locations
agcttcataggatggacgattcacagggagtgtttaaagagatcattgacaaggacgttgttgcttacacttcgatgatcactggttattcagaaattgtggattcagttgcatggaatgcatttgatattgccattgatatgctgcagggcaacttggaagtaaaccgtgtgactatgataagcttactgcaaatagctgggaatttgggagcacttaaagagggcaaatcactccattgctattccataaggagagcacttgttgtctcagattatattctagagacctgcattgtgaacttgtatactcgatgtggagcttatcaatcagcagttgctactttacagaattcanagggaactgcagcttcatggaatgctatgctttctgggtctactagagctggacagagntttgatgcantccactatntgtctgtgatgctgcatgagca

SEQ ID NO: 18102 - DNA, 424 bp, Oryza sativa
  unsure (1)..(424): unsure at all n locations
ctgagctggtcccgtatgagcggagagacccactgtattgaatgcctgctcancacctcgggcgcaatggagatgtcacgaatggtcgaaccaattacanctatttgagcttaagccacaatagaccttccacggcccatctcatcacacggtatagcctgttaagattattgcgggcgaataagttcatctgagggcccttaacttatcaagaatccgattttgatccttcaatcggaaaacaatacgtaacgggtccctcaactatcaaaactagtgcaaaataagttccaatgatggtttggacggcggtttcagctgacgtgatgtctatgtggcttattngactcggncttcatctgacgtggcattgacatggcgcttacgtggcagtntggtttgcaaataatataatcgtgaccct

SEQ ID NO: 18103 - DNA, 462 bp, Oryza sativa
  unsure (1)..(462): unsure at all n locations
agcttacccataaacgaccgagttcaaagaggatacggcatggcagtttatctattaattaggaatagtttgttagtttccttttatctttaggaaagtgtgtttagtgtcctataaggactttaacttttccttttatctttaggaaagtttctttcttggccgacaaggacttgtatcaacccatgggtataaatatgtacacccgaggtctatgtaatctatcgctacgatcaatacaattcggcgcatcgccaccctttntacttctacttttgttttttacatttcggcagaacttgacacccgacgcggggctgcatcgtcttcgatctccggcgaagggataagtccaatgttccgtcggcccaggcaattgtctcatctacatcggtgtcgttcaaggctgtatcagtacattcgacctcttggatgctctggtttgatgatatattgctacta

SEQ ID NO: 18104 - DNA, 465 bp, Oryza sativa
  unsure (1)..(465): unsure at all n locations
agcttggcataatgccccccaccacanacttatgattcacaatagcaccaaactgagacatctcacccataatcgttaaaagatcatgagcctgcttcaccactgattggttgtcaatcatcttaaagtcatgatattgctccacgacatatatccaacgtcctgcatctgaaaccgaatatttacggtccagtgcctcccatagctctgcggcgctggtgtaagcaccatacacgtcgtagagctggtcagacaggagcgaaagcatgacacctaaagccacatcattactggtctcaaagtccgcatgctgctgttgggtcagcggcctcacttgtggaataacataccacaagttctgcgacaccagataatgacgaactttggattgccaacgcttaaagttttcaccagcaaacttctcaggcctcatcagatcaacagcatgagcagccatgaccaatg

SEQ ID NO: 18105 - DNA, 485 bp, Oryza sativa
  unsure (1)..(485): unsure at all n locations
tatgctgtgttggcgtttctgtgtccacaatttcttcttactgttctgtcttgctgcgaagatactgcttctttgctcttattattttcttcttaagaaatggatctgtcttgttcaataaccgacatatgcgtttaagaaatctgtgtcaagcttttgcaccggcttccgtgtataatgttcgaccgcccgttntatttccaaattttataattctcgtaaaagaattaagtcacacataaagtactattcatgttttatcatctaataataataaaaatactaatgatagaaacaatctaataagatggattgtttaacattagacagggaaactcacaactgcacttaaaattggacgcatgaagtatgctctttttcttaaaaacaaaaaaactatagtttggttgctatcaagcgatgtatatattgtacgacataccactagtaggagaaccattttctagacaaattactaccatttt

SEQ ID NO: 18106 - DNA, 415 bp, Oryza sativa
agcttgtcggattattcagaccagacagggtatgtgtttgtgtcggactgtatctggtcagaatacgtctggtgtgctcgtgaacagttagatgactaagcggtgcctgagatgcgagtctgagtcagagagaagaccgtgcactcgtgcagactccaatccatgtcggaatcaatatatcagggctgttcaatgcttataaatagcctacaccccttgcccgccacttcctcgatcagcaagattctgtctgagtgtgtgtcagtgttgacttttcatgtttgcccgtgctggagaaccaactcatcatgcagcgacatcgaacgatgcatccatcaccgatggcgggaagcgacatggacgacctcgtcacgctgctcatggacataaccatgctctaagtcgagacccgcag

SEQ ID NO: 18107 - DNA, 486 bp, Oryza sativa
tactcagcttggcgagcatgagacgaaggcgtccatgtcgctacaccactcgtcttatctatgttccttaataacagtggttcgagcgcacttgacgcaaccgaagaaattgaccagttaagagttgcagcggatgtatacttctagaacatctagaacgctggtagcacgggagctaccatggcattagcgatgaccacatccttgttcccaagaatagaaatctacaccattgatggatttgcacatgggacacgcgaagaagctgctcttgatcttatcaacaatgctcaaaatgcggctgacatgattgcaagcgatgtggtagatcatttacgcagcaacaaccttcatgcgatcaacgatgactctgatgatgaaacgactgattctgactgagtatgactgtaacaaatggaggcataatctgtactatactggtgcatatatgctgtgcttgagagatctagccccgactctgatttc

SEQ ID NO: 18108 - DNA, 444 bp, Oryza sativa
  unsure (1)..(444): unsure at all n locations
agctnttcctgttcagcccaatggccgagccattttatgcgcacgacctctccccgagtatgagcggtgacgacggngagccaaacccacgccgtcgagctcgtactccaccgccccctccacgccaaagtcctaggcgggagaaggcgctcgagagggctgaaggatccgcgacttcgacatccacaggaggtggagaagggcggcgagatggggagcgtcgcctcctcgtctacggcgacggcagcacgccccagggcgcgctccaagctgcaggcgcgctcctacgtcacccgcctgtcgcccatgacccggagtctccagcccaacgttggctggacgatgtgtgccaaatggtcatgacttgcaggcagcgcctagatgctggtgggcggtcctccgccaccaaggcctctggtgctgctaccaccggctccgcgtcgt

SEQ ID NO: 18109 - DNA, 483 bp, Oryza sativa
tagtctcgatccatcattggctatactctcattgcctcaagcaacgcatgctcatgaacaacaaagaaactctacatccaagtgcaagttcgcaccaacttgactcatatcagcatacaatagtatcacatatgaatagaaaaccgtctaaaagttatataatgaagcaatctataatttacacgaaacaacccgaaaccgactccctcttagagcacccgtaatggtaaagtaaggtgatatctgtaaaacatgtacatctcagcaatagactagattaataagtaaccacttcaatggtatgtctacatgggtatctatagctctctaatccattgcctcgtatttctctatagactatctccaggttagtagatagctttgctctctctctgcatttaatctcttccacagaggaaaatatgctgacatggatctcttgtagagagcctatagataaccattgcgggtgccttagagtct

SEQ ID NO: 18110 - DNA, 428 bp, Oryza sativa
  unsure (1)..(428): unsure at all n locations
agcttcngatgtgcatcgactacaccttccttatcaaggcatgtcctaaggatccttacccccttcctcgcatagatcagattgtcgactccactgcggggtgcgaccttntgtgttttctagatgcatactctggttaccatcaaattcgcatggctagggaggatgaggaaaaaactgcgttcattacccccataggaacctattgttatacgacaatgccctttgggttaaagaatgcaggtcctacttttcaacgtactactcgaatttctttgggtaaccaattaggacgtaatgttgaggcttatgtcgatgacttggttgtaaagacgcgcaaccaggaaatgttactctcagatctagcggaaacttttgagagtctccgctccgcccgcatannactaaaccccgataagtgtgtgttc

SEQ ID NO: 18111 - DNA, 365 bp, Oryza sativa
gcaatgacttttcagtagatcttattttatggtgtaaaataatgggtccaccaatttaagtgaaactcaacggttagaatggaaattgccatgtgacgatttaagagcgtttgtaggaacgctacatggcggcttatgagcggttgtagggagaataatggacctttagtatataatagataattttatacttccccatttcatattattataagactttctagcattacccacatttatatatgatgtaatgaaatgggcaatgctagaaagccttattatatgaaacggagagagtagttctctgaaattaatttactccatatattaagcttcatatatgagacctttgcatctatttatgt

SEQ ID NO: 18112 - DNA, 440 bp, Oryza sativa
agcttagcgattagctccctcaggataactgttcatcttgtggccagatgctcaaacccatccgtcgcctccactgccttgagattcccgggtgagtagaggaaatccatgcacgccttcttcaagctcgggcagcggtgctgctcagccagcgccagcgtggtcgcggcggagctcacgtctatccgcttgcacagcttgtcctcgcagatcagcttcagcctctccaggttgtacctgtccgccgcgacgagcagatgctgcgccatggatgaggtctcctgtgtcagcaaaacggaatgatcaaactctgaaatcgctcacactcgctcactctgaagattgccggacaacgacagtaacctgaagaagttcaggaaacgtcaaaaaactgaagaacagagtatgaatttttgtacagcgcaacttcggctgctttt

SEQ ID NO: 18113 - DNA, 370 bp, Oryza sativa
ttaacatgtaaatagcacaacaatcattagcatttacatagttggatttgatcaaaccaataccagatcaactcagaatgagaaattataatataataaaaaattggctatcaatggcatttagttgtgatataaaacataataatattatatagttctgaataatgggatagtaacattatttgttaacactatgcctgcttgatttacaccacaacatcaacatggacagccatctaagattggaattacaattgacagaactaatactcctacaaagtgcttcttgactgctatgtggcaaacatagtaatgtagcatgaactaagacaggtaacttccaagtcttcacatagggtgaatatgaaca

SEQ ID NO: 18114 - DNA, 493 bp, Oryza sativa
  unsure (1)..(493): unsure at all n locations
atcctatgagtcacctgctgcatgcaagcttccagagaagaagaaagatccggtgtgtcctacgatcacctgctcgatcggggcacaataattcaaccaggccttgtgcgaccttggagccagcatcagcgtcatgcccaaagacgtctttgacaagctcaacttcacggtgttggcaccaacaccgatgcgcctccaactggctgactcatcagtccgttacccgacagggatagcgggaggacgtgccagtcaaggtacgggatttcttcatcccagttgattttgtggtgctggacatggacacgggaaaggagacgccgctcatcctgtggcgtccgttccttagcaccgcaggagccaacattgacatgggaacggngagtatccgtttccatatcaatgggaaggaggaaaanattgagtttcaaccgaggacggaataatggctcatggtcagaatcaagtacgggccacacccgcagaatattca

SEQ ID NO: 18115 - DNA, 453 bp, Oryza sativa
  unsure (1)..(453): unsure at all n locations
ntgcctccacttaggccttccaaccggtagtcttaaccacatctactgctgaatcaatagcacataaccactcatgttggatgatggtgcctgacgacaatatgcctcacagagttgtctatatgtccatgccaacactgctgagccccaactgaaacggcccagatcaccaaagttggcgaccaaaggaatccatatcgccgaagcaatgtcacccccagcatcaggaaacagaacccctcccaacaagtgcaagatgtatgcacgggcataacactcaacacgccatggctcagcgtcatcgtcaagatgtgagaagttctgactcagccaagacaggggtattccattctgcttcttcttgcccccttgccctgctcaatgttcagtggaatgccaaacagttgctccacttgtgcacgccatccaggattctttgttctgtccgtcacg

SEQ ID NO: 18116 - DNA, 472 bp, Oryza sativa
  unsure (1)..(472): unsure at all n locations
agcttttangcagagatgttagcttgtgactttttatgatggtaatgtattcaagggaaacgtgctgccccaaccattctggcaacatttccaagtcctcccaaaaccccaattctagtattctaagagcaggagccagctgcaaacatattttaaggaaataaatgaggagagagaagagcagcgggctacagatttgtagccagctatagcacggactccaagacgcagtgtgtgtatgacagatgggaccaggtattaatagtgtagtacataactattgtatggatgggctattatattggctataattgaattggagctagtagttggctatactattaaacttgctctaagagagagaaagcactggatgacatcgggcaacgtccgcaagccgctgcaacgatgtacttcanaaatctcaagggtggcaagtctgccccacctgtcaggggagaagtggcaatta

SEQ ID NO: 18117 - DNA, 434 bp, Oryza sativa
  unsure (1)..(434): unsure at all n locations
ctagaatccaagaataaaagagtcgaagcattaanaagagaatatttcttattactaacacccacatttcacaaaacaaaagggtgagccaaaaaaactaatacaactgaacacaaaactccataaatctaaaagtaagtaccgcgatagaagatttccataaaagggacctcaaaatccaaaaaaaaaaacaaattataagttcaacctaaaagcttttataatccaaatagatgcatgaacccaaggcaatgtaaaaaaataaatgataaaccacctttaagaaaaccaatagtaagtaccaagttaaagatttagattataaatacaaatgcaagtcggcgacaaatacaatggtctctatttntacaaaagcaaacatcaaacttatgaaaaccatttagaatgtcttctgcataaaagggaaaaacgat

SEQ ID NO: 18118 - DNA, 457 bp, Oryza sativa
  unsure (1)..(457): unsure at all n locations
agcttgcctagcagcacaacttcaagcttatctttatgagttntacgaaaagctaaaaaatctagataacaatgtcaattgcaaatggaagagtgaaatgccgttgcacaactcaatggattgcctggaatccgaattacaatttacaaaccatgtgggagcaggcactaacctgnggccttctgcactggcaaatccaacgtcattgcccctccacaaccgctgaactcctagttgtgacctccgtgccgtcgttccatcgagcaagcattttatcgatcaccttcagtgcctgcataacgcggcggcgatgcggctggcggcggtggagcggccgatggtgtagctggatcgattntggcgcggtggagcggccggcgcgagctcgaatgttggcggcgcgcggaggacgacggtcggcagcggcggaggacgacggtcggagggcgatggtcgc

SEQ ID NO: 18119 - DNA, 445 bp, Oryza sativa
agcttgcaacaagagctccatgagtatttttgtgaacataccagaccttatgaatgctaaatactctaattcacgaggacatgttgacatatcagagtaatccagtcagcttagaagtgacttcacatatattatagaagtaacttactgttagcagcgaaatttggtaagcccggagtatcatcggcttagagttagcatcggcttcgaagtcctgagattacgtcgatgagatttgtcaagtcgacaattgtcggattcttgctatattcgtgtaagaaaattgaattacaacaaaaagaattagagtaactttaatttagaactatatctagattcattaacatctatatgaatgtgggtaatgctaaaatgacttacattataaaacgggaggagtaactctctgtagtagaaaagattatattgtgagtgagctgaaata

SEQ ID NO: 18120 - DNA, 471 bp, Oryza sativa
  unsure (1)..(471): unsure at all n locations
tgagccgagatgnacactagtgaccatcctgatgtatcttgtttatgccgagagtatgcccattctctggcaagaccttattgtcattacaagctggaactcatatttgccaacatgactatggccttggcttggagaccactcacccatggtgtcaatcattagcctcatcataatgggacctattacttgttacacctcagaggagaacactaaacgcaacaaatcggatgccatccttcacttgatgaccaaccggctgcgtatgagagatatagatatgatagctgaggatacattaacatcacaagttgcatatactcgcatgcaagctcaagtgaccagatccgctataaataataagtgaacaacatggatctagagcatgcaccatgaagtgatacgatttgctcccctaagttgtgcatacacttaatatcaacatatcacgtgctgcgtaatagagaatga

SEQ ID NO: 18121 - DNA, 207 bp, Oryza sativa
cccttctatacggacctatgaaactcagcttggacttgatataagctatgctatggggcgtgtatttaatgtttgttgggcatccactcgatggaatacataggatggattatccacgcttaatgctacatcgtgatgacttattgcacacctaattctacgtggaatacgatctaactgttgaatactcgccttcgaacggtttat

SEQ ID NO: 18122 - DNA, 476 bp, Oryza sativa
gagcttgcatatacacaacatcacgtgcgattttattatgtgttgagcctatagaaaaagtagtttaactaagcgggttacctgcatcttaccacacgtattaaaccactgaatatgatacggatgtggatgtggatgggtagacaagccaagcttcttgaccatctcttcacttggtaaaatggtgcaactcccgctatcaataatcactttgacggtatggcctatcacaagaactatgctttggaataaattgtggcgttggttttgctcttcacacttctctttagcacataagtgctagctagacaattaggctaggatactgatctagcgactctggatgcaaatggacttcctcgatgtcatcgctatcttgtcctcctacatggacagtggccactaaagcatatgcatcatcacaatcactactagaagtatactcaccatcatcattcacagatagagctcgctga

SEQ ID NO: 18123 - DNA, 317 bp, Oryza sativa
atgtcacttgtgggacccataaagagacgtgaatgatcttcttgagattataaacctccgctctaccactatgattctctggaatatcatggatggaggtttgcgttataagtgacaacacatatatgaggtgagttctatcaaaatattcagccactccacgttgacactgatagtgtacatgtaatatcacaactatggaatgtaatcactggacgaaaagatattgatatgaaatttcaaaagtggagcactagtgcacatggagatggataccccccattaagtgcaaagaatatgatatggtcacaatcagc

SEQ ID NO: 18124 - DNA, 444 bp, Oryza sativa
  unsure (1)..(444): unsure at all n locations
agctnttcgataacctcgcattggcagtacttactctatgaacttgaaatcctcatgcactctaggcgtacacggtttctagcagtgagaggagttctggcgctcccgggaagggaaaaacacacacattcctacgttgcttcttgtcgttgaacccagtccctcatgattgttctcttatgggtatcctcatgcagtattgctaagccagcctctgaccatccggaacgggcatccgccattcacctggccatccgaaccgggcatccgccagcagactgcttgccgcatcacacacctagaagaagaccactacgcagggatactgcctccgctcggctatctaatccgctaggtctatacccattcgagaagtacggttgtacggggggcgtttcatgcttaacttcatggctcggtccttaattgaccggngacggtact

SEQ ID NO: 18125 - DNA, 502 bp, Oryza sativa
  unsure (1)..(502): unsure at all n locations
ggcgcctgaganagatagggatttcactcaatacgggtacttccgtttatttttgcttattagntntcactgaatataaatattattccctctggtcataactatttgatgttaggacaatatttgatgaaactttaaccatcaataacttctaaaaaaacaaaaaaaatggtatgtgtaatgccttaaaaaagctatcagaaaattattctaatacaaaatttatggtcaaaatttcaaaagtttgaccaaatcttgacctatatgttaaatatttgtgactggagggaatatttagatactaactaccgtttttgatctacttcattcagatatgtctgcagcatcctttatgcctgtgagaattatccaaattatagatgggttcctgaacataagttacacctcaagacctttgntagagcggaaccgtgtgcaggtaatattcctaccgacggaatntacanaatgtgctatataatacctataatgactaacattc

SEQ ID NO: 18126 - DNA, 439 bp, Oryza sativa
  unsure (1)..(439): unsure at all n locations
agcttgcccgcaggcacgccgaacacgcacttatctgtgttcagctntatgcgggcggagcggagactntcgaaagtttccgctagatccgagagtaaggtctcttggttgcgcgtcttcataaccaagtcatcaacataggcctcaacattacgtcctatttggctacccaaagaaattcgagtagtacgctgaaaagtaggacctgcattctttaacccgaaaggcattgtcgtataacaataagttcctataggggtaatgaatgcagttttttcctcatcctccctagccatgcgaatctgatgataaccagagtatgcatctagaagacacaaaaggtcgcaccccgtggtggagtcgacaatctgatctatgcgtggcagggggtaagggtccttatgacatgccttgttaaggtcggtgtagtcgatgcaca

SEQ ID NO: 18127 - DNA, 488 bp, Oryza sativa
tcctttagtagatcaatttccttaaccgaatatagcaagaatccaacaactgactacttggcaactctcataggctaatctcaggatttcaaagccgatgctgactctaagccgatgactacttcgggcttactaaatttcactgttaacacaacccaatggttggatgctgtgttctaattttttttatgattttatctaatttagaagtgtcacggattggtttgaacacatttaaaagatgattaatgggctttaacactgcatgggagtgtggagggaggttctggactttttttacacaaaaagatatatctgatgacctaccataatgtaaattgatgggcgaatgtattgtttttctcattatagagtactatactaatgtttagaaatacttatatgatgtttaatggactatctattcaaagagaatagatgagagtcggatgctgttatctatggcctttaaggacgtaaacagtttt

SEQ ID NO: 18128 - DNA, 474 bp, Oryza sativa
  unsure (1)..(474): unsure at all n locations
agctnggaagagaggtaaggttgttttgcatatgctttgtttgaaatcatntttgaaatcactaagtgatttatttctttntaactttgggtcgaaagaagacttgcgtctcgattcgacttaagagatgcttttcaacaactcaaatggtaatgtaccgacctcctgngtcagatcattacttatcggctcccagagccatttcacttgattaggcggctcccagagcctttttcattnttgcggactcccagagtccagctgcccagcagcaaagcaatccgcttccactcgggaagcctagtctatgatgcccacagacatcccgaatcacacagattcgtttctgaccacctaggtcatccatctgccacataggctgattctggttacgatttccattccacaacaactnttcgcanagcacatgcaatcaaatctacgcaacgggaaccacctcacatccgcccatga

SEQ ID NO: 18129 - DNA, 469 bp, Oryza sativa
  unsure (1)..(469): unsure at all n locations
aacgaccaccgngttcgccagccactcctgttggatgacctcgcggatgaatccggcctccagaagtcgcgccacctcctcgcggatgaaagcttgacgttccggggcctgccgccgtactttctaccggaccggctttgcgcccggccgcacggcgagacggtgctcaatcacctccctggggaccccgggtatatccgccggtctccatgcgaagacgtcagcgtttgcccgcaggaaggagacgagcgcgtctttctatttgccatccagaagaccaccgattcgtgtggtcttggacgggccgtcgcccatggcaacctccttgaccgggacctcatcgcatgtgactatccgctgcctcggggcggcggggacggaggtgccaagcctctcatctgcaccctctggcttggacgcagcggcgaggtggtccacgcgctgctccatacaagcaagcgtgactttg

SEQ ID NO: 18130 - DNA, 479 bp, Oryza sativa
  unsure (1)..(479): unsure at all n locations
agcttgtgtaaaggtggctatccatacttcttgtgacaagtcagtaagtcacaccttatctgggtttaacaaagttaaccatcaatcaagcgaccccagtacctcatttccagccatggattatgttttctgtttgcataggtacctcattgatggcgcaagggcacttcaaagcatttactactttgagagaatgttgcagaaaaatgtacaaaaccgtgaccatttctattactcccactgaaaggaagtaacaggtattaacatcaatggctacccaaagcgaaatggaacacatggatggacacaacattaggccaattntgctgttcatcattccttatgtacactcttcagtaatcccctagcttgcatcgttgcacggngaaatgtatccaacaaagaagaaaataaaagggaaaggggaaaaatactatacagactgtactccattaaacacaagagcaaagtcgatttat

SEQ ID NO: 18131 - DNA, 443 bp, Oryza sativa
  unsure (1)..(443): unsure at all n locations
cagccaccttgacttgtttactgggtgggtgctgttatctggctgcttggcttcttgaaatacctgtactgggcgaagaagtatgcctaccggcacaatacacgcatggtcaccccatcagctgatcaagactcaccgtgatagatttgattgctcttgaaacaccatttacttcacagatgcaaaacaaaaggtaaccatgtactgatgtaagttgtatcatgctgtttgtgttcagttgattggctggacttggtcgttgatcatttcgactcaaatgtacattntgtaccattccgacccaaatgtgtgtaaaagtggtcgttntctgtggcaaaatatatcattcagagacaactccaatacaactgtatgtctatgaccgtacnaaaatntactaatgcccaantatatctcttcctactntcctggtacctcatgga

SEQ ID NO: 18132 - DNA, 469 bp, Oryza sativa
ttaagtcacctgcggcatgcaagcttcgacattgcgaccgatctgagttgtttatcatctttgaatcatgcgttgataggttgctcctgcgttcttcaatccaaagggcatggtgatgtagcagtaggccccaaagggcgtaataaacgaggtcttcaagcagtcggattcttttagtcggatctgatgatatcccgagtaacagtccaagaagctgagtaactcgcagccggccgttgagtcaaccacctggtcaatgcgaggtaacccaaaagggtctttgggacaagatttgttgaggtcggtataatcgacacacatgcgccattgccccgtctttttctgaaccagactgacttatccagccagtcaggatgaaggacttccttaatgaagcctgctgctaacagcttggttaattcctccttgatcgcatccttcctgtcctgtgcaaaacggcggagtcgtt

SEQ ID NO: 18133 - DNA, 187 bp, Oryza sativa
gctcgaagcagttgtataatgcgagcggcaattttatttgaaaaccgccaactatcttagctgcctcctgaattcgggacagatcttgaagggggggattgcacttcgataaaactcccaatacaatatttttagggatatctaataataatattcaaagaatggccacctaagtcgtcataaaatc

SEQ ID NO: 18134 - DNA, 466 bp, Oryza sativa
  unsure (1)..(466): unsure at all n locations
agcttttgtcccaagctccaccaaaatcatttctcaagctctcaacatatcttccaagatttgattgactcgctcggtctgaccatcagtttgcgggtgataggccgtgctgaagtttaaacgggtccccaattcttcctgcagtttctgccaaaactttgaggtgaactgactacctcggtcggatactatcttcctgggtaccccatgcaaacacatgatccttgcgaggtacaattctgccaatctctttcccgtataggtggtatgtactggtataaagtgagcaaccttagtgagtcgatccacgactacccagattgaatcatgtcccgatgatgtccggngcagtcccgttataaagtccattccgatctcctcccatttccattccgggatttgaagaggttggagtaaacctgctggtctttggtgctctgctttcactcattggcaaacatcgcag

SEQ ID NO: 18135 - DNA, 455 bp, Oryza sativa
  unsure (1)..(455): unsure at all n locations
ccatagaaactcagcttctgctacttttcttccagaatggaaggctgaccacctttcttctttccagaaattcctgcaccagccactgtcaatggccacgaatcatcaacgtgagtatagcgatgtttgtcttgtggaggatcgcgaacatcatgccggcattatatccatggagataactgtctgtactataactngatgagaacctgttaggtacctaggccatttctttaccatcatttaaggtttgaatgttgctctgcatatgttgtaagccatgaaaaatcatgctttcggtcattatggtcgcagccattttatttcttgttagactcttgggtggaagtgagaacacataatgcgatgaagtgaatattctacttgtgtcttcgagttatttatatgtatctcaaactcgaattattccatacagctgtttcgtttgtacccgttgc

SEQ ID NO: 18136 - DNA, 463 bp, Oryza sativa
  unsure (1)..(463): unsure at all n locations
agctnggaagagaggcaaggantgttttcttatcttttatttgaagatattttgaaatcactaagtgatttatttctttctaagtctgggccgaaaagagacttgcgtctcgatttgactctaagagatgtttttcaacagctcatttagtaatgtaccgacctcccgggtcagatcattacttctcggctcccagagccatttcacttgattaatcggctcccagagcctttttcattttctcggactcccagagtccagctgcccagcagcacaataatccgcttccactcgggaagcctagtctatgatgcccgcagacatcccgaatcacacagattcgtttctgaccactcaggtcgtccatctgccacataggctgattctggttacgattcccacaccacaacaacttttcacagagcacaggcaaacaaatctacgcaacgggaaccacctcaca

SEQ ID NO: 18137 - DNA, 488 bp, Oryza sativa
tctatccttatttgtggatccaaatgattatgctacctatctgaaattgtatgttcatcgagtgaaaactttcatgctgaaattgttttgttcgtttttcccctttaagacttacatatattacaataacctgcacaatttttattaaggtgttacagtttattctacagcaaaggtacaacatactccatgcaaatgtaatacagtaacttgcagcatttctgacactaataatggcaaaatttagtatttatataaccacactcatgaagcgcgccgatggcacgcccagtcatctagttagctttgttttttagaactcaaaccaggcgcatttcatattagaatgcaacattttgtttagagtcttgatggccattaacttgatgataaacaaaatatatatcaacgggagagcgactcagccctccccaataacaaggaacagcataataaggagagagtagtagtcaattacagagtaaaga

SEQ ID NO: 18138 - DNA, 432 bp, Oryza sativa
agcttgctcaatcctgattggtagtatctgttgatgccaaagagatgtggtttgcagctaatttcattcaagtcgaaaggattaatgttatcatccaacctgacattgaaacttgcccctgcattatagatgaagttatccacgggcacgggtacgggcatgaaggtcatcatggcctcgagcacaacccacgggatctggttctccagcataaacatgtccctcaagatgctaggttgcttggagccgaaccaagtttgtaacaatgggtcaacggctacatcgcacatatgagccataaattgcagcaagaaacaaccatcgcgtatcatcatagctgcaaactcggcttttcgaacgcctactaccgcatcgccctcgtagcagcttctggcaccgcttgcgatggggaggatcttgcagtatacttca

SEQ ID NO: 18139 - DNA, 494 bp, Oryza sativa
  unsure (1)..(494): unsure at all n locations
tcaccctccaatgtgcatatagtctgaatcaggctgcattttttccttaatccaagaaatctacgaatgccagttaaatccccagcttcgccgtggactgagaagaataaactaagtatagtgtacaatgaacttaactataatgaaggtggatgataaggtcagaactgcacatcccactactatgtagcagtgcatgctcatgcataaaaacatatattgatgaacaaagtctaaatgctataagtttaaacacaacacatgaaacactcgaccgtataatcaaatgtgcttaatagaacggcatanatataattcaatagattgacattatacgtaaacaatgttataacggaccagcgagaagctaaaattggaacatgtcatcttttgtaaataaaataacaaaacagctaacatcntcatgtanaatctatgttcttataacatagatacaacaggcatgaatatgcatgtgcgtctgtatctacatg

SEQ ID NO: 18140 - DNA, 439 bp, Oryza sativa
  unsure (1)..(439): unsure at all n locations
agcttcatcggacaaaacaaatgattgttttcatgaagttcaccactaaatctaagaaacactcaatgcagtcctgtaaaccaaggttacacaggtggatcgtgctcaatccgaatggcaaaccctgtatggtacccactatcgaaatgaaaaacgtcaccccatcgttacaagttaaccaatttttttaaccgataatcagcagtaaaaaaaacttccattcgaaatacctttctaaaattttttgtagcgggccagcagttagttccaccttttcagtgctgatttgaattttttggcccgctccgatataagggtgttacacgtacgtttgcttgtgcacataataatacgtagtaattcattcgtttgcacatggatgtacagctatctagcgagttgcgctgntgcgttccactgtcacgcaaattggcaacca

SEQ ID NO: 18141 - DNA, 389 bp, Oryza sativa
  unsure (1)..(389): unsure at all n locations
tcttctgctgctgctcgtcgtacacatgcacgcactctcttttttacatggaaaagtgcangcaggtttgtggtggttgccaaagacttgtangacctgtcgtccagtaaaaaccggtgacaggtgagcactataaacgctagtacaccacactgatcatatatacattgtcagtacaaatgctaggactagcgattcaaggaagaacatcttaagggtccctctagctcaaaccttcacaattatgtgacaggtatgataattactagttataatcaacaacctcatcatctactgccacacttcaagaataggatggagatctaaattattattatctattatataattaaaggaatagaaaaaggagccgttcacgtcgctctcat

SEQ ID NO: 18142 - DNA, 461 bp, Oryza sativa
  unsure (1)..(461): unsure at all n locations
agctttactgagtcatttaagttatataataattcctgaacccaagaattcaaaataacaagttcctctttacccagaaaaaaagaaccacttagaatagccaaacagattatatttgtcgagaaatgcaaaatgatatggagatgaccctcattatctattttggccaattgtattatttccttgcgtattcctataggggggttttgtacatgtgtattcggtttctcttttatcatttcgtccaagataaaaaggtcttctaattccatgaatctttctagaactcttttctcttgaatagcagttaagagagtttgggattgcctggtattccaccaattcttaatccaaagttccagacatttgttaaaagagaaagagactccccaaggcaaaagtacgataaatacaagatataggagagaaggcaatgctttctttttttntcattttgatct

SEQ ID NO: 18143 - DNA, 417 bp, Oryza sativa
  unsure (1)..(417): unsure at all n locations
agcttggcccaccactccaccacctgggtggtagccagtgttcgtctcggcccagaatcgatgcagccagcaagtgcaatgcaagctcccccacaattattgctccgatactccaatcgccatctgcgaaatgctgtcgctgttcctgcctacgagcgagagagagaatctcatctcgatgctgaacaagtaattntcccggttctgaatccgttcaatcatccaggaaaaatgtccggaattccaggtaagtaattttctctaatttcttatcctgatcagatttatagtgagattcaggggaatagagatctgctggctgtttcatcggaaaatttcgctgaattgcgttcgcgaaaaaaaaaattcgctgaatttcgtacagcggatgatgaggattgaaaaggttgggtgctg

SEQ ID NO: 18144 - DNA, 373 bp, Oryza sativa
gaccttagatactcagcttctgtgatatccccaggatgctcgggtcaagatcaagcactttatcttgtttatcttgaccttcgcgggcttgctcaaagaaacccgtcatatggcgaactgtttatcacgaagcatttgcatatagatgctcagaaatgaaccatatcctagaccgtctatcaacttggttgacgcatctgaaagcgtctctttttaatctgcaaactggatgattagacaccgcgctcggacaactcccttcaatcggacaagctatactcgcgtcaaccctactcatagagttacatgaaaatattgtttgtacaatatattcagtgactactcatactgatgatcgaacagcaaacccttt

SEQ ID NO: 18145 - DNA, 407 bp, Oryza sativa
  unsure (1)..(407): unsure at all n locations
agctnggttaattcttggactatgatggtgtctcttaatatatctgcgaggcttcataacaagaagggatgcttcgatatgttgtaccgcacagcttagccgatttacccttcaatgcttgtcagcctctgcgacaccttcagtgatgactacactaagaccattagctgtgcttcactgctcattgtgtcacttctgaagctcgtaaatcctatgatcttccgaaagaggtgagctactctatcaattaccacacagttataatgatcacaactagcaagattgacaacgataaacatgccaagtgcaagaagttgatcatggtatgtcaatggatgcttcttgtgaactcgccagtactaagaaatcttgtagaagctactgattatgcagatctgttcatagat

SEQ ID NO: 18146 - DNA, 460 bp, Oryza sativa
  unsure (1)..(460): unsure at all n locations
agctntccttcacccncttcatcaactcctctgtgttctcccactgngacatgacatgtggatcaaatatactccatttccacttatttgttagctagctagatgatgatgaagttgcttgcttctcctgngactatacagaaggcattttgttaccttcgtaaggcccccccatgtcaaagtctgtaattaatagttgatggtttgaggacaaaatgacactcgattctttcttctttttttgtggtgtattctcgagtaatgggcattgctttctaggcaaaatctttgattggttcatcctgagtgagtgatctgtcaaagtgtggacaacaatgatttttgtgtgagagaaatgacaagtttgcagccgttctttgtggctaagaacttctgtctatttttaacaggcacattnttagctacagtgtaataatatcagatgcacttgtatagaaac

SEQ ID NO: 18147 - DNA, 497 bp, Oryza sativa
  unsure (1)..(497): unsure at all n locations
tcctttagtagatggatttccttaaccgaatatagcaggaatccgtctattggcgacttgataactcccatcggctgattccgagatgctgcagccgataatgattctaagccgatgacgtctttgccgattaccaaatttcactgttaacaccctttgaatcacagggtagaaaaaacagaggaataagaaaaacacaggattctgacaggaattaaaatgtaaaacaaaggattgcaaaacacataaaaaaacaggaatggtcgtttgattggagcgcagtaaaaacgcaggaatcggatgagagagatagactcaaaagaatttttccaagaggttggagctcttgctaaatttcctccaaaatccacatgcaatgtgccattccataggaatttcataggatntggaaagcttcaatcctttgaatcacataaccaaataggaaaattntctatataanttanatcctatanaaatcctatataaattctttg

SEQ ID NO: 18148 - DNA, 471 bp, Oryza sativa
  unsure (1)..(471): unsure at all n locations
agctngatgcagtacatcaccataccatntgtctggtccaccagggcgcagataaccacatatggtgagctgtttaattaccagtggcgcatcatcgacgaagacaacagttgttctgtcacttcaacttccactagatcatgtgccttttgctcatcaagagcagcttgagggagttcatggatgatgcctgtcaaccggttgatcaaaaggaagatctcatcagtcctagtggcagccgcgagtgtcagagctagcaaggcagcaggctgcacacgagcaaaccacgcgcgctcaatttgccactcggtattcagggaaagaagacatgagtagtttatgtggccgcatgatgcagctagagagaacaaaatttcttgccgattctatanttgatttgccgttactgaaattntctggcttgccttttctttgtgtttggcccagtatcatttaaaccctaatttctct

SEQ ID NO: 18149 - DNA, 346 bp, Oryza sativa
  unsure (1)..(346): unsure at all n locations
tcgccgctgcctccattggattcgcagctgcgaagagaagccttgtttttctttcgtgtcgccgcacatcgtcggaaagtcgtcgcctccgtggacagtacctcgccggccttcgaagctcgttgcccgccatctttcgttgccgctcgtcgtcgcttaagtggggggtaaggtcactntgatcccctctcgctcccggtgccctccgtttgcgttattgtgccgtggttcgctggcaacagccgctcccatgccgttcccagtgtagattatccctaaggtcttaatcccatctaatctaatctaatcttgtttggccctagtgtcgacgttgtctccatgtgtt

SEQ ID NO: 18150 - DNA, 463 bp, Oryza sativa
agcttctatggctactgcttagtggtcgccttctctcttcctgagccatggtggctgccaaggagtctacgagcggatctaagcagcgtggccagcgagcttatgtctctaatggttcaacattgcctcctcttccctcttcttggtccacagcggtagccgaggaggatgcaggcgacgagctttaaggctggcaagtggatccaggcggcatggtcagcaatcttttgtcattgatgcttcctcctctcccctctacccccgccatggtagcggtcgaagaagccgctggcagcgagctttgggtccattatgaagtgggcagcggtggcgagcagcgagcaacaatgactagtgcgggaggcgatgaccaagcaacaaccctattcctccccggcacttataggatagagtaaagagatgggtaggggtggacagaaagctcgtggctcgttagctcgct

SEQ ID NO: 18151 - DNA, 362 bp, Oryza sativa
  unsure (1)..(362): unsure at all n locations
tgagcgagagttcgcaacaagaactggaagaaaaggccggcaagattgggtgagtcgttgaaaaatatcactgattntacgtcgctgatttcagagaagtgtgtgtcgccctcgttccaatatattcgcgtgagcaaagtttgccgtcgaaggagatcgctaaatgggctctccctgctagctagattnttcttgccccgctaagccagctcgccccaaaaagctaaattattttactggcacgtagctttgcttgggttaagagtgtttttgggcctatctactcttgaactaagttggcgctatggaactaactggtttaagcagctttgataagcccaatatacgtgtagattttgact

SEQ ID NO: 18152 - DNA, 470 bp, Oryza sativa
  unsure (1)..(470): unsure at all n locations
agcttcatgctatnttaacctttcaatgttcttttttttttaattggattgtcaatacatattttcttgttaatgcttctgtaaatcattggactgtttaaggttgcaacatctagctgatcaaatagagttttcttagtgtttgcttttccttaccaagaggacagtgaactcaaaactaaaactaccttttgaaatcacatgcccagtgtcagtataagctaactgaacataattttgatgaaactagctgtatgattacgatcaattttgatatgccacgtggacatatttttttagttttgaatatttggatatgcttgctatatgttagccaatttgtttgcagagaatctgttagttgcttaagaaacgagatacccggtatagttatcgagtcatttcataagcagtgattgtaccagtgctgataaactaaggaaggatgcacaatggtaacactgtaacta

SEQ ID NO: 18153 - DNA, 468 bp, Oryza sativa
  unsure (1)..(468): unsure at all n locations
ggacgccgtacttgaagttgtcaacgatcgaatactgaaactcttatgtgactccatgctgggcgagtgccgaaacacgtagttaccggacagatggatcactgacagtttgatctccttgatggagaacttctggccgatgcacgcccttggcccgatcccaaacggaatgaacgcgtatgggtgcctcctcttctactcctcgccgttggggtcgaaccgctccggccggaatacctctggctccgggaagttcttgggatccttcgctaggactcctggtgccagccacacccatgttccctgaaaaaaacaagggtatactagtactgaaacaacgaagcacagtctgtctggaactctggattattggccggatctagtacctcttggaaagcatatactnncaattcaacctgttcgcacgttcccttgctatcaatggcgattataagagaaactcatcga

SEQ ID NO: 18154 - DNA, 427 bp, Oryza sativa
  unsure (1)..(427): unsure at all n locations
agcttgtgcgctggcatgccgaagaacggatagtctatactatgctgaggcacccagcagattcagtacagtggaggacaatcgataggatttaccaggaattctcaaaagacccaagaaacatgcgtttcgcaatatgtacggacggcattaatccttttggtgatttgagcagtcgtcacagtacatggccagttctgattgttaactataaccttcctccctggttgtgtttcaaaagaaagtacattatgcttgccatgctcattcaaggaccgagacaacctggcaacgatatcgatgtgttccttgaaccgataatcgatgactntgaaaggctatggaatgagggcacacgaacatgggacgcatatgcacaagagtatttcaacctccatgcgatgctgttgtgtaccatcaacgatta

SEQ ID NO: 18155 - DNA, 418 bp, Oryza sativa
ctgatacgtcaaaatgttgaaaccatatataaaatgtactttttactaaacagtaaatagtaccagaccgcaatgttaacatgtcttgtatgttattgtacagctttataacgcttcatttgagaaataactcacgttttatgtttcatttaagcaatggaatgagatggtctgtcactttttcttccggaaaaaaaagcggaattgggtcccatcgttttatggagtgattaaattttgcagcaactcaaccatttgctgcttcctggtacaatattagtcagttttgccgtttaaatggtaagcgtcagcattttgtttgacattcattttgtatgacactgattcttattgccgcttgtattatatgtagtacaactacacgaaatgctttattttctcccttataatgctatca

SEQ ID NO: 18156 - DNA, 464 bp, Oryza sativa
  unsure (1)..(464): unsure at all n locations
agcttctagccncttgattaannatttattgttgtcactntccaaaggcgataagacagtaggagatgcatttgtgctatgacgcaagaaacaaattgcatcagtttctttcctaaataaacaacacaatccaacgaaaacaaaaacaatggcagtacgagcatagtactagtatatcttgaaacaaagatgatgctatcacacaatgttcagactctgacctggcgtatctcctgccccatttgatatgctaggcaactccaattttgactgaagacagggtccaggactgcatcgaccccaatcttggcgacaagtatcctcctaccggagctctcaaggtttctctcttaactattcacctgcattgcatttttgcacccaaccattaccatctctatctatgtatctctagtaggtttctacttctaaccgtcagggtgtggcaatgtcacaatgcagct

SEQ ID NO: 18157 - DNA, 325 bp, Oryza sativa
cggccattgggccaaagactgtcgacagccacgacgcgatcattcttacgtcgcacgggtggaggaggaagagccggctctgctcctagctcacgcaagcatcgagctacctccagcggcaccggccgcagcggctttcctccaccttgatgagccgaaggtactcgtctccctctgcaacggctccagcaacgacaaggctgatgggtggtacctcgacaccggcgccacccatcacatgaccggccgacgggagttcttcaccgagttcgactccagcgtccgaggctccgtcaagttcggggacgcctccggcgtggagatc

SEQ ID NO: 18158 - DNA, 418 bp, Oryza sativa
  unsure (1)..(418): unsure at all n locations
agcttgcctaanaggaaaggtgcttatcatctgtacattgcatcctcaacatgaatcttgcataaacataacaaactcattgtttataatcatgaatatatttatttattacatgattgctgcaaacttccgattacagtgataagtagcgaactgaaaatcacaaacatggctacttattctgattctggagagatatagctggcattgttctggtgactgcatcatccttgattggttctgtgatgatgtgataggactgcatattgctatcattcacaggggaagcttccttctgattgctggttgaagcggataacggtcttctgcttggtatcgccctcctgaggttgattgccctttgctcggccgggagtaggtcggtgagagacacaacttcttctatcgatgacaattc

SEQ ID NO: 18159 - DNA, 443 bp, Oryza sativa
agcttgtatatgtatggaagccaccttctgttgtatgagactgggccgttattctaaagctcaaccattgtgatatcaaccaccgtcatgatgatatttgtcaaagcattgaccaccacccgatagattaatcagagcttgatgaacagcataatcaacttgatcctggaaattattgaacgtcaaggcctgttgctcctcaatctcctattcttcaatctcctcaatgtcaccatccttaggctccccactgttgtgacctgaatcaactgagctacctttagaacccttatgtgtaccatgcttacatgatgtcacatgctgattttcgtcttatgatgtagtaagtattgaataaattatcatgagaattgatattaaatgctcattaatttacaagtgaagctgaatgtgagaaataaaatctgctatatgtaaagcat

SEQ ID NO: 18160 - DNA, 359 bp, Oryza sativa
tgtgcatgactcagatgttctgcttacccatcgataactcttgtatgtatttatgtggtgaacggactactgttcccactgacatcgagtaggcccaaacgattcagttgaggctctagatgacgcataccacatagttccatggactacgaatagttggaaataaacagctccgattcttctgggaagtgcagaatctattgtgcccatacgtaatcctgtggatagacattgacgaggaccgacactaacatggaataagcccgctcatataggcaatgtacccgcagcgatattatgacaagctatatcacccggaacaaaaggatcagaaccttctgcacaccacgccggattta

SEQ ID NO: 18161 - DNA, 440 bp, Oryza sativa
  unsure (1)..(440): unsure at all n locations
agcttcccccttaaaccactagaatatactttctccgttttataatgtataatgtatgatgttgttgactntttaatcaacatttaatcatttgtcttattaacttttgttcttttgtaaataaaaaaaaattaaaccttgcttaaagaacatcttatgataaattgagttataataaaataaataataattacataattattttgaataagatgaaggatagatgtatcttaaaatttataagcatatagcatgtgaaaaggtggaaggactcggggcttatacaacagaatcaacggatactagacgcggccaagccatccagttgccgcgtcgcgccgatgatctcgagttcacgagtgccgtgccatgcgccgtgcgttccatctgtctgtgcgccgcgcgaccagatagcgtgagaatgagatccnnctctgatg

SEQ ID NO: 18162 - DNA, 439 bp, Oryza sativa
tcgggtggagagttcgtccatcgctggtgtcgaggatgcatgcgttcctcctgaagactaccttcaatcaataaacagacctgctccccttcactaaccgccacatgccctcctacttgcctctgtcaaccagatctgacgtggagcataacaatggcactcttgttagatggaaggcagtacgtggcacaatatgggggaaaaatatggtggtgctaggtctagcatacattgtcgtcgctaggcctcaacactgcactccccgccatcggtgctgattaaaggtgaaggctccctgcaatggtgatgttgtgtgaggatgcactatcttgatggcgtggaggaagagagcgaggcttggcgtcgcatcacatctcccctgtgtgtgggtggtggatttgtaatataagtacgcaatcggatcaatcatggtgattct

SEQ ID NO: 18163 - DNA, 468 bp, Oryza sativa
  unsure (1)..(468): unsure at all n locations
agctntcattgtgtggctgtattgtgcatatatatggngacattctttctagagtaaaatgcatggatggttatttcatttgtttaggtgtgtcatataggtcactctacttttaaaatatacatatacatcactaattaatgtaatttaagtggctcatttgctcatctaactgtccacatgagtatactttgtacacgtggtatgccacctgtgattgaaaacaattacttttgaacatgcgcagaaaacagtacgtgtattttcccctttctcatagcactagcatttggaaatacacgaaattagaggtactataacctaatcatttcacttgtgcctgttttgatgagttcgtctatatcttagtcctctctctcacttactatcaaacccaacggcgacaatcaatgaatacaaacagtgacggaggcaaaatcctaggcggaggcagcgatgacaagctat

SEQ ID NO: 18164 - DNA, 458 bp, Oryza sativa
  unsure (1)..(458): unsure at all n locations
tggcgcacacganagagtgcaagagctcagaagatcactcgcatagtcccctacctggcgcgccagatgacggagcgtggggctcctcaccgggagaccgcgctggcccccctttgccggttcggccggggaccctgtgtgagactccaagctcccaatctgtggaaggttcgcgagacaggaagcacagaagacgccggcgatgtatacaggttcaggccgctgagaagcgtaataccctactcctgtgttttgggagatctgtgtgtgaaggagctacaaagtatcagccagcctctcccttgttctgggttcccaatctggaaaagtccagtccaaaaacccanaaacctccctctcagtgggcaaggtcctccttttatatcttaaggggataccacatngcaccatcccctctctctgtggggacttaccctaccttttcataaatggacgga

SEQ ID NO: 18165 - DNA, 460 bp, Oryza sativa
  unsure (1)..(460): unsure at all n locations
agcttggagagagactggagtgtgatttcatggttagctctggaagaaatactggtcttctctgtctcttctctagtagcttagaattgtattttcactaacctaatctagagcactaaatacatagccttacaagttacaccaaccctcttgacttattgaccccactgatgatttcaacccctatcattctcttgtgatgctttcattttcagtaaaattggttgacctttgggagctgggacttgcaaacctgttgcatgtagtagttccataatgttttctgccaatttagttactaaaattattacatcacatggactgcttcttgttacatatctggcccatgcagtttatttcatttagtaactgaagggttggcatggtttacatctacaatctagttattagtttgtggaactagaataatctccacattnntgatgtcgtaatgatacta

SEQ ID NO: 18166 - DNA, 464 bp, Oryza sativa
  unsure (1)..(464): unsure at all n locations
agcttatntgtgattcctttctagaactaattacttctgcctaagcaataacaaccatatttgaaggaaactatatgttcttttgttagacttgaacgccaagttgaaattgtcttttggcattgccttttctgagatagacctctctcctcaaatttctacagaaaaagttgttgcacgattaaaattatcatgtacaaattttgatttttctacatattgtgaatggatatcagaaaatatagtaaacaggaagaagaaaaaggcaaatttagaatgctattgtatagggtcctatgatattatgtattccctctgttttacaatgtaatactttctagcatgacccatatatatatatatatgttaataaatctaaacacatacatatgtctagattcattaacatctaaataaatatgaacaatggctaaaagtcttacattgtgaaacggaggaagtag

SEQ ID NO: 18167 - DNA, 460 bp, Oryza sativa
  unsure (1)..(460): unsure at all n locations
agctnggatggaaagtatctcgcattggatgtttattgtttctgcctcttactgtcacatgccatacactcatcctgactatagcaatactgttatgtagcatttgagagcctttttatggtgttatggactggtcataatagggtagtttccatttctcgcatttctcaccactcaatcactcatccatattgatgtatacttctttagctgacttctccttttgacaaatttatgcatgttcttagagagaatttacagaatacttgcacatcattatatttatgcatgttctgacaaagctgtggctgatgacatttgtttagtctcatatttctggaaaattacaaaaaaaatgtatatagtagtggggagggtaccagaagtgtgttcaattgactgaagaacttgttagctggccacctcataattaatcattatatgttattggtactctctt

SEQ ID NO: 18168 - DNA, 457 bp, Oryza sativa
gtctctgcagcatttaaagggcatgtacacaaccaggtctggtctggcgccgccaacgcgattcggctccctttctttctcttggaagttggaaatgagcatgacttcctccggttctagaccgtgctcctctgtcgctagacaatgacgcaccgaaagaaggttaccgtggcttgtcgagtcgagccacccatttttctccagaatgcacgtgtcggtgtcgccctttctagaagaagagttttatgcagctcgtaggggctctcttttctttggcctctgattccgtttaatttaatccgccgcaacgcaagcgtaagagagcacaacgcatcagagacttcttgcccgaatcatatgctcttaaccacttgacctcagccgtagaaaaactagtccggatgcctagggatttcttggtcttgtgactcaattatatgagtaataatacagatga

SEQ ID NO: 18169 - DNA, 476 bp, Oryza sativa
  unsure (1)..(476): unsure at all n locations
agcttagcgcannaaanaagttatggcaatcttttttttaacgtaagttatggcaatctctttgacatggaaaagtgaaggttcaccgccacaacacctgcagttntcggctgtggcctccgacacgggttatgcaggacgcaagaattgaccttctaagagcagttaaaataacactcatagcgccggcgatactgactccacgtaggtttgaggagtaagctggagggtgaatggaaaagagagagaagctcggtgactaatttacagcccggttgtacactgctcccaatattgctgctgctctcagccaattgcaacattcaagtgaagaatttaaaaaaaaaaatcaaacctagccatgggaagtgcgtagagatgtatatataggttctgtttggggagagtttctagttgctacagcttctcccagaactagaagtttccccaaacagtctagatnttggtctagattt

SEQ ID NO: 18170 - DNA, 459 bp, Oryza sativa
  unsure (1)..(459): unsure at all n locations
ctcacttcgccacttaaaccagttgctgagtgcaatggatgacatgattggcattgagcacttggaagaggattctgatggcaaggctcttatgaaagcacggcgatctgctggatcaatgagtgccttttctggatcggggggaatggtctacatggagtacaagtgcttcttctttccgcttatatttcgttnttacgtcaattatttgatttcattattctatttactcaattctaacttgtgagctcttttcatccagcactggtaaggggaaggctggagcttccaagaaaccgaaggacccttcaaagaggcattacctgtttaagaagcgttatcaatgatcttgataaccggcgttgtttccttcctttgcctatctcatctgcaaaaatactgaatacgagttatggttaaggaattccaatgattaacgtggagtgggggaggttccca

SEQ ID NO: 18171 - DNA, 479 bp, Oryza sativa
  unsure (1)..(479): unsure at all n locations
agcttgtgaccttatccttgccggcatacactcatttattgtgcttatgcgctggcgtggtggctgtgtatcgcgggcgttaaaaggtttaaggcgtctatgggtatagcgacacacctctgcagagtgtatgaattgtgatatgtcactccctgtttcgggtagaaactgcgaacgcggcaggaaagggatctatcggagattctaccctgtggtactttatatgcagtagtgttttataattaaaatttgaatttttgcaacaaatatttgtcaaaaacattatgaattctttgaagaatcttggattctagagatagttgcattcacacatttcttgctattgatgggcttgtngagtaccattagtactcatcccctatgttaattccttgtatatagatgttgaatcattagaatctgttgaacaagaatatatggctggaagtgaacgaactcacgttatggatgacaacccg

SEQ ID NO: 18172 - DNA, 406 bp, Oryza sativa
  unsure (1)..(406): unsure at all n locations
ngcctctggacgagcacggntacgaacatacttcttcagaacgcccatgtacctctcgaaaggaaacatgttgtgtaggtacacaggcccgagaatacggatctctttcacaacgtgacaaagcagatgcgtcattatattgaaaaatgaaggtggaaatatcaactcaaaactgacgagacattgcaccatttcattctgaaaggcttctaatctatccggatcgatgaccttctgcgaaattgcgttcatgaatgcacatagctttgttattgttgctcggacattgtctggaaggataccccttattacaactggtagcagttgtgtcatcaacacgtgacagtcatgagactatangttngtgaacttcttctccttccagcttattattcgcttgatattc

SEQ ID NO: 18173 - DNA, 461 bp, Oryza sativa
  unsure (1)..(461): unsure at all n locations
agcttgcgcanaaatgagatccttcatgtatgtctggttagagaagttaccgctattgttacctccttgataatatgggcgtggttggttccacccctgacctccttgtggacggtacccgttgttgttgcccatgtacatcgcctcctcacgggtttccgggcagtcattcccagaatgacccgtgccgccgcagacctcacacgtgacgtgtgagtccaaggccttgacggtgccttgtggccttttctcatggtcgtccaagcgtttcatgaggaggtccagcttggcagcaagtagctctgtctccttgacggtgtgtatgcctcgctgacgggtctggagtcgttcctcgctccaacccatattggagaccatcttctctatcagttcaacgactccttgaaccgtgttagaaaagaaaggctcctcagccgtagcgttcaggtgatcgcgggaca

SEQ ID NO: 18174 - DNA, 462 bp, Oryza sativa
  unsure (1)..(462): unsure at all n locations
acacttttcctagaactgaaagatcatcacaaagntacttgtctgtgcatatctatcgcattatcaactgacgagcccacttaagcttgtaagttaagactcaaattttttttattctagtttgtctagggagattgaacctctagtttcatccataagacgtgagaaatattcttttagttgtatggttcaacactaactgcaagtttgtttgcgcaaaaaaaacacactttatatttgttaaagtacaaacatgtcattgttagaaggacaatagtggaatttcattttctggaagaatagtggaaattcaccagtgataaagcataactcacaggaagtatcgtacgaggaagttcctcgcaaacaggcgataatgaaggatgttcaattctggcacaggatatttntcgtgaccaagtgcacccttcatatatgaaagactcctgcctctttatttac

SEQ ID NO: 18175 - DNA, 457 bp, Oryza sativa
  unsure (1)..(457): unsure at all n locations
agctttgttaattcttgagagaaagtatactgtttatacattgttcttggcccgcacctctacagtttggtgtaattaagttggtcatgttgcgcgaagtttttataatcaaagtaaaattggtaggacaatgcatgtatgtgacaaaaagtttgtattaatttatcgtttgtttttaggtgtctactgctattaaggttaaattcaaaaagatatatatattcgtttattctagccagtagacattagcaacttcagttactcttatttatgacatggttggttgtcatcctagtatcatttaactgcgatacatagcaatagatgtatattgaaaattaactgtagaataaattcaaaccaaatcacaccttataagataagatangataagatatgtacttatttaatgtaagagatatgcagagatanacctacaatagtaccattgcaacta

SEQ ID NO: 18176 - DNA, 478 bp, Oryza sativa
  unsure (1)..(478): unsure at all n locations
gcggcgtgccgagatgacaatgaaagctatcaggtactcgcagaagagatcccgtgagctatgtgcagtagtgtcccgtctagtaacaagccaacaaccagtcaaaactgttttgctctttttactatggctagcaggacaccggtagaaaattggaagatagcacgggaggagagtagaaaatatagcaccaccaagccaagagtctgacagtgcgattcaggatttcaggtttaccacttcaccttgcgataaagtattaaatataggttaaaaaaactaattatacatattgcgactaatttgcgagatgaatactttaaggctaattgctctatgatttgacaatgtggtgatacagtaaacatttgctaatgatagattaattaggtttaataaattcatctagcnggttactgatagactctgtaattatgtttttattcgtgcccgaatattccatgcaataccctataca

SEQ ID NO: 18177 - DNA, 473 bp, Oryza sativa
agcttgacgctacccctacctggcgcgtcatctgtcgaaactagatttcggcaataataaaagggggtggctatcaagctacgaaagtgtatgggtttgaagacaaaagatttatacaggttcaggccttcttatgaaagaagtaataccctactcctgtccggggatgaatccgccgagtgtattattgattgtatgattcgggaaaaatcaacatatgcccctagaggcgcccggaccccccttatatatgggaaggagtccgggttacaaaagataatctatattcctaacggaatatgaagatacaggtaaaatacagtcgtaaccgactaagtctcagggtgtttccttgatacacaagttaagaaacaaacccgagacacagataaaatattctatctatattaagtatccggtacccagttcgaataccatcgccgtatagatatgggatacccataatctccaca

SEQ ID NO: 18178 - DNA, 336 bp, Oryza sativa
  unsure (1)..(336): unsure at all n locations
cctataaaactcagctttagataccaaaggactgaaaatattgaaatagaaacttaatctaattaatttgagatataaacttggaaaggacaaaaataggaaatgcttcactatagtacaatgtactgtaaaccacaaggaaaacttgtcgcgaataaataatagttcctaaaatttaagattattgagtatgttacgtatcctatggagtctggatcgatcgatctgagcgccattgacatccactccggcgccgtaggcgtgagcactatcacatcaacgacttcaaacctcttcagattgtatattttaatacacactccnaccattcgcata

SEQ ID NO: 18179 - DNA, 467 bp, Oryza sativa
agcttgtcctcatggacatgagggtgtatatttttacaaaatcaagccacataacaaatatctgcatatgggtttacaaaatgtgatcacatacatcaccagacactgccatcaatccaaattattattttgcagaaactaataaaaatatcatgctcttaccacgtttggaacagcatagagctctaacattttgaggggccccatcacagaggtcagaccagcatgaatcccaaccattgccagccaggatgcacatgatgttatcacatccttcttctcatttggttggaacagatcactgctcgtgttgaagtgtgaacctttattgcctggactacttgcaaactgcatagacatgaacgccaaaccaggaatttagtatgatattacagaataataacctctaatacagttgataatgaatgtcaagaagctcttggcctacccaagtataatgggaatgc

SEQ ID NO: 18180 - DNA, 472 bp, Oryza sativa
  unsure (1)..(472): unsure at all n locations
acctaagatactcaagcttcagggaccgagacaaaaaggaggaatatgcacagaaatattgttctcctgctcaacaggataagaaggacgctcaagagtgaaagcacccgctacctctatgcagctttgatatgcctgaagcgagtgaagtgttaaatgagcgncattttattcattttgtggtcaaagatcttcctttcacaaattttcattgcgtattcttttggatgaatgtttgtgctacgccaaatatgagttgtatcagtcgggttcttggttactacactgttacttaaaccttgagttgtttatccgagatggtgtggcggaatgggggcacagcatgtttgtacaattatttgaagttgcctttggaatgggcaccgtttgtgttgtccaaaatttggacggtgatgccctgtcactcacaattcttatctctgtcttgcaattatatgcgatgtgaagctct

SEQ ID NO: 18181 - DNA, 430 bp, Oryza sativa
  unsure (1)..(430): unsure at all n locations
agcttangggatagcatatgtatgtaccaatctcattgaaatgggtaatctgatgcacccatgtggtgtgtgcgtgagcgtatgggtgagtttaacttcttgtatttaaaagaaaacgacacacgcttccaatggtagatcccaggcggttgatatttttgccatgtatttgtgaagtgagcaaaaaccatctgaaagagaaaggttttttaatatggagtacaatacatggccgatttatattttagtctataatcttggtttaatgtatcaccttatgtccaaagtgcaaaagacttaacttgagtgttaacgtggtcatccatagtaatggagaatttgtatttaaactcccaccattacaatattccccacaatatattaactccccatgctcccaaacctacttcccactgtgtgtgtgtgtgtg

SEQ ID NO: 18182 - DNA, 364 bp, Oryza sativa
  unsure (1)..(364): unsure at all n locations
catcaagcgcgcctggtaatctgttctgcagcttgngcttaatatccgacgacgtcatttcaggtgcaaaaagttcatttagactccctcaattttcagtcgagatcgcaaaaccagaaatagatcatccgagtccatgatttgcatatagtctacacaaagtgttaaaaagaaccgttaaaagtatattcgtgtagaattaagatcttcaatcatcacaactatatagagatataatacagctaattagttgacaaactatatatacagccagatcatctcgagccatccatgcaggtccactcgtgatcaaatntatcgatgctaancaagcatatatataaacataaaactaacccaacta

SEQ ID NO: 18183 - DNA, 467 bp, Oryza sativa
  unsure (1)..(467): unsure at all n locations
agcttgttcacttttgttgggtcgttcttgtgaacatgataatgatgctacacaccatggtaggagtaataaatacacttttgtgcataatggaaagaaaattgctttgctagctttgacccctgctgaaattgtagaagctgataaagaacgagctgctagtttgaaacttgatgaatctgaaaatcagcaagtggctaaatctgtttttccacctaanaaggataagctttcacctagttctaaggttgagaggattaagttgaagggtggtgttctgcttgctacaaaatgtgacattgctaaaatttcagatgatgatatttgctattccttgatatgcaaacaagccttggtttctatgatgctgctagttcgataccttctatggttactaacctttngcaggagtatgaggatgtatntccagctgagatacccccgggattgccacctatgagagggat

SEQ ID NO: 18184 - DNA, 475 bp, Oryza sativa
  unsure (1)..(475): unsure at all n locations
tcaacattgcggccgatctgagttgaaaagcacctctgaattatgctntggtaggntgctcccgcgttcttcaatccaaagggcatggtgatgtatcagtatgccccaaaaggcgtgattaatgaggtcttcaagcagtcagattcttttagtcggatttgatgatatcccgagtagcaatccaaagaactgagtagctcgcagccggccgttgagtcaactacctggtcaatgcgaggtaacccaaaaggatctttgggacaagacttgttgaggtcggtataatcaacacacatgcactattgccccgtctttttccgaaccaagactgtgttatccagccagtcgggatgaaggacttctttaatgaagcccgccgctaacagcttggttaattcctcctagatcgcatccttcctgtcctgtgcaaaacggcggagtcattgcttgatgggtttggcgcctctcttacatg

SEQ ID NO: 18185 - DNA, 443 bp, Oryza sativa
  unsure (1)..(443): unsure at all n locations
agcttcaagttaatcttatatacttatacttttcaagatgacacactggctaaccttaggactagttacagaggtgtggcgatgataagaagcaaattcatattgcatgccggagtttaaggagacagtaatgcaaatcttcgccaactttatataagatttagtaatatgattacttcctaactaatatgtagatttagcctcttgggttggtgtagtttaagtttgtttctcgttattttcatgtattgtgacaaggctaaaaaaattgtaagaagtgattgtactaccttctaataaagtactccctccgtcccaaaaaaaaaggcaaaccttgagtttccgtatccaactntgactgtccatcttatatgaattttttttataatatcgtatttcattggctgtagatgataaaacatgatntaatatttatgcgtgac

SEQ ID NO: 18186 - DNA, 207 bp, Oryza sativa
caccatcatgctactcagctaatggcggatccggtatgatcgaatcgatgcctaaccctttagatctgggggcaatcattcaacccacatgattgcagctgctgccgcaaactatgatgtatatacctgacgctttctgatccatggaaaggaagcacaataccacacatacatgacaattgggcgtcacctgtaaactaaactata

SEQ ID NO: 18187 - DNA, 441 bp, Oryza sativa
agcttgaggtaactggcagcacctaatctagtcacttattaactgaatgtgacagatagacaacacactatggtaacacatatagactcactcgaagaataatctgacagccatattttttttaatagcatgacgccaaacacgttttgtgatagcttgatcctaaacagcaaagtatggtttgatgccaagctattggccgtgttatatatggcttacagcagaaatacacggatcctggagagcttcctctgatcgaattgtatgacactagatgcagcggtttctggaccagcaatcatagatgttgcaggcgcatgcacgtgtgcataactaatcaagagacagagataaccttgctgcattcaagtacttcaagtgaaatcattaatacattctcaaagtagtataaacttacctccattgtgtcatctataccac

SEQ ID NO: 18188 - DNA, 346 bp, Oryza sativa
gaccttgatactaagcttgagtctgaatcccttgcgtgctgatcaagagctggatcctttctcactaacatataggaggagtaggatcggatattaatataatgctggaggacaaccttacatggtgaacgtatgtgaataaatgagccatcttatgaccatttcgaggttgtcaagcagagtgactatctacgcccaaacgcgcatgtgcaactatttaatagtgatcaataacgctgacatacaacgacgcacttcttatacatgcatatgacagacatgaggtggtctataatgcaacgatggtttgcaaagctcaatgcctactcgtgtgcttctcatttgc

SEQ ID NO: 18189 - DNA, 460 bp, Oryza sativa
  unsure (1)..(460): unsure at all n locations
gtcacctgcngcatgcaagctnggatggcacatcggcccacctgcacatcttgttcattcaaaatatgtaaatgttggtagatatatacacgggcaatatggtacaaatacgtagtaggacgaaacatattagaactaagctaaaaaaaaaatcagcaaattaccgatctttatttcaaaagtcatggtataccatatctatctcacgcataagacactcttaccatgagtttcattgctaattcgcacattaacatacatcatgcatacaagtagtaactgaactatgtaaagcaaagcctgtaagacgtactaaaactcaaactcagccataaaatcgttcgacaccaagcccggtggtgtttcattaattctgtcagtttagaagtagaggatcggnngtaatagtgaanattcacaattcataatagatgaaccctaagtnttgtatagaattgta

SEQ ID NO: 18190 - DNA, 459 bp, Oryza sativa
  unsure (1)..(459): unsure at all n locations
agctngaggagaatgngacagccatgatatgtctgtaggaatgctgctgggagatgcaactgcagcagcagcagaaaaggggggcaactcagcagcagctggtggttgtccccatcagggtgaggaaagatggatgggcaagtgatgccatgctttatgtaagcaaatatcttctccattntatttgcctcccaattactatatttctagtgaaaatgtttggtgtgcatttttttaatgagttgtatgggtgatgattgatttcaggtgaatgtggagcttgtggacgcgaacacgccttctgagaacatcggaaggactgtttcattcanggagagcagggcgaggacgacgactccggcaccgacaatgcgggacaataggaagagcttggaggcagggacgtaccatgaggtccttgacctgaagcagctgcttgatctggctgacagggagcac

SEQ ID NO: 18191 - DNA, 471 bp, Oryza sativa
  unsure (1)..(471): unsure at all n locations
ctcagcttacataggaagccgaaacagccgcgaatccctgacaaaatcttctctatggactgaaattttagggccgtcctgtccaccagatccagagggaaaccatcaaatcaccaaattctaccgtttcagcgcaccataaacccctcgacatgacggatcgaacacacgaaccctatccacatgactacgaggaagaaaaagcaagcagaaacgcgcgtattcgtgacccctgtcgcgtcaacaacctacaggacccagaaaaaaaatgggggaaagctgaatactagaccaaatccccgccgattcgtgcgaaaccgcaagaacacacgaccaccctaaccccatccaacacgccaaattccttcccaaaatcgcaagaatccaacacccgccggattccaccgcacgaagatccgagaaaggggaaggcggagaggggacggngacgcngtgagcggacgcatacct

SEQ ID NO: 18192 - DNA, 457 bp, Oryza sativa
  unsure (1)..(457): unsure at all n locations
agcttcgntaaccgagtagagtgtggtaattatatttcagatgacctgaatacatgctcaataaagttttgcatccatgttaacggtcgcctcgtcccatagcttgttctgtctagtttttttagccctttcaaactttggaatttgaatccatttaattcaatatttgtcacttgtccgcatgtatgggcaagtggcggattttagtctattcccacgtatgttgaggcagttgcatgcatgcaataactcaccttgtgttgtgttccatgcctagtgtctagtgatggagatgggtgacaaanaaaattagcataatagtagtactagattttatgatggaatgaagcatgtggaagatatttcaatggagttatggtgacatattctccttataatatctcagtttgagtgaagcctctctattttaaatcacacccaattaacccatgtgtgc

SEQ ID NO: 18193 - DNA, 487 bp, Oryza sativa
  unsure (1)..(487): unsure at all n locations
tctcatacgctccggaccgttcacctggacggaggaagccgagaatgtcctcactcaattgaaggtatatctaagctctcccccagctctggtcgctccggagccaaacgagcccttgctactttacttagcggcgaccccgcaagtagttagtgcagcattagttgtggagcgcgatgaggacaatcctcacttcacgcttccacaccctgtgccgacttggcccgggagagagcacggaggagaggcccccgagccgaacggtggcccgaggcccccgacgaccggagttggccctctgcccgcttgtcagacggtgctaggagcccccgacccccatgaaggccctgaggccactgtgggaaggccgcacctgtcgccctttgaccctgaggctaaccctgtgctgactcgacccgggaaagagcanggagaaggggcccccgagccgaacggaggcctgatgcccctgacgaccggagttggc

SEQ ID NO: 18194 - DNA, 407 bp, Oryza sativa
ttaagtcactgacgctgcactgtcggtccccagcacccagatattttgatgcccattgttcgatttaataaacacttgtaatactgaaaaagcatataccatcttgataagatgctattgatcacttactgaggagcacctcagtccattgatccaacaagtaccattctcatcatatcctccaatgaggctcaataacaatcagatatccccgaaaaaaaaaaatcaaatcatcaaatggatgaacagaagatttgtttagatatgccgcatggggtaatatacccccaggatataatatcgagaatacatcttggtcccacaaacttttggtatttactttctgaagactactgatcgccgagaaagctgaatgatcaaaaactgcctttgacagctcaatgtga

SEQ ID NO: 18195 - DNA, 502 bp, Oryza sativa
  unsure (1)..(502): unsure at all n locations
tactaagcttagcatggaggtggctggattagatgctcgttgtccttgaagataaatgcggaagacttaaaccctttatttcctaattnttggttcggctctcctaaagaattgacttccaaaagccacatattatacaatttctttattcggatagcgagtcaacaaacgaatccctttcattaaatgatatggaaatcgctggttcacttctcgataacgggagaactcaagactctatttcccttgcgaagggggccttgtatataacttggaaaatatatcagacataaccaagacaatataaaactgaagataataaaaatagcaggccaatcgattatgctaaatattgtaagttaaccgatatagcagattaaattatactccctctgtcccataatataagggagtntggagggatgtgatacttcataagactacgacattggatatcctaagaagtgtcatatcccttccaaaattcttatattatcggacg

SEQ ID NO: 18196 - DNA, 460 bp, Oryza sativa
  unsure (1)..(460): unsure at all n locations
agcttcacaacanattaatcatcctattaatttctatatttcaacaaacatcgaatagtccaagaactgctatgaatggctactagctagatctgcccggtccatgccatcgaccatcctccacaacctcccagattctgtgagggtagggagaaggcttatagtgaaaaaaggaggtgaacctatagagaactcatgagttagcttgccgagctcgtcaccgcgattgcatccttgtcatgcccatcatcggccacccacagtcatgttgcattcctccatctccccacctctgcaattggtcatccttcatctcccttttatccctcggccaattctagcacctcttgaggttgctggcagaggtaggagggttgttgtcgccatcgaaagaagatgaggcanagggcgagtgagagccaatgtcgaccatttttcacatttatttcttcttcacata

SEQ ID NO: 18197 - DNA, 487 bp, Oryza sativa
  unsure (1)..(487): unsure at all n locations
tcttcgcttataggtgcttgttgggagggagttgggttgcttaataagtttcttcaacagaactaacaagtcgttaaaactactgtcagaccaaccatttctggccttcaatctcataagctcaagcaccgtccgcaacaatgtgaaatccttctcacagccctttgcctcatcgtacaaaagatcattcgctgcctttttcaatgcatcaaagttatccaacccatgagcggacccagcaacaacctcaggttcagcatgatgcaacatctctttcaaatctgcaaaattaccatcatctacgctgacaagtttgtgtagcgttcaacaaatccatgcgtcaccaagtgttgctcgattacagatggattgttccaacttttctgatttttgcagtgcacgcatggacatctaatatctntggtcttttagatgcagattcttcttacagcttcatgaaatatcgactcttcatgatgaacacaaa

SEQ ID NO: 18198 - DNA, 471 bp, Oryza sativa
  unsure (1)..(471): unsure at all n locations
agcttgtaactgcaaatcatctgtaatttttatcttgtgaaatgaagatgggtcagtgttcagtggagcattctgtttaaccactacgcaagcagagaatggttttcatgattacatgaggtatggccacttgggaagctcttgtgcccttctttgatgacacttttatccccatggcagatgacacctctggtgatgttgttgtacttctgaaaatagagtttcagaaccagcacgttaataagtcatagccggattcatctagttctgaagaacccatgaactgaacaaattaacagaagtggcaaaagaactcaccgggatcccgtcaggaaagcatcgccagaagaaattcgggcgaggccggccaacgccatccttgatcgcgtcggtcaagacggcagtgatcagcacacaanacagaagccctgcatgcatagcaagcataattcacaattcacgtttcacatt

SEQ ID NO: 18199 - DNA, 465 bp, Oryza sativa
  unsure (1)..(465): unsure at all n locations
taagatagtcaatggatttctaaaaattacaatgtgtctgaattattggtctgctatccccttggagtgtgatcttgatgtcgtgtgctgcatgccacacgttcagagaaacattccccatgttggattntttgaagggtctcacatcacccaatgaagcattcagaaagtacaagtaagtcacatctcgaggatgacaaaagacgttcgaaggataattgggtagggagttggcacaaatgtacactatctcatcaacgcagttctgcactagtttgaacaaacacactctcttgtgcgattacaacaccagcgacatgtccatgaaaaagaagagaacggacacgtccaaaaggcactcaacaatattgctttcgccaaaattcatatgaattaatccagcagatattntaaacatgatcagtatataggtatgctaataatttactagttcagttagtcagt

SEQ ID NO: 18200 - DNA, 468 bp, Oryza sativa
  unsure (1)..(468): unsure at all n locations
agctngccccggaactggctgaactgtttcgttattctgttgatgtttggcgtcggtttgcacttttcgctgaaggatttgatggcggtaaaggccatcgccattcccggtgcgatcgcccagatagccgtggcgacgctgctgggtatggcgctctctgccgtgctgggctggtcgttaatgaccggtatcgtgttcggtttatgtctttccaccgccagtaccgtggtgttactgcgcgcacttgaagaacggcaattaattgacagtcagcgtgggcaaatcgccatcggttggttgattgtggaagacctggtaatggttctgacgctggtgttgctgcccgcagtggcaggaatgatggaacagggcgatgtgggctntgccactcttgcagtcgatatggggatcaccatcggcanagtgatcgcatttatcgccattatgatgctggtaggtcgccgtctg

SEQ ID NO: 18201 - DNA, 488 bp, Oryza sativa
cgcgatcttaagtcacctgcatgctgcaagctagccgaaatcttgagcaaggtttgtctttattaatagaggaatatcaatcaccaaagttgtgcattatgtgttcgagcttatttcttaagatatgcaggaaaaatgaattcttttgtctatccccgaacttgtccgtgacgtaaggtcaccacaaatcaatttttgtaactttgcaataggcattaaaactcaattaatgactagccaattaatgattcgctaatggctctctcattttatgttcacttaatcttaatctcatcaatctcaaactgggcctgaattcctagccaggacaagagaacatcctcatcttttcgcttatgcttgcgagtcaaaatcttaatatttaatctaaaatcggtagttgattttagagtcttttcatcatagtatatcttccgaccttatgtatgccagttggaacgaatactgctggcagttctgaatcatat

SEQ ID NO: 18202 - DNA, 469 bp, Oryza sativa
  unsure (1)..(469): unsure at all n locations
agcttntagcttgactgcttgattgactgcttctctggatcatattaaaggggttgttctgtttggagaatttttaatatataaggaatagggaaaaaaaaagaacttcatccgctttcatttgtttgacgctgcgtcaaatatataaaatggaggtagtataaaggaataggagtgaacgcatgcacgcatcaattcgaatgactttgaggtttgtcagtgaatagagaattccatttatctgtacaatttgtagggaaaaatccttatttgatttatacaaaccaaataacacttataggaattaatcctatccttaggaacccaaatcttttgtttttactcccaaccgaacaagacctaaacttacacatatccatccgatgtgtactcaactaactcaatgtagctagaattaggcccgttttgaaacaaaagaaaaaacatagtaattgatgtgtatcctatg

SEQ ID NO: 18203 - DNA, 487 bp, Oryza sativa
  unsure (1)..(487): unsure at all n locations
tctcgttcttctcttgttccgtgtggagaggtagctcaatttatatcttgctgcattaagcttggtgttataacctacaggccagatcgatggcattcctcgtggagaggtgcggcggcgagatggtggtgtccatggagcgttcgcacggccgttcgacgactactgcggcggcggtgacagcggcgccggcgccgttcctgagcaagacgtaccagctggtggacgacccgtcgaccgacgacgtggtgtcgtggggggaggacgaggccaccttcttggtgtggcggccgccggagttcgccagggacctccttccaaactacttcaagcacaacaacttcttcagcttcgtcaggcagctcaacacctatgtgagcatatatacatcatgcatgtatatatatatatatatatgccgcaattaatttcactcattatgttatatgcatgctcgtnttttcgctagctctttcatatcatcttt

SEQ ID NO: 18204 - DNA, 468 bp, Oryza sativa
  unsure (1)..(468): unsure at all n locations
agcttgtcanaactggacattgcatcgctatcttcaatgtcaactaaactatcgggcatggttgctgattcatatgttcatgttgtcgaagcccaggtcaacatggcttttggaaggtgtgtatgattctcatcttgataattatgatttgttttcgtggtccgtagcaaaactagcactgaggtttattcctgcaggtttgacatagctgttaccatggctgagaaggctagggttattgatcctggaaatacagaagttggaaggattacaaacaacataagattagttgcacaagctcgaggacagggaaatgagctntntaaggcaggcaagtttgctgaggcatccttagcttatggtgaagggctcanatatgagccctcanatccagtactgtactgcaatcgagcagcttgttggtcaaagttaggtcggtggatgaaaagctgtgaagatngcaatgag

SEQ ID NO: 18205 - DNA, 409 bp, Oryza sativa
  unsure (1)..(409): unsure at all n locations
ggagatactggaggtgtgcgagtgctccaacgtgcatgcttgttctgcttgtcgcggtgggcttgggctttggaggaagggagaagattgctagagtttttcactctctcctcaccggatctgatcaacgacgataaaatattgttgcgtccaagtattcaactgccctgaaaataatatttctatgagttgttttcacccttcttcactgtaaggctgtgttctttggttgaagctctcaactcacatctcttgtttttctcgcacaagttntttcaaattgataaatggtgtcgattctttaacaaaattatatacgaaagttattttaagaatcatatcaatattttgttaacaaatagctaatacttaactaattatgtgctaatgagtccttccgatttacgtg

SEQ ID NO: 18206 - DNA, 423 bp, Oryza sativa
agcttggaggtagggagggcggctgctgtttatccagaggagggggactcggcggcggcgaaacttgaatgtagggagagcggtggcggcggatctggcgcatgggatcttccgatccagccgcggtgacgacggtgggccagcgggttgggtgctccggcggtggtggccgtcttgctgctgccgttgtgcttgatccggttgttccacgcgtggatgcaggtggcgcagtcaacggtcgttgacggtgatggcaaacagcgtccatcccatttctccctcatcccttcaaccaaacaaaagaattgggattgtcccatcctacaaaccatacatgtgagtggaatcatcccaaccccaaaattagggatgaactggttcatcccatctcatctagtgccgaaacccaacacatgcttagtg

SEQ ID NO: 18207 - DNA, 401 bp, Oryza sativa
tgtattgaaccatcaattgcactcatgttaccagttaaaacatgactttccccaacatgcatacctcctcggttgctgagagcaggatacccgacctacaaaaaggatgaaagaaaatgtgagctggattagaagagcttcataaacagactcgagcttatgagaggaaaaaagaacctgataaatggatgcttgaagactatttggaggaaaccaagcaccagaaatactacccctaggtggttgaaccccaagggatgaactaccagtcattgaggaaccccttggtgctagtgaacctgacatgtttctaagattgagattcccatatacaacccttccaagtttttcgtgagagttaagtttagaaaaacatcactttctaacatgcacaaacggac

SEQ ID NO: 18208 - DNA, 455 bp, Oryza sativa
  unsure (1)..(455): unsure at all n locations
agcttgcccgcaggcacgccgaacacgcacttatctgtgttcagctntatgcgggcggagcggagactttcgaaagtttccgctagatccgagagtaaggtctcttggttgcgcgtcttcataaccaagtcatcaacataggcctcaacattacgtcctatttggctacccaaagaaattcgagtagtacgctgaaaagtaggacctgcattctttaacccgaaaggcattgtcgtataacaataagttcctataggggtaatgaatgcagttttttcctcatcctccctagccatgcgaatctgatgataaccagagtatgcatctagaaaacacaaaaggtcgcaccccgtggtggagtcgacaatctgatctatgcgtggcagggggtaagggtccttaagacatgccttgttaagggcggtgtagtcgatgcacatccgaagcttgccgtc

SEQ ID NO: 18209 - DNA, 494 bp, Oryza sativa
tcctttagtagatcaatttccttaaccgaatatagcaagaatccaatttctgactacttggcaactctcataggctaatctcaggatttcaaagccgatgctgactctaagccgatgactacttcgggcttactaaatttcactgttaacacaacccaatggttggatgctttgttctaattttttttatgattttatctaatttagaagtgtcacggattggtttgaaaacatttaaaagatgattaatgggctttaacactgcatgggagtgtggagggaggttttggatgttttttaaagaaaaagatagatatgatgacctacaataatgtaaattgatggccgaatgtattttttttctaatttaagattactatacaaatgtttagaaatatttatatgatgtttaatggactatttattagtagagaatagatgagagttggctggtgttatctatggccttttaggcacgtaaagagtcttaattt

SEQ ID NO: 18210 - DNA, 443 bp, Oryza sativa
  unsure (1)..(443): unsure at all n locations
agctngatatgcttcccaccactcattggcttgttcttctagttgatgggttgcaaaggttaccttctcttgttcgcttgttcggaccaaggataatttcttttcaatagcccttagccagtcttcagcatccataggttcttcagatttagaaaagactggtggtttaattctcataaattctgcatgtgcgctgtaacctttacttccttgattatgtgctatggctggtaataattgagtttgtcttgccattacttctgccaaagtggtaggatttggtgaagggatttctcctgtttctctttcacccgtactgccattgcccatactcatctagaanatggggtaattgatatcttctcaaaggggagtcaacatccataattaaacatagcttttatttatggacaagttgtacatgatgtatgctacaaagaaac

SEQ ID NO: 18211 - DNA, 495 bp, Oryza sativa
  unsure (1)..(495): unsure at all n locations
tgagagaggtaaccttgctctggagaggagcctgcataggaagaattatatatggttgtgcggcgcttcagggatccattttgcctgactggaaaaatctacatatatgatggcctctataagattcatgagtcctggaaggagagaacaaagtctggtatcaattgcttcaagtacaaactgctgcgtgagcctggacagcctgatggagctgcattgtggaagatgactcaaggatggatagacaatccagcaagcagaggcagggttatattacctgatctatcatctgcggctgaagctctcccagtttgccttgtcaatgaggtagaccatgagaaaggacctgngcatttcacctatgccagtcaagtcaaatacttgaggcccctcagttctatgaaacccttacagggttgcggatgccagagtggttgcctgcctggtgatcccaactgtgcttgtggacaacataacggaggtgacttaccttac

SEQ ID NO: 18212 - DNA, 457 bp, Oryza sativa
  unsure (1)..(457): unsure at all n locations
agcttgagatggttaaagctggcattattgatcatgtgcttgatatgattcttgatgttcctgtttctgttagttcatcgattgctgagttgcttcgcattntgacaaacaacagtggcattgctaaaagttctgctgcagcaaaaatggtagagccacttttcttgcttttacgtcgcccagatgtcactatgtgggaccagcatagcgcattgcaagctcttgtaaatattctagaaaagcctcaaagtctcgcggcattgaagttaagtcccagtcaaataattgaaccgttaatatcattccttgagtctccctctcaagcaatccagcaacttggcactgaattactgacacatcttctagagcaggagcatttccaacaggatatcactacaaaaaatgcagttgtccctctggtgcagctggctggtattggaatcttgagtttacaaca

SEQ ID NO: 18213 - DNA, 387 bp, Oryza sativa
ctcaagcttagttgccgccgtcagaagcgagagaatgcacgagaggagtttttttattttttatggagctcgagctccacctcgctatatatacacgcgagagagattggtcccgttggtttgaaaaatcaagaaaagagatcgtcgggtgcgaaaatctctaccgtttggagataattttgacaggaaaaaaatatctcaaactgatatacgttattacactgtattaagattaatttgtacgattagatgagattattatttgtggatgtgtcttcttcttgggcgatcgatgagatctgtttgacttgctctctatagagtttgggaaactcttggatcaaacatagcaagccgacgagaatatgacaccgagagacgtgtgac

SEQ ID NO: 18214 - DNA, 478 bp, Oryza sativa
  unsure (1)..(478): unsure at all n locations
nnagctttcaattggtttgtgtactaaactagttatggattatagtttcacttgattttagacaacagatgtgccatgtggtatgtgatatatgatatatgaaggaaaatgatttagtttatgcccctcaactcctccaaaagtttacgtgttcacacctcaattctcaaggtggatgaaaaccaccactgaaccttctataccagataaattacacccctaaccgatcaagcctgaaacagacttcagcgccacatccactgccatgctagcactgatgccacagcaaggcattggaaaagtgatacagtttctctttccctcctattacctttcccctctctcctcagctaaatcaatatcacagctaactatcttgttctgtgacaggataatgggcaaagagaatgggagagggaaacagaanagggtccatgggcatcttatccatgagcaaacaccttatntcaagcttatg

SEQ ID NO: 18215 - DNA, 487 bp, Oryza sativa
  unsure (1)..(487): unsure at all n locations
actaagcttggcaatcgctggaaagtgatgtcgttgtaattaagggatggtgaaataccaagataacgaagatgttttagttcaccaatacatgctgggaccgtcctcatatcttgcaagtccaagtacaccacccgcaatttccttagcctcatcagcacacgctcaaagtcgtttttactcatctcctttatggaatagcacatgattagtgtgcgcaagtttgccagctccaaaatctgctcggggaatacttcatcgtagaacattatacaaacatggcgaacatatttcgaaatatgttgtacaatgcctttcttgatttcaacacggtcgctgccagcaaccatctttgctacgtcatacaacgaatcatgagccgtgaagtactccccagaactagtgtcagaaataaccttcctttntagctgaagaaatgagcacacctgcagttcatgaaagtagagctcgccgacatcttccatat

SEQ ID NO: 18216 - DNA, 326 bp, Oryza sativa
  unsure (1)..(326): unsure at all n locations
agctntcgttgccgccgccgccgtagaggttgttgttgccgccgatgtcgccgccattggtcccgatgctgctgctgccgtcgagtccgccgccgccattggcgctgtgcccgccaccgccgttggcgccatagtgatggtgatgatggtgtacggtgacgtctggtcgaccgtctccagccggcggcggacgcggacgatacagaggaagcggcggcggtgctccttntttttttaagctcttacacactggcttcggtgatgtaggcgccaccgacgccggaagagagacgnattatcgtacgaaacttgacccatgaccatga

SEQ ID NO: 18217 - DNA, 395 bp, Oryza sativa
  unsure (1)..(395): unsure at all n locations
tctcgaaccacctcagcgctgggagacacaaaatcgttggctctttcatcatatccgccattgcaaaagcttgtgcatcaggctccctgcaacagatccactggcgctggagaccataggcttgcgcctccgccgtcgtagccaagcagcacctacatgttgcgttcgccttctcctgcatcacaatcgcaagaccctacctctgccgccgtactgctagtgcctcatccgagccatctcaatccgccggggctggcgccgcccccgccgacctgtcgtatccatgacatcacgggaggtcgcanggagggagagatggatggagcgtggagggaggggaaatgactcatcgccgtcgagggataagtgaacgtcgtgaggagagggaggagatg

SEQ ID NO: 18218 - DNA, 465 bp, Oryza sativa
agcttggcgacataacataggccaatgtgttttgagagttaaagcctagtccaacatgaaatttatgtaataaaatatagtccaaagtgcgattcactctttctttattatgtctgtatgtatgcaattacacaagatcactactaaatattcctgtttgtaattgtcaccaatctaaacatctatgttccaatgaaattcatggattccccaatcctatgttctgcattgcattcatttactattcttgtgcattcttctatgcttaagctttaatatctcgcgcactaatagagcccttaattggttcactgggtatgactgctccatattccaatacgagtaatggccatcaattgtcattactcacaattatttatattctttaacatagtgtgagagaagtctcgacagtatatataaggacccaatgttcactgtattcagagtctgctattattactg

SEQ ID NO: 18219 - DNA, 324 bp, Oryza sativa
agtagaacacattataagtggatatatattctcagaatgaccgagtcaccaagtatggctattcatatgctccattttatcatcaacattttcaccactgtctaagaaagattgctgattcgcacattcccaccttgtcatgaggcacagatatatatgctgaataccatgttctcacagttcactggactatagctatgtagagtatctcatattcccttcctaacacatgaatagcgaggcatcatatgtacagtgggcctattgccaagaccacaagactaagtttgcgcaacatgctaatgattccttggatacctatca

SEQ ID NO: 18220 - DNA, 455 bp, Oryza sativa
agcttcgagagggttagggtttttggtcgatatctgggatccagaagcttccgacgcggcacggtgttcgaaccgggagcgaggaagatgggagagggcgagtaggattttctttacgggccgatttttttccgtggatgaattcagcccataatcaaattcggcccacttattttctatggatgaattcagcccatacatagataaattaagcccacttcttttcggcctaaatcgttttgtgaacatgtggatcgtgtgagtgaatgaaattggtcaggaactcacgatgtgaaataatttaaggagtgtcaaattatcaaatctctcgaacgaattcagcctgttaatcaaattggcccacctcattacgtggatgaattcagcccgtaaataaaattggcccagcttaatccgtgaaagaattcagcccataaaataaagcagcccaacaa

SEQ ID NO: 18221 - DNA, 326 bp, Oryza sativa
agcttcacaacacttcagaatactcgcaaatgaggacgccacgtcgtgcagtaatctgtctctgaaagtggtgctttgttcttggattatccagagatgttgccatctgctcaaagtctgggctcgtatcatcatcgctttaccacgggctcagtttcgtactagtaaaagaaactctgctactgaacaggaagtatcactaataattatattcctatttgatatagtgatagtatcttagtttttggttaagataacccattagatgccactgagtttgttatgagtctacgatttgccattacctttgtcacgttctataatat

SEQ ID NO: 18222 - DNA, 458 bp, Oryza sativa
  unsure (1)..(458): unsure at all n locations
agctnggattnttcttcatgcacaagttgatggttggcttggatagtggcctcaatgtccttgcgttctcgtcttttggctaatcttaatttggctttttccagattgaattggtgctgctcaagataaacagctggagtaaggatgtcggctaactcatctgggattaaagcttgaatttcatgtaatcgagccctgatctagccacagttaactactaagctgtctagcgatgatgcctctagccgatctgaaatactttctagagtcttctttagatcatcagatagaggggccagtgctttgcttgtagtatcttcttctccttcgtccagataatctctgatatcanaagagaaaagatcggctacgacctgcggtgatagtatgaaagcagttagaggttaaacaattgtagccgatttggatgcttattatgagaaacttactgggatagc

SEQ ID NO: 18223 - DNA, 439 bp, Oryza sativa
  unsure (1)..(439): unsure at all n locations
tatcctttntaggtggaaaaacagatttagccacttgctgatttttatattcatcaagtttcaaactagcagctcgttctttatcagcttctacaatttcaggaagggtcaaaggtagcaaagtaattttcttcccattatgcacanaagtgtatttattactcctaccatggtgtgtagcatcattatcatgttcccaaggacgccccagcaaaaatgaacaagctttcataggaaccacatcgcaatcaacaaaatctgcatatgagccaatggaaaacgaaaccctacaaacctgtattgcctttgctcttccggaatcgnttaaccactgaatatggcaaggatgtggatgtgtacgtgtagtcaagccaagcttcttgaccaaaatcagaactcaccaagttgttgcagctaccttcatcaatgatcacacgtg

SEQ ID NO: 18224 - DNA, 469 bp, Oryza sativa
  unsure (1)..(469): unsure at all n locations
agcttatgcaacaagctcagaccttttgctttctgcgaaggtcgaaaagagaaccgtatgggctggaagagacctcgtcggatgggcacccgggcgaaagcggtacgtgcgaaggctttggggcgaagacatatgcttcgccaagcatcaaaccacacatgagaaggcccagcgggccatcgcactctcggagggcttcaccaagatgaatgggccaagctacctatgccaataggggcccaaacatgtaaaggacactgtgtacccctaataatgtccctatcataagggtaaccatgtaaattcccctgtaaaacctaaaccctaagagggagaacctgtaatggggctataaatagccccctanggtcatgtaatanggggatctcaaaaattntcactaagtaatacaatcgtttccctttccaaccacagttgagataaccacgtctttcgacgtgacgtagtt

SEQ ID NO: 18225 - DNA, 445 bp, Oryza sativa
  unsure (1)..(445): unsure at all n locations
tagcaagtgtgagttctggttgtccgaagtcacattcttgtggctcgtgatatctgctacaggagttgctgtggacccccaaacagtgaccgccgtcaccgataggaagcaacccaagacagtcactcagattcgcagtttcttgggtttggcaggatactaccggaggttcatcgagaacttctccaaaatcgctcgacccatgacacagttgttgaagaaagaagagaagtttgtgtggagcccgcaatgcgagaaggcgttccaaactctcaaagaaaagctggtttcctcgccagtgttaatcttgccggatactcgcaaggacctcaagaatatganacagggtaaagccgctggttcacagaggatgaacacggaaccctatggaacggaaatcgggtatgcgttccggataacagcgaacttatacagttgatacttc

SEQ ID NO: 18226 - DNA, 444 bp, Oryza sativa
agcttcccgatcgctagattgaccttatcttcttatacttcatatgcgctggtatcttggcataaggtggtattggagtactagctgatacaggttaggtctaccctatcggctatgctgtgagcatgcataacccctactttggagcatgtttagatatagagcaatttatactgtctcgatgtcaccatcgatctatcccagtcgctcggtataagcgtgtcccatcggatggattacgtactgttggcatctacatccgatcgagtatgccgaacaatctccaagtttttatctgcctccgccgatctgactcgagttgcatcggtgtggcccttaatgatatgtcatcggcaatcttgccgatcggctatcgatgatggattcaactctttgttgtcttctttcttgttgattgcaggatcaaaccatctggcacgctca

SEQ ID NO: 18227 - DNA, 465 bp, Oryza sativa
  unsure (1)..(465): unsure at all n locations
tgaagatgctatcaagctggaatgaagctacaattgttcatactcaaaagtaaaagatttttccatcaataaagcacatgaacagggcttataatagggtggattcgattattttcttaagcaatgttacccggactagtcctctttccacgttgggttgatctcatccagggttttcaatttcgatttgcacagaaattttggaatttcggtgcaactaacacttttgggaatttttgaactttnttacccaaaatcatttgaaaatttaataaattttgaccaatattcaaaaaagtttgcagaaaaccaaaaatcttgtgcaacatttttagttgctagaggggagcgaaatttccaactgaaattganaaccctgattntatcatgtagcatgtcattcaaatttttagattaaatgcactangcccaatttaatcctaataaattcttaatcctaataaa

SEQ ID NO: 18228 - DNA, 470 bp, Oryza sativa
  unsure (1)..(470): unsure at all n locations
agcttagaagaggttgggttagtatgctattgtctcaactctcaagtattgatgtctggtggtgatattttgaaacttgagtgtgggagaaataattggaatggacagcgaaaaagaatgtgcaagcacacgcctattgaaaagtttgaagtttgaaccaccgtcaaatggttcgagccggctcgttagatcgagctgatgagcnttgagagaagctcgggtcgatttgaatacttatcaagccgagccgagcttgagcaactcgtgacttctgagttttcttgacagccctagctaagaaagtctgtaccaggctctactttgaacatgcctaacaaaggtagccttgcatgtatagcgaaacacatagtctaaggaggtagccttgtatatatagccatacacattactttttataacggaaatgaattcggcctctatatccactatacacggctaaatatggagaa

SEQ ID NO: 18229 - DNA, 338 bp, Oryza sativa
  unsure (1)..(338): unsure at all n locations
cttagaaactaagctatgggaaacaaangccaccatcacatgtgtttacttatatactaacatctcacgggttggtgctatgtcaagcaaaatacactagcaacttaatgcctcttacttatatgccaactataaaattggctggatactagctctgtctttgataccatatcgtagctaattccttgcagaccacaaccatctctggatgtcacccacagcctttgcggtcttgatcatccatcggcgaaggataatccagccaacacctcaccgaggcacttaatacaaaccaacgcaagcgttagcccgcaaccaacttctacaagaactatcac

SEQ ID NO: 18230 - DNA, 469 bp, Oryza sativa
  unsure (1)..(469): unsure at all n locations
agcttataagctacattgttgatggagacactttttttgtactctngnncttagnctttatcactatgaagttcagtctacctctcagtagacatataataactttaaaaaaaatagtaaagtatgtttgaggaaaaaaatcattgccttatgaaaaggaaaaacaaacttcatattaaggtgatcgctattgttccagcctagtccctgctgaagtggtatcaatatttatgccttcggtttgctattgctgcatatagtatcacaacaaaaatgatgtataatgttgaagagagccttattttagctaaagaagatggaaatctcttatattctaaggagctttcagctgatactaacgagataattgctccagttataaatagaactgatttttttatcttatatgtaccattcactgcggcctaatttaatacaatgtgatgtgcgactctgaaatgtggagaag

SEQ ID NO: 18231 - DNA, 472 bp, Oryza sativa
  unsure (1)..(472): unsure at all n locations
ctaagcnttttttcatattgaattatgagcattcacagagatggtcggatgatttatttctaatcctgctgaaatacgtttaggaaagctataatcacaaactaacaagagaactactggaaacgagcgttggcgattcctagcaattataaaatggtattctacttaaaaatactgtaaaaaaagtacatacatgggcaagttgattacagcaagaggtaaacaggaccagcagaccagatctactgcacagttgcatgctataaaaaaaagggctccaaattgcttaaacaatgcagcaaactgcaagaagtgattatgtctttccaacttgcaggagcataagtctattttctgttaaactgaaagtcaacagtgcctcagtgaagcatatagcacatanattgcagcactattgtgggaagtgccgtgtaatcgtccctatgaacactatgaagcagaatttctgata

SEQ ID NO: 18232 - DNA, 263 bp, Oryza sativa
agcttccaacaagctgcgcagccacgcgactctttctgacgtgcgtcggccaccacttcgagctgctcgtcgaggacgtcgcccacatcgagtttgtccatgttcccttccctactgcaatacactgtcgtcatgtacaaccacgctacgtacctcgtcgccactgccgccggctgtctcgatgacgaaaggtatcatgcctaattctcacatgtaccaagtatggtacctaggtatcaggtatcatgggtactaggtatcag

SEQ ID NO: 18233 - DNA, 473 bp, Oryza sativa
  unsure (1)..(473): unsure at all n locations
agctntcttatgtttgtaacatctaacttctcttagcatatttctctaaaatagttacatagctcaattatagcctcacaaatatgtggaggtagcactccacgaatggataatggaaagtatctgtgcaaaaatgcatgacaatcatggcatttcatccatgatattttaccatttgttgcatccacataatgtgacacttttgaagagtacccatccgacactttaatttccctaaggaatacaaaatgctctcttttctgctagtgtcattgtagcatgccggacaaaataaatacttgccatcatcagttggagttgcacgaagttcactctgtattttcatgagtcccaaatcaaagcgggatttaatgttatcctgtgtctttccttctagatntaacaaggtacccacaatactatcacacacacttttttctatgtgcattcatatttnntactcccgccctttg

SEQ ID NO: 18234 - DNA, 430 bp, Oryza sativa
  unsure (1)..(430): unsure at all n locations
aaactcgctattatgatgaaattgcaggatacaagacgcttattatattttatatattcatctcggcagacggcatatttaatttgctgggtattgcttatagggtgtcaagaagtacccacagatgatgacacaccacctatgcgtgcaaaggacttattatgcccaagcaagacaaccttagacggtcttattgatgatacgagtataacaatgccaaatgtagccttttgccgattaacttcacgaggaactccatgctagttatatagaagagagacttgaaatatcattgaccggagaacgtgtgacttgaaactaatgcatgacatgccagatctacaatattttaagatatgctattagaccaacaatatgccatatatgcaatcttgacaattntcgtacgaattcacatgttctgagccat

SEQ ID NO: 18235 - DNA, 440 bp, Oryza sativa
agcttcccaagattctgatctaaagattcgtccatggatattccctccttgttcatggtggatttgatggaaacgggctctgatatcctttcatcgtccttaaacaccttatgttggtttggtattctatcgaacaggttgtgtgcgctagattcatgagcacctcacttgcccaaatcttcctccaccttgcactgctgccttcccaacacctgcatgacgagaaatcccacgaaccgagcggctctgatactagattgttaggaacccacttcttccaattcaatagcaaggatccaccatacaagcaacaattgttttagggggaaaagagaagaagaaactatggaatacaagttttggaagcttctataactagcagtggaagctggaggtaggaagagatcggtagagaagatagatcgtcgaggttctagcct

SEQ ID NO: 18236 - DNA, 468 bp, Oryza sativa
  unsure (1)..(468): unsure at all n locations
tggcgtgaggagagagaagccctatggacttgacaaatcactgttttcttgctccgtcaaagatggtcgagtcggtggggcgattgcatggcggatcaggtattaaggtcaatcaaccatgactcttgtgggctctttggctttagctatattgggaggaaacatcactccactggaattgtgaggaaacaataagggaatagaacgggaactcaccagcttcagctctctccctccctcttctcccttgccccctacctcatttccgctttgcctccatcaccaacaccgaccgccgcccgttgtcgatgttgttactccggcggcaactgcaggtcgatcctgtgctcagtactagtccactgtctccctagccatccctgtaaagatggngaaccctatcgctatccccttctcagcacacaccacttcttctcaacgccacaccaaaccctaaccatacaccag

SEQ ID NO: 18237 - DNA, 448 bp, Oryza sativa
agctttgctgtctgctagcttcttataatctacgtgtacgtacagcgtcctaagatgtgatatgagggctaatccctgtgcttgcctagcctaaccactagattgatcgcaagctgtggccagtcttgtttgcttgtttgtcccttcattaatttaccatcgacacgagcaaacatattacttcccctgtaacaagatataaagcatagccacccttaacccaataactataagaaataattattaattatcacatcattgtttgaatgtatccacccaatagaatattagagatcttgagagttaatgagttaaagaaataataatttagtagagtagatgtgctaattaattacatgcatgcatacatgttttatattatgaaacattggagaaacactagtgtttatattttgaaatagagggattacatactacgcatgcaatc

SEQ ID NO: 18238 - DNA, 484 bp, Oryza sativa
  unsure (1)..(484): unsure at all n locations
tagttacctcctatttcatttcttggtatatcgtataatctatttggactccaaagntaatcattaaagtatatatgtacaacaaaaatatatttgcagacaattaatgttcatatatagggatgattcaccttttgaatgatctatgcacaaagaaaataaacggaattacccgaaatgcttataaggccagaacaacacacttgaacatataacaatgatatactaattaaaagtgcattaagcaccatctaaagtcaattagatgggtacatagtttagagcagatacacgaaagatcatttagcttgcttggattattttagcacatttttaaaaaaaatcatgaagtaatcagatattctctaactaaagccattggattntcgatgcattggtgctttggacttcatnatttagttagtcctatttgcttagatagtgtatatctaatttagctatgcatgtttgacaacaacatatg

SEQ ID NO: 18239 - DNA, 489 bp, Oryza sativa
  unsure (1)..(489): unsure at all n locations
taagtgaagtatgacaaaatataacagaagttgccaatgaatcttctttatatntttgggacataggtagtaatgattttttccagcaacagtaagacattatttttgctgctccatggacctcaaacctccttgaccatatctgctgccacttccttctatgtgctgtacttttttcccactctcatcaggttttactcttggtatgttaattagatattccttagttataatgtaacacccttgtaatttttcccatgtataattccattgaactccattttttttcagttcagaagtgatacttatttttctggattttgcggtgttttatttaaattgtgattnttctatttgatttattgcatattgtggaatttaaattttttctgatgttntttcttgactgtcaaatggtgttgacctcatgggagtagcgaaagcacatcatagacagaagagggcaaaacaaagggtatttggtcgagt

SEQ ID NO: 18240 - DNA, 448 bp, Oryza sativa
  unsure (1)..(448): unsure at all n locations
agctntagaatgattatcggagctatgtgttaatatatactgcagcttacctattccctttntctttctagccgttccgaatctcgggacgagattctttgtaagggggtagtttgtcacatcctgattttcgtttcacgatttataaattatttaataaattaataatagaatttatattaagtgttctttaattctacaagtgaagttaaatgtgggaaataaaatttcttaaatctaaagcatggatggatgtaattcttattaaattctccatgattaagtcaactctctgaaattttctcggatattttcagagctcaattcctaaatgatacaaagaacagttcagtaattatttgatcaataattgtcgcgtcccaaatcgactctaaaatacatcctctaaattatgattagaataattaacatccatgtgagagccttc

SEQ ID NO: 18241 - DNA, 460 bp, Oryza sativa
  unsure (1)..(460): unsure at all n locations
tctctctatgctactaccaccatcctctgagcgctgtatctctcatgcacaagatataaatatcacttgttttcccaacctatgttctcttaatatccgaaattgccccaagttatcactgccccccatgcctcatacttccactctaacgcatattattgtggaaggagattatcaagaagtgttgcatttggaagaaaagatactgagtgtaaatggttatggtggtagtttggccttccataacctacagaaagtagaaaacatgaaaattgaaaagatgtcacacatttcatggaccgatctccagaagctgaactccctatcaagccttaccatcataggatgcanaagcttgttgtgcagtgaagtagacgaaagtgttatcttccattcagttgagcagctcaatctctataagtgtcatcttgccggaatatccttggcaaagctattaaac

SEQ ID NO: 18242 - DNA, 454 bp, Oryza sativa
  unsure (1)..(454): unsure at all n locations
agcttgctcctcagcgaatagtcattcatgtattccgaagcagtcctatagccgccgttgcaacagctccaactccagcgagtacattaccacaaggtgtcaatgctcaatttcagccccagccaccagttgacaagacagcggcattgtacctttggatgttccagcacagcagccaaaataaaaatcaagtacaagatgaagaacccgagcgtaagatagttattgtctgttacaaacggtagcacctgttaaggaagcagacatgccaatcgccaagtggtcactggagcaaatgcagtacctgctaagcctagtgctagtcagaagcaaacataatactcttatatcagtggtcanatactcttgttgtattgttggtcccgtcaatcatgttataacagagaaacatgagattatgaaggagtttgattagtttatgaacgatccatgt

SEQ ID NO: 18243 - DNA, 473 bp, Oryza sativa
  unsure (1)..(473): unsure at all n locations
agcttcacattattggcacctttggtcttgtcgtatcactacaggagcatgaaaggatgaacagacaaagataacggaattatgtgtaaaggttgcatggatatttattttgcaaaaggaattcaattagttagtgtggtggtctcaatattttgctgtccaaataataatattttcacaacccggtatcagattctaacacccaccttagataatactcccttcgctccataatggatgtgctagttttgttctaagtcaaacttatctaattttaattaactttataataaaacataacaacattctcagtactaaattagttttattaaatcaacattttaatatatatttttaaaagacatatgtctcgtgttggaaatgtcgctattttttttctataaactttgtcatactctgaagttgactttggacaaaccacaacatnttacattatggaacagtgggagtat

SEQ ID NO: 18244 - DNA, 415 bp, Oryza sativa
  unsure (1)..(415): unsure at all n locations
ntgctntctccttgagcatgatctatataactnttccccatgttcttctcttgcctgaaagattgaacaatttaccattggtcaaatgcctacctgctgcaatgttatctacaaatgacaaacaactatattaagcagggatcttgtaaatgctaccaaacacatattttaccacaacttcgatttgagcaaagcgtgtagagatggacatgggtgcactgtaaaaacagtaataacttgagtgccaaacgctgcatttgcagcaagtttcaacaatagagtatatttttttctgaccaaatctttctagaaatctaagtgcagtgagaatatggttgaagtataaaaactaaaaatcaagcaataatagacacacagatcgggagaaattntaaccaacatctatgtaatcaat

SEQ ID NO: 18245 - DNA, 291 bp, Oryza sativa
  unsure (1)..(291): unsure at all n locations
ctgggagncaactcatcatcaagaccagacagaaacttctcctgcctcgcgtcatcggtacgcacgtcctcacgggcgtaacgtgcgatgcggttgaactcatgcaaatactctataactgtgctggttccttgttgcaaggaacagaactctctcttatattgtggcccaatatcctggggaatctgtgctgtattgaaactatgacgaaactctgtccaagtaacttgtgccccagttggacaggagaccatgtagttgtcccaccatataaaagcgggaccttgtagc

SEQ ID NO: 18246 - DNA, 282 bp, Oryza sativa
  unsure (1)..(282): unsure at all n locations
agcttctcctcctcaggtcacagcggctatggttgagaaatcaatccatgttcttcagcattgctcatatattttttcttcttcttatcgttcaaaatgatgttctttttttttatgttatggattttttttcatgctgttgggtggtgaggggactgttgcatctgttggggggggggggggggcncatacntctaaccaccccctccgatcatttggcctcttatacttaataataatcagaaaatggcgtctcacctaccaggccatccttgtgctccc

SEQ ID NO: 18247 - DNA, 446 bp, Oryza sativa
  unsure (1)..(446): unsure at all n locations
taatattataaccaactgctagctctaaattatctttggtcaatctaatagctcattcatataatagttatgtttaagcattaatatatagtcccacatctcatacacacaacgtattagaatccgtgttacagntggctataaatctagcctgatttccttcgctccagccagcgtttctgctacagtacgtctctagctatgtcgtcgtctacaacctggccggtacttgtgacggcacctgcacctattttcattgatgcagtggatcatacggtagtattgattactatacccaaatacagtactattttaaggggtaataaaagtataaaacacatgattgtaggtttagtgaccgtcaattacaggtggaaagattttaccagtgaaaagaaaaggtaatctccaagcaggcctatatacnactgtgtcatacatgctat

SEQ ID NO: 18248 - DNA, 429 bp, Oryza sativa
agcttgcagcttgactaactatgcatatactctttaatgaagcaagaggctgcgggccaggcgtacgtatacgtgctagtagctccgacgaacgctgatccatcctccatcgaacgatcgcttcactcgcacgccacgccatcggcgaagaactatgcaactgcatgacccgcgggcataaatgcatagcctgaacaaccaccgccgctaggaggatggggcagccaatcgcccaatcggctgcacgcgccgacgaaggagacaaaatggacaggacaggtcagaattgaggtcgatatcgacacttatctagagtctagaagcctcgcgtactttctctccgtaaaaaagatataagagagaccacctatacatttatggattaactgtattaatgtgattacactgccctctacatatcactataat

SEQ ID NO: 18249 - DNA, 454 bp, Oryza sativa
  unsure (1)..(454): unsure at all n locations
taactnttgtatgttagatttatgggcttattctgtttttatctaattttgngctatcanaataatggtagtgacaaaagatgctaangttttagcactatcaaacttggtggtatacaatttgaactagtgtgtgtaaaaaatagtcacaatacaaaacatccatttgatactaatgaatttgccaaaaaaaattggtatgacaattctggcttcaaaccacataggccatatatacaaaagtttacttattttgagatgaaagaagagttggtttactctcatctactaataacatgtggtgtcatgattgttcgacgatataccacgaggtgtcttccaaaattacttgacaaggtgacaatccaacaagtatatatacaattcctnctatgagaataaggcatcanaatcccgataagccaacatatgctacgttgagtcgaaaattgga

SEQ ID NO: 18250 - DNA, 438 bp, Oryza sativa
  unsure (1)..(438): unsure at all n locations
agcttcacgaatcttcaagataaccatgcttgacttaaaatatctggtaaccgcaactaggcgcaaacaatcaaaaacctaaacaagaaccaaataaaatatcctatttaggctaattaatagtgccattagatagatcacaattttacgaaaatattgaaagtggaacgggatcattcggagttacggatcgagagtatgaatttcagaagtttatttgaatttctagacaaggaaatgatttatcgaatcttctggaatacgataatttatggaacaagggaaaatgatttattgaattttctggattaaagaaatgatttattgaatttgtggaaaagacatatggggccaacatatggtgagagaggagtgaattgtgagggagcagatatggactnttggtcactgtgtttggcggagggaataatgatggac

SEQ ID NO: 18251 - DNA, 442 bp, Oryza sativa
  unsure (1)..(442): unsure at all n locations
tacctcctttgcccttcacgatgaggtttctggtgtccaatacctgagcttgtccggcgtcggaggagctcacattattggcccacacgatctgtccattaatcatgtgagatcatgttcccatccatattcaattttgactctagatccccatgtgtacagagggtgcaaattatatgcactccagacgacggttctatcggatgacttanagaaccatatggagaatgtggaggcattgggggagatgttgtataagccacaagtgacagtacgatctggtgagtagagcacatccacgctgtgctcgatgcaaccttcctaactaggaaatacagggtgccttgatgactgtattatcggctgatgcagaggaccaacttgtacctttagcctttggtggagaaagagaattcacgagactggtgctggtttatcgatc

SEQ ID NO: 18252 - DNA, 473 bp, Oryza sativa
atccttagagtcacctgctgcatgcaagcttagagaggcttctcgcgttgttacgtttgttctactatatccacgggctacgggagggagaggactggaggaaagaagttggatacgattaaaaaaatatttaaaaccattatattgtccaaattcacgaggtaaatacatcctttttgtgaggctgacaggtatggcccacatactgcgcgtgggggcctaatggcaatgttcccttttcgtaaagaaaggtgattttgcaaaaagaggcacgtgatcttgctaaaggctaaagaggctctctctctctctctcttttgaacgatactccttttgttgaagatactattcctatgaatgctcttcttctgaagaaattgttgggggttagaatttgaattcttatctatttcgaattttcaaactgttttacataaagtctaggcacctctttatatgcttgggccttactt

SEQ ID NO: 18253 - DNA, 394 bp, Oryza sativa
gcttcatgctctcgtccgatgcgggtgaaggtgtagtgcaagatgtcctccacttcttccagcggcaacggccacgccggctgcggcgagatcacccgatcgcccatgcgccagaacgcgacttggtgggcggagaggaaatgttctatgatgccggcgacgacgcattctctttcagttggcggccgcgagagcgctgcggcgacgatggcgactttcttgaggtccagcattgtccggctcgtacctattgtggaggaggatcgcgttggggaggtcgaggtactggaagttgttgatgttgacgaggagggtggtttgtgcttgtgcttctctgccatccacggcgaggaagagccaggcgccgttgtacgaaccgatatagctgcgcgcg

SEQ ID NO: 18254 - DNA, 473 bp, Oryza sativa
  unsure (1)..(473): unsure at all n locations
agcttgcgatccagatgtatatcccttccttgttgtttgaacataaataaattatcattaggaacaagcatatcatcattgttattttgatataaacaacaatgtcagtactaacagcatcgaacgtagatggcatttgcacttcatggtccacatctgaatcaagggaatcaatctcatcctcttcttcctctggcacaggggagggaggattggcagggatgtagaccaccctcagcttgaactcctcgaccaccttgcctgcctctttactgaactacaaaccgcaacatttaacatttagtacatcactcataaatcaatcagcatctatgaactcgattgagactgcaggattntaccatgtcactgtgaatgttcttctgcgttgtgccatcctctaccacgacgctttggatgagaaacttgtccttgcaagtataatccgtanggatctctttcggcggttgcat

SEQ ID NO: 18255 - DNA, 464 bp, Oryza sativa
  unsure (1)..(464): unsure at all n locations
tatctanaagagntcgagttcaataacgatgcgacatgacatttatctatcaattaggcatangttattagttttcttttatctttaggaaagtgtgtgttgtgtccgataaagactctatcttttccttcttagatgctttcttgtccgacaaggactagtatctccctatgggtataaatatgtacaccacgggtcattgtaatttatcaatcaatcgatcaataatactctcggcgcatagccaccctcttccctgaggtttttacttatcttacggcggaacttgggcacctaacgcagggctgcatcggctttcgatctccagcgaaggggtaagtcctatgttctgtcgggccctggcgaagttgacgactacgttggcgttgttcaaggctgcatccattctatctcttggatcgctctgtgttggttgaataattgtctactgaatatcaaatatc

SEQ ID NO: 18256 - DNA, 444 bp, Oryza sativa
agccttggtatttcgtcgctgtctcgcatcccgcgtgtatgtatattatatatatcctccatccagaaatctaaaattgtttgatatgtttcaaactctaaatcttattggtaatcactatgtgctaaattaaattattgatcggaaaaaagaagtcattttagtacttatggattgcacgctcataagtcttttcatatggcggatgagttaattacttcctaatcttggtaataaaataaatacgtgttagacttttgaatagagagagtattgttactattctgtccaaaaataacaagtcaggtttgtacgtaggatcgaagtagttaggattgaactttttatagtacggagggtgtatttgcatgtagctcacatgcatgcacgtgcgaggcaggcccgtatctctcgagctaggacgccaggaatgtttaaatcgag

SEQ ID NO: 18257 - DNA, 400 bp, Oryza sativa
  unsure (1)..(400): unsure at all n locations
gctngcatcaaacacctaaattcctttgatttgctgagtacgaaagtactcacccttgctctatataaatatatatagttccttcgtcgtgaagttgaagatgaagtgaagtgaagaatatggtttcgtcctggtttccagacgtcgcctgtggtgttgggtgttagaccgttggttccgctgctgctgttgttgttggtgtttcctcgtgcgcgtcgtcggttgtattcttatgctattctgagctacaacctaagttaaggtaaataagtcttctttttatttttaaggattgcaatgattcatatttgtcaccgtgggtaccagcgctggactggtactgtgatcgcggtttcgtaggaagcggttctcgcctgtttttctacgacatgctcctatc

SEQ ID NO: 18258 - DNA, 416 bp, Oryza sativa
  unsure (1)..(416): unsure at all n locations
tgctntcttctcccactntctgaatattttgctatcaagtgtttgacagtgaataatatgacaataccatatntaaattgaaatactattattctttttcaactacaagcgtttcggctggttaagcattcccctttctactatgtgccaatgcatgttgcccggaatgattatgtgaaaaatctgcaaaactcatgaaattccagtggtctaaaggaagacacgaagcgttgtatacatcttatatgtcctgtcctgtgctgactgcataatcagntcatctatgatttgtctagcatcaggccatcagccatcctttntgagagtttactcatccaaatgctaatatttccggaattaaaatatttatgggggtcagattgacaaacagtacgtaatgacatttgctttaattt

SEQ ID NO: 18259 - DNA, 460 bp, Oryza sativa
  unsure (1)..(460): unsure at all n locations
agcttaatataatgtagatgtatatctttcatatccaaatatggntattattaatggatttgtcatcaatcaccaaaaagggggagattgtaagctcatgtgccttaatttggttttggtaattaatgacaaatctaattaattgagactaatgtctttatgagcttttctttggctagtctcatttggatatgaaaataaaattgatgagaggtatgtattaaacttcatatattctaacttggtctctcttgaggatccaaaatatagtgtgagctccgtcattgatcttgattgattatgtgcatatgcgttcctttatatccatatgtatgcatatcttaagggggagcttactttatattttgtttattataagatctctagcttgatttaaaattatcgttcatctcatctntctatattgttatatccagttattatctatcactaaagagag

SEQ ID NO: 18260 - DNA, 403 bp, Oryza sativa
  unsure (1)..(403): unsure at all n locations
ngagttgaattataagaggctctattgtactatattatactataattagggagatactagagtagagaaagtcggaggaattccggagttgtcggtaatcctcttcttatttcttttactatgttaattactctgctttaatcgaaatatcatctggagtaattaagaattattgtgtgagagttatctcttagttagttcctaatcaacgtacgggatcactgatcactataatccagtaaaacatagtggttgctctagtgtttagctaacgctaaagtagcttttaactgcgtagacgtggtgtctgggtagctaattatcgggagttgcttcgtatcccacagcatggttgaggtgggtgtagaggtggtgacagctctacatacactggagtctcctt

SEQ ID NO: 18261 - DNA, 471 bp, Oryza sativa
  unsure (1)..(471): unsure at all n locations
agctngagcaaagctcagacttagtttctttatctggctntgtcatcatatcagctgggttttcatgagtacttatcttgcataccttgacatcaccttcagcaatcacacctcgaataaagtgatatctcacatcaatgtactttgttctctcatggaacatctgatcctttgtaaggcatattgcactttgactatcacaaaatatattaatgcaagacgtaactccacaaagctcagtgtacaaacctctaagccaaatagcttctttacaagcttcagaaatagccatatactctgctatagtagtagataaggcaacagttgcttgcaaacttgccttccaactaacagcacatcctccaatagtgaaaacataacctgtgagtgatcttctcctatccaaatctccagcaaaatctgaatccacataaccaacaagtccatctctagatctcccaaactgcaaac

SEQ ID NO: 18262 - DNA, 396 bp, Oryza sativa
tgatacatatgttagactccagatccagaaggaactaaatctctacgggttgagaactctgtaacgcttgctcgacatagtgataccaacatgaatacgattgttattctgcaagaggtctaagcctgtaaacattttctgtgttgacttagctccggagcacgtccaagcataccaaggatcccaaaaccgcttctctaccgggatcgcttgcttcccatgttcgtcacattagtttgtttttccgacaaataataatatatatgttccataaaatgtcttacctataagttatactgcatagattattcatattaaatagattgtatatgtggcaatctattgctatttcattgattgtctaataataagtttaatgggtaatttgcacaactc

SEQ ID NO: 18263 - DNA, 262 bp, Oryza sativa
tgaattttctcatcattatgaacacattatctccatttacagacgaaactgctggcaaaggcacgctattctctatcaacatttgaaggggagcaaatcgtaatagcacacaggtatgctgcatacgacggatgtaccatagactagtcctccatgctccattgctaatatcaagtcatcttcaactcaccaatggtatctaggttctggcacacgaggataacattggctatgaacacatgggcaatcaaccaagaaagct

SEQ ID NO: 18264 - DNA, 329 bp, Oryza sativa
catacggaccttaaatctcagctgctgaggaacaacatgatgaaattgtgagttataattacttgaccgggtgtctgggcacccaccctcccatactctacctccgcccgcgaggggcactctcagtgaccggattgcctcccctgcaagaggcttccttccatcagtggctctgccttagcacgaagatagtcttgaatgatcggcgtcggggattcggcaccattgcgaccttggtagaatggacgatctgtaaagagaggaacaatcgggtgttctatcttcagcagcgacctgttactaccaaatttggtatatcagtatccgag

SEQ ID NO: 18265 - DNA, 329 bp, Oryza sativa
gtttcccgaggtcactgtgaggcgcagtcaaatcatgctagacgaaactatgtccatttgctcttggctttgtcaatttggccatatctagacataccaaaaaaatgcattagcattgagttcggggcagcgaatagttcaaattttgaaattttgaaatatatatagtatgcacaatgtgacaaattttgaatgccataaccgtatcgatgcaacgctacacacacatatattcttgtcttttgcttcaacagaaagattacaagcgagccacttataaccagtgttaaacccattcgaattgatcgtgcatcaccgaaataccgaaa

SEQ ID NO: 18266 - DNA, 344 bp, Oryza sativa
gccgcgctgctggaggaggactaccatatgctcaggggatatgcgcgagatcgccttcctgaaagatgagctgagcagcatgaacgcgctcctcgaggggctggccgacacggatgcgacgctcgatctcgagacgaatgagtggaggagccatgtgagggaaatgagctatgacatcgaggactgcattctacgagtacacgcgccatctccgccatgggcggccgcagaggcccggtggcaatggcatcatggggttcttcagtggctatgtgcagaatgtgaaggaccttgtctgtcggcatgagattgccgatcagattcaggagctcaatgctcggatt

SEQ ID NO: 18267 - DNA, 404 bp, Oryza sativa
  unsure (1)..(404): unsure at all n locations
agcttctcgacacatacgtgcgatcacacactaatgtgttctatgcatgaagctatgacattaactcgtgcacttaccgagcacgtcgccggcgtataacgtcttgacggtgagccaccaatcgaggttgcggtctcaccctgcggcgtctcccacgcagtacgctttgccgacagactcggcggcggggactgactgcatcagcagcgccgtctncgacatgcacacgagcaccacgccgccgccgccgattgcactgcctcttacacggcgagacttcgccaccggcattgtctagctcgctcaaatctcacgatattacaactgagatcaccaattgagctattagcaaaaatctgcaccgtgtgagagagtcttctgactcatgtggtggcgtatatata

SEQ ID NO: 18268 - DNA, 320 bp, Oryza sativa
ctataaaacctggagggaacctctttagttaaaacaaatctatgcaacgctatttgagatgacttgctctatagcaaaggacacatccggccactgtggattgacgccaacatgtggcctgttcatatattggtagggcaaatactgaatttgattgtttggtttgaagccaaacgaatggtaatgcctattgctgaattttatcataacataaaaatgagctatcaaatgggatcaatccacacacatcactataaatcctaccctactaaattattggtagtaccacaacatacgtaggtttaagcattacaatgttt

SEQ ID NO: 18269 - DNA, 469 bp, Oryza sativa
cttagagtcacctgccgcatgcaagcttagtacccgccattgtgatagcttactctattatctatgactgcaggaagagatgagtcttgagtgaagaattgcatgggtatttatagtgcttgaggccacatgcaacactagtttcgtgatagcatgcacgttagcttttttagttggcaactcccagtatgatataatatcaagttgaggcttatagaactgtagaaaaaagagctcatttacttcaagagatccttgctaatacatatccctgattaattacatatcaatgtagttaattgcagccacttgtattcctccctccatcttagagcaagtttaatagtatagccaactactagctgcaatctatccatagtcactcctataatgagcgcatacgatatgctcgtacacctgctttgatctatgatccctgatgcttacacacactgtgacctacaggcga

SEQ ID NO: 18270 - DNA, 414 bp, Oryza sativa
ggtgaaggctgtacgtgaggtacactggattgtgtttgatgaactaaatcttgcaccgtctgatgtcttggaagctttaaatctgctgttggatgacaacagggagctctttgtgccagagcttcaggagaccattcctgctcaccctaattttatgctctttgctactcacaatccacctgtgctctatgggggacgaaaaatattgtctcgggcgttccgcaacctgtttattgaagtgcatgttgatgaaatcccagaagatgagctaatcacaattttggagcagagatgttcaattgcctgcagttatgccacaccaatggttcatgttatgaaagatttactaacacatcgacaaaacagcagagtctttgctggcaaacattggttcattacaccaccggatatatt

SEQ ID NO: 18271 - DNA, 458 bp, Oryza sativa
ctgcagctaacagaagtattggaccagttttttttctattttccttcttacctctcttcctgcctccagtccaagatggatacagatggataggctgtaggatctcgatcgaatgacactaatcaatagactgaaatatgaactatttgtatccatccacttaaatttggggaatttccgttgaacgatgcatgaagtataattattttcctttccatatgctcgctccaaaccactcttcccgtagacaaaattaccatcgtaaaaagggatttcgccaaaacaccactctacatttaaaaaattgcatgtaaaaatattcgtgcggtatttacttaaattgatttaactaagtgcattttggtcaacaaagatgtgataaaatggagaatcgtgagacaatggcatttgtgtgaaaccttctgcattgagactggcataatggaaaatcttaatgt

SEQ ID NO: 18272 - DNA, 360 bp, Oryza sativa
tgacttgatttttttttgtgtgcacgctccatcatgtgttttaagaaaaaaataggcatcttataattgttgtcccttcttctgtgtgtatgcgcttaataatttcatcctgcacaaggcatctttgaggaatctaagatcaactagcaacagcaacaattagtctgctatatatcagacatagacactggctcttgtggatgaacaacaactagctagattaactgatagctagcacggatacaaaggacacacccagcagaggcctctactggaaacatgaatgcaacagctgctggtcatgaatagcctaagcatctcctagctatcattttgactcttgctgaccgatcctgcatt

SEQ ID NO: 18273 - DNA, 464 bp, Oryza sativa
  unsure (1)..(464): unsure at all n locations
agcttgcaaaacttcttatattaatttgtttatttatgaatacgtngncatatntctattntttaatgctttaggtcgnaggatgtcttttcactttcctatgccttttcaatatcaggtagctccacttgctatcacaaactttgaggactcaactcttgttgcttcgtgcacattcctgttggaactctgtggtctctgtgctaacatgcttcgtctagatattgctgcacttcaacgtatctcctcctactataagtcatttcagcacaataaacaatgtgatctatcttcaccgaggagtcctgngctacatgtactctcccatggagctgaccttgctcctactcttgcccgaacattagcagaagattatatccagtctgatcatcttcatgttttggagcagaagcagccctctaaggctgccaagagggaacattcatcacaacctcttaaagcta

SEQ ID NO: 18274 - DNA, 482 bp, Oryza sativa
  unsure (1)..(482): unsure at all n locations
taccggcacgggtntntctggcctactgcagagtccgatgctcgacaaaattgtgcgcacatgtgaaggttgccaatttttcgccagacaaattcatctaccagctcaagagttgcagactatcccgctgtcttggccgtttgcggattgtgggctcgacatggatggcccgtttaaaaaagcagtcggcggttacacacatctctttgtggccattgataaattctccaagtggattgaagctaaaccggttgtcacaattacagcagataatgcgcgagacttcttcatcaacattgtgcatcgatttggagtgcccaatcggatcatcactgataatggcacacaattcactggcgaagtttttaaagacttttgtgaagactttggaattatgatttgttatgcctcagtggcacaccccatgagcaatggacaggtggagcgagccaatggcatgatacttcaagggantaaagcac

SEQ ID NO: 18275 - DNA, 432 bp, Oryza sativa
  unsure (1)..(432): unsure at all n locations
agcttncagcttttagctggcagatcttattgcttcttattttctctttaattcatcaaggtatggatccacttgagcatcatacattgcatttgtcttgcctggatggagcttttcttgagttntaaatgttttaccaatctatcattgtttcgatggcatgcttctgcccctggttttgatgtttcttagaatcaagctcctgcaatttcatcagcactttctgcgttttttgacaaatacttgcttgttctgttcgagcaatggttctgaagaataaccacccaacagcttgctagcttggtgactgggattattgctggaaatactacataaaagatcaaaacagtttatctagttctgctctgggattattgatcgaccaagttattggaaacttatgccatgttatgaaattcttgatgaaatacc

SEQ ID NO: 18276 - DNA, 395 bp, Oryza sativa
  unsure (1)..(395): unsure at all n locations
gatcttaagcgacgcagcatgcacttgcttgagagaaagatagtgtgtttattaacctctctaaaccatctctacattttctctgatctagccattggaccaagagatactctatcattttcctcgttaaactatctcttgcgtaagttacttttaactagctaagacaacaattttttattatagacgttattagagacgtatagagtatttagttaacataccctcccttactattgagcttcctgtttacacctaaatttggtatctaggatagaaataggaaaagatcatcaaagtctggagttctgccggtntcctccagagagggccggtctgatcgccatgtgttggccggactgaccgcccatgtgtggccgggcagaccggcggtg

SEQ ID NO: 18277 - DNA, 317 bp, Oryza sativa
ccataaaactcagctaatctgttgagccaatcactatattgcatgctatacgagtggctggacactatatgacacagaggagactccctattggagtgacacatcagagacgatttgagaacctccaagagagaatactttaccagagaaagctcccaatctgttatgacagctataattaatcatccctatatagaaatgaatttttaaaaactatttggaaagtttatgggggttcatcatctctccttatactagtggctgctgcatgtcctactaccttttcctgtctaggctgctgcattaaatgcagccaa

SEQ ID NO: 18278 - DNA, 442 bp, Oryza sativa
agcttcgaagtcaacagatcctcagaacatatctctcaatccacttggggctgaagttcatgaaggaaatattatttcaatcacactagacaaattgtcggctgaacacaggcaggagcttgaacagatgatgagcagcgtgaaggacaagttaatgaactcattcaaagaaatccgccaacggacaattgtccagaaatacaagctgaaagtggttgctgctgatgaagtcggctcaagctcagctcaaggtggtaaaggtattgctggtgaaccaggcgacaaaggtagtggttttcaggtaggcatgtgtgaagatcttggcccagatagtagtggattacaaccacagtttaacaacttccaagatcgaattgactatgctgtgcaacatgctctgatcaatcaatctggagtcttagtcaatactttaaccaacatg

SEQ ID NO: 18279 - DNA, 443 bp, Oryza sativa
  unsure (1)..(443): unsure at all n locations
tgcgtgcatggcttgcaaggtgtnggtgtacgtcctacgatcatatatgttcggcgcgtggtcacgtgcatatgcgtgcatctatctcttgtgttctggatgtgcatgattctcttgatagaaggataacttgcaccatgtttactcggataggaagtatatataagaaccggcacctatgactttgggaaccattggtgtcggtttttacaataaactggtacggaagagtggttataggtattgattctaattttacactgganaaatgtgaaaaaagcttcatagccatggtgttttgtggtagtgatagtttggcgacagattccctatatatactttctgtccgagtaaacatggtgcaagntacgagtataactttattatcaattaacctatggttctaagtatgaactatgtggctcatgaatgctggaatctgg

SEQ ID NO: 18280 - DNA, 396 bp, Oryza sativa
tagtgtctaagaccctggttagttctaatcttattgccaaaaacatcacatcgaatttttagactcatacacggagtattaaatatagatcaatttaataactaattgtgcagttagggaagaaatcatgagacaaattcttttagcctaattaggccatgattagccgtaagtgtcacagtaatctacatatgctaatgacggattaattagtctcaaaagattcgtctcgcggtttccaggcaagttatgaaattagtctttttattcgtatccaagaactccttccgacttccggtcgtctgatgagatacccaaaaatttccttttcgcgaactatacaggccctaaacatcaaatgtgacattgaagatcaaatctatctgtgatccaaca

SEQ ID NO: 18281 - DNA, 380 bp, Oryza sativa
tcaggatcgacacaataaaacactgaatttcactaattaatataagctcaaaattctagttcaatgttaagtctatgtttttgcaaatagatccttgatatccaatatccatgaaaaacttgaggggctatcaaatatataaaatactcataacgtgtgttgaaaagagaaaattgatagtgacattcatttatatcgtacagcgaatctttgaaaatattgcaaagtgaactgattagttcatcactttctccaactcttctggatttatataatatttttgaattattcttttgtctaaattgaaagatacttctatcttttcatctttgggtgaagctataaatgactacaactggtcgatcttgccagatagctct

SEQ ID NO: 18282 - DNA, 463 bp, Oryza sativa
  unsure (1)..(463): unsure at all n locations
tatctgagccaacaatatagagaatgggatatntattgcatctaagtntctcattccagagatcctcccaaaaaaaagactaaggttcatgttctcaccgtactctgtgcaatccctttaaagatatcacctagggatataacatccttccaccagaaagagnctttgttcattcccaaatggggtggctctgtagtataataagagttccatatatgatacacctatgagaggtctgcactcctatagaatttggccaagtgctctatcaacaaggcaatgttttggattctcacgttaattatatctaacctacatttctcctttggcctacagactagctcccaagaatcaagtgactttctggtagaaatagcgttattacccctccatagtaaattctttcttgcagaccaatagccttgattcacagtataggcaactntatatagcacatatgtta

SEQ ID NO: 18283 - DNA, 438 bp, Oryza sativa
  unsure (1)..(438): unsure at all n locations
agctgctcctcagcgaatggacattctttctttccgaagcagncctatagcccgcgttgcaacagctccaactccagcgagtgcattaccacaaggtgtcaatgctcaatttcagcctcagccaccagttgacaagacagaggccagtatcggcattgtacctttggatgttccagcacagtagccaagaaatcaagtgcaagatgaagaacccaagccaatgggaatgagaaaagcatcaacgaaacctcaccagagctaatccaaattgtggttaaccaaaccaacatgttggcaacagcctttcaactattacagaattggaactacccagcacgggcaaccaacgttcaagtacctacagtccagcaacagtgcaagttatcagaatttctcaaaactgagactcaaccttttgcattgtcgtcgaacctatgg

SEQ ID NO: 18284 - DNA, 398 bp, Oryza sativa
tggtttacttgatctacttaccattttactttgattttctatctttattcaaattaatccaaaaacttgtgctattaattggataaatgtcttaactccctcctttcacttgtctttagatgccgcgctacaagcctgagtacttgtttggtgttgagggatttgtccaggagttacgtacgatgtcctttgtcattggatttgggactggccccttttatgctcagattcctcatgatcttcatgaagagaagtgccgagtcaaagtcaccttgaacagtaatagtgaagatatcccctcagtgatgttcgaagctggaggaagaaactacatccatgcatgtcaggaggtggcaaggatctgcataggagagcttatgtgatcagtcggccgacac

SEQ ID NO: 18285 - DNA, 148 bp, Oryza sativa
tgtgaaccacgaaccaaccttcatgcgccaaaaaactgcctatcttccattccaaaagaatggattcgttgaaaaaccatcgctaaaacaggcttcaattaaataccactcctaaccaccatgtattaactgaaatgccatcttggac

SEQ ID NO: 18286 - DNA, 437 bp, Oryza sativa
  unsure (1)..(437): unsure at all n locations
agctngacttggtgcgagaaggctgttnttttgatgtctgccctgctaaaccaaaggaagggtcttctttggcatatacccatggacaattcagggcatagtgtccttgttctctacaatcatgacaaatggggacatcctcttctggcattggaagctcattgacctatggggcaaatgctcgatcaaacacatactgatattggtcttgacttcgaaccaatggtagctgtgaactaaacagcatgcttggaatggaccaagggtctgcccttgttaactctcttgaggccagtggtggattgagttgaaaacttgagttactagaggcatacccgctgacattctttccttttctctataaacatctattacagggattgaggtgagagaggagactagccatgaaagaatagaccataactagagacaggtcc

SEQ ID NO: 18287 - DNA, 439 bp, Oryza sativa
tggtggcgactcctgtatgttattccatccactacctggtgcgccaactgtcaaaacaagaattcgtcaataataaaaggaggtagcgcacgagacctaaatgtggatggatgcggagacaaggatttagacaggttcaggccctctcgatgagaggtaataccctactcctatctggggattagaatccgccgggtgtattatagatccgacgatctggttgtgaattatgccccatagagggtctcctgcccaccttatataggacggtgggcaggattacaagatagaaaccttaaccaatatagtatcagtttcctaaatctactttacaatattatcaaatcaaaactataggctgttccataatatataagagaatgtaatacccaagtcatgatccggtacatatttcatagatataagttatcccctataa

SEQ ID NO: 18288 - DNA, 463 bp, Oryza sativa
  unsure (1)..(463): unsure at all n locations
agctaagagatattatgaaagtacctttttgataaatcaatatgtacatatacaacatttattttttgatagtaagccttaagccttataaagttattgatggacaaagtatcaaatacttcacttaattccatccaaaacatcaaatagaagtagttgtcaacaggtttattgcatggtctgttgtcacagctcgtgcttgtttggaattaatctcaattcattntcattatttaaattttaaaattatgaagtaatcactacttatttgttctcgtgtccgagtcttagtttagtattttccttaatttaacaatatgcaaatagtgagttgctaattgaacttatatagcttatagcccgcggatttccaatgacatatgtattttatttatcacatactagactattatatgggctttaaaagtgggccaaaacataacaacggccatatgcatgccat

SEQ ID NO: 18289 - DNA, 463 bp, Oryza sativa
  unsure (1)..(463): unsure at all n locations
gctcactctcagatgggctgtcaagcccaccaataaactggctctcacatttcacttggttcaaaatttctaacaaaaattgcttgtggaagaaaatccaaatccatgatttaaaagtctggccatctactgggcgtaaatgttctaatcctttcagaaatctgaatctgaactaattaataatccagtgtatcatgtaatgtcccttacatctctcttccttacagtacacanactacacatcaaccaacaccaatcggaggacagcgaaaacacaagaatcaattgaatcaatggcgtttttggtcaagctcatttctcctttgtctgcaaatgctgcagatcgatctcctcctctactgcatcttcaattcttcatgaacatcttcaactcttcaggtcatgaccaacacaggccggacgacatgactagaacaacggttgcgaacaagcttttccagca

SEQ ID NO: 18290 - DNA, 263 bp, Oryza sativa
gaccattctgcaggggccacaccatgaggcccaaaactcaacaagcacaggtatatcactgcagaccacatattcataccaagaacaagccgcaattgttttggctgcacacacaaacaaaacagagatgtaagagaactcctctatatctgaacgtacaaccaagcaacacacgagggtagatgtcacaacaactgctacactcaagcaactacaaaagatgctaaacataaccctgacactatccgctagctgagagaaca

SEQ ID NO: 18291 - DNA, 312 bp, Oryza sativa
gctgattagcgcgggaccagcacttgttatgcatttacctacaacgcagacatggcttgctgatgaactatgaagtcttacatgagacaaaagctggatatagaccaaatcatgcaaccttcctaagcatattgactgcttgcgcacatcacgcggacctaatattaaagctgttaccaatctcgccacatgcaagaatactggaacttggtcccaagatctgatcactactcctgcctggctgatctcttgtgaacatcatgatatattcaccagcctcataatgttaccaggagattcccatcagaccat

SEQ ID NO: 18292 - DNA, 359 bp, Oryza sativa
ggcccaaatccaacgtttatggaagttggcccattaccattactatgcatgtcatcagttcattttctttttcctcttcttctccctcactatctaaaccaaacttaagataagctagcatatataaaaaatagttaagataagctaatactccctctggtccatatataatatataagtcattttcgattttgtcataagtcaaacttctttacctttgatcggctataacatctgaatgggtttcattaaattcactagaaaatgtgtgctaacagcgcatttatatggtagtggaatcgtagtgttttttataactccataaaggtttatgaaggtgatacgataaactaaatact

SEQ ID NO: 18293 - DNA, 476 bp, Oryza sativa
  unsure (1)..(476): unsure at all n locations
taaccccttaatgaaatctcgtctaggctttcagaatatgaaanaaaaaaacttagactaacataacatccataagcgatggnggatattcatcgatcccgtggcgattgttgtttatcgatccggtagcgaggatgccggtaattgcagcgatgcgactgagcaatccgggcggccaactcggcgtcggtctggggacgatcttgccgccgctcgcccatgagccacgcccaccaccccaccggccgctcctcctcctcctcctcttcctcctcgcggnggcggcgaccccggtgattgcagcgattcgactgttcaataatccaagcaatccgggcggcgaactcggcgtcagtcttgggacgctctcgccgccgctcgcccatgggccacgcccaccaccccaccttctcaatgcgggcgttcacgaacgagcgcagcgcggcgtaagcggaggacaccacggatcccatcgc

SEQ ID NO: 18294 - DNA, 380 bp, Oryza sativa
gcttccattcttcacaatgggccataatgtttctctgagtgctcttcatcaacactctacattgcgttcttccatatgaccagtcacaagatcaccccggcgtaaatgctttctgcttgcttgcgcactgatttctgatgaacaccacagagaaagacttctgaggcaccgacagaaggctaaccgactcaatcttgtcaactgcttggaaggacaataggaaatggggagcagactcccgcgttgccaaaggacagatcgagccaaagggtctatttgcttagagaatttggtactaaccgaagtttctatgtcctaaattcacaaagttattgatcctgttcgaagttcaatttagaaagaaatataccaactattga

SEQ ID NO: 18295 - DNA, 466 bp, Oryza sativa
  unsure (1)..(466): unsure at all n locations
aagctccaggaggagggtatcaatnantgcaaagatataatacgttttaaactatatgccctggtttctggctctactataaaatgctgcttgctagggcgtcttattgtcaagctccttatgaaattaaagaaagcaaccattattcattcatggtctaatgatgtatgtcttccactattatttagccgatgatgatgacatactaatgcatgatgggaaacttaattaatacaagttaattaagacttgatctccaatctaaacatcctagtagagcttggtagtatttgagaacaagcttgcttaattggagggaataattggagtaagtntaaccactgagattgtgcaccttgcaatggttgaccattaaggatgataagtctaatatgatatacccaacaacttattacaagtggactatatgaatccttctgtaaacaaatgtatggctgcttattgt

SEQ ID NO: 18296 - DNA, 468 bp, Oryza sativa
  unsure (1)..(468): unsure at all n locations
gtcacctgcggcatgcaagcttcatgagagtcttcttcacttgttggntctagttgccagaagagtggcagatatgcctcccattctctcaaaatcgtggcactctttctcgctgcctgttttttcctgtaaaagcaacgttcagtgttagcgaaatgggaaatgaacgagtagtcggtgcttaactttccgaagtgaacttcacttacaacgtaagcctcaatcaagcccttcagctgcatctgcccggctggagcattcactctctgcatcttcacaatctccttgttaacctaaggaaacacaactaattgtcaattctttaccttgacaatgaccttcatacatgaacaatttactcatgctaagtgatgaaatatgcaacgaaagttattatagatgatatgattgtcatattatatcagaacatgtaggcctctctaatcatgattccctgtacttgcggag

SEQ ID NO: 18297 - DNA, 356 bp, Oryza sativa
  unsure (1)..(356): unsure at all n locations
taagcctactgcttatgcaataacacaattattgtataacctatacatggntgcccctagaagaggaaaatggcgggatgatacacatgacagatagctcataattttgtgacgaaatgtatataaccatatctggcaaactatcacacttgatgatggcgaactcagcatatcacgattaagaaccagctcatgacggaagtgaattggcttgaacagtatcatgcaatcatgactttcataactaaacctcttatggtgcagcatcattatctttgaaagtgagtgtatcttcactgattttttagccgtcaccaacccaacctgcgagatcaaagctcgacatattgtaattt

SEQ ID NO: 18298 - DNA, 441 bp, Oryza sativa
  unsure (1)..(441): unsure at all n locations
agcttggctcaccctgagatcgatgttanttttctttaatnggatcgcctctggtcaagcattgcaggttgggagagcaatcaaggcagatccagtgaggaatcgcggccgccttaccccggtggcgatgacgacgccggcgactactgcgatgagggcggcgtaagtggcgcacgccttccggcgggctcgcgacggcgtatgcgaggactgtggtgaagaatggcgtggtggcgcctacggcctgtttgaacgacacggggaggtaccggagcgagacttttccggcgaccactgaggcgcataacaccgccccgagcagcgccaccctggcgagctgccccctggagcggcgcggacgcgcatcccgcggcgcggcggcggactctgtggctgcggcgtatgagacgagggcgcatgcggacatgtggcatgcggtga

SEQ ID NO: 18299 - DNA, 67 bp, Oryza sativa
tcgcgcgccggagagtaccccatggcaccggcttcaccggcgaatccctctgctgtatccaccttct

SEQ ID NO: 18300 - DNA, 413 bp, Oryza sativa
agcttacttcaacaaggaagccttgttctttatttgagaaattataggtataaaatccacaatattagctagaagctcaaagtcgagaaaccccgttttttcaacttctcagaatattaagctcccgaaacaaacctttaatcatctgcgtgagcctcccagtgccaaatatcactctctcctgccaacgatggtctctcgtttggacatctagaacatcatattgatttgtgaagtttgcttaaaccgtacttgtcgctaatactgcccttaattgcaggtagatgaactaactacacttggctgtagcgtgtcgataatctcttcagatcaaagttggctgccccagttcactaacatacatccacgcacacatcaaaactagcgtctgactggaccagcaaccatctttt

SEQ ID NO: 18301 - DNA, 445 bp, Oryza sativa
  unsure (1)..(445): unsure at all n locations
ntgctgcattggttctagttagaacagagatctatatgaatattataaaggaggttgagacactgacatacacatcagcttccatgtcaagtttatgcattcttgatggaataatccatcgttcgaatgcgacgtggatcttttcctcctccttttttcgatgatgtgttcacaagctggacaaggactttactcggccgtacgcacacctgactgagacgttcaaatttattattcgaaaggccagttcaattttcttttgacgctatggaagtgatgacttctggtctctgcacatcgtaaactaccacaaagattatggtaacatctcggtctaattaacttgatcttgagtacttgaagtggagattccattacgcattcaacaattgataactcaagacatttatctcttgactctgactctacgtttatgcgtgagcat

SEQ ID NO: 18302 - DNA, 465 bp, Oryza sativa
  unsure (1)..(465): unsure at all n locations
agcttgntttaccaacaacattattatttattctggaactgcaaatacctaagatacttcaatcaagagtctcacttcaaattaacagcaaccagccaactaccggttgattgattggtgagctgccaatacctaaaatgtctacaggacaagagaaaataaatctcatgatggccagttggccaccagcagacatttgctttcatgtgcagtcatgttgatgaggagacaaaatcacaaaactatacaagaactgttcttttagcgtctaacctcagatngcaatgacctaatcagcagccagcatatataaaaaactcaacacaaccacctttgtaatatttgcaccaacacagtggtaaatgagagcatctgatgaaataaataatcccgacgaattctcatacaactgagtaatatgtaatgaaaatgcaatcagatagctgaattcagaactatttcaca

SEQ ID NO: 18303 - DNA, 325 bp, Oryza sativa
gatcttaagtcacctgcagctgcagcagcagagctagctcgttctttttttatcttgcctaacccatgctgcaggggctggtatgccaagctcacgaaccgttcatgaggggggaaggtgggggtatctgaatggcggtggtgtacggtccagaagcaggtaccgggtgtctactagtggccacagagcgcacgcgcattcaaatggtggaggaggaggcggagtagcaacaagctatggtccctgatactgtggtggatatggtgcaggttcaagctctagtcacacgagcacagcgattatctaggatatactgcggatgcta

SEQ ID NO: 18304 - DNA, 184 bp, Oryza sativa
agaatgttaccttaagtcagtcaagtgtcttcctacacatttatatctggtcctgtctatgtgatgataaaactggtgggtcgacctggttatctgtaccatcttataatacattattcataatgtgtacaccatacgagtcgcattggtgcaatcaaaaaaatggaactaacttagttcactg

SEQ ID NO: 18305 - DNA, 465 bp, Oryza sativa
  unsure (1)..(465): unsure at all n locations
agcttaagggaaggctggttattttcaatcttttntatttgcaagcattttgacaatctaagtgtgtgcattccgcgaccagagcaagacaagtctcaactcggccggnggtgaggagtgaacaatattattttatcaagatttgcacaactcccagagttggcctcaaagctggtttcccaaaccaaaccaattttctagactttcagagttttggttgtctccaaacaaccagtcacttttagggactccctgtcccgctgtctccctgacagccacttgccttccaaatatcgggtttcccaaaccttatcactttttcataaaactgggtaaaacgaanaactacgctaaggaatcacctcacatccgtccatgaccgtgagcacggttgttcgaacagtttgttaacctctgcagagggggtacactntacccacatgacattactaacccggatcaccc

SEQ ID NO: 18306 - DNA, 489 bp, Oryza sativa
  unsure (1)..(489): unsure at all n locations
gctccaccaaaatcaagagcgcaggctctcatcatatcctccattgattgattgactcgctcggnctgaccatcagtttgcgggtgatatgccgtgctgaaatttaaacgggtccccaattcttcctgcaatttctgccaaaactttgaggtgaactgactacctcggtcggatactatcttccttgggaccccatgcaaacacatgatccttgcgaggtacaattctgccagtctctttcccgtataggtggtatgtactggtataaagtgagccaccttggtgagtcgatccacgactacccagattgaatcgtgacccgatgatgtccggngcagtcctgttatatagtccattccaatctcctcccatttccattccgggatttgaagaggttggagtaaacctgctggtctntggtgctctgctttcactcgttggcacacatcgtagagtgcgacgaatacagctanttcccttctcatgctg

SEQ ID NO: 18307 - DNA, 376 bp, Oryza sativa
  unsure (1)..(376): unsure at all n locations
agcttgcggccaatgacaaggtcctaganaattatttgtcaagttagatggctttgcttctgcttttcaaaatcagctgagctntaataaaatgatagaaacccagctagctcagttggcatccttagtccctgcgatgaaagcaacgggacgagctccggaaccacttagcgaacacgatgaaaggggttagagagagagagagagagagggagatggaagagggcgaggacgccggccgaaggcggcggccatggcggggctcaccggcgcacagtgcggaatgggttccggcggcggaatccgacgggaaaggggtggacggggtggcccgcacgacggcgaatgcgacggcgtcgacggcacggctgggcgc

SEQ ID NO: 18308 - DNA, 442 bp, Oryza sativa
  unsure (1)..(442): unsure at all n locations
agcttcactttattctctntacaacacaaacctctgggttctatgtctctattatcttaggcctnggnccaccaacgattactccttttcctttagtagattcggcttgctccggccgaatcaacaccttcttgtcattgaaattaattgtattcaccggaaaaggatcatgatcaagcttcatcttggagccatcggagaacttcaatcgtccttcatctatggccaattgaacctgtcgccgaaacacattgcaatcattagtggaatgagaatgagaatcatgccatntacaataagctcgacgtttcaattcttcttgagatggtatgatatggcctttaggtaatctaatttggttttcttgttaaagataatcaaatatcttatcatacttggccacatcacaactatatttaacctcactttgtcgatctatgcg

SEQ ID NO: 18309 - DNA, 424 bp, Oryza sativa
agcttaagaatagaggggcccacatgtcattttgtttcctgtcctgaaaacgccataactgccacatactgccatgaggacccacctgtcagccccctgaccaaatgtggaggcctgctgggccagcccaagatcggtcgacccctggcagcgatgcctcagcttgggcctccacgtgtacgcttgtgatgcactcccaatgacggtggcagggaagtttccaacaattccaactgccataaccatcattggaggctatataaagggtgctcattctccactacaaagcaaactcaagcgagaagctttgatctttctctcaaggttagtttaatgctctagtgctaagcggagtggaatataatacttcttggagtcctcgaatcctcggaaggtctcgggtatggctctagtagcttttctt

SEQ ID NO: 18310 - DNA, 488 bp, Oryza sativa
gcgagcgaagatgatcaagtgctcccactctttctacgattcggttcttctcttttcctggtcggaacaattttcatagcttcgagaaaatgtgttagatatcaaaaccaagtcctcctcctcgaactgttcgagttgatcatcggacatggcattatataaaggaagaacagaagacttcgatgaagaagtaccatcattcatagatgtcagagaagagactaaagctctatacttagaaccaactttacgagtaagaatattcatctcatgtgttttaagttttgtgcaaagcgaatccaaagtcaaaagtgacatattaacagacttctgaatagatgtatacttcatctcccatatagacatgtctagaccattcacatagtgactagaaatctcagattgtggataattagcatcataagaagaatcaacagatctaagattatttcaaattttattaaactgagatagatatcatccaaagc

SEQ ID NO: 18311 - DNA, 406 bp, Oryza sativa
  unsure (1)..(406): unsure at all n locations
agctngcttggtgtgtagttatctgaacaaaccttattcaaaaattacgttgtaatattctaacttgaccggtaattgatcgagctagatacaaatatccaaaccccaaattgatgtcccaatacaggccttccaatcattagaccccatgataccaccgaactaattaaccaaaataatcaccagctcagcctaattaagttcggtggcgtcaaaatatggcagccaacatagatcagcaatataatagtggtactactagtagtatactcacgcgacgagccaaagccaaacggccaatcatgaggcggcgaaccgggccgcgccatgtgtgcgcggtcgatcgcttgtgcaacccaccaaaaccgcgccgttttcatctgngaattttttgccgtttctccgt

SEQ ID NO: 18312 - DNA, 480 bp, Oryza sativa
  unsure (1)..(480): unsure at all n locations
gaacatggccacataattaggtagtggcactagtgcttataaaattataagctaaacctcttattgctaaagctcttgggttcaagatctcacaatattctgggctcaagatctcataatattctctttattctttattgggtgctntcccaccgccgcggacttcagcatcttcaagggagtccgggtttttcccttttatttttttgagatgaactgatagagttggataaaaagtttgtccttgttaccatatgcttccttgtgactgaacaggaactagctcagtaaattgttttttttttcttctcagagttggaaatgagttccatctgtgttaagtgacccttgaattatgtactccttttgagtgttgattggattcgtgaatttgcattggttnttttaacctctataacgcgatatgccttaccagttaccactcagatcagtccttcagaattacttaatgaaatttca

SEQ ID NO: 18313 - DNA, 295 bp, Oryza sativa
tacctgcggaacgtgcatgacttggcatttcacgacaccatactataagatagctcatcgtaccgagcccacatagtcatccactacggactggcgtcgcctcctgaaaaaattccatggagtacgattagcttctgaaacccctaacgcagattgctctgtcggcggcatggcctgcggcacatgatacatcacgagactagcacgatagagtgagcaacaatgatgccactcatatcataccgatggcagtaaatcatacgctccttcgcaccagccctataacagccatata

SEQ ID NO: 18314 - DNA, 256 bp, Oryza sativa
gaaatgaatgacacgtatacaaccaacatgcttacttatttattgagcaagattaatagaccgcatggtataactctcgctggtgaatgatccattattacagtcatatacgttctgtcctaataacactggaattatttcttaatgataaccactaatagagattatgaagtgcatgtgccactagtttgatgtatttaacacataaagggaggagaacacgcctactttcctacaattttacacggctatctat

SEQ ID NO: 18315 - DNA, 467 bp, Oryza sativa
  unsure (1)..(467): unsure at all n locations
agcttatgaaggaaacaggctatactttcatgcttcatcgtttccaaaactcaagcgcttattaatatgggatgctccctgtctgaacaaagttgagattgaacaaggtgcaatgccaagactggttaagttaattctaagagaccttccaaaattgaagacgcttcctcatggcattgagcatcttagagtacttgaggagttagaggtccgagatacttcggaggagcttatagagaagcttcggcaaaaaggacaagacattggatgcaaagctcataagagtatcggccatatcaaaaggatcagtattcatgggacacgatagaatgtcaaggaaagtattggaagactgcagatcagcagctaacaagttacatcantgctgtaattttgggtcgccacaaaaaacctttggattacaccaaaacatcattacccttgtaatctaatttttcgtattatgc

SEQ ID NO: 18316 - DNA, 488 bp, Oryza sativa
  unsure (1)..(488): unsure at all n locations
atcacgcgacacatnanactcaagctntactatataagattaaaacaatnacatttgattaacctattatcaaaagactgctctctcagaaggatgtaacatatgcgacagttaatgatcaccctctaagagtgatctccaagactatatagagcgatcaatattctgaacatttgagccattacgctgtatccatatacgccatgctccatatatgatgtccacaaaacattgaagaactatatgagtagcgatactgctgcaacatgtttccaaaagactaggaggtaacccatgttatatacaacagagtccaacatgccagatccgccaaactaaattggcattggaataattgatgctaaaaagtctctcttctctatgcagaacatagaacattgagcgcgctcatgttatgttaccatcttcaggcatacattcgtttctattcaacattgctctttttgttgtctattaggagacaacac

SEQ ID NO: 18317 - DNA, 473 bp, Oryza sativa
  unsure (1)..(473): unsure at all n locations
agctnggttatggacatgaggctgatttgttatgggaagttagaatcggctcaaggagaacggagttgcaaaataatctaacagccgatgagtattataaccttatggccgatgagagagaagatctggttcaatcacggttgcgagcccttgctaaggttaccaaggataaagagcgagttgctcggcattacaataagaaagtggtgcccaaagatttttcggaaggtgaacttgtatggaagttgattttgccgattgggactcgggatagcataattggcaagtggtcgccgaaatgggaaggaccgttccaaatctatatagttgtgtctaagggagcttacatgttgcaaggactcgatggagaagtctatggaagagcactaaatggcaagtacttgaagagaattacccacgtgtttggttaacgcatgatcggctgatgctttgcgatacatgatagccaatgt

SEQ ID NO: 18318 - DNA, 471 bp, Oryza sativa
  unsure (1)..(471): unsure at all n locations
tcaacattacgaccgatctgagttgaaatacatcattgaattattcgtcgataggtcgctcctgcattcttcaatccatagggcatggtgatgtaacagtatgccccaaagggcgtaataaacgaggtcttcaagcagtcggattcttttactcagatttgatgacatcccgagtaacacgccaagaagctgactaactcgtatccggccgttgagtcaaccacctgttcaatgcgaggtaacccaaaagggtctttgggacaagatttgtaaaggtcggtataatcgacacacatgcgccattgccccgtctttttccgaaccaggactgggttagccagccagtcgggatgaaggacttccttaatgtagcctgctgctaacagcttgcgtaaatactacttgatcgcatcctttctgtcctgtgcaaaccgtgngagtcgtgctagtgggtttggcgtttctaacatg

SEQ ID NO: 18319 - DNA, 411 bp, Oryza sativa
gctacaaccatggcctgatctacttcaatacgcctgcggagtcacaacatagccaagaaaagagactcgatctgtgcaaaatgtgcactcttcaaggtaaccaaataaacgtgcatctcgtagagcatcaaaaacagcccgcacatgaccatgatgatgctctattgatctgctatatatgacaatgtcatcaaaaactaccaccacacatcttccaatgaaagcacgaaaaacctcattcatcaatctcatgaaagtactgggtgcactagtgagaccaaagggcatgactaaccactcataacgcccgaattagccataaaagctgttatccattcatcacctaacctcatgcgaatcgaggggcaaccactacacaaatcaatgttagagaacacaagtgaaccactc

SEQ ID NO: 18320 - DNA, 440 bp, Oryza sativa
  unsure (1)..(440): unsure at all n locations
tagaataccanagaccgaatatgcacttatatattataatctataacnttactggaatcggntgaggtatgcttttaacatgtgtagattatgattgattgaagaatgcaaaagttcatacgacttccacctgttctgctgcaggatgtttgatcaccatcatgcattcctgttggctctcgtatggattgcgtatttgtgtctgccctctgaaactaggaagcttaatgtactatttgagaagttggataatgaatcccatgatagtactatttgcactccggttaaacatagtgattataatggaattctttcataactagatctggcccattgctataagtataatttacacttgacattaatatcttgcagctaagtctgactgtgggacatgcctaatgtatctcctacactttattttgtttaccatgcatgtg

SEQ ID NO: 18321 - DNA, 441 bp, Oryza sativa
  unsure (1)..(441): unsure at all n locations
agctnttcctgttcagcccaatggccgattcttcttaagcgcacgacctctccccgagtatgagcggtgacgacggggagccaaacccacgccgtcgagctcgtactccaccgcccccttcacgccaaagtcctaggcgggagaaggcgctcgagagggccgaaggatccgcgacttcgacgcccacaagaagtggagaagggcggcgagatggggagcgtcgccttctcgtctacggcgacggcagcacgccccatggcgcgctccaagctgcgggcgcgctcctacgtcacccgcccgtcgcccatgacccggagtctccagcccaacgttggctggacgatgtggccaaattggtcatgactgcacggcagcgcctatatgctggtgggcggtcctccgccaccaaggccttctgtgctgctaccaccggctccgcgt

SEQ ID NO: 18322 - DNA, 423 bp, Oryza sativa
  unsure (1)..(423): unsure at all n locations
tggccacctgnccgacaagaaatctaatgatcaagtatcttatgatcgagaccataaattgtgcctcactaatcaccctggtgtgaagaccaaataaagcatgaatgatcaagtgcttttgcaattagaaatgctcttgcatgagtgacatatatgctnttctcacctgaattatgcatctaaaattcttaattacttgtctcatcctactatataatggctggctgtccaccgaataattttgttgagtgtcacggtcgagtatagccaaacgaaatattcatgtatacgcgtggtaaataagctcaaagtcttcatctgagacctaatatcatgcatggcataacaacaccatttggttctttagatagtaattcacttgttcttaacaaccatagaatcccctttgataccatgttatat

SEQ ID NO: 18323 - DNA, 438 bp, Oryza sativa
agcttcgacgacatacactagtttatgctgttgcagaggatggggaagagcaggaaccctcaatacgatgaaatgttcaacttcgacccaaagaccatcgattgtgaggactacttctacaggatccatatacccggagtgctcaagtacatcctcaagtaaaacacacatggatgatgatggattatatcatcatgtataacagctggatgaagaagacttaaagattgtactctggctctgctcctccctgttacaaatgccagcaatctacctaagtatgctgatactatcttgtatgggaatatgcatgcttgctcaaagaattaatctttaatatatgtcaactactagactaagtaatgcttgtatcggagaagaatcaccatatcttaatcaataataatacactgtgtgcttgcgcttgtgtcatgtact

SEQ ID NO: 18324 - DNA, 447 bp, Oryza sativa
  unsure (1)..(447): unsure at all n locations
tacactcaagttaccaactcctctntcccaggtcttaaagatccatgacccttcaaaattgctagcacagagcccttgctcccataaaccctccactgatagtagctgcatgagagaaggtcaatagtgtctgtcagcataatgagttctgacattaagaaggaagggctcttttgtggaagtaatgttaactaagtaatcaatgaacagcttacaaaccgttcatacgtatatacgacaccaaaataagcaaacaactttgcctagcaacaaattagatggactcaggtggtataaccctctctaactgtgtaacaagatcccttaattagataatgaagtcgatgatgctatacaagagaacaatgtttagaagggcacaagagaacagtgacatggaccacgtgaacaggaccggtccgtcccactgggtcaaccggaattact

SEQ ID NO: 18325 - DNA, 461 bp, Oryza sativa
  unsure (1)..(461): unsure at all n locations
aagctttgcctttctttaagataaactcctcttcactagctaagaggtgttcacacgaagcanaacatatcaaatactcctatctctcacaacgtagaataaggaaaaaaacactgtaaaaggtatggaatattcttaacttgttgcaaggaactgatcaaaagcataacctttttagccaaatgcatgatcatattgttgtccatttatactagtacaatcttaacaaacctgtaataaattttggacaaggaaaaaaatattatccatgaaatttgggtgttcattaccatgattgtgactntatgtcaacactgaaatcaaacttactaaattcaacattttctagatatatcgatctctttttagtataaaaaaatatagctacgtgcgtntataaggttgagcgtacgtatattgtgagcgcatacatgatatatatcatgtttcttaattaaaac

SEQ ID NO: 18326 - DNA, 451 bp, Oryza sativa
  unsure (1)..(451): unsure at all n locations
tgtgacttaaccgaaagtactatgctcacggtgctnngtttataccataaagaactttgtccaacatacatatataatgtggaaaagcgtctgtttcataacactggtgagtgccgcatgtagacctcttcctccataactccatgaaggaaagcattctgcacatccagatggcgttgactccatcctttatacactgccatagattgaacaagaccaatggtggccgtcttgaccaccggactaaaggtgtcctcatagtcaattccatatctttgctataactctttgcaactaagcgagcctcgtatctatctattgagccatctgtcttttctttatctagatacacactacagtcaaaattattttccactagtgagggagcaagtgccattcttgtctttgtaagcataaatcatagtctatgatctttcatattagttactca

SEQ ID NO: 18327 - DNA, 364 bp, Oryza sativa
  unsure (1)..(364): unsure at all n locations
agcatgganatacacaacaaggcaggaatcttatggcatacagctaagactanggccactacaactgagctagaagtacatgcttctttcagcatctgatcactcgcttcaaagttcagtctggaaactagagctaactaaatgagacgcatgatccatcacgagaagaaaaggaagtacttaccatcaacctctatgcccttgggaacaaaacgaactgatccacgaccaatgatgacataccctgcagtgatttctttgactggagaaccaactataccataccgtacctttagttttccctgatcaaatcatgataggaatagattaatgccggcaatcctctattatagcatatttcgca

SEQ ID NO: 18328 - DNA, 412 bp, Oryza sativa
ctaagctctaacccctgagaggtcagcttgctcaataaaaatactttattgttgcacatggaccatggcgctagcaacaataatagaaatgacaagccctaattatatgagcatgtgtcgtgatacggcgaatactctaataatgatatatattactctcgttgcctcatatatctttaatgaccatatttgcatcgccatgcccgcgatcgatatgcgtctcagtcataacacatagaagacaataatactattgtgtctatcgcaatatatagcaatattagcatattggtgagaccacgacactgtaaaagcttatgaaataggtatactccatgtatgcttaatattggacatggtggggtctttatagacttgtgactaacttattacgactaccaaccgcatctcg

SEQ ID NO: 18329 - DNA, 469 bp, Oryza sativa
  unsure (1)..(469): unsure at all n locations
atccttaagtcacctgcggcatgcaagcttcactntcatcctcttctatgccaatgtgttgatcattcagcttgctcaattccatgatctattcgctaggcccgcaagatacaataatctggataaatggtcaatgcaaaatttaattttccatcaaaatcaaattgtaagcatgaatgcaagaccagtcagacactggtgtgtgaatctcctgctgcacagccactttntccgtgaaagaaaagcatgaccaatgtttatttgaaccacatccagtgtcgcagtgtaagctaataaaagtaataatgccttgcctgtacggacgatgaatgtcatatacatcatgaccattgttgagaccaatagatctgctaataccatcatgtctttagcctcatgtttgtcaaatgcaagccatgattaattaataccatcatcaatatttgcatgtataacaccgctgtctttg

SEQ ID NO: 18330 - DNA, 470 bp, Oryza sativa
  unsure (1)..(470): unsure at all n locations
atggacagtangttctccgattatatctcagcaccatgtgtacacgatgatggtgatggttgcaattaacctgattaactctaatcactgagataatgcgcacggctgttcacttcatcctgtctttttttgagttgattaaagaatgggttgcagaagatgctagggactcgatatatactacctccctactctagttgattaacaaattcacatttagatcacttgcatatatatatagtttgatcgatgtgatgcagtactgatcttggcagaacaatccaatgagtatggctacctttctacagtgcatgtacttttctctgtcttcagatttcaggtatcttcactagtagtaactttggagtgaaacttaccatttggaacaacgcactctgaatcatgcagcttcccaggaatcatgcatgctcataaatgcgatccaatatcttctcttgttttacagacta

SEQ ID NO: 18331 - DNA, 458 bp, Oryza sativa
agcttcatcatgtctgcacacagagtagagtattgttttttatgaacgtaaatgatacgatggccgcttctggaagctttccaacaccaactagcacgctattgaactgttcgggcatgttggttggcatgtgacctcacccgcggacatttttatcgtatgcgcgagaccacttatctttatgcaacaactcatcttctagccatttacgacgaccttaaggaatactctgtcttaatgcctcaacatccctctcaaatatacacttctcgtcaatctgacatatccttaggagctcttccgtctgatgctatgccgcaccggccttgtggatattagcactgaagagcctcatgcactcaccggtggtgaaccgatggcattctgttacatgagtcacatggatgtattataccacctgtcgacggaatataagacgtcctatgtgccaacacacc

SEQ ID NO: 18332 - DNA, 341 bp, Oryza sativa
  unsure (1)..(341): unsure at all n locations
ttccatacgtatcgattactgcgactataatcatactatgtgacatatctcgctctctaagcgaccaataatcatgcgggccgcctgaagagttccacacatttctatatgaacctattccatagccacctcagattgatcatcatcttcgcccaacaacatgacatcatttatatattggcgaagtttatcttcatctactcatgagtactttaacgcttgccaccaaattattcaatcaatcttatgtgtgggatctattcaatgtccaatcaatggaattatccatcctctgctgtttnctggcgcaaatgtgcgaattgacaataagcctgtcttta

SEQ ID NO: 18333 - DNA, 435 bp, Oryza sativa
  unsure (1)..(435): unsure at all n locations
agctngacgcaacccctacctggcgcaccatttgtctaaacaagatntcggcaatacaaaaagggggtggctatcaagcaggaaaagtggatgggttcggagacaatgaattttatacaggttcaggccttctaatgtgaagtaataccctactcctgtccggggattgattcgccgagtgtgttatagatagtatgatctgggagaaaagatatgccccaagaggcacccggacccctccttatatagtgggaggaatccgtattacaaggtacagcccatattcctaacggaataggcaaataaagaataaatacaatcgtaaccgactagaaccccatgtatttccttgatacacaagtaaggaatttaacccgagtcccttatagggattatatctgtatatgggacccctatacctagtcggatatacat

SEQ ID NO: 18334 - DNA, 502 bp, Oryza sativa
  unsure (1)..(502): unsure at all n locations
tgttagcactcctattgcacctcattntaaattatcagttatacaatgtgctattactgatgaggatgtagaatacatgtctagagtttcatattctagtgctgttggttctttgatgtatgccatggtttgctccctgccagatttatctcatgctatgagtttggttagtagatacatggctaatcctggtaaagaacataggaaagctattcagtggattttcaggtacctcagaggcacagctgatgcttgcttgaagtttggcaggactgataaggggcttgttggatatgtggattcccattggtagttgtgctatgagatggaaggcaacattgcagcctgttgttgtccagtctaccactgaagcagaatacatggctattgctgaagcatgaaaagaatctagtttgctgaaaggattgtttgctgatgcttgtggagttgattcttgcattaacttgttntgtgacagtcaaagtgctatatgcctcaccaa

SEQ ID NO: 18335 - DNA, 454 bp, Oryza sativa
agcttaagagtaagcaatccaacgcataaatatttttattaacattatcaaaaacaaaaatgaacccatgataccatgctaatgcccagttcaagagagtatcatgatggtaataaaacatagaacatgggcttttagctctatcacatttgcattttattccttttcggatttttgaagaaaactatagcacaatcgcgatggtacgcctaatcttatcagtcagcgagtgatgagggcgccaaacagtgtcatcaaatctcaaacaagttttccagttagagctcctgctacaggtagtctcagtgctatcttcagcactacttatgcgtaaacacactcagtagcctgtgacaaaagcagtggtaaaacacataaagcatagaaagaacataattgatgcacccatgaacaatcaagcgtgagcattctaaacgatgtgccgaaagctatt

SEQ ID NO: 18336 - DNA, 506 bp, Oryza sativa
  unsure (1)..(506): unsure at all n locations
ngatgaatatcatattgtcacanatagcatacacatcaccaagtaatatttcctacccatctcttctcaaatcatccaaatggcacctagttgatttgacacacttaacagcattcacaatatcttgatctttcctttgcaacgctaatgacagggtgttagtgataattaatatagttgacataagatgcaaatagaagacaaactcaaaagattggaaatacactagaagaccatttgcttgatctctatttgttctatctttgtcatctttttccacaaattctagcactctgactattgttgggaacatgtcaagcaaactnttgagagttntgtagtgagaactccaacgagtatctcctggtctttgaaggcattgctcttgattaacccagttccagtatgaagcatcccacaacctaatgccttgcatattnngtcataatataattctctaatcatgtctcttctcttagatgatccacccaccacattcaacaaag

SEQ ID NO: 18337 - DNA, 446 bp, Oryza sativa
  unsure (1)..(446): unsure at all n locations
agctanatggatgcttgggggaatttaattttatagcanaataacatgatgtaaaatccataaatagaatggaattaacactaaacactgctagatctaggtcaatatagtgatcatcagtatgcattataataaataaaagattccagttttgacgccaaagggatccattgccccccttagcgaatacatcatgatgcaatgtctcaaaaagtccaagataaatagaaggtgaagaacatataaagaagtctaacatgcagaacctcaaccaaattttcaatatacaaaaaatatataagcattcacatggtaccggtcatcatgtggttcctgtaccacttgtctggtttatattcaacataacaaaatgaatactaaattaaatcattgcatctttaacaacctttttgtgtggaatatttcaaactagtgtcatgttggat

SEQ ID NO: 18338 - DNA, 299 bp, Oryza sativa
atacggaccatcaaactcagctctatcaaatcgctacttgaatatatttcctatttgttaacaggggaacattctaatagggaacatccccacaaccacacaactgcctttattagactctgaatagcttcccagctgtcgatctggtctacgagaagactggggccttaaagaccttccatgcttattgtacacccatattggttctttctacttcgctggtttagtcctgaattgagaagaagttgacaaagtggtttttaaaaaagtgggagtatgtgtagaaattttgatataat

SEQ ID NO: 18339 - DNA, 402 bp, Oryza sativa
  unsure (1)..(402): unsure at all n locations
agcttgacctactctatgataatttcttctctgctcttgaaaaaacacgtacgtcatcgtgaattatcgccaaacacgtatatatatcatggcatagtaccaacaatagataatgtaaatatgtcttttcttaatggctcttagtttcctttttaatttgtgataaccatggcttacttgtaagagtgccaatacgtatgcaagcgatggtgctagaatttgttagatcgtattcataattattcgtacggtaaaagtacatgagagactacatgttgccatctatactgatatatttacaatttggtccttttcgaaaacttatattacaaatagacccctggaaaaatatataccggaaatggtcctttttggggcgcaatanattctaatatacttcat

SEQ ID NO: 18340 - DNA, 462 bp, Oryza sativa
  unsure (1)..(462): unsure at all n locations
gatgatcaactagcgatggagaatgtatatataatcttcgttggatacagacacagcagngaaacatattgtatggtgtatttcaacagagactatgcaatatacaagggcatataagataatgacccaataaagtatacatgcaagtcttatgtttcatacaatatgatgaataccttgtgccatacatagtacacaaacagactgatcccatccaatggcgaagcatatattgaggcatctaaggaatatatatatccaagtcgttggacgtctcttatgcatctcagacattaaaccctggcggaggatgcatgcatatggacatttaacggggatcagagtctactctcttcatctttgtcatggaagaccaccataaatgttaatatgcacgtgcgcagagcgctaatcaatgcagattcacgtgcgctatcaccatggatgaagccgtcatgccga

SEQ ID NO: 18341 - DNA, 228 bp, Oryza sativa
atccttaagtcacctgcagctgcaagcttggaggcaggactatcgttttttttgaacacaacttccacaatgcgttggtgcaccttctgtcatgttggaggcgccattcaattccttctcaaggatggtactatcattggcgcacgtcaactatgcgtctccaaccatttctcatacaatagctgttatatgtatgagtgggaggtctactgaatcgaaaataactat

SEQ ID NO: 18342 - DNA, 383 bp, Oryza sativa
tatgttgcctatggtcagctacattacaatttataaaatgttattacattagagggtggaccatgcgactaacaagtaacaaccatgccgaatcgcgtgtatggctgtctgaagctaaacccttatacgaacaccaacacaaggcctgacaaacaattgagtgcactatacaacgtacacttggcagatattattagtgtattgctcagaaaaagacttgtcggctcatgcttcgcactgcacgaggatctcgagtgactcatggataagaactcttaacgtcagtttgtctgaccctcgtgcgagacttcacgtatatattagctcctcacacgattaccgcgatgaccaatagaggactctgtcttctctgaccgagcttc

SEQ ID NO: 18343 - DNA, 344 bp, Oryza sativa
  unsure (1)..(344): unsure at all n locations
agccctccccttctttgtgatgtgaagaatatttgtttatccataagcccactgaaaacacacacacggcaaaaaggatgagctgtcacatacaaattaacagacacacgcacagcacacacgctagagatgcgtatgtagctctatccatatttcattccaaatgttagaaaaaagaaaagaaactccttacaagtaaaaaaggagaagagaaaggcttacgacctgtgtccgcatgcctcaantttttttcaatgatagaatcgagatgaatccaccctctatatatgaagaaatacctaaaacaaatacactcgcgtgctatgcgcgaaggctatatatct

SEQ ID NO: 18344 - DNA, 353 bp, Oryza sativa
  unsure (1)..(353): unsure at all n locations
ngcaacgangccgacagtatcccattcatagctagtgcgcttattagtttataccgcctcccgtcacccataacacgtaggtcaataccgacatatgctgactgagtctcaggcactgtaaaattctgctatcagagtaacatatcacaataatagttatggacatttaactttgtaccactattaagatgtggcaaataattattagccactcgctgtttatgacatgtgggtcctcatatgtctatgacatgtgggtccagtggcaaattatttatcaccatctgtgagagtgacgaataattaatttattctaatagttatgacatggaaataaaatatatatcaacaca

SEQ ID NO: 18345 - DNA, 389 bp, Oryza sativa
agcttcactaaagataacccatgtgcacctatcttacgcttggaaatgaaggaatgggttgcaccacaatcaaacaatattactgccggtgtcgagttgacggggaatgtgcccaatataacttctggtgctgactgcgcctcctctgcagatgcatgattaacacgggcctgaacgaacttgtgtccagcacgtcttggcttctggcactttccaaccgtgtgtccgggtttgttacaattgaagcagagttcgggtctttctcccaacctcttgggctgttctggcagagctggttgaactgattgagctggaatctttattgaactctgagtatggttgagactgtgctgctcactgatgttgtgactgccactatggtggttctt

SEQ ID NO: 18346 - DNA, 432 bp, Oryza sativa
  unsure (1)..(432): unsure at all n locations
tgacatcatatttaactcattcatgtctatcaatatatatgattatctacaactcatcaattgtatagatcagtaatactcccttccttttttaacgacgttggtcgttagttcaaagatgagtttaccaacataaaaaaaaccggagggaatatgtaatatatccactactagaaaaagcattttcgcagacttggtttttntccaaacagatatgaccctcggagctaaatggccgcctactaaaatgtagaccggagtgaagctcgccgttcgcctgtgaagatcaatatttccaggcgaaccacttaagaggtccgcctagataactatgaattttgcaggcggaaccttatgttgtccgcttgaataatatgccacaaaaaaaatctaagctcatcttatatctccttcgcattctatctctcacca

SEQ ID NO: 18347 - DNA, 447 bp, Oryza sativa
  unsure (1)..(447): unsure at all n locations
ncaagcttgtacaatagttctattgtattattatagtgcatatggtgttaagacagtgtgaaatgactagtactgaatttagatcctccactatatattatccaactagtagtttagaactacatganattaaacatattaggctgtgggttataaaaaaaaaatcaccccttcccatttctaatacccaacctcaaaatcctgggtatgccccacctctaacccactaaccacatgcgtatggtgccggacggtggtcaccacacgcacgcccagtcccagccctgtgatcgaatcaactatggttgtgatttgtgcatgtgaacaacttggtagattaatgttaaatgttgttgcattgtagaattgtacgacttgatgaatatttggtttatattttggcacactcgatggtgatgagttgcattggatgacaatgaactgctc

SEQ ID NO: 18348 - DNA, 421 bp, Oryza sativa
  unsure (1)..(421): unsure at all n locations
ntgccatcgaaaagttgaacagaanacatgtactactagaatgagcagcacgtttccttcttaatatacgtatgtccccgccggatacgtttcctaccgtaacgtagatttccaataaaagccttgattaatttgccttgctgttgttgttatgtccgcgtcagggggctcgctatcacctgaacaaatccgttgtcgcccacaattccacgtacgtacgccgtgctagcttttccatgtagtacgatagacctcgccaccctttgatggtcatctccaaaccactcccaaaatacaaataatgaaataatcactcacgcagcatgtcgtccggccgggacgtcgtcgccgtcgtacggccaaagcgcaaagccacaggggcagcgacaaacaaagggtagctagccacgcgatcaataca

SEQ ID NO: 18349 - DNA, 470 bp, Oryza sativa
  unsure (1)..(470): unsure at all n locations
agcttggtgggtctgaagataatgaaagctttatcgtgcccatcactctataacgaatgacacctgaanaaaagaaggatctcgatgcaatgatgcagcaaacacagaaccaattcttgaactcattcatgcagactcgccaaggaacaattgttcagaggtacaagatgaagttagtggcagatatttctgggacaagttcttccaaggatggaggagtgcaacagatctcaaatggtacagctcaatcaagtgataaaggtgttgcagatggctcaagtgacaaaggtagcggttctcaaggggctcaaggtgatggttctcaaggaatacagggtgaggatcttaacctatatggcagtgcagcacagatacagtttaacaacttccaagatcggatcgactatgccgtgcaacatgctttaattaatcaatctggggtgctagtcaatactttgtcaaacatggtg

SEQ ID NO: 18350 - DNA, 394 bp, Oryza sativa
ttttgaacttattcaatccggtcaaaaatatctcacccgtggtgtctcaacatatgccaatattggtaataattgacaaaagtacccgcgcgattcacgaagtgagtttttgccacgaacgcacccaatacactccaatatgtccaaaattcatgttttggcgcttcttgaacttttttattccggtcagaaacatcgcacccgtggggctcaatatatgccaatattagcattaatggacaaaagtacccgcgcgaatcacgaagtgtgtttttgtccgaacgcacccaatacactccaatatgtccaaaattcatgtttggatgctttttgaacttatttaatccgggcaaaatatcgcacccggcgggctcacatatgccatattggatta

SEQ ID NO: 18351 - DNA, 460 bp, Oryza sativa
  unsure (1)..(460): unsure at all n locations
agctacgagnnnctttacttgcattatctgtcgttactatacagcaacgaagatataatattggaatgatgatattacgttgcatttctttcttcttatgtgctatatatattggaaaccttcatagctattgaacacagtacactcagacttgtacaaatgtaacaccatgatgacatgatcagtggcagaaatgatgttcataacggtattatatattgacagaattatatcccatatggactctaacaagatgtattgttccgcataaattcataatgatgctctctcttatagtctaagagtaataggaatacaaagcaaatacattatggcaggaataatcatatatacctagtatctgcttgaattcaaaattcttggcttcagatatgtgttattaatttattatcaacagcttcaattacacttctttctcaagaacctatgaccataacat

SEQ ID NO: 18352 - DNA, 497 bp, Oryza sativa
  unsure (1)..(497): unsure at all n locations
gcttaacatgcanagatgccacatcatcatccactaattaacatatatgccacattattattcactaccaatcatcacatctaaatatcatgcaaacatgtaatatctttatagtttttataattcaagagctttcaaatacaaacatgtgtaattatcatccaacataatttacataatgttccaatatatatctttattatgttcaatgaaatcctatatagctttatagttcatcctcatttagctagtgcttaaatgattaatctatggtccaaattatctttatcatttcttcctctaattaagccatatcacatcaattgtttttagcctttagatgattaatctactttccaaaccatctccttatttttcttcttccacaaagtcataccaccttactctttaccgttgaatcaccattgtacatactatttatatgtaagattatcattaaccacactatacttacttaatctcgatgtatctagcta

SEQ ID NO: 18353 - DNA, 452 bp, Oryza sativa
  unsure (1)..(452): unsure at all n locations
gagcttcgngcagcaaagagcgagaaggtcatttcttagtcgncgctccgcgaaggtcaagaagagtttttctggagttacctaaacccaatctttcccggaagagtagttaccgtagctcttacatcgagcgttgtttgcttgtgtgtacgggtatggattgcatcattggtggggatgcgaccatactaggttgtttgcttaagcaacttgaatcataaaaatccattaacaacagatcagtaggcaatcgggttaagaccttatctttagtaacccctctgatctgcccctccctctattgtgcccgtagcaattggtcagcatgaaggatagctgcattgtgtcaagatctcaacagtttcatggatcaactcggtgcaatcctatgggcattacacgtcaacttcatgaagatcagatttgaccgtaagtcatggctaatcatactc

SEQ ID NO: 18354 - DNA, 335 bp, Oryza sativa
  unsure (1)..(335): unsure at all n locations
agcccgcngccccctgtgccaaagcgagtatattgatttcatttactccccacatctggacgggtgttcttgcagccttaagtgcttctcttcagctcatgaatctctatttatcacaagtagaatgcggcaacaacattagtctgagcttaccagtcaaaaaaaaaacacacataatcatgagctagcacctcctttgagattacatgttctgaagaggcgtatggattccacatcaatgagaataagtattctctatgcaaatatattggacgatgggaggacaaaacttagctctcccaacatcagagatatttgactggagggagtatttg

SEQ ID NO: 18355 - DNA, 396 bp, Oryza sativa
agcttgcacaagcatacgtatactgagtgtttgtttaacccacaatgcccccatgataaatatgagatatgctataaggaatgctagaaccaaaagagaactgaactgctctccatatgaacctctcgaaacggcaatgcatagaaagatggtgaatagactctctgatcatacagaaagaacatctatagctgccattacaagtccgctctgcgaattatccttagtcaacacaactgctttaagcaaggtccacatgagagacttaatcttacgtggcatcttacgctggcgaatgcgcattataccttttaacatagccattattacttaacagcggggtgtattgaccttaccgagaacataccattactatgaagatttcatgtacagctg

SEQ ID NO: 18356 - DNA, 361 bp, Oryza sativa
cactcagctctggtggcctctgcgtgggccggctgtcgccttgaccagcccttgtcgaatggggcgtgcggtggctttgcggttgaccggtggagtcgtgctcaccttagcggtgaggatgagaccggcgagctttcaaacctcagcgaataatatgttgtctcatcgtctcatttgatagctcgcatttacatgctgcgcaatatacatatgtagagacattctcgagatcatatcaccctaagatcgctgcacattgacctaggagtgtgatttactttcgtagagatgtaagtgagccactatcaccctaggattgccatatagcacttacttgcttagcttgagatgaccctcacca

SEQ ID NO: 18357 - DNA, 468 bp, Oryza sativa
  unsure (1)..(468): unsure at all n locations
agctntatcttaagaccatgtcagacaggcattatttttacattntnntatcactgcataagctttgatggataagggaaatctacccaaataaaattatattgtctgactatcatgagttcttcctctccaggctttgcggatgatgacagtccttacggaaaacaagatgagaagggcacatattatcttgagttntcaaggcccctaagaacaatggatcgattacagcaggtagttatctactattgtttcaattctttccaatattccatgagcaccagcatgcctagagacatgtgcataaatgcatatatgaagttaccaacaaatagttatacattatatttctaatgtaccgacagctaggtctgcaattctccagtattgcaactgtgattgtgtctaaataacattgccatagtagggtggccatnctgctcatcctcttcttactaagacgcgtgc

SEQ ID NO: 18358 - DNA, 268 bp, Oryza sativa
actggtctgcctgaagggacagtgtattggttgtcatctgcatgctctattatttctaacacataacaaactccagtgcttataaacataaacttcatcattcaatatttgtccaaaaatacaaacgttgatgttacctttatgtatacatgcacctttggaaacaggctgaaactaaagttaattactctagttgtgcacaacctgaaacatcttaatcttctgtcactcctgtgaagtaattgtatccttacaaaattgactttaa

SEQ ID NO: 18359 - DNA, 414 bp, Oryza sativa
  unsure (1)..(414): unsure at all n locations
agcttgaaagggagcagcatgcaacgtctctattatnctcgcttacgccttccctgtaaaatattagtacagctgattagcactgcattcctaagtacagagtaccatgtaaaatttctgcgaaacgtgcatgactcgtcatttcacgacaccatactagatgatagcttagcttaccgagcccacatagtcatccataagggactggcgtcgcctcttgatagaattcgatggagtattttcaccttctgaaacccttaacgcacatcgctttgtcggtgtcatgttctgctacagaagatactttatgagattagcaagatagattgatacaaaatgtatgccactcatatcataaggatggcataatatcaaatgtcccttcgcaccagctctataaaagtcatatatcca

SEQ ID NO: 18360 - DNA, 471 bp, Oryza sativa
tcacaccttccttgctcacacggtcttgttgttgccggttattgtggcatatctcccaatgcgtacgtcgtacattatatcaggaaagaagcaatctttcatacatggagtgaggagatatatgggttccggatctcaggatcttacacaacgttgagtgcccaagttctttatattccatatccatctaagttaaagcgtgaataatgggtcgacggcccaacctagacgcatcagtagatgattatggatgagtcaagaagcacggtgggaggactatacgctgcagcaagtgtgagctgcgcggccatacttactagaaatgtccgaagaatgcagaagtttcaagcggcgcagatgctaattctattggacaggctagtgatggtatgcgaccacctggtgaaggaacaacaaacaggcgcgcatagccaaggcgtttctcgcagcaggcgtatcatggtgtacaat

SEQ ID NO: 18361 - DNA, 411 bp, Oryza sativa
  unsure (1)..(411): unsure at all n locations
agtcagagccgatgctttactctgcacgtgctgctcgtcgcgattgctgctcgtcaaatcggagacgatcagtcgactccttgtcggcgtttgatgcgaagccaaatctcgctaaacaattgacgacgatgatgaatacggccggcggcccggatgggcctatntggtatgggattggtccaaatctaanatttagttctagagttatgtttggataaagccgtagagcaatttaaatccaactctatctttctttctagtttattctgtgaaattatattactccagtttcgttttattctacgcggacgtgaaactgtttagttaggctctaactctattagaggtggagctgacnatgtgccaaatagacccttagtatatccatctctaaaggtctaataccattta

SEQ ID NO: 18362 - DNA, 483 bp, Oryza sativa
  unsure (1)..(483): unsure at all n locations
tggaggtatagttctattagtggatgatatatcttatgggctataactaagtatattaattaattagttggtgtgtgatttggatcgatctcttgtacatatatgcatgtgcatttgggtagtctttgattcacaggatatagtaattaatgtaaacgtagattacaattgatttgggggtgcaacgggatgcatggntaattaattagtcagctaattactgtaattaatccaatctgggagagaggttggtcgacacagntgctgcagtgtcttgaccattagctntggatgtgaatgggctgtacatgtgactgttaatctgttaaatatacggtccaattggaacatactgtgtcggcctgtacataatcaattaatggaataattaagttggtgatgcatgatttagtctctgttacacccaacaaaaaaggctcaattaaacaatcaacacgttggttggatgaaacattgatatat

SEQ ID NO: 18363 - DNA, 487 bp, Oryza sativa
  unsure (1)..(487): unsure at all n locations
tacttgtcttatagtttaggcgctntatctgtctttggttttatcgcttgttgatatgtctggttcaataatacagcttatccgagtgagttttatggactctactgtgccagaagcttctcaagctcaagcatttacttttctagttagagatcagcgtcttggagctaatgtgggatctgcccaaggacccacaggtttaggtaaatatctaatgcgttccccaacgggagaggttacttttggaggggaaactatgcgtttttgggaccttcgtgctccatggttagaacctctaaggggccccaacggtttggacttgagtagtgtgaaaaaagacatacaaccttggcaagaacgacgttcggcagaatatatgacccatgctcctataggctctctaaattctgtgggtggcgtagctaccgagatctatgcagttattatgtntctctagaagttggtagcgagtcccattatgtctaga

SEQ ID NO: 18364 - DNA, 320 bp, Oryza sativa
  unsure (1)..(320): unsure at all n locations
agcanaggcaaagtctgcaagggcgatctttattatctatcacatacgccgctacaaaagtccacaacacgcacatcggaagagcaccacgatgttcgaagaccagtgccgtgcacttagcatggatcggcaccgacacttggagaggatactctccacctgtcagaatccagactacaaggcgtaagtgctgcagcacatgcccaatgggagccctggacgaatggtagacgtacagagacaagcattgcctcggattgacgcacaggcgagcatcatgctggaagcgcgctactcatggcttacctacaccatgagca

SEQ ID NO: 18365 - DNA, 192 bp, Oryza sativa
  unsure (1)..(192): unsure at all n locations
gacacacnacaactcaacattgccatgtgctcataactggctacagttactatgcggttattctctcttcgaacaggtggaggaggaagagacggctctgcacctggctcacgcaaacatagtcctacctccatcggtaccggccgcagcgtctttgtctcaccttgatgagccgtatggactccgtctccc

SEQ ID NO: 18366 - DNA, 471 bp, Oryza sativa
  unsure (1)..(471): unsure at all n locations
aactcagctttttgccttctgctggagcattgggcatgtgatttttccctgctgatctggcactcattaagatgcaagctgattcgaccctgccaattgcacaacgccgtaacatcaaataatgctntccatgcgctctaccgtattattgctgatgaaggtgtccttgccctttggaagggagcacgacctactgtgtgtagagctatggccctgaacatgggtatgcttgcttcctatgatcagagagttgagctattcagagacaaacttggtgctggagaagtattcactgtacttgctaagattacagcattgagtaccttattggtttttttgctaaacttgtggagaatttcacctattttgttatggtgcaagcttttgctttcatgcattaagatatagccgagttgaggaacaatgaccttcacattggccattactttatattatgtaacacatgctgct

SEQ ID NO: 18367 - DNA, 411 bp, Oryza sativa
  unsure (1)..(411): unsure at all n locations
agcttagagatgacgaccgccatattgttgctgaactagccgggccaacatacttcgcaatcgatgattgcccggaaaagtacgaacatgggaaagcattcttgccggaatgggcactgaaagaaggaccatgggagatgacaaggttacataccttctacatggaggccagcaagacaggcttgggcaatataacagctcgatcaccggcagattgtttcgacgaagaaggttacgtatggctagatttctcagatctccacgccatatatcgtcgggataagatggacgtcaactacttcggtgtttggtgcatgtgagtatgagntttaattaattagatgaaaaatatgtataatacaaatccatgtgattgttactaacaaacttcttttgagaatgcatacatgg

SEQ ID NO: 18368 - DNA, 465 bp, Oryza sativa
  unsure (1)..(465): unsure at all n locations
tggaagagaggcaagaatgttatgcaaatcctttgttcgatatcatttatgaaatcactaagtgatntatttctttttaagctagtgctgaaaaggtgacttgcgtctccattcgacttaagagatgctcttcaacaactcaaatggtaatgtaccgacccccggtgtcagatcattacttatcggctcccagagccatttcacttgattaggcggctctcagagcctttttcattgtctcggactcccagagtccagctgcccagcagcataacaatctgtttccactcgggaagcctaatttatgatgcccgtagacatcccgaatcacacagatgcgtttctgaccactcaggacatccatctgccacgtaggctgattctagttacgagtcccacaccacaacaactgtgcacaaagcacacgcagacaaatctacgcaactgggaaccacctcacatccg

SEQ ID NO: 18369 - DNA, 451 bp, Oryza sativa
  unsure (1)..(451): unsure at all n locations
agcttgacagatgaacatacttaatatgtgtataaagaatcagaactgccaagtggtaaaaggaagaaaaataaagacaagttgctatattttggtaacagtaactcttaattggttgaaaagctgatctgaattttgttactttgcaccatggagattataaatataaatatatgattctcagataattggtaaaataatctatgatattcttatcccactcactatccttagatcattaacaatgtaggatctgtatatcgttatccttatgtcattacaagatatgcttgtttgatctggtttctacataactattgcagaaagacaagaagaatttacaggaattggctggtgtttatgtttataatgttacagagagagaaccacttgatacgcctgatgcaagatgattaaggaattttcttgtatagaanggtaatgtattaca

SEQ ID NO: 18370 - DNA, 472 bp, Oryza sativa
  unsure (1)..(472): unsure at all n locations
tgtcctttgtgcttaagcattattgactgcattaccaatagatacataagggtaattaattntaaatncgtccatgtgtccaagtgagacaagtccttcagagctttcttgagtacggatttgacattaatgaaccatggatagtatgaattgcatacagcacaatggacccaatacaatggcagacacaatcttcaagtgcatgtctcaaatctttattgcaaacaaagaaatgaatataaatgagacactagtatagtcgtggataagttttatggaattaatgtacgtagctgaaagcatttcgcatcaagataccaaacaggcatgtgttaaaaacctttccgatgtatgatatcaccagatatagaacaaattttgccaaaaagaaacagtgttctattcaagttcccaaataatgacataagccttaattgacactatgtttatgacacgcttgtcaagatgcata

SEQ ID NO: 18371 - DNA, 439 bp, Oryza sativa
agcttcgtactctaaccgaatgcgtagtctggtacagtctacctgcaggctgcagcacaacaaagtggctaactgtttcagtcttggacaagcgcatgctggatgatataattaacctatctaatttaaaagaagcagctatatagacacggtacactacactttgcattaattataatggagcatttggagctgaattaaagtggacgcccaacttatgaaaaacaaaaacggtggaacttaaagggagaaaaaaaaaagagaacgagtgatctttaccctttttttgtctctcccgtgacattcttaggatgccctgcactcgacagttgataggatgctcagctgctaactatacttttgttattttcagtagcgagccacccacccagagccacttcttccgattctgtccatcaattcgcactgattaagcttt

SEQ ID NO: 18372 - DNA, 134 bp, Oryza sativa
  unsure (1)..(134): unsure at all n locations
agcttgacacatggaggttgagaccgcgccttatattgtcgcanacgacatcccactgagtgcgctctggaccaaacaacttcgagtcctatctcagtgaactagccactatgtgtccctgaagcaacaacttt

SEQ ID NO: 18373 - DNA, 287 bp, Oryza sativa
cacacacgatcacgccatggactcgctcccaatcctctatctcacatataaggaaactcaatctctgttcgttggttactaactaaaccttaagtactaccgatcctcacagtacaataagagatctgctactaggaggctaatcataacggtataatagtaagaataatccccatactacacacccttattatgatattcccgaagaatacgaaccctaacctaatacatatcctaaattaagatcaggtaaccccgtacaggcaaatcaccagctcaatgggaaa

SEQ ID NO: 18374 - DNA, 472 bp, Oryza sativa
  unsure (1)..(472): unsure at all n locations
agcttangngctgngatcgtgcttatcatatttgtataaaagntaccaacaatatcatcctcacacgtgttagttaaagtaaattggaaactaaaaagtggccaattattgaatctctccgtgtttcacatagctcgaacaaacaaaaaatatctacaatgattactcttttaatatataacgccattgaatttttaagatacgtctaatcattcatcttattaaaaaaatataattattatttattttattgtgaattgatttatcatcaaatgttcttgaagcataacttaaatatttctatatttacacaaacattttgaataagataaatgtttaaatgtttgtaaaaaagtcaacgacgccatatattaaaaaacggcggtagtataaggagtgttccgtactactgtggntaccggacccgggtatttttaatactcggatgttttagcttatatcaactatattg

SEQ ID NO: 18375 - DNA, 370 bp, Oryza sativa
  unsure (1)..(370): unsure at all n locations
gctttagtattagcatctnnttagtatgatatatgccaancacattgtcagatatattacattataattatatagaggtaaaatagattaaaataaaactagtgaattaaattatatttaagactatatttacatccaaaatgtcataatttttaattggatggaagaaataagacaataaaaaacagcggctcttctttgagttaatcgaatcggagacagaaaatagcaaccatcttatatattgcgtcactaagagtacctttgttttgttagaatggatatataggcatgttcaactattgagaccgattcacgcttataagttatccacgtcacacaagatctcctagtgctctctattcatctc

SEQ ID NO: 18376 - DNA, 349 bp, Oryza sativa
ggatcttagagcacctgcggcatcaagctcacaaagacatgtcgcatttttttgctcctgcggagcgcggaaagtcgctgtagttctgtctgaggctagacgtgcccatgtcattgtcgatatgtcacatgaagactgcagctgtacgatctgcatcatgtcccactttcatcttgtggcctccaagcagatcttatttttcacctgtagctgactctacacattgggaaaaaaaattcttgtcgttacttgtgaaaaataataatgatagaacatctgatgctggacctaagaataattgaacatttagaatgggaaccttgttttcgtctgcagaaatggaccaatg

SEQ ID NO: 18377 - DNA, 428 bp, Oryza sativa
  unsure (1)..(428): unsure at all n locations
agcttcagganatcgtcgccgcagagtattatctttattcgctgcatacggaatcgatttgatatgagcctgttctggatcgggatcaatcagtgctccatcttccttcgtgcagaggtgctgatcaagttctccgcccacgacatcggctggtatggctggtgcaaaagcatcagcagtccaggccgaacacgacgccgtgtccgagccgagcacagtgcaatgctacatactgcacggagactcgttcgagtacctatgcctttgtattactgtgttctaatcggagatgatcaacagagggtatttccctaatcacgtcacgtgcatatgcacacgcgtgcgagcatatgacgggtcatcatgctccacaagaccaacaaacaatcaagtctagagttactgcatacatgtgtcttctgcagtgt

SEQ ID NO: 18378 - DNA, 348 bp, Oryza sativa
  unsure (1)..(348): unsure at all n locations
tgatgtgtgctttgtgtangttcgtgatgactgaattatttttgcttgcttgtgatgtgcatgcacgatgtgcattttcaggggatggatctcaaggatacgcctgccctgcttgattatcactgatgattaattttcaaaagaagattatcactgatgaaatcttgcggcggcttgtgtcctgctcagctctgtagtcgttaccaggagacacgagttgctgttgatctgttgtatcctccctctgcctccccaccaggcggacgcgcgacgtgtgcagcatctcggcgacaagggtgcgccggaggatntgccacacgggcccgcatctgcagcgcgtgatggtgt

SEQ ID NO: 18379 - DNA, 327 bp, Oryza sativa
  unsure (1)..(327): unsure at all n locations
tactcangcttatattntgacatcattactttctttaatataaaagactctttagtggcatatctagcggacataagatcctgcggatcctcacatttgagatcatgatcgcattatacatgaatttcaccaggtttcaacaattacccacctaaaagagatattcgattcaatggtgttgtacttataataacctctggcagagatgatcgcgtttttttcatattgtataataaggagattgcgctttgagaggatgtatccctaaccatgtattctctcgaaatcttaactgtatcccattagttcacttaaaaaactcatatt

SEQ ID NO: 18380 - DNA, 461 bp, Oryza sativa
  unsure (1)..(461): unsure at all n locations
agcttgctgctagaaagaatgctcagtttgttttatattatcccatgttcgttgtgctgcccacatagttaatttggttgttaatgatggcctgcaacaaattcaatctttgataaccaatgttaggaacactgtgaagtactttaagaagtctccagcccgcatgtataagcttgtgggtgtgtgcaacacttattcaattacagatggtagagggttgactattgatgttaaaacaaggtggagttcgacctatcggatgctagagacatgccttgagtatagaaatggttntgattattatgctgaatctgacaacaaatatgaatggctacctctacaatctgaatgcgatttgttgataaaattcatcctatcttgagaacaatgtctggtgcaaccactgcatatttagggtcaacctaccccactgtcatgtgttcatccattcatatctaagt

SEQ ID NO: 18381 - DNA, 441 bp, Oryza sativa
agcttactgtgctgatactccagaataattatttacatggaagtccagtgagtagctgatgattttttatatctcttcaatatctagacctctcaaggaactggctcaaaaccattcccagtgaagtgtgcaaacttgtgaacttatattacctgaatttatcagataataaaatcaaagacttgcctcaagagcttggactcctttctaagttgcagtacttgcttctcatgtcaaatcctatcagagagatttccgaagttattctgtcaaagctctccagactgcaggttgcagatttttgctcgctgcaagtggaacaacctgctttttttgaaccaccatattgggctctcgaatgcatgacagacttgaaagctcttggaattactgtatgcaagattaaatactcgaatatgctctgcaaaacagcttacctgt

SEQ ID NO: 18382 - DNA, 434 bp, Oryza sativa
ccttaaactcagcttaaccaattgaatttttgtcaattgaacttaaatagatttgaaacctttgctcggattggaaatttcaaatcaaaattgaaactttaacttacttcaaaacttaaactccgaatcaaaaataaatctttagttgaaacttttctaatctgagttatagtttcaaatcttacttggaacttttaaatctgagtgaagcttacataaattgagtcaaaagtatttgaaatttgagttgatagttctaaataatttgatttgagagtctcaaataataaggctaaagttctcaaattttgagtcgaaagatctacattttttagtgaattctaaatgaaagcttacaattcttggggaacattattttttatgaagtttatatttaattgaaagtcagaaaatacctatacaattttaatttt

SEQ ID NO: 18383 - DNA, 434 bp, Oryza sativa
  unsure (1)..(434): unsure at all n locations
cnagctagctatgatcaatcagatatttctgtttactgagnngcgaagaaacttcaaacatgttctattgttcttgatgagaaggatcatactattgagattcttaatgctgaatatgctatattaaaatctttgattcctaatgacgattattgtcaatcttgtgaagttatattttctgaaattaatgctttgcgagatgtcaattctgttaattgcaaaaaattggaatttgagattaacaaatctaaaaacgtggaatcttcttttgctcttggatctgcttacatgctcgtgtcgtgatgagctgattctgaccaacaacgttttgaagaatacaaagttgctttcgtgcaagttctttggcaatgctcatgtgcaattacgcaaaccaaacactggtgtttgatttctcagattgtcaagcgtttctg

SEQ ID NO: 18384 - DNA, 471 bp, Oryza sativa
agcttctcaaagaacaaaggcagtattgcgtcttctttctcacctactggtggtaatgctaaatagcctggtatgaaggggcgtggacctgcacctccttcatgttcaatgtctatgagccttcaatctggtcaggctgcatccagaaggttcaacttgaagcccctacactgggttaaagtaacaagagcaatgcagggaagtctctgggaggagtcacagaaaactgacgaagcttcaaagtattgtaccaacacaaccacactcatagatggttatgtacattatgagttctatgttaatgcatcttttcgatgactcgtgcagacctccagtgtttgacatgtcataactagaacatcttttctcaactgtcctgccatgttcaaatgggaagcgttcagatatgtcaagaagtcgtgcatctggatcaaaccagacagattcatctgtgagttctccacaaatata

SEQ ID NO: 18385 - DNA, 384 bp, Oryza sativa
  unsure (1)..(384): unsure at all n locations
agcttgtcacacttatgaaataatctgctatatggttgtttgatagttgntattactgtcttcccatcctgcatcatgtcaaaaggttaaagatgaattgaactagtcgccagcttatgtgttatactctcatgtcacctcagctatatcatgtagaagttgaattatcctgagagctgtagttgaatccaatccagatgttggttcatcgagaaagagtaaagatggatttattatgatctcattttcaatgcaaactcttttcctttcaccccctgaaaccccactgacgaaagatccaccaatcatcgtgttctggcacctctcaacatcatcagataattaattaagctaatttctaagaataggtgcatgctaccatac

SEQ ID NO: 18386 - DNA, 229 bp, Oryza sativa
gatggatggcgctcggcatagatataatgtattctagagtgtgttctctatcttttcccggccattgagatcggtgtagaccggattcgctaattagctccctactatctagaggggtctatgaagacagctcgtggatcaatcttgcgccatattagatcatatgcctgtaggtgcattttttgtgcttgtctaaccaaatgtgacgagttttttctcgtcctaaacc

SEQ ID NO: 18387 - DNA, 450 bp, Oryza sativa
gcttgtcccttgctagagcaagagggccagcatttcctcaaggctcagtctcttgggaacacgtgattgtgatgccaagcttatcctcaaagtccttcaagaaattgagcattacctaagagacggatcagagcaaaccaattagaatgtgaagttatgttatacttataccatgagacaacagtaaaagattatcctctctttacctccaggcggtacgtgatggctaaaacaacttctgttactccaacttctttcaaggcctcaatctgcataaatcggaaaacttttaattcagagctcattactctcctcaatcctcatgctcatgtatgctggagccaacattttggatataaatcaagtactcttgataaccgattggaattctcgaggacagagaatatttggtgtgataccataagagttttccaaaatcatgtaaccaaa

SEQ ID NO: 18388 - DNA, 396 bp, Oryza sativa
  unsure (1)..(396): unsure at all n locations
tgatgcccggctaatagttcgagattatatatagaatctcacgtaaagtttagtaaggtaactaggccttcttgtgtgaaatatgcaatattatgtcagtgttctttcgcatgttccatccattttgggtggtatatatctcacacttgtgcattcttttggttntacttgagtcgattgaccaccgtcaaaattatttttttaggaacactttctagagttccaatatttaagtactttaattatgaaaagagagagatgccgacttatctaaatcttatgtcagatgccttgtacgttgacttggtgagtgcgttttgcacatagaagttcatcatttatcatatgaggaaggctcttgatatattattctttttgttccatctgtgcatcatt

SEQ ID NO: 18389 - DNA, 442 bp, Oryza sativa
ggacttaagcaccgagctcagctcagacaaactgagatctttttatgacgacactgagatatggaggtaaaaaatttcataagcgccaatggtgaaacaacatacctcaacttgccgttgcaaatgccttggatatatatcatattatcatcattcaagctactagatgctcttcccaataacctgaccaagcaagcaaaagttttccaatgaaaatcaattacagaaacaaatctggggatgttctagaggtcatgttacaaaaatataatatttaaaccccaacttatgggacaaaatgaggaaaatatggtgagaccttgttgcatacacggacaagatcctggagaattttcatccgctcactcattttctcacgacgtgcctgccgaaaatgaacagaatttcagtggtatattatagataaacatgaaatagaccg

SEQ ID NO: 18390 - DNA, 452 bp, Oryza sativa
  unsure (1)..(452): unsure at all n locations
gcttctggatatactgtacgaaaatattcttgtttagcanacgggttttatttctagaatgaacacatatatgggtatctgaggtgcatggcaaaactcatcatgcatgcccacctatcttgctgtagccacctcgtgaagagccgcgtagtgagatttcctcgtcgatcagaccgtgcaatatcagcatgagctgatcgatcactagccgctagcgctaggtctttctcaataatactaatatgcatgcccgcaaacactgaggccgacgcccacccactcccatatgggccaccagctaccagtgctacccaatcatcagtcaaatggtgcatctctcacttgatgcgcatagcgttggttgataccgacccaatagccgatcgtcgaccggctcaactcggtcatcgcaacgggtactgacaccaaaagtggccggcatgggctcccgc

SEQ ID NO: 18391 - DNA, 378 bp, Oryza sativa
  unsure (1)..(378): unsure at all n locations
tatctcttacgctccaggaatggatcagtcagaacatcaccaccggcttgccttcgccgncgccgactggtgtttccgcctgcacggctggcctattatgccgctgttgttgggcgtctacgtcttcaccgaccggccgcctcgaccgccgccgactggtgtttccgcctgcacggctggcctattatgccgctgttgttgggcgtctacgtcttcaccgaccgggcgcctcgtccgccgccgactggtgcttccgcctgcacggctgacgtattatgccgccgntgttgggcgtctacgtcttcaccgaccggacgcctcgaccgtcgtcgactggtgtttccgcctgcacggctggcctattatgctcgcgttgtt

SEQ ID NO: 18392 - DNA, 460 bp, Oryza sativa
  unsure (1)..(460): unsure at all n locations
agctngtttacatgtgccatctgccatgtgtttcttgaaccaagtgaaggtatatcagtccatgctggttcaatcttctcttccagctcctctaagccatgggaaggccctttcctttgttccgattgccgcgacaagaaggatgccatggaaggtaaacgaccaagtggcgtcaaggttctatgatatcacttgcaatcagccaccattgtagcttccgcaaactcaccttctttgtcaattgtgagcgctctttgtgttacaatttttctctctctcgcatttaggcgattcggataatattacgttgcattttaatatattatgtgaggaactagccgccgtgttgtaagtagtatcgtgaaaggaaaatgcaaccgagtgaatagagtatgtctccatttttctcttgtaggtgcatgaactaactgcagcttgcctctctcgagttgagtatgat

SEQ ID NO: 18393 - DNA, 400 bp, Oryza sativa
  unsure (1)..(400): unsure at all n locations
tagtaagattttgttggaggcagggacatatttgttgacttcgtacattgatccatagtctaaccaaccgaatgcaataccttgtggatgagtgccattagccaataaatctgcggggttctgctaacataacctttagcatgtggtttatgtaatttacttgtttatgtgttatatctcttgattgggtaatatagntgtaactctacttttcttgttctcttggtatagattgctgataagcttcattgctacgtggaacctgatgacacggtatgtatttttttagtacaagaatcacatgtttattcattggtagattacattctccatatgatgagtgtaatacaataaaatggctgtgcgctattaagctaccaaatatgcctgcacttctata

SEQ ID NO: 18394 - DNA, 351 bp, Oryza sativa
  unsure (1)..(351): unsure at all n locations
tatatgtatgtaaaatggtttgcaggtacataatatgcgtatatatgacatcactaatgtccttgaagggatagggctgatataatagaagctcaagaacaatatccgttggaagtaatatattctctttatatccatatctgtaaattgcatcttatgggtatcacatgctttatgtctcctttttcagaggaatcgatgactcccgaccaggagaagttagtgatgatatgtccatcttacacgtatcatgcttttgttatatcctattattgatactacaattattaaatattgcttctgattganaacatgttctggcgaagcacgtgcttaactaatgatatattt

SEQ ID NO: 18395 - DNA, 398 bp, Oryza sativa
  unsure (1)..(398): unsure at all n locations
agcttcacagtgtaaccgatacatatngtttcggtttctgcctctcttttntgttttaatgcgaacagtagtagatcggcttatagcctgatctttntgatctatgcacgtatacagtaataaaaggaaacaatgctcctgctgcttgtctctcagcagatcggctctagtagcctgatcttttcctctgttgccgtgtgaaacaaaaggaaaggaggttgctgagtcggctgctgctccctgatgatgatcttcaatacacacggcaagtgttcagatggattcagtgacgaccaaataacctcgccgccgattagattaatccggcgatactatattaatntcggccgtttagccgaaacttggatttgatgaaacggaaactactacattaaact

SEQ ID NO: 18396 - DNA, 426 bp, Oryza sativa
  unsure (1)..(426): unsure at all n locations
ctgctcatctttnggaatgccttccgcttgagcctatcctttgcttcngctggaaaagtgaaccatatcttcattgccgatcaagctcgatctatctcggcttatgtgacctctccgatatctttatggaggatcccgaagttctcacgtgccgctagcccgcagcagttaaaccatcttccaatgacagtcctgtgcgccgtgtgcctaccactagcgtcaacctctcttataacttgcactgtggtcggtcatatattttgtgaccgcggatctctactagacctacttgcactcgtcccgcccacatcgacgtatgttgttcctgcggcaattcctgcagcacaacagaaggcatatattgctaaggggtgctatctaaaattatgcggtcatgggtgaaattatctatacataccatgaatt

SEQ ID NO: 18397 - DNA, 191 bp, Oryza sativa
  unsure (1)..(191): unsure at all n locations
agcttntaaccaagctgctactagttcttattcttgcaagcggaatggtgatgtacaccgacttaaccaagcaccccaatggagtttggatgtatcgatgcctaggcacacactagctgtactgctagaatcacatctgtggagatctggatacgcttaaatatgtatcaaagggatcacatatgcttaaa

SEQ ID NO: 18398 - DNA, 436 bp, Oryza sativa
  unsure (1)..(436): unsure at all n locations
tgcatatcatgatagnatgatgtaacagacctggtatcttgttataaacattgcagtttgttgaacaaaatgtcagcataatacatgggaacataaacatctctgaaatatatgttcagggctttccaagatagtggtattatgctatgcctactaagatgttgtcaatcattagatgcatgtttaattaagacactagaggcacacataactcttttgtgtctccgacaatacatgctatttaaaatcactatcgaccgctagctcccaatgtaatgtagcacgaggatcatagtttccctctaaataatgcagtgcagatttgatcttacctagaacatcatcacttacctcataatgggcatgttgatccctcctcatgttctcacaaaatgtctatgttagcacaacttcctcaatacttttcgattcctgc

SEQ ID NO: 18399 - DNA, 180 bp, Oryza sativa
  unsure (1)..(180): unsure at all n locations
agcttctagaatttactccaggaaggggtctctcnctanaacttttccacttgagctaagaagtgagccttgtttaggtcccttttgaatcgcaggattaaacaatcgcgcgtctggccaaacgatacacaccagcggaacgcatttgtgaccgatgggcaaacgtacaggaaaaggcac

SEQ ID NO: 18400 - DNA, 483 bp, Oryza sativa
  unsure (1)..(483): unsure at all n locations
ctgtcaagtactgagggttctctaataccaagggcctcaagatctttctccacctcttccagtatatggcgggccgattctagttcgccttgcaaggcttggacctggttctctgcttccaaacgttttatggtagctttcttggacagctcttcaaatttctccttttcttcattaacttgatccaacttctctgacaactcagcctccttttgttctgcttcgagtaatgaagcctcgaggctagttcttttctctttgtactcttcaagctccccagaaagctcatcgactctcaaacgggaactgttgcattcctctgtagcatctntaagctcttgctcaagatccatactgcttttctcagcagatgccaactttgactcaaactcagtaaggtgtgacttcaaactttgttcagcaacacttaatatctgaacctgagtttcaagctctgcaattctctgtaatgcagactccgca

SEQ ID NO: 18401 - DNA, 393 bp, Oryza sativa
agcttgcgcacccatctatttggttggaactcttcttctatcgccctgtccccttgcaccccggagctcggccatggcggccatgccgcgccgctcgcccccgcgccgtactgcaccgttgttgccggcgggaggtcgctggagattcgcctcatcctccccggctgctgctgtgccggcctcgcaccgtcccggcatgcgcgctaggcgcatggcgcggctgcctctgcctggcgagaggtagaagacgacgggaaaaagaaagggacgagagagagaaaccgtgtggggcccacatctagtttgcgcacagtaatcctccacctaatggtgattaacccactcaatgacatgtggggtccctattattaaaatctaagtaaacttaattat

SEQ ID NO: 18402 - DNA, 410 bp, Oryza sativa
  unsure (1)..(410): unsure at all n locations
catcctggagtgtagctggccactaaaatccttgacggaaggctttaccgaccaaagtgcgcgaggccgagtgggccccgcattttccctcgcgggcgtcggtgataagctctacgccttgctcccgagagatacatttcaagaggaccccattggcgccgctccggtagagggtcccttctacaagcatgtaccgtttggagatgtgcgcgagctnttcggcttcggcgcgatccttatgaagagtgtgattgtcgaggtatgcccggatgtcggccatccaggcgacctgacatggggggtcggggttgaccccctcgggccccgaggcctgtggctcaccangcgtcaaggtgtgggtcgcggcgttaggcaccctctgggggtcctagtgcgccgactgctgtgtg

SEQ ID NO: 18403 - DNA, 418 bp, Oryza sativa
agcttttgggttcataaatgctgaaactgttgtattttgttagtggtttatgagacaacttcataaagctataggagatgttaacccactagctgtttgtacctatgcatgtaaagattaaaaaaggttgcacatactgtgtttgagcatgctgagtagacggaatgcttctgccatctaatgaagaactttgtgaagaggtttggtggtgatgtgtgcacttagcagcaaacggcttataggaaggagatttggaaaaagcacatgaaagaagttattgaagcttgcagtgatgtgcttccttggcttgaaacctatcatccattgaagtggatgaagagtggtttcaattcaacaataaagtgtgattacattacttacaatcttgcagagagtttaacaacttgattaaagatta

SEQ ID NO: 18404 - DNA, 426 bp, Oryza sativa
  unsure (1)..(426): unsure at all n locations
tcacggccacttggctattttattttcaaaaatgctatttntgtgagatatgtatgtactccctccgtcccaaaaaaaagtagatatatctaggaggtgatatgatattctctagtaaaatgaatctagacaatagatgtactaggagatgtcacatccttacctaggttgaagttttttttactgagagaatatattagaagcacaaaacaatttcttatacaagataggcgatgtaccgtgccatccgcaaagcaaagggccatttggcatgaaaaccagattttgtcgagtttgtgtaccggcggcacttcttcgtctaaaaaagcacctaaagagatggacccctctattttacagttgtcattttcaaaaaatatgggggtgcttacaaacttttttaatagataaatgtaagttaaaaat

SEQ ID NO: 18405 - DNA, 374 bp, Oryza sativa
  unsure (1)..(374): unsure at all n locations
cctgcagcatgcaagctngtcaactcgatgccacagcggaatttatttgttttctcctaagcnngcccttcgaccatcacctcttgtctccagcaagtgcctttgcctatgaccttggcttctgtaggcctggacgaaggtgtcacgcccagaaattcctcaatggaatttcaagcctaatgagcaataaacccctgttcaggactggccagtgtactctaacgacaaagtaacatatagatcacgtcttaaaacattataatgtcttacctaaatgccgcgaaattaaagatactgcgctagccttgattggatttaacagaacacacttccacgcatctctacggacgacaacctcttctgggaaacacctt

SEQ ID NO: 18406 - DNA, 444 bp, Oryza sativa
  unsure (1)..(444): unsure at all n locations
cataactcggcttctcgttttcttctcttganaatgcgaaatcgcaaggattcgaattctacctcacttgacaacattgcttccacaccatgaaccagaagaaacggtgattgccccgtggcccgactaggcatagtgcgtagagaccaaagtacagatgacagctgatcaacccacttgccggtgtagggatgcagtccgacgaagtcttgtgctctgattccttgaagtaccataccattggcacgttcaacttgtccattgctcataggatgcgctacggaggcataacaaattttgatgctgaagtcttcacaaatatctttaaacacacaaccagtgaatngagtaccattatcggtgataattcgattgtgtaccccaaaccagcgcacgatgtttgacaagaaatctctatccttgtccgctgtgattgtgacgact

SEQ ID NO: 18407 - DNA, 337 bp, Oryza sativa
  unsure (1)..(337): unsure at all n locations
tctttgatgggaatagtatgcaattatgccgtatgtggatgaaaaatcacggctgtctgatcaataataaaccaaacaagcgaaacaaatttttgtaccgttgggcaaaatgtatctgaaaatggtttcgttggagcatgaccaatatgagaggagctgttttctttttttgaaaatattttgattgactcaaagttgttgaagcaagaatcacaaaagaagaaagattttattacttgacaccggaccattagctttctccgtagctaagattcttttggattaaggctgcgttctaaatactagtacatcanaagagaaacacgtcccgtgtcgc

SEQ ID NO: 18408 - DNA, 446 bp, Oryza sativa
  unsure (1)..(446): unsure at all n locations
tatacaaatgattactgttatttttgtttgatcctaaatccatccgacaacagaacctctagtatacgaccattctatttagatagatgcatgtgtagccataatccttccatagccattagctagactaaaccacaaattagccagatacgtatctcattcatactacattggctagctcctaaatagaccaccatgataacagaaagattaagagactttaacccttagcatgttagaatccattagcaagcgcgaataatatgagcaaccgtaagtttgacctcaacaaatatatnttggttgtgcatatttgattggtgcttgaatattggtgtttcttgcgtattctagactttgtgtatcgggtagtcgtgaggcaacgtcagcaacttccaggaggtgaaggttgatcaagaagtatatcaagataaggactatcctga

SEQ ID NO: 18409 - DNA, 432 bp, Oryza sativa
  unsure (1)..(432): unsure at all n locations
agcttcaaaccagaataaaatagttaatcttttcttgtgcacaggggtcctcaatgacatagtggttgcattccaccatcataaaagaggaagctcgctcaaaaacttgaattgtaacattttccaattgccattagttaaaagtttaaaacatggatagccggaaccattcagaacaattaagacagtcattaactactgactacattatgcagaaatttccagagcacaaaatataataaagaaacctcaagcanaataaagggaaaaaggtattatcatagcaatacagatctcacctaagttgcataggccaatcataaaatggaatatctgcaacaacggacgcatataacattaaaaatctggcagctgagctcacagcacagagggaaagaacaagtgaggcactaattatcattatttaatatc

SEQ ID NO: 18410 - DNA, 409 bp, Oryza sativa
tatgccccaacatgtgctcctgaagtggtccttgcaagccctctccaaatcttggatgaaacttttcgaccaataagcaacatcgtgggtgctgacataacggcaatgtttctcatgccttatgtgtttctcctgttccgacattgatatggcctcattcagtgcctctgcggttgcctctatattccatgggttaacccggatagcaccactcacagatggtgagcacccaatgaattctgataccaccagcatgctcttctttggtccattcacttctgatgtggagtcagacccctgcctacagacaatatattcatatggtgtcacgttcataccattcctcacagcagtcaccaccacacattctgctattgtgtagtaggcaatcttctacacacttgacaca

SEQ ID NO: 18411 - DNA, 309 bp, Oryza sativa
gaaaaaccgccatacaccacgaaaccccgacgacaagaacaaaaacgaaaacacggacgagtcaaaaaggaggcacacaggcaaggcgaacaacacacgacagacacgagcactgaccacacaaaccccagaacatcgccggaacgacaccccaaaaagagggaaccccccaccacaacaaatctctaaaaggcaccacgcccaaacaaaaaatactagaaatcaccgaggcgaaggctaaccacaaatcaccccacaaaaacgaacccgagaacccagaacgaacaaacaaaaaaaaggacgaagcac

SEQ ID NO: 18412 - DNA, 483 bp, Oryza sativa
  unsure (1)..(483): unsure at all n locations
ctcagcttgtcatagatccgcaatggtcatatggcgcatatcgctatatttaatcctatcatcaaaccatgaccgttccgaggtatggctttggatttcattggtcagatttatccttcattatcaaaagggcattagttcgtgctagttgcaatggattacttcattaagtgggccgaagccgtgccgctcgacaatattacttgtacgaatgtaattgactttattttgaagcatattgttcatagattcggtattccttaaactttgatcgaggagcttcttttatgtctaaagaggtgagaggttttgccgaattttatgatattaagttgttgagttcttttctctactacgctcgggctaatggataagccgagtcgagtaataaaacattgttgaaattgccgctntgccagttgaggtaaatcttggctctcttcggtattttaaacaagacgacttgtcggttgaagaatacaa

SEQ ID NO: 18413 - DNA, 349 bp, Oryza sativa
ccgagcagcaagccacgaagaacatgaacatctttgtttttgtgcggaccttatgggaaacaagacaagctctgtatgactcaatgtgcatcgaggtcacccactccaagtgacgagactatgccaatatatatcttcactcaacaccgccgatagcgcccccatatcttaactaaatctcatatggttagcacatagaccgtgctatcctgccatgagcccctatgaaagcatccacatgtatagagcagaccgcctgcatcaccagagatggctttcccttatctctgcacagggccatctgcacacctacacgattctgcgaccaagagcggatcttcatcctaac

SEQ ID NO: 18414 - DNA, 451 bp, Oryza sativa
acctataaaactcagctgctgactggaaggtcggatcctatgcctcaagggttgttctgttatctctcgacggtaatccacagccttctttacacaatatgaattgctatctgtacaaggagaaccgcactttcttgatataaatccagaaccttctgtcaataaagatgaactactgtgtttacccataaatgctctcaccgaagcatcaaatcatgcaccttatgatggcgatgagtccctctttgtcgagcagcaagagcagttaagccatggcaacgaaatcatattcccagttgaaactcaagaagggcctgcgctagtagcagaggcgaaagtcttatgacttgagtattgtgtacctagccagcatctcgtgagcagcatagtgttgctaccgaatttgatgatcctggagacatgaaactgcttggctcatacgtgcagactg

SEQ ID NO: 18415 - DNA, 384 bp, Oryza sativa
agcttggattatgagaactatttgtttgtttttttatgcccctgaagacaccatatccctgacgaggggagctgtatctactgagaggaatatagcattgtcctgtagatgggccacttgtccatagggccaatgagatgtatggtaatgaaacatgactagagaaatggccgtacaaccactggttgcgcatccaattaggcccgctactgtagatctcggaggacacagtaatgatgtggtgcgttcaggttgctcttgcaacattacaagcatgtagcttaatcttgcgtgggccatgcacctctgcatatgctgtgtttgaaacatgtcatcagatggcatgtccaattgattgatttaaagtcattttgatttcccttt

SEQ ID NO: 18416 - DNA, 372 bp, Oryza sativa
ccattcattctatataaatgcaccattagaaaactatcggaaagctaaccatttctgttctattgaatggaaaaacatatgaaaaactatctacttccacctagtgcttgcatctcttcggctggctagctcgacaacataagaagacttgatgtgctcgtcaatccataggtgtgccatcgccttcctcgtaaactcctaatggcatacaaaccctatcaaccgaatgagccctagacaatgccaatggtggtcatatcttatgcggtactgcaacactgtatatcactgactgacacatgagtacacttgacacaatttcgatcaatgcttatgctcactattatataatggaaatgcatatctgtatag

SEQ ID NO: 18417 - DNA, 370 bp, Oryza sativa
  unsure (1)..(370): unsure at all n locations
agctntagagattacgctatattatttgtttttgtgcanattatagcactacacaataatatcttctgaataatgtcagttcagttccatggcaaagaatgtggaaaattcaaaataaattgcatgccactaaaccttcacttctactacctccgtacctaaaaaagtgtgtttttagctatgatcctggacagtattcgtcccggatcattgctaaaaatatcactggttcaaggatggagggagtagtaccgtatgattgaggaattggctcattaaaatgaaataaaacaatctgaatacttgaaggaacatattaataaattattattaaggacattttaacaatatggatatcttcttgactttg

SEQ ID NO: 18418 - DNA, 461 bp, Oryza sativa
  unsure (1)..(461): unsure at all n locations
tcaacccacatnttttacacaatttctatccattttgtttctctacaactatccaccatatggncattctcctcccaactttcaaggtactcctccaagctttcaagggattccacatcaatgaaattgggctcaacctaatttatccaccttacaaggtttccatttgcaagagaatatggtgcactcaccaaatcatgggtttggaactgcaaaccaccaagcaatatttgcactgcaataccccttagttagagccactgtcaacagttcttcccatgggtcagagtcatcgactccctgccctgcaagacaacaagaggcgccagttaatctcgagtcgtcaagtgaaaacagcgaagacgaggtgaggagagcaacacgcaccacttggacagaagaggagaacttaccggtaattagtgcttggttgagcaactccgttgatcctatagatggaa

SEQ ID NO: 18419 - DNA, 434 bp, Oryza sativa
agcttcagacgtactacaccatgtccggtcgtatggtttcttttgcaaatgggatatgataggtgggataggaaaatggaaatggataaatggctacgattaaatgaggtgtgacgaatggatggctaggatgtaatattgtcttttggagggtgggatattatttcccaatcctatttgccaaacaaagccgataggcgatcgaatgaatcaaacgatcgatatgatccaattgtgacttggataacaagcccctcggtcggtctcggtggataataataaggacacgcctacaaatcaggcgccttatttttattttttttaaaaaagccaggcgctgtttcaccaagtggatcaaaaatctttcacttaatagatcgaaaatattttaatcttttataaagctgaaacacaaccaaatcacctcataaaac

SEQ ID NO: 18420 - DNA, 493 bp, Oryza sativa
  unsure (1)..(493): unsure at all n locations
cagctttcatagatatggcttcactngataagatcacgagaatattatgttctttcaagtctattngcattgatcagcaggccctgcaaacatgtggtgagaacttcagtccaattggtcacgacaatccaaattgagaaaaatattagtatcttagatgctctagagaacactctcatcaaaaggcattattaggcacaaagatcaacctcataaagatttatatgttgctacaacatgttgtgctggacatatgcgtgcgttttggtctttttgaggatataaaanaaaaggatcatttacaactctacatatatgtatatgcatgggttcatgttgcttgtagataggatgcaaattttaccaaaacattatcgaagaacatcttaccaaaaacaaaggttttgtacaatgaatcttgtacggatactttagtatgatgatttgacgataatttgagttctacaaggaactaactcatgtacatactaca

SEQ ID NO: 18421 - DNA, 405 bp, Oryza sativa
agcttggctattcggggactgcaataataataatgtttttcactgctattctcacatcctaccacaatgatcattgcgaaatggctacaacctctaatgcatcatatctcatgttctgtggcttgcttcctaatgtgccttatatcttgtatttatctataatgtgatgtgttctgcaaattcctttatgtgaaaccactctctatcaagtacgggcttggtgtgccaaaccatgatactgaagggagggtcgtcacagtggagttcaatgatctttacctcctgactgcttatgtaccaaattctggtgatggtctaaaaagataggtaattctgcttattttaatcttggtatcattgagagttgataattcagataagttaaatccataaccatatattacc

SEQ ID NO: 18422 - DNA, 485 bp, Oryza sativa
tatcttcatgctggaattgataaaatgctctaggttagaagttctttttgtgtataatccgaggagttacaaccactcacacagttcggcgtaactgtatttcagacaaatgttggctatgcactattgcgttttatcgcactctcgtagtcgatgactactccctggttgtgttgggtgatcatccatgggttgatgaccatgcttgtcgcacactggcgtttttcgcgtgtggacatgtgcaagccatgcaaaggttcgtcgtgttgcatgcgttgagctcttatgccaacgactgttgcaccgacacattccactatttttgtggatatgtctgaatataactggtttattgtgaatattaccattgacggatgtatggattatctctcgacggctatgtctaggggacattagcaaatgtggttagataattcgatcgtggatcgtacctaatacatgctgcttaactatgacccatttct

SEQ ID NO: 18423 - DNA, 401 bp, Oryza sativa
  unsure (1)..(401): unsure at all n locations
agctngcgcgcaaagcaatatactatgcatgttgttctatgctacctagggctagcgcgaatgagcgatctcaatgaggacacctcgcctgcatccatcttatatggactcgctctctgctacgcgattccttgtgtctgtggacattccagactgtctgccaaatgagcaatacaggctgcagacttaatagaaactaaacccccgtctattacacacacacatacacatatgattggggcacatatgaaggtgcacagatcgattcaaggcataatgcccgcatcagatccaccacaaaatagaagccagcataaactcttctactggttactaactcgattaatgatttctaactctaccatataatacatcatcatgagttgttcaatacagcatta

SEQ ID NO: 18424 - DNA, 381 bp, Oryza sativa
cgataggtgctgatgctgtcaccccccacatgaggagtacacaatggccatctgtcaatgataaccgtcaacagcctaggtgatggtgtctggctgcttgtgacaaaatacttttgcatgctctacctggtctgactcactgcagaatatttgcacatctcactccatgcacagtttaggcacctctgcaaagtttgaaaaatgttcggtatctctaacctaactaagctagcttgggtattacagaatccaccggcctcctgcaaagacaggctaagccactgtatgttcatagcatttctgatgcagctaagctatggttctcatcgattacccatattctctagtaagttaacacgatttattagagaatacaaaata

SEQ ID NO: 18425 - DNA, 415 bp, Oryza sativa
agcttggcgacgcaggcgtggagctgcgctttgtttctttgtcgcgcagcgcgctcgccgactgcaggatggtgcccaaagtgaacttcttgggcacgatgccgtccccaagaatgccggagaagagggcgaccgcgtcccggtgccggccgctgcgggtgaacgcgccaatggccgccgtggccgaaacgacgttccggtgcggcatttcgtcgagcagattgtgggcggatccagtgaaccgtgtgaacggcaccaccagctgtgccgtgggctatgtcagggtcctcagggaaccctcaaggtgctgcatctgatcgcaggaaagtccggccttttcgaaccgacgaactttgccgctttggatgtggtggatgaggatttctgtttcttgttggtcatcttgatgcaatcg

SEQ ID NO: 18426 - DNA, 417 bp, Oryza sativa
  unsure (1)..(417): unsure at all n locations
gcgccgggctggagcgctcccggccgcgttaagacgcgcagccagccgccggagtggtggccgattgggccgtggtcggcgaagacagtgtgttgcgacgaatgaacgccggcagcttttgccggcgtggctacggtggtgtagagcgtcatggtctggtcggagccatgggaggggagcgtgggtttgttgctcgccggccggcggccggctgccgtgtgtaccgtggtcagcaagagcgcgagtgcaacgcatgattgngcgaggatgcgacgacgagtttgtgcttgcatctctgcgcgcagttttgactcgtatacgaggcttgtgagtntggaggtgtggtttttatgtgaggtgtgctttgtttaactgtcaaaattaacgtgtatgtaatcaagaggcgacatggagttg

SEQ ID NO: 18427 - DNA, 333 bp, Oryza sativa
cctgagctgcagctgcagctgcaacgtcgcgaggaccattccttcttgttagggagaataaacgccccatctatttcacaaaatttctttcccaacatacatctcatcatatatttagacacatactgagagcatcacatatagatcataacaaaaactaattgcacacttagggagaaaatctcgaaacgaatctttcgagcgctaataatgccataattagccataaatactaccgtaacctacatatactaataaccgattaattatactttaaagattctgttctcactttctagcgctcaaaactatacggatcatggatggattgtg

SEQ ID NO: 18428 - DNA, 445 bp, Oryza sativa
  unsure (1)..(445): unsure at all n locations
gctctcgctccggcgttccctctgcttcttgatcctctgggcaagaagcttctggtactcagcagcctccgacttcttcttggcgatcctcttcttcttgtcagcgattctggcacgcttcctctggagggtgaggggagtcacaagacgctggatcttatgagccttgctcaccttcttgcctgcaacacaacaacaccattaggtatgtaagcagaaagctacctggaagatatattttgacttgaaaactgacaaacatgcagacaatataatatggtgaatntatccataagagaattaaaacagtactaagatcaatgcagatcaggagcaggacatactagaaatgaggtagattattaaacattgcacgagagctcaccattctcggtagtgaatgtcctgcggtaggtgttgacatatttgcggacatcatcatcct

SEQ ID NO: 18429 - DNA, 430 bp, Oryza sativa
agctttcgcgatggcagtaggagtattgattttgtatggctactactcctactctgaattaaggacacgttttaaactagatttgagctgaactaatatctcatttatcgagaatatgttcatcaaattgttaaacagtatgttttattataaaactagtatgtttatcaaattatatttattctgaattttagctagtattaaattcctatatggactctatactctacttctaatattccttattttttaattctgattctctattttttttcttaattgtatttaatattccttattttttaattctgattttcttttttttcttaattgtatttctatatggactttatactctacttctaatattccttatttttaattccgaaattctattatttcctaattgtatttctatatagactctata

SEQ ID NO: 18430 - DNA, 324 bp, Oryza sativa
  unsure (1)..(324): unsure at all n locations
tatgaaggtaactgaatgtttactcattgagagactgctataaatgaatgaacttcttttaaagcaaagagccgagattcgttccattatataacaaacaaaaacggacgtgtatatactcctaccgtcctatgtactgccgggctcgctacattgcaagcgaaaaaaaactntcagccctccttttcactcccggtcaggacggatcccctcgtcgtgtcgcgagtgcggcgaatggcgatggccaacaggccaagtgggtgggggtgagcgcgtgtcacgcgcccgtgtggcaccacacgttggcttggctgcgtacgtgct

SEQ ID NO: 18431 - DNA, 432 bp, Oryza sativa
  unsure (1)..(432): unsure at all n locations
agcttggccgtaagtagtataatatatattttattgtttgtanctngacaaagataattattttctagttaatcacactaataaaagagcaaaaaatgattaaaataaatatattgtgcaaacacatgctaattttattaaatcaataacatgaacaaacaatatatactatacacagtcaagcttggtagaagctcaagctaagctcggtaaagctcacgagcttttgctttttgacagccctactcccatccataaaagtgcaacaagtgtgacaagtgagccatccatatccccctgatgactagaggaaccgatgggatggatctgtgtgctatgcttctctcggtggctcaagcatgtttgcttgtcatagataatgctagatcccctaatgcatattcacactctactctaatactctttccaatc

SEQ ID NO: 18432 - DNA, 353 bp, Oryza sativa
accggaagaggggatgcaacctagaccacagctcttcctgggaccaactctgggatcaatacgaagccctaatgatcaattcacggacgcccccgaaagagacggaaaaccgagagcaacccgcggcggacgaacgaaagacagactacgcgcaacagtcggaagcgaagacacaccagcttgcggcactggatatggagacgccgccaaagcggaagtacggcaccctactcaatccatatcgggtcagcaaaagaacagatgatccccctgatgcacaacaaggacacaaacaatacccgctaacaaataagcagacaactgacgacagccacagggaattcaccaaccac

SEQ ID NO: 18433 - DNA, 483 bp, Oryza sativa
tacgctatgatgggtagaagagagacagtatgagagatttttttttatccctcttatacaagagatagtcgacgaaagggaggaagatgaagattatattggacaaacaagtattgggctaatatattagagttaatataaaggtaatttatttgtaaatgattacctttatatccatgattagatgcacatgaacaagagagcaaacacccctattagtataaacccactactttaggctgtgtttagttccacgctaaaattggaagtttgaagaaattaaaacgatgtgatggataagttggaagtttgtgtgtgtatgaaattctgatgcgacaaaaaagattgaagtttgaagaaaaaagttggaatctaaacagggccttactccaaatattacccatgtcagcaaaagtcattgtttaatcaatgcactgttatataaattattaattttcttcttgttccgtgcactctctcctg

SEQ ID NO: 18434 - DNA, 419 bp, Oryza sativa
  unsure (1)..(419): unsure at all n locations
tcaagctttactgagtcatttaagttatattttatttcctgaacccaagaattcaaaataacaagttcctctttacccagaaaaaaagaaccacttagaatagccaaacagattatatttgtcgagaaatgcaaaatgatatggagatgaccctcattatctattttggccaattgtattatttccttgcgtattcctataggggggttttgtacatgtgtattcggtttctcttttatcatttcgtccaagataaaaaggtcttctaattccatgaatctttctagaactcttttctcttgaatagcagntaagagagtttgggattgcctggtattccaccaattcttaatccaaagttccagacatttgttaaaagagaaagagactccccaagggcaaagtccgattaattcaag

SEQ ID NO: 18435 - DNA, 481 bp, Oryza sativa
tacaagtaaaccagatatggagatggcgactaaagttgctgtttcctattttatagaatttcaagattacaatggatctacgaaaagatcgtgtatttacaactacaacggaatagtatacaaagtcaacacaaatcattaaatggaatttatggctacacaaaccgttgaagatagttctagacctggaccaagacaaactcgcgtaggtaatttattgaaacccttgaattcggaatatgggaaagtagctccgggttgggggactactccttttatgggggtcgcaatggctttattcgcggtattcctatctattattttagaaatttataattcttccgttttactggacggaattttaatgaattaggtttctactaacgataactacgaagtcatagtttttccatccaaaagagcctttctactttaagctctacatttctagacattctggtagttcgaccgaggaattttt

SEQ ID NO: 18436 - DNA, 479 bp, Oryza sativa
  unsure (1)..(479): unsure at all n locations
ntcttccagttcttctctcctcaattagacaattctctctgtcttagtaattcgacaatccatatgatcaaccaacgagcttacggatactatgttaacaagaaaagagggagcatataaaactgacgacaatgtaattgatggagtacatttgactgttcccactcccctcacatgtcgtaaagttccgtcggcagtttgaattgtttctttaaatgatgactgaaatggagtatatgatgtaaactcactcgacattcctgtaacatgtctagatgctccggagtctaatatccaagttgagttatgtacctgcatatgatgtgcgagattaataaagttgccaagcactggtgttttcttcttcactttctgaattcttccccttatttcttcaacttcttcagccaatttctcaagtatttgctcaattccttgaatatcccncatggcagatcaaccaaatcttctatgatact

SEQ ID NO: 18437 - DNA, 263 bp, Oryza sativa
atattgtctactagaatacgaagaaagtatgtcggaagaattccggagttgccggcaatcttctcctatttcttttattctgactattactctgaattcaatataatattcttcttgagtaatttagatttatcttgtgagaattatctcttggttagttcctaaataccatacgggattatttttcactataatcaactaaaatatagtgattgctttggtgagttataaacactaaagtagatattaatttcttagacatg

SEQ ID NO: 18438 - DNA, 465 bp, Oryza sativa
  unsure (1)..(465): unsure at all n locations
tataactngtttaacatgttgaacctaataaagcgttatctttgtgaatgatgattgttaaacttgcctggaaaacgtggttggatctagacgaaaatctgtccgtaaagcagcccgaaatccttgttagtatccaaatcaaagagagcgcatgtgttgtcatggagaaaaggacacatgccaggatgaaccttcttctagagtatgacattaaattgctgataattcagtgattcgggtggactgctcttattcagtcagcttggggacagacgtcagaggggttagtgctttgattgtagcacgtttaattacttactccttcccggntaataatacatactagtgccacatcacttgaccagatagtcacatgtcgtggagttagtgttagttctcacaaccaaaaataataatcaaaaaagaaacatgagtgcactgctcgttgtagtgtgcagntgcact

SEQ ID NO: 18439 - DNA, 102 bp, Oryza sativa
agcccaggacaagctgctcaaccagggggggaaagacgccgtgtggggatcgcgatacacacgtcgcaccaaccggcgggcgacggcaaggcatgaccagga

SEQ ID NO: 18440 - DNA, 221 bp, Oryza sativa
gactcctctggccgaaagtaccaccgcacccgcactctcacatttgggcctcgtgaccctgcagcctcaataacctcaactcttgccacataagagggctttgatgtatcagatgccctcattagcacacagaccccagctgccagaaacatataagagaatcagacaggtatcgagatattttatgcctataaaaaatagtgacatgggtcatcatcaag

SEQ ID NO: 18441 - DNA, 435 bp, Oryza sativa
  unsure (1)..(435): unsure at all n locations
agcttgataggaggacaggtaagagcggcggtgcgngtcttatagggatccacacccttttgggtgtagggaggtgacgaaagctacagctcaactcaccgagattcttctgcttcttctttcccctggacccccttgcactgttgcacaggaggctgccctgtgtattagtgtaccactagtaattaagtacataactccatcaacttagcttaaattgagattggtttgtcgagcacacatgagccaggcagactggtgtccctctggagctctgctgcttgaggatcactccatctccagatggtcaacaggagatgattaccattgcgcgtggtgttctgcatgtgcacgctgaggctgagttgacctgcggctatggtacccacaacccagtagtaagtgccaccattttacccctgttcactgaactaa

SEQ ID NO: 18442 - DNA, 415 bp, Oryza sativa
agcttgcaccttctacacctactggatacgtttctgtatcttcagccgcactcctttcagcaaagaaggatgtgccaacacagtttgggatgcccattcctgcagtctgtggttggttgaagcagcattggaatggtaacttataagatgttagcaagccaatgatgcctcctgcacgattaatatccactgggcaacgaagtgagtgttcttctgttggtcgtcttaactacatcaagaccatggagcgagagggtggtgatgggatgtcatcatcacaaataccacctatgctgacacagcatcatggatcatgcagttcagcttctgcgaagatttcatgcggtgaaaatgattctgttgactcgcactctattcatgaacaacaagatctgacctcacaaatgcatgaatc

SEQ ID NO: 18443 - DNA, 459 bp, Oryza sativa
gcattggtgaacatgagcttttatgtatgaatcatgatgagtgaaagatccatccaaggagtgtatactcaatgattaatttcattttgctcttgatcttgtctggtttctccggccaacacatggctgtccaaatccagacaagcccaatcaaatccaatgcagtatctggtccggacagggttgtccttgtacttagctctgttgctgattgaaatggactagtatttcctgacactctttgcagaggaagggcatattgtcatgtgaaattatgctgcatccggctagtcttttgctcttctttcttgatgccaatactcaaaggaaaataagaagatacagttaaaaaaaagatgaagaaaattacacaatggagaagaaaaggtatggatcatgcaacttctcctgaacctgttaatctgctcgaaaagaagaagataatacaaagaggagata

SEQ ID NO: 18444 - DNA, 429 bp, Oryza sativa
  unsure (1)..(429): unsure at all n locations
agcttggtcgatgttctaatcttggtaactgtattcttttgtatataacaatatattagaaccataaatatgtgaagctttctagcacatagtatagagacttacatcctctgcgttagtcctgtacctcccattaaccctaaggaattcgcacgcgtaatagccgcaaaggaccgttcctcacggttgctggtgacacttcaggacatatcatagaaaaaaatagttaaattttgcaattagtgaaacaattggaatacattaagtgagtggagtattaccggccaataggtacgtattagcagcttctcccttgttcgggtctgttctccacccttgaacttgaagtactcgtacgcgctgtatggatgttgaccgttncacattaaggaggatatttattttaatacattcatataaaaatgcaag

SEQ ID NO: 18445 - DNA, 481 bp, Oryza sativa
  unsure (1)..(481): unsure at all n locations
acacatgaactagctgttatggctanactgtttaccatgggaagttcatattgtctcatgaagaacagagttgcaaaatgatttgacagccgaagagtactataatcttatggccgatgaaccggaggacttggttcagtcgcaattatgagcacttgcaagagttactagggataaggaacgtgttgctcggcattataataagaaagtggtacctaagactntttcggacggtgagcttgtgtggaaattggttttgccgattggaactcgggattgcaaattcagcaagtggtcaccaaattgggaagggccgttccaaatccataaggttgtgtctaaaggagcatacctgttgcaaggactcgatggagaagttnttgggcgagcgcttaatggcaagtatttgaagaaatattacccaagtgtttgggttgatgcatgatcggctaatattgctgatacatgatagccggtgcgt

SEQ ID NO: 18446 - DNA, 438 bp, Oryza sativa
  unsure (1)..(438): unsure at all n locations
ggctgcagcttgaccactatatgggtcaggtgtgttgttttagatgcaacacttcggccttaggagcgttatgccaggctgtactgttatgccaggctctacagtccttagttcgacgtcgaggcattaaccatgaaagtccccatggaggaccaagagttcccatagaggttgtatagtggctaagggatagaggaagatatagataaatttaaattgaaaattaaatttaaaaggcactgaaataatnttagaattagaaggtatttaagtaaataagggaattcaaataaaattttttaaatagaaaatttggtatcaaagcaaagagtttgaaattagacaaaattaggtccaatactggaattggatgtacggtttgagagatatgggttcttgaagtttgatttgaaataataaataaaacccagtaaaaaa

SEQ ID NO: 18447 - DNA, 438 bp, Oryza sativa
  unsure (1)..(438): unsure at all n locations
ntcactctcatntattctttgtgttccacatagatgtgttcttttgtttgtgtacaatcagtagaatagactgttgttntaacataaaccactacgtatgtatgttctggaaaaataagaagataaataagagataacgatgcanggatatgtgctagctgcagcctagtaattaatgcatttgattcatccttcttcctcattgtgtgggcatgcaacaaggaaaaatatgtatataatacaaacctgaaaactagatgagataaaaaaaataaatgtctaagagttatccacgtcaacataagtatttataataattttcagatttttcactgtatattttattttcttgcacaacacctgcttagttagttcagctaatgttatattangacttgatcggaagtgctggctgcagctgcagccaatcagccccaa

SEQ ID NO: 18448 - DNA, 354 bp, Oryza sativa
gtgcgcagccccaggaccccattcctttaccccctcccgcgccgaaggagagcgagatcgagctctacgcgcgaatcggcatcgacgatgacacgcccgaagaccccgaagtgctggtacgtacgctactcgtggaacttctgtgccaataatatgtggctgttttagatgaagtcaccggaatcacagattgaaatgttcacaagctatagcgcggcattctctggtttactggatgatttatgctcaatcgttgttgtactatttctaatcaatgtagaaagtcctgacttttactcttgtgatttctgctccagtccttgtatgctaatttatggttagcatatcgtaact

SEQ ID NO: 18449 - DNA, 472 bp, Oryza sativa
  unsure (1)..(472): unsure at all n locations
tctattgataacatgtaaagaaaatactccctccagcctattttatgtgcaactactaagttncgcattcaacttttatcatccgtcttatttgaaaaattttacaattagtattcttgttgttatgagatgatgaaatatgaatagtactttacttgggacttatgttgttaatttttttcaaaagattttcaaataagacagccgggtaaagttgggcgtggaaaatcgtggctgcacttaaaatgggacggagggagtaataataactagtatggtgacccgcacagattacgcgggtagcattctattttctcgtataatggcgccggcatatatatttccatantttattattaaaatatattaaaatagcaacataactnttatattatgcactaactggaccaaactaactaatgtgtactctcttcgtcccaaaaagaaacaacctagtagaggatgtaacccc

SEQ ID NO: 18450 - DNA, 352 bp, Oryza sativa
accccgcggagccacaacataacctagaaaagagactcgaactgagcaaaaagagcacaccccaaggcgaccaaaaaaacgagcatcacgcagagcaacaaaaacagcacgcaacagaccatgacgaccctctattgaaccgcccatatgacaaagacaccaaaatataccaccacaaagctgccaacgaaagcacgcaaaacaccactcagcaaccacaagaaagaactgggcgcattaccgagaccaaagggcatgactaaccacccacaacagccgatttaatcaaaaagcacgaagccaaccaacaccccacctcaagcgacacggggggaaccaccccccaaacaaa

SEQ ID NO: 18451 - DNA, 475 bp, Oryza sativa
  unsure (1)..(475): unsure at all n locations
tcctccataatccataggagaaacctctacgtctggctcttgtcttatcttcatagaactcaccatccaacaaattctctgtctctggngattgggaaatataaagcaagactgagtaccaccaccgtactcaataagtcataccaaggggaaggtacgatgctaggatattaaggaatgtgtgataggatatttgaagtaaaagcagcatttctaaatcataaggtgaaagcagtaaaacagtagataattaagtagtattaacatcatcactgtccaacactaaaaccacgttgcgacaggcccaacccataccacctaaactataccagttcattaagtcaaattattaaggtgagactaatttcgatgagctggttgaccgcccaataactgcgggcacggctattcgaatagttttactctgatccgaggtgtacaactttacccacaagacacgattgcacacatgtta

SEQ ID NO: 18452 - DNA, 244 bp, Oryza sativa
  unsure (1)..(244): unsure at all n locations
agcttcctagttagtgttttctcctaaatcctatgtttgngcgagccatttggcttgctcaagcctggcccggagggggggggatattatttaatatcaaactactattccatcattactacactctcttcttatactaacttaccacttcttatcatcaaaactactatccatcatcaatattaataccaaccatccaaattttcatacataactataatactatactccatacaaccaacac

SEQ ID NO: 18453 - DNA, 453 bp, Oryza sativa
  unsure (1)..(453): unsure at all n locations
ntgcactanaaagtatatgatctgtcttaaggatgttatttttgtatngagcctattgcttgcactcactaccaatacaatgttgagaggccgaaggcttcatgaactctgtataaaaccgaatgtcctccaaacagcttcagttcaatcttaaagttttactacaatctagagaggctttaagcttttgactccatctgtgtggctgcagcagttatttgttttataatgtaatttgtccaaacaaactgtcatttgatactttaccatcagagctatgatggtgcagaaaattgatgctccatgatacagcacggtaatttatcatgtcataatatttttggagttgcaccatgtaattagaggaaaattgatgtactttacttaatgagttatgataagttcgagcttaatataaagaatcattgaacaatgaagtatggaaaacaactt

SEQ ID NO: 18454 - DNA, 374 bp, Oryza sativa
  unsure (1)..(374): unsure at all n locations
agcttgtgttgaccctataatggtatatattcatgaaccttcggcgtntacaaagccaacctcgatgtagtactgtctacagtagtctgcagtgcaagaatgcggagggagtaacctgaaccaaccatattttgagcattccctttcgaagatgtgccttccagtaacatgatagccacagctcacggtgatagtacattgttcacagctggccacttatgggaatggtcgttatctgaaatgtgagtgggccgttctcttcgtaacaaatttgccagaattcaatcttctgataagaacccgacatggatggggagggctgactttgaaccataaccaactgcttgtctaatagattcactccactgattggc

SEQ ID NO: 18455 - DNA, 478 bp, Oryza sativa
  unsure (1)..(478): unsure at all n locations
tagctggtcaaccttttagtgtcttggtctcacacggcttaatctcttatggttaagccgncacctaagcttatcaggtactaacacgcttccctgaacttcattgcttccaacgctgaaactggatcatcaagtaaaaaacacacagcatggatgtgacattgtgacccaagcagcaacctgaagggcactagcctttaatagccgaaagggctgattaatccaggtccaaccctgcagcatcaagatcacaatagatctgtacgaaagcaacaaatcagcaagtgacacttcgtgctgcgaaaagctaaatggcaccttggtattagtagtggcactatcttgtataatgctaggagcttaattagctcccaggttatgataaactactctggtttcgagggaggcgtcttcgtattcgatacaagaacagcaatttgcaagctccatgggagacaccaacggaagagacagaaat

SEQ ID NO: 18456 - DNA, 333 bp, Oryza sativa
aactctgatgggaatgggacgaatggcaaagcaaggattgcttacgtattcatagcgcccaatcgatagagtcttgcacttgcactgcagcacgcatgcatgatccaagtgattggatggcgtgttggcgaaatatacgtctatgagtgtagctagctatagctagtaaaacttgtgtttagtaagccggatccaatcttgtttgactgccacaaaacttacaaattaagtctgtgtgatgctcatcatctcgtatatcgcttaaggtatctatttctgcacctctttccaatggctagctaggcactgcacattctgtactttcatatatac

SEQ ID NO: 18457 - DNA, 480 bp, Oryza sativa
  unsure (1)..(480): unsure at all n locations
taactcgttcaaataanatatgggacagatctaattcacatttcttatccgtanaaccaggtaatatcgactgctctaagtattaaaaccttgcaaaatgactccctcatctcttttaagggtggttntttttgctgacatggcatattgatttatttcacacgtgatgctttggcatctacacctatgtggcaatcatatcagaaacaaaaaccaaataagtagctataggacctacatgtaagggacatgcgaaaataaaatagaatctgtgtatgtcagcttccagtctccaggagccaagttttctcgttgacccccgattttttttttactaaatcaacgaggtgnggggggggctgtctcacctgaatttgtcatttcattgaagggaagagtgtaagggtcattacatcgagtttagagcttgtangggaagagaagaatttctttccaatagaagatacatggcgatcctta

SEQ ID NO: 18458 - DNA, 479 bp, Oryza sativa
cgctttaatccataaatggatctctttagacgacatcccatatttttgtttcctttcatgacaaaacctttcggttgcgccatgtatactttttcctccaaatctccatttagaaatgccgttcttacatccatctgatgtaattccaaatcataatgtgccaccagtgccattataatcctgaaggaatctttacaagagactggagaaaatgtctcattggaatcaatcccttctcgatgcgtgaagccttttgccacaagtcacgctttatacttttctatattccctctggagtcatatttggttttgtagacccatgtacagcctactgctttggctcctttaggaatgtcttctatatcccaaacatcgtgtagattcattgatttcatttcatctttcatggcttccaaccattcagatgagcgagcgcttctcatggcctcttcatatgaggcgggatcatcctccatatg

SEQ ID NO: 18459 - DNA, 457 bp, Oryza sativa
cgtggcggcggatgcatgggtggcgccggttactatttttggtcgagcttgtcgttgatggcagccacgaagatacacgtatgccaatgagtgatgacgaacgaggatacttccgtcttgtgggcgagatcacatcaccggcgtcgatgacaattatggagacactccggtcgtgcgggtctgagagtatgaccggcgatggcgacgagtcggaagttgtcccgacaacggtgtacatatgaacattttgtcaccgagcggtcgaggccgatgagtgtgatactgtagttgttggcatgaggatgactccgtgtgatgaagcgaaagcatcgtggatggacagcacgacgacctcagcctgatgaagataaggaatcatggtcagacttgtcgacggcgtgtgggcacctagcgatggcgctccagtgttctcctcaagaggcttgactatgaatga

SEQ ID NO: 18460 - DNA, 281 bp, Oryza sativa
acgacaaaccacacagccaggaacgacaaaagacctacgcccgccatacaaggatgaacaagaacaagagcccaagacgcatctgaaacgcttctaccgacacggagaagaaaaaatggcacaaaaaacaggagacgaaggcgaaaacaaacacacgccaaggcagacagcgaggcgccctcgaagaacagaaccatacgggaagcgcaacgggcactgaagtaggcactcaacgcccacgaaagaaagactccaccagtcgccacagaaaaaagccaacc

SEQ ID NO: 18461 - DNA, 463 bp, Oryza sativa
  unsure (1)..(463): unsure at all n locations
gcccacggacgcggtgcgagtgtgcgacgagcccagagaggcttaccaaacgtccaaacctccgcacggcgccgccgcacgatgcccccggcgccaccgttctcctcccacggcgacttcgtcgccgccctccaccgctgcgccaccctcgcgcacctcaagcagctccatgctcacgccgtcgtcaccggccgcgccgccgcgcagaccaccaccttccacctcctccggttcgcctccctccgcctctcctgcctcccctacgcccgccgcctcttcgacgccacgcccagccccaacgtcttcctctactccgccatgctctccgcctacgccgccgcctcctcccactcgcaggaacacgcccgggactccctcgcgctcttnctccgcatgctccgccgcggacgacccgcgcccaaccatgtcgtgtacacgctcgtactccgcgccgtctgcgcca

SEQ ID NO: 18462 - DNA, 422 bp, Oryza sativa
  unsure (1)..(422): unsure at all n locations
agcttgaggtaatcttgttcatcatcctcattgatttctcgaggtattgnnccaacttaggtatgagggccatgacgcanggaggcggggggtgagccctagcgacacgggcatatcgcttctgccactccgtatccggatcatacctgtgcagcttccccgcccgtcggtactcctccaccacctcctactccgtcatctccatgtactggtgcgcgtccgcgatcaacgcccgcaagaaggctttcgccgcttcctgttccgcagccgtccacttctccaagtaagcgtctatcccgaacggcttcttctcctgccgaggctgtttctcctcctccttcgcgtcgccgacggcggaattctacaccggcgtctcgccgtctttgcgctccatcgatcttcaaatcgaagaattggatgga

SEQ ID NO: 18463 - DNA, 337 bp, Oryza sativa
  unsure (1)..(337): unsure at all n locations
agcttctccaggtttcatctcaaatttaatattctcctttttgaaaagatcacgacgaagctctntaatattatttgttccttgatgaaaattattcaaagcaacccaaatctcatgagcagtttgaagataagcaacatgatcataatccgaacgagaaatcccactcaaaagaatattgcgagctttgacaatttagttcaaaagcagttttttcagcagagtattaatagcttcaggaatcacataaggaagagaaacttttctccaaatatcataattctcagccataatgtaagattgcattctactacaccaatgagaaaaatccattcta

SEQ ID NO: 18464 - DNA, 388 bp, Oryza sativa
gattcgcccggagaggcagttcgccattgtaaacccggatcgcccgcccagtcgcttgacgtgttaacagctgactatactcgacgaccgaaacatcgccgatcatcctgcgggcttcgtcttcggactgttcgagggtcaacactgtaaaagtagcgcgtgaagctacgtcacaagacagataaggcgagataacacagcacagcagtctatagcacaagatgtcttactgtgcgccccctcatggagtatcaggttcggcaaaccgtcgacttcttcgccttgctcaaccgcgacttgccatgactgggagaggggagaaatgcgaagcatacaaaatttctccaccaagtcacggtagctaaggcaggagcagaccttccgcagt

SEQ ID NO: 18465 - DNA, 433 bp, Oryza sativa
  unsure (1)..(433): unsure at all n locations
agcttgtgctataaaggaagatgaattctatctttagtggtaaatntcaagctccgttctgatagtgaaggacgatcaagtgtgttttctcgactattggggaaacctagaactcttggtccaagaaagaagtccagtgccaaagcattcccatcaatgtcttccggtcaccttcctcagaggaaaaaacagtggaggaaaaagcagagcaagccatttccatgtgatagagatggagtattgggtacacatcaagctaataagctgagaagaattccagctttggattattcatttgtctgggatgatggtagtcgatccaccaattcctttggtagaaaaccaagcgatattcagacaagnttagagcgttgtgaacatgggaacaaatgggatatgtgtactaaagaacatagcagaagcaatgagttca

SEQ ID NO: 18466 - DNA, 421 bp, Oryza sativa
  unsure (1)..(421): unsure at all n locations
tggacatagcctgaacgatatcgnctcatattctnttggttcttgatgcgtactcgancagaacatccctgcagaagaaaaggctctctaatagctcagtaaaaccatctctcgatacatcgtcaagttattctttctgaattcagacaacaattcttgttactttgttagtaatacatgaacaataaaaacaccatcttttgcaccaaaaaaaaagagtatgaagaaattcagacgtgtgtaaactggatagtaaaacatcgatcactgtaaggtgagtaggtgacctgaaagattcacgatggtcacgccagaaggcaagatttcgctcctccttgggttcaactctgagaaacagccgatcagaccagtccaggatctgatcttgggttaccacccggtcagttcatacccttccacc

SEQ ID NO: 18467 - DNA, 274 bp, Oryza sativa
aacgcggttttcatatgaagctaagaatctttacggatgacatactaaaaaaccagttttttggtccgatatctggaggtcatttccatactctccttaaatttgcgcactatgttctattacataaagtatttcccgttgatatttcccatctacatccaaattcttcggctatttcttctggcctgattttcccctttgatacttcctaattagttttccattccctatttgtagttgctacccaattgattccaaaaacgggattgcccat

SEQ ID NO: 18468 - DNA, 483 bp, Oryza sativa
cttttcttgtaaacccatttgcatcctacaggcttgcacctatatggtcgctcaacgacttcacaagtaccattaaacataattgagtctatctcactgcgtaccgcttcctttcagtagttagcgtcaggagatgaatatgccttttctatggttcttggagtgtcatctacgaggtatacaatgtagtcatctccaaaggatagcaaccctttgtctcttactctttcgagtatctataatgttatcctcctcaagattttcctcaggtgtttgatcattgtgttctatcggtgcaaagtgttcatgggataaaacaggttcttgactagaagtgctaggtgtatttttcatgggagattcattctcaaagaatgtggaatctctggactcagtgattgtaccaactcacatgtcgggtactccacaagttattattaagaatctataacccacgctatgaatagcataaccaatgaacac

SEQ ID NO: 18469 - DNA, 423 bp, Oryza sativa
agcttggcgcacacgagagagtgctttatcttttaatatcactcgcagagccccctacctggcgcgccagatgacggagcttgtggctcctcaccgggagaccgcgcaggcctccctttgccggttcggccgggggccctgggtgagggtctaagcacttggtctgtggaaagttcgcgagagtggaaacacacaagacacgggcgatgtatacaggttcgggccgctgagaagcgtaataccctactcctgtgttttggcggatctgtgtatgaagaagctacaaagtgcgagccagcccccgatcggtctgggatcggtttctccccccttttcttccttttctaagtgggcaaggtgcttcttttatatctcaggggataccacatgcccatccctcctctctttttttgcgggggactc

SEQ ID NO: 18470 - DNA, 275 bp, Oryza sativa
  unsure (1)..(275): unsure at all n locations
tactatcatgcaaaactgagggtcagtcgtcgttgccaatggtagtctaccggatnttttatatataataattaataaccccgtaattaaatatttggtaattgcgtgcaagtaattattaaagtatgatggacgctgtttttgttagcgttcagatgtggacgctattctctatagcgtgcaggtctgaacgttattgtgaacagcgtccaccatactggtgcagtcgaaccgtgccaaaccggtccgaacgtattcacctaaaaccaatcagc

SEQ ID NO: 18471 - DNA, 355 bp, Oryza sativa
  unsure (1)..(355): unsure at all n locations
agctngncattttcacagcaaacacttattattgctctcgcaagcgctccagactatccctcttacttggccgttctcgtgctgggggctcgatatactcggaccattcccacgaggacagggcggctacaagttcctgtttgtggccatcgacaagttcaccaagtggattgaagcgacgcccacgggggaaattaacgccgataatgccatcaagtntatcaagggatattctgtagatatgaattgcctcaccgcatcataacaaacaacggctcccatgtcaatagggtcgacttccaggattactgcattggattgggagtcaaaacttgtctcgcctctttttctcacc

SEQ ID NO: 18472 - DNA, 484 bp, Oryza sativa
  unsure (1)..(484): unsure at all n locations
ntactagcatcaatgtggaccgctgggcgactgtgaaatctgtattctgtgcaagccacaattacaatcagcaaccgttaagagcaatttgtacagcatatggcaaataacaaaaataatcagaaagaatggcgacatatataaaagaacatatactaaactaataaacaaaccaagatnttacaattacatcacaggctatggtacaaagctatcaagcagatatgctggcgtaaaaccccaaccaatcaagcctctaaaaataaaaaatcaaacagcagagataacgaccagctgccttagtcgtcgcctgccgtggatatggcaagcgttcttctggagaattccatgtggagttgctttacgaggttgatccaggcaccaacgctttgcccgtctattgtcacccagtcaacgactgttgctgctggttgttcataccattcgtcaacctgcaagtaagggcaatattgaagtaaatgct

SEQ ID NO: 18473 - DNA, 372 bp, Oryza sativa
  unsure (1)..(372): unsure at all n locations
agctncgagtatacttatatcactgttcatgtttttgcaagctcctctctatccaccgtcggatccatgctaagcctcatacaccggcccaggtgctcccctcgctgggggcttggcccgccgatggcatccaacggcgcaaatgtcgtcttctgctgccgcccaaacgcagcagccacacccacattcactaaggctcggatgggctattccttcttttcaatctggttgcaaaatgcagcaacttctttaaggcattttccttaattttattcttacaaacgagttcacttacataccctaccaaccaggaacgaccacacctctcagacctttagaacggaaagaaataacgaacttggctcgccaaaa

SEQ ID NO: 18474 - DNA, 477 bp, Oryza sativa
  unsure (1)..(477): unsure at all n locations
gggcttgggggtcaagataatccatggtataaaaggtgatctcttggggtggtangatccatcgcatctcattgaacacacacccatcaaagtttacgaagccggagtgcacggaaccaagtcgccgggagatctcgttgaatctttcgattacgatcttgtcggtaccatctgtttcgactactctctttgtaatctgttctcatcgtcatcaatctcatataaactggactagggctattacctgataagggccctaaaccagtataatccttgtcttttgtttgcttgatgtcgtactacgtagactctcgttccaacgtatcccaatacttaactcattcggtccgcatgtatccctcgtcgacaggtacggtcttaataaacaactttgaccattattttctattatatatatgtaaacacgtgtaataaatatatgatgttattaaagtactccctcagtaccataatata

SEQ ID NO: 18475 - DNA, 314 bp, Oryza sativa
  unsure (1)..(314): unsure at all n locations
ttaagcgactgcagcatgcaagcncgaagactagaattgattatttctaaaggaatagaggagtgggggacagcttgtcataggctccgctgatagtcgtctttaaccttcgacttcttcctctcgaccgaacgggagcagaacgggaacaccgcgcgcacggaaggccggcccgaggcgacccggcggcggccaggggaggagcggagaagctccggcgaccacccaccggctgcggcggcgcttggagggacagggcgcatggccgccatggctgcgccatatcccgagctcgctacaagggctaggacgac

SEQ ID NO: 18476 - DNA, 476 bp, Oryza sativa
  unsure (1)..(476): unsure at all n locations
nnttaggggaatattcaaggtgccgccaatcggtatattttatttattcgtgccctcgatatggacaaaaattaatttgtgcttcaagccgatagactaacaaaaaaggaggacaatgcttcatcatgttactgtcacaaaacctatcacgattctctacgtgaaaatcgcatacaatgncaaacaaaggtagaaatgcattatacactacaactgagataaatagcctacattccacacaatttacttgtctgtagacacttcattcttcttaatatatagttcatttgactcaaaagtgtgtgctgtactgtccatatgcatgacaatggcaaaaaaacaatacactataagtaaagctagtgaacaaactttactatctctccactcaaaacaaggtcttaatcattgatatggtctctntcaatcaactaatgcaacaccatataacaatgaatattaattttaagacctac

SEQ ID NO: 18477 - DNA, 354 bp, Oryza sativa
  unsure (1)..(354): unsure at all n locations
agcttgagctgatgctgnnctatgtatgtttttggtggtgaaacatcggctagttcatctgggagttggtcgtagattacaaggaatctatctctgattgatccacaactgaccaccatagtttctagggagccttcaagccactttgagatatccagcaaggttgttttcacattatcggctagaggcaccaaggctttacttgtaatttcttcctcttcatccataaactacctgatgtcaaaagaaaacatatctgctagaacattgaaacagggaatattgagttactgattagtagagtaacatgatagccgatatgatttgtggattcaaaagggcacttacagggat

SEQ ID NO: 18478 - DNA, 478 bp, Oryza sativa
  unsure (1)..(478): unsure at all n locations
ntactggtgttagtattcatgtttcacggtgcacattactgtattacacacactctctnttcaaaggttcttagcttcataatcaatctgtccagtcatctgttctcttgaattgtttgatacatgtgcagggaaaaatctttatggctatgaaaatgtgcatacggatgttgtaatcttcagaaatgttcagatagatgacctgatgtgtttcaaaaatcatgtgctctgtaaagaactggattactgtttgcctgtatcattgaaagaaactgacttcctctagtctggtttacttagtagcgccccatccttctttntttttttagatttcaccaggggggagagtttccccaccttgattttcattgaaagggattgttaaagttacatgggagtaagaagaataatagcagttacagggatgaaagggcagaagcgaagcaacgcttccactgtgaaactatgggacatacat

SEQ ID NO: 18479 - DNA, 428 bp, Oryza sativa
  unsure (1)..(428): unsure at all n locations
agctngtcacacatatccttacttgcaagattattttatctacctccatcaacgatgaccttgcacacctttcctcccactttagctcgggtctgaaaaagattgtttctttgtccattttcagcatccttaagttgtacactcagaacttgagtcacaacaagtgcagcaccttattcaaactcacattgagtatcctcttttccaacaacatcttcatttccatcatcaagaacatcttcttacacctcactagctgaatcaaactctccatgttcaatcacaataatggcacgattgtttggacattctctaacaacatgcccacggtctccacacttgaagcattggatatctcgactcctagaagtagagccaattgaggtagtagatgagaccgttggtttactcttcacactagaaatgac

SEQ ID NO: 18480 - DNA, 459 bp, Oryza sativa
actaagcttgttataagttgggtttaaatgaatgcgaagaagcttattatttgttgtttttatgtgggcttaacaaagaaattcatgacatgcttgattgtcaaagatatacatctctttctcatttgttacaacttgcttgcaatgctgaaagtaaaatagaggaggacatgaagaagcaacatgctatgtttttgtcttctattactaaccatttgcaggaagtgcataatcatgaaaaggaggagagagacatgaaagagccgccagtcccattgatcacactcaaagtcgaggcacctccattatctgaagagggcatcaaaggtaaacttaatggtgctgaaattaataaaggtgagtgtgttgttaatgaattgaatctgtgcacttttcatgctatagcagagcaaccattagtggaaccaactgctgagattcctttgtcacaaaatagat

SEQ ID NO: 18481 - DNA, 274 bp, Oryza sativa
agcttgtcctggcatcgataggtgcactattgtgttatgttgtagcatgctccgaggcggaagaaggaccgactctcccgtcttacgcgagaaataagaaatgcaacggggtgtgcctgtacccctttccagctgaaagagcaatgcgtgctgctgaaagcttaggaaccgtgcaacggctgaagagtctcatagccaagtacagctctgtgcgccgtgccaacacaaatgggcattaatttacaaaaggagtggcgaacgcttatctacctat

SEQ ID NO: 18482 - DNA, 268 bp, Oryza sativa
aagaagagagagcgcaggatacactgctatggagcgatgtgaagggcgtgcaccttaacctggcttaataataactctgtataggatggagaccgtggctcgctgacgccactagcgaacctgtggggctcaacaggaccgaacccacgctgcagcgcaccagtggtacccgagactatggccgatagaaggatggagtgcaaatgcctttgctgtcggcctgttgattgtttacagagactattgtccactgtgtaatgagcacaga

SEQ ID NO: 18483 - DNA, 332 bp, Oryza sativa
  unsure (1)..(332): unsure at all n locations
agcttccaatgcaattctctccgccttgtgttcttattagttcaacaaggttgatggacttgaggaggccaaggagatatgggatactntgcaattggctcctgagggatcacccgctgttcgtgaggccaagattgaattattggaaggaaggcttggaagatttgtgatggatgagaacgagacaccacaagagatgacaaatcactttgtcgctttgnggtcaagagacttctccatgcatatggtctaagaaatcccactcttgtatcaatgatacgggaaacgaaagacttcaagagactcaccccaagtgacattcttgaaaaaat

SEQ ID NO: 18484 - DNA, 437 bp, Oryza sativa
  unsure (1)..(437): unsure at all n locations
tatggaaagtacanagctcggcttgttgctaatggctatactcagaaagaaggcgaagatttctttgacacttactcacctgttgctagattgaccacaattcgtgtgctactctccctagcagcctcacatggtcttctcgttcatcaaatggacgttaagacagcttttcttaatggagagctggatgaggagatctatatggatcaacctgatgggtttgtagttgaaggtcaagaaggcaaagtgtgcaaattgttgaagtctttgtatggtctgaaacaagctcctaagcaatggcatgagaaaattgacaaaacattcacatctgcaggctttgcagtcaatgaggcagataaatgtgtgtactatctccatggtgggggtgagggagttattttgtgcttgtatgttgacgacatactgatatttgggac

SEQ ID NO: 18485 - DNA, 311 bp, Oryza sativa
agcttgggagatgcgtgcacgcgaccagcgttttatctgtggatgtcaaacttttctgtcgtctaaaagtccccttttgcgtgattgtcaaacagtaaatcttctgttcttactttacccttttccttatttttctcaataacaacagagatgtacttgcacaggatatatcttaacggagtagggcatgttaggttactgtagtagacgttactcctatatgttaggatagagagaatcgttaaatcttttctagtttcattgtggtttgtgccgcgctgcacacttgcaccggtgtgatcaacttgatt

SEQ ID NO: 18486 - DNA, 480 bp, Oryza sativa
ctcagcttctggtgggaacctgacacacagctctatgatgtcgattttgttatctgcgcttctcacggagaagttgctgccgtccgtcgattgctcgctggagtcgagtcaaccagtgctggaagaaggaagaagtctctgtcatggcttctacgaggctatgtcaaaggcggctttcatctggaggcctccgaaacactcatgaagatgcttgacatgggcttgtatccagagtacctagacagagcatctgtgctgaccgccctgcggagaaacatacacgaatctggcagcctggagtcctacatgaaactctgctagcgactctccgaaactgatcttgatggaccgtgcgtcatatatctatacgtgcgcacagtcaaactatgtatgatgcacatgctgcgagcctatctcgctctcgaagtacttatgctcatgtgaggctggagcttcaatgctttcggggctcttgtgaag

SEQ ID NO: 18487 - DNA, 396 bp, Oryza sativa
  unsure (1)..(396): unsure at all n locations
agctntataaggctccctgaatgttttttgtttgctatcagaaatcggggttgtctgtacgaaaccttccatctgtgtactcatattccatagcttttaattgcactgcttatgctacatcaacagatcaatgtcatttgtttagagctgacttttggattgatttgttcccttttttcagcaaagtatcaatttagtgcgtccaggagccctgaacggctacctctgtgcacatatgcaattcaattcaatttttttggcttatgtatcatccaagcatagaattgattgtccattacccacttgaggattagctatttccttgaaccatagcgactgttctaaaatatccaccaaatagttccccctcttttctcttataaagaagaggcttta

SEQ ID NO: 18488 - DNA, 247 bp, Oryza sativa
aagccgccagcatacgagaagaaagagcggaggccaaacaaaactacgagaaaacagccccaggaaccagaaggggggactaaaatatcaaagcacggaggagagatgcacagtagctacagcaaaaatggcgggcacaacaaaactacgaggaaacaaaggaaggcggactgaaaacttcagaagcaacctatgtagcaaacggcgacctcatcaaatggtgagacagaagagacggcaacacacg

SEQ ID NO: 18489 - DNA, 423 bp, Oryza sativa
agcttgagctgaattataagaggctctattgttctatattgtatactagaacaggaagagagtagagtataaggagtcggaagaattccggagttgttggtaatcttctcctatttcttttattctgtctattactctgaattcaatataatattcttcttgagtaatttagatttatcttgtgagaattacctcttgattagttccaaattagcatacaggattattgttcgctataatcaactaaaatatagtgattagtttggtgagttataaacactatagtagatattaattgcttagacgtggtgcttaggtaattattatccagtaattgctgcgtatcccacagtatgttgaggtgtgtgtagaggtggtgatagccctcgagagcactataagcctccctgtccggtacgtagt

SEQ ID NO: 18490 - DNA, 468 bp, Oryza sativa
  unsure (1)..(468): unsure at all n locations
taataagtcnnaataactnttctttgntgccttgactgttctgttgtttaacaattgattgctgcttacacccatgttcaccttcttaggtatgtattcgaagatggcattgattttgttaaatcttcagtcatagaaggaacgcaagtaattggccacttgtttttttattctctccggttgaaatggattgaaaatattgttttactgacatgtcttatttatagcatgaagaagactcagatcaagaggatatcgatgaaaaggatatgttaaaaagggagctccaggtgtgtgcaactagattcatatctgataatgcaaagtattcgctgtaactttcctttagaagttacaacacaactatctacttcagaacatagcaattgcttggtttagatccttcagttgtccatctttggnttctggtatatgttccagcatgtttctttgaaccacgatgagcgt

SEQ ID NO: 18491 - DNA, 435 bp, Oryza sativa
  unsure (1)..(435): unsure at all n locations
agcnttttctgaattccaactctgttgtcttattatctttgtgtcaaattttcatcttgccacatactacatccgtcctaaaataagtgtagccatagatatacgtgctcagtgtnttgaccatccgtcttatttaaaaaatttataaaaaatattaaaaaaaattagtcacacataaagtactattcatgttttatcatctaataacaataaaaatactaatcataatcttttttcaaataagacgaacggtcaaacgttggacatgaacagtgctaaaactgcacttattttgggacggagggagtactagcaatgctctcttttttctgtaaaaatacttagaatgtataggtttatagcttatgataacantatcttcagaaggaacaaaacgtagtagtttcatcaagatgtacagtacataaaagaaca

SEQ ID NO: 18492 - DNA, 457 bp, Oryza sativa
  unsure (1)..(457): unsure at all n locations
taggtgcatatgatcggtatgatagttatagaattcattatgttttcagcttcagattctcaagttaccaaccagctacttcgtagcttgattgagttcggtagcttgagatggcagctaatccctcacgtatatagaacaaaacgacacatgattaattaagtattagtttttttaaatagattaatatgattttaaaagaaactctcatatataatttatttttaaaaaacgtaccgtttaacaatttaggaagcatacgcatgaaaaacgaagatgtgaagttaactcacactgccgaacacaaaattagaatattaagctcccaaacatggcctcaaagtgtaaaaatacatgttgcaagttttagagcggtgaagttcanatatactgtagcanacagtgcatcctacggtcacaaagtgcgaggtcccatgtttgaattctaaaataattc

SEQ ID NO: 18493 - DNA, 422 bp, Oryza sativa
  unsure (1)..(422): unsure at all n locations
agcttcacactccactgtcttgatttttgtttttggagtacgctgcggaacctccaaatatgtgtgaaacatagaggtcagagtctggatatgctgagtctgagtcctgagtagccgcttctgcggccttctcgactacacgtactcgctggcccttctccaatgccaattgcttcgcgagtgccattttcaagacgaaacaagtctccaaagagtgcttgtccgactcgtgtatagggcaccatattttctccgtatcgtcgccttgtgggtctgggtgcttgggcgggtccgcatactctgctgcgaggacttctgtttgagctttcctttntcccactcctgcgactcttcttcttgattgactcaggtgcatccttggatgggttcttctctccctctatcttcggcctgtcgttctt

SEQ ID NO: 18494 - DNA, 468 bp, Oryza sativa
  unsure (1)..(468): unsure at all n locations
tactcagctgactagttataaaaattagcacatccaaacctatttttttttattaaatctaacattgaatatattttgatgttatgtttgggttgggctgaaaatgcttctatgtttttctataaacttgatcaaagttaaaaaagtttgattaggaaaaaagtcaaaacgacatataatatgaaacggagggagtagctgctatgtaagttagttacattatgcagtgtgcaggaccaaaaagagtacattctatagtgtagattaacaatgactatgctaaaaagggagcactaaatctttaaaatcacgctcanggagcaattcatataaagcattcattttagaatagaattctcacatatatgataaaatattatcgatatcttttcagatgttcagagccaggaggcagaaaggcataagcacagcgtgaatatagcataaggtactaactttctacgtaca

SEQ ID NO: 18495 - DNA, 425 bp, Oryza sativa
  unsure (1)..(425): unsure at all n locations
agcttgnccgcgcgacaagagagatattttattttgtttctcaatgttagtaccaatgcctattagagtgtccacactatcctcgataaactgtgagacataccaaatccaccggtatttccattaattcctttcgagctaacaatgtgaatgcatgctgatgaaactctaagatccgtacgaggtattacgattaacaaagccgacaaatgcccttttcaacggtatgacccatctcgaaaataatattgagttggaatttctaatgcttttggacaattcgaacgtgatacacgacatttggtctaaattgaactgaatctatcgaaaaccatgataaacggcgcacgtatgccgggctggctcaccaacgtacccctgtcccgacctccaactatatggctaaaaccccttaccctgtcaca

SEQ ID NO: 18496 - DNA, 381 bp, Oryza sativa
gacctatgatactcagcttcttttatctaaagctataccgccgggttactgttgttttatggtagactatacagactactactaggaggggtatagtggaggatgataatgcgctggttgctttgctacggagtggcagacttgatggtcccctccatctgtcaatgtccaacgttatacgggctggagaaggaaactcgtgaatgctctatgctaatcactgtggattaacgggatggattgcatctatgtaaggaacgttctattgtacaatctgctctctgatgcgtggaacgaagacaccttgcacctgagtatcttcctttttaataagggaactctacacagcgtctgtacaggaaacgtcgtcattgttgttgc

SEQ ID NO: 18497 - DNA, 404 bp, Oryza sativa
  unsure (1)..(404): unsure at all n locations
agctctaaccacagcaaggacatattctttttgttttggcgcacacgacgtgacttgactgatcaaaaccactccacgctggcaataccacctaacaaaactgggttagggtgctaagtgggctggtattaatagattaggcggttaagtgatcctacaatganggcacactatggtgtatggcggagcttcaacctccattagctgttggccaaggcaatacttgtgccctaggagggggcgaatgtgggtgggtcttttttgtgtttccgcgggtgtgatggcgtgattttgttttgcaagggcgaacttgtatttcttgcttatgaaatgatacacagatctcctgcgtgtttggaaaaaaaagggacctacatatgtttaggggggaatggacttagaaa

SEQ ID NO: 18498 - DNA, 486 bp, Oryza sativa
  unsure (1)..(486): unsure at all n locations
ctataaaactcagcttgcggacagcaactatacacatgttatgtgacctttctttatcttgtaacacaanacaccagtgggtatatcttatcattgatgtgcattacatcagtgcaccactaactaaatctttatcattaacgngcattattgaactcgattgtgttctgcctttattagctataacaacattctattgtagtgcagaagtgcccttccgtacaacaatattaaaaaaagccactgccttttatgctttagagtactacagtaggttcaacttgttaagcatcccatgcgtgaactgtcactgtccatatgaaagatattacccttatcatccaaaataaagcaaccgaacctgagataagatttctaatactatgaatctaaacaacttcttgtgtgcagttgtattgactacgtactgtgaggacctatctaattccgtgtgttagagttctatctagcggttactttatatgt

SEQ ID NO: 18499 - DNA, 405 bp, Oryza sativa
  unsure (1)..(405): unsure at all n locations
agctcgcgagaggcaagaaggtagattatgttagagtcaacgaggatgacgtgaataagaagaagaacacaaaggagaagaagaaacatcgcatgcagtggttaatccaagaaatcataaaagctcttgatgaatcggaagatgaagatgagagcataggtaagcaaattgttgatatagcttttattgctcgtaatgcaaattctgatgttgatgaatctgatgatgataatgaagaaaagcttagttatgatcaattagaatatgctgcctacaaatttgctaagaaacttcaaacatgttctattgtgcttgatgagaacgatcatactatngagattcttaatgctgaaaatgctagattaaaatcttgattcctaatgatgataattgtcaatcttgtga

SEQ ID NO: 18500 - DNA, 408 bp, Oryza sativa
  unsure (1)..(408): unsure at all n locations
tcgcagaaccctcatcgacggtggcagtgcactcaatattctcttctccaagaccttggacgatatgcagattcctcgctccgagctaaaaccaagcaatgcgccttttcacggagtaattccaggattatccgcaactccactcggccagatcaccctcccagtcacttttggcactcgggaaaacttccgcacagagaacatcagctntgaagtcgccgatttcgagacagcataccatgccatactcggacacccggcgttagccaagttcatggccatcccgcactacacttacatgatgatgaagatgcctggtccccgaggagtcctatccctacggagtgacatcaagcaagccgtcacatgcgacaaggagagttgcgacatggctcatacccgcgagat

SEQ ID NO: 18501 - DNA, 406 bp, Oryza sativa
  unsure (1)..(406): unsure at all n locations
agcttctcagcacgctaaatattatagcattcgtcatatgtatgactaaggaagtacttttgtttgattgtatagcttattacatactttacactttgccacttgccacttactgcgtggaatttattaattcagctcactcatatatggcttgttatatatgtatgcatgcatgcatctcgattngaatataggatgtgattgtatgcgttcataagtgtaatttcacgcgttatgtataataaataattaacaaaaattgctatactaatataatattttctntttgagaaatatggtcttccaaaaccctgtcacctcccaatttatatataatcagtggtgaactggtacttaccaccggtatgttttaatgcacatcgtaataagaaaacaattatacgta

SEQ ID NO: 18502 - DNA, 438 bp, Oryza sativa
agcttacagcttccatgctcaagaatattactgcatttttattggaggaaaagatagccaaaagatatgcacggttgatgatgtttgcaagccaatatttatcatgaatatcactgacactggtaaaaatatagaactccagccatttgaaaatatatgcagttactttgttccctatttttaatgtaagcactcctgtgccaaaagaaaaggttgcaagttgtaatcaaaatagtaaaactggtgatcagataaaactttataaatcaccaccaaaagatttgaatctatttcagtaacactacatatgtagcaatggtagctgaatcaagtgatgtctgagctgctgtgcaccttttggtgctctctagtgtgactgtgaggacatgtttagagctattatttttttcaaaggaaaactattcagataatcaagat

SEQ ID NO: 18503 - DNA, 487 bp, Oryza sativa
  unsure (1)..(487): unsure at all n locations
cttaaaactaagctactgcactaccaaagaagacgtttgagttatgtatgtgtctctgtgatntaatagattatcactactgcagctttctagaaaccaaaatgcagaaatctacattaattttttctgggttatgtacacaaaggcctcaccattcactcactggtccttatatgcacataaaggcctcgtttggcttataaaagaggaaccaagagctatgagctgaaaagggacagagtcgtccataatgagtgttagttcacaacttcgcatagaagtgaaactggctccagtgtcttgtgaactgtcgcttgcccatggtagctatgcctatgaggcaccgggagctatcctaatatgtgtggatgctgagacagtgggtcgtgtttctgtagagcattgaggggggcagaacaccagcatcatactcttacctgataaagatgcatgggaaatgtctgtatgacatagcgatatgatgtat

SEQ ID NO: 18504 - DNA, 260 bp, Oryza sativa
  unsure (1)..(260): unsure at all n locations
agaaattatttgtggaancagncaaggccggatgacgcacacaagattgcccctaccaaaatgcacaagcaaaaatgacgaagccatgagcgaaaactgcaaagcgcaaaacatgagctgtgataactgagcagatgcatataatatgctccaggataataaaatgaatgtcgtaaatgagtaactattcgcaacaagcagagcaaattgaaatgaggctgctatcacctgtgagaagcctatacaggagacgaacctga

SEQ ID NO: 18505 - DNA, 487 bp, Oryza sativa
  unsure (1)..(487): unsure at all n locations
ctataaaactcagctttaggtaagctgctatgcagatccatctttattatggcaattacttatctatggactggagaatcatgcactgtttatttattgagaaatgctcttactgttagactcatccttttcttttctttttcagattataaagattttcctctttatgtatctttttcattgaaaacagtatgtagattctaaaggctactgtcaaatgtttggcacacatttcataaaatttccaaattatctaccattgtgctagccctctcttntgaaaggcctcctcttgttagtgctggaaacaatcagtagttatggctgtatgaaatgccatgagatcatttactctagattgaatcattgaactaaatatgttttactgtttttagatgggatgcagcacatgctcgtgctctcaagttacaagagaacaatgatgcctatatgtaagtttatacatcaccttttcttttctcttctt

SEQ ID NO: 18506 - DNA, 419 bp, Oryza sativa
  unsure (1)..(419): unsure at all n locations
agcnttcggttattttgtgctgaagtgccatcttaagatatgcaacatgaatctgtcaaacgaaattcacctaatgcaacaagtcctaatgcagagcctgcagcaacagcatagccttctctttctagcacattatcaccaccacttcttcggccaatctcaccctgaatgtaatgagcacaagataagtaaaaagaaacaacattaggaaaaggaaaaaaaaatatgacctagtccaaattggttcatatattatcatgtgcacaatgccacatcaatatagcccaagaagctggtagactttgcttcggattcagtttagttcaattatttccttatctttagtttggttcaattatatccttctctgtacccttagtgtcttttagattggtttgttacatccatgattctattaa

SEQ ID NO: 18507 - DNA, 481 bp, Oryza sativa
  unsure (1)..(481): unsure at all n locations
acagctgggggctaggatcagagcttattctatctttacatgccaagggtctaagagccttgtcacccgacgacatccctccgatgacaaggctgggggctagggagagtgtacaactcaaacggctaactaacgccggtaactgataacacgctcttacacacgacacccagaggaagaaacacttgttaaagatagatttctttattcacaaaatattccttacaatttgtacataagtattttgttgcattacatcttttcccaagatatcttgttgcagggtacaaattctaccaagaaggccaacgccaatccattgattggaaaatcttctcggccaacggcgacattgatctcgcaagatggtctatctccgccggaatcctccgagaacgaccagaaccttcgcggagaaattcgagatccatgcgtgggcggtgatctcatatacaagccagcacatgtncttcggcataac

SEQ ID NO: 18508 - DNA, 344 bp, Oryza sativa
  unsure (1)..(344): unsure at all n locations
aggaatcaccagccgtggcagccattcctgcattgggacgactatgcccatgtaatcaaccttgagcaccttgttaatcgtnagctccacatacagcggccagtagagcatgggcatacctgtaatgattcgcttttgcaccaagtaccacccgcagagcgtcacatacgtgtcggttgtaatgtggtaaatgacactcaactggggcacctgcgtattgatgaaatatccgcatatattttctcctttagatatagaggtgagattattattcactattaaaaaaaggtattgactacgatgccctcctcaccgacctcgtactccttctgtaagaacgcgtc

SEQ ID NO: 18509 - DNA, 418 bp, Oryza sativa
  unsure (1)..(418): unsure at all n locations
agcttgcataccgatgacagaaccgctgctttctatttatctgtcacagacggngatccaagggcagccatgatggagtactctgaggacctaaggtgggagaggcaacaaacaggccactagatgtaaggtcaatgggaagataagggcatggcatttgccgctgcgtactacttatctgtcacaaacggtgatccaagggcagccatgatggagtactctgaggacctaaggtgggagcggcaacaaacaggccactagatgtaatcatgtaaggtcaatgggaagataagggcatggcataatgatgcaggttattggaagatcactactacctgtttggccgcttgaacaatatatatgtggcttaccctctgtacatgtaataatgtgaatttgtgaacatatgtaatgtatc

SEQ ID NO: 18510 - DNA, 480 bp, Oryza sativa
  unsure (1)..(480): unsure at all n locations
tcttgtcggtacattagaggtaaccgattcaatagacatactttttatcaatccatgggtcaagcgataataagatatcaacagttttcagtgtttcctctccaactgatacacacaaaagaaaatntgcagtatttgttaactagctctatcttgggtatggcaacctgtcaattatgtaggaatttaatggaagtactagtggcaagccacccttagtccccttcattgtgaatatttcaaatcagtgtaattgatttttccttgtgcttggtaatccagaaatttcagcaagaggacaaaaaactgtccaacacagaggcttatatgcgcagatcataggttcagcgataggtactaacaatatctcttggtcttgggccaatctacatttaagcatgatttagtggctgatgtcagttgcatccactttattcacatgatgacatgtgctaattagaaattngagtttcatacatg

SEQ ID NO: 18511 - DNA, 420 bp, Oryza sativa
  unsure (1)..(420): unsure at all n locations
agcttactggtgcacaggtaattgcatttgttctcttctgnttaagtaatgatatagacattccccaggttgacccattggcatttaatttggtacttggttgatgcttgacatgaatattccgtatctaacatgctgatcattataatataggactatctgttgaatcaccaattttgtatataatatgtgaggtggtttagttgcagtagctatcttgtgtggagtcaacttgttatgtggtatatcaagacctgaaatgtagagcattagtaacaattatagagaaagaggtacacaacttgtatgatatattaaggtttggaacaccgtcagtgttgtcctgtctcccttttttgttctttggaatttcctaaaaatgtgacccatgataacaattgttttcagcatgcaacctgc

SEQ ID NO: 18512 - DNA, 449 bp, Oryza sativa
  unsure (1)..(449): unsure at all n locations
taattgcagagtgtgcgtgtntgctggcaggagccaaagactgtggtgtgtggngcacctgaccaagaccaaccgagcggcgttgatttatacggtgcagcgcagtgctgtgctccagtgctccttgatcagcgagcactggcagttggctagattttttttttcattgtaatgcatatacaccgttatacacacgcatagaattgaatctaaaaatatattatttattttttaatttctcagaaatatgcgagatgcaattttattgatacaaatataccgtcgatattgcggtgtccgacggtgaatgcgagagaccgctcggtggcggctaagtctcgcatgcccaacgagcgagaccgaagagcatgtcactctttgccgctaataagtgactaattatgcgcgatagtgaattaataaattattaattaatctctaatcatttc

SEQ ID NO: 18513 - DNA, 431 bp, Oryza sativa
agcttcttgcttgaggtgtgtggtatatattattataggagctccttaaaaaggctgccaatgatggttgtgaagttggaatggtcggaattgccctccaaccgtcattgggtagtgatccacgccgtccaaaaacaaaacctgcatccaatggtaccagcgagggtttggtcgaaccatgggctggcccaatccagcccaccttcggctagcggccttgtctcttgatatattgtgcagacttgtgaattttggcccaattggtcctgtcatttctgagttcttggcccattcattgataagtctaattcttgacattgtcctgtatgatcgatcgcctggtttgttgtcgattcttctccattttgtgctcattctctgcaaagcgttaataatcctagtactagtttgatatttattatttaaacaca

SEQ ID NO: 18514 - DNA, 428 bp, Oryza sativa
  unsure (1)..(428): unsure at all n locations
cagctgagagactctggtgtaaacctattaagtgctgtttatttgctgctgctttcgngatcttttactgctgatatgacctctactcaaagagtgaagtatgaacaatgttttcaaacaagtttcgtaaaagctttcctatctaaactcctagaaaatgcgacaagtgtgcaatgagtcttcgtgaaatgagttggatgctactacaaatccaacactctacccctgcacttatattctagattaccaatgctgaagactgcactgagttgatacaagaaggctttattccaatttgggaacacttttagagcagtttctttctcatgtaattctgaatctgaaggcaatctgattatatggatcctatgaattcagaacaaacatacatgttttgccatgataatgcatggatgacaacattttaa

SEQ ID NO: 18515 - DNA, 305 bp, Oryza sativa
gagcttaattagctcattagctaggagttcatttgctgtgctccaagacgaccttgccaagcgattaagccttggttaccttggtcagcaagaacacacatcttatcgatccaccagggcattcaaacccgtcagctatcgagccattccttcttgcagcatgcagatgatgtgtgcccgtgcgtgttttgcattctgcctacctcgcggaaacttcgaatgatctcacgcgcatgctgctcaaaaaaaaggatagaaacgaaataagacatcggactgatataagttggttaatttactaactg

SEQ ID NO: 18516 - DNA, 479 bp, Oryza sativa
tattacaacggtactacaatagccatccgctgcacgaatattcttcgtgtgaatgatcgccccacgcgatcggtggcaaccggttccccttcccacctggtttctttttttttttggtcaccgtattatttttctcttttatgaagtttatacacctaaagtttacacatctaaattttatctacctaaagtttgtatagcgaatgtttataattcaaaagtttatatacccgattcaaattcaaatttggattcaaatattttatttgtagaatatttctatacataaatgttatgcgtgcattattttcctctttttagtaagtttatacaacctagagtttacacatctaaagtttatccacctaaagtgtgtagagcgaattgttataagtcaacaatttatatactcgattcaaatcaaattcggattcaatatttttatatagaaatttctatacataagttatgctgaaagt

SEQ ID NO: 18517 - DNA, 421 bp, Oryza sativa
  unsure (1)..(421): unsure at all n locations
agcttgtgcctgttggagagatcatcattttttattaaagtatgccgntcgcggtacataaaatactcagccagggctgctcccgtataaagagcgaggtattgtaatgtagcaggggaatccgccatttcagctactacaatagtgtattccatggccccctcttcatggaaagtagttactacttgagctacggaagatgctctttgaccgatagctacataaacacatattacatcttgccctttttgattgagaattgtatctgtagctactgctgttttgccggtttgtctgtccccaataattaactctcgctgaccgcgcccaataggaatcatcgaatcgatagcaataagccccgtttgaaggggttcatatacagaacgcctggaaattatacccggagcacgagattcaa

SEQ ID NO: 18518 - DNA, 402 bp, Oryza sativa
  unsure (1)..(402): unsure at all n locations
tcatactctgtccggtagagataagatantctgaggctggttctatcgtgctccagcgtgcgaataaaacaatatcaataaaaaaaagatgtgcctctcttctcaacactataatgagcatgctgaaataataaataaaagaaataaaggatccagcgagcacaccacaccattccccctttggtaccacctttaaccaccgggtcttgtttacgttgctcgtttgggcttgggtttaggggcgtacttttgggtgaggctcgcgtatctacttcgactagactaggaccagcactgtacactatacccttgagcgagtattacaattggtgtggctaacggggattctagtattctcttgagcattgctattaagccaccaacagcgtcaccacaaacccg

SEQ ID NO: 18519 - DNA, 428 bp, Oryza sativa
  unsure (1)..(428): unsure at all n locations
agctngaaataaattcaaacttatcttagttatttatccttagggcttgtcctatagtcaaaacatatgctctgataccagtcctgtcgggacccaaaactaacaacttggatctgacagagattaatgtatcaatccctggatcagtaaaaattgatacatacaatataactggttcttcattgcatacgttaaagtcttacaatactaagggttttacaataataggtactcacctatctaattaatacacaacggaagtttctatacgttctgactagtgagggataacctttagggattttctaagttatcggggtcttcgtaataatagtcataaaggtcctcctcttgacccagatcttgataaggtgttataagaacaaggatgagtattcacaatactcagcaagttatcacggaaatat

SEQ ID NO: 18520 - DNA, 461 bp, Oryza sativa
  unsure (1)..(461): unsure at all n locations
ntngtctcatgctccaccaaaatcaagcgcacaggctctctttatattctccaatatttggttgactcgctcggtctgaccatcagtctgcggatggtaggctgtgctgaagtttatacgggttcccaattcttcttgcaatttctgccagaattttgaggtgaattggcttcctcgatcagacacgatcttcttaggtacaccatgtagacacatgattcttgacaaataaagctctgctaacttcttccctgagtaggtagtatgcaccggaatgaagtgagccactttggtgagccgatcaacgactacccaaatagaatcatgccccgatgacgttctgngcaaaccggtaatgaaatccattccaatttctttccattttcattctggaatttgaagtggatgtagcaaacctgctggccttaggtgttctgcctttactcgctgacagacatcac

SEQ ID NO: 18521 - DNA, 431 bp, Oryza sativa
  unsure (1)..(431): unsure at all n locations
agcttcgctntctgagtaactaccatgatgttaattatatcttattagacatgagaaanatgcattaatacattattcaactagggtattattgtaatgtgaaaagacaatgccatcctatacaaaggcatatcttgaagatgtaaggctgtggcaccaaaatttgatcttcttttttttcttggcgcatctaaaattgcatagtgacacgtcgtgtatctgtctccatttccctataacgtgcgtggaggatagtgggaatatatatgcgccttgacgtcgcgtgacgaataaaattaataagtgattttttaattatcgtttccttattgtaattcaattatcttttccttattggaattcacttgattgtgcggttccttttcaccattccctttagactttcattgatttcatttgctttgcaaaat

SEQ ID NO: 18522 - DNA, 482 bp, Oryza sativa
tagccttgcacctagaacaccaaagagagaaaaaagttgtgtctatttcgtgcagacgttgaactttctggcaaatcacgcttagtttaagcctcttggttagcaccggaagcaaagaaaggtagctaagctaatatcaattcaagctgagctgagctgagctataagtgtctggtgtggttcctttagaatcactcgcgtactgcttaattaaccaattcgatcatcaacaacctcattatcgaccgcaatgagatggccgtagggcagcatgtgtgttaagtactaaccttagctttagttcttcttcgtcgtcgtccctatcctgtgtggttcactatgatgacgtgctgcgtgtcccaatgggtaagaggatccgcggttatccgtatgacacattgtttatgttggtgtgttgtagacaatatggagtagcatcgctatggttactggctgcgatctctctcagtgtatagcatatc

SEQ ID NO: 18523 - DNA, 341 bp, Oryza sativa
agcttggcatctgttttccacttcaggaagtactgttatctgaggatcagattcgctgaaagcatccctttatttagaatatgttcttgttatcaactgatgtgattcccttataagattatattcatgttgttaaaatagcatgacaaaaaatactccatagctgatacagtgggcaatctagttaaatatgatgtcttcttagtgttaattcatgtgttctttatgtaggaattatattctagtgttgttcatacatatataaggtgcattccatctaagaaactgctctttgaatttaggcacaacaaaagtgaagaaccttgatgataacattggtg

SEQ ID NO: 18524 - DNA, 484 bp, Oryza sativa
  unsure (1)..(484): unsure at all n locations
tgccaccttcctgcaanaagtgcgggagaagttcccagtcgtcttttacgtgcgcgtccttgggaagctggtgaaggatggcttcaatgggagcctcaccgcactagctgaataccttggaattccgcgtaacggcgacgaacaccacgccggcttcgacgcgctgcttacattgtcctgtttcttcaagatcgtcagcctttcaggtcaccagatgcaccgcatggatgctcggcggggattgcttgctgggttggaggagtggaacatggctatcaaatgtgcacgccatattgacaaccatactggaagcatctacgttgtcaagatgctaccacataagttggatgaagaggcaagacgaattgaatagctggtggccaccaacttcaacatcgttggagtagaggtaatccatgctcaattgggtaagcgctcctacgcagttgaagcccaacataattatgaactcatcaggacattt

SEQ ID NO: 18525 - DNA, 435 bp, Oryza sativa
  unsure (1)..(435): unsure at all n locations
agcnttgcagaaattataaagagcatttgttctcatattataaatactggtggtagaaaagaaacaactcttacctctcaatgccatttcaacgtcacttacagaacacattaccagagtgccaacaacagcatccattgaattgtcctcagctggcaaagcttcaccaacctaaatacaattacgcatcaaagatagttcacagaactaaaaagagaaatagtgcgctaccagaaggcaccatacccctcttctgaaggtgaagttcgaaggtggaagtccagcagacactgcagctgctctggcatactcctccatgtgtttattaggatccaccccaactatgttaacgccatcggcatttgcatagtacttgagaatagggccttgtccaacaccaagttcaagaatgttctntccagcagtcatcaattg

SEQ ID NO: 18526 - DNA, 238 bp, Oryza sativa
cctgagctgcggcgatgcctcataatagatcgaggttttgttcttttcgctacgccgcttacgagctttcttttctatttgtgttcacatgctttgatcttgtgccttgtccatctacttacaagtctggtggtctcttgcgccgtggcatccaatgtgagaataacgcgagtggacagcatcgcctagacgacgcactatgccctactacagatccggtaccagatgaagatatgct

SEQ ID NO: 18527 - DNA, 483 bp, Oryza sativa
  unsure (1)..(483): unsure at all n locations
tgtctacccaatccacaagcacacagactatgggtttaccccattatgttcaagtcctaaaagaagcagttgattacccgcatcactcatagactaagtctaaaacctgcaagcaaaagattaattcaatagcaagagtcaatacatggcaagcaccaagacaagcctaacaccctatttgcaaggcatataattgtggagattatggatatcccatatctacacggcgaagatatttggactgaatataggataccgaatatagatagaatatcttatgtgtatcctgcgtttggttcctaacttgtacgtcaaggaaacaccctaagatttagtcggtcacgactgtatttgatctgtatctgtgtattctgttaaggatatagattatcttttgtaacccggactccttcccatatataaggtgggtccgggcgcctctatgggcatatgttgattntcccaaatatacaatcaaaatac

SEQ ID NO: 18528 - DNA, 396 bp, Oryza sativa
agcttgccgatcagcgatcctacaacgcccttctttattgtttctgtgtgtgtgcagtgtgcagtgtgcttgattcagatctccacagagtagaagtggatatctgcaggtgagtttgccttctttatttattgcacattgctttggtggaggccatgtgcggaaggaattgagaatgagattggagacgcacattatttataaagctaaccagctacacctactttccgacagcatggctatttagtatcagtattaagctccgttctaaactcaatggcataaatggttctcggtttctgtacatgttttaaaacggctaaacggggtttcgtccaaaaattcttataaagttgtataaacaacaataaatcatttttaatttaatattaaatt

SEQ ID NO: 18529 - DNA, 254 bp, Oryza sativa
gcttgaactagagactcacgacgacggcgcaccccggctagacggacagcacactgcagaacacggcccagaggacctcggccaggacggcacaactgagagcctcacagagcacggtcgaagcaaggccagcagccacggcacagccattgaccacagcaaggccttccaaggctgcagcatcaagaaaccgccctggatgccagcaatcttgaacgtctcagcggcgttcaccatgctggcatgtggcgcaa

SEQ ID NO: 18530 - DNA, 403 bp, Oryza sativa
  unsure (1)..(403): unsure at all n locations
tcaagctggtgtgctctaatacgtatgaagactatttagcaatgacatatcgnattntttaccaaaccatatgtcatgtttaatagtacagtttgttcaaaccaaaatgtttttaattatcctccgattgtcataggctattgaacatatggagaagatagtatgatacgtactgtgcggttttaagtgttgatgagcagtgttatgatcatcggaaaatttaactaatttgtcactattaaatttgtaaaatctcccatatacccctctcctatttgttattagtattacatttagttactggagagagagagacaaaactttntatatttcgccactttcatcgacatggcgtgccaagtgccaacaagaagttctggcagtgcaaatgggtggtaccaaa

SEQ ID NO: 18531 - DNA, 479 bp, Oryza sativa
  unsure (1)..(479): unsure at all n locations
tggagttgctactganatcttcaatctttggttcggcatgttatctcaagtaaagaaaagtggcataagggcaaactctaagatgtaggtcttgttagcatatgtttgtaccttgtagtactatacatgttgtgtttttatgctgcactgactccgtacattatttttctttatttgcagagaacatgataagaaagtttgttgcttgggattgacttcactaattaaccttccagctaatcacattccaccagaagctcttgagcgcattttcaaagcaacactagagcttcttgtttcttacaaggatcaagttgcaggttcaatcttatcttttggttattttctgatgaacatatgacaattcaaatacttcgaacaaaaactctgtgataccattctgttaacatgtngacctgagagaaatttctaatcttatgtctcctttttgcaattacgatgtagaggagaggtcttta

SEQ ID NO: 18532 - DNA, 388 bp, Oryza sativa
agctcagatcttattcgggttggagaagaatctatatataaacccagttcctctagaattaacactactcatacatttggtacataagattcaaagaaaaaaattctataggaatcatgtgccaatcctccaaaatgtgctgattctataggaataaaaacatcatccactccatcctttttgaaggacaatttcatgtgttctaatcttttattttgttttttgcacatacattcctaagttattcctgtgatttgaaaccaaagagacccttaaggcccctttaattcaaaggacattcatagaaattttagaggatttcattcttacaggaatttttctatattgcctttgaataaaaaaaggatcctatggaatcctataaatt

SEQ ID NO: 18533 - DNA, 447 bp, Oryza sativa
ggatcttaagtcactgagctgcaagctttctgtcagcccaaggttttttatctttgcgcacaacctctctccgagtgttagcggtgacgacagtgagccgaacccacgccgtcgagctcgtactccaccgccccctccacgccaaagtcctaggcgggaggaggcactcgagagggtcgaaggatccgcgacttcgacatccacgggtgatggggaagggcggcgagatggggagcgtcgcctcctcgtctacggcgacggcagcacgccccaaggcgcgctccaagctgcgggcgcgctcctacgtcacccgcccattgttcctgacccggagtctccagcccaacgttggctagacgacctggccaactatggcatgacggcacggcagcgcctatgtgctggtgggcgggcctccgccaccaagaactctggcgctgctacacc

SEQ ID NO: 18534 - DNA, 438 bp, Oryza sativa
  unsure (1)..(438): unsure at all n locations
natcgctaggccattgctactgcatatcaacctaccaactatattgttgggacacgctgnttggcatgcagcggcggtacttcaaatcagacctactgcatacaatgttgtatcccctatgcagcttacacgtggatatgcaccaaatatttcccatctgcacaaatttggatgtgctgtatacgtccctataccgccacctaagtgtacgtcaatgggtcctcatagaaaattgggaatctatgtaggatttgaatctccgtctatcgttaaatntttagaaccattgataggagacctacatacgaggcaatacgctgattgtatatataatgaagatcatttcccggcattatggggaggaaagtacctacagaaggtcgaatgccgcgaaaatgaggcgaatcttataatctctacattatatcacgtactaag

SEQ ID NO: 18535 - DNA, 406 bp, Oryza sativa
  unsure (1)..(406): unsure at all n locations
agcttaattgtttaacacgatattattgcttatcttactattaaggcatgaaaataggagaaggaatatgtgaaaaagtggagaaatgaattaaatgaagataaggcgtacatatgtgtattcgcttttttttttaaaaaagtaacttatacatacaagctttggttggcccgggtttagaaaaggaattntttttcttgaaaattaatctaatagttgtaaataatgggtccaccaaatttaatgaaaatatgattattctagaattttaagaatatttcactaatttattagagcatcacatggtaacttagaagcgtttgtaggatgtcgtaggacgaattangaatatttntggaagtttaatggacttttagacatctaatataatggtctaaaacatcaa

SEQ ID NO: 18536 - DNA, 379 bp, Oryza sativa
actcagcttcccagtttttatttcgacatacgagccaacttttctgaacgattaactactactcctcatcccaaaattaacgccattaacttttttaacatgttgctgttcgcttataaaaaaattaaatattattaattcttttctatcatttgatcattgtaaaatattttatatatacatatagttactattcataaaagttttgaataaacaacggtcaacatattaaaagcaacatttaggaacagggagacatggatttctcgctagcatgtatcaaaccgtactgtatgtccatgcgatgaaatgatactgagtctaagtttagttcccggttgttgccactttgtgacagaatggcaattctgcctgaact

SEQ ID NO: 18537 - DNA, 428 bp, Oryza sativa
  unsure (1)..(428): unsure at all n locations
tagtgagctagattactcatatctcctggagttcactgttaattttcatggcatttctgaagctgaaagcctcttccttcgcatacctcaagaataccagaatgagctgctgtacaacaaccttgttatggcttgtttggatatgggcttgattaagcttgcatatggttacaagaggaagatgagggaactgtcgttgccgatttcaccatatgtatacnaaccggtgatcatcctccattctttccagggcgtcagaaaactatttccaagatcctcgctcagatgaaaggcgatcgtgtgacccctcacacgtcaacctacaacatcctactgaagataaaggccaatgaacacaacatcgatggtgtggcgagggttttcaatgatatgaagagagcataagtcgagccaaacgagatcaccta

SEQ ID NO: 18538 - DNA, 385 bp, Oryza sativa
  unsure (1)..(385): unsure at all n locations
agcttcccaaactagtaaacgatttgttttttgtaaaaacaaggaaatttgctattaaaaatcatattaactcatttttcaagtttttataggtaatacttaattaattatgtattaattcattattccgttttacgtgtggagaggagggggttctcaacccttaaaaaaacacggcctaagtccaacacatcagcacccaagatagtcaatctcaagccgctaattagtgagtactagttatgtgacttgcgtgctaccattatctnttttttaacgaatcgagcgtcaatattattgaatagagtcggtatacataaggaaaaaataaggaagagtgtaaaaaatggccgaaggccactactagataaaaatgagccacatt

SEQ ID NO: 18539 - DNA, 422 bp, Oryza sativa
  unsure (1)..(422): unsure at all n locations
gggtctctcttgattgggcttcaccgcctagagagattatgtctatcgagatgaaccatgtagggaaggctcccatgttcaatggaacaaactactccaattggaaaattagaatgtctactcacctcaaagctatgagcttccatatttggagttttgcggatgtaggctctgctatcaccggcatgctcttgacggagaatgatcaccgtaacctctaactcaatgcgttgttcaactctttgagccaagaggagttccatagagtgagcaaccttgagaccgcatatgagattngaaacaagttggcggagatccatgagggcacaagtgagtacaacgatgccaagtttcatttcctcaagatacaatgtgagacattctccatgttgcctcatgagaatgtgaatgacatgtatggg

SEQ ID NO: 18540 - DNA, 433 bp, Oryza sativa
  unsure (1)..(433): unsure at all n locations
agctntcaatgcacatagcaacttccttctacttgtactgcatatcttacattatgtgtcttttcccacatttaaaaggagcgaatataaaccagcattttctagtcaccagttctattttcttcataaaagaaaccattactttattcaggaaacccgcacgacaatttacagtcaagcatggcataagaaattcctctcaagtgcaccttgcttgatgaatcctttttaagtcacttatgcaggaatctagccttatcctctaatttgggttctaataaattatcatgttcttcaggggcagaaagaatggataacagaactgaatgtgcttgggattgtagagcatccaaacctctgttaaactaattggctactgcgctgaagatgatgaaaggggcgtacagcgtctcctagtatacgaatacatgcc

SEQ ID NO: 18541 - DNA, 420 bp, Oryza sativa
  unsure (1)..(420): unsure at all n locations
tgtgactagaatatatgcgaaactgttatctacttaaagngacagagcacactcgagcttacgagaagcgcacaggccaatggacggcttcgtgaacatgagatcatgggctaacgcaaaggtcttgtatgagcggtgcgcattgagatccaccttccttgcaatgacctctccatccatgttcaccttcacccatccagcaacccgacctgtcttttcgccctcctccttgtacttcagcacatcagatacattgggggcggtcaccttggagtcgcgttcagatgtgtccactttagcgctgattgaacaggctgttcatactgaactgtcngatcggtggccataccaccactccacagctgatgtcaaaccaggaaatgcagagtggattagtcgaaatgcatngaaaagtctaca

SEQ ID NO: 18542 - DNA, 431 bp, Oryza sativa
  unsure (1)..(431): unsure at all n locations
agctcgactntattcttgccaacatgacgatgttcttggcttggtgagtactaacccatggtgtcattcattaacctcatcgtagtgggacctattccttttcacacctcaaaggagaacattagtctcaacaaatcggttgtcatccttcacttcatgaccaaccggttgcatatgaaagatatggatatgtttgctgagtattcattaacatcacaagtgtcatatactcgtatgcaagctcaagtgcaaagatccgatataaataataagtgaacaacatggatctagaacatgcacaataaatgtataggatttgctccccctaaatatatgcataccaataaatatacaagagatgcacgtgtatgcataattagagaatgaccaatgaggggttatcctatacatatagagaaggcatatgtagt

SEQ ID NO: 18543 - DNA, 387 bp, Oryza sativa
aaacagataggattccctttaaattaaccaacccacatctaggtcattagaagaacacctttaaatcttggccatctctagagaaagtactacccgagaaaagttggaccacatggttcaaacgcgtgtcaacaagcaaaaggggtcactgggacgaaattggaatcagccaagcacttgacctcactatagcaaactcggccaaagatgaacccctgatggcagctgcttcttacttctggtcaaacaccatcaatgccttgttggttaatcaagggccgatgaccccaactctcatagatatcagcatgatcacgggtctggatgtcacctcatctgccaaccctatgaagttgaatacaaagaaccaatatgacttcaagacca

SEQ ID NO: 18544 - DNA, 398 bp, Oryza sativa
  unsure (1)..(398): unsure at all n locations
agcttgaatagctntagtgggaaagctgattgccttgttccaatgcagaagtatgtaaatgaccactgctgcgtgaggaaagattctccatatctgcgcccccatggaagataagacatgaactgctgtcgccctagagtttccacctagagtttgatgtagggggaggggcaacacagcataatgacaccttcgatgaggagagtggcatcatagggcattcctgtcattagacgaggcactgacatcgcctacccacacatccgaggaaagatcagcaccgaaccgacgtctgctgagcaaggctagccgccgctagaccaaacaagtagctacagttgtacccttaacaacgactctaaacaactgggtacatacccatagacatcacccgaatg

SEQ ID NO: 18545 - DNA, 433 bp, Oryza sativa
  unsure (1)..(433): unsure at all n locations
cttatccgatgatgtgaagaanattcttgaagatttctctcatctgctagaggcatcatcgntagacagcttagtggttgatagtggctcaattaagactcggctacatgagattcaagctctgatcccagatgagctagccgatgtcctaactccagctgtctatctcgagcagcatcaattcaagctggagaaagccaagctgagactagtcgagcgtcgggagcgcaaagacatcgaggccacaatttatgccaatcggcagcttgttcatgaagagaaggccaagctcgatcagatatctgaaggtccgatcaagtctaatattgatcggctcgaagctcgaaagattgagctcctggcacaacttcaagaatgcagtgccaatctggacatggaacatataaagctagccgatctcccaaatctgttg

SEQ ID NO: 18546 - DNA, 325 bp, Oryza sativa
aactttacagaataggaaattggttattatttgaccaaactatagccgcaacgagtggcacacaaataacaccattggcatcacccaagcaaacgccttcaactccatctggcctcgttcattttacaagaataagcacctctctctgactattgtctgaagacaagcctcgactcttgccgcgtaattaccacataggactctggtgggtatcagaagaaaaacaactgtctatgaataaagaaatacagcatggaacaagttgttaaatctggctccaccagcaaggaagtccttaaatctttgacttaatcaatctcaactg

SEQ ID NO: 18547 - DNA, 353 bp, Oryza sativa
  unsure (1)..(353): unsure at all n locations
tgtgggtcctttcctttctacagcactgatggcattcttcgttatattcagtgaacgaacgcctctgatgttctcaagntcattcagatcatctcctgtcactgcaactttacttccaatatatacgctcagattggtcaggttctccaatctgaccaactccgccactcgacaattataattgcttgtggagaccccaattacaaacccctttagcacttggagttctgtaggcaaacaaatccacttggcatgccctttatcaggtaggaatctgacacatcaaggtgggtgagcatctgaagagaagtgatgctctcagccgcctctccgtattatgacaagcatgaaga

SEQ ID NO: 18548 - DNA, 381 bp, Oryza sativa
cgcggcagcaacttaatgctacaaacacttttatctcttcttaggatcatgcacaattaaaatgggagctgatatataagcgacattacaactcttgaaaactctgctcgcactcttctgaccacttgtactatacatttttctgaagcagtcgtgtcatcgggctaggcaatcatggaaaaattctctatgaaccttcggaaatacctgcgagacccagaaaactactaatctctgaaactgtctcctgttgttaccagatggttactgattccacattactaggaacaacggctactcctacggctgagatgatgtgaacaaagaactccactataaacaaccaagatttacttttgctatatttggcctacaaatgat

SEQ ID NO: 18549 - DNA, 443 bp, Oryza sativa
  unsure (1)..(443): unsure at all n locations
atanaaactcaactgtcggagagcttagagaatttacaggacacatattttgttcatttgagttaaactnttctacgggaggctcttgtgggttcctaagtatgaaacaaatatcaataaaataaaaataaaaaaagtgcacatctctctcatctacactagagaggaaaaattctacaagtcacgtatttcgtccatttgagtgcattgttactatggctgggtctggtatatccctaaccatgagcaaatatcacaataataaaagaaaaacaaaaaaaatgccggggccggggggggcagccacattggcacgctccccctgccacctcagcgccgacctgccacggtggtaggaggacagcgccagcgactctggcgctcaaaaaggaccatttttgggataagcatcttcaggtatctatgtgctaaacgatatcgtg

SEQ ID NO: 18550 - DNA, 305 bp, Oryza sativa
agctctgcctacactcaggccttattccttgttttctatccactcccacaggtgaagcaatagcacacaaccactcatgtcggatgatagtgcctgacgacatcaggcctcacaaagctgtccatatgtccatgccaacactgctgagccccaactgaaacggcccagatcaccaaggttggcgaccaatggaatccatatcgccgaagcaatgtcacccccaccattaggagacagaacccctcccaacaagtgcaagatgtatgcacgagcataacactcaacacgccatggctcagcatcgt

SEQ ID NO: 18551 - DNA, 484 bp, Oryza sativa
  unsure (1)..(484): unsure at all n locations
actaagctaacaatggtttggggacccttgcatctgggtggncaagnggtttgtttcacctttccacgctggtcttgtgtgacctgtgactgagtgaccatatcctactatggcgcatggagatataggctgtgatttgatccacgatgaaaatttattctttgtgtcacatcggatatatggatatacatttgaaatattaaacgtattctaataacaaaacacattatagatttcgactgtaaactacgagacgaatttattaagcctaattaatccatcattcgcaaatgtttactgttgcaccacattgtcaaatcatggaacaattaagcttaaaagaatacgctcacaattttatacgtaatctgtgtaattaggtgttttttatctatatttaatactctatgcatgtgtccaagcattcgatgtgatagggtgaaaacaattgccatgggatctatacatgcacatatgatatgat

SEQ ID NO: 18552 - DNA, 324 bp, Oryza sativa
  unsure (1)..(324): unsure at all n locations
agcttattntccgcttctgtggccatctatatattatgcagatatatacagtccattcatgttcttaatttcctctaactaaaaggctgaaaattaacacgtggtacgcatgatgcgaagtaattctacaacatttgtcttctttagatcagtacacgcacgatgcatcaataaatttcacatggaaaaacagtaaagctgttaaagaaatcaatggtaattacagagcatcaggtaccaaaaaaaaagtatttcacaatgtnttggcagtacatgcgtggattggacacccttttgtggtggagaattgcccccttttttttc

SEQ ID NO: 18553 - DNA, 441 bp, Oryza sativa
  unsure (1)..(441): unsure at all n locations
tgtagactatntgttgcactgtctttngttgtggcgggtatctttcactcccgtgggcaatggtcatgggcgacaatccttgcccgtcatgtaataacgggcatacccacgggcacaaataatctcacagggcacgggtatggataggcactacccgtgcccgtcgcgcccgatagccatccctatttgtgtcagtgtgtcattggggaggaaataaaaagacaaaggatcaaagagagtgcatatactaatgaaaaataaaagagtgaagtgcatcagcggtccctaaacttgtgcggatgtatcatctatgtccctgaactctcaaaatatattnttgggtccccgaacttgtcttgggtgtctaaatgtacatattcatacgtctagcttaattgggatacatttgtaattatccacttttacgccttatttaaaata

SEQ ID NO: 18554 - DNA, 426 bp, Oryza sativa
  unsure (1)..(426): unsure at all n locations
agctttccncagccccttttcatcaatggtcttctgacgtctacgaaggagtgtggttcgttcgacaaattcctacctctatatctatctctgaggtgtttgggttttgcaaaactccatagatatgcagaagagaaatgctatccccactccgaccaagacagaacttttaccanaagtttattgtgatctctttgttcaaataacaattaaggtgaagcagggtcaggaacaacgaatctctttatgataaacagatccattttgcaagctcgttattacgggtagttcctacaaagaatcggactaatgacgtatacaatgcttgaattatcgacgtagatgctacatagtgggttctcatccttcagagactacgagtgtaataggagcatccgttgacaaaaggatcaccctaagatgatc

SEQ ID NO: 18555 - DNA, 485 bp, Oryza sativa
  unsure (1)..(485): unsure at all n locations
actcagcttttatcattctggcatcgagcntatttgccgcaggatttcttttactgtatcgtcaccgcagtagagtttaaccaccaaattcgggatggattggtgtggttcctctacgcctaggacaccacaatatcgaaccatgaacgtaggaaagcatgagagaaatattggctagtaattgtgaagccccaattcttgactggaagggacaccaaaggcctctgccctccctctctatctatccaagagatggaagggcagagcttttttttggtgttttcatcttttcatcaaagagttgaacaatgaagatagatggcaagtgcctgatcgatttgatcaggtcgtgtaggaacaaggttcaaatcgttcgttcgttatgatgcctcagctgcatacatcactgcacttccacttgacacctatttaaacggctcgtctcgccgctaccttatcctattatcatgcttctgtcgctccat

SEQ ID NO: 18556 - DNA, 320 bp, Oryza sativa
agctgccatatgcggaagtctcgtattctttctttaccaggccagtctacagatggcaccgtttgaagctgtatacagacggaagcgccgcacacctctcttctatgatcagacaggcgagcgtcaactgttctgaacagatgtattagcggaagcacacgacaaagacagaaccatcatggaaagggtgaggattgcccaatctcgacaagagagttacgcggatgaccgccgaagggagctcacttttgatgcgggaggatacctgtatatgtctttcactccgatacggggaggacaccgtttcacacaaaagcaat

SEQ ID NO: 18557 - DNA, 379 bp, Oryza sativa
gatccactcaaacccgatgtcttacacaagccggattgtcttattctgctgtgtcacttaacccaggctggctcggacttatccgattctagttgtagccgatccggactccagccgagtcttactctgtgtccgcgacgatacttatattcgatgccgcttcgatctaatcgtcgtctccgatgctgatattaccgaacttggtcgggaacaagccgatgtaagattgctgggctgatgttgagtctagctgaacagagtttatgctccaatatgcatggcttatctgtagggtcatgtgtaagtaagtgttgatgcctccggagagcgtttgcagtgacggagcaggagtccacctgtgagaagataatgttcggat

SEQ ID NO: 18558 - DNA, 410 bp, Oryza sativa
  unsure (1)..(410): unsure at all n locations
tgcaagcttcttcctcaacatgacaataacagaggtatatattcttaganacataaatttacagacaaatcgacgacgacacagtcacatcactaagggaatgcaaagaccgcggagggaagaacacgattcttaaacctcctttccttctcttctgacaccgcctctcgcaacacccggacgcacatttcccgccatataattaacccgaggctaattataaatctgtaattaccaatttaccgcaactctgcactgtagcttcttgcaggagatgtggagagagctgtaattaatttaggagtagttcaccagggagcggtacgtcacgccgggcttccagctcgccgggatgacgtttgttgcgacgagcaccttgccggagtccgaggtgacgcggagcgagaatg

SEQ ID NO: 18559 - DNA, 467 bp, Oryza sativa
  unsure (1)..(467): unsure at all n locations
tgtgtgaacatgtttttattcatggcatggaggtgatgcggtgatgctgctactactgttctggtggaacggagggatgggagatcttatttttcttcaaagggacctcgttntcatgtgatacgtactatacgcgcgcgcgtgcctactcttctggggggaacggatggatgggagtcaagatgggttgcttgtggtcatccgtgctaccggtagtgtgaaaatgtgatccttgttttaggggttaactccggtgagcccgctgnttgtttctccttgagaatgaagcttgtaaaccgtgtgctctaattcatgattttcattggcatgggtgattatgtacgattctcctgatttgaaggaagccttgaatacacatttatccatcatatcatacacatttgtaccgccttnatacatgtcttcgtgaggaatcatgaaaaccacccgttgatgtcacttttttt

SEQ ID NO: 18560 - DNA, 451 bp, Oryza sativa
  unsure (1)..(451): unsure at all n locations
ttaagncacctgcagctgcagcttctatgaaatatcctcgttgttatcccttttgtccanagaataatatactcactatgacctacatacatttacatcggttgaagatagaacaaagagtgtgctgcgaagagcctttttctcattgggtgcttgcatcaatgcttttgtgcattgtcgacctgttctatgcatagatggaacttttatgacaggtaaataccgaggtcagatattgacagcaattgggtgtgatgggaacaaccaggttctacctatggcttntgcatttgtagagagtgagaacactgaaagctggtactgggtcctagagagagtgcacattgcagtggtgcgtatgaggcccaacgtntgccttatacatgatcgacatgcgggtatgtngcgggctattgactacttgcagaacggttgggatgagaagggactt

SEQ ID NO: 18561 - DNA, 434 bp, Oryza sativa
  unsure (1)..(434): unsure at all n locations
aaacttggcggcttacatagactctcaaagagggttatgtcttttctattcacactacactcccaacaagtcccaataacgataacgtcagcttaagatcataaatgaccctccgagtggatggacttcatcatcattgattgagaccgaagagagtgtacagtcaaaaactatggagntccgttccttattacgtatataaatgctctggtgtacataaatacatactgtttcactgatcgatcgttatgcatgtattgtgaactactacctccgttccaaaatattgacccatcctagaacagagtctctatccagatttattgtccaaattctatcctagatagcaatatattgaaacggagaaagacactgtgatcatggagaccatgcatatatgcagcatggatgcatagccgcgccgagcaacattc

SEQ ID NO: 18562 - DNA, 421 bp, Oryza sativa
  unsure (1)..(421): unsure at all n locations
ggacctctaancgacctgatgcatgcagcttattcaagagaacctttcgttattatctgattattccacaacatatatgtagcaaccataactatacagtaacaaagttgcagagatttactttctcttatgggaaaaaaagaaatccttctaattaatctctgcacagagtattcagataagtgaccatgctgagatatccaaatgacaagttgccttttgaaaaaaaaaatcagaaaagaaacctcaacttcaatacggctcatttagacattcaagcccaacaagcgggctccggcctctgggcctgatctgagctgtatttgggccttacaaatgagctgttaactcggatgggcctaggcccacaccgtgtgggctgcttgcagagaaaccataagcagaagcatacacagacctc

SEQ ID NO: 18563 - DNA, 502 bp, Oryza sativa
  unsure (1)..(502): unsure at all n locations
gtagtgattaatagtcatggaggcagactggagggttgatatttacaatgataccgtgtgcatatgactttgacgctcttggttaaattcagctggttgagtattgggcacatatagtcatttgctaattagttgtatacaaaaataatctcaattattttgttgggacgccaatactgatattagatagcaatctgtcatactatctatgctcctttactttcagctttagaaattgatatgatctgtagcacacaccttcgaccatcattttttctcaatcaagaattcaagtataattatacgaagaagttacatgagaaattaaaaatctagtaatctcattntgaaataacaaatccaaacaagttgatgcatattagtggtcaaagctttatgaagttgatccatataagaaacagagggagtgatgtatcactatgcatccttgtataattaatanatgcatgcatgcatacatcatgtntnttgtcatatacat

SEQ ID NO: 18564 - DNA, 471 bp, Oryza sativa
  unsure (1)..(471): unsure at all n locations
agcttagctaatccttgaagcataccctttctcacatcaacagcaaacacaacttcttctttttttttttttttgcggnggacagcaaacacaacttctaacctatccgttttcatggggctagttatagagagcaagtaaaccacatcctcatccatgcttatggtggggtttccaattggaagttccttgaacattgtttcaattgtctctctgtcgtcgtcgtcgctgcagctcaggttaaaacgacatgtgccgcgcgctcaaggtgatgtgtttatcttaataatttgaattcttattatcttatatatgttacatccatccagcagcaaccaagcaagtaatcaggaatcaaacagggtaaactatacatatatatcaggctgctcacataatcaatacacatatactaattgtaatgtctgagttatctgaatgatagatatattgacgaattaattatggaat

SEQ ID NO: 18565 - DNA, 452 bp, Oryza sativa
  unsure (1)..(452): unsure at all n locations
acgttttcactggcttagtgactgcttggactactggagatgatcagaacaaaatcatcctgtatgacagtgaagtggaaggcagcaacagagttgttggagctgatggatcagtcgatctgactcgctgtttcgtagccgtcaatttggatgatgaactggtgctcaatgtctgtgtttctgaaggagctggctcaatctttgagctcgttcttggacacaatgatgaagaatgtgtccgtgagcaaggtccctatgaactgcaggtgaatgttgtttggacagctgcctttaagcatcgacagcgcagaatattgttggagcgtatcggtgacttccgcgtgttaaggtgatatgatgtagtatgaagatttatatggtggaagtngttacatctcaagcagttctatcttggtatatagatcatattntttgttcagctgagtttaact

SEQ ID NO: 18566 - DNA, 458 bp, Oryza sativa
  unsure (1)..(458): unsure at all n locations
agcttcccanacagaccataaatctctcctctacccctccactctcccctctcttggaccctgcctcctatctcctctgccctctcccaccacctgacactagcagaatattttggttccatgatttcggtttaatatatagttaaaatattggattttggttctctgattaattttaccaccactagagtatatggttcaatgcagaaccatcgacaagctcgtgctggctgagtgaccgaataggacccaaaaaaaattaggggccccattttttctaattttaatctatcttaatgtgttccaacatgtttaaagctctttggttctatttttaaaaggcaaattttgctataggacataacgacttactggtttagctgtaggacaccgcacgaagtgagtattgtgtaaagacaaatataaaaagaggaacttatggacttgaatcagacatt

SEQ ID NO: 18567 - DNA, 379 bp, Oryza sativa
gctacgtcacggtaaaaatcagctttcagccgatctttttgttacataaaaaaagagacaaaaccgattcaattgttcggtacctgtgaaacttaatagttccaatttgctagctactcggtgattaccaaataaataaaactttgccgagtacagagcatacaagaaaattataccgatataattattcgcaaaatttggctatactatatggcgaataataagatttttatcactatacaggggaacggtcacatctactaccaatcattagacgtaagcgctgaagaaacttacaagtacctcgatcccaccatctttgtttaaagtaagacgtggtaatatagctctcagttgtctatcaatgtatagaatgggg

SEQ ID NO: 18568 - DNA, 344 bp, Oryza sativa
  unsure (1)..(344): unsure at all n locations
nagcttgctcacctgcggaagcgatggctgattgtatgagccnggangcggatgaagaattctccggcgagaaatcaaaattaagtttggagtatcggagacgggagagggggaggaggatgaatgtcgctgtaagcttacgacgactctatcgtggcctgtagaggtgttgtttggatgtatattacgctacccacttcccatctactactactactaccttcactcacaacttctattgctccctgtcccatcttgtgcaccgtgttcatattacccctaggtgtatccatggactcttgaccttgttcctaaacagagttctccctcctctagttctacac

SEQ ID NO: 18569 - DNA, 481 bp, Oryza sativa
  unsure (1)..(481): unsure at all n locations
ctcagcttcacattgccgccgatctaagtntgaaaacatctctgaattatgcgttgataagtagctcatgcgttcttcaatccaagggcatggtgatgtagcagtatgccccaaagggcgtaataaacgaggtcttcaagcagtcggattcttttagtcggatctgatgatatcccgagtagcaatccaaaaagctgagtagctcgcagccggccgttgagtcaactacctggtcaatgcgaggtaacccaaaaggatctttgggacaagacttgttgaggtcggtataatcgacacacatgcgccatttgcccgtcttttccaaaccagggctgggttagccagccagtcgggatgagggacttctttaatgaagcccgctgctaacagcttggttaattacttcttgaatgcatccttcttgtcctgtgcanaacagcggagtcgttgcttgatgagtttggcgtctttcttaacatgt

SEQ ID NO: 18570 - DNA, 462 bp, Oryza sativa
agcttgcaggacagcaacttaagcacatgttatgtaaccaaaccaaacccgggaaatacagtacaccactaactaaatcttatcattgatgtgcattagatcagtacaccactaactaaatctttatcattaacgtgcatcagtgaactcgattgtgttttgccttttttagctataacaactttctattgtagtgcagaagtccccctccgtacaacaattttagaaaaagctactgccttttaggctttagagtacaacagtaggttcaacttgttaagcatcccatgcgtgaactgtcactgtccatatgaaagttattacccttatcatccaaaataaagcaaccgagcttgagataagatttctaatacaatgaatctagacaacttcttgtttggatttgtatgtactacgtactgcgaggacctatctaattcgttgtgttaagagtcctatctc

SEQ ID NO: 18571 - DNA, 442 bp, Oryza sativa
  unsure (1)..(442): unsure at all n locations
tctagcatatattagaaggtttgagatgcccatgatgctcaatgttcgtgcccggccgaccagactcacgctatcttaactttgtgggctacgtacctagctagctagctagctaagctgctccgtgtttgctgcgaggtggccgaaagcttccatgattcatgcattgcattagcttggtgaattcattccatcatcatacatgagtgatgcagcgtactcctttcgtctcgcaataaatcaatatacgatcggatgagacatttaatagtaaaataaattaagatagatccaaatttatttttcttttgtctaaatntattntactattagatgttttattntagattgcttttacgaattaaattttcatttaatcatatattactatattatgggataaaaggagatacatccttttctttcttactttatcaggttc

SEQ ID NO: 18572 - DNA, 461 bp, Oryza sativa
  unsure (1)..(461): unsure at all n locations
atccttagagtcacctgccgcatgcaagcttgcgtgtgcgagcaattgtttttattagttggtagaataaagtatagttgcatgaaaaatttgacaatgatctggtggaaagtttctagattgctaaaaaatgctaagaatataagtataaattgagatccttgtaccattcaatgggagcctacagctcaaatttaaaatcgtgtagggtttgaccataccaaagataatgtatatnttaaatatatataggtagaaaacttttctaacagtgaaaacacttaattttgtacataagtttagtgccatgcaaagataacaaaacttatattccctgtaatcataaatatttaatgttataagataagattcggacagacattttagaaattttaccatcattttatattataaaaatttatataatctagtttgtgatattatgatagtagcattacttt

SEQ ID NO: 18573 - DNA, 489 bp, Oryza sativa
  unsure (1)..(489): unsure at all n locations
tgcggaagcgtgcagntggtactatcatcatatcttggatgagtattccaatctccaaattcaccagtgactccaacaaaagcctcggttaataacggcataccctcaaacacaggattccggttcatactaaaacggttttgctatatttgtgtcgccacaaaatctcatcgattatagtcgatttttcagctctctgatttgctttagattagcactggatattatgatttgcgtatgcgttgtttgagatctgcgcccgactacctgcaatctatcatcaatgtattactgatccagagcaaacacaaagtaacgtgctcaactgatcgatgtattactgcccaaggtcctatcattaacgtgttcaactgagcaaacaggcaactntattgctgtaattatatatttatacaaatntacacagtagttacaccccacttacatatgtaattntgaacttacatantgtaatttaggacttacatt

SEQ ID NO: 18574 - DNA, 393 bp, Oryza sativa
  unsure (1)..(393): unsure at all n locations
tgctaggcgattgctggacaggccctatagtctttgtgcacgtgttttgctggggagatacagcaaaggaggagatattctatctgctaattgccctcgaggtgcctcgtctacttggatcatcaaaagaagagaggtactgagaatgggactgatccgtatgatcggagatggtcgtaccactgaaatatggcatgatcagtggatagatggactactgaacaatgaagccgttatggagaatgactgatgatccagttcaattagttgccgatctcatgttgcagaatacaaaccaatgggatgtggagaacgtgcagcggattttctttccgntggatgcggctgctattctgaacatgccaaggccgagaacagagccagatgattttt

SEQ ID NO: 18575 - DNA, 375 bp, Oryza sativa
  unsure (1)..(375): unsure at all n locations
cttccagttcagttntggaagtctccgaatgtggtcatatcgaccgtcaatggtggtggacgccggcctatcatgcaatattangacgaggaaggctgaatgcaatcgaagctgtagtttccacctctcacttgatgatgaagtttcccacgggtttaaaaaggacagcaacaggtagcgagggattgttacctagttgcgttaaagggaaaaggggccatgtggttatcgaataaaccatcacccttatcatagagatagccacgaagaggtctgactttatatccaaatatatcagcatatttaagtttctctgaatagtaaactccgataaaccggcgaaaataagcaatccagtcttttttatgatcgata

SEQ ID NO: 18576 - DNA, 444 bp, Oryza sativa
  unsure (1)..(444): unsure at all n locations
taatacttgtgaaatntcaggcaaagactaatggtcatgtgttattctgccaaaggctaatattaatgtgttctctaaatatgagtattaccctcctgtgcaaaacttcagggtattaaactatgacccaaaattatccccttcgacctaaaaaaataagtgtgttagctttcagcataaaaaaaagaatagtttagctttcaatctaaaaaatatgcctccaactcaaaaattcacgagtattacttaagagccaaaaagtcttgagtactatcctttgttccaatatgtatgagtattagcctaaggccaaatagctcatgtatgcctttgggccatctatgtatctataaatcttcaacccaaaaaatcatgagtattatgccttcggcatgtgtacgcatctatgtatgatgaattccgcctgattactcatgagtattc

SEQ ID NO: 18577 - DNA, 424 bp, Oryza sativa
agctctgcttggagtctacatctattccactataacagatatgtctattttctgcaaccttatgctgtaaaacccaagtagtcaggacttgctttgatccaacggatattaataaggaaatgatatccttgcttttgactaaagtgtcatcagagttgccattggggatgatgttacatgaattatctaacgatgtgtagcccttctgcacgaagcatgtcgctctcacaggtgatccaccaacatgctcccccagcagcttggaggaacaccattttccagcactattaattgagttcctgttacatacatcgagaccaaaaggtatcatttaaatcctttcaaaacattataccgattacagaacacctgaaatgaacagctatgctttttcacactgcatagatagagaccagaaagtaca

SEQ ID NO: 18578 - DNA, 451 bp, Oryza sativa
  unsure (1)..(451): unsure at all n locations
ctcagctctacgaatatacaccctctagtttctgtatattttcctagaccgaagcagattctcaaggtgaataacaaaaaaggcttggggaccataataagcagtaaagcgattatatttgcttaactaaaatgaaaaggcagtacatatgttaatggatttctagattcattaacatctatatgaatgtaggcaatgctagaacgtctataatatgaaacggatggagtactatttttctttcaagagcaatattttttcctaataaaaagttgcaaaaaaaactatcataagtttaagattctctatgttcgggttcggtgggaacctatcctatccagggaatgaatgggtgtatccttccatatcacttaatccagggttaatnggattcgtgccatgttagacaaacagtattactacttgtattcatattcatgtcatccgaata

SEQ ID NO: 18579 - DNA, 476 bp, Oryza sativa
  unsure (1)..(476): unsure at all n locations
caaaaactcagcttcacagctaggttaaagagaagtggagacatttggtcttcttgtcttaccccntcgngagnctgaagtagggcccaatatgatcattgacttttactgcaactttacctccccttactgttttcataatccaatcacaccaaatctcagggaaaagttgtgcttgaagaatatgtaaaatgaaatcccagnttattttatcgtaggctttctcaaaatctactttgaataagatccctttttgtcttttcctgtgcattgtattcaaaatttcatgcattattagtactccttccataatattcctattntttatgaaggcagactggttctgtgaaatcaaggactcaattacttntcttaatcttagcatgagaatttttgtataatattgaactgacatttatagacatattggctaattttgatttgcttgatcctttgttttggaccaaggatactcc

SEQ ID NO: 18580 - DNA, 478 bp, Oryza sativa
caggctgcaagctcgtaaatcccctatgagtttatgtattgaaattctctttggagccttgctcaactgtatgcaatatagatccagattgttacctgtatcaatcaatcgatctagggcttgataaagtctaaacatactgattttcgaatcattagctttcactttaagaatctattctatctatgacaaagaaaatccatcatggatcactgagaactcgtcatagaaaattgtctgtgacgattctacttaccatcatctattgagcgtcacagattaaatctgccgatgctttctccgaaatcgtcacggatcagtacaatctatgacgttctttaacctgcataaaacgcttttgggctcgtgtagtccagccaggcccgaccatacgtcacatatggttgccacatggtcgccaacatggcaggtgacgtggtcattgacacatgtgtgatgacgtgtcactcatgacgta

SEQ ID NO: 18581 - DNA, 492 bp, Oryza sativa
  unsure (1)..(492): unsure at all n locations
actcagcttacaccttngagtgatccacgatgtcggacttagggggatttactttgtatttgaaatgaagatgaagcgagtagcaagggaactccaccacccaagggagctactataccttttgattacagcaaacttaccattccctctcacaacttcgtctccgtgccttcagggcgtgctcctcaatntgatcagacatattatgctgcttggaagcacaagatgaagttgcatctaatctctttgcatccaagtatttggaatgatgtttgtacaggtattgatatacctcatgatgacatggagctcacttcggagcaagaacaactcatccaccgcaatgctcaagcttccaatgcaattctctccgccttgagtccggaggagttcaacaaggttgatggactcgaggaggccaaagagatatgggatactntgcaattggctcatgaaggatcacccgccgttcgtgaggccaagaatgaacta

SEQ ID NO: 18582 - DNA, 374 bp, Oryza sativa
ttattcgccaagctggacaaggaagataaataaagacaagttgctataattcggtaacagctactactaattggttgaaaagctgatctgaatattgttacttggcaccatggcgattaccaatataaatatatgatcctcatataattggcaaataaaactatgatattcctatgtcactgactatccttatatcattaacaatgtaggatctgtatatagctatccttatgtcattactaaatatgcttgtttgatctggcttttacatatctatcgctgagagatatgaagatattacaggaaaaggctggcgtttatgcttataatgttacagagagagaaccacttgataggcctgacgcatgattgat

SEQ ID NO: 18583 - DNA, 400 bp, Oryza sativa
agctttgctatacacatggcacgacttgtgcatgctatcaatacatagaaggctcatctgtctctaacatatctcgtatgtactccactattttcatgacatctacatattgcttttaacggagatgatgcatgacacttcatatctatactcgaattaagcaaatatgcaatgttgatgctagcatatgggttgaattctaaatgctctacatatacgctttattaatttgtcattctacaaatagtttaattgctcctcgcgcaaaagacaactaatacttaacacaatgaatatcgaatccttggaaacagtcttgacgacaaggacgcatttaatgtgagcaaaataatgggtgctgtatacctggcaacagtcttcacgacaggggcgtacccgg

SEQ ID NO: 18584 - DNA, 476 bp, Oryza sativa
  unsure (1)..(476): unsure at all n locations
cacaacaaactaagcttacatcgacaacagttcaattacttgatggatacttagcttactttttcttttagtgtggcaaatgatttgtgccttccctgtgcggaccattcatgacctctgtccatatactagctagcacaggataatttaagaattgataccttgttatccaattggaatggcatctatcatactatatcaaatactccctccgttttaaaatggttgacaccgntgactntttaacacgtgtttgaccgctcgtcttattaaaaaaatctgtgaaatatgtaaaactatatgtgtacatgaaagtatatttaacaatgaatcaaacgatatgaaaagaataaattatcatttaaataagacgaatggttaacacgtttaaaaagtcacggtgtcaatatttgaatggaggagattagataaataacactgcatgttatgtatactaggtaagatgcagctgatac

SEQ ID NO: 18585 - DNA, 417 bp, Oryza sativa
  unsure (1)..(417): unsure at all n locations
agcttaccatgtcatgccaccgcgtaatctgtgtattcgtacgttgtagnaagagcaagtttaatagtatagctccactactagctccaaatcatctataaccaatgtaatagtcaattcataccatagttgcttgctatactattaatatctggtcccacctgtcatacacacgttacgtcttgaagttcgtgctgcagctggctacaaatctaatatatttatagctgacttatagcctgctattgtacgtgctctaatagcttaaccgagaaatgtggcgccgatctatcgccagagagacccaaggcgaaattaaacgtaacagcgacgacgcgccctgaaactgatagtacgtacgttgcgttccaagatgtcatttgccatggtcgatcggaatttcttctacttaatttt

SEQ ID NO: 18586 - DNA, 449 bp, Oryza sativa
  unsure (1)..(449): unsure at all n locations
ntatagcaataactattcttagtggattgtaaatgcatatgtttttgtatggttgagatcaaagcatgagaggtattattttatggaagaaatatcaaaacaagttcaaacaccaccaaccatttattaatggtgattttgccatccaaataccagcatgtccttttgacttttatggtttaaaatgctaactagatgatttaagtatgtttaaaacaaattttcggtgcggcaacaatatatgctacaacatgaagactgatgaggacatcctccactattacccgctggcaaagacgccaaagtcgggcggcgaccgtgtgagcctttgaataatcccaccttgcttagcttgggaggaagaagccaccttaaaagggagagccacccttcccttattggactagtcttttagagagaatangcctttccccgagtgggtgtggcta

SEQ ID NO: 18587 - DNA, 469 bp, Oryza sativa
  unsure (1)..(469): unsure at all n locations
ttaagtcacctgcggcatgcaagcttgaaatgtctctgtgaattaggatcatacagttctctccaagnttaaagggcttcagcattatttggatgtacactcaaatctgctaatggaagaagttcgtataaccatcaagtctatcttgttgaaagttgagactactcaatgctttcgtgattttgttgtgtcgtttgctgggccaccttccatctattacattgatattgatctttatggaattgataactgtcagcatgttgtgaaagatggggatctgttttttcttagtactcaaccattaaggggtcagttatcacgttgttctggtattgccacagatgttggctgtgataatcagtttcaaagaagcttcatgatgttatgttcataaaatcagaaaaacactgatttagaatcaatcacatatatttgttctcttactaacattatggataattngaacata

SEQ ID NO: 18588 - DNA, 514 bp, Oryza sativa
  unsure (1)..(514): unsure at all n locations
ctaagcttgccaggtaactntgagttgcacctcattgaaacagaaattctggttgttctctgtgatctgcccaacttatgctatgttaggttgagacacaagggatacacagatggcaaactcaccttcaatgagcacaaattcaaaaatctcaagtgctttcttgtcgagggcaacaacatgagaggcatcanatttcataaaggagcagctccaaggctcgagaagatagtattgtccttcactaacatagagtctcttcatggggtcggngacctaccaaaactggaagagctcgaattgaagagaaacaagttccttctttcattatctgaagagggagaaactcttgagaaatacatgctcaccttcaagaaggatgaattccaacatctcaagtacttacttgctgacggcttcagcaagagctttgagacaaacataaccttcgaagatggagcaacttcaaagcttgagaagatcatctngtactccttcgccaacataatgtctc

SEQ ID NO: 18589 - DNA, 454 bp, Oryza sativa
  unsure (1)..(454): unsure at all n locations
agcttcatatgtgcactaaattacatgttgtatcttatgatcgatcattgggttcagagtttgggaaatcgagacagaatgattgtttgatcgacgccggcacatgtgtagatatggttgttaacaaggggattaattaacggaagctagtgtatgtgatcagtcaatcattggcaagattagtccagatatgtttagcttaggccctgtttagattaattggcaaaaattttcactctgtcacatcgaatgtttaaacgcatacatgaaatattaaatataaacgaaaaaaataactaattacacagattacgtgtaaattacgagacgaatattntataaatctaactgctgcatgatctgacaatgtggtgctacagtaaatatttggtaataacgggataattaggcttaataaattcgtctagcagtttacaggcggattctgtaattt

SEQ ID NO: 18590 - DNA, 506 bp, Oryza sativa
  unsure (1)..(506): unsure at all n locations
ctattacggacactatagaaactcagctgtgctactctcttgctctgtttcacaaattaattcatcctatttctgtaaatattntccataggtatctgggaaggccttgaattgcttggattgtggtggtgagagctcttcactaatcgctgctggtggctctgaccctgtcttgagggtatgggaccctcgtaaacctggtaaatgtggaagcaaaaccatgctctaattatcttttggagatcaaattagctaatactctttatcctcaaacaggaactctagctccaatttttcagttttcctcccataaaagctggatcagtgcttgcaaatggcatccaagttcgtggtttcatttggtatcatcttcatttgatgggaaagtaatgttgtgggatctaatgacaagcagaagattctaataatatatntccttcctgattactcttttctcttcaagctattntatcacaatgccatagaccattaatgggttctgtctg

SEQ ID NO: 18591 - DNA, 465 bp, Oryza sativa
  unsure (1)..(465): unsure at all n locations
agcttcacaacgattatcagatgttcgcatttatcttgtggggaccaagcaaatgagacacagacacagcgttatttaagcagaaccccattggctggccaagatctgattattacaagccataacagcctattagcgacaaaaaataataatctatacttaaatgtctttagcgacttaagaccaacggtgaaaaagaaactaccccaagaatatcatagaatcaatactctgcaattcacatggaaaagtcaccacgtcactattctattgaattagtagcacatacccccagattacttggtcacatggtcgctctcccagctgagatcagtgctaatcaattagtctctcacgtcaagctntatagtacgggtggatgcacatctaatcttatgtgacatgtgtagtttaggcgcaattcatctagcttatagtacttgccctcatgcgacatctgcagca

SEQ ID NO: 18592 - DNA, 488 bp, Oryza sativa
  unsure (1)..(488): unsure at all n locations
tcaagttcttagtttaccttactgctcactgtcaggtcccgtatttcatcatntgctgccatgcgatcgctcaccacgatcgagcttcattacaatttattgtcaggttcagtgccagagttcttggctggcttttccaacctcactgttcttcagctatccacaaacaagtttcaaggatggtttcctcccatcatcttccagcacaagaagttgagaacaatngatctttctaagaatcctggcatatctggtaatctgccaaatttctcacaggacagtagcttggagaatttgtccgtcagtagaacaaacttcacaggtatgattccgagctccatcagcaatctcagatctctgaagaagttgggcattggtgcaagtggtttctctggaacactgccctcttcgttaggtagcttcctatacttggatntgctagaagtgtctgggttccagatagtaggatccatgccgtcatggatatc

SEQ ID NO: 18593 - DNA, 358 bp, Oryza sativa
agcttgtggtcacggaccagatccttccctttctggagccgactggccttcgtcagcaactccagcaaggcgggcgcctggcggagctctacgtccgtgacgatgaccttgatggggtcgtcgcggctggcgtacagcatcgccgcctcgcgaagccccgagattgtgaagagaggcgccgccatgctctcctcctcctcctcttcctcttccgccgcctctctctcctccggacggataatgatatgtggcggtcacggcgacccatctcgtgtggactttatacagacgaggtgagggaggggatttcttccggaagtgtcgatctgacaaagcggagatggcgcgggaatatttg

SEQ ID NO: 18594 - DNA, 341 bp, Oryza sativa
ccctccagacatcacaggcttatgtgacactcctacgagagcccaccaaccccacccatggtagcagcaagggcatatggcacgccattttccgcggtgttcccttccacgacgaaaaattgcacgcgatgaacacgcacgataaggtcccgcacgccatccacatggtcctgtgtacgtaacacagttctcacggtcatcataacctggcggcccctccgctgctgttgtacctcgcccacgacgcggacaccaccttcggtaacacctcgcgctcgcgccccgtcgtcagtctggacatcgccctcgccctcgtcaccatctttaccagcagccgccac

SEQ ID NO: 18595 - DNA, 370 bp, Oryza sativa
  unsure (1)..(370): unsure at all n locations
ctgctaaatttagcaagatttatatgcacttactattatttatttacaaactaaacgtagccactttttgggtaactttatcaaanaaaaaaaacagtaagaatgacaatggaagcaaagtgaacaagcccttactatcaatccggacacccgacggatatgggtgtgggctattcaatactccatccattctaaaatataaagcacaaccacccttaactcaagaaacaaaaaacaattattatcatcttctagttcatatcactctaataaatataatgcatagcgcgcctaatgcgcgcccacgcgccagctggtcccctccccgcgcgcacttttttttcttttcgactttttttttccgattttg

SEQ ID NO: 18596 - DNA, 448 bp, Oryza sativa
  unsure (1)..(448): unsure at all n locations
agcttacaaaaatagtataacacctttctgtcttgcacctctttatttgcatcgnggtaattccaaagaattatcaaattgcgctaaaaaggattntaacagcatcgggtcacatcattgtgagcacaaattgccaaagcaaaaagcgcctaagtccctagggatcacaacgggccacgctggtaataatattgggctgaagtactgtataggcatagacccattagcactcccgataccctaacaaaacaccgaagtccaagcgacgctttgtcttccccgccgaaactctctccatttccccactccttgctacagtacaaagctgcgccaacgaagctagggttcatcaatccgccccaatccattctcaaaaatccacgaaacttctccacgcgtccaccgcaccgattccccgttcccctccagctactttttagaccgaatc

SEQ ID NO: 18597 - DNA, 418 bp, Oryza sativa
  unsure (1)..(418): unsure at all n locations
ctaagcttagatgttgcatctgctggaaaaataatgaattaattgtttgtctgctttgnatttcttttctaattaannaagtgtggtaggccattgtcaattttctccagtactattcagctacacgaaccacttgactgcccatgaggtcactactcactagaaaacttctattcctagtacgctacagttntgccatcgccaacctggatctgccatatggagaatagagtatggcatgatatttcttgattgctggagtatagtcgaaaacaagagtgctcatctttcttcctctttttgaaaacaactaattgtatctataaatttcaagttgtgtgaattctcactaggaactgtgcattatcacagatggctagagtgcgttcatgcatgcgcgcccacccacgtttgactc

SEQ ID NO: 18598 - DNA, 433 bp, Oryza sativa
  unsure (1)..(433): unsure at all n locations
agtcacctgcggcngcaagctaccaagctactttcaatttattttatttaccgacttcccaagaaatcaaacgacatttgattcataggctaactgatttacacacaagaaacatcaaggaagaagaatgtgggtcttaagcgacttgcttactacatccctatttttcaagtctaacattgaacggggaataggtccatctacgtaaatgtcccacagattaaagtcttttcaaatgagcttgaaatgaataaggctttgattcatttcatattcggatctagatagctgatggtggtcaattaaactcattttgaccaccaacctctgacaataaaaagggtaaaactatgttcaagcatcaatttggttagactattctatttcactagtgttgtccatcttagctattttcaggtacactctaataatg

SEQ ID NO: 18599 - DNA, 266 bp, Oryza sativa
gcttaggagagcaggacgagttctatataacgagagggagagagaccttggtcgacagtctataacgactctatgggactaccaagactttgagcgaaccagcacataccctgtttccattgtatataacaacagaagcactgtgtgagtagaggcaaggcctaatttccatgcgttagcagtctctaccaaaaaaccctgctcagaggcaacttgcatgttattcaataaagcgagagggtataaacgcgttacgcaaaacaaat

SEQ ID NO: 18600 - DNA, 383 bp, Oryza sativa
  unsure (1)..(383): unsure at all n locations
tataaaactaagcttctgcgcggaaaccgactacacgggcctaccatttttgttgctattcggcggggctaagatgtttgagaatgtactataaagaagatacgtcttgagcgaaattatttaccanagttcacatacattatctcacagacgatgactaccgtacccgttaatggagcgtctaccgatagcttagtgtgatgtgatacaaatcaaacaatgtgggcctgtttagataccacctcacaattttacaccctgtcaccttgaatgattaacacccgcattaattagtagatatatattatgaaattactatgtacatagattgcgactaatatgcgagaactagttttaatgttaaatgctcattatttgcagtg

SEQ ID NO: 18601 - DNA, 470 bp, Oryza sativa
  unsure (1)..(470): unsure at all n locations
actgagctgcagctattactggggcagggacgactttcttctattattatccgggcacggtctgtggcatcattgcagcatttgacacatgccacctgcagccgcgctctaatttgcttcgctctgaaaaagatagtgatgccgcccgcccgcccgccagccgtggcgagccacctgggcctttgccggccgctcgtcgatcgccggccggtcccgtactgctggctctcgcgcgctcgctcgctgctgctgcgtgcaatgcatgaatatgaggtgaattttgagggcatcatgattcgtcggcatcgattgctcatgattcggcaccgtgcctgcgactgcggattggtgatcatactangactttgcactgatttcctttctctttcttttgccggtagcagcgagcgcttgagacctgaatgatcagtcgatgcgatgcgatgcagtgatgcgtnctactattactc

SEQ ID NO: 18602 - DNA, 492 bp, Oryza sativa
  unsure (1)..(492): unsure at all n locations
cctacccgcatcgaccttcgtgataaaacaggttttatttatttatttcactganccaaaaataacctagtctcacatttgcaacaacctttttctggagaaattgatgtatcatgtccttcataggataaatcaagagccaatataacgagggatgtgctccaacttacttttgtaatagtgataatcaccacagtggaagagttatataggaaaaacaacatcatcacggctttggactctaccaaatgatttacagagagaatcactactaataagatgaatttacctgtagcagctggtttntatcaggtttggcccagcctaccatttcatcgcctaccgtgaacaaatgcagtgaaaattgctcaagtatgtggcaaattagcaattgcaatcaactttgcggcaagtggaacgggcactatgtggtaatggcacaatttccccctgaagaatttctcacaatcagacagacttctaatgtctaca

SEQ ID NO: 18603 - DNA, 349 bp, Oryza sativa
tgggagaaagaaagaccgacactgatcctactttttagtaaaaaacgatataacgaaagactcgcagcagtgggaggaaaaaagactgaaactgaacctatcttctaggaaaataaggcattcagattacattgttgtacagtcaacattctgtacctgatctgctggggcactcaccaggttccattggatgtgcaagttccatatgaaagctgcatcaagaatgctgggtcgggctcacaacaatcatgtgattaactcaactgctcacccacgaaaagaatgccactgaaatcaacatctatagcttgaagacacaacagtacctagctcttctttgatcactaca

SEQ ID NO: 18604 - DNA, 468 bp, Oryza sativa
  unsure (1)..(468): unsure at all n locations
ttgatctataagatttgaaacaacattgagcanaagggtattatcatcttattcttagngccgncntagtgctagtcaaaaactgcagtgcttgatgaacataacctcaaaagacacaatagaacttcccattgaaaccaacggtagctcaccacaaggactggctgaacattaatgtttgttttaatgctacaagctactagagattatgccttgtcgatcacatcagggctgaaaactgaacctaatatttattaatccaacactctccataagaagaggacatattctatagtgaactcagggtctggttagcaacgccaaatacccaacattaacataacaacataagtgcaatttagttacagttacagttacagcatggaaggcattattcatagttaaattccccaacaatcacatcacacaaacaaagctcaattgttattctgattgcacaagtgataa

SEQ ID NO: 18605 - DNA, 472 bp, Oryza sativa
acgcagctgcagctgtgcctctagcgtcctcacatttgggttctcatgtccggcattttacgggacgcattgctattgtcctaaaagacgacgtgccattgctgctgtgtcgctggcctggcggaggaagccaacaagtcctgatgagtctggcaccaaatacaatgtacagtactagtagtacgtgccaagtgcaacttgctaataataaatcgcttaatcgagcatgcgcaacggcacggcgagacgagaccgacgcgcagctgcagaggtcgtgcgccacatgcatgcacgttgcaaccgcgattatattgtggcgtgctattcgatgtagttctccgtgctactcctatatttgttggagaaatagggacgatacccgtgctacgagtcgttctggaagaactgttctcggtggatggagccatggaggccagctagctgcagacgcatctggctcttctcgtcacct

SEQ ID NO: 18606 - DNA, 476 bp, Oryza sativa
  unsure (1)..(476): unsure at all n locations
ntatcaattacagaggaacaggtgtatattacttccacttttatacttgtacaccttctatcccaaaaaggataacttatagatatanaattgaaccaatgcttgtccaagtttatctttagaagttaagtttttatcatacggatggctcctttagcaattgcatagtaacactgtttctttggttcatttcaagtagttctatttgactgtttcttgtcagtaataccattaattctcacagcctagtgaaccattataaacgctaatcctgccaaaatgattaatgtcaacagttaaatcatataccattccccaccgtgagtcttacactctaaatacaacaaatctgnagagaaaacaaccaaattgaaccatttctcttttcttttccactcaccccaaaaagaaaaacaattagaatttccaccaccgcacggcatggcatggccccggtgacctgtcgtgctgtccgt

SEQ ID NO: 18607 - DNA, 434 bp, Oryza sativa
  unsure (1)..(434): unsure at all n locations
agctcgtngatacaaatgagcatatcagttatactctttgttacaagctactgaaattggtgctagtccttcctgtagcaactgcaagtgttgaaaatgtattctccacaatgaattatgtcaagaacaagcaaagaaatagaataggagatgaatacttgaatgatcgattggtaacatttcttgaatgagattgttttcaacaagttcctgatgaagacataatacgttattttctgtcaataaaggctcgtagagtcaagttgtaacaacttgtgttgatttttcagaacatggacaggatgtaagtatcttgaacttggaaatatcggctctatacttgaattatattttgcaactgtgaataactacatttatattttctttatgtagcacactatcttatataatatatgttgctgatgggactattc

SEQ ID NO: 18608 - DNA, 465 bp, Oryza sativa
  unsure (1)..(465): unsure at all n locations
tctaaagtttgggtaatctaataatcgagtacaacagacaatttgaatataaatatatactctggccaggaacttcttctgaaccaggagctcagatatttaacacctcatattttcaatttattctcaatcatccactgcttggatttagaaatctatctatctatctatctatacctatactaattgggcactgttttttagcttccacgttaaccaaaaagatctaaccgctcgatagttagaatattntatcctgaccgtaaataataaaaatctgatttatgtttaattagttaacttcgtgggccacccttagttaaaccacatctcagaaactaatactgagagggacgaggaggaaagtactattagatcgatctactttctaacgccatncggccatcgcaacagaagatagaatcaagcgctctcacatcgatcttgaatcatcaacaacgtcac

SEQ ID NO: 18609 - DNA, 392 bp, Oryza sativa
  unsure (1)..(392): unsure at all n locations
gcaagcttgtatataccacaatgtttagcagtttatatatcgtacgtgtgagaaacgatggtgatgagttaggaaatatggctgctgaacacagcctagtctcttttactcgtagcctcatttgcagcacaaccgagagattaacatctgcattctatatggcatatattaaggataattcttcccgtgttattgtcggagaacaattaaatccgaattatttctatatatgtactgacactactagaaacattntttctgaacaagacccncctttaaattgtagatgggtcgtgactggtcacatctacaaatatcgagaacatatttgcatacaaccactaagatacatgaaaaaaatgattttcgcagacggatctcttaacataccc

SEQ ID NO: 18610 - DNA, 384 bp, Oryza sativa
  unsure (1)..(384): unsure at all n locations
cgatctaatgtgaagaaaagagatctggccgatgagaacttacctcagcgtactcagccaacggcgtggcagacgggctggcggaagacgacatcgctgcaggcggagatctaattggagatgaagtcgcctagggatcgccttatgcgtcggagaaatcgtcgaagagagagaagacaaagttagcttcggcggtgaaaacgcaagaagacggtatgaggtttctcggnggcaacgattagtatttaaagcgctggagtaacggttaggaaacggcaagagcgaattntgctcgaaatcgatatatggcaaatccgaaacattaccaaatattccggacttgnnggggcatgtgtaacaaccaaatttggcaatatcagcatc

SEQ ID NO: 18611 - DNA, 457 bp, Oryza sativa
  unsure (1)..(457): unsure at all n locations
agcttcgcatcccctataatatatgaagctttcattatcatcctcggccaatagaaccccactctcctaagcaaccaattcatcttgtgggccgattgatgagttccacaaattccttcatgtacctctcccatagccactttagattgatcttcatctaagcactttaacaagacacaatctatatttcagcgatataactctccaccaaacaaagtgtatttgaacgtgtaacatcctcacaatttaaactaaaatttgactgcatcatgctggcttttgattaaatttgtttggttcaaaaatctatttgatgtttatttaaaaattggttcaagtattattagaacccttccaatttactctaacttattccctttattttaaaccctagtgaagttgagcaaaatctctcanattcanaccatagaatatttctntagcctatcctattatt

SEQ ID NO: 18612 - DNA, 437 bp, Oryza sativa
  unsure (1)..(437): unsure at all n locations
atgagtttccttggaaagcactagaagtgcacacatttagataaaaaaaaagtagggacataccactatttttcaaaatgagaaaagaatagacactatgtatgaacattcttatataaaatctatatgtgtcaacatgtcatgcagatgtatgcatatgttaagtgagaattgaaatgtgaaatatgctattgttcaagttctaatgggaagaacatatgctgaaattntgtgttgcacaatttcatctggctctgaataagatagagcaaatgatatgttaataagacaataagattaatctcttacatatcttgcaaattagtcatgctgcccaaataatcaggtattttccctatgaatccattatctgatgctctnnctacaggacaccaaanattttagaattagcatgaanatatgaagaatgtgatagt

SEQ ID NO: 18613 - DNA, 432 bp, Oryza sativa
  unsure (1)..(432): unsure at all n locations
agcttggagaataagatcgcacgatctagtttcttttgagctcgncatactgccataataactggtacctttgactgtactagtatttttcccctagaaggaatttgctatcctatctgtctaatataactgcatattaataaaacgctcttctcatgctcatctaaatcaaggaaatatttctggcacgggtttgttgaatgaacccaattatccaaacaagacctttatggtttgtagaaaaggtaaagattatactctatcccttagaaagccatgagtattttagtttaatctgtctgcctaccgaacgtactgagcctaatccccatataagcaagccctattgaatcttcctagatattctgatgtgtaatcatattatgagtcactgttggtattatcgtactatcagtaacttgtgctggaaag

SEQ ID NO: 18614 - DNA, 404 bp, Oryza sativa
agctttggagttgctccatctccataggttttgtttgtctcaaagctcttgctgaagccttcagcaagtaagtacttgagatgttggaattcatccttcttgaaggtgagcatgtatttctcaatagtttctccctcttctaatgaaagaaggacttgtttctcttcaattcgagttcctccagttttggtaggtccccgaccccatgaagagactctatgttagtgaattggagctgctcctttctgaaatttgatgcctctcatgttgttgccctcgacaagaaagtactttgagattattgaatttgtgctcattgaaggtgagtttgccatctgtgtatcccttgtgtctcaacctaacgtagcataagttgggcagatcaccgagacccttcagaattt

SEQ ID NO: 18615 - DNA, 356 bp, Oryza sativa
  unsure (1)..(356): unsure at all n locations
tatcattgtacttncctatcttgactgtcaacatcaagttttcttcttgatgttatcagntgggggctatcatcataataatggagtgtgattctttatcaatttaatttgcttacttggtctatcattgccttgtttggttttttctacttagtctgcgaggactgaaagtttttaatagcttctttgggttttaggctcaacaaagcttgataaaaacttttaagcaatcaaagacttggttagaactatcaagcacagcataaatacgccagtattgtacaaattgagcctccatttgttacattcatactcagtcagaatcagtcttttcatcatcagagntattggtgctc

SEQ ID NO: 18616 - DNA, 421 bp, Oryza sativa
  unsure (1)..(421): unsure at all n locations
agcttatcactgtgttgtcttgcgcttgatttctctcctttntagatggtggtgttgctgttataatattgttcttcttcttcttgttgttcttgtggagaagagacaacacgctaatttggatctataacctactaatattaggctttggaaatctgtgatatatcatataaccgagcagactcgacataaaaaagttttcctctgggtcctatctatggttaatagttgccgactacaattgccttgattctttaagtgaaacagttggagagtaccatatgtttatcccagttgaaaaaacagtggttatacccttcttttacaaaatacagcaggcgagactcctacacatatagccactaaggataatcataagttatggagtgagatcggtctgaatcttttggactaccttatg

SEQ ID NO: 18617 - DNA, 489 bp, Oryza sativa
  unsure (1)..(489): unsure at all n locations
tgcttaattaggtgcagactagctatgctgctattcatccattggcagatcaaaatgtgttcggtcttcctggagagtaaaatagtccgcgatgctgtccattacgtggtaaactgttcttttattggagttctgtttttaactcgtcctattgaggggcgatgcctgtaattaatctggatcgtaaccctcttgcctggtgaatgctccacaaactctcatgtccctcgcatgagtttgttcaagtgtggaagttgtgactgtgctattattttagcattggcttggcagtacttgttctgtttctagcaagagtttcgcatgtgagcacatgcatagcaatatagtatgttctaaattagttcattacattatcctcaaattcagagctgatatatggtagtatttgcttgtgatgttgaaaatttatccatccttcttgtatcgtcagttntggtattcacgaacagcgtgccacacctatgtaag

SEQ ID NO: 18618 - DNA, 455 bp, Oryza sativa
  unsure (1)..(455): unsure at all n locations
agcttcaaaataatctttaggtgatatatatttntagatggaggaatcatttaaactactctcttcagcaacctatcaaataaccaacttgatggaccaatcccggattctattcttcaaaggtttaaggcaggacagcttgaattgaggtttgggaacactcccttgcatagttgcatggctcctcattgatattaaaaaaagaatctaacaaaataactactccaaaaggaaaagactaaaaccaacactggttatcacagaacaacagtatcaatcaattaaaggttcataaacaacgaccacattatcgaaaaacaactgaaaaaggtaaattgcacgtagtagactctagtgattataaatgctttagcatctacatgatttccaacanaacagggacaaaatagatctattagcgaaggcatgcactctatatagcatgtaatagttct

SEQ ID NO: 18619 - DNA, 463 bp, Oryza sativa
  unsure (1)..(463): unsure at all n locations
acccgacgcctgcgtcggtgccttgtgttatattttgagntttaaaaataaaactcgcgacacaaggccattcctgggcggaatacttgtgcggtcgcatctaaagaccgattcctttggaattacatccgagcatacaatagtgcgaccacacgggtggaatgggacgcccctggctgagtaaattgctaatcgggggagccttgatgccgagagacatgtggattcaccggggtggtgtcggggaggacccctgngcttcctggcacagtatggtctgggacctaacctcgttgtggtctgggacccctctcgtcggcatatggttaacctgtgtcggctttcgaaatgccttgtcatgaaagcccttatgtcaccagacgtggccattctacacgggctgggtgagtcgggataataatgacgtgtgggtaaagtgtaccccctctgcagaggttaacaa

SEQ ID NO: 18620 - DNA, 496 bp, Oryza sativa
  unsure (1)..(496): unsure at all n locations
cttcgataaaacggatatacccaatacgtcgaaactcattgtctaatggtagagaaagaccgtttccacatcaaanacaacaaanactagcgcaaacatgtaatagcgtattcggaattgtaaccaagccccccccatgggttctatacccgattcataactagaaagcttctctggtccttcacgaaccggagctaaaagtgctgaaatccaaaatgctaaaataggaataaggcttgctattattagaaatgcccaaaaaatatcatattcgtgaagcagaaacataaatgtactcccattaatgtggaataggcggaactgaattagtcaattcaagtcagcattgtcaatttatacagaatttctctcttttcctcggtgaaacaaggatcggttnttctcanaccaaagggcttagtttagcctttggttcctctttgccacgtcttctttaaagattcatccaatggaatcccgaccccctttctttttg

SEQ ID NO: 18621 - DNA, 286 bp, Oryza sativa
agcttacctaaatcgttccaagactttattcttaagactggaccagttgcggaacctgtttacaaggctgtaagagattgctgcagaggtggtcatgtggatctcattggtctctcagcctatttagcttacaagaagaattctcatttgataaatttaacaaaaagtccacccattattccatgttctgtgatacatcctgacagaacatcgcgcttggctcataatgtcagtgtctcttcatcaacggttaagaaaacactccctctgtatttctcattgacat

SEQ ID NO: 18622 - DNA, 435 bp, Oryza sativa
  unsure (1)..(435): unsure at all n locations
tctcanacgctccgggccgnttacttggactgaggaagcttgtcgtgccctcactcagatgaaggcgtatctcagctctcccccagttctggtcgccccggagccaaatgaacctttgctactctacttagcggcgaccccgcaagtggttagtacggcgttggttgtggagcgcgatgaggacaatcctcattccgcgcacccccaccctgtgctggcttggcccgggagagagcanggaggagaggccctcgagccgaacggtggcccaaggcccccgacgaccggagcaggccctctgcccgcttgtcaggcggtgccaggtgcccccgacccccaggatggcccgagggccactgcgggaaggccgcacctatcgccctctgaccccgagctaaccctgtgccgactctacccgggagagagcatggagaa

SEQ ID NO: 18623 - DNA, 446 bp, Oryza sativa
ttaagcgaccgcagcatgcagctttcaaacgctccggaccggaccatgatttatgaagccgacaatgccctcacccagttgaaggcgtatctaagctctcgcccagttctggtcgccccggagccagacgagcccttgttactctacttagcggcgaccccgcaagtagttagtgcggcattggctgtggagcgcgatgagaacaattctcatttcatgcttccctaccctgtgccgacttggcccgggagagagcagggaggagaggctcccgagccgaacggtggcccaaggcctccgacgaccggagttggtcctctgcccgcttgtcagacggtgctaggagcccccgacccccatgaaggccctgaggccactgtgggaaggccgcacctatcgcccttcgaccccgatctaaccctgtgctgctcgagccgtgaagagca

SEQ ID NO: 18624 - DNA, 368 bp, Oryza sativa
  unsure (1)..(368): unsure at all n locations
gctttactagtcggctactctgacaagattccattctttttctcagtagccatttatgtagagacaagctcnacaaaatggtntgcccacctacagcctctaacaaaattgctagccacatatgcaaagcaatacgctgtgcagattaaaaacacagctttattgtacgccgcaacatggtttctaaaataaaaatggggataaacaccagcccatagagcaactctagcgacagatacaattttaagaatggtcatacgacacattcagtacagcacgcagtagcatgtttcactcaaagctagcacactggatgattaatttgcacacccaaattcatgaagtagaatagctggttcactgcagga

SEQ ID NO: 18625 - DNA, 447 bp, Oryza sativa
atgcagctactctgatgcagttcacaacatattctttgtatatgttaatatcacgagatccacgaacctggtgaggaactcatgaaaccattctcctttcattaagtagatacttacatgccacctcacgatatagaggatagcccaacctacagcgtgtatcacaacctgcctctgatgcttagagattctagtatctcaaccttagagcaacgacgccgtttccaggaggcgcactgggacagatagaagactgaacatagatggctagaacaatccctctgttacttagtctctcacagatagtggcagccaactctacaccagagcaacccaatcccacaatggccacctgaatatcggcggaatattcaccacaccttctcctttccaacatctacagctggcgtccaactctctgaacataaataggacaatacaacaaca

SEQ ID NO: 18626 - DNA, 470 bp, Oryza sativa
acacactagaaactcaagcttcggggattgaggaggtaaagattctccttcttgagggcttttctattgtattcaatgtatcacatcaaacaacaatttattccattgatagtgctaacagtaccttttcccactcttattcttttttaaatcagtattacaaggtctcatttaaattttgggcatctttggttaacttgtcatatggggctataggtacaccctgctctattgctggagtgataacatcgtgttaatctcggatattttataagtcattataatgaagttaatgtgccaagcttggccatgtatgcaactctcgtgcaccaactgcctggcgtgaatgtcatcaatctgtcatcatacttgaactatattgttagctgttagccatagcaatgcgtgtttgcactacagacatatctggcaggagacatgagacacacgtactgaggaagctttgaaat

SEQ ID NO: 18627 - DNA, 469 bp, Oryza sativa
  unsure (1)..(469): unsure at all n locations
agcttgatcagctatctgagggcccgagcttttattattctttcggctcgaagcncggaagagtgacgtcatggcacaacttcaagaatgcaacgccgagctggatatggagcacaaaaagttagccgatctcccgaagtctatctaatagcaataagccagactcaaatcggctatcaagaatgtcgcggatctgaccaattctctgaaagtcatccctggaaccgatgctcaagatgcccaagctattgaggaaggagaacaaattaagcgaagggctatttcggctatccagcgatacttgtctcaatgactctctgtgaaatagacattagaaaattcttttgtaatcggctaagatactccagatactttgctgcctttatagtcctttgtgcccattaatacaactgcgagattgtgttaaaaattctcattattatatatatatgccccctaatatacaatg

SEQ ID NO: 18628 - DNA, 445 bp, Oryza sativa
  unsure (1)..(445): unsure at all n locations
ttgcanatgtgctagattagntacatatctctatgcgtaatgtattgtttgttcgtttgaactggtcatagcatagtgataatgtgcttttcctatcattctattgctttatatttcaatgcttacttcatatgactaaataataacacctttactcatgatanggcgctgcaaagcgcgcctaatggtctagttaagatcacggtctanggtttaaattcactgtacactcttcactcttcaaccagttcagatctactatgggtgtcctttgctcccttgtcggcctccatcgagccccgttgaggccaccgtcctctccactgctagcctcctccaagcactgacgaggctgccgtcctctccaccgccggcctccatcgagccccaacgaagcttggtatacatgctatatgtagtacaatcttcgatgcttggtatatgt

SEQ ID NO: 18629 - DNA, 465 bp, Oryza sativa
  unsure (1)..(465): unsure at all n locations
agcttagactggaggaacaatccattaggtttatctatttggtcggagcgtccaaagcgtggntgtagagatcattgccaggtggctacctcgtttgcataacaaacaattggtatgagatactatgtttgccccaatgtagacgacgatttcgttgtatgtataacaaattccaaatttaactagcatctgcttattattactatcatatctgactaactactatgtttgtttcttagggcaatccaaggaggtgcgcattcactttatggatcgacaatgtcaatccaacatatgatggccaaaagataactgagtctgaaacacaggtagagtaccagcgagagaatgagcatcaaaatgcaatacatgttgaacagcgcagaatgggtcggtatatacgctcacgctcgatttgtaggaccgacaaattatatcttttaccatgctatcttgcattataat

SEQ ID NO: 18630 - DNA, 411 bp, Oryza sativa
  unsure (1)..(411): unsure at all n locations
atattcttggggaccnttcttggttgctgctaaccatggcaggaatgcgccaggggaaacacaattgtcatgctcaacgtcaacatctacaccttcgacgagatatgacgacttcttcacgtgatgcatatgaggtacatgactattattttgcacaagttgcattgtagttaccagtctatgatggaaagtatgattccgctgcatacattaattgggagctagcagtagaaaaacaatttgatgagtatgaattttctaatgctcanatgataaggctgctagaataagtgtaccggttgcatcttttggtggatactgtgggaataagctgaactgggataatgcaaatactgtgagaaanggttgtgtttatactatgacgtctctcttgagaatgggacattaaac

SEQ ID NO: 18631 - DNA, 462 bp, Oryza sativa
  unsure (1)..(462): unsure at all n locations
agcttcagttataaattctagacatatattcttctgatacctgcatatcatcctctagtgttgtgaacggttttttatgtatgattttttttgtaaattaccaggcagtggctcttttcaagtcatactttggtggtgcttttgatgaagatgctatcagaaataactctgttttaatctatgagcttcttgatggtaagggacatcttatttttggactctgtttcatcaatttgcactgtggatgcttctatttacctgtagaactgtctctctcatctaactgtgcagaaattatggacttcggttaccctcaaaacctctcacctgaaatcttanaattgtatataactcaagaaggagttcggtcgccatcttcctccaaggtgagaaaaatgtgacattgaaatacgataaccggataaaaagcacatcaaatagtttgttgctcatttattttgt

SEQ ID NO: 18632 - DNA, 500 bp, Oryza sativa
  unsure (1)..(500): unsure at all n locations
tctgctcaagaacacaccaatgttagagatgatgactattgtgccttcgatttatggtcttgagcaggcaaagttcacgcgcagggtattgaagctcagaaaggcctcccgagatgctgacatccagttttctgctactggatgatgagatgattctgttctgtcaatttatgaagcctcgtgatgtagtcctggaagaagtgacttgcctaccatccatgaggttcttccggtcttattctggctaattctaactatttatagagttgataagcattttcatttatcggcgagctccatttagcttggtatacttataattccatttagctncacctttagatatactnttttgtatttgttggagactgatactaagttntatattagctggatatattaataaatttcctcaatgaaattgaggaaagcatgcagtactctatgcagacctgctgganttctatggatatataggatgagatatcattacgtaattg

SEQ ID NO: 18633 - DNA, 438 bp, Oryza sativa
  unsure (1)..(438): unsure at all n locations
agcttgctactatgtatctctatatgttcttattaanagtactctctagcacttttgcgttaacttgtgactatgcatatgcacatgtatctttagcacttgtattttgcacaagattgagatttaataatttagctatgcacaagtagtggtattgtagtagtaccgttaataacatatgctctctgttactgcagctttatgatgatgttactgtataaaccacagtaacaacctataaaattcgcagtaacgtaccgtgatactgcacttctgcgataatattactaccgaatcatagtaacaaggtgcgattcctatagtaatatatctgatttgttctataaaattatatagaggtagaaagcaagcatgcaatatcctctaatcacatagtggtattgggtaaattgggcaggagagcttattataaactat

SEQ ID NO: 18634 - DNA, 457 bp, Oryza sativa
  unsure (1)..(457): unsure at all n locations
tcacatctccattcttgcttccagttaagaacaaactggtatttgngatggttgatacactgctgacactacctgcagatagaacagaagagatcaggtagaataaccaactcgaaaagtaccatggtaatatcacaaaacttacctgtatgcgcctttggtatatgccagatcatcccactgttgctaacaccgttggaagttccagacttagtgtcatgcattgaagttgaagatgccttaacatcatgctcgttggaacttctgtgatgcttagtctttccagtagagatgaaccgaanatcatgcaaagttacatctccacttttcccaccagttacaatcagcggtgagatagatccacagcctatatttctatcgaacacagaaagagaacgaactcctcctgaaagatgaagtccatggtcagcctcagccatatattctaaattctaca

SEQ ID NO: 18635 - DNA, 461 bp, Oryza sativa
agcttcactatgtccaacgcaactgacattttattgttttttgctctgcatccaccgtactaaggcgtctcggaatcacttaccaacctgctgaattacattccatctctctcattctgggctgggtcctcaacgtcacggaacatgttcttgcagcagatcgtgatccacatcaaccatttcaccgcccaacggagaaggtataaacatgtcatgctcatttccatcttcctgattatgcgcaccacttcttgttgctgctgctccacttcctgaatcttgctctccatgcttcaccccacatggtatagcctccatgaatcctcgatgtatcacatgaccgcgtaccgactctccgctatcagacatattctcgttcttgcaatctgcacatggacaacacatgtaatcactgcttctcttatacatcccctcccggcggcattatattattacccctt

SEQ ID NO: 18636 - DNA, 486 bp, Oryza sativa
  unsure (1)..(486): unsure at all n locations
tcatgagttccaacacgcatgataacttgctgtgcttcgacttgcatccatcatacaaaggcatctgacaatcttccaccaacttactaaacttctcaaaatctctgttgntgtcctttgcatcttcaatgtcatgcaacattgtagatagacattgagtgtccaaatctatggtctctccacctaaaggagaaggtacgaacatgccttctccagctacggcgccggcggtgttctctacatcctgatccaacacttcttccgctgtgacatcaggcgcctcttgctctccatgcttggtccaacagatatatttcttcatgaatccattcattatcaaatgagcatgcacttcatcgctatcttcgatcatctgttcattcttacagtccctacatggacacaacatgtgcatgctcatcctactntttctgtcattatccgcagatatgacanattcagttgacccctctctatactcggtag

SEQ ID NO: 18637 - DNA, 282 bp, Oryza sativa
tgcagcttgcaccaggaaaggctgtttgtcttgtgttaacagagctacacaagtgagatgagattctttcactcgcacacgtgtattagttcccactgctgaagagatgagcggaaccgaatgataaaatccatgccccagccggaccacatacattctcgcgcaaatcaactttttgcaagtacgctcagtgagaagttgcacatctcgagtttgtgccggacaacacaactccctgcatatcatactagcttacagcacggataaagaagtctgaataac

SEQ ID NO: 18638 - DNA, 438 bp, Oryza sativa
  unsure (1)..(438): unsure at all n locations
ggcgaattgctgtatgacaatgaaacaaggcgctttttatttatgactatataccagcgatgcactcactgtatgttcgaccgtanagtgatccatcgagaactatatttgctaatgatctctaaaagttctgtgcaagttgtagtatactaattgcattctatatgcatattgtcttagatatattatatgatagtccctgataagatctttcaagtattgacgctttacgtcatgagattcattttacagcaggacaaataatgtacgtatgtatgatatggtcaaccaaggataacacagccaaactaaatctggcatgtaagctattcttgggttaatcacacacactgttatgaattgatggttaaatccttgtcgcacatggctgtctatctgaagctcttagtatttactgtgcacaacatccctactact

SEQ ID NO: 18639 - DNA, 465 bp, Oryza sativa
  unsure (1)..(465): unsure at all n locations
agctngctcgctctgcatggactgtttgtgttattattgttgttgggcatcggnctctcagatatgatactgtcagctaatactcatgcatgcatgcttgtgaagatgaatatagatcaaatgtcagaaaaggaaagagcaagttcaagtctcattccgaaaaatatctttgctattgcattggttgcaattcgggcagcaagttatctatccaatagctatatatgtgagtttgtcagatataccaacctcatcaaatattatatatttatttggtgcacctgcttactcatgcatctatttcttgagatgcagtggcacaacgtaaagttgctaactttcttttggccactaagtgcattgtcagtgtgtggcactcacccacaaaaggagaattcatcatataagctaatattcttatcacaattaatgctctcaattctctgtgctgacctcagcttattc

SEQ ID NO: 18640 - DNA, 461 bp, Oryza sativa
  unsure (1)..(461): unsure at all n locations
tcacatgggagtcctttcgtcgcatgactaaactctattttacatgtatcgcatgagccgacacgacaccaagttaatttcgctcgctccacgatcaaaatttacttggtggggggcatgtgtttgatggtattttggcgattatatgtgtacacaagacttactcatgatggacaaagcaaacaagcagtttgtaagttggctagcttatcatttctacacaatgctcggccatgtatatacacgcaaataaatgcatgcacaggcagctgggaatatatatacttggattagtatatgtgcatgtataattaaccaataactagccgtgtgaagattggctggtgaggcaatcacgtgcatgcatgcatgtactacagtagacggtcgtatgtgtgtgcatgcctgngtgattaagcaacctatgcatatccgagtgattaatcatgggctcggcccat

SEQ ID NO: 18641 - DNA, 463 bp, Oryza sativa
agctgggcaatttcatagtaaacacatctttttaccagcgcaagcgttccaaactatccctctcacttggccgatctcatgctgggggctcgacatactcggaccattcccacgaggacaagggaagcgacctccacgggggaaatcaaggccgacagtgccatcaaattcattaaagagatattctacagatatggattgcctcaccgcatcataacggacaacggctcccagttcatcagtgccaacttccaggattactgcattaggctgggagtcaagatctgcttcgcttcggtttctcaccctcagagcaatggacaggtcaagagggcaaatggcatattactacaaggaattaagacccgtgtctacgacagactgatgtcacatgacaagaagtgggttgaagaacttccctctgtactatgggccgtgcgtaccacaccgacaacgtccaaca

SEQ ID NO: 18642 - DNA, 487 bp, Oryza sativa
ttctttgcccagttataaattatactatcaaaacatgtattgttgtgagggagcgtattgttggatcctgtgcacacagggaacaatatcatgtgcacaccatctaacaaattttctaaataaatatagaaaaaaatgtacatatagtttcaacatcattacactaatttgtaaagtcttcagctcaaatttattattatttggccgtaacaaaaaaaatataaaattccagacagctttaagagtatcaaaattttgtttcttttattcttcctatatgtaacgaattttgagataggactctacatataaatataaatgtaatactacttaaaaataaattaataatacatgtacatatctttttagtcttttttttaaagttgatgtgcacagttgtatataagaaagcttgtgtgcatggaacctatcctatgccacaagactttattcgaaagatcaatatatggtgtcattatctactcct

SEQ ID NO: 18643 - DNA, 428 bp, Oryza sativa
  unsure (1)..(428): unsure at all n locations
agctngtacagcgngacatgcactatcatttctatatcaagtatgagcatcctcgccaccttggtgacaatcatggttccaatgatgagttgcttctgcatcgagctcactccttgttccacgtatgcgagcgtgggatagttgattctgtgatcatcaatgatgatgatgattcagataatcctgacagtaaagtaattggggaccttcttatgcaagataaagatcacaagagcatgtggacagtgatggagatggagctctccctcatgtatgacatcttgtacaccaaggcatatgtgattcacactagcttatgatacatcatccgcatcatggcgccgatcaccatcattgcctcactcttactgtttcatttcagtggcaaaggtggccacaaccgaatcgatgtcatgatcacatatgtc

SEQ ID NO: 18644 - DNA, 485 bp, Oryza sativa
  unsure (1)..(485): unsure at all n locations
gggcctagccatggcgaaagggcccccgggcgcatattggtccattgngccttctccgcccagggcccgtcttgggtgatgtccatatgcttcgctaaatgcccttcgccatataccctttgcccatgtggtctttcgaactgcgaagctcggagccaggcccttgatcttcgcccacatgcttcgccgcatagccttcgccgtgtgccttcgcctttgtcgaagttgacgcctctggcttgatccttcattgggtggacggttgttacgcccggaaattcactattaatttccgaactaatttgtgcataacatcctcgtccaggaatcagtcgaggtacacaaactgacaatttaatatacaaatccatcataataataacgttacatacttacaaagaanagaanacagcagcggaattaacggtctagcgatggcttcagctccactctcacaggcagctcaactggtgtataagccaaac

SEQ ID NO: 18645 - DNA, 408 bp, Oryza sativa
  unsure (1)..(408): unsure at all n locations
agcttgctgcagattctatgaacatatactttattcgagcgangngtatgacgagtgtttaatttcttcaaataattaattatgcagtacaattttgcaaactctagaaaatcaataaggcattgccgttccaaatgttacaagagttgtagaacaacaactttgttcggtcataaattaatggtatcacatatagtcgtatatatggcaccattaaattatcttttttttaatcacgggaggtaaaattatgatgattatcactggcatgctttctaagctctcaaacagaacgatttcaaaaggaacacttttaaaatcaaccttttaactttctaatannttaattatntgtttatgcccttanataattatcacanactcagtttcatcgatcacccatcagct

SEQ ID NO: 18646 - DNA, 471 bp, Oryza sativa
ctgggtcaaaatggtgtttaacaactgccatcttataccatatgtgaagttgacgacaattaagatgctctacgaagaacttcaaggtagacatcagccattggttttcaagttacttcatgagaagagaagcatgatcaagaagaaaatggtgtgaaagataaaattttctcaattcatgatcaagcttgctgtcaagagaatagatgaagatctagaagatggatttcaaactatcaatcaacaaaaacaaagtgaaatggaaaattcaaattgatgaacaaaattacaaagtgaaaatattggaaatgcgaagaacaaagtgaatatctatggcgagacaggtaaagggaatgcaatactcagctgcgatggaccaaacgatcttgaagggcaagggatgaatttgtcatgatggaccgtataaagccattttgaaatttgaatctatgagtactccacatcaatcat

SEQ ID NO: 18647 - DNA, 379 bp, Oryza sativa
atccataagacaaaatcccaaactctggtggagcgcaaagtctcatcaaagtcgacgaagctacgaatccgcacatgccagcaagttctcctcccaagagatggccgacccacccctaacaacgtcaaccgatcaattcaggatcaaatgagaacatgaccgataactcacacctcgatgatccaaaatgactggtgggttacctcagactacgacccctgaaccatatatacgttctccacagtctgaatccatccaagtcctcgggatagaaatcagatcgtagcgcgaatagtcgtgagatcgatgatctagccacttgcaacggaagactggactgcacacagcatgagaaatcgagagctcatctcaaccacaa

SEQ ID NO: 18648 - DNA, 430 bp, Oryza sativa
  unsure (1)..(430): unsure at all n locations
gtataacagcacaagaagatgtacgatgtgctaaaatttcactgaactttgctaatgtactgaacggggttggtcattcaattgatacacctagataattcatatgatgccttcataagttcattttcatatgcacctgaactctccgagccagcaattcattattattcacattgatattgtgataaataaacttaattatctcactcacactcatatatatacacacagtccaagacctgctcacacctcacacccatatgtatcaacatccatgatcagttggtgccttgctactagcctactacatagatatacaagttatcacattgactgttcttgctatgttgtgtgtgggntgggtcaagggtagtcgagatggtatcttgattcgatagaaatgagtgacatcacgaaaacatctttgatg

SEQ ID NO: 18649 - DNA, 463 bp, Oryza sativa
agcttttggacagaaagtccttgacctcctctatcacatttaggctggtcccaaagatcaatatgtcatcgacatatagacagaagatcactccctctcccccaccataacgatagtacacacatttgtcagctttgttcacaataaagccagcagatgtaactgttgtgttaaacttctcatgccatttcttaggtgcttgcttaaggccatacaaggatttcaatagtttacacaccatttcctcctgaccttctagtacatacccgtttggttgatccatatagatctcctcctccagctctccatttaggaaagctgtcttaacgtccatctgatggacgagaagaccatgagaggctgccagagcaagtaatactcgaatcgtggtcaagcgggcaactggtgagtaggtgtcgaaaaaatcctcgccttctttttgggtataacccttggccacaag

SEQ ID NO: 18650 - DNA, 483 bp, Oryza sativa
  unsure (1)..(483): unsure at all n locations
tgctcacgccacatcaatntagtcatatatatcgtaagtcatctgtatattctcatggttcagaattttggtagtgccatttattttattctgtcaccactaaaatatttcttttacagcacttcgaanaattattccagtttgctcggaaaattgaggaactaatgtacaacatgagccctgaggaggtaacccatcacatttggttgtgcatttcagtttcaaaggcgatatcattgagttattatcttcttcgggacagtgcacccacaatattgatcctttttcggactatggtccatttcttgatagttgaagcagatacctgttctggcagaggattcaagataattagatgagatgaccaaatacttaagccgtctttttgtgaaataataccaccgaaatattgatggtgatgaacatatgaatntcttatttttattctttcaagatctataatacgatgaacactcatatgtg

SEQ ID NO: 18651 - DNA, 246 bp, Oryza sativa
tttgaatgcggcatatatatgatacattatagcaacgtaatcgcatatgtaacactagaacgcgtaggaagaatacctgccactgcacttacagcttaattttagtaacaccgctagaatgagagttctcatgagtttaatgaaaaggatgacccctggcacccgttgctgctgtcctgcgccggccatatttgctgctcgtgctggtgaacaccagcctgctgctgctgagtacgtaatgatgat

SEQ ID NO: 18652 - DNA, 399 bp, Oryza sativa
  unsure (1)..(399): unsure at all n locations
ctacgcgaaaagtgcctagcggcctactacaacaggacaggcacaccttagaatatgtgctagcagacagtattaactactataccacaaaatatgccttccacacactttaaatgatgacgcatggaataagctcttgcgtagatgatcttgcgggggatatagacccggtgtagctcatatgaacagctgactgtctgaatgagtatgccttaggagagactccgaaatatatataataattgaatcccgactggcgcaagtattctgttgatagcccttacggcgaataataattggtccagtctttgagcatagaacatagactcatgactatgaatccatgtggaatgtatccggaacaacgtcanacggcagatataatcctcacgcttgagt

SEQ ID NO: 18653 - DNA, 468 bp, Oryza sativa
  unsure (1)..(468): unsure at all n locations
agcttcttccaaagcatacggctgtctagatgtatatgacgatctctagacagatggatcttatatgaatcgtatgatgaagtaccacatgagtggatatataggaaaggaatccaaatctgccgaatcgctcatgttatgatcttctacatcctaggtctccgcgttccgtcatctggcttatgttcttcatgtagcattcagatcgaatgactctatgaaattacgtcgatacttctacatattatgggtaacgtaggagacatccctattttcccccggnggtcttaattaccactgcttagctttcaattcgcctctgaccatcaaattaaatgtgaataacccgtcctcctctctttgaaacaaggggcgcttccggttctgtgcgtgcttcanacaattttgtcttctccatattaccatatctctagagtcaataattttctatgaggaactactgaactc

SEQ ID NO: 18654 - DNA, 477 bp, Oryza sativa
  unsure (1)..(477): unsure at all n locations
tttgagagaaaagaagaatctacttctaccgatatgcccttaggcacggccatacataacatagaaatcacacgtggaaggggtgggcaattagctagagcagcaggtgctgtagcgaaactgattgcaaaagaaagtaaatcggccactttaagattaccatctggggaggtccgtttggtatcccaaaactgcttagcaacagtcggacaagtgggtaatgttggggtgaaccaaaaaagtttgggtagagccgggtctaagtgttggctaggtaaacgccccgtagtaagaggggtagttatgaaccctgtggaccacccccatggnggcggtgaagggaaagcccccattggtagaaaaaaacccacaacccctttgggttatcctgcgcttggaagaagaactanganaaggagaaaatatagtggatagtttattcttcgtcgccgtangtaaatacgtaactaggaatat

SEQ ID NO: 18655 - DNA, 471 bp, Oryza sativa
  unsure (1)..(471): unsure at all n locations
agcnttggccgactctgtcgccgagtggtcttagtgtcattaagacacgcccgaggaaaagatggagtattggaccatgcattntgacgggtcgaagaggctttcaggcactggagccggggtcgttttgatctccccgactggagaaagactgagctacgtattgtggatacatttttctacgtctcacaatgtggtggaatatgaggcgcttcttcacggactaaggattgcaatctctttgggaattcggcgtctgatagttcgtggagattctcagttggtctgtaaccaagttatgaaagagtggtcctgccttgatgataacatgaccgcttatcggcaagaggtacgcaagctggaagacaagttcgatgggctcgaactcacccacgttcttcggacaataacgaagcagccaacagactcgctaacttcagttcaaaacgagaagccgctccttccgacgtg

SEQ ID NO: 18656 - DNA, 464 bp, Oryza sativa
  unsure (1)..(464): unsure at all n locations
tagaccggaggcaagcggcgaaggtcgagaagaaaaccatatgggctatatccacagggcanaagctgcggctcggaactacatgggtttcgctaggaatggacctcgccggagggccgcacgggcgaagactgtgaggcgaaagcctcagcacgaaggcacgggcttcgccaaaccaccaaaaccctgccgtgaggaggccaagcgggctgttacgttctcggaggggattcgccaaataaatgggccaagccatatagcccaataggggcccatacatgtaaaggacaatgtatacccccaataatgtccctatcataagggtaaccatataaattcccctgtaaagcctaaaccctagaggagggaacctgtaatatggctataaatagcccctgtacgccatgtaatanggctataacatttcactaagcaatacaattgttctttacttccaactactt

SEQ ID NO: 18657 - DNA, 453 bp, Oryza sativa
  unsure (1)..(453): unsure at all n locations
agcttatctgtttaatatgaagttttttttctttgtattcctgcacgtttgttctagacaagtgtttatgctaaggaccctataggagaaacctcttcggttggttctcgtttttagcctgcatcttgcataggcgtctggagaatcggtatccgtagagaagtgttcccttcgggtggaactgcctgnggagacgataaactcttagctagaacaagtgtgacttggaatatctttctaagttgcttctaaaaagacagataggtgaggcatacggtgagtaccgagtaggactttatatcatctgaagcaagcttctgaggctgtctaaataggattcgccaccctgcatagatcctaaagttaaaatatctctcgaagtgaacagtactgaacagtaatttatacagtaaactgaatagtattcagccgcatatatagtgttttgaacag

SEQ ID NO: 18658 - DNA, 460 bp, Oryza sativa
  unsure (1)..(460): unsure at all n locations
tatctcctacgcttcangaatggatcagtcagaactttatcttcngcttgccttcgccaccgccgactggtgtctctgcctacacggatggttggtcacaccaccgttgttgggcgtctccgccttcaccaccagcttgccttcgctgccgccgactggtgtctccgcatacacggttggttagtcacaccatcgttgttgggcgtctatgtcttcatcgctagcttaccttcgccgccgccaaatggtgtctcttcctacacggatggatggtcacagcgccgttgttgggcgtctacgtcttcaccgacaagccacctcgtctgccgccaactggtgtctccgacggctggcctattatgccaaccgtgatgggtgtctacgtcttcaccgaccggccgcctcgttgtcgccgataggtgtctcgcctacatggtctgtttgtcacaccaccgttgat

SEQ ID NO: 18659 - DNA, 459 bp, Oryza sativa
  unsure (1)..(459): unsure at all n locations
agctctaagctgcgcaatcgagtgctactgttatcgcacgggagacgatgcttcccctgcaagcctctgatcttttgccggatgctgtcggtgggatcaaatgcgccatgattccgttcctctccgacctcggtgatgtggatgcggacgggatcgcctggccggccgctcctgtccccgatacctgtgacagggcgcggcctggcggcgcagcgcgttgaagccggcggtgatcgtgcgcgcaaggtgctcgacggattgcgcgaccagacatacaggtgtgtgcttcttgatcctccccgagggtgctaactaatgctccctttttgcttgtaatgtttgatcacttgtcttatttatacttttttttgtaaatataaaanacgaaacgttgtgcttaaaatactggtgataataaagtaagtcccaataaaataataaaatttcaaaaatttgata

SEQ ID NO: 18660 - DNA, 444 bp, Oryza sativa
tgttcgccttacttttttgcaccttcatcttactgtcaatcttggtggaccaacgctgccctaactggactcgcttcaaagcttcatcatgtctgttcacagagtagtcattgcacttcatgaacgtaaatgatacgatggctgtcactggaagcttacgaacaccaactagcacgctattgaactgttcggccatgttggttgtcatgtaaccccaccggcggccatttctatcgtatgcacgagaccacttatctttatccaacaactcatcttcaagccatttacgaggaccttcgggaatacgctgccttagtgcctcaacatccctctcaaatatctacttctcgtcaatctgacatatccttaggagctcttttgtctgatgcttgtccgcaccggccttgtggaaattagcactgaagtgcctcatgcaccaccggt

SEQ ID NO: 18661 - DNA, 426 bp, Oryza sativa
agcttctatagaagatcctacacttattatttcatggatggaatttactacagcttttagagatgcttttatacctacagttgtgattatgatgaaaaagaatgaatttctaagattgaggcaaggctttatgacagtacaagaatatttgaataaatttacacaacttgctcgatatgctgcctcggatattcaagatgaaaaagagaagattgaaagaattatagaaggtctacgtgatgaactttgaggaccaatgattattcaagatcatgaaaattttcaaagcctagtcaataaagtggttaggctagaaaatgatcgtagaatggtggaaggactccgtaataaaagaatgaatttactatgacaattaccaactaaaagttcactaatagttctgaggccttatacatttatgccatc

SEQ ID NO: 18662 - DNA, 495 bp, Oryza sativa
  unsure (1)..(495): unsure at all n locations
ntagcatattgaatgaatgattntcttatataaggtgcttatataacatattaagcaatattaatcatattaaaaaaacatgtaaaacaaatatattaggtaagattggctaaaactcgaatactatccttcttggcaatcaatgagcaagttagttcttacaattccaaacatgactcagtagttcaaactttaaacccaattaatgcagcactaagtatgaaaggaaatataaggtctaaacaatcgagctcttgattgattntcagggtggtagatacccttactaatctaaatcaatgaaaattgtttagctgatgtcggtgaaaccctaacagatcgagtcgattgttaacgccaaaatttggtaagattctttaatggattcggttaaggaaagagtgcaaccagctgatggaaacttatctagaagtgattgagttcaagaaggaatcatanagaccatggcatagcggcttaattctatctataact

SEQ ID NO: 18663 - DNA, 452 bp, Oryza sativa
  unsure (1)..(452): unsure at all n locations
agctntagagagatcaattgtgattatattttatgatgaggataagaattaagaccaaatgaatgaacaatttcttgagctatgataatattgttagctattctcctacctggaatgaaagcatgctgagaatcacaaatgaaatcaggaagcttacccttaattctgttggcaatagatttggctagaatcttgtagggaacattgcaaagactgataggcctgaagtctttatgggaaatagatctgttctttttaggaatgagaacaatattggttttgtttagctcgggaggaatgttacctgtttgatagaagtcctgaaccagagtcattagatcatcctttatccaactccatgcagatctngtaaaagcagcattaagaccatctggcccagcggaagcatatttcctcatgccctctgatgatactcaaattccttctcatct

SEQ ID NO: 18664 - DNA, 434 bp, Oryza sativa
  unsure (1)..(434): unsure at all n locations
nttctgaccaaagtgcgaccggcggcgagtgacccacagatcccttcgtgtatgtcgaggagtagatgtttgccgtcatcgagcgagatgcatttgagaagtaccccgtttggtgccttcttgtatagatcgttgccgatcatacagtaaatcttggcttgtcgggttattatctcggcttttgcatcatcttcgggcaactcgtcactactcaggaaattgatgagtggggtctgccagtcatatgtggtctcgatgtcggcaacggcgcgttctgcctctgtagcccccgagccgatgtcggggacgactgtgctatcttcgccgtttgtggttntgtcaggatgtccaggaaggtgccaggttcgagtggctctcgtctggatgcacgccgtgctatgacgtctggttcgatgatgttcttgcgatatacg

SEQ ID NO: 18665 - DNA, 414 bp, Oryza sativa
agcttctcgggatcctggtctctgttcgatgttttgatgccaaccccgagaagatacgagctatagagcggatgcgccccctcagcaaacttatggatgtgcagtgcgttaccggttgcatggccgccctaagacgtttcatatcgaggctgggagagaaggcgctacccctatttaagctcctcaaacgctctgggccgtttgcttggacggaggaagctgaacatgccctcactcgattgaaggcatatctcagctctcctccggttctggtcgccccggagccaaatgagcccctgctactctacttagtggcgaccacccaagtatttagtgcagcgttggttgtggagcgcgatgatgacaatcctcatttcgcgcacccccaccctgtgctgacttggcccgtgagcg

SEQ ID NO: 18666 - DNA, 448 bp, Oryza sativa
  unsure (1)..(448): unsure at all n locations
cctcaagcaaaccgactatgggtatgcctctattataatcaaagtcctgagcataacaatggtcttgagctatctatttaaattaaatctatcacttacaaaacgaagttatattcatatggcaagagtcagtacattaatcaaaggcaaaatttgctacgggacattcaaaaaacgcgtaattagctaggagacntcncnnnancacgtatttgctatangacaccgtagaatactggtaattagctccttgacacccgtgagattattttattatatcctgaggaattacagagagatacatcggtgtaagtacaattctacccttcgaacacctgcgtaagaacgattgtctttctttatgcttcctctgtatcgatctatacagcttactatgctcttgccttcttctgcaacaacggcagcttcggtagatgtcgttgcggca

SEQ ID NO: 18667 - DNA, 371 bp, Oryza sativa
  unsure (1)..(371): unsure at all n locations
gacccggatcttaagtcactgcggctgcaacttcgtgattgttttatattctataatttttcatgttttagacattattgacaaanatatattattattattattattattattattattattattattattattttataatgcatgtaataaatattttttacttttattatagtaatgngtaagataaatctagtgttttaaagatattgacaattaaagttataaaaggttggtcaaaacgtcctcctcaaaattactctctgcgtcccataaaaaagaatctaggatatgaatctaaatgagtaaagtgtacagacgggtattaaacttgtagtggtatgtcatttaggccttaactctcaaatact

SEQ ID NO: 18668 - DNA, 490 bp, Oryza sativa
  unsure (1)..(490): unsure at all n locations
tagtatggtaaaaagcctatcattggacatatgagagtatttggttgcatttgctatgctcaagtgctagcacaaaagaaagtaaaatctgataataaaagtgattggtccatatttgttggctatgctgatggtatcaaacgctatagactttataatttggagaaaaagaacattatcatcagcagagatgtgatttttgatgaaagtgctatttggaactggaagtctccagaagcctccggtactccattattgccaaccactacaatcacactatgccaaccacatatgtatggcaatcatgaagtggaagatcaaactccaagtcaagatgcatcaagtccaaggtcaaggtcaagcttcagttcggattcaagcccgagtagtgaagagcanatntctacaccggaattagcttcaagatgtgtaagaagtatggntaaattattataatctacttctcaacanagagggacanaacaatatg

SEQ ID NO: 18669 - DNA, 231 bp, Oryza sativa
ttttttcgaacagcacgtccgggatgttcccaatcccacatacacgactaagtaccggggctaaggctccctaatgctgctacgccttcatgaaaccgctgcttgttataacgcccaacctgggcgccggcgaacttcttggaactacgaatttgcttcgtatacactatacggacacacttaggcatttgttaaataccccctctcttaacgttatatacttttatgaca

SEQ ID NO: 18670 - DNA, 347 bp, Oryza sativa
agcttggggggttttgttgaccgtcgttatttatttttgctaccgtcaatattacaaaaatagaggagaactagtgatgcttgcaatacatatatctgttagaataataatattccactagtattaggtatactaaccttttgcagagaatgacaataaagtggaggagaatcaacatcaactcagacgataaatcaatcggacggtgttgagaaccagacttatgtatgaatgggccaagaactcagaaataacatgacacattaggccaaaattcacaagtctacaatggaggacaacaaaggaggccgccagctgaagatgggatgggttgggccagcccatgg

SEQ ID NO: 18671 - DNA, 440 bp, Oryza sativa
  unsure (1)..(440): unsure at all n locations
gacacaacaaactaagcttaggaagagatgggttctaagctgaactntagtactgcttatcatcctgtgtcagatggacaaaccgaaagggtgaatcagattttggaagacatgttgagagcttgtgctttagactttggtggaagttgggataagaatctaccttatgcggaattctcatacaacaacagttatcaagctagtcttcatatggctccttacgaagcactgtatggtcggaagtgccgcactccgcttttgtgggatcaaatgggggaacgtcaggtttttgggacggatatcctgagggaagcagaagaaaaggtgaaaatcattcaagaaagattgcgtgtgggccagtctcgtcataagagttatgccgacaatcgtcgtagagagttgagttctgaagaatgagattatgtgtaccttcgtgtcac

SEQ ID NO: 18672 - DNA, 462 bp, Oryza sativa
  unsure (1)..(462): unsure at all n locations
agctntcttaggtaagtagtgcaggattgtgttgtttctatcatcgagntntcatgttggagtaagcaaagagatcagaaaatgatcgcaggttgaaacgttaacgtcagaggagcaacgtctctgtagtgaaaagtgaaaggtagaaaaatatggttgtaagtaaaaaatttttttggctgttactctgaattacagacaaagcaacctaagtcaattatattcagtttagcgtccctggatcatggaaaatcagcacatgttaacagcaaagaggaggcaggtagctgcaactaccccttgacgaccgatgaataattcaggtcgattgctagtagcactgctagtatctgcaagtgcaataacacatgcagatactagcgcgtcattcatttcacattgcaaaatgttttgggntctaagatctatgtatgtgttatatatatatgttcaaattcctat

SEQ ID NO: 18673 - DNA, 469 bp, Oryza sativa
  unsure (1)..(469): unsure at all n locations
accttagaaactaagcttctcaggttcatctcaaattaatatattccttcttganttgatctttatgaagttctttaatgcggtttgaccttgatgaaaattactcaaagcaatccaaatctcatgagcagtttgaagatgagcaacacgatcataatccgaacgaggaatcccactcaaaagaatattgcgagctntacaatttagttcaaactcagtttttgctgcagcagtattaataacttcaggaatcacataaggatgagaaacttttctccagatatcataattttcagccataatgtaagattgcatcctactacaccaatgagaaaaatccgttccatcgaaaacatgaggcttagttgtaaacttattagaagtagccatggcaaatactcaagattagtaaagatcgaaaagagcaaacgtggctctgataccacttgtaggatcgaattacaagaac

SEQ ID NO: 18674 - DNA, 433 bp, Oryza sativa
agcttataacgaatatttgggcacttaaattatattataataatcctatgaagacccatcgaatatttgccactggcttgaatcggtattataaatattccatataaaaaacgtaaatgcatatgttacactaaaactgtgtggaataatacctgtcactgcacttacagcctatatagactaacaccgttagaatgtgagttttcatgataattagaagaaggatgacccctgccacccgttgctgctgccctgcgccggccatagatgctgctcttgctgtagcagcaccagcctgctgctgctgcgtacgtattgctgctagctgccgccgccgtgtgcgatgctgctgccgcgtgcagctgctgctgatgcaaatgccgatgctgctgctcctcaccgcagcgccgtgtgcagcatctgctaccggacg

SEQ ID NO: 18675 - DNA, 410 bp, Oryza sativa
  unsure (1)..(410): unsure at all n locations
gcacttgatcacgcgcactttggcctaagcgaaaagtgcctaagtccctaaaagaacgtgacaggccacacctgaaaatatgggctgcagacatattatgcctagaccaaaaaatatgccttcgacaccctttaaaggatgacgcatgtaatatgctctcgagtaataaatcttccgggtgatatagaccaggtgtagctcatatgaatagcttctgatctgagtgattatcccttatgagatactccanaatatatataataattgaatcccgactggcgcaagtattcggttgatagcccttacggngaataataatnggtccagtctttgagcatagaaaatagactcatgactatgaatccatgtggaatgtatccggaacaagtccccaatggagatataatcct

SEQ ID NO: 18676 - DNA, 449 bp, Oryza sativa
  unsure (1)..(449): unsure at all n locations
agcttttttggcttatatgagatagatgtatgactctaccactaaacttaggatattaaatccactagcttataaatcatataagccaataagctgacttaaaagtctaggccaataagcctaagcctaaacaaagagggcctgaatcttattatcatcgggttagtttttaaaagtcaataagtcgtcaccccttacttttttaccactcatttatttgattgcccgacctgtcacaacttttattcatcctctttgaaactttcatatttagatcttatagttttttagttcattgtcttgtcgattgacatatttatatttttagaagttacatcatatgtcgtcattgtactggtctacaatccacccgatgtctcctcttagttgtcattggaatntaaaaagtcaaatatgatattatgattatcgttgtttttttcttttag

SEQ ID NO: 18677 - DNA, 466 bp, Oryza sativa
ctaagctttaacaaccttaataaggccagtcccttataaacggatttgatacatacatgtgaaacaatgaggatgcataggagccatttcaacaaaggtacaccaatgagctccttccacttcaacaaagcaaagaaaaaataggaatctctcagatagcaaagaaacaaaaaaaaactccttggaggaggatcacaacatgaactggatcagtagttcatccatttttttgtaggaagtaaacaaattcagctagagcatacaacatagttctgaattttcttacacgtcgtactatattatccccaaaattaagcatagtaagcacgtactaaacacatctatacagtatgtaggctcgggttaaagatgtaccagtggatagcacacattctatatatgctacagagctcgcctatgtcactctttcatcctcttcttgtcaaacattcgtaggctcagaaat

SEQ ID NO: 18678 - DNA, 467 bp, Oryza sativa
  unsure (1)..(467): unsure at all n locations
agcttcagcaaattgatgcttaagaatctttatatatttttaaacaacagaattgaaccaaaaggagcatacttgaaaaaaaaagtgtatatgcagcaaggaaagatgttagatggattcagccccttcctcactagccagttcattctggttaatggttattggtgaattataaacttgacatggttggaaactgaatcaaacttgtaaatattaagtttgtcctagtacatgactacactgagcgagaaaccactgacgtctcttcatcaggaaacaatggcatgagaagcatttcagtctcattggtgtangtagctaagtggataaacttctgaatgatcaatggcaaaaagaatgaactgtcgtaaactcataactatcacatcttgaatacgcagaacataataagcttcagattatgacgaggtaaaattatgtaccacaatgtttggccctatgcttga

SEQ ID NO: 18679 - DNA, 401 bp, Oryza sativa
gaagttcaccaaggtatgttgtgcatatatctaaagaaagccccttttcagaaccgacaacggccctgaatagataatgagccgttgaaacatcagctacacctgccacagcaagggctattcggacaaaggcatcttctccaacaagtcttccctacattgtaacatacaaactcagaaatttatttcttgtaattccagtaaaggaactcagtgatattgcatgaatttaagttttccacaaggacaacaacgcgtacatatacagatgaattacacctcaccagtatagaatagttatctagtgaagactctgtgtcatcatcttcaccatatggatcttcccacgcaagcatagtcataaatattagcctttggaatgcaagcttctgccgaacaat

SEQ ID NO: 18680 - DNA, 372 bp, Oryza sativa
  unsure (1)..(372): unsure at all n locations
gccgccaagaactatgtacgtcacagcggttgggttgtgcgggataacgtgcctgtcagtaccgtgtactggcgaagaacataggcacgaggagatcatgagagcttcgtcccagattccgagaaagagatgcttgggaccacaatgctcgagacattcaccattcctgcgggtacagaggacaaagtgaaaaggtggactctgaagaaaatggcagaacagtttcagagcttcaagggagatctgtacaagaagtatatactgtaggggcagacaccgaacttcgacacattcccaaagctaatggatcactgggacgagttctntgcatataagacaggtgaacaccggcacgcgatgatggagagaaac

SEQ ID NO: 18681 - DNA, 465 bp, Oryza sativa
  unsure (1)..(465): unsure at all n locations
agctttccaattggcacaagggcatgatcctgtttaccttctgcatcntctaaatcaagcactcgaagcatcctcatcttcttagaaaggaaaaatgatttccactccccaaagactgtcagagatcgtatgtgggacacatccactatattttgcatatcgntcttttctctgctccagctcttgctcacaacaaggtggcgtactttatctttagagcgcgaggtgatgtggtcatctagaacaagaacaaggttttcttcttcagactttgaaatgatgatttcatgcatgagattatagacttggcagaaacctgtcttcccactggcaatcgtttttgattgatggatcatactcttgttgagaagagctgtgaactgttcttctgccactttctcgttgctcctgtttctcgttgctcttgagtaaccctctgcagtccatcgcctcaataatcgtcta

SEQ ID NO: 18682 - DNA, 408 bp, Oryza sativa
  unsure (1)..(408): unsure at all n locations
actcagcttagaagaacccatggctacttcacgccacanactttggttattgttcaacacaagctgggagaagcctggagccgggttactcttgacttcacaacgggcgtggtctgtgtcacagaagaaatgctactgaagtgagggctttttccccaccagattttatctagtataatcttctaacaacacaagaatctcgtcgtcgcttgttccaccgtcgatggcacactgtaatgccgtcctgccatcttggtccgcaacttgtggattagcccccctgcataatatttgcggagcgaagaaaagtgagaccacctttatgtagttgatcttttgcagtggactagtctttggataaggggatattgcaagataatgctgagatgtagtactgaatacctgaga

SEQ ID NO: 18683 - DNA, 454 bp, Oryza sativa
ggatgtaatatgctcgacgatcggtgcagaagcattggtgtttatgctcaagtaagggattattgtccccttccaactttttctagtttgttgaacaattcagatgtgtgatgaagagctttgttatgaatttcagatgggatgggctgaagaacttcctgagcctaccaaggcagcctttgaagtgtggctcttccaagggcaccaaggcgttcgtcagatcatacaagaacctgcatttctactggatacttggggctggacactttgtaagtctcaacatacacatgccacactactaataaaaaacgcatgccactactagaaaaactctagttacaagtttgatttctaaggccgcgtttaaattcacatttttttcgtcaaacttccaacttttccgtcacaacacatatttagatatatgcatggagcattaaatgtggatgaaaaa

SEQ ID NO: 18684 - DNA, 423 bp, Oryza sativa
agcttgttgcaaggtcgccagcttgtatgctatgattggatcataccggtggctctctgctggaacgccgcctttccttttgctgtccttgttcttattaccatacatgccttctcttttggtatgcaatgggtcaaaggaatgaacaccaagcactatggctggatggaacaagctagagaaaggactccactccactgtgcttcatgtggagagaagatccagctagatcacatagctttctagccggcgatgccacccctgcatcggtagtggagaaaatttgtttgcaagcaatacactttaactctgttaggatagttcttctccttactttcgccgggagatagttctccatacttgttcaaggaagctagttcactagcttgttcaagctatcagctcggacatgccatttggacc

SEQ ID NO: 18685 - DNA, 482 bp, Oryza sativa
  unsure (1)..(482): unsure at all n locations
acacttaaaactcagcttaaccctttattatgcaagaaacacgaactcatcatgcctatcttataatcaatgttctgcaagagatgcactgaagaaacataaagttcatgactcgatcaagagacgccgaanagaaggtcattcttgttcacttgcatcatgtcttcgtgattcatgagctgataggtggtgccacactagctagtaagtacattccangctcgcgtcactttcacctgaaccgcctaattttcaccgtcaaagttactaattttcacaagctaattacgactgaccaacaatgttttcacaagctaattntcagttctttttttcacattctgcagcttaccagttcaacctaagaggacacacgcacgcattttattctatgataactgtaccaatctagactagactaagcagaatcctagttctactagtgacatttgcgcaccattcaacactgactgtggtcgttc

SEQ ID NO: 18686 - DNA, 456 bp, Oryza sativa
  unsure (1)..(456): unsure at all n locations
acctgcggcagcaagctngcatatttatttactcgtatgcccttcatgatctgctctgcacaaggcagagatgggataaactcatgattagaattacatgatctattatgtatatttatgattaaagtattcttatttctcttttgatcaatatctaatcaatgattgttgtataaatgttgtgttgtgcaaattatgtgtatcttgtaaaaaatcttagatatatccttattatttcaaatttcaaattgtattatgtgattttcctttctttaagtacattttaacctttaattgacagcgtatacaaacagctagtcttgctttaatgcataagtccttcaattgacatatataatccattcttataatagacagggatatngcatattaaataaagcatcttatcagataatttttggacttcctattttgattctttaatacataataaca

SEQ ID NO: 18687 - DNA, 420 bp, Oryza sativa
  unsure (1)..(420): unsure at all n locations
agcttgtactatatgttatgctctgtgatttagtacgaatgatatgatatttgacaaatcactatctatctcatttatgcaggcattcttcagagcaacatattggctccggttntgggcacaaccgtaaaagtgtgatgaatatggagagcttttgaaagttatatgtcgtaagcttgagacgacagatatgcaactttttgccaactatggatggagattcacaaatagacttaaataattgcgtgctccttatattggtctggtcattttttttatgtttaggtgtgtgtttaattctatttgaactacactctttgttaagtgctagaatagaataattggctgtagctctgttgagcaaaggccgagatgatatctatctcattattaacaaaaagctatgtagcgtatttattg

SEQ ID NO: 18688 - DNA, 477 bp, Oryza sativa
  unsure (1)..(477): unsure at all n locations
ggggtcctggtacgacaacgaatggggatacttggtttgtgtgtctgatnacgaaagtgtaattctgtgttacatgctcacgacagtctgcttaaaccacattttgctctgattgcaccacccgcgtgatcgacctgatccttcacatgcacagcaccaactatacgagccctcctcatggaggcctgcagatacaggggagttgtgttttgccccagagaagagtagatgaagcctcttccgagaataaattttagattctgtatggctttatgtccgtcgaaacctacaactatacttggtcgtatcatggtggttgggtggctctggcatggctcatattttgtgtctaattctcttgcgctcaatctagatagagatgttgcttcgcaatgcattggctctgtttctggtggtcttaatacagcgccctaaacctatggcgcgcgccgagtacttcctgattacaacgttgtg

SEQ ID NO: 18689 - DNA, 407 bp, Oryza sativa
agctcttgaagagaagagtctattatattgttctagagagcattgtttcgctctcttcagggagacaaaccccatgaggtcagtgaattatatgattaatcaccaaattgtaattcctgttgtgcaccatctatcaaattctgtgcattaaaattgtaataagctctgatgctgccagcttgttgttttatcaaagttaaattataatacaaaataatctaaccattttggtaaacttatcagttatggtcactccgtcattatgtagcctttcttgtttccatgacatatattatttatccgttgtcaaacatgtgcaatatggtatggtagtgtaacagcacgaacttataaggctatcttcaacaatgaagccacaatacaagaaccattttacgtttgcatag

SEQ ID NO: 18690 - DNA, 484 bp, Oryza sativa
ttgagtagcatctatatttatcactgatgctatgtatttgttatactatacagaactctgcttgtttgagttctgaaaatgctccaacacacatatttctattttaaggaagaaatgaatgagcgtatggctggattggaaactataacctgaactctgcatataaacaacacagttaattttgtagtactcaaatgagcttgcaatatgctaaagcgggtgagaatacatgtttctatactggctttacctcaatgtgaaataggatgtactggtcggagaagctttctgggatggatcaccatggtagagaagagtcacttttatcctgccatcactccttggtggactatataaaggcacctatgttatcaattgcaaatatcttggtactgtgagcttgctcgttactaatttatatttataagatagactaattatagttttatcacatggactgtacttaacacattctgacatattc

SEQ ID NO: 18691 - DNA, 460 bp, Oryza sativa
agcttagtggatgctgtggtggcggcgctttctaattgtggttctagctggaagctttgaaaaaaaagtttgaaggcgatatgacaaattgataaggtgttggtctgcactgggcgtagaatccatgagctgcaatcaggaaattcttggtctttgtttccattaaaaaagaatacagtgataattgaaacttcgttcccattcaaagatagtaatggttgagacattggatatgtgggcagccggataatgtgattttatttctttcgccattagttacatcatcagacacatgtacaccacctgtatacacatgaatgcatatgcatggttctggggagaatatggaggggttagtccggcctgtatgagcctaatctcttatcaagaatagaaaactgaatgctcatattcagtctttctttctctctctatctatgggtgatacccagatgccgaa

SEQ ID NO: 18692 - DNA, 497 bp, Oryza sativa
  unsure (1)..(497): unsure at all n locations
ctcagcttgtgtgctaggaagctggaacgtgcactntcctctatggttcagcactctgnacgtcatagtgatccgagaggaacacctctttggcaccatgaaatggacgcctttcacccatggactcctctggccgatagtaccaccgcacccgtactctcacatttgtgcctcgtgaccctgcagcctcaatagcctcaactcttgccacatanggtggcgttgatgtatcagatgccctcattagcacacagtccccagctgcaagaaacatataagagaatcagacaggtatcgagataattttatgcttataaaanatagtgacatgggtcatcatcaagatgtaaagctggtattggatagtactggcatcacagtgataatctcagagcanaggaaatgcaatctgcttacagtataacaaagtgtactaaacacaacggtatcaaagcaatcagggtcatggatgctgtcacatctagatatgattataa

SEQ ID NO: 18693 - DNA, 471 bp, Oryza sativa
agcttgagaccagctcatctgcaatatgatgtgatgtaatcaccacttgtaaatcctaattggaacatcaattgctccaagcgcttgaaatttgtgaggtaaagatatccaatctaatactccctccgtttataaatatttgacgccgttgacttttttaaacatgtttgaccgttcgtcttattcaaaaaatttaaataattattaattctttttctatcatttgattaattgttaaatatacttttatatagacatataattttacatatttcataaaagtttttgaataagatgaatggtcaaatatgagctaaaaagtcaacggtgttaaatatttagaaacggatgaagtaatagaaataccaccaacaatgcaaggattagtcttctcaacgaaaatagtgagggttagtataaagtacaacagaagttgagcttaaggttgatttttctcaatatagaatcatt

SEQ ID NO: 18694 - DNA, 443 bp, Oryza sativa
  unsure (1)..(443): unsure at all n locations
tgcccgtggtacaccgaacacacacttatcggagtttagttttattctggcggagcggagactctcaaaagtttccgctagatctgagagtaacatttcctggttgcgcgtctttacaaccaagtcatcgacataagcctcaacattacgtcctaattggttacccaaagaaattcgagtagtacgttgaaaagtaagacctgcattctttaacccgaagggcattgtcgtataacaataggttcctatgggggtaatgaacgcagttttttcctcatcctccctagccatgcgaatctgatggtaaccagagtatgcatctagaaaacacaaaaggtcgcaccccgcagtggagtcgacaatctgatctatgcgaggcanggggtaaggatccttatgacatgcctttgtaaggtcggtgtagtcgatgcacatccgaagct

SEQ ID NO: 18695 - DNA, 463 bp, Oryza sativa
  unsure (1)..(463): unsure at all n locations
agctttcacctctaanactgtagtcagttgtgtaacaagaaaaatatatagacctatcttaatgactgttcatgatcaaaatcagagttttggtttgccaaataggaaagcagatagatagagtaaacaatgcttaattgatataaagtgttcagcattttagatcaattaaacatagtggaaattattattctcttagtacgaattctactgcttgtaacacatataagaagtgtctttacaattgcttcactgatatctagacaatttgaaaacaaaaatctatgtgtctctgttaggcctggtttagttcccaaatttttttcccaaaaacatcacatcgaatctttggacacatgcatggagcattaaatatagattaaagaacaactaattgcagaattatgggggaaatcgcgagacgaatctttcgaggctaattagtccatgattagccataagt

SEQ ID NO: 18696 - DNA, 419 bp, Oryza sativa
tcggagatttcttcctacagcttggtgagcctcctggacctcttatgatacacatgcatggatgcatctagcaaaatcaaagcccctatgcaacatgcagtaacagctcatgtataccttccgctcaccctcactatcggcgctactccgatgtctcctagccaacaaaactagaggaatggaatcgcgagagcattctcttcatcttatcttttgacctcattcccaatcgagccaccaatcgtcgccgacgagctcgccaaagccatgggcaagctcccagtccatcgggctgctggaggttgaagatgaagacattgtcctgtacatgatcaacaatataggggtcaaactattaaacttagtcgttacatggggcccacggcctaaatgcgttatataagccagcgacctttggt

SEQ ID NO: 18697 - DNA, 452 bp, Oryza sativa
agcttcataatgtctgggctgcgtgcaagctttttttctgtcaataactcattcttttgtcactttcaggaagaaagagatgcggctttggccaagatagaagtttcgcacgttcatctagaattgttaaagcgtacaaatgttctcaatgatgcattctatatttcacatgatggggtgatcggaacaataaacaactttcgtcttggccgcctttctaatgtacaggtaattatgcaaaatgtgcagatatcacgtccattcactatcttttagtgctttccttgaattctattcaagatgtacatggaatgttcatgttgatcctctgtgttaatgtaacaactgtgttactctcttcttacgtggagtgggatgagataaatgctgcttgtggccacgctgctcttctgttgcataccatggctcagtacttcttcccaaaattgagt

SEQ ID NO: 18698 - DNA, 454 bp, Oryza sativa
cttctagattcttcacataagaggtgaggtcatgccacaatttctagtgtatttattttggcgattatatacaaatcagatgtgactaaaaggttatcaacttcatcctccaatagttttttttgtcatattacatttggagctatgttttgcacacttttctgactccaacatttagtttgaagtcgataagatagaaaatatgtgtggggaacaaagaatatatagatatctatgttatttgctcaagaaggttttatataatagttgagaacgaaaatatattgaaagttattcttacataatagaaaacatactacaatgaaaattactaaagtacaacacattcatattagtttacaactttagaaatagtagataacaattatctggcgtaacatttatcatttttgtatgaacaatgatatgtcattattgtatgactgttcataga

SEQ ID NO: 18699 - DNA, 467 bp, Oryza sativa
  unsure (1)..(467): unsure at all n locations
agcttggacattctcaaagctgcacagcacattctctacccacaagcatccattnttctcttgaggtaaaaaaggcagagcatgatgaatcatcttgctgttatgggctatgaattgcaaaaggccatgccctgaacggcattgcactatcaaggagttgccactccaggtgattattccttcctgcatccgcagctgctcagcttgggtgcaggaggcggccataaactaagctcaagtggttgaaggaggcctttctccactacttcacaaagtggccctgtgccaatgtgttctctctctgcctgcagcagcaacaaacaaacacttctttccagggaaaaggagatcctcaattatgagctcttcattaggcaaaggttagtgctcttatttccataaatggtggagccacctctcagtacatccatgttctntgcacatcgcaattaatatagtcatctcat

SEQ ID NO: 18700 - DNA, 467 bp, Oryza sativa
  unsure (1)..(467): unsure at all n locations
taacctttctttccgtacccatatatcgaacggaagagaattgtttatagaaataagtattagcgtgttttaagcttatgtgtttgtattttttttctttaagaaaagctttgtaacatgcatgtttatccaaattaaatcaacttttactgtatggtgcaaattttataaattcttaaccaaaatctaacatgtgtggtaaactataccactatatatatgacatttccaaaaataaaaagaagtggaattaatcttcttaattgttttaatatgagttgtttgagttattcaattgctatnttaatcatattcatttgatttacaatttatcacattttggtgatctggactcatcatcacgttctctatttctatttagcacggtaactgcaattactaaaagaagtactccctctatcttaaaatattgcgacctttcgagttcaaataatgcagggagtaca

SEQ ID NO: 18701 - DNA, 467 bp, Oryza sativa
agctttggctagagcacactcccacacactattgtacgctgccaatctccccccaggtaagctgatttcctgtcttctcgcatgtgtatgttgatggaaatgttaggtgctaagatccaaaataaaaggaaaccttgggtgttgtgctaataagtcccgtgccaatgacatgttggaccccgagtgtttcactactaaaaaacaattttctagatgcccaggtttcatttgtaccagcggcccataacaaaatccacttgtaataatgatgatggctcttgtagtttgaaaccacctatgcaaaatgatttttacaaatggcccccttaatacgattgcatgtaaaaatatggccgagccactcatggtgctaagctcccaaccccagtcggcctgagggcaccaagtcctcccctcctcctagctcacctcttctcactctctctcacacaccgtgcctatcccta

SEQ ID NO: 18702 - DNA, 433 bp, Oryza sativa
  unsure (1)..(433): unsure at all n locations
ctgcaactcccctattcttccagtgtctcttagtctcagcgtccttttgatcttatacactctgatgtatggngacaaactccttttgtttcgaaaggtggccattcctattatgtgatctttattgatgactattcgagatttacttggatttacctcatgtcttctcgtagtcaatttctttctatttatcagcagtttgctactatggttcgcactcagtacgattcttccatacgggtttttcgtgctgactctgctggtgagtacatttcggcagcccatcgcctttttctagctgagcagggaacacttccccagttttcttgccctggtgctcatgctcaaaatggcactgctgagcgcaaacatcgtcacattcttgagactgctcgtgccctcatgatcatctcgcatctttcgcctcatttct

SEQ ID NO: 18703 - DNA, 411 bp, Oryza sativa
  unsure (1)..(411): unsure at all n locations
agcttcttgacagtgcaaactatatcaagttgttattattcttgagatgacagaagcataatggttagtgacttagttggcttcttataaaaggagaagataaaccgtgagtccgtgattgcgtatcctacacaccatcagtacgtcagcgccgagcgcttcagcatcggaacttctggggaaatttaactatttgccacttttgggatatagcaaataacaatgtgtcactcactatctatgacatgtagatctagtggcaaatcgctaagcacgccccgaagttccccgcaaaaaaaaaagccccgaagttctgaacgggccagattacttgacattatctatatntcggcctgacaagactgggctgaaaacggtccatataggcccaacataatatgcacggatgca

SEQ ID NO: 18704 - DNA, 387 bp, Oryza sativa
  unsure (1)..(387): unsure at all n locations
tgtctgcgtcagtccaggaaacctttgcttaaacttatttgtatgccctctgctcgntcggcaagcagctccctcttctccgtgtctattatcatgtctttcaccatgccccaggatgatctgccactggtggcacggcctaagacacttgctggttgtgcagcaatcctccggcgccacacatacactgatgcctcgacacggttggcgatttccagtgcttggtactccgttgacaggtccaggcagtcgagaaggcactcatgagagaaatgatcagacgttatgtagcggtatatgatgtcacccaaagatgcccttccattctacatccaagatgaaggtaacaagctgagatcaactaaattacacatgaaatggcagatg

SEQ ID NO: 18705 - DNA, 465 bp, Oryza sativa
agcttatcactgagaggttaaccatatttttttttgggtgcaaggccattacttataatgccttaattgggagtagaaagagaagacggttaataaaagttgaaggtatactgtctcctgagcgacccaattatgttttaacggaggcccgtaaatatcgggccgaaactagctgtcacactccggcccaattaaaatggagcagttgaagcctcgcgggcctgcggtctctgtctgacagcaacttggaaggaataagtctattatattccctcactcttgctcctgatttaatcgccttactcagccacaaaaccagatataaagcctcccccatcttctgaaatcacggccaatcaactcacgtgatggtgttgaaaacggtggcaatttaatcatggtcgactcgatgagtcagcatgtgggatcgacgtgtcagtgagattctcttcatctcgtcttctt

SEQ ID NO: 18706 - DNA, 414 bp, Oryza sativa
actcagcttccacgtcttggcccaatccaatccccagccacatgtcgtggtcaccgccaagctcaccacacgtactacgtcgcgccatccgcttcctccgcccgcacggcgcaagcgtgctacgccgctacgcgctgcgtacgcgtcgcagaggccgaacgcgatgtggaggagggcatttaactcgcggcgcacgggtttgtgtcctcgccgccgtggccgtgggcgtcggcggatattgagtgcggttcgaggcgagcgagaggaggcgtatcctcgaagcgagggcgaggcgaacgaccgaacgaactgtgtagtacgtgacgcgcggtgcggcacgggtgggaggcaataaacggtgtgccggctgtacaccagtatgatcgcacaggatcatcgcgtcgtgcacgtgat

SEQ ID NO: 18707 - DNA, 438 bp, Oryza sativa
  unsure (1)..(438): unsure at all n locations
gctgatgtaccaaacttcatgtcttttttngttngctgattcattaccatataaaccatatgtactcatatctgactgtaatagttttacaacacacaatgacaacaaaatttcaatcaattatgtacagcttgggtcaatcgcttcgcaaatgctggggatgctgctctagaggtagctgaaaatacagcagaaaaggtgcaccattctgaacttctatgctatatgtaacagcccagtgtccaagccggctctagtaagtagtaaccccattatatatactatacacacatagcaacccatttgcacttttaactcaactcatgctaattggttaaccagcttcctttgtgcatctaanggttatatgctggttcccagcttcaacttaatactcggtatactccatctgtatgttcagtactttaactggcacta

SEQ ID NO: 18708 - DNA, 405 bp, Oryza sativa
tgctatcttcaacaagtccaactgaccttccattcgaagattccgggtaagcatcataagtatcttttttcgtgcatactcatctggaacaccaagagagatctctcgatcacaccttcctggcctacgaagtgcttggtcaacagcgtcaggtctatttgtagctccaatgacaataacatagccaggtttcttttcagctgactctgaacccacatcaccgctaccagagccaatttgttggtggtattcatccatgcatgtcattaactgtgtaactatccgtcgttccatttcccgttgcagattctccctcttggatgcaatcgcatctatctcatctataaatacaattgatggagcagtcctgtacgccttcttatacaggcttctgatgtttttctc

SEQ ID NO: 18709 - DNA, 373 bp, Oryza sativa
  unsure (1)..(373): unsure at all n locations
agcttgtagaagaatataaaatatattcattatcatattaataagactaaattagtatttagatgttattatttttttataaacttgatcatacttaacaaagtttgagattatatgagaaaaggcaatataacctaacaaagtttgattggtaaaatattcgaaacgaaatataatactataaaacggaaaaagaggatcaaacttgatcgaagaaaaagttggtatattatctcgcttaatcaatcctcgatcgatctaaactctatagggggtgcagtggctacgtaccttacatgatcagtccaagacctggttgaggatggccatctgcttggcgatggncatctcgacctcgccctcgtactcgttc

SEQ ID NO: 18710 - DNA, 434 bp, Oryza sativa
  unsure (1)..(434): unsure at all n locations
tatcatgtntacactatttatgtcagaataatatttctctgtagagcagantgagagtagcagatagtctcgtcctatccccttctatagtactattcgttcgtagatacatgagtagtgaggccccgaagggcgtaccccccatgagtggatctgaatatgactctgctgaaactctgtcagacgtgcctttcatatggagtgatgccgattctaaggatgaaggaaatacatctgctatgaccttcccgcttggcaaacaaccatggtatgttgcaccttaatgccattccatttaatgaagtgcaacgttcagatcggaaagaggtttcttagtaagaagtagtttcgattcctcaatggttggaggaacacaagctctacaaagatggagactgtgaggtttcaatctctattatggccactggacaaaa

SEQ ID NO: 18711 - DNA, 417 bp, Oryza sativa
  unsure (1)..(417): unsure at all n locations
tctttaactaactatcaaaacaactttaattaattattaaaaattggatgaagaactggccaatgagaaaacaagcatcattgcatcaatactgggttcttatgtccatgccagtgcacattttgccagtggtggttacttttagtaggtgggaaaaaaacttatttaagctggacagagcaattgaagaagtaaagttcctagttccagcattagggaaaaaaccccatataaggcagcgtttttgtaagatagtnttattttcaggaatgcatacgctcaataataaaagaatgccacaattattattctgttggacatggcacatttattgagtatccaaaggcagggtcgaagaacaacagccagagagccaagtatgtattacatgtacacgtcatccagctaccactatat

SEQ ID NO: 18712 - DNA, 475 bp, Oryza sativa
ggacttcattcttgccaacatgacgatgcatttggcttggtgaccactaacccatggtgtcattcattagcctcatcgtagtgggacctattccttttcacacctcaaaggagaacattagtctcaacaaatcagttgtcatccttcacttgatgaccaaccggttgcatatgaaagatatggatatgtttgttgagtattcgttaacatcacaagtgtcacatactcgtatgcaagctcaggtgtaaagatccgatataaataataggtgaacaacatggatctagaacatgcacaataaatgtataggatttgctccccctatatatatgcatacaaataaatatacaagagatgcacgtgtatgcataattagagaatgccaatgggggttatcctatcatatagagaaccatatgtagtatgatgtgaccaacataaacatataccttatgatctcatgtttcaatgtaat

SEQ ID NO: 18713 - DNA, 412 bp, Oryza sativa
  unsure (1)..(412): unsure at all n locations
agctttcaatccaaagacactctttttgattgtctgctatacaactggnactgtctctgtgtctcatctttgatattctggatattgtagtgggtatatacataaatcgttcatggatgcaggtaaagaaagactgtatatggaggttgctcgtttgcttcagaagaaaatatatgttggagctgcaaagttgcaaatattaaagcacttggggcttcctcatgaaatcatgcactggtttacagccaatgaagctgagagtcacatacatgttgttcctatgtggactctggcaagcttcaagcggatgaagtatatgtccactcaatatgctgtaagaaaagtacttgatcctaccttcgtctgaagataggggtttaactttgttgatatgtccctcataatctgatga

SEQ ID NO: 18714 - DNA, 439 bp, Oryza sativa
  unsure (1)..(439): unsure at all n locations
ctagctagcttagcttagatagctagacttcaaattaatgtatattcacgaaaaaaaagtataaatatatgttgtacgtacgttgccttgncagcgaagcaggaatatatcatatcaattccggatnttagtgatgagcttggcgcaatcgccaagtctggactctggagttgtgcttaattcacactcctttttctgcagtggaatagctaactgagggcctgatgcaggctgtgtgcgctggaaattaattaatttttcacgtaagtacggactctaatttatgtatggcctgcacaggaacatgcttgcatgattgtgtttgatcggatgccacgctagaacatgatggatcaccaagtcagaattaagccggtgcatctgcgtaaaaatgccatatacttacttgtgatttttaaaatgcacttgatagtgcagt

SEQ ID NO: 18715 - DNA, 370 bp, Oryza sativa
tagcacaactcatcacgagacattaaatcaacaaattaagcgcatattatgattcataaacaagtatcagtatggtcactaaagatttgtatgcgttcatgcatgtgctatgccctaagcatgatcataatttatgaactcctgacacgacgccagccagatcaacagaaaatgaaacaaattaaggtgattggagctacaccattaaacacaacttgtaaaataaccttcaagtataaaatatacaagaaaagggttggcagtgctgaatcggtgaagcctacgtaatgaatttgcacatttcttacacagataagaaaccaacaactagtgcacacgatcgaatcacacacatttctcactgaatttt

SEQ ID NO: 18716 - DNA, 368 bp, Oryza sativa
agctcgcgccccgacgtactcgcgacgctgaatgtattcttgttgtgagctctggcaagagccggtgactcgtcgatgactacgacaaccgtttccgatgccgcctgagagtataggcaaaggccggcgccgtccatgagccggaactccaacatgagcaacagctccgcgacggtggccttgccagagagggtgacggccgtgtcgaaccaccggacagcggagccactcggagcctctctggagggagtccaccacgacggaactgacgccgacagcatgcgcactgagacggacgccgggcgcctcggcggggacaaccgacaccacgaaccgttgcggctcgagctacagcggcataccggtgc

SEQ ID NO: 18717 - DNA, 491 bp, Oryza sativa
  unsure (1)..(491): unsure at all n locations
tagattagattatagtattagttaggcactggtgtgatgagcttcatatttaactgggccaactgattggccagaaagaggcaattgtactacccatgagcagtactggaagcagggggataatgcaatattatatttcatgtgtgtggttacacctgatcccattggttntaagagttgaaaactgaattgagatgctttgggctcttcatcaacaatggtttgaattgagttggttaatgtactatgtccatatttgccgtatgcattactgctgaggagtagtacataactagacttcccattcctcttttttttatacatttccactatctaaaatataattcacacatatattaattaaatttgatttcttttaagtcaaaggaaaactatgtatatacatcctactctcttggatactaaatataagcatatatatgtagttaactaagaatttctcttttagacatctgattggcacatttaaa

SEQ ID NO: 18718 - DNA, 307 bp, Oryza sativa
  unsure (1)..(307): unsure at all n locations
ntgtatggtttgagacaagcacctacagcatggtatgatatgcttaacaactttcgcttgacaaggtctcgaggaaaaatggcaaatcatcttttgtactttatcatgagtgaacagtcaatcttctctatgggagacgtaactgaggactgatatatatatntcggattgtntcgaccttacatcttgtgtgctgtgcgagcttgctcatgactatctgtgaggtgaattctcctatgagcactgatgggtgagttatcgcactttgtaagacagctaatcaatcaaacacctaatatacatttgc

SEQ ID NO: 18719 - DNA, 460 bp, Oryza sativa
agctctggacaaagcacttgtgactggaaacttgttttcatcatatacatcagtattcaattatctatcagataccctgatggaagagacatggattaaagaagtcagcccttgcttgcgatcttctctgatgtggatgggagctgttgagttatcccttgtctgctctgtgcttttcatttgtgagtgggcaacatgtactttccgtgattgccgtacatcacaatgcctaaatgttaaattttcacgaagcaaagatttctctcaggtctatatggcagtttccctgttgaaggataaaatgaatgagataaatatattatcttctttcaagagcagcagtcagctttgcatgaaggatcaccttataagtgctactctgaatcattcttctatcaaggtgacagccatggagactgcttctggtgtatagacagtacaggtagcattgatgagaata

SEQ ID NO: 18720 - DNA, 375 bp, Oryza sativa
agctcactaaagacctatgttgtttacttatactctccacccgcagggtagtctacagacggtctattaccacataagactttgagtgaaacttgcttgcacaagacttgctattcaaggcgtagtccattgttcaagttgtgagtaagtgtagctcggagttctaggtggatgttcaaccttaattggtctccatcgaaccgctggacttaaataatacattggataaggcacatctcagtgggattctgagatttggtgggggattgctggacttaatgaatgggcctctacccactcgaagattaatttttgtaaaatacaaaagcccacctcatgggatggtatgcatgtggaagttattaccaccttgct

SEQ ID NO: 18721 - DNA, 446 bp, Oryza sativa
ctaagcttgaagcctaaaattgtgaattataagcctataacgatttattttattccatatataaatcatgacattgcagatttaaactagcataaacgcatcattagatctacacatataaactagacaataaagcatgaacagggagcagtcgtgcgaagcgcttcccgaaaaccttattgccgccttctcctggtgctgaacgtcgaaggcggaggttccgaacttgatcaggacgcctgcacgatctccactcagcttatatagagatatcagggcgcctgcacgatctccgcttagcttatatagagatatcaggacgctggatcaggactcctgcacgacgtacgatctccgcttagcttatatagagatatcaggacgcttgatcaggacactgttgatggtcgtctgcgatcagtttcgcccgtcaatattaccaaaat

SEQ ID NO: 18722 - DNA, 446 bp, Oryza sativa
  unsure (1)..(446): unsure at all n locations
agctntctctctcttccgccatcggtttctctcatatgtgctgatttgattcgagggatggcttgtgagaggtgagggattgaggcggtggatcacgggaaggattttgatgcacttttcggaggtggatttggccggagctgtgaaccctagttcgccggcgcagctttacactgtatcatggagtggggaaaatggcgagagttccggcggggaagacgaagcgtcgcttggatatcggatttttcagttaagggtatcggaggtgctaatgggcctaggcctgaacagtacttcagcccaatacttttaacagcgtggcccattgtgttccttagggacttaggcatattttgctttggcaatattatgcgcacaacagtgttgcccaatgctgatgaaatcacttttatgcggtcatataattctctggattattgcaatgc

SEQ ID NO: 18723 - DNA, 369 bp, Oryza sativa
  unsure (1)..(369): unsure at all n locations
tagatattgatgggtaattacttcattntgtccccatttaatatgtaaacgaagtttttctttttttgttttttgatcatgcagggttgtgatgcgtccatccttcttgatcccacgaaggcaaacggctcgccggagaagacagcgatcccgctccgcgggtacgacgccgtgaacaagatcaaggcggccgtcgaggccgtctgccccggcaaggtctcctgcgccgacatcctcgccttcgccgcccgcgactcggtggccaagtccggcggcttcgtctacccggtccccgccggcagccgcgacggcaacgtgtcgtccgccttctccgtcttcttcagcatcccgtcgccgttcttcgacgcc

SEQ ID NO: 18724 - DNA, 453 bp, Oryza sativa
  unsure (1)..(453): unsure at all n locations
ntgcttcaattcagtaacatagtctatccatttattctgtcgnaataatgctgcgaattagcttgaaccgttcaattacattggtctagcattgattcagttctccaattgatgatgcttgcgtttctatcttttgctagctttgtggctgttgaaccatgaacagtatctatgtacaggaggaagtagtctctgctgtagtgaactggttctgtcaaaatattctcctttttgctcaggtatttcaaagttctgaatttttttgtcggcatttctaagttaagctcacatgtcgtaaatgatatgcttcggagattttatgaatcggagggaagagaatcgaagtaacaatgtactgaactagcattaatcctgatcaccatgacagggcactataaaaagatgggttaattaataattagtggtgcaaaatgatgccgctgccatgcattg

SEQ ID NO: 18725 - DNA, 430 bp, Oryza sativa
  unsure (1)..(430): unsure at all n locations
tctgttgcanagcactaccgtacttccacatgtcttgtggttaangcttancttgtggctcagtctggttataaacaaaagtacacggattggagatggatgaagtcgggggtcgatggacattctccagggcaaatgaaggctacacgagctgcggcccggtagtcgagatgtcatggcagagggttggtgccctgctgctagggggctcagtcctgcctgcctgtcccgggtgtcccggccgtaaggggattgggtcggtactctcgtttatggctaggatgggctgggaactatgtcacgtcttccgtccgtataccgtggtggtatgtggcacgttggtgcacgccaggaagatgtgtcttgtgggtaaagatgtacacctctgatcagagtataatctattcgaatagccgcgccctcggttatg

SEQ ID NO: 18726 - DNA, 468 bp, Oryza sativa
gctgtacttacacctaccgatgagacaggtggtagtcatcttgaaggagcgggcgccctccagcgcaccgaagatgtcgctccactggttaccgatgttaccgacaatggtgaaaccggcattctccaacttctgccgctcgccggacttgaatgcaacgacagaccccaagagttcgtcggcggtgtgcactgctggcttgagcaacagcttcatccacccggagtatccctgccggcgaaggtttgtgacagtgatgtacctttcgtcctcggtgcggcttgtcaagaacaccggcttgacgccgagctggagcagaccgcggtacaaccgtctcgtcttctgcagcagcagaccgctcctctccaccacgaattcacggaagcatgtgtcggctgacagagtagttctgtcgcgggtgagtataaaaatcactaatgaaactctcttctttatttaagacttata

SEQ ID NO: 18727 - DNA, 419 bp, Oryza sativa
  unsure (1)..(419): unsure at all n locations
agcttgccatggaggtaatgtactgtgagtctgtgtccgcancacncagcgtgcctctggtattggagagtatggaagaggggtcacttcaagaatcaatgcagagaccatcttctcccacaatgaacattgagcaagagtcaatgcagagaccattttctcccacaattggcactgagacaagttcgccagagatggctcctgctggatctgagaactgtaaagaatcatggttgctcgtgccccctcctacaccacttggcgaatcaatgccctccttgccagtcgcatctgcccccaaagttttatcggtgatgccggaggaagcgtgtgagtcaatcccttcatcggaagctctggatgttgaanaacctgcctccatcacacaggctgagcccatcttaccttatacgccaccg

SEQ ID NO: 18728 - DNA, 485 bp, Oryza sativa
  unsure (1)..(485): unsure at all n locations
taanaagacaagacatcttngtattgcacgtgtcactattatcatagctatacggaaatgtagaatgtttcccttgaagtcaatgtttctgtggatcttttgcctctccgaagattcagaatagggaggaagagtgcttcttggctccccgaaagagatgaatcctaagatccttgagttttcttctaatctattctacagtatgcaggcacgatatatatgtttccacgtgtggctactacttttgtctaagtgcacattattatacatatagactggaaattattggatattggttgcaacataaactatttcctcacgtagtgttgactaccatatcgatgtntacataccggacatcatatctactatgtgccattaaccatatattccgtgcacgcagcgtagcgcgtgtttctttctatattttaccaagttccctacctgcatttgaagtgtcaactggaaagcactattaatatctc

SEQ ID NO: 18729 - DNA, 458 bp, Oryza sativa
agcttgtggacaataatcaatgctgttggataaataacagtggatcatggagtattagcatatggcctatctagtagtccgcatattcttatccacaagtgataagtgtggattatgtctgcaatcagcgtcttgctagttgctactatgaacgaaccaagccaaactaatccaatcgagttcgtgctccgtaatacagtttcagccaattgtcacgtaacgccaacttttgtgagccccatcgaagccacatcaatcagtcacacacacatgtacacacgagctgtgagcacaccctgtgtatccatgtagtatgatccatggatcatcttgctggatgtgttgcggcagagaaaccagcacagtgataagcagcgctacaactttgttttctttttgggagaaacagtgttacaacatgcaagcctgtcgctacagtgcactttcattattcatat

SEQ ID NO: 18730 - DNA, 450 bp, Oryza sativa
  unsure (1)..(450): unsure at all n locations
ngttgacaattggatcggatgatagatcgatacaaatattattcaataggtagacaaatagtgaagtctcttttgctgcaattggctttggccaataggagtacaactattacctgctagttagggggggtgtcccaacttgtataaaaatccttgtcacccatctatttctaccgtaatctcgcgtatgttctgatactaacgatctccatactctacaaataccgtagacaaggcataactcgtcaataatgggtctttattggttctaggtatatcattagtggagattgtctgcgatactatcaaccacttctattgtagatgcaatactgcagatgatccgtgttcatatatcaaaactatgggttgcccgatcaaaactttcgcgccaaccgtcatcaacaccagagttcggaagcctcacaaactacttttcctccttaccat

SEQ ID NO: 18731 - DNA, 465 bp, Oryza sativa
  unsure (1)..(465): unsure at all n locations
gcagcttggaggtctaccgacgtggctgatcttctttgttgggtgatccgggttagtaatgtcgtgtgggtaaagtgtaccccctctgcagaggttaacaaactgttcgaacagccgtgcccacagtcatgggcggatgtgaggtgattcctaacgtaaattggtttgactactgcttgtgaaactgtagtgcgaaaatgggttcggtgtttgaataatctgcagttgatgggatcagctaggcccgggtggccgtttgaaaagttgttggaccgtgtggccgatgtaaaagctcgtggccgggtgccaaccttgcttaanatttaaagactgatgcattgcacatactcccaccggacgagacccactgtctcattcgtgtcagttgagaaacactcacttaagttgttcagaatagagtcaaatgaaattaattgcaaaaacatcagcctctccttgaagcct

SEQ ID NO: 18732 - DNA, 450 bp, Oryza sativa
  unsure (1)..(450): unsure at all n locations
tctagcgaccttactgttntgaacatgcagacagagtacggtatattttcaaatatggaaagcacggaacaatctgctcgtgaggggaggatgaatatgatatgcangtttacgggaaattattctaaactcttaagaaaatatctttttgttgcttgtggcatatcacttcataaacatgtgaattcaaattcaatttatatatctcataacgaaaaaatatattaaactacagctagctagttaacgtataaatacaattaaatttaattttttcgttacaatatatataaattgaattttaacttgtatggttatgaagtgatatatcacatattattacatcttctcaaatgtttttataactatttgagcgacatacaaacaatgagtgaacgtccccttcaaagtaaaaaatccaccctcatggatttatcgcttagtatttta

SEQ ID NO: 18733 - DNA, 465 bp, Oryza sativa
  unsure (1)..(465): unsure at all n locations
nngcttccttccggttgacacaacagcatgtttctatatgatctagcattctagcaccagtgcaagccaaccaccaccaccaccacgacgacgacgaccgcggctcatgtgggtaggccggtggccggatacctcacagccttgaccaatgacggcgtctgcttgtggccaccggccggctcacgctgcaaagaggtttgcagggtaagcaaacttaagctgcttgcatccatccagggtgcatacatgcaagtctctttttgacatgtactacaagggaggctagtgccaccaaaatagatgaagagatggattcagcggttggaactcggaacattgcagcattctaaatttgttgagggtagattctggttacatttggacagctagcgtactgggaaaagaaagggaaaccaatgttggttctatacttactggttggaatctgagctgctaatgatacag

SEQ ID NO: 18734 - DNA, 501 bp, Oryza sativa
  unsure (1)..(501): unsure at all n locations
taactccaatcatanagtggcaaaagtggcatacataatgtctttgtctctatataaataacactgctagctgttacccttttaagtaagctaattagtcactatatcgccatgtnttggcagaagaaagacatatgattagtagatattgatgtttcacctcatcattntcatgataggagaaaatctaaaaacctctagagattatattgttcattcgacgtccctctagtgtatatttggttcaactatatcctatacgtggttttcttggagagtaatattacattccttaaggaggtatttangaggtataataaggtaccattttttctattgtaatttagtagctaggaaatatgatgtactaaattttacacttacattttggtaccttatggtaccttctcaagaaccataaaagtactctatcttgggaccttgngtcttgccactacctccattttcctacattttcacacttgcaagcctgcattcatc

SEQ ID NO: 18735 - DNA, 467 bp, Oryza sativa
agcttgtagagcattatcaagaagcaagatgctttatcaacaaacagtattgccgatgtcatgttgatatctaccatgccactagaaccaccagcctctaagtttagtgaactttcatggccatcctacataaaccaaatgactgttagttctcttttcaagcaaacaaaatccagaacaatagtcaaataagcttctgttcagaacctttagaagcttctcttgttcaataactgcttctcgagcactccatgctgaccagtatgatgcacaaagaatggtaccaacagccataagccacaaaaacacctctgcagtatcaaccagaggacggtctggagagtatagctgcaccgaaactgagaaattgaaaacaaattcgatacatatgttagatactatggccaaaaaacaacttccaagacaaaacataagttgaaacaaataaaaaacctacataggacatg

SEQ ID NO: 18736 - DNA, 426 bp, Oryza sativa
  unsure (1)..(426): unsure at all n locations
caccactagaacagcctttgtttgctaaagctaaagtttttatgcttaaaactgtcttaaatagcagtgcttacagaagatataggccacctccccctagttacaccaacatccacagccagaccccatcataatgttgttcttgttttgttcctccttgcaatgacaaccatctcttgctccacagatatgcctgccttccttgaatcggaaccttccatgcctcgggatgcgtgccgctacgctcggcccggagatcttcctgacttgccggttcccctgcagaatgcaagaagtgaaacatgatcaatttttttgaggaaggatttgaaactgcatgcaagtntgcatttcaggtgaccctacactgaaaaacgttagactttcaggtgtactttgtatgattacctgcattactacatttgc

SEQ ID NO: 18737 - DNA, 416 bp, Oryza sativa
  unsure (1)..(416): unsure at all n locations
atcaacgccaaccgccgcgaaagtgcgctcctgtataatgattaattcgtcaggtcaagactgaacatatcacatatgggcatataatcaaggcagtttgatctgaagaaatgggtcacctcgatatggaggaggtacaaatccgaatccaaaacggtgttcgtcaccatgtggtgaagccaccgtggtatgaacttgtcatgccaggcgctgacgctctgtggaaacacccatatcaccctgctccttccaggagccacagggatgcacaagaacaccagcatcccctgaggctgctgctgctgcttctcctgatcaaaatctgaactttttatacggnntttttagcctgaataatgcaacggatcgagagggtggctgatgctgatacatgccactgtctcgaggggcaactc

SEQ ID NO: 18738 - DNA, 461 bp, Oryza sativa
  unsure (1)..(461): unsure at all n locations
cttgaagatgctgagaaacanatctatttgcttcangaaacagntcaaaggttcgtcctagaaagttcttgtgaactgatattctattgtttggtcataaatatctttccatcttcctttactatgatgtctgatggcttgcaatctatttctatatgtagatctgaggaggccattacaaaattacaatcttcagtgactattgaaaagcaacaacatgaggaaactgtggtacaattagctgaagcacaagctaaaattgatgaacttctgagagaagctggggatactgatgaaaaatctactcaacttgagactactatacaaaggttnttagattctttacaagttacatggccattgctcgacatgcatggaaacttttgatcaatcatgaagtcattntcttttgcaaccatatgtattntacaaaatctgttctactatctcaataacagttc

SEQ ID NO: 18739 - DNA, 341 bp, Oryza sativa
gtggatctgagctaaccgatgaccttcattttcctctatgtccacctcatgagtcatgccggacaaatgcgatgaatggacagaggatgtgattcccatcgcgtgtcatgggaagggaaggacctctccagtctccacaattgcttcaagttattccccatcgtgcccctattaattaaacaattggattttatttggtacatgacaacagtggtacttggtgatacctcctcaagaattgtaaaaattctcggttttctatacaatttatgtgcacgctctctctgtccctctcttttggctggtgggtgccaatgaaaataatcgtgtgttcaacgctg

SEQ ID NO: 18740 - DNA, 365 bp, Oryza sativa
gaacctacggcttgggcgcccgatcggctgggagcaaaatccggcgctgatgtcaacatgacgtcagcgtccgatttacgtacaaaactattttaaactgatttttttctcctaaataacttatcctgatactgagccgaatgcaccattaaattcgttgcaattaaatcttctaaacaagactacacatggatatatttcgacgaaaaaaatagcttattattgaattatctttaaatgttgcacgatgttccaccaagtatatcggaattgtttcactaagttgattgaaaatgtttcaactcgttaaatcaggtgttgttccaccttatattaaacaatgtttcagcatatagcgaaagaat

SEQ ID NO: 18741 - DNA, 438 bp, Oryza sativa
  unsure (1)..(438): unsure at all n locations
ntataaaatactaatatntcttgaaaaacttagtttaagtatattgcttataccatctgntctatattatatggtagtgtgatatattttatttatcaaatagatcacacatcaactttcatatgcattntatcattttagaacactatttgaaagcatttttcaaggtggattctaattaatacacatggagtaaatcttgaanaaggtattggcgtctaacttttatatacttgacatgaaacatattcaaaatgatatgccctcctgtatggatgaaatcatgaaaacaatcganaacggtatattgtcttcggagacgaatttcgatcagtcgatgaccatgttaccaattaaactattcaatgtcgacaacaatatgacgctgaanaattagaanaaagacgaacacaaatgacactaatacagaaatagcat

SEQ ID NO: 18742 - DNA, 425 bp, Oryza sativa
  unsure (1)..(425): unsure at all n locations
agtagacatttgcttaatcacactaccattctttcccataagccaacctacttggctgtctagcaccaataatctcaatgaaacatgatttctctcaccagatgcatctcctgttccattntccatttcatttacaaaaatccggtcaaatacaagcaaaatggccttcacggctaatggcattcccttctccagctccagctgcgcctctggctcagaatttgtatcttttgcaacagaggaatcatctgctttcttatcattgtctttccctgactcatccctgtcctccttatcatgatctttttctaaatcatccttttcttccttaccaaggcctntctctgaatcatccatttctttgttactatcatccttttcttccttagtgtggtccttctccattccatggttgccatcaacag

SEQ ID NO: 18743 - DNA, 463 bp, Oryza sativa
agcttggaagatccaaagactgatatcttatggatgaacttatccgctagaagtatgtaggctggtatgacatcgccatgtccgatggtacgattagttgaggagtgcatgtatcttagaccttcggcagattcaatggcaatgcctatgcgtaagtgtaatgtgagagggatatttccatcaccatggagaatatcttgcagattgccattagccgcatattcatataccaacatcggagcatccacctccaagcaacaacccaaaagtttgataatgttgtcgtgcatcatttgcgactgaataattacctcatttgtgaaatcatcctttcgtgcttcatttacctcaattgaggtcttcacagcgacaatagtattatcttcgagagaccccttgtataccttaccaaagccctcttgaccaagaacctctgaattggtctttgtgatctcttctagct

SEQ ID NO: 18744 - DNA, 437 bp, Oryza sativa
  unsure (1)..(437): unsure at all n locations
ctgcatgaggatgttcgcggcttgcgcacagatgatgtagactattatgcttccggngagatgcacactcgagtgggtatattggattctcgagtccaaatgttggagagctcccaagcttctcatcgtcgtcgtcgtgatgcttctcatacttccacttcggcgtgtgctccttctcctccacaagagtgaagacctctttggtgcttgatgccaaaagggggagaaaaatgcgttttatgttgcgttgggactagcagcagagaggttagacacctcatatttaataagtgaaggaggtttgggctatattttgtgtgggtatgggctattactctatcttgtgcgtatttgcactttggtaacactctatgcactggaccctctgggcttgtatacctatgcttatttggagccttgatgggcctaatgtgact

SEQ ID NO: 18745 - DNA, 350 bp, Oryza sativa
aggttcattagaagatggcctgaatgcacttctgaatattgaagtatggaataaagcattgcagctctactgtacattgatttatttttatggaccatggagtaaatttcacactatttcctgaagaaaagatggagtataatgattctatgagcaacctatgttttagataccttaactcaagtttgaaaaaactaggatctcagtatgttagatactatcgacactgttctgttttcttaacattacaacattttgttgtcttgttcaatatttagaaaagggatgtattctgcgtgttaattgttctgattaatgaaagagacggagggagcggaaatggtttgatg

SEQ ID NO: 18746 - DNA, 446 bp, Oryza sativa
  unsure (1)..(446): unsure at all n locations
tctatatgatagctcatctggtgagcattacagtctcttattatgtgatattgtgacatgtcaaggatgccctcttgtgtgaggtttcctgtgtagaacgtagatagattctgaaccatggaattgtaaacataagtgtactgaccatgatgtgattatagctgaatcagtcatttgccaagaatattgctgggaagggaaagcatagaagatcattcgtcaaatagacctgtatatgagcagcttatccctgtatatgagcagctcatcccagggctgcttaaatgcttatttcatgtactatacatgatgtgttctggcgagtggattctaatccctcgaggcgatgtgccctcgtatatatttttctttcaaaatcaatgcanatatatgttgttaaaattctgacaaatatcgacaatgtagagtacaattatatctaatag

SEQ ID NO: 18747 - DNA, 462 bp, Oryza sativa
agcttagcctgcattcgattgtctggcttcccaacttccccatctcgtttggcacaattcatgactaattaatcaattaatcgttcttaagtaattttggtaatagtgtctctaccgcgttccttagagaaatagatgtattttaagaatctaagaacagtagactttttttttgtgtgttccggtgtatatggaatggagttattatcctacccaaaatggtattgatcggtgaattaatttacagcgctagaaattaattccattgcaggacagagatccagtcggagtgaagaataggaaagacacacatatgtgagaaaccaagttgcctgttttacgcgcttctttgatggatatttcttgcgttcgctgttgagttttgatgactccagaacgatttgaaaacattaacctgatacccaattttcttgtacccaaattcacacggacgccaaaagg

SEQ ID NO: 18748 - DNA, 421 bp, Oryza sativa
  unsure (1)..(421): unsure at all n locations
atttctgactctatatatatatgttgcatttctggggtaaatataaccaaattattgtgctatataccatctgttagtcttctaccactatagtgcaatttaaagattactgggtcatgtgttcactgctttgtgttacatatcctctatagaatcatattgccagtattcggctactttgtacatagagatgctttaggagtattagtaaactcttaaataaaatcaagtgtgagagaattctgtaagtgattttgcatagtaaagctgagtctcaataaagctagcagtgatagtgaatgtttgtctattgtctttgtgtcagnttccactggtcttatggtatgtttcacataagtctgcatcacaatgctaggttcaacacgtactttactagaaatgccatgttttatcatttaat

SEQ ID NO: 18749 - DNA, 448 bp, Oryza sativa
  unsure (1)..(448): unsure at all n locations
gcttaccggcaaggtttttctatcctacagcggtgtccgacgctgacaagattgtgcgaacatgcgaaggttgtcaattttttgccagacaaattcatttgccagcccaagagttgcaaaccatcccgttgttctggccatttgcggtctgggggcttgacatggtcggcccgtttaaaagggtagtcggtggttacacgcatctctttgtggctatcgacaaattctccaagtggattgaggctaaaccggtcatcacgatcacaacagataaagttagagattttttcatcaacattgtgcatcggtttggggtacctaatcggatcatcactgacaatggcactcaattcactggcggagcatttaaagacttttgtgaagacttcggcattaaaaatttttacgcctccgtggcgcaccctatgaataacngacaagtcgagcg

SEQ ID NO: 18750 - DNA, 442 bp, Oryza sativa
  unsure (1)..(442): unsure at all n locations
ngaatagctntagtgggaaagctgaaggccttgagccaacgcataagtatgtaaatgaccactgctgcgtgaggaaagattctccatatctgcgcccccatggaagataagacatgaactgctgtcgccctagagtttccacctagagtttgatgtagggggaggggcaacacagcataatgacaccttcgatgaggagagtggcatcatagggcattcctgtcattagacgaggcactgacatcgcctacccacacatccgaggaaagatcagcaccgaaccgacggctgctgagcaaggctagccgccgctagaccaaacaagtagctacagttgtaccctcaacaccgactctaaacaactgggtacatacccaaagacatcaccggagtggaaggtcgtggagggagacattgagagananatctatcttcctagcat

SEQ ID NO: 18751 - DNA, 383 bp, Oryza sativa
ctggcacaggtttggttgatactggtgtcagttcatgaggctgcaagatatttgtagcaccaactccctgaaccctcacatcacatatgagtatttttctgtttaataatttgaagccatactcttgctgaaacaggttcacaaactcatcagcataatcacttccagattccctctctggttgtttaaccatgattgctgtatcggttccctcgtacctcaagttcaagtatgaatgtgtcctgatgctgtcctctccaaaaccctgctctattaacttttcttttacctgcttaactaaaagatctactcttcgagatgcctctgcagcagaatcaacattataaatagcagagtatggctcttgcaaatcttcaataaca

SEQ ID NO: 18752 - DNA, 334 bp, Oryza sativa
tagacacttcttgtatgaacattgcttatatagaaatctactatgcgtcaacatagtcgtgcagaatgtatgcatatgttaagtgagaattgatatgcgaaatatgctattggtcaagatctaatgggaagaacatatgctgaaattttgtgttgcacaatatcatctggctctgaataaaatagagcaaatgatttgttaataagacaataagactaatctcttacatatccttgcaattagtcatgctgccctaataatcacgtattttccctatgaattcattatctgatgctctcctacgaggacaccaaaattgttagacttagcatga

SEQ ID NO: 18753 - DNA, 498 bp, Oryza sativa
  unsure (1)..(498): unsure at all n locations
taatccgcagatctccatataacagcattaatcttttgttgattatatcttggncatacgaactctgaatcgacccgttcaaagtctcctaatgtttgctataacctaaagaaccctgcgctttctttttatgtattggtattgcttctttatacgcttgtagctttgcttgtgtgcttcgcgtagctatcgtcgttccggaggttccccaagcgtggttcgtggtcgttcccgaaggttctgaaggccgttctctctgagcaaggcaagtcacatcatccttgagcatattgaatcccagcttataaaaatattctgattcagattaatgcattatcgctttatttaaatttccgcgctatcactggtttatttagccaagcctatttacctctgttatgacattattattgctattgntattattaataccttgttcacgctagaataaacaaaacctcaactagtgggaactctattcatgggtgactagtataa

SEQ ID NO: 18754 - DNA, 464 bp, Oryza sativa
  unsure (1)..(464): unsure at all n locations
agcttncatgcatgtttgaggagtgatgtatcatgttttaatctatcttttaatctttttcataactatttagatgacatataagaaacaagaggacatcctcttaagggattaaaatagtatgccccttttttcaccaccttttgttttaatttcaatatataaggtgagtacttttgtactataaagagcagtaagtacatttacttttcaattccatataacattngctnttcaatttcatatgctaattgtctagctagtgtgtatatataactacatggagaaatatatagggagtggaatcaagaggggaccaatgcacaacactctagctagatagtataagtcgccatctttgatatatctttcttattcgtacaagtggccagcataggaggtagagagctgttacgttggtgtgacccttgattaatctgatcaatctatctccactgagtgca

SEQ ID NO: 18755 - DNA, 169 bp, Oryza sativa
tcacttttgctatggcggatatgctcttccaaccacaaaggtcttccgtgggatatagaacttctatggaatcaacttacatcatttgaatccatacttcatcgagcatattgcaaatgttatccatgtctgcgaagctttttcgggcgttacgccctattatgcgctg

SEQ ID NO: 18756 - DNA, 312 bp, Oryza sativa
actttctgatacaggtctatgtgtatatttggttttccaaacaacaggattagctggagtaaaacatgtgcgatgggaaggaaagattgcattaatattaatgggggaaagaactgacttatttatgacttgggtctctcccctctcatttgtaaccgtggtagtgatgccttctgcattggcacttccacgagtgaaggagttcactatgttgaagatacagacctcttcattgtcaatgatgacaaccaaaattgtggcaacaaaattcatcttgttctgctatgaagagatggctggcttcgaaatcaa

SEQ ID NO: 18757 - DNA, 437 bp, Oryza sativa
agcttattggattattaagaccagaatgggttgttttattgtcggactgtatcgtgtcagaattcgtctggtgtcctcgtcaacagttagatgacgaagcggagcctcaaatccgagtcggagtcggagagaagaccgtgcactcgtgcagcctccaatccaagtcggaatcaatatatcagggctcttcaatccttataaatagcctacaccccttgcccgccactttcacgatcagcaagtatctctctgtgtgtgtgtcagtgtcaactattcatctttgcccgcgctgcagaaccaactcatcaaccagcgacatcgaacgatccatccatcaccgatggcgggaagcgacatggacgacctcgtcgcgcggttcatggacatcaccatgctcgacagtcgagacgccgcagctaaccacatcagatcatgcc

SEQ ID NO: 18758 - DNA, 462 bp, Oryza sativa
  unsure (1)..(462): unsure at all n locations
ggaaggagcaagagacgaagtcgccaatgtcgctactctccttgtccaagctatgttccttaataacagaggtccgagtgcacttgacgcaaccgaaatctttgacaagttaagagttgcaccggatgtatacttcaagaacatcaagaaagctggaagcatgggagctagcatggcattagcgatgaccaaatccttgtacccaagaattgaaatcgacaccatngatggatttgcagatgggacaagcgaagaagctgctcttgatcttatcaacaatgctcaaaatgcggctgacaagaatgcaagcgatgtggtagatcaattccgcaacaacaaccttcagccgagcaacgataactctgatgatgaaaggactgattctgactgagtatgattgttacacatggacgcatacattgtactatactggnggatntatgctgtgctcgatagatctag

SEQ ID NO: 18759 - DNA, 342 bp, Oryza sativa
  unsure (1)..(342): unsure at all n locations
aactcaagctcatcgncgagaggaacagcccgcatcaccagctattgtctttatatgaccgctcaacgataaaggatgcgggggtgcaaaaacagccacgacgcttgcctatataacaccaccctttaaagaatgcgtaataactcactgatcgagcgcccttgcgctgaagatgaaccgggctaatcgatctgccgaaactcggggatgtcaaaatgcatcggtaagggagcgttccgcctcagagggaagcaaccgcgaaagcggtggtcgacgaaacggaagcgagaatgtctgcttgagtaacgaaaacattggtgagaatccaatgccccgaaaacc

SEQ ID NO: 18760 - DNA, 489 bp, Oryza sativa
  unsure (1)..(489): unsure at all n locations
cgggatcctcaaagncacctgcggcatgcaagcttggacacctacagtaatggtgctatttattgttcaccagctacatctcttaatacatcggttggtttactgaccaacttattatcaccaggacgattccctgtacctagcatgcaggtatatgtcctcttgtatgactctaaagactaagtagaccacactccccactaggtctgcatgtcaccatttacctctgacatctcatcttgactagtttctgcgcacatcaaatagtaagaatatatgagtatgttgtacatactcagcaagattagcacatatatctacatatatatttttaaagaaaaatactactacccatagatattaacagccgataaatagtgaaagacactaaacatagtgagttaaatacattctgcagaggtattaaaataaccgtcacaatctcgtgccttcaattcatttnttccgcaagagtgataccctcgtctg

SEQ ID NO: 18761 - DNA, 433 bp, Oryza sativa
tcctttctgcgtagaatattacacaactattgaaatatctttattgttcttaatctaatctcatcaattgcggttgtatgcaacttgaattgactaatatatcacgttcaaatagtttgaaactcttttatcgtgtattttgaggtggagtccaatatatatggacattttatgaaataccacgactactatagaatcaaattattctggacaatactccctaagtaccaccatatgtaaaaatgtggacctggagggcagttcaatgatcgtttacgaatatcaattttgcgcatgagagcgttttaacatgcccacggacaaaaataaacctagttttgcatgcacgcctttcaagatgaccgcatgcgataatacccttctctacctctccactgctttttctctcgcacttaagtcacgtctagtcacg

SEQ ID NO: 18762 - DNA, 386 bp, Oryza sativa
cattcctgcacggcttgcttgcgatagataccacgcctgctcctatcaacacacattatttcataccgatgcacttgtgggccttgagcaacaactctatgtctccgtgcctatttgaatttatcttccatggactttgtcactacgatgcccaacactatgtaggtatcggccatggaccgaccaacatatctggtacgaaccctaaagtatgcatgcgctgccgtgatagatgaatatacacaatagcaaccaatggcggtactcaaactcatccaatacccagttgtcacacttgcaaactgggtgcaatatccatacagaaacatagtgtcaacaataagcccactcttcttagctcatcttatcactgcagaaagtctgac

SEQ ID NO: 18763 - DNA, 410 bp, Oryza sativa
  unsure (1)..(410): unsure at all n locations
atgcatgtaacaacaatggaccgatatgtaagataccatgtgaatgatattgaacggagcttcttgatcaagttcccagcatgctctcttgctgcaaaaaggcacattgattcgagcacaacaattcttgatgttcacggtgtggtatgctgctgaagctttaatctccagactgattattctttcttttttttcttttcactcacgcatgtgctaattgagcacattcttttcagggtttgaaaaatatcagcaaaactgcacgtgaattaattgtccgattgcaaaaaattgataatgataactacccagaggtactgtcttctactcaattcgctgataagcacagtactgtgttaattntcttgctaactttnttttcgtgggtntatgtgttcagaccctatatc

SEQ ID NO: 18764 - DNA, 310 bp, Oryza sativa
  unsure (1)..(310): unsure at all n locations
atanaaactcaagctcaggaggcgcaagcagcaccggcagcatagtcgctctatctcatttcatatcgaggctaggagagagcgcgctacctctatataaactcctcatacgctccaggccgtcatctggatggaggacgctgaacgggccctcactacattgaatgcgtaccgctgttgttcgccacttcatggacgccccagagccagacgagccggcgctactctacctggcggcaacctcgcacgaggtcaacacaccgatggtcgtggagcgcgacgaggacgaccctccctccgggcatcccca

SEQ ID NO: 18765 - DNA, 416 bp, Oryza sativa
agcttgctgatgagaatgttgtctctgaaataacagacatggagctcggctcgtacgtcgtccatggagctggtactaaacccaatttgaatggggaagatgacacaggagagattgctggattctggggttacctgctccagatcatctaccatgtaaagagggattccatgcagcccaagaacttagaatatccatccacttgagcgcctttttttttcttatttgttatcgaagagagttatcttatctgcactgacatttgcgtccatggagagggggtctgatctcattatgcttttcatacgcaattattgcactaacaactaaagtacgtttgtggtgtgctctgatgaattggattccgttctaaagatcagatgtgcccacatactatcatctttgtccggtcacat

SEQ ID NO: 18766 - DNA, 325 bp, Oryza sativa
ttctttgctgaggctgtcgatgcagagagtggttgcgatgatttattgccgagtcaggtgcagcaagatgagcattggtgcattgtttctgctatgggttctgattaacaccaggccttacgggtactgcgtttgctccagtgaccacaatacgattggaatgtctgcttcgagtaaattggcggtaatgtggaggtcgatattgccttggttggggacagtttttggagtaatgcccttcttcactgcagttgtaacaaacaataactttcttacactcgggttcttcatcttgtacttgatttttcaactgctgtattggaac

SEQ ID NO: 18767 - DNA, 370 bp, Oryza sativa
  unsure (1)..(370): unsure at all n locations
ctcagctttccaccaagactcatgggccccgaaattctttctagatcagtggctatgtccatttgaagntgatgctgtcaggagggccgaatccgaattcaaaacatgttaaactttatatcttgtcttctatggaccaaaagtgacgtggtgagatgaaaaaagacttggagaaggtcttggtttgatccccaatcaacttctttaatcatccatgcattccttacgctcgatctcttttctttcgcccaagcaagtagctctgctaacgaaaacacacaaaactcattgtgtagcaacgtttggtcaaatatataacacagtaatctaatatagaacatatgcacctttggttgattaatacataaag

SEQ ID NO: 18768 - DNA, 470 bp, Oryza sativa
agcttcagcacgaactcgtcaactgtaatatttgttctcctgagtgcatcggcgaaaaccatttcatcctcgttggtgcaaatttgcacggtgagcccaataaaggactccagtagattgcctttgccctctgcagaatctattagctcttgcgcctgcacatgcacccacgagtttaaatacatctcgtttccacagcacgatgagacttttaaaggtgaactttcaatttaaaacaactgaagaaaagttgttgctagatccctacataaagatgggaaaattctttatggaagcccttgcaatctgttgttggaacatctggagtagaagaaatgatctcatatttaatggtgttcaagtaaactttggcatatggaaatcagatttcaaagaggattgtactctacataagcatagagtataggagagttgacaaaccaatatggcaatcatggattccaaacata

SEQ ID NO: 18769 - DNA, 422 bp, Oryza sativa
  unsure (1)..(422): unsure at all n locations
aagctatgcctaattaagtctgaaatgctgcttaagttgttaattattttttgtcaaatatagctgatgagcaagttataaggctacacaacactgctaatatatcaactgaagcaacatgctgtgctaatgggcttactcattttatgtacataggctattctcttaagcaagtntgactatttggctttgctcttttttatatgctgctcttctttaatagattaatataccttctatgtcctaacaattcagtttcagcttgaaggtagtccccttaggcgtatggtcagcaacagtatttgtacataatcgtctgttgataacaataattcttgaagtgttgagttatgatttccttgaagtgtaagcaagccataacacacgaagaaatgtgataacaatttatattgatccactac

SEQ ID NO: 18770 - DNA, 483 bp, Oryza sativa
  unsure (1)..(483): unsure at all n locations
tcagagtcacctgaggcatcaagctatctagccgtgaggtctaagaccgttctatctatcagtacccgagtttggatagttgaccctgttggaatactgtccgtattcttgcaccggtgacctgtgaggctaagaccgagtcggtctcattctccacgtgacacccccgtcttgtaccgaacatgctgcttggcttctcatcaagtatacgagcaaacgntgtccacacttgcatatgcaccacccggacacgtccttctcaatgcatgaacagatgccctccctgatcatagcacatgcacatgcacgtttatgtgcatcaacagaccagcatgcatgttcaggcacatatattgcaggtaccacgtggtgatctttcagcatatggcgcgcacgtccatgttagaataatattagtctccaccgttaatattactaaaatagagaactagttatgcttgcaatgcgttatcatgttagaat

SEQ ID NO: 18771 - DNA, 452 bp, Oryza sativa
tgcaagctctgcgcagtgaatggcaaggcgctaccagcaaatagtctactacgctacataaaccagttaactgtcagcagcccaagtttttctgctactttgtacataaaccatggatgatcagaggaagatcgggttggtcgcctcggctcccaccccgtccctgtgcttgaacattttcagctgcacacagagacgcccgctccttcggaggttctcggtgtccctggggagccggatttcgtcgcggtcttgctgcctccgcttccttgattccggcgagctcgagtccagcgaggaacaggacggcgtcgtcacgtgggagttctgccagaggtccatgaccccttgttccttgaactccttcgcttcatcgagcagagggacggtgccatccagaaccatgtcgcacttgctatcctgataaggtatcagcacggctgggaatcggt

SEQ ID NO: 18772 - DNA, 476 bp, Oryza sativa
  unsure (1)..(476): unsure at all n locations
atcttaagtcacctgcggcatgcagcttacatagcctagtatgaacacgaatggttttgttaatataactacgtacgaaggcatcatnttttttggaataattaatattacgaattatgtactcgaagccaacctctctacaaataatttgtttagctagactgcactggagcataaattaagtacaccgagattatgtaatcatgcatatgatgcttacaatatgtctattcacttgccacaattttcattgttttcatgctatattatttagattataaaccatagtttatgataatctcttaaaatacatagctaatttttataagcttacgacattggattatttataactaatttgcagttaaagactcatattaactatattccaatacttctaaaagagatatgtatatttgaattatagtatgacattataatatgttatgtgctgatgtttatatatcgtattgtat

SEQ ID NO: 18773 - DNA, 368 bp, Oryza sativa
  unsure (1)..(368): unsure at all n locations
taagagcgcaggcatgctaccagcaatgttctgctaacagtcctatttcgtatctagntccctctacagaaaactatatctttaccgctgcccactattcaaataaatatgtcctgaacttccatgataggatttcaccctgccatcatccgacatccccttctgttcagtccgattgaattctaactttaacctaatagctttctcaaacatggcttaattcttaatacccaaacaactgttctcgcttggcatacaaattattctgcaagcaaccagtcattgaccaatggtgacttctaccactcgaatataaatctgcatgctctctttccgngcgatgtatgtaccttatatagaaatgctca

SEQ ID NO: 18774 - DNA, 182 bp, Oryza sativa
ttgacatctaggggaaagtgtattctttattctaccgtaagacagagattctgcaccctaatcacatgtaacttgccatgtacaagcatcgcctaagatgatcagactgactatgacacgaccatgcacgtgggtgtaacatccctacaaccaatagagagcaccaaactggacaaaaggca

SEQ ID NO: 18775 - DNA, 404 bp, Oryza sativa
  unsure (1)..(404): unsure at all n locations
ttaaaccacgacactgcactataatatttgtgagcgttttttgtctggcaattaagaagtaaatgggctttcagcgacctgtatacaacctgattgaaacacaaagctagggggtcccgggaccctaaatagcctttgtaccgatacacaggatgggccgtatatgtctatagccaatgcgaaatgatgtaacatggtgagagggagtaaatatgttcataggaaaatatggctatatattctatcacatatanatatgtgataaatacctagattataagggataatctaccgaccttatcctggtgcctctaggtatatataaagggagccggaaactctaaaacgggtaattgattgatagcttatacgcactactccctccggttcatattaattgacgt

SEQ ID NO: 18776 - DNA, 465 bp, Oryza sativa
agctggacttaattatgtcaaaatttatgtttgttcacataactgccagctttataggaaagctaaggcaaacgatgactttcgttcaaaatgtggtacttcaaggtggaaaaacaaagaagataaaactactttaacaaagaaggaaaggagaagggcaaccccaaggaaagtgttaaggtacttcccaattaagccaaggcttaagaggttatttatgcacaaggaaacagctatagcattaagatggcatgatgagggtcgtacaaaggatggtgtgttgcgtcatccagctgactcagaggcttggaagtccattgactctaggaatccccagattgcatcggattctcgaaacatcaggtttgcaatggctagtgatggatataatccttttgggacattgagttcaacttatagttgttggccaagtgtcttgaatccatataacctttcttccatggt

SEQ ID NO: 18777 - DNA, 445 bp, Oryza sativa
ctcatacgctggttctttagtgtgggtacactgatcagtgagccaaagtctgagtaagggcgtcacattatctgttgaatcttgtgtgtttctttgctttgtacaagcttcttatcgatagggaaagctgcagttgattgtacagcatatgctatattaggctgttatggaattttatctgtattttcacaaaagaagagtagcacttctgttaaacaaatagatgtctcaatataaacttattcgttactgttgcatcatgtggtgtgaagatctgactccaattttatacttttcagatgttaataacatcttgctgaaatcacatcggcaggcgatactcgaatgtttttgctgtttgaaaacccacaagattggactatctacaataactatgcggccacgatatgcttagtggggttctcttttgttattaactaaccct

SEQ ID NO: 18778 - DNA, 447 bp, Oryza sativa
  unsure (1)..(447): unsure at all n locations
agcttatacatgctgtacgaaaactttattattctagatataaacattcttaaaatagtatctatatatagatgaactacctcctttcttactagtaatatacatccagaaaatcgagtggctcgctttctatcactgctgccattcacaaattggcaagattatccactaagaaatgcacactaaaaccttccaaacacactgtcatagngaagacacgactacttatttaattacatactgaaaacaaccaattccaaaggtacaagcacctctgggaccgatcatagatcatcaccggagaaagatagacaaatataagataataaagccgcgcaggaaaccgatcgatgtggccgttcaacaatcaacaacgccgctttcgctttagataacataaaaacaaagatgagcatagaaatgcacgggtgcaaagcgacacgcgac

SEQ ID NO: 18779 - DNA, 271 bp, Oryza sativa
  unsure (1)..(271): unsure at all n locations
aacaggagataaaaatgatccagcaggtgaaattgcatcggaaaatatatttaccttcacggttgactgaattatgaatnggaatccccgaacacctgaatcatttctgggttaacaagatagtgtgaacaaagatttagaggagttgcatgagcatgactactaagtcccattaccacataccaatgcaaaaaagtgctgcacatctctttgcaataaagaacacaattaatataaaggcaacatcgtacctttgtgtaagcactgttat

SEQ ID NO: 18780 - DNA, 466 bp, Oryza sativa
  unsure (1)..(466): unsure at all n locations
agctaagtaaggcgttcaaagagtgtctttctcttcctcttcttctcagcctcagcactttggatattcggaggaagctgaatatggactccagcaagcacacatcttggaccctgcatacataaacaaaagaactgaggagccctatgacagatctcaataagtacagcttgatgaccatttaacctacgcgctgtgcatgctgaattatgacatacacaagcaatctaatatgtgatgaaattgttcactggcataatcagagaagccaacttgtggagtgtgaaggagccccacaggggtcatgagaacttgtttcagttacatacatccatacatgattgatagaatgaattcaatgtcgtgtaaccacctattgaaactaagtttatctatcttcccaggacatcatntaaatgttcccagctgttcttataattctttcttttgctctaaaatggacacc

SEQ ID NO: 18781 - DNA, 479 bp, Oryza sativa
  unsure (1)..(479): unsure at all n locations
ctttatactaagctccaatgtgccatacctcatctcaatgagctttggtttcgctctccaagcctttgcatagcctatggtgtacttgaatatcgtctccatgtgcctaataattgatattggtacaaagccagagttaccaacaacactgctgttcatctcacttgtcacaatagctgaagtgatgtttcagtgatacttctccaccccgtgtaaaaagcacttgtgctcggtcacaatgctaactttaccaaaatcattccatttacccttatatgcatggacacgccacggcaatcttccttcatgcacctcacttcatacacataattagttgacttgaccaccctatactctctctgcatggaaactgccccatgcttcaccgnctccttcatatcattcttatgagcataccttgcacgctcaattacctcagtctccttatactcccanggtacatgatcaccctctgatat

SEQ ID NO: 18782 - DNA, 466 bp, Oryza sativa
  unsure (1)..(466): unsure at all n locations
tgcagcgtgccagcttatgagagacaaatagatcatgtggttactatttatcagncaattccaccagcttactcaaacacagttatctcgtttggcccggaggatgctgaaggcatactttttccccatcaagacccgttagtaatatcagtggaaataacacagtgcgaagtgcataggtgtgtggtcgatggaggaaagtcggccgatgtacttctctaccatgcatttaagaaaatgcaaacttcacataactgactaacttacgcacgaatttctcttacacgatttggtggtcagcacgtacatgccatctgcaagaattcattacaagctggtggttggggacgagaaaataagagaatagaagaagtcgtgcttgatgtggtagacatgccatatcaatacaacagccatattgtggaagatcaacaatcaacatttgtgaagcaattctacaccacaa

SEQ ID NO: 18783 - DNA, 416 bp, Oryza sativa
  unsure (1)..(416): unsure at all n locations
gttctcttgttagctatcctgcttcttggacatcgtgaaagcaaatagcttcatatgctatggggcatacctcacatacttgggttatattatcagctgtctttgctgatgtctcgatgaaaaccatattattcttctctgcatactcttgtgcttccttcagaatgtgcaccatatcgtcaaaacaattttgcagcatattgtgatactatgtttactacaacttcacacaagatctgacctgagaagatacatgtcgattttcatgtagatcagctntattaccaaccaanaccatgataatatcaggactaccatgtttttgaagttcctgcaatataagaaaaaacaatctgagagtgcttcatatcctgaaaaagaagtggagacataacatactttacaatagtcgacat

SEQ ID NO: 18784 - DNA, 203 bp, Oryza sativa
ggacaacactcgctgcacttaaaaccccttttcttttttccgcaaattcagattctgaaattacatttgactagacatccgccactaaattggaaatttaggcacctcgggtaaccccgcttactgttgatctcgcttggatcgtagacgtcctacttaccagagcggtacatgtctgccgacctcctgaaacgaacttccac

SEQ ID NO: 18785 - DNA, 271 bp, Oryza sativa
gaaactcagcttctctggaagaagcattatgcgccttctctttattatagaaccaatcaaggatgcagtcactagaacaatgccagctatatctctccacaatcaaaatgagcagccatgtttgcgtgtttcagtacgctacttatcatggagtaatcgaaaggttgcagcaatcatgaaattcataaatataatcacgtctgtaaacagtgagcttgctatgtatagagatgattcatgttgaggagacaatgtaccgatgttaaacacc

SEQ ID NO: 18786 - DNA, 437 bp, Oryza sativa
agcttaactaacaaagggaagttgttgacttttgcgggtttaaatgctggagctcgcgttgcggtcgccatggccacgctgctctggagcacgtgaaggaactgagcaccgaggagaggagaagactagggaagaagggaaaagatgcaggtaactgggcctttaattgttagttgggcctgggcccttcccctgactgctctgtttactaaaagtcccacaacagaacacaggacatcgatttactaaccaacacacactgttatgtttattatgtgtctttactactgtactatctcctttttaattatatcttctaaataaaattaacactataactatattacttataaaatagtacttcctccgttccaaatatagatcctagtacatgatgggtgtcagattatatcactatgaatatccactctatacta

SEQ ID NO: 18787 - DNA, 503 bp, Oryza sativa
  unsure (1)..(503): unsure at all n locations
ntacaactaaacacgggctcactcgntcaccgtctttggtttataatcgggcgtgggtttcatcacttctaatagtagcatgatgactatccatgatgactatccgctactgccggcccgcctattaaagtcctccgctcacgcaggttgaattcatctagctaaagtatgtataagtatttctcggttcataggacaatgctacgtagggccaatttgaactgaataatacagtattagtatacattgctccaaaaataattcgaagtggtctcaggttaaagaaaggcaaattctctattcttctaaacttatcaagctgtttacgcagcagcaaactggcttacacagtaaacganaaccaccacaagatacaagggagcctttagaataaataaaacggctacacatagtaataacactagcaattgaacaatggtggtagcaaagtaaaatggcatctcctagcagaccgacttgaacatatatacctacagaatcac

SEQ ID NO: 18788 - DNA, 413 bp, Oryza sativa
  unsure (1)..(413): unsure at all n locations
agcttcacacccttctaaagagaaacatgtttctaatgtgcntagtcaaacatggtaagttgggcatacaacatctgcgtaagaaggaggctcagttggatgctaagagtaccaattcgctccctttgtgtagaatagacgccgacccataggagaaagacgctgcccgtatattcacagcagccgagttcaagaatgtccgtgcacagatacggctaattgctggacttgaagtcataagtgggactaatcaagatggttcgtcactgtatgttgttggttcgaaggacgataatgaggtgtgagatgaagagagagttactttcataggctaggcgtcggaaggcgtggaatgtcactgcctgaagatggagtgcgaagacatccctcgctcacacattcttgttgcactc

SEQ ID NO: 18789 - DNA, 430 bp, Oryza sativa
  unsure (1)..(430): unsure at all n locations
tgcaagctatcactnttccgacacaatgaactatcttacatacacaaacttccaactnttccatcacatcgttctaattttttttcaaacttccaattgtggcggggaactaaacacaacctagtatacccttgtgatgaacatagaaattcattaattacattatcaaaaatgtcaaagtttgtcgcatgagactattatagttatgagattgctgcgcaatgcattatttattaccacatttatctttagataatgaaatacaaaatatgtatttattttcttgaaaaagtcataaaagggaggagcatttctacaaagataggactatgaatgctcacaataatttatttatgaatgctcctgataaaaaaaccattgtcctattaagattcaaataaacaatttaatctattacatatggtctatt

SEQ ID NO: 18790 - DNA, 294 bp, Oryza sativa
  unsure (1)..(294): unsure at all n locations
actgcagcatgcnagcttancgcacacgagagaggacgagggtctttttatgacacacgcgcctcctacctggcgcgccanagacggagcgtggggctcctcactgggagaccgcgaaagccccccttagacggctcggccggaggcgctaacagaggatcttcgacctagatctgaggaacgccagcgagaaatgaaaagcgcaagacacaggcgacttacacaggtacgggccgatgagagagctgaacaccctactcgagagcactggcggatcagcgagagaaggaaaac

SEQ ID NO: 18791 - DNA, 401 bp, Oryza sativa
tatattgtctccatgctagtgagacgatctgctagccttattatttctgctcttgcatcagcacatgcaagaaacattgcatgcacgcggtcttctataaccgttctgcttgcagtattgttgtgccgagcaagcttgctcaagtggcttaactaggagacctgagtatatcataatttgcgatacaaagacttttacatttggactaagtgttatcaaaactatttataagatggttcacgtgatgcattgctaccataaaaaaatcattttttaacaaggaaatgtatttatagacataatcaacattccctcagatgagagcaagatataagcagttcaaccaaactccactgttgtttaacatttcccacgaatggccatataccgtattataaaac

SEQ ID NO: 18792 - DNA, 394 bp, Oryza sativa
gattggatacaatatcattgctttttgccacgtaagtgtgcgtttttattgaccaatattatggcttaggctgattatatattgtggtcattttctaggcggttggtaaatcctttatgagtttatttactcggactttacaccacatatgccatatatttccatgtgtggtgaaaccatgtgtcttctagggacttaagtacatctgttaaagcagtgtgcgcatggcgcatgcccaatactttggaaatttctttattcataatatacaagcttctttatagctattgtgctatatcactcatcatattttacgaagcggttggtatatcactccgatcatggtatttggaggattcacaccgcatatgctatatattgatatcaagtcact

SEQ ID NO: 18793 - DNA, 460 bp, Oryza sativa
  unsure (1)..(460): unsure at all n locations
aggaacatgcagttaaaggttttctatcattggcaccatctgntaagccagagatgggccgaccacaattngttcaacctgagaaaaggcggcttaatgctaattcggttccatcggtttcttacatcacatcatcccctttacctgttgcagcacctcaaataaagtctgaaacgcgacatgtggcagggggcaatgaggtgaaaaatgcaatgcataatggaaacttgagagagtcggtagttgtaatgcagcgtccccaatctgcagctgccaaacaaagcctgccatctacaagccatagtatgtgtgcgtcagaacctccaagggaatggtacttatatggtgcatcangtgtggatatgatgttgaatggtggtttaggtcatggcctaagaaatatgagcttggatggtgtaattcttccagcagtttggcatgcaaccatcacaaagtttgt

SEQ ID NO: 18794 - DNA, 197 bp, Oryza sativa
gcgaatgcgcgggcatgcgtcgtacgctaagattgagacacttataagagcgaattattaaccggtgaacatctaccacgattactccataaattggtttcgtcgacattaatttcctttataattctctaacctattagctttatattatatcatatctaaggaatatctataagcaattatttataatcctcttc

SEQ ID NO: 18795 - DNA, 464 bp, Oryza sativa
  unsure (1)..(464): unsure at all n locations
agcttcgcanaaccctcatcgacggtggttttgcactcaatatcctcttcgccaagaccttggacgatatgcagattcctcgctccgagctaaaaccaagcaatgcgccttttcacggagtaattccaggattatccgcaactccactcggccagatcaccctcccggtcacttttggcactcgggaaaacttccgcacagagaatatcagctttgaagtcgccgatttcgagacagcgtaccatgccatactcgggcgcccggcgttagccaagtttatggccgtcccgcactacacttacatgatgatgaagatgcctggtccccgaggagtcctatccctacggagcgacatcaagcaagccgtcacatgcgacaaggagagttgcgacatggcccacacccgcgagatggcgtctgcccgagaggatatccgactggctgcagccacggcgagcgaagga

SEQ ID NO: 18796 - DNA, 390 bp, Oryza sativa
  unsure (1)..(390): unsure at all n locations
agctcgctttatctttctcgctgcatttgtaatcttttatatttttgnaagacgtgggtctgtatgtcaacaaatgtcgtttgtgtaccctggctggtcctggacagggatttaatgcacaatcagcttaaaaattctggttcgagaatttctgggtgtgacaacgtggtatcaaagccgaccttgaccgtaggacaagccaactggaaacctaagagccctctgaaccctcttttttcatatgcatatgctcttttgcacttggatttgtttcacgaaaatttggggttttgcctctttggtttgtgggaaaaatcttggtcgttcattcggatcnggattttaaaattagctcagtgtagggttctagaaaaaaaaatctatttgggg

SEQ ID NO: 18797 - DNA, 90 bp, Oryza sativa
cctataaaactaagcttgcaggtgagttactgaattacggcaattttttttttttctaaatagagacactagatgcttaatgatatactc

SEQ ID NO: 18798 - DNA, 438 bp, Oryza sativa
gcttcgcagaaccctcatcgacggtggctgtgtactcaatatcctcttcgccaagaccttggatgatatgcagatccctcgctccgagctaaaaccaagcaatgcgccttttcacggagtaattccaggattgtccgcaactccactcggccagatcaccctcccggtcacttttggcactcgggaaaactttcgcacagagaatatcagctttgaagtcgccgatttcgagacagcataccatgccatactcgggcgcccggcgttagccaagttcatggccgtcccgcactacacttacatgatgatgaagatgcctggtccccgaggagtcctatccctacggagcgacatcaagcaagccgtcacatgtgacaaggagagttgcgacatggcccacacccgcgagatggcgtctgcccgagaggatatccgact

SEQ ID NO: 18799 - DNA, 386 bp, Oryza sativa
tgcgtttgtgtaaagacatgggtggaatacacacaacttatctgttctcttgatagtacattcccctatgagcaatataagggcgactcaaatatgcccggaagttaaccttataattgaggaagttgactttctaaccaaaccgatagtcctagactcgcaaagcttggacattatcctatggatggattggttggctaaacacaacggacagatagattgtgccgaaagttcatcaccttgcaaagacctggatgaaagcaaacccgctttatcttaacacccctaccgcagacggtctatcctacctgttacaatcacctcctggagtcggtgccataattgtgatattccacgatttccataaaataaacagatgcccccac

SEQ ID NO: 18800 - DNA, 296 bp, Oryza sativa
  unsure (1)..(296): unsure at all n locations
tggacagagctcactgctcaanagagaaatattctcatcttctttatccctatnagaacataagacctctactagaatatggaggtgactacatactaccaaacacaagcttaccaaatgcaacctgcttacagtatgcaatgctagattgattactggccaccgagccacaaaggagagcgttgggctcaatccaccaaagcccacgcgatccctaacgttgaggagcgagactcacgcattctctcacacgactatctctctagcgctatgatcggaagcgccgatttcctcga

SEQ ID NO: 18801 - DNA, 458 bp, Oryza sativa
  unsure (1)..(458): unsure at all n locations
agcttgggctatcccatactagcacgtgtgtgttgactgtatacgaaatgaactgatgctgagtaaagtccttagatcggtttgggcacactctcgctctatcggcacacaactaaacaccgtatgtgtaccacatgaggcacaaacctaaaatccatatttttccaacattttatttaacaaatatcacattttatcatttttatccagatcataaaagaattcatcttatatatgtaattgagccccaaatggtaagtaaactcatcactaagcatggctaagcanttttatagacttgtgacctcaaacatcattcttaatatgacacaatggattgttcctaaggttcggaataatggttaaggtcttttgtggagttcaggtgataatgtaagttaaggagttgatctaacatattttacaagattttaatggattagtggacaatggacatg

SEQ ID NO: 18802 - DNA, 429 bp, Oryza sativa
  unsure (1)..(429): unsure at all n locations
tgctgaattaccgatcgatgtggttggagtttgatntgtgatcgcctaanatggcctatatttatgtgaggagttgatccttctatgtggcatgaggtatccctgggtcggcttgggaaaggctntgtcgcgaacctctgacaccggccagtgtctggagtaagttcgtgtcttgtgggtaaagtgtacccctctgcagaggttaactaactgttcgaacagccgtgcccacggtcatgggcggatgtgaggtggttcccgttgcgtatatttgtttgcctgtgctttgtgaaaagttgttgtggtgtgggaatcgtaaccagaatcagcctatgtggcagatggatgacctgagtggtcaagaaacgaatctgtgtgattcgggatgtctatgggcatcatagtctangcttcccgagtggaagcgga

SEQ ID NO: 18803 - DNA, 465 bp, Oryza sativa
agcttatgacctggttctgcatgcacccttctattttatctagtcccgtaactcaaggaacttgtacattacatcttatgttaagcgccatcttagttgcccgcttttcttttagacgagatcttacataccctctaattgatacacctaaacaaacttgatcgttctatattaaagtccaaacttattttgacagttcgcgtctgtcaagttcaactcccagattccataatgaatagttacgaacttagaagtatcacacaggaagactaatgtttgcagtctaataactctggtttgttacaattacaaaccactaatagtatctggcatcttgagattatctcatgagacttaatgaaaagcctgatgtctgtcatactgagttatgtctcatactgcccatatactacattgaatgttcggatgcctgacactaaattacatctatgctagaatcatata

SEQ ID NO: 18804 - DNA, 441 bp, Oryza sativa
  unsure (1)..(441): unsure at all n locations
tatanatactcaagcttatcattcgtgaataatttgggaaacgattngcattcttctattcgcattgtatcttgaataccagaacctgtcatatatcatatatgctagaacttctttcctgattacattggtagagaaggttatgcacattgttgcatatgggatccttgtgaactgttatgtgattgtgtacatatgaacatgtgcaatgtgatagttggctttgctatgtgtgtgtacctttggaggctgaaatgggtgcataangaagtcacgctgaccatatcgagtactatatgctctctttcatcaacacagctcagaggacttagtcctacatgctattcatggaataataactactccctgactatgtaataattatagctcatatggngagtgtcactatngcaacaatagaaggtactatctgatctgctg

SEQ ID NO: 18805 - DNA, 446 bp, Oryza sativa
  unsure (1)..(446): unsure at all n locations
gctagtgattngatcgaagttcgtggctttgttttatatatccanagacatcaactcttaggcccaattcgcaatccgtccatttgcttcgcgattgtgaagtatatctccgagtggaaacgatgtgtccaccgtgaccgagttactttgaaagtagtgagataatttcctgacggtgattaagacaccatataataacttttgaacctgaggatatcttgtcttggagtcggctaaaacttcgctaacgaaataaatcggacgttggactcttttaatatggccttcctcttcatgctcgacaaccaggaccgtactcacaacttgggaggttgccgacacatttaacagtagcggctcttgtggatgtggcgaggccaaaactggtggagtggtgagaagtttcttgacgtctttcaaggctctctgtgcttcgggtccccact

SEQ ID NO: 18806 - DNA, 404 bp, Oryza sativa
  unsure (1)..(404): unsure at all n locations
tgctatatactctctccatccaaaagtctaagacctatttcattttttggtgtttccaaaagtctaagacctatctgtaatctctgtgttaaattaaattgttgactggaacctaagaagcaatcttagtatttattggttacatgcatgtgtatagttcattggttctgttacatggtggatgagtttcggatggagtacaacttacatttaaaataaaatcagctgaacatagatatagctggtaccatgctagagcataccttgcatcattgcatgtggttgcgccacataatgcacaatacactntgacttataaaatctttgcacatggtgattccttgtttctgtacgatacatctggttttgtagtttattaattattattatgaagcaagcattat

SEQ ID NO: 18807 - DNA, 491 bp, Oryza sativa
  unsure (1)..(491): unsure at all n locations
tattctgatgtacctctggatcaaggaagtctgcagacttttctctttgttcaaggacacaacacanattgaagaanataaatagaaggtcttggaaatcggacacatgtttgtatagctcagatcgttggtagtagtgataaaaaagtatgtaatatttttcaaggaaacatcttcatctcgagcaaatttgttgtgtaagtatatactgttaaattatataaagaaatagtaggacgcagttgcaataattagtggacaacagaacaaggaaataacactattggcattccacactggacaacctaaaacaagcagcttaacattccacacaggaataatatgatcctaaatacaacaggcttctttgttgcatattaaatatcataatagactgcaggaccaacgggaactcacttaattctcacgtaatatgttggtaactgatgcacgctgngatcattgttcctgaanaatagtntacatttgat

SEQ ID NO: 18808 - DNA, 430 bp, Oryza sativa
cgtaagagatgattctctacataaatgccttccttcttacttctctcttatcaatgatatgctccctaacggtgttgttatatctaatgtttacctatcacagattctcatatgagctatcctattatatttattcatgtcttaatatcaacgatatgcattttgcaagcttcattgttatatacctgctaaactcttgaattcctcttatagtgcaaaatgccatccgcttgtaaggtataccatgcgtgatgtactgcatcatcgattctcacgtatttaagaagctgatagagaacataattggatggaagaatccaccatcaacatacaagtatttatatgtgtggctcctatagtttcaacagattgttgcttattcattccactgaccacatatgggcgcgttttttcactcgtagcaagaact

SEQ ID NO: 18809 - DNA, 411 bp, Oryza sativa
aagagcgcgaattctagctcaaccatacagctctcgtattgcatgagagtacctcacagcccatagcaccactcttcataacaaacctgagcacaccatagcacgcccttgctaaaaaaacaacaaaattaatcagacaataagtaaaacactacagagaaacaatgcatgctcgtggagaacatcctaaccagtacacgctaatgtagagtggaaggaaaagagatctaaattaattgtggacaacaggatcacacgttagaagccaatcaacaaagcttctcagcagagactacctagttggctcaagcaatccagtcatactccgacacaaagatcggacagggcgacctatcggctctatagaagacatacaagaaatgcaaacaacctttactcgtacagaaaaca

SEQ ID NO: 18810 - DNA, 458 bp, Oryza sativa
  unsure (1)..(458): unsure at all n locations
agctatagtgctcatcctcctccggatttttttagctcagagaagaaatggtaagaatccactgttagtgtgaacgcaaaatatgatcttgcggctaaacctaaagtcggcaaagagatattttgtttagggtgatcgctacagtgatcgatctctcatgaacatccctgatcggnggataaccgccataccctagtgtcggttccccctgtgtgcagtggctataaatagagatcaatacctaagtgttaaaccctaagagatttctctcgctacccgatcaaacaacccactgaaacacagggaagaatcatgacacgattctcttcgtgcttctcaactataagagaagaatgaagaacatagacagagagaatgtgaactccatgagatcaacgtatgatccaatcccatcttaagttgtagttccactttgtgccaaaccgattctatcaaat

SEQ ID NO: 18811 - DNA, 139 bp, Oryza sativa
ttgactaaaatagatacaatatctattgttgagatctttttggtaacacaaagggtgactagctcccaactgaaaaatggtattaaagtacttaataacttcaaatctaactttatctgactttatgtcacttaaacct

SEQ ID NO: 18812 - DNA, 337 bp, Oryza sativa
  unsure (1)..(337): unsure at all n locations
aatgtacatatgctgcttaaccatggaaaggggagggcacccggattaaatttactcaaaaagaaatatctgtcaccatatgatgactgtcccataccttttcattccatgatgctaattaagcaactagctagttgctatctcgatatgtcttggtaggtggttatccatgcatccaacatcacctctgctagcagaggcaacttttgaacataagactgctttcatcactcatcacaattatacaatgatggccaaacaaaatgtttacgtagcaaaggtcgtaggagtctataagacatggacagntctctcatgatctccttggattattttc

SEQ ID NO: 18813 - DNA, 451 bp, Oryza sativa
  unsure (1)..(451): unsure at all n locations
catgcaagcttgttgataggactgctgttctatactttccgtgggatgcagctgcacctgtcatactgggcatggattcttttcaggaggaacaatcctttgaaccccaaggtatgataaaggtagagcgagttgagccaaatgcagcaccaggtggctggagaatatggccattttctttcaaaaggacaaggtctgttaacactgtccagccagtttctgaaagcactgaggaggcttcctcttccgctcctgttaaagaagtggagagagaaaacaacaaacccagtgcaaagaggatggagagaaaagtgcgttcgctcactccaacatctgaggagctagcatctcttgatctcagagagggcaggaacgtggtaacatntaccttctcaactggaatgcttggaaaacagcacgtaagtttccatttccacattggttcacttaa

SEQ ID NO: 18814 - DNA, 338 bp, Oryza sativa
  unsure (1)..(338): unsure at all n locations
tactttctccgattccgacgccgacgacgaggacgacgtctaagagcgtgacggcgaggacgaaggagaggaagaagaggaggcggaggtcgcagccgaaaaggccgcggacgaggcggtcgaaaaccacgtcgacacccctggctatactcctactccaagtccaggtcacaacaagaccggngtggagtcgaacagctccccccttcgtcgaaaggatntggagggggcgaaagcgctagttgcattttccgcaggcaatgcggcgaagggaggtccgatcaaatagatctccaaaaagaaaagactcgtcgacgtcgctcacgttttcagcgatg

SEQ ID NO: 18815 - DNA, 457 bp, Oryza sativa
agcttccttctttcagaaagacttttcattttatcaagaagcccactagacgaccaattctgcaagttaagataattaaacaacagattaagatatgaaaagtaacacaagctcaactagcttccaaagctcaaataaaaaagaaagacaaattgtattttccttttctcaggagcactggacctattgtcttgaaatcagtaggatcgatattataagacagtcggtcttaaacctagtgttgatcattggataagttactactgtagtcataaataaccttgtccataagtaaatggctcaaaccatcaagataaaaaagaagcatgtaacataagttatatgtcaagagtcatgatcacagtcaaagactcaagcaaagaaggaacataatactaatcttcactattaccttgtgcatgaatagaatagactgagcagagcacttctgaccact

SEQ ID NO: 18816 - DNA, 468 bp, Oryza sativa
  unsure (1)..(468): unsure at all n locations
tcgaagcaaccacttcaagcgacttgaattatgagccctacattatatccacatatgtgttccactccaactccccattcaaatctagcatgtacttatgtgaaatgggtcctgctccaacatcatatttaccttgtatagctatagactgattgctccaccccagcacatcttttgtacgacaaactaactcctcaaaactaagttttccaccaaatataaagtgcttaacactcatcccctcgaaaatgctaccactgttactttgctctaccaccgaaccaccatagtgcaatcgtactaatctatccatctacaacattaaccgacatattagcatattgcattttttaataacttgaatttgcgatacaanaaatctaacctacaactatgtcccccacgaaattgtcctaaatatctaaacatacacaaacttcattggtaccgatcaatctaatttgactc

SEQ ID NO: 18817 - DNA, 477 bp, Oryza sativa
  unsure (1)..(477): unsure at all n locations
cctgcggcatgcaagcttcttaattagacttgacatcgaatctctctttcatctcttnngcgccaatcttgctgatcctctgctgaatgcttgtcaattgtcatcatctaatccgtcaaaatgcatgcactgatgtacgcataatggcatgttgtaatgagatagcacaaatgagatgtgcactgtaattacaaactttaattagtaggtgtttggaggctgcgtctgaaaatagctcaaattgaactggataaacctctctgtatccatattctcttctttctcttttcccccttttctgctatccacagctctatatccttcttgtctaaataagggtaccattaactctacattatacgtacagccctgataaataccttcactacactgaataaagatatacagagcatatgccccggttcgttcgcttaggagttcaagtgtacttgcacctgaattacncctaacacaact

SEQ ID NO: 18818 - DNA, 399 bp, Oryza sativa
attccgagtcaacggaaatcgccaaaacaaggcagtgctgctgcagaaaccgaatatggaccttgggccttgtaatagactaagtccgtctcggaagagacccccacgaatgagcataaaccctagatctatattcttctctaaatgtctatgtacagcctctacaacaactgagtttcgattagctgaataatgccaagagccatacaccttgtctgtagtcctcgttcgattagacggcgactatagactcaaagcccctaataattggtgtgcagatttgccggaatcgattatatgtaccacttcaatcgcactatacctttgtgttaaataccattagctatattagatagatcttatcttttcaccagagactctcgatgcatagcagaacat

SEQ ID NO: 18819 - DNA, 419 bp, Oryza sativa
  unsure (1)..(419): unsure at all n locations
agaaactaagcttcggctctttgcacaatcctctttcacngatatagcacatcttaatctatcaggtcctacacatgaattgtgctgttggacatcctcataggttctcgattctgagcagcccggttcgtcttgtgagtctaattatgcttttgagcacaacaagatgagttgctacattagtataacatgtgtctactagtacatgaatcacatcaaagttccaagtatgagcagataccttctgacttatatggtagagcaccgttgacagtattcatgattccagggtcaccaagatcaataccagtacatcttacatatacaatcagtactgattatgcctgaaatgctcaaaatgaacatcaaacgcttgtcacacaatatctactacttcacaattcaatgcgtgaacagga

SEQ ID NO: 18820 - DNA, 397 bp, Oryza sativa
gacctacgtccaccatgctgaagtcctcagtagatggtggagtccgaataaagcgcatttgttctaactgtcatctgaaggggcactatagaactggatgccccacaaatccggagaacacatcgaagaacaaagtgatcaaggtgtgcacgaaatgcaagttatctggtcactatgcatcaacgtgtggtgttggtgtatagaagcaagtctatcgttgtttttaaatacaatcttgtaaaaatattcccatatcttgcgtgttgcacttggacaaggttttaattaaattcggatatgttttctatttcataattatgtcattcatcttgtgggatatacatgtatacgtgttcgctctgtcactcataaacctatgtgtacatgtacacctatt

SEQ ID NO: 18821 - DNA, 346 bp, Oryza sativa
  unsure (1)..(346): unsure at all n locations
cttcaattaccaacattccaatcaacttgtcattctttcttactgtgattattttgttcagtaaatctggaagaccactgataaagaagatgtctgagcgcataggcaatgcacgtcctagacatataagtagcaatgcgcagctagactctcctggtaagttcttgccgtactattatgtacatggcttccattctttgtgatcatgacgatttcatactggtaacatttccatgcaatcggaagatgatcatgacgagctccttgctgcagcanattctgctctaagtattggtttcacttgtgacatcctttcatttatctagatatatatatctggaactat

SEQ ID NO: 18822 - DNA, 461 bp, Oryza sativa
gcacttcaacaagacctgtgatccccagctctctttgtatactatctccgagctagaggagaagggtggatgcaaagccatccgcttgaaagctgtcaaaaagaaagcggtcgtggcacccctgtaagcgcccctactactgagatgtcatcgagcataacattcatgacgtctccaaccctgatggtcaagtctcagttgccactatgtcaagctgcttcctactggctagattcctgtgttgtattgggctgtccctattatgtacctctcttgctgtgtgtctctcatcgacgttgggagtgtttctgcgagagtagagatgctgtgcccttttggtcctatgtcacaagacaatgtttacctgtataactggaatgtgagaggcttgaatgccaaagtaaagcaagactctgttagaggttgcatctagcaatataaaccgacgattgtctgttaca

SEQ ID NO: 18823 - DNA, 356 bp, Oryza sativa
  unsure (1)..(356): unsure at all n locations
cgacatatgagtaaacaaccaacacacagaaatacttgtttgtttttgagttcangcagaacactgcttgcttctatacatgttcctgaaaaggaagttcggaattcaacctgttcaaaattaataaaatgagcaaactctgtttggtccacttgcattactcaattgaggcagtagcagaataaatacgagtgtgagatatacaagcgaaagcagcgatcggtactttgtgttcccaacacatctgctgcgcacggaaaacggagcgggccattagcgcatgattaattaaacattagcaatttttttccacaatagatcaatatgatatttttaagcaactgtcatacagaaac

SEQ ID NO: 18824 - DNA, 450 bp, Oryza sativa
  unsure (1)..(450): unsure at all n locations
agcttgattattacgtcgaggtttatatgattgcgaagaagctatagaattgaggtttttacgtgggcttaacaaagaaattcaggatatgcttgattgtcaaagatatacatctctttctcatttgttacaacttgcttgcaatgctgaaagtaaaatagaggaggacatgaagaagcaacatgctatgnttttgtcttctattactaaccatttgcaggaagtgcataatcatgaaaaggaggagagagacataaaagagccgccagtcccattgatcacactcaaagtcgaggcacctccatcatctgaagagggcatcaaaggtaaacttaatggtgctaacattaataaaggggagtgtgttgttaatgaattgaatttgttcactttccatgctatagcagagcaaccattagtggaaccaactgctgagattcctttgtcaca

SEQ ID NO: 18825 - DNA, 306 bp, Oryza sativa
  unsure (1)..(306): unsure at all n locations
aaccatgccattataattntgcacaatttaagatatgacatcctgacccacatgtcattgactcatgtgtgtcctacatgtcactgagataccgatggcatatctcaaactttacaaaattataatggcctggttccaatttaccctataatcaaagggctcttctctttatttcctgtgtgttcaattcctataggactggaaaaacatacaacttcaattcctacattattcctattcctggtgttttcctatccattggttcaaaggggcgccttacaaccataatatgcagagttatgtgtc

SEQ ID NO: 18826 - DNA, 457 bp, Oryza sativa
  unsure (1)..(457): unsure at all n locations
agcttaggcctgacggtactattgaatagttcaaggctcggctcgttgctaagggctatactcagaaagaaggcgaagatntctttgacacttactcacctgttgctagattgaccacaattcgtgtgctactttccctagcagcctcacatggtcttctcgttcatcaaatggacgttaagacagcttttcttaatggagagctggatgaggagatctatatggatcaacctgatgggtttgtagttgaaggtcaagaaggcaaagtgtgcaaattgttgaagtctttgtatggtctgaaacaagctcctaagcaatggcatgagaaatttgacaaaacattgacatctgtcaggcttgcagtcaatgaggcagataaatgtgtgtactatcgccatggtgcgggtgagggagttattctgtgcttgtatgttgacgacatactgatatttgggac

SEQ ID NO: 18827 - DNA, 414 bp, Oryza sativa
  unsure (1)..(414): unsure at all n locations
ggctaacggctatcgggttcgcctttntccttatgacatgatgaccaggcaacagctccgtcggtcgaacttttttgttgtaagttgccgaagtgcctgtggcatacttttgcatgtgctcgagtgcttcgactcttaccccctccatgagttcgagtgacaactcgcgcccctctttgcccccagagaatgtcacccttggtgagttagcccctagctctgttggggtcattgcctcatcgccatagagaagcataaacgggctgaacttggttggtcttgtgggggtcgtccgaagggcctatagaacagatagcatttcctctggccatttgcccttcgctaccccctcaagccttttctttagtacttctaggaatttaccatttgtacgtttcgcccgctccgttgact

SEQ ID NO: 18828 - DNA, 368 bp, Oryza sativa
tgggcatacgccgtgcgcacactggcttaacacatgtgctaaagtccctataagacacatggtcccaccacacctggaaatatatggcatatgtggtatacaatccgagtaaattaactcataaaggatttaccaaccgactgaaaatagaccaccaaatataatcactctaaccataccattggtcaacaataatgcacactgtcgtgtaacatatcactgatattgtgtccaaaccattgcataataacccaaacagcaccatgactatataaaaaagtcagcgggccagctatataaatgctttactgtttgacaccttttaagatgcattgtaccaactcctaaaaagttgaatacatgcggta

SEQ ID NO: 18829 - DNA, 294 bp, Oryza sativa
  unsure (1)..(294): unsure at all n locations
aaacggagggagctatcaacacgcaccctactactaccatacgtaaccttaacctatccagctgacactttgctatcaaactataatgaatatttctggacatatcatgaaatgcactagtacctctttgatcaaccgctccattgacacaaaccctctttgatgctaaataacccgtgacaacatgaatggcattacccactttatcacctgccttctactcatctactctcatgatcagatctagaacatcggctgcacaaacaattctttgngctcccatgaatcgctatc

SEQ ID NO: 18830 - DNA, 318 bp, Oryza sativa
gatagcgcacggcacatggataatgcagctcttatttgtttcttatcctcttcccgggcttggtgtgtggtgtagaccggcattgctaaataagcgccgcactatcaagagggggctatgaaacgaacttgtggatgatctatgcgccatactattccatatgcatgtgtgtgcatttggtgggcttgtctaacacaccgtggtgagttttctcaagccctatacaaagagagatgtgggcaaatcctataggtttgggtagccctatgtgggtatgttcggcggagtattccttggagagtgagccctttctccctg

SEQ ID NO: 18831 - DNA, 182 bp, Oryza sativa
  unsure (1)..(182): unsure at all n locations
aatcaacccacagaggaagatgtgcacgtgacaccggacannaacgacgcagcagcacngcgcgcagacacgcacaattccacccgcaacacgcaacgctgtcacacaggagcccccaaaacacaaaacaatcgggacccgggggaagggagagacagaagacgaaaacaagcccaaagaac

SEQ ID NO: 18832 - DNA, 461 bp, Oryza sativa
  unsure (1)..(461): unsure at all n locations
agctntatatagctgtcccgctgactnttttatatataagtcaaggggctgtttgggtttttaagcaattgattggatacaatatcattgcttttcgccacgtaagtgtgcatttttattgaccaatattatggcttacgctgattatatattgtggtcattttctaggcgggtggtaaatcctttatgagtctatttactcggagtttacaccacatatgccatatatttccaggtgtggtgaaaccatgtgtcttctagggacttaagcacatctgttaaagcagtgtgcgcatggcgtatgcccaatactttggaaatttctttattcacaatatacaagcttctttatagctattttgctatatcactcatcatattttacaaagcagttggtatatcactcggatcatgttatttggaggattcacaccgnatatgctatatatcgatatcaagtc

SEQ ID NO: 18833 - DNA, 460 bp, Oryza sativa
  unsure (1)..(460): unsure at all n locations
ntgcttgtgtgcttcgcgtagcttctgtcgttccggatgttccctaagcgtggttagcggncgacgccgaatgttctgaaggccgttctctctgagcaaggcaagtcacatcatccttgagcatattgaatcccagtttataaaattattttgatttaaattaatgcattattgctttatttaaattcccgcgttaccattgttttatttagcattacctattaatccttgttatagccttattattgcaattggtattatcaccttgcttaccctaggcaaacaaaaccccaactagtgggtactctattcatgggtccactagtatgaatatangtagatgcttcgctgattaattaagcaacattacgtggctttataactctagactttgngaatattcatatcactcgaacactatggaatggttggatactgtggattggatgccactcccctc

SEQ ID NO: 18834 - DNA, 474 bp, Oryza sativa
  unsure (1)..(474): unsure at all n locations
tcaccgtgtgtcacctcttataatgcacaccaactcttaataatgtgagtaagagcggtataaaaggatgttaatgtatngggcactcgatcacgcacactttggcctaagcaaaaacaatgcacaagtgcctaatagaacgtgactatccacacatgaaaatatgggctacacggtgaaaacgttcatggaaatatccgatcgaccgagcgtcatttccgtataaggggtaccgcttctgaccggaaccgtttctggctattttaaaatatgattttctaatttctttctgcatcatattaatgttgacactgaagagtgtaaatgatatatatggtcaattattggccattcgagcatcatttgcgaagagatgctatgcgatcccatcagttccaactgtttccctatagacatactaggcctaggcccaaatatgcccaccgaacaccctaaaatatgacgtgtataaca

SEQ ID NO: 18835 - DNA, 175 bp, Oryza sativa
  unsure (1)..(175): unsure at all n locations
agggcagattttactacaagagctcaactaacaaggagtaacaaatgccacatatcaccactaacagataatcacatgtatatatcatgcaaacacgctatatcactctagtcaacatatacnaagagcatgccaaacacaaacacgcgtaaatatacacccacatcatccatat

SEQ ID NO: 18836 - DNA, 451 bp, Oryza sativa
cgctagcggcggccgacggctgacgatgagaaagctggcgtttgtttttataaacttgcggatggcatctccatgcttggcttcattagagccgaacttcttgctctccctttgccatttgccctcctcctttcgaggctactcctttctccttgaggtggccacctctatcgcgccgactgatgattgtggtgactcaatacccttggtcggcttatcaagtgccttccggatcaagaatatcaagaaagaaacgccgacgtgtgtatatatactgtgagtccgcacactaacattatgtgaatccatcacatacctaatataggtagtcacatacttaattacccctaattctccttagtaccccactatgtgtgtgtccaccacatcaatttggtatgcatctaatatgtgccacacatattgggaaaaaacagggctatacacaact

SEQ ID NO: 18837 - DNA, 395 bp, Oryza sativa
acccagagtctacctgatgcatgcaagcttgttcctattctgcatatattactttttcttgcatacgctggatgtgtaccgcattcgctaataaccttcgaggcctcttccatgtctaaaagtgaatgtgcaaagggtgagcacaaggtcgaagctatgtccattaacccttcaggcgaaaaggctgagagtatatcagcttggtctagaggcccaaggaatgctgataagaaatactacaggcggaatacacacctgagtgatgtgtttaggcctacacgacgggaggacaacaggagagttgctatagatgtcgagaagcccgcgcaacatcgtccaaagcctgatacctggcgtaagccagttgagtcaccatagcctgaggttgttgcacc

SEQ ID NO: 18838 - DNA, 363 bp, Oryza sativa
  unsure (1)..(363): unsure at all n locations
acactataaaaactcaagcttctttataactatntcgctatatcactcatcatagtttataaagcagacggtatatacaccggatcatgttatgtggaggattcacaccgcatatgctatatattgatatcaagtcacttgagtgattaccattatcaaaaccactccgatggtgggagtatttatatcttgactatatgcttggcttggtcaattaaccacattgacgggggctacacctattaggtgcatctagtcagtgcacctgactatatatttcacccctccacaggcttcagaatagctacaagtactcgggagaccatggngaagatgattgagcactctgctttggagtaatct

SEQ ID NO: 18839 - DNA, 418 bp, Oryza sativa
  unsure (1)..(418): unsure at all n locations
acataatttcaaccctgcgatatgaaatctgatcaaagatcccatcagtaccctgcaatactaaccaggataatttaaatcttaaaactccgttagctccatcctctcttccaaattgcagtgtatggttatctgttggcacacttcgcggtcattcacaatgaattttgacattataatatgagaaaaattccctatgtgctccgcgttcgctcaatcccttatgtgcacttgaatattgcctcatctcttatatgctcccgagtatttattttgatctcctctatacccatctcgntaattgaccatgagttgacctaaatgtgtgtcaaaatgactgtattgcccctttgcacataagtatagaacagagacactatagtcattntaataaaatctaacgggcaactaacttaat

SEQ ID NO: 18840 - DNA, 246 bp, Oryza sativa
gggattcgcccgaggaggcagatcgccatcgtatacccagtatccccgcccagccgcttgacgcgataacagctgactatacttaacgaccgaaacaacgccgatcatcctgcgggcttctgcttacgcctggtcgagggtcaacactgtaaaagtagagcgtgaagctccatcagaaatcacatgatgtgaaataacaaagcataccagcatataccaaaagaacagtcttactgtttgccccct

SEQ ID NO: 18841 - DNA, 396 bp, Oryza sativa
actcagctggaatgataaagagaactcctgaatcaatacaactattgctggtacagtgttgacagagaacatacccatcacaacgtctggagcatcctgagcggtttcagcttgaatgtgattcacacgtcctcgaccaaagtggttggaagcacgagaaccttgtccacttgtctgagagctacgacgagactgagctggcgctggagtaggagctctggacgggctgccattaccatgccctgagatggtggtggcaggattctgatgacactgtctagcatagtgacccatttggttgcaccggacacactgaactgctgacggtccctgtggtgacttgaacgaggtaacactgtttggcgcaatgatgtcactatgggcactctgctgtgg

SEQ ID NO: 18842 - DNA, 410 bp, Oryza sativa
ggagctgcaagattgtggtatctacttgctgtcccgtcttatttggcaatatccggcctgtgctttcaggtatttaacttattaagaagaagataaaaaaaagcttacgaactgaactcttgtgttgctgctcctgaacatgcatgaacaccaacaaactttgagcaactatgcaactaaaattgcaggtgtggcaaaaagagcacgttggcaaattctggcggcatttgtgaacatcggttgctactacttgtgagggatcccatctgaggatctctctggcttcaactaaagcttggagcattggtacgatgattctcgctgtactcctgtcttagccctattgatcagcacttctattaagtacgactatatgtttcttcaactttccacgggatatggatgggcat

SEQ ID NO: 18843 - DNA, 371 bp, Oryza sativa
  unsure (1)..(371): unsure at all n locations
tctagtcaggctcatccttccggaggaagctacccattgtatgtctgatgctcaaaaaaaatccgacggtcaaatattgctgctgaccaacaaatgagacattacgttatatattgtgaaacaaaaaaactagcaagtgaatcaattaattattctatgacacatgatgaacaacaccatgttacatgtcgctgccacgtacaacaaccagcattaaccgatcgaaacatgcggnttctttttataaaatataatcatgtgacatcttgttggcaatatttaattaaaacgaatacaatggtgtgactggatcatatattgcatagaatatctaagagaacaagtattttgaagcttactgaatacatgct

SEQ ID NO: 18844 - DNA, 250 bp, Oryza sativa
  unsure (1)..(250): unsure at all n locations
ccagagtagaatacaggaaaactctntgtgactctgttcttcaaattattgaattggtcgatacaaaattctttacagaactcatgcagaatcatcttcaaattaaatgggaataattccttcttaagacggatctatttgttttgctagggaaataatcatatagatctgaaagcatgagagatgaatatgattncataatacacacacaacttgcttgtatgtaatggatgaacttaacgagccaatc

SEQ ID NO: 18845 - DNA, 362 bp, Oryza sativa
tctgagatatattttgtccgcgtccgcctttttttcctatctgttttttccatcacgcttcgggttggattcttcgatctcatctgatctattgcacgccgccgccggaccaaaacctagcattgtcgccacatcatctccccgtgtgttttatccccctattgagatttgtggatttgttccaattttgagaaaaacggaaagagaagatcgaatggataaaaagccctcaaccaatcttgatagattaagaagaaattggctggatttgatggggatgaacggctccggcatatatgcaagagactatctaaaggtcggagatggcagtcggctgtgtgagttgggcctatggctccact

SEQ ID NO: 18846 - DNA, 452 bp, Oryza sativa
  unsure (1)..(452): unsure at all n locations
gcttgttaaatctattcaagttctattctatttngcccgaagcttctcgctacaaaaacagaattttgctagaagaatttggcgatttaaatttgccgaacccggctaagcaagggataatcggatgtaacttttttgtagacgtccgtggatatattataagcctaatttcgagtccgtatgataagatatgactgtttaatgaaggcactcgaacaaggttttattacctttctagtggcggcaggatacatggcatatcacaaaatctatcggcaacagatcaaacacaaatagaaagtgatttggtgggtgactgctacggtggcgacggtggtggcatgaactccaaactctaatcgtctatcactaagaccagctaattaacacaaccgatgcaatctaacactcaacaagccttaactaagcagaactagtataaaagcacaatg

SEQ ID NO: 18847 - DNA, 461 bp, Oryza sativa
agcttatcaagtctactttcaaatggattcatccacatgtccatatctgttctggagcggccgcaattgtcattttactcccgactattttctgtccatggtgctgcgtcacctcttttggcccaatgggctgtgtatccatgttgggcccattaggggcgcgtcctatggttggagcacgaccctatggtcgttcttcccctctttttatacctctagtcgccgccaagaacaggcgggttttgatgatagagttagcttcttgctaccggctcgcagcgcgcgtgttggctaaaccgcccgtctgcctgtaatcggaaccccaccatattgtgtttgatagtgaaactttcatctttatctagcaatttcagtgcttgtcctacttgttcttgcttggtcttcgattgcttgcaggacgagtgccctcgtggccgggttgacgcgcaccacaagttcgc

SEQ ID NO: 18848 - DNA, 394 bp, Oryza sativa
  unsure (1)..(394): unsure at all n locations
ctagcatcatcacgaggcatagaagctatttttgtatttatcacgcgatagagaggatgtgcccnctacaagcttatggatgtgcaatgcgtcactggatgcatggccgccctcagtcgattcatatcgaggctgcgagagagggcgctacccctattataactcctcaagcgctccgggccatttgtatggacagaggaggccgagcaagccctcaatcagttgaaggattacctcacctcccgccagtcctagatgccctatggcccgaggaaccccttgtgctctacttggtcgcgaccccccacgctgtgagcatcgccctcgtggtggaacgcgatgaagaccacccgcgaaccgtgagcccgcgtncggcacccgggcggtccgacca

SEQ ID NO: 18849 - DNA, 138 bp, Oryza sativa
ataataactgcaggagagtcttatgatagaataattgagactagccacccgaattgatattggcagtttctagtaaaaaaaagggcttacatggtgacacaagactacatacacttggcactatcatcaatttatgcc

SEQ ID NO: 18850 - DNA, 446 bp, Oryza sativa
ctatagaatactaagcttaacaggctacaaacacagatcatttgccgttacccttcattgactaaatgttggaacagctagcaaatcattcctttttttgtttccttgatgtgtattccgggtaccatcaaattcccatccatccggaggaccaaagtaagaccacgttcacatgtgcatatggcacctatgcatcttttcaaaggtgtatgatgtccattttttctgatatgatcgaagaaattatggaaggcttcatggacgatatctctgtgtttagaaagaccttcggtcattgtttgcagaatttggataaggtcttacaatgatgccaagaaaaggacctagtactcaattgggagaagtgccactctatggtctgcgaaaggattgttcttggtcatccagtgttcgagtgaagaatcgaagctgatcatgctaaaatc

SEQ ID NO: 18851 - DNA, 378 bp, Oryza sativa
ctcgagctttctcgagcctaactcgtgtgccctcaaataaccaatacagatgaaaggaggctgcatgcatgcttgtcgagtactactagtactagtagctttttcaaacatgatatgacaactagtagtactattaaatagagctgcatgtatgctagtaggactaataggatagtgctgtagattaaagaagtattataagctaatgtttgaacggtgcaaatctgctcgctctgagttttatacagctttacattgggagaacgagatgtactatttggtgcattgatattaagagagggaatctgggtcgaaagctattcagctctgttgtaagctcgcagctgtagcttgctgagtcggtcaattgtgctatta

SEQ ID NO: 18852 - DNA, 447 bp, Oryza sativa
tattaggaccttaaaactcagcttggagaagaaacttacgtggagtcttggcttataccccatttgagcgcctgtgaagaatgagacgcaagaccgatattccgctgctgattattgttgatagacaggcctgaagcgcctttgtaataatgtaaatattatcgatataataaagatgtgcctgctatatcatgtttgtgtggaggaccccggcttttcctgggacggtgattaatacactaccgttcgggaaaagggcaattttccggtcgtgacaacaatggcggaggtgatggtgaggatgatgacgcaagtgatgatgggagtcctctctatcccaccatccaatttatgcttactcttaggaatgctgagcaatacactatcctctgacatcatgatcaattcctgacgcctaatgatatgaatgatccaaggttcatacac

SEQ ID NO: 18853 - DNA, 400 bp, Oryza sativa
  unsure (1)..(400): unsure at all n locations
agctntaggatgagactctctgtatgatgtttcctgccaaaacgcttcacattgctcgtcccttctgcgatgcggcgcgcgcgggtcccgatctcacggttccccgtgggtgccgcgcgtctaggcatgagtggctgcatctacgccagcgtcaacctcgagttccggggcctcccgctgtcccattctatccacgccgagcagttcctcgttgttacgctgccgacgtggggaaatcgaaactttgcgccatcgccatctcccacatgccctgcagccactgtcgccaaatcctccaggagatcctgggctctggtgggatctgatcattgtcacctactccgacgccaagtggcgcacggtgacgtccctcctcccgcgtccctatgggccccatgat

SEQ ID NO: 18854 - DNA, 388 bp, Oryza sativa
  unsure (1)..(388): unsure at all n locations
ntatgtatctatcgcagaacttggacttcatgttctgtatatntaagcacgagggggacattgtgtgtcaacaatgcaagctatctttcctgatttcagtttttcaaaggccattgaactggcagaagttctttctgaagctggatagcctgtggtatctgtatccaaacaaatagttgacagtttcttgaacgcatatccttcagatcatctcttgaatcctcatctgctgaggaatgtgttgatcctacggaagcgtggcttcagatatagagaagaagcaatacttgttctggagtactgcttgagtgacatgggagatcctatctttcctgataaattaggacgggttagctcttctttcttgtgccaatggatcattcacaac

SEQ ID NO: 18855 - DNA, 267 bp, Oryza sativa
tgcggttgagaatgaactataagtcacacttacgtagtcttattttgacataacacgtagttatgataactcatgattaaacacgggtctatatatgcactatggctggagatacaatctagtctttcgttgtgatgttgcctgacctaataatgcagatgactgagatgatgactgcctaagatagaaacgagctctatcctctgtgatgactaaccttactcatattttacaacatcattgtggaaatgtagctgttctatcttc

SEQ ID NO: 18856 - DNA, 472 bp, Oryza sativa
  unsure (1)..(472): unsure at all n locations
ctcaagcttgatttcattcttgccaacatggcgatgtccttggcttggtgttcttttatccatggtgtcatccattagcctcatcatagtgggacctattccttttcacatctcaaaggagaacaatagtctcaacaaatcggttgtcatccttcacttgatgaccaaccgggtgcatatgaaagatatggatatgtttgttgagttntcattaacatcacaagtgtcatatactcgtatgcaaactcaagtgcaaagatccgatataaataataggtgaacaacatggatctggaacatgcacaataaatgtataggatttgctccccctaaatatatgcatacaaataaatatacaagagatgtaagtgtatgcctaattagagaatgaccaatgggggtttatcctatacacatagagaaggcatatgtagtaatgatgtagaccaatataaaacatataccttcatga

SEQ ID NO: 18857 - DNA, 94 bp, Oryza sativa
tcacatgtatgttgaggtcttatcgtctgcagtagactccacatataaacaagctctttgagtatataggcaaacccaccttctttctggaaaa

SEQ ID NO: 18858 - DNA, 183 bp, Oryza sativa
  unsure (1)..(183): unsure at all n locations
ctcaagcttagtaggcggaggagtgatctgtgatatgattatggatactctcatatggatgaattnctatttcagccctcaattggtatctaacatttgaaactttgaaggaattatattctggtctaaccggaggtattggcctggcgctgctggtattacccgtcaatggttggtaccaaa

SEQ ID NO: 18859 - DNA, 402 bp, Oryza sativa
  unsure (1)..(402): unsure at all n locations
gaaagatctatttaattcgttaatctctatatttatgtggccagataaaatatcattaaatactttgcttaattctataattcctagattattctgggatttatttgagctaaggaagtatttttaataaatggaattgcatttcatgaataatttaaattgaaaaaggttttaaaaagtcttcttttggctttgggccgaaagccggcccaaaaccctctctctctcttttcctcggnccagtccggcccagtccgccgagccgccactcttctctctctctgtgtcgctgacaggtgggtcccacctgtcangttcgtntttcccgagccgccgtcgtccggtcgaaccctatccgagcgccgtcgccgtcttcttccaaaattacgtcgctccttttca

SEQ ID NO: 18860 - DNA, 150 bp, Oryza sativa
agcaccggtactaaattgaccctgactgtgctcttctcatgtgtgcagcactcatcgagcaaagcttttacccctacatgtctggcgcagtactgtgaaagcctaaagcatcttgtactcgtctgtcatgtgaaatcctattacttttac

SEQ ID NO: 18861 - DNA, 323 bp, Oryza sativa
  unsure (1)..(323): unsure at all n locations
acctatgctaaagtcttgttttttttctttataaagcanccggataggtaacttctatatttttctatattacctctgatagatttttatttagacctcattttcttacctttgtgaaagaccaaatttttgtggcttcctaaaatttaaaagtatataaaatctattttccactcctattctatctgcatcactcactctctctctcctctatgcgttgggacccaaccattgccatgtacacccgtcttctccatgctagcattgtcctctcctcccactgatcaccactaacattctctcattctccgagtgggagggga

SEQ ID NO: 18862 - DNA, 139 bp, Oryza sativa
  unsure (1)..(139): unsure at all n locations
tgtacatcactctgaaagcgagacacatatacggtcagatcctaagtcacacacttacagtgagtgcatatcataattcgatcttcagggttggatagctgctantntactacataaatagtactaacttcataataac

SEQ ID NO: 18863 - DNA, 449 bp, Oryza sativa
  unsure (1)..(449): unsure at all n locations
acgttgatcaataagctcaacaatgttttattttactttgnncttcncaatcaccaatttttcagcttgcacctgcaaatttggtgaatatgctgagatgacatataatgggaagcaacttctgattaacataaaggatataaaatattgcatagatttctgtaatttgatgttcttattcaatccacttcatcagaacaattagtcataaagcttaatttgtctaggcctggtacaaaatgtgggtaaaatattgattgttatctttccataaatagatcctcaagctgaccatagttcactttgttgaaaaataaaattccccatttatatgacttgagtgagagtgcttatctgacctttggaaatgctctgcagtaactcaggtactcgtctaaaagttattcatatncgccttctcaatctttctgtatgctctgagcttcttt

SEQ ID NO: 18864 - DNA, 142 bp, Oryza sativa
  unsure (1)..(142): unsure at all n locations
aactgaaggctgtgacaccgtgctttgcgcctccagtgcactactgctgcctatcnccgatgtctcgagcctcagcacaatctcaactgcagggcaggtagtggctttgnaggttcctcttctcgtcaacttctcacatgcg

SEQ ID NO: 18865 - DNA, 309 bp, Oryza sativa
tcaggcaaagtgtttcaataacaacaggccgaggtcacttgatgctatcgagaacttcgaccagccgagagccgctccggatacatattttaaaaacatccaagaagctacgagcatgggagaaagcctaacgctggcgatgaccaagtccttggacccgaagaatgatattgatgctgttgaccgctttgctaacgggacaagtgaagaggctgcccctgaccctattagtgatgcgccaaaggccgatgacaaaatagccgctgatgtgggtgagagaattccagacaacgaccctaagtcagctgg

SEQ ID NO: 18866 - DNA, 160 bp, Oryza sativa
tttaggactacttcactatttactcatatacgtgacaataacgtagctatgaaacatattgttataacagaacagtcaaaaattggcacaccggcacataaatggactcacagatttgaaatatgagagacgtcaatagaatccctaagcaattacttgt

SEQ ID NO: 18867 - DNA, 412 bp, Oryza sativa
  unsure (1)..(412): unsure at all n locations
ggaaccatcagttcaatgcatgttaattatcaagatctattgatttnctgcgccctacgcgctaattagcgacatataatttactcaaacttaattcttgtacgacagctctatgatatctagttttaaatgcgtacagtttatttggtggtaacagcatatgtgcaagccagacttcttaattcatttgaacatgcctgcttatcccaaccaggagctggaattataagtactcttgactggtcatcactattgttttcatttgcgtacgggcctaaccattcatacaataaatattacagatatacttctatatttaatttgcttgttatggttcttttcaggatgtggntcagattagcctgtggtagcaagagaggaagtccatccattggatgagacttttgagaca

SEQ ID NO: 18868 - DNA, 386 bp, Oryza sativa
  unsure (1)..(386): unsure at all n locations
ctcaagcttcactgcacctctttacagcctcatactatttgttttcacttatttcaagnaaacagggagcataaattgttttacaataatcgcntcaataaaaattcgtgtacaataaaatgagcagtgttatgtgtatgtgcatgtactgcattatgaattcgccgattccttgttaagaatagagagaatctaccacataagaatagagagaatgcatattaacacttgagatatgtcacgttatcagtgtagtatatactgcatattgacacttgagatatgagaagtagaagggattctcaagccgcatatgtggccctcaggtagtctatgatatcagcgctctcgaacatcttgacccctgtgttaggatcttcgatata

SEQ ID NO: 18869 - DNA, 196 bp, Oryza sativa
gtataagatctcaggtttatctttgcgagccgaaggatgggattacactacagggccagatacttcttctcataacactgtgactccaccgtgagtgtactctgactacttgtcccaatactggaaagcagaaacaatcttccgtagatcttctgaatcgtgcataccagaaattccccgtagccctacacaatga

SEQ ID NO: 18870 - DNA, 425 bp, Oryza sativa
  unsure (1)..(425): unsure at all n locations
actcaagcttctagcttcgatagctgttcagataaatgataaacaaacgctttcttattattaattgataaataccataatattctactccctccattttataatccgtntgactatttttacaaacttcttcaacttcgaccaaattcatagaaaaataaagtaacattttttttacaaaacaaacatattatcaaaatatattcattttttagtataataaaactaatttagtgttgtaaatgttgctaactntttataaatttaatcaaattaaaaaactttgactaagaaaaaaattaaacgacttatagtataaaacggaagagtagtattctatattcttttgtcttaaaaaatgataaacgccttgatattttagtattctatcctcttttgtgtgctactgttacagggctctcatc

SEQ ID NO: 18871 - DNA, 181 bp, Oryza sativa
  unsure (1)..(181): unsure at all n locations
tgttgtgtaattcataaatgttacactaaaaggcttatcagcggattaaacttaactacacnggacagcgattaagttttcgcccataatttatgccaaacgccgatgaacagtgcaaatgcccgcacgccaatggtaatctgcacactctgccctgtccgttttttcccaacgaacgaaa

SEQ ID NO: 18872 - DNA, 374 bp, Oryza sativa
aacctgcaagcaaaatccaacggacccaactgagcaaccagcacagcaagattatcacaacaaaccaattcaggctagacacatgggagccactactaaaggccaattggctattcagggagagagaaggacaaaggggagacgacagaatttcatatgtgcattggaataacatgaatatcaatcggaaggaaaataaattatcaagcttacagctagctaggctatagagatgatatccgctctaagaatacactccaatcgtcgtaaaaaatatgacaccggtactttttagacatagcattcgaacagttatcttattaaacaatcaactggaaatatggaaaagaagtataacctaagcctcaagcacc

SEQ ID NO: 18873 - DNA, 121 bp, Oryza sativa
tgctctatctatatctgcaaagagcttcttgtctggtggcttgactgtacaaactgtctctttggaactgcgtcatataaccgatggcagatccgatctgctgctgaagaggaaatctctt

SEQ ID NO: 18874 - DNA, 458 bp, Oryza sativa
  unsure (1)..(458): unsure at all n locations
tagcttgttaggataaacagtcaaaccgaggcagaccaagcttttctgtttcgatatctaaccctatcattggccgtcactaaatagttataaatctgagcattcacatgagtcaaagacttaaactcgagccgacagaatagaaatctaatcaacttatagctacaccaagtttgcctctttgcgatcttcatcttaccgagataaaatagtatcctagagttttcactcagtattggaaggttctataaatacccttgaggtctatatatattgcctatccaaataaaaacagaaacgcaacaggttgaattataattgctacaacaaaggtagtatagtacatatgtgtgtacagnacgtagcaaaatcttgcacacatccttccggtgaagattaacactgcagtacagagggccaacaagcaaattcccagttattaattacgggagacaatt

SEQ ID NO: 18875 - DNA, 161 bp, Oryza sativa
ttgtgggcctttatcttatcttatctgagttgctcacatcttttgatgttaaattctatcttacatcttagttcagtgaacacgaagttggtctcattatcatgatataaatatttgtcttatgcttcatgccgttgagaagttataggaaagactatata

SEQ ID NO: 18876 - DNA, 376 bp, Oryza sativa
  unsure (1)..(376): unsure at all n locations
aacacctaaattcccgggacttgctgagtaccaaagtactcatctctttttctatattaatanananananatataggtcctccgcctcgaagngaagatgaagtgaagtgaagaataaggtttcgtcctggttcccagccttcgccttgggtgttgggtgttagtccggtggatccgctgctgctgctggtgttggaggttctcgtccacgtcgtccggtgcattctcgggctgttctgagttgcaacctaagttaaggtaaataagtcctctatttattttaaggattgcaatgattcatattcgtcaccgtgggtaccagcgctatgtcctgngactggtactgagatcgcggtttcgtaagaagcggttcgc

SEQ ID NO: 18877 - DNA, 481 bp, Oryza sativa
  unsure (1)..(481): unsure at all n locations
gcctctagcttcgangcctctcttctctgactgaaaangnaccntgtttatatcttatctacaaaaaagnggaccattagctcaaagaagaagaggnggaacaaagtcagctgaaaggctaaaagaacaacacagcccctgacatttccctgaggcttgaggacttcttccctgggagtcatgtcaagttatataaggagtgcaaacatatgtatccattctattataccggagtctttaatggtccagattgctccttgtagaatcctatctactcgactcaaagtaagcattgttcattaattcagagatacttctagaggcgtaagacaaccatattttcaagtgtaaaatttaatatctcgtatctataagtattttaggtatcaagttgaatgaaataatttaatttgttgtcgctgatcaatccaatcctgtgtataaaatanacaattcatgcatggtccatagntcaagacat

SEQ ID NO: 18878 - DNA, 404 bp, Oryza sativa
taaaactcagctgagacttgttgggttgaggatttgccagttttttttttttatgtcctttgccataagatgtgggactggccctttgtatgcccagattcctcatgatcgagatgaagagaagtgccgagtcaaagtcaccttgaacagtaatagtgaagatatcccatcagggatgttcgaagctggaggaggaaactacattcatgcatgtcaggaggtggcaaggatcgccataagagagctccgcgatcgctacagtgattatgtggccgacactgagtatcgctaccatcctcaccaaccccagggaagtgaccgtggcagctaccttgagactgaggggattgagaatgatgctaccacaacgcatttggttgagatgctgtgggctatggatgaaa

SEQ ID NO: 18879 - DNA, 313 bp, Oryza sativa
ctacttcaaacacaactcagctactttaagcatgttggggtgcaactgttcttgctgaataacaaaatggatgtgtactgtcttttgcaagttatgctgccaaagcatttgagcatcccttgatgatgctgaccaagttgccagcaggatcttttcaccaatgtactgggaccaattgaaaagtttaactggaattgacctcctaagaaggattttgggggtacagacttcagtgtggtgtacaaaacaatctacagagcaaggtgatgtgatctggacccatcttggtttgctgccttttgttattcgggat

SEQ ID NO: 18880 - DNA, 354 bp, Oryza sativa
  unsure (1)..(354): unsure at all n locations
caccaagctgcagggnggaggagggccagggattcctggctgagacggtgtcgtgctttcttttacaacgctgncgttcacgcgctatgtggagagttcacgatgtgggaagtgttctcggttgtcaacgagatggtgcagaagggattgcaacccactgtcgtcacttacaccactatagtcgacgcattttgtaatgccacggagctgacgatggcttgtgcattttggctatgatggaaagatgggatgcactcaaatgttctcacattactgcgtaggtgaatggttcttgactactgcaagtcaatcgctctttcatctccctttctatcttcccctcttcccctctct

SEQ ID NO: 18881 - DNA, 474 bp, Oryza sativa
  unsure (1)..(474): unsure at all n locations
gggctccaataaagaccacaagataggccgatagctcccccttcttgttttgaccagaagcgtgaacgcggcaaggggaaggtcggngagttggcgccggagccaaaaaggggcaaggctgcgacgtcgatgccagtgagcaaatcggggaaggtcgtgagggcgccagcccaatttgagctatgcatgccattggtggaggacaatgtgttagctgtgatgggtattgcttgccgagagctacataagcaatacatggagctaagcaatgccaagcggaaaatgagggagtcatccatagttggacatcacgaccaccagccgttcctatcgtcgccttgctatataactataggctttgatgacctcttcgaccttttcaggatccggaagttggacactggtcttctaaaatgctactcctttgaagtgcataccttctatacttgtgatatgactggactatatctccta

SEQ ID NO: 18882 - DNA, 62 bp, Oryza sativa
cttgtcgcgtggatcttctctttagcaaggggaacattgcaccacgatggacataacaaaaa

SEQ ID NO: 18883 - DNA, 428 bp, Oryza sativa
  unsure (1)..(428): unsure at all n locations
aactcaagcttcatcagctttcttgctcacacgtttatgctgctgccggngattgttgtatatcttctaacgcgnacgnctcaaattatttcatgaaagaagcaatctttcatacatggagtgaggagatatatgggttcgggatctcaagatcttacacaacgctgagtgcccaagatttttatattccagatccatctaagttaagggtgaaaaagggtcgacgcccaactagacgcatcagaaatgatatggatgagtcagaagcaggtgggaggactttacgctgcagcaagtgtgatctgcgcggccatacttacaagatatgcccgaagaatgctgaagttccaagcggcgcagatgctagtccatctggacaggcatgtgatggtaggcgaccacatggtgaaggaacaacaagcacgcgc

SEQ ID NO: 18884 - DNA, 432 bp, Oryza sativa
aactcagcctccatgcaattctctctgtcttgagtccggacgatttatatttgttgatggacttgacgaagccaaagagatatgggatactttgcaattggctcatgagggatcacccgccgttcgtgaggccaagattgaattattggaaggaaggcttggaagatttgtgatggatgacaaggagacaccacaagagatgtatgataggatgatgattcttgtcaacaagattaaaggacttgggagtgaggacatgacaaatcactttgtagtcaagagacttctccgtgcatttggtccaagaaatcccactcttgtatcaatgatacgggaaaggaaagacttcaagagactcaccccacatgacattcttggaagaattgtgtctcatgagatgcaacaagaggaagctcgtgaagtgaggcaaat

SEQ ID NO: 18885 - DNA, 364 bp, Oryza sativa
  unsure (1)..(364): unsure at all n locations
gatgtatgcattacctgcaattccgaacatccccaatacatgagactagtcgcaacacatgagatgagtcacagcccaatttttctgttctttcaacattggggcaaccgctccaaatactaaaaatccctatgcactctcgagcccttcatctgaacacgctagtcatgacggaagtcttggacaccgaggttaaaggaaatgaaagcaagaaatggttcattttactcaacatgtcattaacacacgcactattctctntcttcattctcaatgcaacacaacacatgatattcacaaccggccatgaccgaggtgtcgggccacaagaatcacctaatccactatggtggtatttgatatg

SEQ ID NO: 18886 - DNA, 218 bp, Oryza sativa
tcaaacgcctaaaaccacgggaccaccacagaaaaaatttttcaaccgctatcaacgaatatagtaatggaccacatccgaaacacggcatttgttcaaggacaactcggtgactacctgccccccggggactttgtaggatgtgaaagggaggaatctgtgagggtgattttggccaatgctctgcgagaccgcggccacagcgggcatcgtggaac

SEQ ID NO: 18887 - DNA, 447 bp, Oryza sativa
  unsure (1)..(447): unsure at all n locations
ttggtcacatgcaccgggntcaacccacatttagagtatgaatatttatgaaggcgaacatctgctcaggaaattatcacattgctgatgttgagccattcatgttttgtttggctacgtacatcccaaaaataagtaaagaaaagaggccttgtaactatatatgtgtggcaatgacaggaaataaatcatctgcaagcagcatacaaaaccaagaacatgcagcatataataacatggcctcttgttgtggcaaactttgtttctggagacaacaactctgggtgacatcaaaaggaccttataacatcaacaaaattcctgaaaatgctggtaggtgagcacttgagctggtacttattattgtacatgatgtcagtaagcatattgatgaaaaatatcacaaaaccattatattttatcgcaagcaaacacttctatgccctc

SEQ ID NO: 18888 - DNA, 241 bp, Oryza sativa
gctagcatgctatggttactctatctcaactcactatactaccagcaaagcacgctcctgcaaggaatgtagttctcgtgctctccacatccatcactaacggttcttgctgacttgaacctctgccttaaaatatcccatcgtcagcaagtcgtagcgacaaattatgtaaactcttactggtctatgctaagtcatgtgaaatacttgtaaaaataaacatttaattattttaaaccgc

SEQ ID NO: 18889 - DNA, 435 bp, Oryza sativa
  unsure (1)..(435): unsure at all n locations
tgcccgcaggtacaccaaacacgcacttatcggggtttagttttatgctggcggagcggaggttctcaaaagtttccgctagatctgagagtaaggtctcttggttgcgcgtttttacaaccaagtcatcgacatacgcctcaacattacgtcctatttgactacccaaagaaattcgagtagtacgctgaaaagtaagacctgcattctttaacccgaaaggcattgatgtataacaataggttcctacgggggtaatgaacgcagttttttcctcatcctccctagccatgcgaatctgatggtaaccagaatatgcatctagaaaacacaaaaggtcgcaccccgcagtggagtcgacgatctgatctatgcgaggcagggggtaaggatccttatgacatgcctngntaaggtcggtgtagtcgatgcaca

SEQ ID NO: 18890 - DNA, 164 bp, Oryza sativa
  unsure (1)..(164): unsure at all n locations
acacgagctgcactgcgagtccaaccactatcggcactagctcgatcgagccaaanccactaactgaagaagtcttgtgccgtttacaccatcacactaagctaatactcattgctacaagaatcagaacgtaagatgactgatcttaccgaggatgtgataca

SEQ ID NO: 18891 - DNA, 434 bp, Oryza sativa
  unsure (1)..(434): unsure at all n locations
cattaaactcaagctttatctttgcactacaaaatctttatatggcccttgtttgatcttttatagtcaatgggnagaccaaattcagaaatagcatcattagctttttgcagaacaaaaacagggagcccaatttacctataaggagtgtcaccgccaaatttcttctgattcacatagccagacataagctcgatataagcaccaccacattcaatatcctgctcaatctttatcgaatactggaccaccaatgtccggttcttgttactgaattctgggaacttggccgatatagcaaaatgcttagcatccgaaggtgtttgtatacctaacatgggttcaacacagattaccaacatgattcatgacataattcatagcacaaataatgctctaatcgtatggcttgacagtngaaacatgaggactga

SEQ ID NO: 18892 - DNA, 354 bp, Oryza sativa
  unsure (1)..(354): unsure at all n locations
catacgcatatgtntacaatgccaggatagcacagagacctcttactcctgaatatatgataacttggcacccttttaatgatatattagataggatggaccttacacctacccaagaaagtaacatatttggtgcgtgataactgatcccaagattgtatgcacctgccacgcgcttggtattcatagaaagagtagtggacctctgtatagaagattttacatcatctggaaggacattgtattatccatcattctgcaaatcaaagaggataaacatgaccgatgatgcagttcgctatatactattgggagaagtcctcagaagaaatctactggcagaaagataagcta

SEQ ID NO: 18893 - DNA, 397 bp, Oryza sativa
  unsure (1)..(397): unsure at all n locations
tcatgtctcaccaaattgatgatagtcttccacttcaaactgtttgcatatctctccagtcctttgcggatctgcaccacatcacagcacatttgagagactaatagatcatacgacgagaatatcaacaaatatatagagccatcccaaccaaaaatagatctcctttcaattcttctgagaaacaagtatcaattcacaaaacatactagtgactcagtttgaatgcagtgcaagagcaatggatggatatgggtctgcacaaacatagtttactcattgtcgataatggaattcagccttacctaagttggataaacaatgcacaaagatatcatcagcatatatagnttggaatatggcatggttttatgaatcttatttggatccctctatc

SEQ ID NO: 18894 - DNA, 368 bp, Oryza sativa
  unsure (1)..(368): unsure at all n locations
atgacacaacatcagcgaggccgacgcttccagagaaaacaatgacaagacatcttttggctgctgaagaggcaantcctctatactctcggcgggatacaattctcaagtgatgccttcatccgacataagtgggcttcggcctcaaacacctgtaccacatatgccgatgatgaataaactctttacgggcctcctactgaaaggacaaaatccagctgcccatgcaatagcttctattttcaacaaaaacctacacaattcggaattctcacatgagaataaactcggtaaagcgagtgatactattcttgagaggagtgtctcaaccatatcagtgcgaagcaatatgaagacatctctctctt

SEQ ID NO: 18895 - DNA, 362 bp, Oryza sativa
cattaaaccagctcctggcggtggtcaattacatgacaaattcttttttttaggaacattgggaaaagtgacacatctcaagtgagaatgatgtaatgtaaggcccagtgcaatctaaaagcgatatgggcaccgtgataacgcaatctttgacaattcgaaagtatatgaatttgtccgtactgaaacgctttgcgctcatatccctggggatatgccagctcttacagcaacgacctatttattgatttcctttcctgcatgatcaaaacaaatatttaatgttgacaagtataatattggcttggaagggaactcatgggttctgctaatataaatctttttgggtgcatcttttaaat

SEQ ID NO: 18896 - DNA, 116 bp, Oryza sativa
  unsure (1)..(116): unsure at all n locations
aagcttcgccatggcaggaggaggaggatgacggaaggcnaccatgttattacgtcctggcgccacggcgaggatgtccgcgcaggaaaccacacctgggcacttcttctcgaccg

SEQ ID NO: 18897 - DNA, 205 bp, Oryza sativa
  unsure (1)..(205): unsure at all n locations
ctcacacccctacgagaatgtaccgttgttttttttcgngacgacaacgcgangctcctgctggctgagacacacacacagactcacgcctggaatattattatattatgctgagctctttctctatgatatcacacaccgatgncttaatctctcctcagaagcgatgctgcagatgtgcatgtgtattagagctcgctttcct

SEQ ID NO: 18898 - DNA, 465 bp, Oryza sativa
atagataggaccaagctaagtagaatatggtattgaattgttcatggaaagtatactggccataaccgtatatattctagtgtagaacagagctgcacagcacaatgactagcatatactcgctgctacacatcctggcggctaaagcaggtcattgttactgaatgcaaaagaaagctagaagttcaccatccaagtaatataagcatagaacagcttacaatctgacagggcacatagtgtggcatatcatgttgcatcatatggctaatatgtcatatggtacaaaaatggccccatgtttttttctgttgtgaccagatctagtttaccatccaaacagtacaacaagagagcatcactctatcagagcagtactgtagctagagaagaattatcctccaccgtagagaagaaacccaaaagccgcaaacagtgatacacctataaattaatatatagcat

SEQ ID NO: 18899 - DNA, 456 bp, Oryza sativa
  unsure (1)..(456): unsure at all n locations
ctataagttcataaacctagaacagttgatgccgctctttctctggctcattcttcagacgaaatgctcgaagaagctggtaaaaaaaactactctagggggcagtttcagaaacctctttaagcctgctatgaaatcaactcatatgggcaagggtatattgggtactaatctaaaagatgggaagcaaactgaggagaaatctaaatgggaagatagatttgaatccctcaacgcagctataaaggctaaaggtgaatgtttcaaatgtggtgagaaagtggggaccaaaacataagtgtccaaaggcagtacaattgcatgtagtagaagaattacttgatgtgttccangtgcacgaagaagagtcagactctaatcacgatgaagaggatacaagtgaggaggagctggtcctatttgaatgtgttgtgcatggtaccatgggaagaaaac

SEQ ID NO: 18900 - DNA, 309 bp, Oryza sativa
tggcactcatctagtagaaagagaagaatagagagtgcctgttgtgtgtgtgtctggagaagaagaaggacgaccacatcaatatcgagaagctataaaggattagaagagaggagaggataggagacgattctgccagccactaatccactgtatgatgaggaagaaaaaatgacgaaataagcgattatgggcgggcgacgactaaccactcgagacgggctgggaaacaacagcgaccactaccatttagtatgccctcttgattacgcctttgccaattctatcatgatatcgcaatctacagtt

SEQ ID NO: 18901 - DNA, 402 bp, Oryza sativa
gacctaaaggaaaatgcgcgcgcatatgagtatttttcttgacgagagaaaaaatattaaccgaccaacaaagaggttgcttgtgcatatacacagcgccctgtgattgataatgattgatttgtcacccttttcaccccttaatttagtgccttaattaaatggttattttgtcatgtcaaatctaactagctatatcctgctagatttattctcgctatagtttatacatggccgcaaatgtggtgtttcgtgcatagtttatttactgattcatcgaaaagtatggctttggtgtgtgtggatgcatgggcgcttgattctgtccatagacaataaggtcaattagtatatgtaaactctttcggagaataataattagtctagctatgctagcaatca

SEQ ID NO: 18902 - DNA, 203 bp, Oryza sativa
ctttaagaaagggcaccgcgggcgacaagcccacctgaatatgttacttcagacaaatctacacagggcaagcgtagcttatgccagcgcaagtggccccggaggagaatatggaagaatacccggacataccaagaagagacaacaaacgtatcacaacctcccccacctaacacaaagaggcacaatagaaagaagacaga

SEQ ID NO: 18903 - DNA, 387 bp, Oryza sativa
  unsure (1)..(387): unsure at all n locations
tatcttctagatactgtattttcacgagctggctcgcaccatttatatgcttatcttctttttggctttactctgtccttgaattggccaaggtggagacacctctgtacctgcgcctttcttttccgccgaaagcaatattcttcacagtatttttaacagtcaaatgtcattcactgtccttgcattntggattgattcaaattcaattcatactttggtcattcgcaaatatagtcttcccacgcccataagaattgatatttaatcattgacttatattatattgctttattggccaggctgcccatgaccacctaaatccatagtatctacatcagataaggagacctcaacattttcatcatatgcttttttcattacttc

SEQ ID NO: 18904 - DNA, 410 bp, Oryza sativa
  unsure (1)..(410): unsure at all n locations
ncgatggctntgtcgaatatggcacgatgatggagatgacgtctactttgcttcgatggagacgggaggcaccgagcgacaaatgagatgggaaggtgagcagaagctggaacccctctcgcctcctgcacctgcgcgtncccgagcttgcacccacgcgtcccccgcctgcacgtgctcagcccggatgaggagccaaactcagatccaccgtttctctacggcctggctcggaagcccgatatgcacgcgtggagccaggctagagtggccgtgcaggcaaccaaacaccacaggcctgcacccgtggatgcgagccatgtgcgatgcacggaaccaaacacacccattagagcactgtataaaacaccgataccatggaggcaaggagtagtatacagacacatttc

SEQ ID NO: 18905 - DNA, 418 bp, Oryza sativa
acacaagaaactcaagctgcgtttctcttacgcgatctgaacagtttttttttaatatgcgaacggcacgtgagagatactcagctgtctgtatggtatgaatgcgaaaaagataaactattcgtccaagacactagaactaatgcgcatggacacagaaacaactgcacgctgactgaatatattcctgaagattatcatgggcgtacattaacttatgaactgaaccttataatgcctaagaggcaactagaacgccgaaacacctataataggctctcctttccatcagaaggggacagggccactttttgaatgagcgcacactgaactgtcctggcgtaggcaccaactatgctaccttgactggactagctacttatttggtcccactgctacaaccccctcttataaaaag

SEQ ID NO: 18906 - DNA, 457 bp, Oryza sativa
  unsure (1)..(457): unsure at all n locations
ctatatgtcttatcatntggctnttccccactgggtctttacttatatgataactatatacattatactattntggatcaaactatgagctttactcatagatctaaaatagtccataatatatatcacgggtctctccttatttttcccactgggttttcgagtagttttacgcgatgtatttaactataattatttctaagattatctttacagatatctggaacactaaatgagtaatgatcaaagctggattcgatcaagggagagtgttctgaaatatctgggtgatctcatccatctatatagatagagcagcaataaattctgggacacgatggttggtcgtgccccacacctcttctctgctcacggcgattctaacaacggacgcgatggttccaaattatcgcgcttctgttgccgctctctccccctatatattgaaccatgtatc

SEQ ID NO: 18907 - DNA, 328 bp, Oryza sativa
acactcctagaaactcaagcttcagtctatgcgaatcagctcagtgattgacctgctgcgctgtctgtatgctgtttctataacaggcgaatgagaaataagaattcgttttagcacataatgcagtttgacacaactgaaattctatttgcatatgtccttcctcccgccataatatttccttcgtcccaaaatataaaggatccttcgttccacaatatgacagatggaagatattcaatatcatacagaatttgagatggctggtaagtattagccaaccgatgcaaaatttccagcagtttgctgcttatgtgaaatgattcac

SEQ ID NO: 18908 - DNA, 295 bp, Oryza sativa
  unsure (1)..(295): unsure at all n locations
ttgaaccgcgantcacacggaccgcaccctgtctcaaactcccaaatatatgtgcggacgtgacgtcctacatacatacgggcaggtagctagtgcgtcatgggcgttggactaaacaaagccacgccaaccgccgccggcaagcccgcaaccgctctggttctacctcccgaccgacctagccggcgtgggcctcctccgtctgccctcccacgccgaccgcgtgcgcttctgctcctgctgccgccaatggtgccacgcggcgacgacagcgccgccttcgctgtccccggct

SEQ ID NO: 18909 - DNA, 73 bp, Oryza sativa
  unsure (1)..(73): unsure at all n locations
aaacctctaacatatgttgtttcttcgattatagtacacttcatatgtctgtatctgatatcngctgctatct

SEQ ID NO: 18910 - DNA, 403 bp, Oryza sativa
  unsure (1)..(403): unsure at all n locations
agcttactgttccctgcgataggctctgcgcctnncctgtctcattctattgtttaagcgaagaacgccgccttccgngggggctcgagccatcagtgagataccactctggaagatctcggattcttatcttgtgtcagaccctcgggacaaaggacagtctcaggtagacagtttctatggtgccgatgcctctctaaatgtaacggaggctgtgcaagggtttactttttcagacggacattgtattctgagtgcatatcttaatgcttcagactgaagaccacccgtcggcatatacgaagtcggacttttgatcacggtgctatgcaaggaagggctcttccatttttacctattgtcctggttcgctcccttatctctttagcaggtgttcttattc

SEQ ID NO: 18911 - DNA, 398 bp, Oryza sativa
  unsure (1)..(398): unsure at all n locations
ctcgaccaagacatctggcgactcggaatagagcatggcctgaacatgactcctatacgatccatcagaacgaagtctcagagaatgacctcttgaagcgactangtgagcatcagactaaactactggtcaaggtgaaaaaggtacangtctctcacatgatatcccgatacacactgtggcacaatcttgtcaacaccagtcgacagtagaattgtctccaagtgcgcctgctctacacatattaggaccataggatgtgttcatctagtataaaagcccatcaatataacttgcttcagccccatggcactcaagcacattgtcgagctaggtgttacctttacaagcagcactgttgtcagtcttcnnagacgcgttctctccaatattttgat

SEQ ID NO: 18912 - DNA, 326 bp, Oryza sativa
  unsure (1)..(326): unsure at all n locations
aaccatgtgaacatccctgctatgaaaccatgcaaatttagcatttaccttcagcagcagttttggaagctatttatgtgctatagtccacaattgtcgtgccattgaattttgtagtgtgatctaaccaaatattccatttccaaattattgtggtttccatcccttgcactacaaaagatggtgataatgttctcctttaaaatactcccagcaacaagaatgcttcaaaatctttcagcaagtgaaacagattattcgtgagattatttgcacggctatatattntattataaagatatattaaatatttttagaaatgcact

SEQ ID NO: 18913 - DNA, 143 bp, Oryza sativa
acgctatattgactaaaactctataatgtttatgactcaatacgtggcgatatcttcataaaatgcaacaacttcttgcaatagacagaccgattctatgggtatgctggtgcacggaatgcactaccacatcactttggact

SEQ ID NO: 18914 - DNA, 197 bp, Oryza sativa
tcatacatgagacaactaaggtgatctgtttatgtgcttttattataatgtttaagaactattaacatttgaatcatatagttaaattttatccacttacatcaattaacattgttaaataacgtggggtttgaaaataaaatttacaccgccatatgatctatttactcttcacgaagaaattgcatattgggcca

SEQ ID NO: 18915 - DNA, 368 bp, Oryza sativa
aaatctaggttttcattaaattccgataagctgctgttggagaaactgattactaacttagcaacttctcgttgttctagcttttacggattctcagaaattggctattactactgatcgaaaggtttaccatagactgaaaaatcgtccatgaagacttccatgatatcctcgatcatgtcggagaaaatagatgtcatgcatctttgaaatgacgcgggtgcattacacaacccaaacgacattcttcggtatgcataccttccatatgggcatgtgaacgtggtcttactttgatcatcgggatggatggggatttggtgataaccagaatacccatccaggaaacaaaagaatgaatggttcgc

SEQ ID NO: 18916 - DNA, 122 bp, Oryza sativa
  unsure (1)..(122): unsure at all n locations
acactggtcactgagcctctgctgcgagacgtgcgtgtctgtgcccgcccgtaaatgaactattggtaccggaagctggagtaagntaaacacatgataggtgtcaagaatctatgtcgctg

SEQ ID NO: 18917 - DNA, 466 bp, Oryza sativa
taaaactcagcttgaataaagtggcaatgtggactatggagtttgggttcaagttattcttgtttatcccgtagaagatcaagatcccacggaaaaacttcgaagttggaagagcaaaaccgccatagaagaagtgagaaaaaaccatgacctcatgtgtatcgggggttgggaaagcttcaccaaatgctggccgccatccgatgatctcctttgctgggagaacgccgtgcaccaccatcttcttcaagttctcctccgtcacgtcggacggcgcccattggcttttaaagctttccttttcttccgtcatcgatttgatccgaatgagttgatttgattcgagagatggctggtgagagatgtggaatcgaagcggtgagttgcgtggaggatttttgtgaactcttggaggtggattggggtggaatggtgaaccctattttcgccggcgcagctctgtact

SEQ ID NO: 18918 - DNA, 465 bp, Oryza sativa
ctaagcttgcacaagctgccacgtacaggtacatctctctggcgaacattttgtttttttctaactctggattctctcttgaggttaatactgggatttgttttggagcctgtacgtgcttagaggattaggaactacagtaattaacatacatatctaggactaacaacatctaccactaagtttagcaatagtccgactaattatactatacaaacagtatattactaatatactactttcatattttaatgtatgacaccgttaaatatttgtctaacgacgtttgacattcgtcttattcaaaaatatttatgtaattatcatttattttattgtgacttgattcatcatttaatattttttaaatatgacatatattgtttatatttatagcacataaatgaacaattcaatatttaataaaagatcaacggcattgtacattaatatacgatgggagta

SEQ ID NO: 18919 - DNA, 265 bp, Oryza sativa
  unsure (1)..(265): unsure at all n locations
ctctcnactaattaacaggcggccnnnnattactctgctaccaccgcgcacccgaagaaaaacagcggcaatgtctttttttttccaatactgaccgctatgattgacacatttaattgacatcgttctctagctgactagccgctatcaagatgaagacactgctcaacttcgagagactgttttcttcccaatctttatcattgcctacactaaaaaccggaatctactacagctgtgcacgtctgaactcaaactttttttt

SEQ ID NO: 18920 - DNA, 195 bp, Oryza sativa
tacactcactgatccaccaggatcatgcctgtgttacgaggctgaaaaaatatttcggcacacaaatactcacctcatctatgagcttgtctccacactgttctgaacatctccggagtcgatttatctattcccttgttccttctgaatgtttacaactcttacatgtactaacgtgatgtacggctattggct

SEQ ID NO: 18921 - DNA, 469 bp, Oryza sativa
  unsure (1)..(469): unsure at all n locations
atagaaactaagctaaagctgaccatagaataataaaatatacgctttgancttgtcttgtcactncaattctgagtggatgaaggtttgtttttcctagagggcccaatcttatacgttaatgaaagaagaacccatatacccattggtaattatcgcgattattacaacctaaagaaatataggaagacgcggggtttcattcttgttggctctatttacatataaaagcattgaagatgccctaagctatggttcatacttctatttcccaactcctactctctttgtcttgagcaaactcttttcgaatgtttgaattgttataatgcgcttcttttataaaagtttcaatacgattgctattaacaaaaattttatctctatttctaaaaaaaaactatattaattaacatagtctaatactactcctccgtttaaatgtaggcttctacatgcccacataata

SEQ ID NO: 18922 - DNA, 429 bp, Oryza sativa
  unsure (1)..(429): unsure at all n locations
tcgcgaagaccttgagcaaagcgagtcagcctcagtttttttgttttatcattggaaaatcattattattttgtttgcaacttgcattattagaatcacacacatataacatgcttggcctcggattgcgtgccaaaccgacggacctacccagtaatcgcactaattcctgtaggctgtactaccctgattccttgtcgctacacccttgtggnactttggtatccgtgctctttgagccgtgataccaaatggcccacatacaccgttgattgtctaaaaattgtgaaatgggtttgtgaagccttcaaaacccgacatgtggtgtcggtgtgtgtaagaataaaatgaattgtgaaaactctcgatgcggaggtggtgtctgccttcgctgtccatattgcaaataggaccacttctgtggaactc

SEQ ID NO: 18923 - DNA, 378 bp, Oryza sativa
tcatatcgacttccactatgccatagcatatggtgttcaactataattatatttcggaaagttccgattaagccaacagaatccagggtgtttgttcaatggattagctctcagcataaattacatctgaaatcaagaaatcttgcttatcaatgaaatagttgggacttgggacccgctctgttatagatacgcacgcatggccatcaacatattatctatataaagcagccaaagaccagacataagtccccaacattataaatgcaattgggaaccattacaaacaagaagcactttttcacattacaagttattaatggcatgtgacctcttgcttcaaaaacaaaataaataacccatataagaaacttaatc

SEQ ID NO: 18924 - DNA, 55 bp, Oryza sativa
ggcctagcgctgaagctgccaccctcacgcatgcaagagtcggctgggaaggacc

SEQ ID NO: 18925 - DNA, 465 bp, Oryza sativa
  unsure (1)..(465): unsure at all n locations
attaaactaagctggtaacttaaacatactgtgccattattttattgttttattatgtaangnnannnnatttactatgacattattattattaaagggattttatatacgatatatgttttacatnttgtatttttcaataataggaatagtcaaatatatataatattggaaacagataagggagtagtaattgtcccattngcagctaattggcacgtgtgcatatatacgcatgatattggtaggatcgctaaatcacatcgctacaaatggggcctctatgcttaattatgggagtagatatagtactggctagctatagtaacaagtggtggtaggtagctttgatatgtacgtataggacacacgacagacatttctcatcagtggaaaacagattataagtgggatgtntgagaacctttctgataattattatgcacccagtacggctctatcttt

SEQ ID NO: 18926 - DNA, 277 bp, Oryza sativa
  unsure (1)..(277): unsure at all n locations
gacactatatagactaagcttcttataattgttttgctatgtgaactntcaaagatgttgncaattttatgttgtacgcatcataatttgcccaacagtcggtatatcacttggaacatatttattcgggattcacaccgcatatgctttaaatggtattaaatcacttggttgactattattaataaaaaccacttcggtaaatggataattaatccttgactatatgtttagtttgttcaactaatcacatagttaggggctacacctattaagt

SEQ ID NO: 18927 - DNA, 446 bp, Oryza sativa
ttgccgacaatggtccgtgcagtagcatgattaccacttatatcttaatgtatatccttcaacaattgtgtgccttcctccaaagatacacagcgctgcagtattcctgatggacttttcttgtacagttcagcttcatgaataatgtaaagactgctgcgcctggaaatacgctcggcttcatttttgtcttgagggagttcttgtttggtcaaaaaatttatgagagggtctctctagtcggcttcaatcatgcttatgccttgagtatccatggcttcaattgcttctttcctgtgcacgggtggttcataaagatgctcaacgaacacatcataaggggctgcttcccgtttgaaccaaaattggccagtgtatcggctgcctcattgttatgtcgaaagacatgggtgaactcgagtctaatcaatttatctttcaacttg

SEQ ID NO: 18928 - DNA, 456 bp, Oryza sativa
  unsure (1)..(456): unsure at all n locations
tatgtggatgacgtagtcgtcaagaccaagcagaatgatgaattgtttctgatctagaacagaccttcgcgagcatccgtgctttcaggatgatattaaaccttgaaaagtgcatcttcggagtaccgtcagggaagcttcttggatttatggtgtcccatagaggcatacaagccaacccggagaaaatcaacgccatcctcaacatgaaaccaccgagctcccagaaagatgttcaaaaattaactggctgcatggcggcgctcagccggttcgtttcacgattcggcgagccggggatgccttttttcaagttgttgaagaaaaccgacaatttccagtggggacccgaagcacaaaaagcctttgaagacttcanaaaacttctcactactccaccagtcttagcttcaccacattcgcaagagccgttgttgtatacgtgtcggcaacttc

SEQ ID NO: 18929 - DNA, 331 bp, Oryza sativa
  unsure (1)..(331): unsure at all n locations
ctaagcttggtacaggaaatctacatacttcgcttngcacacatgaattgtcttaggtttcgcgnnnntgctagtttaccctaatttcttaccagcaaattcaggattaattcccatggcgaggttgaaagatgatctaccgcttttggaccgagacacaagaatcttactttggcaagggaaaatgccagccgttcttgcacagcaagacctcgatgatgcgctttctagatttgacaagaggactcacgattggtccaacgatgagaagaaaagggatcgtaaggctatgtcatatattcatcctcatctatctaacaatattttgcac

SEQ ID NO: 18930 - DNA, 332 bp, Oryza sativa
  unsure (1)..(332): unsure at all n locations
agacttggcttatctttgagggtcttcctatttttatatatactcggcgcatgcagtttagacttggagattactacgatgatccagaagttttaagctacctaaaaaggatggagggtggtggtgcttctcatttggctgctgctgctgctattgcaaaacttggtgctcaagctacagctgcacttggtactgtgaaatcaaatgctattcaagcgttcaacaaggtttttccattgatagaacagttaaacaggtcagccatggaaaatactaaagatggccctgcgggatatcttgataatntgaccaagaaaatgcacctgctcatg

SEQ ID NO: 18931 - DNA, 219 bp, Oryza sativa
aaaaaccaaccacatgagcgggcaggcacatgaacactgactctgttctaggcagccccagccgcagaggagacgaagcaaaccagatcggaacgaaaggagagagcgccccccacccagacaccggaaatagcaaccaagacacgaggagacgcacgagagatacagaggccacgcaaagagaagacccgacacctgaccggcagggacacacaaagc

SEQ ID NO: 18932 - DNA, 437 bp, Oryza sativa
  unsure (1)..(437): unsure at all n locations
tcatgaagtggataactgtcaacananaacttgtccttcantttgttgcatttccatctttccataatctccatgcctgtagaatgaagttctgaccaaagttactaatgcctgttgctccaaaatactgctgactgctaaagtttaatttggtatcaaaattatcggcattttagagtacttacataggctgtaaggctgaaaaagtttggtgtgagtttagatgaactgattttcaggccactgacaatctccaaaagaagaacaccaaagctgtatgtatctgacttgaccgataaggcaccacccaacacatattcaggagacatgtaaccactgtataaaccatttcattagcaatgaatgcacaatcgttggcaacgattaattcacacgttgaatntaactagtcaataaaacctacagtgttgataact

SEQ ID NO: 18933 - DNA, 487 bp, Oryza sativa
  unsure (1)..(487): unsure at all n locations
tgganatctgtctgacaacgcggagagataagcatatgacgaagactatattatgctttgcgcctcttccatgtgcagggatatttgtagctaaaccgaagttaactctagtgaacattgatgtagaccagtagaaggtttccaaatatgcacattgtatctggggaaaacttctatgaattgaagaacatttttttgtcaatcattcattcagaaactatggtgtatcactacataacaaaaacttctaagctaaagcttgtcatttatacatgacatggagaatccatctgaaaaggtcccangtcagactgtacgtgatgttntggaaagagttccttgccatgggcagctcatcttcagtgtcacctccctctccacagagcttcangaacctaactatatgtgctgctcagagttcattgccaagcccagttcgtcttcaatgtcgtctccctcttcgaagagtttgaagaatcgtaactga

SEQ ID NO: 18934 - DNA, 496 bp, Oryza sativa
  unsure (1)..(496): unsure at all n locations
ctaagcttgttatgttctggaccacacgctacagctagatgagtcttctatcctattattgattcaccttctttggccaatattgggagggtggcttgctctgctcaagtgacttgcctgaccanaggatgtcaatggccggtgttgtggtgaactgaagaagattagaaaggattatgaagaanacaattgacattatattagctgccgtgcagagttgtagccaatgattggatgggttattgatattatggatctgtttgcttatgctatagaagaatagcgtcagcggcagaggatttatacagcattttggcctactcttctttacatctcatcgactttatatgcatgttagttgttgaattcagtgcgttcagctgctttggaagcacatatttcaaccacatgaagttacagaatcgcttgtcaaacattcagagatacagacacaagtagaacaacttgagcaagtatttcctttgcattaaacatg

SEQ ID NO: 18935 - DNA, 467 bp, Oryza sativa
  unsure (1)..(467): unsure at all n locations
tactaagctgctgacgttacaacacacgcgccncaacattagtgtgcctaagacagctcatatgatcttaacaaaggtacaatataacatgagttaacatgattaacataagttaatcatggcttcagttgttatgtacttatgtcatttcaatattgatgttaagctatagcaacaaatgtcacatagaaaaaagggagtttatgtactatattaataataaaagttcacaaaattagttccttcaagcatacaaacagatgcatcattttgcacaagcaaaacaacatagataccattaccacagcatgattaattnacaatgctcatctaacacacatgtaaattagaaatctctgtgtgataatagcagaagtgtactattgttgcngaagaagaagaataataagaagaagaacaagatgacgaagacgaataatagcacttactacttaagcttcttatgc

SEQ ID NO: 18936 - DNA, 193 bp, Oryza sativa
agacggtgctcaatcagctgcctggggaccccgggcatatccggcggtctccatgcgaagacgtcaacgtttgcctgcatgaaggagcgagcgcgtctttctatttgccatccataagaccaccgattcgtgtggtcttggacgggcctgtcgccagggcaacctccttgaccgggacctcgtcgcatgtgat

SEQ ID NO: 18937 - DNA, 457 bp, Oryza sativa
  unsure (1)..(457): unsure at all n locations
ccaanaaactcagctatgtgcgcaccctcgcccttatgagtaagaatactgaacacgtatctttattngtgaggttataattctgagcgcgagacgtgcttgatgttgcagttctatgtataactactaaagctgatgtttcagatctgtgacctactccggccaactgtccttcccacacataagatttggatgccagattatctttgaggtatgtttctgaccttcagtatttgcaactgttagcatcatgccatgatctgtngatttctgaattggatgcgcccatgtatcggtggtggcttgagatttgnttctgagtgtcacctagtatctgaattcttaaaccattaatgatttcgagtgaatgatggggctntcttgaggatgttctgctataagatttttaactgtgcacattcacgatccattggggcccaatgctgttgagcctatc

SEQ ID NO: 18938 - DNA, 521 bp, Oryza sativa
  unsure (1)..(521): unsure at all n locations
tcctgaggcgcagacgaacataagatatctgcaggttaattctcatatgtccattactatacacaacacaataaagagtggaggagtcacttgaaggtggaccaagttagaatatctcaccttaaaatcaattagggaaagcttatcaggcggtaatcttctcctcgggtgcactcactctcacaagatatcgcttacatgatagacaagatgggctatgtcgagatctctatcaatttgaaggtaacctttattttcactaacagtttatgggctttntggtatctctactattcaccctctcctggatgtttgtttggacttattcgaccgtacaatagtggcccatatatgtcgtcatattccacgaactgtggcgcatgtgcggaggagccctccgctacttctggataccgagccacgtaagcccctgctcactaaccctgcccatctagccatactggcccgacctgcatgcaccttgccatcttgctatatgcacaacaccacacagtgcacta

SEQ ID NO: 18939 - DNA, 454 bp, Oryza sativa
  unsure (1)..(454): unsure at all n locations
tactcagcttcttagaaccactctacagtgtntcgttgggtaatactgtgccatgcatttactaactgtgctantttgacgctcgctatagacctttgagcatggctgtagccatacgcttccttttgtaaagacttaacagcgaccctacgcatatgtggctaggattctatgttatcatgcatagcacacgataaacacgaatgcttgctgctgtacccagtatgatgttacttacgcaatagtagctctgtgtttcgggatacatatatattccagctcagtgtgtatttcgactgttgcttggctttagcctatctctaccttcgattcacaacctgcgagtattgatgcggtacgcatctagcaactattcacatacactctcacggcattctatcccaatccaacagcacactgtgcaagaatgctcatgagaatgcatgtatctaac

SEQ ID NO: 18940 - DNA, 328 bp, Oryza sativa
tattgaactgctgttcaatgtttacatgagatcgggtcatatttataccgagatacatcacacgtccttgccggacacgactcttatctctaacaaactctaagatacaaacgaatcttcacggcagacccttgccgagatatatctctaaagaaactattcacaatatcctaattaatagatacaattgcctactcgtgaagctatctcaatccgtgcaatacctgtgcagcacgctaatcaatcccggagatgatcatataaccaccttagcgagatctgctacatcggctgtctttcgtccaatctatgctagccgatgcagtct

SEQ ID NO: 18941 - DNA, 431 bp, Oryza sativa
  unsure (1)..(431): unsure at all n locations
gcgaccttgaaactcagcttatctgccgctcgcatgctnccgctcgcattggctacagtaggagatctgttatcattttgtagntattntggtgccgttaaaaaatccagtatttcacgattccacttctgttttacttaatcgcagatttgttntacttccagttctttgcttatgaattgtgatacataagtactatcgcttgaaagtttctgacaaaaaatatctattgtatattctcttctgtcaataaataacacaagaatttgtatcatttcagacatccagaatttgattccatcagctggctgtactatctgtaaatcaaaattgaagataacnaaagagacaggttgtttattacttcacgaaatgagaagggtggtttcatgggatgtgtgtgtgtgtgtgtgtatagtgcagcttgttct

SEQ ID NO: 18942 - DNA, 268 bp, Oryza sativa
  unsure (1)..(268): unsure at all n locations
tattacaattgagttntacaatagggcgtgaaattataattgagttntacaacacggggaaaacacaattacctcttcatacagaaatggtgggctatattcctgccgtttctatgacagtttatttccatccctaccaatgttgggtggacccaggactggcccaaatcctaagctagccacggacatctagttcatgcatggcctgcgtgatcagaccgtctctgctagcaagtgaccgctaccgcgcggcactactagaatccta

SEQ ID NO: 18943 - DNA, 483 bp, Oryza sativa
  unsure (1)..(483): unsure at all n locations
ggcgttggcgtctcggcctctggcttgtcactagagttcgctctgctttgctagtgcgagttngtgcctttgtgccgctgcgctgggtggagggtttatatagcgggaatgagttggggttggatggtggggatgcgggtgtctacaaggcgattagctntgttcaagtatccgttggaagataagctccacgcgagagagtgcgggaccaagagggatggacgagatacccgccctctattgccgtgcagagatggcaagcattntctgtgaaataattagcagaaatcttggatagcctanacaattagtggctgaatcaattttgtagtgtatgatagtacaaattcagaacatgatgattcanaattcggtatgaatttcctaggaaagatactgtaactganaaagatntaccctctagcttaactgaattgcaaatacaattgtaatcttcaataaatgaatttatttactcacatt

SEQ ID NO: 18944 - DNA, 322 bp, Oryza sativa
gtggagcttacatgcctctaactagcttcagcgaacgatacaagtggatctaaggtagacaccaagagagattcttctgtgctgtcatatatacgcagtcttggattagatggtcaacataaagcactaactgaacgaagcaagatggcaccacatacaacatctggggctctcaagactataaatgcatgaaagtctatccgatggacatggaggatagtggtgatgctggcgtgatctcggagaggcacggcatataatgcaagaaccaggcagcttcgcatcctggaaatcttacacctgtggaaggtacaaccgtatc

SEQ ID NO: 18945 - DNA, 216 bp, Oryza sativa
gcgcgatggcctaaaattgactttggtcacagccaatggtaccaacaacactgctgtacatctcactgccacaaaagctgaagtgatgcttcggtgatacttctccaccccttgtaagtagcacttgtgctcggtcacaatgctaactttgcaataatcattccatttacccttatatgcatggacacgccacggacaatcttccttcatgcacct

SEQ ID NO: 18946 - DNA, 442 bp, Oryza sativa
  unsure (1)..(442): unsure at all n locations
cacactatananactcaagcttggatgaatgtaagagcacagntcggagagggaatgacaatgagccgaaatggtgtggatattcctctctcggcccgctggcttatatagggtacccacaacggtcataattgacatgtgggacccactagccgttgctctgccaaaaatgcaggtagccgttgcctggccggttcggtcgaaccaagggttcggctgatcccctggtgggcccaactggccccacatttggccgttggactccaacggtcagtgtggccgtggcacagcaaaatttcattgaaaatcttaatttttgtttgctctataaaaatcatcttgaaagaatttcctaanattcagatcctaaatgcaaagtttggaattcaaacatgtgttgaagcaaacattacaattgatgaaataaatatgcggatacata

SEQ ID NO: 18947 - DNA, 480 bp, Oryza sativa
  unsure (1)..(480): unsure at all n locations
tgtgccctcggatccattganaccaccaagatcaccaaggccacatgctcttgttcgccgccgccgccgcggcgcacgtcgaggcggtggccctgccgccgccatggccatgcgagcaaggcagcatcaaggaggagaaggagtggctctcatggcgacgatcgagcaagaagaagaagaattaatgatcgatcaatccatggcaaggtaaaggttagctagctaagctaagctgcagggatgagctagctcgatctgccttgtctgtgcaaggtttggtagcacatatccatgagacgatttgtgctggaattaatgctgggttgaggaggttgccatggatgagaagaacaggatgcgtgcgacgtgagcagcgatcgagctggatttggtgacgaatactacgaagaatggtagaagtactatctagaagcttgggtgggcctcacctgatacggtgtgagtgagctcaatagttta

SEQ ID NO: 18948 - DNA, 425 bp, Oryza sativa
  unsure (1)..(425): unsure at all n locations
tctctcccgcgcccacaccatcaccgccaagccttgattctattctggaactcctcttgcctctataagcaccattatcttcgccacatcagcctgcgccttgtccatgcctcgtcgagcccggagcccacagaaactcgccaccccatccacctcaagacctccattgccaagtcttcaccggtcatcgtccttcgtcgcctcctcttcaccaattcaccatggtgagccacggtgcctcgtcgccttctttcaccatcgcgccgttgtttccttgccatggtngtcgcattcatgcacgtcatgtggggcccacacgtggacacccatggtggttcacgagtggcgccagcacctttaacatcggtcgccatttggtgcacccaattcaccatggtctatcaggctgacacgtggaccccacc

SEQ ID NO: 18949 - DNA, 471 bp, Oryza sativa
  unsure (1)..(471): unsure at all n locations
cctctcatttatctctacatatctttatattatgacattatgtctggtttggtgatctgtaaattgcattcctgctttatttattccttattgtgcttctgcagcttttagttttctctcagatagcagtaccaaagaaatgttttactttttcatggattttacatttgttttttccgttgtcatgttaccctgcaagatagtgtgtatcggcctaatgccttatgctatgcatgttttgccgaaagtgtttcctgctatatcaactagaggaaagtgggcagttggtgtaagcttattctggtttctccacaatcattntcctctcattagacctgacacagatctgttcgttgttcgatggcagtgtcatgaaacttctatcaacttctggtgtctagaactcattgcatgcaggactagtataaatggagctgcacatacaatttcattgtacatgctgcttaaact

SEQ ID NO: 18950 - DNA, 427 bp, Oryza sativa
  unsure (1)..(427): unsure at all n locations
gttgactgcgcgacagtccgcgagatcatggagggaggtgttgtggacggagcaccacttgccggccgggcgctgcctgctgggagcaccagcctccttctttttgtcgctcgcaggcctccactttcgggtggcccgcggagcgcctcaacggcgaggacatgaccctcgtcgccggaatggaccgacctcttattcctcctcctgtcacgaccgcctgtctgagcggcggatccgggggcgggcgaagctgccacgccggaaccggaggggttccaagttcacgccttcctcttacgagccactcggtccgcaagctaaaaaagctccgcggtagtctggagctctctggaggcgaatctttcgagcatgcggatgtgccgcacacncccnctgaacgcataaatcactgcgtgtgcanggatgc

SEQ ID NO: 18951 - DNA, 346 bp, Oryza sativa
tggagcacctatctgaagaaaggaatcaatgtgcctctatgtcgtggtatccctgaacaggagtagcttattggttaaagaagccgacgtcaatctggtgcacctgtgtcatgccaaggaccgatgggtttgcttccaagtgacagtaacgacaactcaagctacattgtcgagagatctcaccatttggcagccacttcatgttccatcagtgatgaagatcttgtggggattgatgattacacgacggatttggaaaagtggccttgagatgatgaacctgcacaccttgtgataagccttgcttggatgggaaggcttggcaaacagccttgctgaaatatct

SEQ ID NO: 18952 - DNA, 364 bp, Oryza sativa
  unsure (1)..(364): unsure at all n locations
ctatctgaaaaaggaataagggacctcatgtcgtggtatccctgaacaggatagcgttattggttaaagaagccgaggtcaatctggtgcacctgtgtcaggccaaggaccgatgggttttgctccaagtgacagtaacgacaactcaagctacattgtcgagagatctcagcatttggcagccacttcatgttccatcagtgatgaagatcttgtggggatggatgattacaggagggacttggaaaagtggcttgtagatgatgaacctgcacaccttgtgatagccctgctggggatgggagggcttggcaaacagcccttgctgcatatatctacaggagggcgaatgannaagttgaat

SEQ ID NO: 18953 - DNA, 481 bp, Oryza sativa
  unsure (1)..(481): unsure at all n locations
ntatgtcagtttggatcatgtcgcatcaaggcttaattgtctagttattatttatggttcatcctcgctcgcgtattggtgggaatcttcttgtgacttcatctttntcagtcttcatgttatccatccggtttaaggggaaaatgttctctatcacctgatgaggcagtttatactttataacaactagtgatgaactgagcaatgtctatgctcttgggtctttgatagtgaatactctgtgtggcaatctctacattaattggcatgccatttatctgcacaacagcctaatgcatccaaccaatagcagtaggaccaaatggcacccctggctacctgctataatattttccgtttggaaatttagtagagtagtgctaggtagatgaagcatgaatgcacttcagcagtgaagaattactggtccacgctccagtgtcatggactgcacatctncagatgaaaatacaaagaactc

SEQ ID NO: 18954 - DNA, 453 bp, Oryza sativa
  unsure (1)..(453): unsure at all n locations
caacanactaagcttanatcgcatccatctcagcgcggtgcaagtcgccgcttgcagcgccttactcttaatgagcttcaggctcctttntgtgttttgcaccaaaactcgattgcggaggacttgacaaacacacgcggaggcaggctatatgcaccgggtaaggggagctggttggaggcagcgcacagctgtgcaatggaggcggaggcacaaagcggtgcataccaatgtggtgtgcaattgatgcactcacgcataggatggatgcgcgagcacaataatggatgcggcggcggagtgaaccgaggaatgatggacgcggacgtgcaactctctaccctgtctctatggtttagtttgctaaactaatgggtttattcggtgtactaggtctatagagtcacggctccgtcatatcggtcaattcgataaccgangcactgaccaata

SEQ ID NO: 18955 - DNA, 377 bp, Oryza sativa
cgcacctaaaaaccaagctagaagagggcttcgctctgcgacactggatttgggcaatgattttattaacagcttgatgtccgagggctaatgagtctgcccaaatcatgcttggttgaatgacaaactttggaaaagtaagggacttataactccttcctttgcttactaaagtatgtgacatgagggagcctaaatctatatatatgtacgcatgacaacaggctaacattgaagatgaacagctatgcattggaatacgcttgaccataccctagagtgacatcagagagtgactatcgatcataagatattatggatgggtagacatatagacacttagccaaatataaattcctagactatgtcaccaaata

SEQ ID NO: 18956 - DNA, 460 bp, Oryza sativa
aaaactaactattagatagatgtctccacccacctcttgccccgctgccatgggctcttcttttatgggctctagaggaacatagctctgtcatggtattaagaccttatccctacaccaaacaagtatgacaaaattttagtccatatagcactacaactatgcaaacaccctctgaattacctctgaattatgagcactatgccactctgctatatgtgcatatatatcttatcatcgtggccctagaaatctctgagatataaaatcaccgacgtgactcgtgaatcacgaagactatatgccaccagctctatgtgcacataatctgtgtatcattaatagaagacaccattaatgttcaaacacatggttaaccattcgtctgattataaaattcatacaaatatatacaatataaagcatgcttagagagttcaccgggtactatactactcat

SEQ ID NO: 18957 - DNA, 389 bp, Oryza sativa
  unsure (1)..(389): unsure at all n locations
agggtggctccagtggactctggattttggtggattattctactccggcatatacaaagtatacggcagatactagcttggcagaatcaccagagtgtcagaactgcatgaggctgatactgaacctatgcttatctgagggatttgataccttcccaactctgctctgcacagatggctgctcaatgatagatcgtcgaatggtatgagctttcaccttgatttgatttatttcttgacatggatcattaaaaacagtacagatcagttgatgttgcaacaaagaagctgaatggtttctgcttttcttcttagaaccaagcaagttctggnttttcaaaacatttntntaataaaacgggcagagatctgatattcacagcacaatg

SEQ ID NO: 18958 - DNA, 462 bp, Oryza sativa
  unsure (1)..(462): unsure at all n locations
gctgagtccgattcgagaacagaaacatcatgcgcatcatgctttttaatgttctcaacgagcaaatcggccttccttgaaccagtgtactctgttggggttccgcggtcaaagagcatcagagtggggaacccactgatttagaaatgcagaaacattaggcatctcaatcttttcagtgttcagtgaaccacacatctctatttaaggtggtgccttactctactccatantttgatccgagctttttgtatttgtcggcattcaccttagcaactacgatgggtgtgctcaatccagccagcaccggagcagcttcatctaactggaacacaagcaacggctcacctatccaccatttcataaagaggcanagacatccacacacagatgaacaaagcataatatanatcgngctcaatccattaggtggcacaactctagagtcaccacaagtagagt

SEQ ID NO: 18959 - DNA, 300 bp, Oryza sativa
  unsure (1)..(300): unsure at all n locations
tcacaaactattgcaagccaagccatagagaggcaagaactcaatgctagaggagctntgcataatactatcatctcaagagatttggctattcaagaagataccccgcaaggttgctactaccgcaactccacaagtagcccagatattgagttcattcgccaagtcaacccctaaagctacagcgttcctactaatcgaacaaaaggagcagctttgccagactttgtgcgtcatgtcatcagagcgtcagagcaaggagctctgctgcgcatggcatggcggcgaggagctcaccga

SEQ ID NO: 18960 - DNA, 303 bp, Oryza sativa
  unsure (1)..(303): unsure at all n locations
tacaagtctattccgatttgctatgctaattgagagtgtggcatcgaaatcattntatgctaattgaatcacatacttgcaatgaaccataaaccgatatgttattattccttaagaaatatggaggcttgtgtctgaacatttctgaggaacaatgcatagtaacgagcacaaacattttcaagtcaaaactttccaatatcaaatatgtgcatctggcaagaacatagtggttacttacatatctggcgatatcatagtcctcttaattcattaatcgnggatgattctccactctgcatg

SEQ ID NO: 18961 - DNA, 467 bp, Oryza sativa
  unsure (1)..(467): unsure at all n locations
ctcagcttagactgtcagattntcgttacggtcatcacttgaatgctttatataccagttcaacaaattacacgtgtatttctcagccaaagaaagtcaaatatacaaagaccgagttataaacatcaacgccaacaggttatgacttgagcatgcattgatctgataaaccactccgcangcgatcaaatatatataactgaacctattattcataagaagatggtttccactttctaccatatagtgcagttgatagtgttaatttgtgctactcagaagtcataacacaacatacataacattacaaagggtcctctagattcgggtnntattcttatttatacagaaactaacttaaaagtgcaacanatagtaagtgcacactgatcatcatattactctcaaactaacttaagttctaccactgatatacaccnaacaaatcatgtcacactctcatcata

SEQ ID NO: 18962 - DNA, 410 bp, Oryza sativa
  unsure (1)..(410): unsure at all n locations
gatacggcccattcagatcgaagatgagtactccagcacggtccacatatgacacttcctggcttgctatctccgtgtccatccacgcacttacggngacgcttaatgcgtgactgacggcaggcgcgcgacgcccccagtactactgctactagtagtacactatgaaccagttattccctccatctaactttaatagttatatttctagatttacaaacttaatttacatagtcatatttcaatctaacaacctatactcttaatgactctgtcggatttaatacatgactctctattcttccacacaagaatggctacatgggcatcgaacaatgtaaattntaatgaatcgctcggttacgagatataactattagcatgttaaatggatgataatagaatactta

SEQ ID NO: 18963 - DNA, 448 bp, Oryza sativa
  unsure (1)..(448): unsure at all n locations
ntacctataccaaggtttcgaccctgcaaatgccgaagttaagaacaagctatcatgggaaggcccaaaggctgcagtcaaccaaagagatgcagatcttcttttcctctggagaagggtatttcctagtctattcttttgcagactttagttngttgtttgttatgttccttccaaaaatacttaccagtactagctattatctaatcccctttctatacaaccatatggttggagtgcacttgcatttgttttgatgtcacaaattattccagcctacagagattnttctaaactgaagttcattatgacgtgttgaaattacttggtagtgtacatcagctaaatatctttgtttctagtaaactgtgctgctgtctgctgctcgcaagtttcttttcattggagtattatcttagagagattcntttttataaaagtatctcct

SEQ ID NO: 18964 - DNA, 454 bp, Oryza sativa
  unsure (1)..(454): unsure at all n locations
tgtgcagtctgtgctgatccactgcactatttaagtggatgagaagctgttattgttgtactgttctagtggtaaggttgacttgtatcagatacaattgcctatccagtgacagaagttgaatgtttaatttgtgatagtgtgaatgagagaatttctgcccacatcattggtgcaccatgatagttacagtaatctttagtttatctatactctagagggataaaaacaccaaaacagtttgatcaaaattgttcgaggtaaatcctaagtataaaattgagaatggatttgtntctcaatatggttatttggtatcgacattcagtgctttatttacacaatggccaattccgaataaacaatctgtgttctctttatcccactgtccataccaagttgatgtagcaagtaactactacacagaatagtatattggtagcctttacatgca

SEQ ID NO: 18965 - DNA, 409 bp, Oryza sativa
  unsure (1)..(409): unsure at all n locations
gagacatcatgctgcaccattagtgccacaacatatacgtgttttgtttatntatgataaataaaagcatccacaaccaaccttctaaacaatgtttgagatgaggcccgaaaggtagctgtggtcctcgcataatgaagtgcattaaactgacaagactctacggattccttatgtgagcatgaatcctgngggatttcgaaagagaagctttcatgctcatttgtggagttctcatcctccagagttgatgtctcaagcttgtccatggcttgcatgttctccttcttaagagatgcatcgtgcaagacaaggttgtttcttgacatatgtcgagaacaacttcttgagagccagagggacaagggttttgctcgatgggatggaggagttcaaactattgctctac

SEQ ID NO: 18966 - DNA, 459 bp, Oryza sativa
  unsure (1)..(459): unsure at all n locations
ctcagctttaagttgtagttgtctggtgctcgtcatttggttttcctgtaagagctaatggagtcatcttgctatgttggtgatgcaggtcgttgcaccagtcaagatgacattccaaatgtaagagcacttaactttgtcattcactgtgtggattagattcttagtcatctctttcacttaatgcagatatgccacatgtgtgattccaattagtgccttcttcgcgtcaagtctttggtaagctaaacatagacaagatatggaaccatctctcattgtcattttttcctcgatcacttctttattatctcctgtatgaaaaacatgggcttgaagcatatgcacttatgtatgtgatatatgtaggcctaanatggtaaatgcattgatctaaagctgactatcaacattacacanatggcatgatacttgcagtttgatatttatgatgaccga

SEQ ID NO: 18967 - DNA, 417 bp, Oryza sativa
  unsure (1)..(417): unsure at all n locations
tctatagcctatcttgtgagattgtgttattagattagagtgtaggagtgtgttggagatggcttgaagattatgtttgtctgagcactttggataacttgtgggctgtcacttgggcttatactcttggagatcttcttctagatggttaggtgttgcccgtgagcttccaaagatcttgtggatgtcccgggaaagtttgtgaaggatttcctcaccttcgcaaggaaacgaggtaagtgagtaaagattcttgcgctgagtcttcagaggtcgtcctaggtagagcaacttacacttgtggtcttttctagaaggaatcgtgagttggatcttggtggtcactcaattctaganaatgacctacaagtgttgaagtgaaggctgtggacttcttctggngatcttgataagtga

SEQ ID NO: 18968 - DNA, 539 bp, Oryza sativa
  unsure (1)..(539): unsure at all n locations
ttagcgacacatgaaactaagcttcttatagctgctctgctatgtgacatttcaatgatgtagccaactttatgttacactcatcatattttacaaagcagtcggtatatcacttggatcatattattcagggattcacaccgcatatgctacatattaatattaagcgcttggttgactacaattatcgaaaccactcggttggttagattatttattccttgattatatgtttggtttgttcaattaaccacatagtcgggggttacacctattaggtgcatctagtcgatgcatctgactttatnttttcagccctccacagtcttctgatntggaaaaagtacttcggagatcatggcgaagatgattgaagcactcggctttggagtaatctagttcgagagaagaatatctctccgactgtgaaggtctcacgngctactgtggagattatgggtaccccatacccacacggcatgaatatcccgactagtataggggaatatctatatatatgacatatgtaacagatcatg

SEQ ID NO: 18969 - DNA, 526 bp, Oryza sativa
  unsure (1)..(526): unsure at all n locations
cttatagcagcaacccgaccctngatacttacggtttcaggatatgtcttgtaacatcaagaacataacantacaagcaagcttcatataattaggagatataaactacgaacaagtgctattgcgggaagcataccagacctccagggaagatgaatgctctgacacttggcttcaacgtgatgcatattcaagctggcagcaggagcaggagatatcattgactgctcaaaatgtgcaaaggaaaggcagcttgaaaacatttcagaaattctcatgtcattgaattgactgataggaacactggaattgcagcatccatttatcactgaacaaaaagcaacagatatctcagcaatggaagcccgcaaggttttctctatcggcggttctggtangaaatgaacagggaaaataagtaacanagtgatgcaatatatacatggtctgatactctaccagagaagaaaacactgccatacttggtcaatgccagaaaacatccacagatattggacatgctgaa

SEQ ID NO: 18970 - DNA, 388 bp, Oryza sativa
  unsure (1)..(388): unsure at all n locations
tcatgaagactatcacaacgactgattaatgcactggacaatgttgttttaaggttattttggcctactttacataatcttgtttatagctgcacttggaaatgtgggatatcattgttcgtgtgattgctgcagcatggatgagaacctgcatcagtccgatgcttggagagagttagttattcctcatgataatgcatgtatggattttctcacagctggtgtctgtgctaagcctttcccacacgtagtaatctttaacccctagcatcctcaaatattcatatcgtgaagaattactcaaattgtattgctggcagcgtgctattgatctatgataaggaatggagatgngtttatatcagactgtcgtctctctggatgactt

SEQ ID NO: 18971 - DNA, 411 bp, Oryza sativa
  unsure (1)..(411): unsure at all n locations
tatgagcatatgacggttgtcttancctacaccaatgatgctgcttatcgtgatatacttaagaagcttccataccaaaacagatggtttcaaatcaccgaagggaattatttactggaagcttcgctgaagcacaaaaactatggtgtgatgacaatccggaaaaggctcatgacccagaaacattttttaaatactatcgacattcaaattgccaccggttagacagatgcttcatgatagaggaagttggtggttattccgctgaacagtttgaattgatcttcattgtgaagtatccactattcttaccgttgttgcaacaggaattgcaaagatacaaccagctgatgtgcctaanacctcacacgttattcttctatggaaatgtangtgatgtaactatcattc

SEQ ID NO: 18972 - DNA, 456 bp, Oryza sativa
  unsure (1)..(456): unsure at all n locations
actaagcttggacggaggctcctaacagtgccctcagccacactaaatatatcactctccatgtctaactatgagcatggaaatgcagatgctgctgctaatgcagntgtgttccctaggccacacacgcacatatatataaggtatcaatagactaaatttgaaagtgatagcaggataagagcgttgcaggcaatagtttcctagtcatttccagttctcaataggctacatttggactccagcataataaattgtacaaagggaaatatgttgattgcagtgttagctgatgacaaggcaatgaatacgagacttcagggtcataaggtgatgacccgaatgatgaacaaacatattgacatggcatcatgacttctatttgttattctattcccatagcaattatgataatccagacgatcaattcacatttcactgcactatatacaacca

SEQ ID NO: 18973 - DNA, 382 bp, Oryza sativa
gtcaagatcaaatattgcatctgaggtaaattactagatgcaagtacttcttgagaatgcacaattcagatggcccttatttcccgcaaccacaagtgtgagttagattggtataaatttgagtacttcaagtgctgaaaatctgatctcacttcttcaatcagagcacggcatggagagtttgtccaaggaacgggaggcaatgatgatagcgttgggccatttacaatctcaagctcctttagtgtagggacttgagtgctgtccatctttgaatatcgcaactctataagttctgggcaatctcttactatgaacacttctagctgagagaacacaccggaagcatcatttcctggtccattttctaatcgcggtatgc

SEQ ID NO: 18974 - DNA, 464 bp, Oryza sativa
  unsure (1)..(464): unsure at all n locations
ntaccactggcatgtacttccttaatttaatcatntaaaggcacgtctctttcattgatgtgaagatctattaaggggcagagagaaaacctataagctatccctaagcaagttctattccatttagctccatgaatggcctgcctaatgtatcacaaagtaatgatgggttgtttactcaggagtatcttgtcccacctaaaaataactggaataaacactatagtatatatttctttcttagtgcttaaggagtaggcagattaataggtgctgcagcaatatgtcctgtctgatctgcatgccatgccattttcagaacataagtggactcagacaagaagctntgttgacttatctttaacactgcattnatgtcaggctcacaatgatgagttaggcccctctaattgcttcttctgtagctnntggttctagtatctttttctttcttttaactaact

SEQ ID NO: 18975 - DNA, 369 bp, Oryza sativa
  unsure (1)..(369): unsure at all n locations
aaaaaagatacacttctgtcttagttgatgtattggaggaaagaatcaaatgttataacgcatgagcggcacaactctatcttagactgtctctggttagtttagtttttgacctgaatgagtagatggctagtccttgatttctagagagcagacaatcttttcttgtcgcatcatcaatgatcaggttgggttcttaaatgcatgatgaggagcctcatcatcagtgatctaccttttgctagagcagctcatnctgaatngaacacatggatgacgagcctcattataagaatacctatcacgatgttactgctancagagttttaagcatgctctctcctagataactcgacaagagtctatggt

SEQ ID NO: 18976 - DNA, 429 bp, Oryza sativa
  unsure (1)..(429): unsure at all n locations
ctcaccggaagagtgtccttgtttatgtgaaacgctgccgagtacacctgtcacgagagtatgctcacaggaacgatgttaccgcgagtcttagccctgttaccgagttgttgaggccaccgtacacatccattccctgtagtgagcacttattataccaactaggaagctagcttgcgcgaatactcaggcatgtattctacggtagatatgtctacacacgcttgaccattcatccgacttaacatttttatctcaaactgtgaaaatataagatatgtgcaaattacctttaatgataaacctagtcacaacaaaataaataattattattacgcttttaatagaactaaatggtcgaatgttcgtaaagaattgaacaacgctctctactaacgatactacacattcttcaanagtattctttag

SEQ ID NO: 18977 - DNA, 407 bp, Oryza sativa
  unsure (1)..(407): unsure at all n locations
agaactctcatcgaggaatttctcacacaaaagagatcaagctaattatgtggaccgtacagtttctgctcctgaaatgtccgtaatgctttacaatcttaatggattgtgtttgtaccatgtaagttgtttccattcaataccaagagtaagaactattctccgtaacagtgatagtgtactagagttggcatacccaacagacaatnttatggagggatgaaaattgctttctacaaaccaccatctgctatcacttctttatcttttactttctggtaatagctcttatgttacacagtatggtataagattcctcttagcttacttgcttagaataagtaccatntaatttcctacgctttatggttacaattattttaatactttaaccaatgagtattatc

SEQ ID NO: 18978 - DNA, 62 bp, Oryza sativa
ggactaaactttttttctttcaacaccgggcggcggaatcaaaagtggctaacaaaaacctt

SEQ ID NO: 18979 - DNA, 291 bp, Oryza sativa
  unsure (1)..(291): unsure at all n locations
gcctatatttaatatttaagatttggatgcatacagatttgacatacattatctacttggaatcttggtagtatttaattaaatccagactggtgaggtaacatgctcatntttttcacagttntaatggtctctgaagtttactcatttagacacttatttgtaaatgtgtagatttataaagatattaacctaagtatgtccacatatacggagccaaaccatggaaaactccaaatatctactgctagtaacgatgcattgattccgactatataaaatatatattaa

SEQ ID NO: 18980 - DNA, 469 bp, Oryza sativa
  unsure (1)..(469): unsure at all n locations
tnctaaatcctcactatgtataaatggtgctattctgcattatctactattataaattataccactgcttaatcttaccaactagattaatctagcacatcggtcttntaatcttgtaactgaacatggtatttggaaggctacaagatacacctgtgttctattattgtccctgatatatatgtccgctggtgatcacttggtgaaccttaagtccttaacagatataccacaaaatcgtacacgttcagtaattagtaatgcatatcatggttttagccacaagagcagcattggcttatttcgganttgggccagaagctcagaactccaagctntgtagtatatgctcaccntgttgggtaaaattatgatactcacatgtaccatgttgcatacaagtgtgaaatttctgcacgatcaaacanagttgtggttttctgatgttctatatttaaatgtaaataac

SEQ ID NO: 18981 - DNA, 407 bp, Oryza sativa
  unsure (1)..(407): unsure at all n locations
actcctgaactcccaattgcatgatattgattctctagaatagttgggcctagcccaattacatgccataccatggttcctgctctagcaatccaaattggagaaagtccattttgcttccctgaactatgggcaagtttggttcctgtcccttagcgtaaaataggatatagtctccctcaatcgttaaaaccggtttaaattacctncttggatggttttgatggtggtttcgtccttcgcggcatccatttagcactttgacttanntcttcatgtgatgtgacgcttacatggcattccacaatatgaanaaatagacaggcccacatgtaagtcttacgacaaaagtataaagaaattggagcccacatgccatcctctctcctctcatgccagtaagcact

SEQ ID NO: 18982 - DNA, 430 bp, Oryza sativa
  unsure (1)..(430): unsure at all n locations
ctaagcttactaagataccatgtgcccagcaaacgctgnaaatgaatgaatgtgttgctccataatcaaacaatattactgccggtgtcgagttgacggagaatgtgcccaatataacctctggtgctgactgcgcctcctctgcagatgctgattaacacgggcctgaacgaacttgggtccagcacgtcttggcttcgggcactttccaaccgtgtgtccgggtttgttacaattgaagcagagttcgggtttttctaccaacctcttgggctgctctggcagagctggctgaactgtatgagctggaatctttagtgaactcggagtacggttgagactgtgctgctcactgttgttgtggctgccactatggtggttcttgttgaagctacccgggtggtagggacggtgctgccggataatcatg

SEQ ID NO: 18983 - DNA, 440 bp, Oryza sativa
  unsure (1)..(440): unsure at all n locations
gacttatattnntttagagagggtgcctctctctcanacatctgtttaggtcttagcaccgtatacaatacgactagggtctagtntgggttcatgggctaatgtaagaatttaaacatgtgggctaatttgatctaaaatgaattaacctccctcaaaacattagccccttcaagagatgctaatggagctaattttgtgtgaggactataaaaaccagctctctgtctccttctctccactatctttctactgtatgtctctccaccgtttagccttgaattaactcatggattccaacatgccatcctagactaatatttagcctaccatattatgactaaacattggctcataagattagccctgcgctaatctttccaacaggcatagtacaatactcgtacgtatcatatgcactatcgtgcgtacgagtactc

SEQ ID NO: 18984 - DNA, 471 bp, Oryza sativa
  unsure (1)..(471): unsure at all n locations
tcacgtgcgtacgttatggacaccaactaacanatatcactaaacaactattattatatttgtctacattttcaatagcgttacacctacttataaaatcttaagcttaaactcattctatcttagccatagacaacttggcagctctaagacacgagtctattatcacaactgtgcctntgtattgcactatgcaaaataaatctaaagatgaaactttatacatagatataatgctactgaaagtgtatgttgtcaagattattccgagacacttataagctgacgtgcatgacgtgaacatgggaacgcctgtgtacattgatacttatacttgaccccaataacgagtaatattacgaaagcatatcacttcagcaaactataccaaactacgaattaaggcgtagatcacagaaaatagattagcgagaaggcttcagacaactattaggatggtatataaaataa

SEQ ID NO: 18985 - DNA, 324 bp, Oryza sativa
  unsure (1)..(324): unsure at all n locations
ntntcctcagactgtgcgtaatatcagcatcacaaagaaaaagatgcattgtgttgtattgntatatggaaaaatacagcatctgatctattgtagctagatcagccaccctcctacatgagaatacacttttatattcgcatggatgactgtacatatttgaaaggatatctaacctgcggagatatntcaggacagtaaagtatagcatttggagataaacattccatgtatcgtgagattagtgtctcacatatctaatgaaatcagagagattcaaacaaaagacctgccaccggtaggtgaaacagatgtaaatgatat

SEQ ID NO: 18986 - DNA, 524 bp, Oryza sativa
  unsure (1)..(524): unsure at all n locations
aaaaactcagctttgataggtacccgactctcctacttgataactatctaccagttgatctttgtttgattgctacctgccgttagaatgctctcctgacatcttcgcattttcctggaatgcagatggccaatacaggttgttggccgctcctatgaagcagttccaatttcataccgtcctgcagaacccatccaacaaccacacggatagtttcctaattcagggccactacccggttatctacctaaactgtacaaacgaggaaaaggtccaaactcgctggtgcatgctactgctcttgcttgtggtgctcgtgtcgtgcctcctgaggaggctgcctcgctgatcaaggctattgagtccaagatcagatctggaggagccacaatagcaaaatcgccttcaagcagcttgacacctctaatttctgaggtcgcctctatgtcatcttctagtgaagatgatgangaatatgaccacagtgagccactgatggcgagtgttgaacacactgccatgat

SEQ ID NO: 18987 - DNA, 352 bp, Oryza sativa
  unsure (1)..(352): unsure at all n locations
aacttgtgctattaattggataaatgtcttaactccctcctttcacttgtctttagatgccgcgctacaagcctgagtactgtttggtactgagggatttgtccaggagttgcgtacgatgtcctttgccataggctttgggactgcccctttgtatgcccagattcctcatgatcatgatgaagagaagtgccgcgtcaaagtcaccttgaacagtaatcgtgaagatatcccatccgtgatgttcgaggctggagggggaaactatattcatgcatgtcaggaggtggcaaggatcgccatatgagagctncgtgatcgctacagtgatcagttggcaacactgagtatc

SEQ ID NO: 18988 - DNA, 233 bp, Oryza sativa
taactaacttaatcatcactccgcctaccattcttctacctacacagaaggagaaataaaaacaaacgaacgaacaaccaatcactcactaagaatgtagtcctatctctcaccattaatctgtatataattgtacacttaatctgagctcgctcagaggatgaaagaactcaattatccgccggagaggcagctgacgacgatgaatccgatgatctagaaattctccttgt

SEQ ID NO: 18989 - DNA, 403 bp, Oryza sativa
  unsure (1)..(403): unsure at all n locations
gatgaccgatatgacatgaacaacatttatccttatatatatggaatgctgacctctagacataaagcgtgttctggatattatggattaaaaattctagcttctctccaggcaaaacgtagtaggtcgaggagaatagcagaaaccacacgtactaatgctccatgatatcaaaaaattagaaattaaatgcattattctacaagtctaaattaagagaaactccaagatatacaattgcatgcatacaatcacattggatcaaagggcagtacatttacttgtatgcaaatagtgcaatattttaccaaaagatcctagacacaaacatgtctacataaatngatccatggaagatctgaactccattaccatgacaacatatagtcaacaactatgtttt

SEQ ID NO: 18990 - DNA, 432 bp, Oryza sativa
  unsure (1)..(432): unsure at all n locations
ctgctgcgcggtgaggagacgcatacgatgatcccggcggtcatgctcgacgagatactctccctgctccgccgcttcaccagttcgaggtgcggcacatatatcgagaggggaactcggtggcccacacgctgtgccggcaggcgtaccatggccctggattgtggacggagagagtgccgatgccaggctgccgtccgggagaagatcgacgacgattgtcgcggagtgctgcacgagcgcctgtgcaagaggaacaagtgacgccatcggcatgaagaatggtggacgcgatcgatgcgggcgcacaagcgattaagcgagtctaatatatcttgtcagatcgatcggctttgctttgtgattggtgtagttgaacatgtaactgacgctcattaattggtcctgtagttganacgtagatgtattatc

SEQ ID NO: 18991 - DNA, 490 bp, Oryza sativa
  unsure (1)..(490): unsure at all n locations
tctgatataaatcacattcaagaagcagttatactttgctctgaatggtgccactggatctctaggatacaaaaatactccagtgcgtaggaagaaatatcaagaaaattcccttggagaacaaatnttgtagaagcacaatctcaaccggtatgttctaattggtatggccagctgcaagtttttgtggactagaatttgatttactgttatgtgctagactgaccatgcagatgtttcacagcttgcatcctcttgcacaggatttggaagggatattgctatcaattaccacagcaaatcatctgaaatgatctataggtaagcggaactatatttatattntctcaaagggaataactcaagaaccagaaaaaaaaggtctatgtactcagataagctcatttgaggttcttaaattcttagtaacatagggtacaagtgtcccttctggccttntagatagttctactatgccaatgtgtaatct

SEQ ID NO: 18992 - DNA, 456 bp, Oryza sativa
  unsure (1)..(456): unsure at all n locations
tatcanaaactaaaagagaatcancctgcatgaatcgntgcagctgacttgttattagccatcctactagcatcaagaagctgtgatccctcagagtccaaggattgagggcgcttcaagcgctcttcatacatcttggcagccaaaacactgctgatgaatgcaccagaatgccatcataatttaaggtgtctattggaccattaagtgaatgatgactcgcattagttcgctgcagctgagcatgtctgagtcgtattacttgcaactgctgcatatgcatctgctgatggtgctctctcgctttgatttgctgtgactatgtttccgacagagatacaccgtggatcagatcaagagttatagatgcatggngaactaaagaatcccagaaacctctangatgccgctgaacctaaaatgctttcatttgtcttgcataatatatcccaaaac

SEQ ID NO: 18993 - DNA, 256 bp, Oryza sativa
  unsure (1)..(256): unsure at all n locations
tgacgtcagctggtctatacagccaactcacacgttacttgggaaagcctttctctcttttctcaatccaacgtatcaacccaatgaaagggggaacttgaacagcctgaacaagagcgcagtcgccaacacggaattcactgcccgtcctggtattcaatacaaaaatcatcatgtgtacaagggacaaaacacaatccatgtatccatcaanataacattgggcatatgataacactgaagaatgcatgtcggc

SEQ ID NO: 18994 - DNA, 280 bp, Oryza sativa
  unsure (1)..(280): unsure at all n locations
taaggactctatgttccctctctacctctaggaaagtcctatattgtcttacaaggactagtatctacccatgggtataaatatgtatacccggngtcaacgtaaaaatatctctcgatcaatacaactactcttggcgcatcaccaccctctttaccgaggtttttacttatcaaccgcgcggaattggcatctgatgcggcgctacatcggctcagctccatctcctgcgaacgggtatgtcctacgttccgccggacctaccgaatctatccgctac

SEQ ID NO: 18995 - DNA, 435 bp, Oryza sativa
aacagtcatgtcaagcacatcacagttcaagcaaatttgttagcttttctctgccatccaacagaaataataaagagcggattgataaagctacatattcagatcatcaagccgaaatttgaatactattatccatctatctcctgcctgcattctcctttgcacaggagtgcttcgctaatctctttcgtgtgacaacacgataccataggcatattggcatattatggttgtgaggaaatgtgatatctcacttttatgagtaaatctctattgcgaaataagggtggctcttcgacactttatctctatctttgccatgcttcgtcaacagaagaaaatttcagttatttcaactcatagccagctaggtcattcatgtctctatagacagtaccactgaaggggcttacagctctactatgactgcaacac

SEQ ID NO: 18996 - DNA, 477 bp, Oryza sativa
  unsure (1)..(477): unsure at all n locations
gactcttattttagcctcaatacctttttggtttgtttaataatagaggaccattcttccatggtatcactgaactggtccaaagncaacaagtagtccaggtcactntccttcttcttcttgagcaataccttatgtatgctattacttcatccctgcagacctgtagtttctgggcgaatggaataaataaaacatgggttngcatcagaatcatggtgttataccgatcatcacnaacgtttactttccatcagaagaatatatgggttagctcaaattagaggtcattaattaactcaagttacactacaggtcatcaactcagaatatctcagcaggaatttgccatgattaatatatacccttccaataaagaatacatgtgaactcacattataggtcatgaattcaatatgtttcttcataggaattggcatatactaacatagantctaacatantccttccaatatc

SEQ ID NO: 18997 - DNA, 457 bp, Oryza sativa
  unsure (1)..(457): unsure at all n locations
gaatactagactagtctaaaatagaatctttggcgtntgtctcataagcacaagccataggggcggctgtgntatacgactgatcagtgaacacaagaatttgtctctgcatcacangtatcacctgtgatacataaagctctgaaacatcatgtagttccgaaagaagaaaccctgcatggaatgttgaaagaccaatcgtttctttgtgctaccatgtatcatgtcgcttatgtcactcacttagcatggctttcatagacagtatctaacacaattgctatttgttaagaggatccttcctacaggattctgctacnaagtggtgacttcagataggcagggaatctacacaatgatagactacctgtgacctggtgccgaggcaactaaatacagtcgtatgtacttctcttgaatgtgtggataccagatgaacaatgacgtctatatatat

SEQ ID NO: 18998 - DNA, 113 bp, Oryza sativa
  unsure (1)..(113): unsure at all n locations
aatatggaatactcanctgctaagaatcttgtacataatgaacatatgccactgtcgagaatgcatgagaaaatatcgacaactgatnagtccttctaagcgctacagctgtg

SEQ ID NO: 18999 - DNA, 281 bp, Oryza sativa
  unsure (1)..(281): unsure at all n locations
acacaactgctggcgatntgactacttttatcggncgattctaagactctgaggccgatactgactctaggccgatgatgaatttgggcttaccacaatttggcgttaactgatagattatactaaacaaatatgcatgcaagcgttgctacttcttatttctggatatattgacggtcgaaattggtctataacgaccgtcaacagtcaactatcgatgttctagatcggcaataagaaaaggattaattggatccatgccattgtatatatgctgattc

SEQ ID NO: 19000 - DNA, 356 bp, Oryza sativa
  unsure (1)..(356): unsure at all n locations
ttatttcctatgaaactcttggtgttaggacattaaacattgaagttgcgtgcataaatgatgcggcatgtacacatggcatgttcaaagggtctaacgactatattgaatcaccaataaactnaaggtactcgtttggacaatacgaaatgtcagagactagactgatccttaaacgaaagctcaagcaggggcggagctagtatataatatggggtgtccaggaacctcggtaaaacacaatcagctatacctgatctattgcaccatatatgcacgcctcctcaaacaaagttaagcatccgcatacgcttaaactcgatctaaagcgagtaaataactaagtggcaccaccc

SEQ ID NO: 19001 - DNA, 171 bp, Oryza sativa
actgaatggaagcaacccaagacagtcactcaaattcgcagtttcttaagtttgccggatactaccggagacttatcgagaacttctccaaaatcgctcgacccatgacacagctgttgaacaaagaggagaaattcgtgcggagcccgcaatgcgagaaggcgttccaaa

SEQ ID NO: 19002 - DNA, 308 bp, Oryza sativa
ataacgacaaaagcaccgctggcgccgttcgtcaaggtcttcaaagagaacagtgactatgttttcacccggtagccccacacagaggatgggatagcacgacaacaccctcaagaggaagtgacgctctgaacgcaatcgttgccagctcgaccaaggccggactaggttatcacccaccgtgtggcgcttgccatccatcgctgacacatcaatgctccactgttgtctaacctccgcggacatgtgggcaccgtttgaccgacgccccacgccggctatccttcgcgtgccgcaccctcgtcgcg

SEQ ID NO: 19003 - DNA, 536 bp, Oryza sativa
  unsure (1)..(536): unsure at all n locations
caaaatactcagctggtagactccacctcatccagcgcatccttagccaattcaacagtatctctgatctgccacaaccacgcatccagtgcatcactttggtctccgatatgctccatgtccacagcatccaagaccaccttgatctgagggaggagttctccagcctctctctagtaggcttcagccctccagcttccttgttatccttcaagtagtcgaatgccttgttgatgacatacgtgatgactgatgttgcaatagctntccctgcanaaaccgcagcaacaccagccatgtttgagtccttgagagatcaaagaaagaaagctttggcacacaagctgaaggcctttttgggcagaaatggagaaatctacttagaaacgcatgtggatcctgctaacaaactagaggataacgctgctaaaccacacaggtggtgagcttgactagtactcctaccacaactaatagtacttgatacggacaggagtattgactaaatcgacacattcgtgacccaccaaacaaac

SEQ ID NO: 19004 - DNA, 485 bp, Oryza sativa
  unsure (1)..(485): unsure at all n locations
cagaatggtagggaccatgaagttctctccttctgttccctggggctcagcagtggactctgttcatattcttcgtcaccatcatctctaacttgcatcatggagatgctagtcatggngatcactcaactactctgctatgctgctcattagagaagctgagagaactcgtattttccaccatcttaagcaagggagtctcttcactggcatctctccttgaagctggtatctgtagcagatatccttcctgactagccttatcagtatccgcaatgatcttctatntggttggattcagcacgaaagtctaccttcaccatgactttctccagattggattcagaagttaaacctattgctgtagtggatgcgctatctntctcctggtttgagccatgaggaaagaatgtgtctgtctntgaacttntntncactaactgcatgcaactaagaatgctgccattctcaaatttcacaacctc

SEQ ID NO: 19005 - DNA, 462 bp, Oryza sativa
  unsure (1)..(462): unsure at all n locations
ctcagcttcacaagaactacaacagtggcagtcacagcaacagtgagcagctctattctctatcctactccaagcccactaatgattgcagcttagtcagttcagtcagctctgccagctcagccagaacagcccaagaagtttggagaaaagccgaactctgcttcatttgtaacgagcccggacacatggtacgtacgtgcccgaagccaagacgtgccggactcaagttcgttcaggcccgtgtcaatcatgcatctgcagaggaggcacagtcagcaccagagggtttatggtgcacantttctggtaactcgacacccgcataatatggttgattctgtgcaactcattcttcatttcaagcgtttgctggtgccatgggtatcttagtgaagttaagatactatggagttatactctggggtggatgacacaactactattgccatcgtgaagtga

SEQ ID NO: 19006 - DNA, 298 bp, Oryza sativa
  unsure (1)..(298): unsure at all n locations
cgaccatagaaactcagcttctacggcaggacgagggaacgcgaccggatttcatcgtggtgtgtatcttatcagtgcggcacggctcggggcggcacacgggactgtgcggagggtgtggnggcgtctcggcatgctgctcgcccggctcgacatttcgcgagcacgtggcgggcacgtgcggncggccggctgacttcaagggggagagggagtgggccggcctgagtgagggaaagggcgggctggcccaatgaggaaaagacagacgagagggagttggaataagttcacttta

SEQ ID NO: 19007 - DNA, 293 bp, Oryza sativa
  unsure (1)..(293): unsure at all n locations
acggtgctgagcatctccttacatgtagctatctgtatatacggattatattgcgctacatgcatatgtggtataattggaaaatggtgcttgtgcttttgctgacattactggatgtgcctntctccatttatttcgtttgcaggtacctgtagatcttgttattgatcattcagtacaagtngatgtggcaagatcagaaaatgtctgtcaggcaaatatggagctagagttcaatcgtaccacggagaggtttggatttttgaaatggggtcaactgctttccgtacatg

SEQ ID NO: 19008 - DNA, 359 bp, Oryza sativa
  unsure (1)..(359): unsure at all n locations
gatgatactatatcggaatgatgatattaggttgcatatctttcttctttcgtgctatatatattggaaaccttcatagctattgaacacagcacacgcagactattacatatgtaacaccatgatgacatgatcagtggcagaaatgatgttcataacggtattatatattgacagaattatacgccatacggactgtaagaagatgtatagctctgtagaaatttagaatgatgctcaccnctatagtcgcggagtaatagaatcacaaagcagaaacacttcggcaggaataatcatgttcatactatcgcgttgcatacaaaatcttgctctcgatatgtgttattaattattat

SEQ ID NO: 19009 - DNA, 478 bp, Oryza sativa
  unsure (1)..(478): unsure at all n locations
ctcagctaacctccaactctgtctcctcaagagcactctcgatcctttataagatcatgatagngagctcgagcttaagctctccattcctatgcgcctacatctccattagattgcaccgacgtcatttcaagctcctactccctaccgcctctctccaagcttnctttcacattgcctatgtgcacctattctccacacgctgcctcctcctcaagctatgtcgcaccgcaatccacatcgacgccatctcaatgagctccaccgactcgttgtcacacaagctcggtgcaatgattgctcaagctngagctctaccaccttcgttcttcataagctcgctgtagcagagtttgatctcaagggaggcagagcttgatggactggagtgctcgaagggcttggaagagtcaacatggaggcagttcatncgctncttccattctgtgctactcgcactggcttgagcactagatct

SEQ ID NO: 19010 - DNA, 437 bp, Oryza sativa
  unsure (1)..(437): unsure at all n locations
agcttgggtcaatttntggcactatatgctggtctatgatattcataatggtgttctggctgccttttaagatccatgtcccctccaccttcaaacttttccgatgaatcggattctggctcctcactctgagtgtagacagcattgctcctcgagtccttctggccaattctgcatactgactagtggattacctttgatcttccccggatctggccctatgatcagacccaaatttggatactaattggttctcatacttttaagaactagccttagaccatgaccagctgagttttctgtcctgaatcgctgcaactgcttcttgcagtattatgctccggtatatacaatggccaatccattatccttttagagttaccaaatacttgcccataactcaattttgcagagactttgattctgtgtgaaaaatg

SEQ ID NO: 19011 - DNA, 456 bp, Oryza sativa
  unsure (1)..(456): unsure at all n locations
aaaactaagcttgcaggcggtgcattacaaanaagaaaaagganntatgtctctgttgctcggtgatgcggcaacactcaaccgctcgctggatcgctgcggttcgatttcaatgcgttgcgttgtgttgcctccggtgaggtgtcgtcgccacggggcagcagcaaccaacagcgttcagagcagacagcaccgttggtttcgcatccttctcagctcctaccagggtttcccataaccgcctgtggccgaggctaccgcgctccatcggtagacacgattaccacggtaaccgtgaaatcatacaaaaccgtgtgaaaattatcaaacacttacattattttttacaattatttgaatctaagaagggtaccacgcatttatattactgtactccgcggtaagcccggtaaccgcgcgggtaccaacggtaacgttaacctcgctcctatctct

SEQ ID NO: 19012 - DNA, 301 bp, Oryza sativa
  unsure (1)..(301): unsure at all n locations
agcatgcacgcttgctcataaccgagggcgcggntatacgaatagatttttctcttatcagaggtcgacatcctgtacccacatgacacatctttctcacgtgtaaccacgtgccacataccaccacggtatacggacagaagacgtgacatagtttccaacccaatctagccatagacaagagtaccgacccaaccccacctacggccggaaccccctggacaggtaggcatgactgaacctctatcagcaagacaccggtcctgtgccatgagatctcgactaccggtccgcagctctg

SEQ ID NO: 19013 - DNA, 392 bp, Oryza sativa
  unsure (1)..(392): unsure at all n locations
tcgcggtggtgtgcacgatttcgagttgttgcgtgctttcgacggagacatatacggcactggtagtagcaggtccgatctgtgttcatgcaggacttgacttggtagatgtcgtggtatatgagtcgggcacgattcgatttcaatacacatggcacagattagatcaagaatgagaccatgtcgggaacggaaggggattggacgangactgtattcgttttggaatcggagtcaagttttacccaaaatagaagcagcagggattccacgggattgcagagatggcaatcgaatcataccaaccaaagcaatgaagagatcggacccgatttcttgggcggtgtgtggttgggcgatgaactacaagcggtagaagcacggcttggtgt

SEQ ID NO: 19014 - DNA, 248 bp, Oryza sativa
cgcgaagccattactaatgcgtaaacgagcttttttattttgtgtatcttatcttcgccgcttgcagagcttcagagaagaaatacacttgtttctggcttactcagtctcttggatgagagctgcactgaccgccactagcgaagctgctagatagagcaacccgtcgcttcccagtgttgggctgaccaaagcgggcgggctttgcagatactggtctagctcgtcgaacgcttcttggcatttag

SEQ ID NO: 19015 - DNA, 467 bp, Oryza sativa
  unsure (1)..(467): unsure at all n locations
actctccatattcatcacacttttatttatagctcactgcctgagccaatatgctatcctgaaaattacccgtatatagtaaacagatggtgatntatcaaaaaccctattatttctactcaaccatagagtccaacatatggttgaggctccaacaaatatcagtatagaaagggagtagctatataaagggagtatcagtatatgtatcaatatataaggagagtagctatatttatggcgctatatgttntcaaaaaaatagtcatcatgtatttacattgtaagttgctaaatcatgtatttacattgtaagtccctaaaatatatatgtaattttagtggtagtacaatgtaaatcttaaaattacatctacaattaagatgtaattattgtgtaagataaatgcaatatggtgaaactaacatgcatactacatactcgatatattgaattagtatataat

SEQ ID NO: 19016 - DNA, 253 bp, Oryza sativa
gagacgcaccactcttttgctttcttctcaaggatctggggccgggaagacagtacagaaatgtcaaattgtcaatgtctgtgcactggatttcgttcaaaaaaagaaaaaaaaaggaagtgtactggactggttgacagaagtttgaatgttcaagtaacttacggcacgtctgtttccggcatctatgtcaatcttgttgccgagtaatatgaagggaaaatggttgggatctgatgggctatcctaaaaa

SEQ ID NO: 19017 - DNA, 447 bp, Oryza sativa
  unsure (1)..(447): unsure at all n locations
tgttcctgcagttagaaagcatgatgcgtctntgtattctttggcaatctcangttatcactcaaatggttgtcagggtgaagctgtgaaactcgcagaggttcttctttattcgggtctcaatttaagggaaggggatttggttactgtgataaatatctgtcagaccaaagaggaagttcaacagatgcatgcttatactntcagaactggggatttatcttatactaatgtttgcaattctcttatatcgatatactctgaaattggatcgttgattcacgcggaatcaatctttaaaactatgcaatcccgagatgtcatatcatggactgcagtcatggcaggctgtgtcaagaacctacaatatgaaagagcatntnnggtatttttataagtaagaaactctggagaaccattatatcagcactgtgttgctaatctaat

SEQ ID NO: 19018 - DNA, 118 bp, Oryza sativa
tctcaggacaactggactgctgacttctttctgggctgaccaacgccttgggcttgattggactctactcggagtcagccattctttcatatctatttccataactcacccctttgat

SEQ ID NO: 19019 - DNA, 387 bp, Oryza sativa
  unsure (1)..(387): unsure at all n locations
gcttgtactttattaaaatactcttctatatacatttctggtattgagnactttccgagtacatgagttccaattttacattatgttcttgtatactgaatgtacggctaacttatctgggagatgctgtggtgcgggtatagtggttacttatgcaattactctatgtcatgacgatgatattagagtagtatctggtagttaagacgtggggtttagattacaggatatcattacttggcgttatatattgcggatgagaagtgggccgctgatggtgacagctcaatacgggtattcctccacgcctatatataatcctaagttaatttcctggggagagtactcctctgtatttatccccgcgntggatggtcatgacaggct

SEQ ID NO: 19020 - DNA, 400 bp, Oryza sativa
ttaagcgactgcagctgcagcttgtttgcttgacgggagaggaccacttttagttatggatcttttaatggagagaaagctcaaagacgtgctagacttaggagagactaacagagcctttagtaaggctccttggaaacaaatgatctctattggctagaattagaaataatggtcatgtattaaagaactgacacttggtctccctcagccatttaaatgcgttgaagtcatgtgttaatgtttgaccgccgcttattaattcttatgattagattttattgcattagataataaaatgaatttatttaaacgtacttacttttaaattttataatttttaatagacgaggtaacgtggatcacatctcactccttaaaaacacaatgggcatgaatg

SEQ ID NO: 19021 - DNA, 500 bp, Oryza sativa
  unsure (1)..(500): unsure at all n locations
tctcttactgaaggggggagatagatagagcatgaatgattttctccacagtactcagcaagccacaccggcggatgcacgattaatgcaagggggtacaaggngataataatatgggttaagttttgcagtatacagcatttaaaagtcacttatttgcccaaagccattttaaaaagacgatcctagagctacacagtattgttaatcaaggtcgtgaacccgcacgaacctgccttaacccaaggcctacgatgattcagaccgaactggcaacccgaccctgtgtcccagctcgtcccaagccaacccaggccaaccattccacattntatttgntgagcaaattttaagaattaaaacactaacttgggtacattgctcggctttgccataaccganggcgcggctattcgaatagaatatactctgatcagaggtgacatctttacccacaagacacgtgttnctcacgtgttaccacgtgccacataccacca

SEQ ID NO: 19022 - DNA, 353 bp, Oryza sativa
  unsure (1)..(353): unsure at all n locations
agctntacagtccctctatttggaccacttcttactcttattatggcatgattagatgatgattgtcctcggccttaattcatattattactggctttttttttgcttttggcatttgctggttctaaacaaatgtcctcacaatgtaacaaacagcgaacagacgtgtatgaatatgcaaaagttcttggtaattctcagtacatcctcttgccatttcaaccatataagctgatatatgcatacatgctttgggaggttgggaaggtttctgattcattaaggtaatttgctgagttactattccagtttttcccctggtttcttagttacacacattgacattaaactac

SEQ ID NO: 19023 - DNA, 480 bp, Oryza sativa
  unsure (1)..(480): unsure at all n locations
tacggaccttagatactcagcttactattgctaatggatagaaatgttatttatcgtattcactaaaaaaaatagtagaaatgttacttagaatcattatacttgtgtatacagtttcagatccaccatacctgcactatntatgcacaaagagccaaaactgaaagtctcacatgattcatttcattcatgattcagacattgagttggaggcaggaatctgcctttntcgacgatgcattcctagttcagttttaagataatgtcttggtttgtacaggtgttttntgccgggccggccaagataggccaaccaaatttactaagattgatgaatatgtactggtttgacaggtgttacctgactatttcatttcaaagaccagcttaacctgtttggtatcaccaggttgtggctttaacatattccgtatatttggaaggacggaagtgaaccaagaagctcatgtacaggaagct

SEQ ID NO: 19024 - DNA, 437 bp, Oryza sativa
agcttgtcgatttctttaggagcgcaacgcaagttcttgtttttacgcatctcctgctcacagcagaacctagtaccaaacggcagttagtgaatttgaagtacaatacattataaactgcacatatgaaagaatgtgagcatcacctcacggaggctgttcttctccactgcaagagatcgcaccatctgctgaacgtccggtagcctctgcatatcaccaaaacaaccaagcattaagacgagataagcaacaccagctagagaacatgctttggccctccacagttcacaagaattgatctttttgtggctatacacctttgagctttgcctaagattcacttatgttcaactccagccttcaagggcaggcgaatgtacagctttgcttttgctaactagtcaatttggttaccaccacagagacaccccgcc

SEQ ID NO: 19025 - DNA, 397 bp, Oryza sativa
  unsure (1)..(397): unsure at all n locations
ctatattagtctaagcaggcacctatcnattttattattatctatgacactctttttgcaaggtctttacctatttaaatagagtgctattacttggacattgacttcatcaagagtatatggagtacttgacgatcgaagtcaatagctagagtccctgatcgacttgtaatgcaacagaaacgaacaaatcttattttcagggcatatatataatatatcatatatggatgattagataacctaattagcttgaatggattcttatatgctcaatacaaaaacagtgacatccgcatgaatgttcttaagttgacttgcatatttgactggaatattctctcacatatatacatctcgatcatgtattcattaatacatcatgcttcaccatata

SEQ ID NO: 19026 - DNA, 275 bp, Oryza sativa
  unsure (1)..(275): unsure at all n locations
aatctactactatccagagcatgacataaaagcgaacagcatactaaanatattatatctcctacaccactggagataaaatcgcgccctttggttagaagataaagacacatattatctacaactttctaggtatacacttctgcaggaagatacatttagagccccgacacatcacaaaactgaagcactgcaaatctgtccacatgcataactggtgacaacctaactggaacaacccaactccatctctagcctctctaacccaaattaac

SEQ ID NO: 19027 - DNA, 490 bp, Oryza sativa
  unsure (1)..(490): unsure at all n locations
acttactgttgacatgcattctctatttttttcaagagacaacagctngaattgatgaactggacagcaacaactcgagtataacaggatccgataacagattaattaactataaatacgctggacaaagatctaaatagcataaactattgcgacgacttacaacttgtaatgcaaattgtgatcccaaaaaagcaaatccaaagataggtggtcgatcgatgtgacctgaagactgaagttaatagattctaacggcggagctagcgtttttaatactcccaacataagtcacacatattctacattgtaagtttttcaaataaattaattggtcttatgtgtaatctttatgcattcaagacttaaatgaagagataaatttatatttttattagaacccatggagtcatctaaatactcattggttgcatgctctacatcgctctctaattttgtacattcaaggtgatgtatatttatttgatct

SEQ ID NO: 19028 - DNA, 451 bp, Oryza sativa
agcttcagcttccctttatgccgactgtgtatcttctgcttcttctatgcgcagcttctggtaatcgttagcatgcattatgtcctcatgattgattgcactctgagaaaagtagaaaaaaggtattcttttcagaaacaaaaattgacccaaattattcgtgttagagatcataatttattttcttacatgaatgccctgagcacaaaaaagactcttcaaaatgttggatacttcatccatgcctagaagagctcagctcagtctcagaggttgtcggcgcagccaaagctgcacatggctgatcttattgcttcatttggaatcccgatattgacatcttcagacaattggctgagaatatttgatgtttcagttcaatcattattgtcatcgtctggcagttcgaacaaatccttcacatctttggctttaaaaaaatttcacctct

SEQ ID NO: 19029 - DNA, 450 bp, Oryza sativa
  unsure (1)..(450): unsure at all n locations
ggcagtggcatgggctgctgcgtcgtctccttccggagacttgtccgggctttcagagnttccatcactcagagagaagcaacgcagcctttccaagttgctaatgctagtactatcaaggttttcttatcagaagagagtacgacctaccattacaattttacaataggagatctcctctccgatgagataaatgaaaccactgttgcatctacttcggcgtacctatcaacctttatcgcagaccaaccaaactgtacaatagcgcagaaggatcctgagcggtatgcttgtggtgataacaaatgtttggatgcggatgacgaanatggaggctaccgttgtgcatgcatcaaatatactaatagcaatccctacctcgacggtgactgcgaccaaggtaactctaactgcatgtntacttacaaacatactacctcccactggtgg

SEQ ID NO: 19030 - DNA, 444 bp, Oryza sativa
  unsure (1)..(444): unsure at all n locations
agctngactgaganatcaaaggcgcataacttattgcactattaagactgcaaagtcatagaagatacagacagagctctttgtatatgaccccatttttctaacatgtgaattgcatgtatcagagtaaaatcaaaatcttttattcttctgatgtggtatctaccaaaagtgcatccttactaatcatcccatgataccaatatgtgaattccattatatcattataaatcataaaagaggtgaatatctattattntctcatganggactatcaaggtgcatcactaatcataattatatgatatcaccacataccatataattctaagaatatgtgaatatctatgaatagtcctactgagctactagacatgtatgggagtcctggggaggtaaacagaaacatgatcaaaatagtacagatcgttgtatgaattatct

SEQ ID NO: 19031 - DNA, 349 bp, Oryza sativa
  unsure (1)..(349): unsure at all n locations
gtattggagactaacctttttgtggttgattgcttgatgaggcttgggatcaatcgagatccggctccttggagtccctcaacagaaagtaggatcgttgagatccgaatttcggtgaataatctgtgtctcctccttgtcttgcttgttatatntgcttccctgcttgatcataattatntactctatctattgcagctgtgtgttggagggttgcgcctangttngctcccatggcataacaaactaaggagaccggatgtttattttttcagactggaacttctggtccgctacttctgttaattaagaccgaaacctttggtaatttgattcgctgtgagtggtt

SEQ ID NO: 19032 - DNA, 161 bp, Oryza sativa
cccctctgagatgatgccttgtcgccggatagcggaaacacactcttctgacacattttgctagctgcggcaaaaggtgggctgaggttagcagattatcaaacagggacgagacatgggtggggaattgcagtgtttgactacactagaacacgaggtgt

SEQ ID NO: 19033 - DNA, 482 bp, Oryza sativa
  unsure (1)..(482): unsure at all n locations
tgctcaaatcacagcagcacacaacattntctctggaaagtatggacttcatatcaacacatctattgtgcactactttgatattggggttaaatatacgaatctcatatagtatcatcgaccaatccatcgtatggcataaaatgttgtggtgatcatgtgatctgatgttcccatcaatttgtgtttggttttctttggcaattaagtgtgcaatggaaggactttggaggtggcaaataaataaatacggtgcgaaaataaataagtaaataaataaagatggcgttttcatgctgtatttcactctcgtcagctcatgaaagtgagagtcgcctcccatcacatgccaccaccaaacacacgtccctctcccatgtggagccctcctttatttatgttccctgcgggcccaccccaataattacaatgcccttcacagctctcatcttctgtgctcaagcatacggtggcatctcatg

SEQ ID NO: 19034 - DNA, 456 bp, Oryza sativa
  unsure (1)..(456): unsure at all n locations
gcttatcgaanacaaatataccanattggcccatttggatgacctatctgagggaaaagagatcttatctcctcgtgtagatggcgccaccccaaacaacttgcattgtctgcgagaagcatggtaaaagaataggactagccattgaaccgctcgtggtccggttcatcggctcaccggttggatagactgggttgattgctgaactggccaaagctatttagcatacaacatgattntaaacaatgtggccaccctaccaacctatgtttgactccctaccgctccatcttttttcctcattntctttaataaatcannatgggccttaagatgcanggtggtccttcctaggtgggcccatctgttgctgaaccgctgttcataataccccagttcaccattttcctcanaactacctattcacctgatcatctagcaaattgattgtggcct

SEQ ID NO: 19035 - DNA, 513 bp, Oryza sativa
  unsure (1)..(513): unsure at all n locations
attgttcgggaggatgttgtttactctcatctgtataaatattgttctttgcaggtggactggttgccgacaaggttgcttgtgagggtgaataggtgtcactgaatggttcgactggagaggtcattttgggcaagctgcctctatccccaccagcacttagtggtgatttgggagaattcatgtctcgggtggatgaagttaagatactcacggtaaaaatgtcccaacgaattattataatacaagttacatgagccaagattttcatgcttcctaagcagttcaaatctgactaaacgcatgtagttattcatcaattatattgttcttatattcatgtatgcctgangttccaggtcaaggctaatgctgatactcctgcggatgcactgactgtcagaaataacggtgcggaatggattgtgtgtgcacaacataacacatggttggacactgcttatcttatattcaaagcatctgtggataattctgacactgctctgctcattg

SEQ ID NO: 19036 - DNA, 235 bp, Oryza sativa
  unsure (1)..(235): unsure at all n locations
acatgaactctattgcgctgaggtatggaagatgatgacagaatntgcctagcgagctgcgctataccatcggagataaaaccactggcaatcctctgatccggcggcactgcattgtgatagcagaaagatcgtcttcacagcctccgtaacgcacgacagtggattatcattatacagatgtgtaccatccttttctgagaagtcaggatgtgcccgaccacaaaatgactac

SEQ ID NO: 19037 - DNA, 488 bp, Oryza sativa
  unsure (1)..(488): unsure at all n locations
agctngaagatgaacagtacggggaggcaaattagactttcttctgggcttctacttccaaggactgattaaagaagggacaaaaagcagacttcgggaaagagagggaaaggaatgcaagctgagaggagactgggccgagagtgagaggacttttcctaattcggcccgaaaaggaaaaggtgaattntaattacttttccaattaaattaatcactgaaatgatctttgaattgtaaaaatacttgtattgctcaaataatttcaagaataatcttgaaaatacttggaccctcaaagtatttaacaaaantataatcagacccattaatgaataatttaatatgtggataatactgaaatgttctttgatgataanattacgagtgagctccgaaaatccgagaaaatccagagagatacttaaccatgagaaattataaaaataaatcatcatgcttatattangaatttatttccatattac

SEQ ID NO: 19038 - DNA, 414 bp, Oryza sativa
  unsure (1)..(414): unsure at all n locations
ggcataggctagtggtctgtttgatctgttntgccagntgcttcattcgaaatgtgaatcttatgtgttcttttgtaatatatcgcatgaccattcacattaattggggaagaatatacaaaagattacatgtagggagctagggacctcaccacagaaaaaacttaactcaggtgctagagctaaattagagtgagttcacggtttttggttaagtacctgattttttttcccctcaggcttgcatttcttcaatctgaagtgcccctgttttagtgcattccgatgatgttagtcacattgntgtcaacaaacaacacacaggtagatacaaaagtctcatgttcaaggcagccactcactgatcattgcatcagccaaaacactaggcatagcaattccatttgtattact

SEQ ID NO: 19039 - DNA, 473 bp, Oryza sativa
  unsure (1)..(473): unsure at all n locations
tgtgactcanaaatatcgatgcagtatcaactagtatggattatataaagacctgaccctncatattcttgcatgtagatgtactagtatattataagtgacgctcctatatgattcatattaaaaagactagaaatgacgttagagctccaggttgtctcccatcatttaaccattgaagctagctnttataatttcaagcctcacttgcaatctacaatattcacatgatttcattaacccaacctatgatttatttctgtaattagttgagaaattttctaatccaacatatatgtccaaataacaggtagcttatggactgaagaggtatcacctaattggttgttcttcatcagcacaacaaaataaaatgccattctaagtgaatgctggttttattctatacaaaagtgcaacgtgctgttaaaattaataatacattacgctgaaaataacaaaactgatgggaa

SEQ ID NO: 19040 - DNA, 371 bp, Oryza sativa
  unsure (1)..(371): unsure at all n locations
agcttactgagcctaccaaggctctcagggatnggtcctctgatctggttgtcattgagatacatttcccttaacgacgagaggttgccgagtgactgtgggatgatcccagtgaagttgttcttccctagtgacatgatcttgatcctcgacaatccgtcaagccaatcacggatctcacgattgagtttgttcaggtcaagttttatgctcacgaggcgagtgcagntcctcaagccatgtgtgatcccaccttggagcgaattgttgacatgtagagtgtcgataaccatggcagctgcccaattgtcgaaggcatttcaccttggagtgaatttgttgacacgtcgagatatttcattcgcgacaat

SEQ ID NO: 19041 - DNA, 406 bp, Oryza sativa
actcaagcttagcagcagttataatcccgatcgggaggccgtttcgttttgatcgatcgaccttggcgacgagatgaacggatcatgggatggatggatggatggaacgaggcggctggccgggagggaggtgtccgagttatatatgggcgtgcgtggtggtggcgcggcgggatcggagttgggatccgaatcggaatcggaatcggaagccaggaaagaattaattcttctctccgattcggtcgacgtcgggctcgaacgtacgtacgcgcgttgggcgcgccgcattctcacgagatcgcacgcacacgcacgcagctcgggagccgatgtgcggcctcgacaccgacacgttcacgtccaccacgtcgaatatccatggctccatgtgccatgcaagcag

SEQ ID NO: 19042 - DNA, 437 bp, Oryza sativa
  unsure (1)..(437): unsure at all n locations
agctngcgtcttcttgatgagcatttagcatactcattgttctttaaagggacaactacaaagctgttcatcttacagtacgagcaaactgcaaaaggcaacttcgcggaaatgcctattgaagaattgatcaagaggtttgctgtttacacacttgcgaatttgctctctgatcaacaatggttntatttattaaacaaaatctgctcactgtgtattactgtattgatgtaaatttatatcctttatagtccatagtttgtttagaaacatttctattgtattgaatgctgtgcttgctangtgctaaagctcttctnntttattctcgttgagctttngactaaacttcattacatgcatgcttgatgttcttttgttattaatatactaatcatgaaaatattggctaattgtacttcctaaggccgagttca

SEQ ID NO: 19043 - DNA, 506 bp, Oryza sativa
  unsure (1)..(506): unsure at all n locations
ntacaaaaccttcagggtttcacatggctcctgttcttatttatccttgattgcctgttcccaggctgacaaacatgctaaatactacagggcatggtgattcagcaccaggacaggtggcatcaggttaacagtgttttcttaagcctttctgttcatgtcacatggttccatatcagtagagcaagatcattaataacacaccggcatcacactccaaatgtcccagttctagctgtcttcaatgtcgcaataatgctatcagccagctcggttcatcccttttatacccatgatccatccatgcccaaccttttaccccatgatggcctgatctgagtacacatggtacttaactacatattttcactaataaagattaactcgtaatggtcaaaactaacttcaactataattctgagtgtcttatgggccatggcaagtcaagtacatattgtagctcaaggtacaagcatacggtcccaaaaacaatgatcacagctact

SEQ ID NO: 19044 - DNA, 450 bp, Oryza sativa
  unsure (1)..(450): unsure at all n locations
agctngaatgaacttgagagcaaactttggagaggtatattataatgtcgtgaaatggggtggaattccctctctcggctggttggcttaagtagtgcacccagaatggtcaaaaccgacctatggggcccactatctgttgcctcaaagaaggaggcagccgaccgttggcctagctggttcggccaaacccacggtgggcccaaccggacccactttcagccaatgggttccaacggtcagtgtggtcatggcacagtgaattntcacttgaaaatttattttggtttgctctgaaaaattcatttgaagaatttccacanaattcanaaatcctaaatgcaactttgaaatccaacatgtgatgatgcanaaattcaaattgttgaaaacaaatatgcggataccataccaattacctgttggcgaaggtcgcgtcatttaaagtcc

SEQ ID NO: 19045 - DNA, 448 bp, Oryza sativa
cagaagcgaagggttcctgcttcgtttgactctctctctgacgacgtggatgatgccaaagatcgtgacggcgaggaggaaggagaggaagaagaggaggtggaggctgtggctgataatgccgcgggtgaggcagtcgaagaccgcgccgacacccccaggtacactcctaccccaagtcctggtcacaacgaaaatggagtggagtcgaacagctccccccttcgtcggaaggatttagaatgggcgaaggccctatttgcgttctcttcgggcgcggcggcaaagggaggtcctgtcaaaaaggtggctaataagaaaggactcgtcgatgtcgctcgcgttttagcgatgacgagtcctccgacgggactccgacttcgcccactggtcagagcctggatctttcggccgcccccattccttcacttggcgccgcttgagtgga

SEQ ID NO: 19046 - DNA, 408 bp, Oryza sativa
  unsure (1)..(408): unsure at all n locations
cttcagagatatacgcgatgaaagttatgaggaaggataagatcttggaaaagaaccatgcggagtacatgaaagccgaaagagatatattaacaaaagttgaccatccttttgtagtgcagctcaggtactcctttctgtacgtgtgacatcaatgtcttatctctatgtgaatcacttttagtgatatttntacctatgtttgacacaaaaaaatatcgacntatcttgtctgacttcataaatggaggacatctcttcttcagctctcaagcaaggattgtcanggactgatactttagctagacttttgctgcaaaagaaatgttccggcctatactcaaccgttgttaacaggggaattgccgactatactgtgaatgatctgtgagctactccgacacgata

SEQ ID NO: 19047 - DNA, 231 bp, Oryza sativa
  unsure (1)..(231): unsure at all n locations
agcttaggcctgacgatactattgaaaagtcattgctctgcttgntgctaagggctatactcagaaagaaggcgaagatttctttgacacttactcacctcgtgctagattgaccacaattcgtgtgctactttccctagcagcctcacatggtcttctcgttcatcaaatggacgttaagacagcttttcttaatggagagctggatgaggagatctatatggatcaacc

SEQ ID NO: 19048 - DNA, 418 bp, Oryza sativa
  unsure (1)..(418): unsure at all n locations
tcgtagcaagttggattatattgctattcatacaatcggcttctaataaactccgatcgggtcaatcggcgccactgttaaaccctacctattgactattcccgccgaaggcaccggggtggtggggaggagcatgctaatgccatgacgagatatatacttacaaagggacggtgcaccaggtcaccaaccaattctgtctactgagtcnggggcgatcgccgcggcggcggcgagttggggaggagaggcggccatggagctctccgcggtgagttgggcgacttggggtaccaagaaaaaacgtgcaataaaaaccaccaattaattgaatacccatgaaaactatatctaaatttctcttagntcatgaaaaaaaaacgcagagatgggtatacgctttgaattaatttacaca

SEQ ID NO: 19049 - DNA, 495 bp, Oryza sativa
  unsure (1)..(495): unsure at all n locations
agctngcattaaacacctaaattcccgtggcttgctgagtactaaagtactcacccttactctatataaatatatatagtttcccccgccttgaagtgaagatgaagtgaagtgaagattanggtttcgtcctggttcccagccgtcgcctgtggtgttgggtgttagtccattggttccgctgctgctgctgttgttggtgtttcctcgtccgtgtcgtcggttgcattctcgggctgttctgagctgcaacctaagttaaggtaaataagtcctctatttattttaaggatttgcaatgattcatanttgtcaccgtgggtaccagcactacgttctgggactggtaccgagatctgcagttcgtaggaagcggttcgcgccgttattcctacgacacgctcctatcaggtgccgttgtacggcggtgccggattggagtgtgacataactattatgggtgcccttatgtcgccgataacttatttattacgt

SEQ ID NO: 19050 - DNA, 327 bp, Oryza sativa
  unsure (1)..(327): unsure at all n locations
atgctaaacttctatgcacgtgtaacattgatctattngaacaggtccaaaccctcttaatgcatcacagacagctgcagagtccatctttggcccaacatcatacatgtattatgaaggacatggaatgttgcatgctatctaccttagcaagagcaatttatgagaatggaggatttcgtacaagaacaaatatgtggacacagacacttttgaattagagagaaagaagaacaaaatagctntccttccatctgctgaaagcgagccatgtgcaacactggttgcttttcttcttaataccagaagtcttcctaatttaaatag

SEQ ID NO: 19051 - DNA, 442 bp, Oryza sativa
  unsure (1)..(442): unsure at all n locations
ctcattgagtctgagaattaactgtttattatgcaatttagctatcntgtacacaatttattgatgtagatgatccatgttaatcaattgtgtacactatctttattgctactcgctatttgaagcgcagaatatctatcatgagtggctgcggatatgcaaangncattaatatatctggatttctatgcataatatgctaatgctggtacaaaaatctggcgagatgttctcacaaaatttgcaacacatgttatagtgccctcatcatgtaccctgcacaggatccatgtattttgagcgtcactttatcaggagataatcttatggacttcattcagcacgtgatttattctgctacacttcattctaagttatgaaactcatcaatgtatggcaacattaatacaattgttggatgtgtatgcttttcttgaaatga

SEQ ID NO: 19052 - DNA, 450 bp, Oryza sativa
  unsure (1)..(450): unsure at all n locations
agcttcgcaggtccctcatcgattgctgcagcgcactcatcattctcttcgccaagaccctggacgacatgtagatccctcgcacangaatgaaaccgagtaatgcgccctttcacggagtcattccagggttatccgctacgccactcggccagatcactcttccggtcaccttcggtactcgggagaactttcgcacagaaaacgtctgcttcgaagttgctgatttcgagacagcgtatcatgccatactcgggcgcccggcgttagccaaaattatggctgtcttgcactatacctacatgatgatgaagatgcctggtcctcgagaagtcatatccctgcggagtgacatcaaacaagccgtcacatgcgaataggaaagctgcgagatggcccanactcgcgagatcacgatcgcccgagaagacatccgactggctgaatcac

SEQ ID NO: 19053 - DNA, 454 bp, Oryza sativa
  unsure (1)..(454): unsure at all n locations
gctgggaatctccaccggtgtctctattgctcctagcgatatctatacatatactgatgacttcttcgngaccaccatcggcatatatactctcaagctcgacgccaccaccgatgtcattcatgctttcgctgatgacctcttcatggctaccatgaacatactcgagctcggcaccactaccagcaccgtgatcttattctcaccccagccaatgccatgctagttcccactacaagcaccatcttcacctccaccgacgaggctaaatggcagggcgggcagagtcgacatcaagacgacatcaccaacaccggcgtgcggactgacgatgccgcgaacactgccggcacccactcacacacatctataccatcatcaccatcatgcatgggaggacgtgaagcgaagacggacgacgatgaccagcgtaccttaatcggaggtatctcac

SEQ ID NO: 19054 - DNA, 278 bp, Oryza sativa
gcacgagctcactaaatgaaaatatatgctgcgtttcttgtttgtaaagcttgcctgaaataaattgttacgctcaggagctctggacagagacttactgtccatccatgaattacagtaatcgtaagcatatctaacccgcttatgatgaccgcttgaagataaactttactgctctgggcctaacaacactactactgaataccctcaactatgtaaatataagtgttatatggctgaacaatacactctcagcttatgaatgagttacttgtact

SEQ ID NO: 19055 - DNA, 319 bp, Oryza sativa
actgctctatctacatgggctgtggcatacattggtggatgcctgaggctggagcatgtaatatacttcacagatggctgagatcacctataatgctattcacaacctaattaatgattgaccactactaatggcttaccggtgtcatttatcgaagatagtcggcatactttcacaatacacaatggctacgcatggtgaacagacttttttacatgctcagatgccaactattcgcatgtggacaatctaggtcatcggggtatctgccgtgattcttctctatgataacgctatacgataatcatcgcacaaagat

SEQ ID NO: 19056 - DNA, 431 bp, Oryza sativa
  unsure (1)..(431): unsure at all n locations
gcaagcttccttcgtcatagagaagttatcacctccgtcccataatgtattcatttctagcacagtgtctcttgtcctaaaataaaactatttctcctcctatctcctcctctcaaccaatcataaccattcttcttcaccttctttctctttgtaactaatcacgcacattcacccatcattctcacctacttccttaatactcataccaatctaaaaaatatctatattntaggacggatggagtaataagttagcggagacctcttttgggtatgctttcttgcactttcatcagcaactactcattggttcttcatcaccgtcgtcgctacggatcaagcttgcaacctggtggagaagagaagggattgattgcttttctagttttttagaagtcgtccatagcaattttcatgagctcatgtcaa

SEQ ID NO: 19057 - DNA, 408 bp, Oryza sativa
  unsure (1)..(408): unsure at all n locations
gagagacaaggttgttttgcaaatcctctggtggatatcattttgatatcactaagtganntatttctttgtaagattgggtcgaaaaggagacttgcgtctcgattcgacttaagagatgcttttcaacaactcaaatggtaatgtaccgacctcccgggtcagatcattacttatcggctcccagagccatttcacttgattaagcggctcccagatccttnttcatctgattaggcggctgccagagcctctntcatttttgcagactcccagagtccagctgcccagcagcaaagcaatccgcttccactcggtcagcctagtctatgatgcccgcagacatcccgaatcacacagattcgtttctgaccactcatgtcatccatcttccacataggctaattc

SEQ ID NO: 19058 - DNA, 413 bp, Oryza sativa
  unsure (1)..(413): unsure at all n locations
gcttgaaacttgngatgaatgcaaaatactgatgagaatattatttgtgntttcatactatagacgtgctctcctcgagaaatgggaacatctaaaacaaggtgacaaaactgttagggagtactctcatgaatttaaaatttgtatcacttatagtggtttacaagaatctaatgagaacacaatgactagatttttcagagggcttaatttcaatattcacgctgggcttgctaatgtgacatataatcatataggccaattgtcatgcttgcttgcattgttgagcgcanaattttggagaatccaacggagcaacaagatatgcttgttgcctctattcactgatgtttgangaagttcagaaaagtctccaaatgagatgaccatatgtttgagatgcacttcatcac

SEQ ID NO: 19059 - DNA, 149 bp, Oryza sativa
  unsure (1)..(149): unsure at all n locations
acatctaagctattaatccggcaaacatcgacccgtggggctcatctattgttactttggcatttttgacaaaagttcgtcgcgcgaatcacgaagggagtttntgccacgaacgcacccaatacactccaatatgtgcanaaatcatg

SEQ ID NO: 19060 - DNA, 462 bp, Oryza sativa
  unsure (1)..(462): unsure at all n locations
agctngcattaaacacctaaattccatggcttgcttttttttaagtactcacccttgctctatataaatatatatatagttccttcgcccggaagttgacgatgaagtaaagtgaagattanggtttcgtcctggttcccacccgtcgcctgtggtgttgggtgttaagtccgtggttccgcttgctgcgctgttgttggagattcctccgtcgcgtcgtccgtagcatctcgggctgttctgagctgcaacctacgttaaaggtaataagtcctctatttatttaaggattgcatgattcatattngccccgtgggtccagcactatgtctgggactggactgaatccggttcataggaagcggcccgccgttttctacacatctcctataggtacgttgacggggtgccaatgggtgtacaggaagtgaagagaaatgatggggaagaatagaacaagtg

SEQ ID NO: 19061 - DNA, 511 bp, Oryza sativa
  unsure (1)..(511): unsure at all n locations
cttggagcgtaacaagccaacgataatggagaaactcttcttatttttggaagggtaggaagagcaagtagggtggtgagctcctggctatcgtttttatagctccaatttgctggagatatgtattgaaatgaaatttcgccgccttttctcctctcctaaattggtggaactgcgatggtcatacgtttgcctggtccagattcagtttcagtacaaagctgaaggatatatatgaccaaaatgagaagtcactgttcctcactgacatcttttnttcttttataaattggatgtccctgtcaaactctctgtggtatggattcaaatgttacgtacatgatatgcattcaaatgcttcaatggaattaaacttatcaccaaccaaaccaagcacaccaggttggctatgctngtgtatatatacaatatatatacatagttcagtgagtgccacgcgttgccatcagcaactatagatatgtcatcaccttcagagttcagtattatg

SEQ ID NO: 19062 - DNA, 220 bp, Oryza sativa
  unsure (1)..(220): unsure at all n locations
agcttgacttcagcagcgggcgactccactccacatgtttactcttgacggcagcaacgaaaccaacctctctgagacggcccaactgagaagaacttcaactctggtgtgggggaaatgagagagagagctcgagtgagggttnttatgggcgacggatgggcggaaaccgctggggatggcccttatttggccggcgacctgaataggtggaggagag

SEQ ID NO: 19063 - DNA, 456 bp, Oryza sativa
  unsure (1)..(456): unsure at all n locations
ntcanactactgggatgagaatntctctntaatctgagctatcataccctgaattgctaaatcggctagctgagaatctgttagagccaagctgtagcacctattccttgtttccctaaatctctgaatgtagtcctgcacagattcaacatgcctttgccgaattgctgtcaagtcagaaagtttcatctcatgaattccactgtaaaaatagctgtgaaattatttctccaaatcggcccaaccattgacagaattgtatggcaaagataaaaaccaagtaaaagccgatccggatgaggacaaaggaaacaacctaactctcagggcgtcaacagccgatgcttcaccacattgagctaagaatcggctcgcatgctcataagtcgaaacattatcttgccctgaanattttgagaagttggaaccttgtatcgagcaggcaatggaaccctc

SEQ ID NO: 19064 - DNA, 373 bp, Oryza sativa
  unsure (1)..(373): unsure at all n locations
agcttggagttcgaaccacagctcaaccataacttgttcttatgccttctttaattctctggaaccttataacttttatggatttcagttgaaatcgaacagaatttcaaccaagtatgaagtatcacctttcctcttccaatgtcccaacaggatctcatattgccgttctcatggcatcacaaattgccggcttgaactttntactcgacgattcaactgactttcacaaaaaattgataacaacactcgggagcagtttccagcggacgggtcactgaaccttgattatgaattgaaaatccatttccaaaaaccgtgctagttttcattgttatataattggacattatatggaaaaaataaattaatt

SEQ ID NO: 19065 - DNA, 400 bp, Oryza sativa
  unsure (1)..(400): unsure at all n locations
gagctatatctgctaagtccatatcacgctctctctgataatgatgtactgacaatgccaggccacggggagcctcaattgatatctaacactcgcgaggtgtaagctccgtcngtcgactcggacgaagagtcatcttcacaactatgctgccacgaccggaaataacccaacgtgcattccttacctgtgtgtattattctttgtcgcaagaggcacggtaaaccaaaagatgatacaatacanaagttaccaagcggaagcctacatagataatttattacatgcgcggcgaaggcccagcacacttgatgaccaacgtaatacatcggaagactatggcgacgaccacaggcgcttgacagcatgcacgagctatacaccaaagccttcatcttcc

SEQ ID NO: 19066 - DNA, 446 bp, Oryza sativa
  unsure (1)..(446): unsure at all n locations
tgtcccaagctccaccaatatctagagcgcaagctctcatcatatcttccaagattngattgactcgctcggtctgaccatcagtttgcgggtgataggccgtgctgaaatttaaacgggtccccaattctttctgcagcttctgccagaactttgaggtgaactgactccctcggtcagataccaatcttttgggtactccatgtangcacatgattctcgaaaggtagagctccgccaaccttttgcccgtatacgtggtatgtactggtatgaagtgagcaaccttagtgagtcgatccacgactacccagatcgaatcgtgacccgacgatgtccggngcagtcccgttataaagtccattccaatctcctcccatttccattccgggatttgaagaggttggagtaaacctgctgggtcttggtgctctgccttcactcgt

SEQ ID NO: 19067 - DNA, 464 bp, Oryza sativa
  unsure (1)..(464): unsure at all n locations
agctntananataanattctcttgcatatttgctttctgttttatactaccagagagatagttntagagactctggtggtgtttgaatctcctgaagatgaagattaagtgttttacgcanagatgaagatgaagattatgtcgacgtttgatgtcgcgattccggtatttgcatagtatggggatcgttggtactaagatatatgcgagattgtaataaaagagatggggacgaggattnttatacaagttcgggcccctgaattgtcaggtaataaccctacttctgttggccgaagccggtcgttgctcttattcaccataatcacaccagtacaatatttgnggtagcctatctaactgttgtcgacttggcggtctgaagtactgactcgtagtcgacaatagggtagccttcctactcgaatccgcatccggcgagatcaaagtacacgctatgtctc

SEQ ID NO: 19068 - DNA, 424 bp, Oryza sativa
  unsure (1)..(424): unsure at all n locations
ngatgatccagtggatacagataagttatgccaacctcattctcttaccaaattcttgcttttcctaatggacgcactgagagagcgaggagcaaggatgaagccacttatctgcgcttgcttagcaagggagcctgagaaagtgcttgttgtgggggtatgtgggaagccaaggctgggggctgctaatgggaatgcatttggtaatgcatttatgtcagctgccgaggagattggtgcagactatttccatgacatgtttgagtcatcatggattgttctcgatgttgttgctgtcagctctttcatgattcggttaacagagaagctatgatgacatgtgcttgtctagcgctaatgattctttcagttcccatgaagatgggagcttgaggcttgattccttgattaaacactctaaaat

SEQ ID NO: 19069 - DNA, 438 bp, Oryza sativa
  unsure (1)..(438): unsure at all n locations
agcttatgatgccatttatcatctcacagaatttaacttatgtaactcatacatggagaaacaagagagtaaattcatttaactacagaattcattgtagaagcaattntaatcgttattaagtctgccggaagttcgaggagtaaacttgacttttaacatggcccataattgcatcggaagcatgggctgtggcccattacaaagcaacgtcaccgttccgggcagaaaatctggtcctgcccgcgccacaccctcgatacgtgaccgatccgcgcccaacgcatccgtcccgtcggttacgaacccaacggacgcttccgatgtgttccacgttatcgatgcgcggcaccccgtctccaccaatcgcgcaccacctgttcaccgctataaaatcagcaactcgtcttcttctgacaacacaatccaatctccaaa

SEQ ID NO: 19070 - DNA, 313 bp, Oryza sativa
  unsure (1)..(313): unsure at all n locations
cttttgcagatgatggtgacgtggacatnggaatgctagggatggatgcctaaacaaaaaaacatatcaaccttctgtgaacactgaagctaaagaggatatctcatcatccaatgttggcttggggctaggagactactacccagcagttttgagacaaagggtcaatgcttgattgcaatctggtctatgtttcaagagtttgactgctcaaatggaatgcttctcagagagcaacaaagttcacctgacactgacttgagttgaaacaaaattgaaaaaacttgcaacaaaaactgatgtttaatgactt

SEQ ID NO: 19071 - DNA, 393 bp, Oryza sativa
  unsure (1)..(393): unsure at all n locations
gattaacataacaaatagcatgatgttgaatcctggctttgatctggtcgcatgtagtacgaccaccaccttaatcatccaaagcgatacctggatcacgttattacatatgacttctattctagtgtcgcgtatatcaacaatccttggcatggaatgttaattaattattgccctaattggttagtacagcttgaaaaatacaatcatgtataaatggctggctataactatctacttactagctagctacttatatattattccaggcgagatagtaatttcacatgtcatatatatatatacattgagcaagcttatngaatatcgtctttctatatatattaaatttgatatataccgatccccaaaagtcgttgtcttatcttaagt

SEQ ID NO: 19072 - DNA, 514 bp, Oryza sativa
  unsure (1)..(514): unsure at all n locations
agctgncttatatcaaaaccgctaatattttgtatcttgaacttaagttnttgaagagagatcatgttgcccacaccacctatcgaatagtgcactntagcatcagctataagatggcgcaacttaactagattattcatagcagcaggcacagaaatatttccagagaaccccacgtccaacacttgaaggtgataaaaacttgtcaaagctcgaggaatagcagcatccttgtagtctccatataccaacatatctntagtctccgagacacgaataaattcaagatagcggagatgatgagggattaggaaagtatgtatagcactgatgtcagcgttcaagacgcaaactcttaacaaccgtaaacatttggcttccttgcatacacgttggatggacttcaatagatatacactgctggcttgcaaaagcatcaagctcctcaacttttgcaagggctaatctttggaatatctcatatttctcagtgggaaaattggtattttatcat

SEQ ID NO: 19073 - DNA, 424 bp, Oryza sativa
  unsure (1)..(424): unsure at all n locations
agctngngaagcctcttgtaattctagtctcatgggaactttgttgctaatgttattaggtacgtctgacaccccgcctgaaacaatcgtagctcaaatcaaggaagaagccaccgtctgggccaaagaaagggttgtgtgcctggtagagctcaccaaaagaaacgctcaggagtctttcggctagcttcacaaggtggtgggctagatgacctgggttcgaagtctcaacccttctaattatttgatattacgccctttcctaatattcgccgtcttttttagagctcaccgatctagagaagtctactcatccctttcttntgtgacgttcgctttacaagtcatgtaaagtatcatctcttgtttgtgctcctacttatcataatacgggcaaacttttgttctttaaaaatatgtcatg

SEQ ID NO: 19074 - DNA, 476 bp, Oryza sativa
  unsure (1)..(476): unsure at all n locations
actaactctatatatcgcctcttgttaccccattgcctatgaattatttacttactatgacctacatacatttacatcggttgatgatcgaacaaagagtgtgatgcatagagcctttttctcattgggtgcttgcataaatgcttttgtgcattgtcgacctgttctatgcatatatggaacttttatgacaggtaaataccgaagtcagatattgacagcaattgtgtgtgatgggaacaaccaggttgtacctatggcttttgcanttgtagagagtgagaacactgatagctggtactggttcctagagagagtgcacattgcagttgtgcgtatgatgcccaacgtttgccttatacatgatcgtcatgcgggtatgttgcggactattgactacttgcagaacgggtgggatgagaatggacttncagctaagtggcctgatgttcggagtcggnggtgcatgcgtcaca

SEQ ID NO: 19075 - DNA, 427 bp, Oryza sativa
  unsure (1)..(427): unsure at all n locations
agcttcagactccagattccagaacagtagttgctcgcatgtcgcaagtntccaacaaaagaaaataaatagaacgtagttgctcacacatctagcgtgatgaccccgttccccgttgatgcacggagaatttcagtgtgggtagggtagaacttgtctggcaatgtaaattagtagtaacatgcataaaatctggctatttgcatttactgctatcacacaatccaatgcaaaactcattcatgatcggtcaacttcacaatgtttaccatgtgatagaactatagaaatgaatgagacgtcatggagatattgatgtctagaatttcgatgcanaatggatttctcttttcttctctgtcccagatgaacaaatgctaatcatattccagaaagccatagttatttcctacgcaattaaactgac

SEQ ID NO: 19076 - DNA, 437 bp, Oryza sativa
  unsure (1)..(437): unsure at all n locations
ctatacattactcaagcctgcagcagcagcagcagcacaagtagcagagaagtgggagattctattatccattcctgcttatccaagntggcaattccgatggccgacatatatcccactccaaggagatccgacaacgatgcccaacccaagcagcttgcttgcatctccatctcctcctcatcggaactcctcctcctcctcctccatctccattatttccaccccggcaacaatccaaccggacgcagcccacgggccttgttcccttctcaccacctccaagtacgctntgcgggacactcgcggcagcaagagttcgtatactcgcctctgctgctgctgcactgccgcgcctaaagctgagcaagaagaggagactntgcagcaagagttgctactggttggtgtggttcaagtgagagaggtcaacaata

SEQ ID NO: 19077 - DNA, 443 bp, Oryza sativa
  unsure (1)..(443): unsure at all n locations
agctntatacgatgtataatactatatttgatgtatctgtttttatgctgcatgctgatttgcatgatggccaagaggtgttgatgggtagatatggattgggttgtgcaaccaggttttcatgcttggtaattcaacatgataaccctctttttaaagataaacatagtgacttttccgtttgggcaaaagaaataccacaaatattgctgacatatgctctggaaatgcaacacgtgatactatgcgtttgatgtcctctgttcctagacttggatgtaaccagatatctgccttgtcaagaacctttntgatccttctaacaaaagcagtagtacttgacgtgattggcaaaatagtcaagacngtgctctttgctggtggcgcgaggcccatgggacaaatctaatcttgcagccagactgtctatgatctaatgaact

SEQ ID NO: 19078 - DNA, 478 bp, Oryza sativa
  unsure (1)..(478): unsure at all n locations
tganatccttcagtgattgcaatcccacaacagaatatctctggagttctgtgcacgatgatatctcaaggaactcaaaggaagagagtgcctccatgccgctattatcagacactgaggaaagctgtgtaaatcctccaatctttaatctcttcaacgcactcaactgttgtaactgctgtatatccatcgtttctgtagaatgcatcagcgttagtgaagtcagagacatcagctcgctgatccatccgattagttgatcattgcctctacgaacgactagatcatgaagggtgtgaagcccangaagagaacacaacatgccacagttatttatctccagcttatcaagctcacgaagaagaattgtcacattttgcaatcttgggcaatggcttatataaagctccttgagcttatgaagatctgcttcctccgagtcgcaccatgtctgaagattatgcatgtnccacaaagt

SEQ ID NO: 19079 - DNA, 472 bp, Oryza sativa
  unsure (1)..(472): unsure at all n locations
agcttcattacaaaatcttgggtgtggtgaatcaatcctactctgtacatgtaagcagaggaatcgatcaagtgcttataatattcaatccctatagacaatcttatcaccaaagtagtctttataaagcagttctaagacaaatgataagtatatatgaaggaagaccaacaagtctttttaatgactcctgatgtaaactagtactaaatgttaccatgataatgacatcatggaacgganatcatgtactaccaattggatttttcacgggaatatgggcattgaaatataagcagacccgtcaggacctaatatttcttttaatccttgtcgaaacttatttagcaagaatggaacaataatatatttgaattgtgacaatttattagcaagcagatattcttcgcagattatattattgtacaagtatgtggacacatgtcaagtctagtcatgtctttacccaaat

SEQ ID NO: 19080 - DNA, 402 bp, Oryza sativa
  unsure (1)..(402): unsure at all n locations
tcctgactattccaaccttcgagtcttcgggtgcctttgttatcccaatcttatttccacnacacctcacaagctctcccctcgttcagcagcttgtgtctttcttggctacccggcctctcacaagggttttcgatgcttggacatctctactcgtcatctctatatttcccgccatgtggtttttgatgagcagacatttccctttgcggccgttccccaggatgcctcgtcttttgattntcttctacagggtttctccaccgcggtagctccctcctttgaggttgagcgtccgcgactntcctcggtgactccctcccctgaggttgagcaaccactctccgatgatgacacttcaggcgatgatcttttccagcttctgcctggacttcggtcttc

SEQ ID NO: 19081 - DNA, 455 bp, Oryza sativa
  unsure (1)..(455): unsure at all n locations
cttcaaccgatatgcccttatgcacggccatacataacatagaaatcacacgtggaaggggtgggcaattagctagagcagcaggtgctgtatcgaaactgattgcaaaagaaggtaaatcggccactttaagattaccatctgtggaggtccgtttggtatcccaaaactgcttagcaacagtcggacaagtgggtaatgttggggtgaaccaaaatagtttgggtagagccgggtctaagtgttggctatgtaaacgccccgtagtaagaggggtagttatgaaccctgtggaccacccncatggtggcggtgaagggaaagcccccattggtagaataaaacccacaacccctttggggtatcctgcgcttggaagaagaactangaaaaggaaaaaatatagtgatagttntattcttcgtcgccgtaagtaaatacgtaactatgaatat

SEQ ID NO: 19082 - DNA, 329 bp, Oryza sativa
  unsure (1)..(329): unsure at all n locations
catcctccagtttctagcgagcgacttgctgatcatgaattccatctgctgatctgcttgctgttcatcattcattggcccatagaccatagtacgatgcatccaagatatgataatctggctcggaaaataggactttgtacctgtaaagattgtaggatcatctgttctgntctggaagtgctgacgtttcttggttttggttggtaccaaatttcacacccaaactggaggagcagagaagcctaccaattactacaagacaatctcttttctactaccttccactacatctttttcacntgaattgatgtatgtgttcgatcact

SEQ ID NO: 19083 - DNA, 388 bp, Oryza sativa
  unsure (1)..(388): unsure at all n locations
gtgctgctactggccctatcanggcttataatcaagcttattgcgactacatttgagaagaaacaaatgctggaagcaatatatactgacagtggaggcagtagtcattcagaaaagaactttgttggatcgtaagaggaccctttacatcttgatgtctacctctataatttacaggttgatgtgtggaaagcctcatcaaatgcgtgatccacgctgccaacgaagtgggaagagagttatagttgtgattcaatgtcgtttcctaccctgttgtcgctgtggcgacgcccaaagccaatggctggagcacttgtggagacaccatctatctcatccttgcaaagggggcacatgcgcgttatcttgagccattngtccacacaat

SEQ ID NO: 19084 - DNA, 367 bp, Oryza sativa
agcttggaacaagtcagtacacacgacagatgcaatctatctcctccacacataactttcaaggacagcaaaagccttgcgaatatggaacaagagcatggttcgcggaacaaaattgagaacagagattgcaagtgagctgatttttaggcttgacctagcacaggaggagcgcaatctatcccctgaagaactcacgttcagacgatttctaaaacaaaaacttctaggtcttgcggctttagatagggtctgactacgtcaaagatccaggctgacttggataaaggcaggtgatgctaacactcggttcttccaaatcaaagctagtgcgagaaagcggataaactttatccaacaccttctg

SEQ ID NO: 19085 - DNA, 484 bp, Oryza sativa
  unsure (1)..(484): unsure at all n locations
agcttattgaatatcgnttntctatatatattattntgtatatataccgcaccccagaagtcgttgttttatcttaagtgtgacagagacacctacttgtcgntaaatatttgttcttggcaaaaggttgttcataatttcagggaaaatactgtgcaccagtgctgctgagatattaattcctggaattccacaatgttgtcatcgctccaaccagcaaagtcacaatctgatggtgctatgcatgtgcttgcctaactagctagctatgtacgccttcatatatataattntataaaagaaaaatggtgatatctgacatgcacatgtattgaaattcgatcgattccccaaacacaataatttatgaattattatgccctttttgctctacttttattttgtaacatatgtagcaagagcaaaatgaggaagtaacattcagcanattcatcgtaacatgtctagttatactcccttcata

SEQ ID NO: 19086 - DNA, 422 bp, Oryza sativa
  unsure (1)..(422): unsure at all n locations
tctccaatacanattgtctaaatcgtattgaatacaaattcttatcaacagctgataccgaaagtggatcgaacttcagtgatttgagagcatgttcaattctgttagacacattatactctagtagtatgttgagcgtataggacaacatcatactcttcaatggtgtccacgttttctagttctatgttgttatatatacacgcacactnttcgagcttgagtaaccaattgaccatagctgaacacggaacctgaaaaatgaaaataaggaaaaatgtgtcaaaaacagaaggcaatctttgtgagaacaaagaaccacgcagaccanagtttccaaaataaaaaaggggattntctgcccttatgatatgcaactacacccatcatgattatgcacaagttaagaagcacactactat

SEQ ID NO: 19087 - DNA, 259 bp, Oryza sativa
  unsure (1)..(259): unsure at all n locations
agcttactgacaagtattaacttaggtatgtgtatcttatttttagtgaatcataattntagcacctaatacacgtttatgttggatcaaggatttgatggatttcgccttgtcatgtactaactggagagctttctaagtatggatgctcaacagattatagctggataacagactgaaggtngcactatagtcaactcaatacttcctcccctccattctatttggataatgtaagacatatatgcctaccattact

SEQ ID NO: 19088 - DNA, 372 bp, Oryza sativa
  unsure (1)..(372): unsure at all n locations
cgagcgatcgatggctacgacgtcactttcagtcactcattagctgaggtagctatactagctagatgacgaagtgatcgaatgacccttttcagaaagattcatctctgttccaacttgctnnntgctagttgctacaagctactggtagnagtatataatgtgtagtgtggtgtgtgtgggtgtcatctgattgattcggngacttgtgaccccggcctttcagaaaaggggtaatcaattaattagttaatcatctcttcgccttcttgttgggttggtggtagtatgggttgatgattgagcatgcatgttattgcaagaatggtggcttgatgcagaaatgcatggctctacctagctagcgatcac

SEQ ID NO: 19089 - DNA, 492 bp, Oryza sativa
  unsure (1)..(492): unsure at all n locations
gctttacaaccagcaccaaagctatagcacggactgttatgcatcacanagttaaggtacatnggcgaatggttcaaataagttcacatgcgtctctgtcagtggtggtggtgacgacaagaacccgagttcagagccatgtgcaaatggttactactccagttcatggtttctactgctgtgtactactcaactattcttgcggtcctctcccaattagccaggacaactttatgctaatgccaccactttataccagaatgcttcaactgcaatcagaatttataaagcaaaacttccacaatctgcagcgaatattgcatagcatggcatatatgataangctcatggctgtttgtctcccagtttttctggccagcgaccactaaaactttctaaaagacctcttanggccaccaaactactatcttaaggtaatgttctttctgtctctcgtatcaaaagctaaataaaggaggagtatctgatata

SEQ ID NO: 19090 - DNA, 262 bp, Oryza sativa
tgctccacatcacattgctctacaccactttttgctgttctacgccgttttgttctgtggagtcgccaccgtgcaatgagagctttctctggtcatcttagcacacgccctcttgtgaagcacgttgtatgccttctcgggttttcttctcactgacttcatcggatcatcattctgcgtgatacgtgaggttgggcccgattatctcggagaaaccttaaggatagaccacaaattgtccaatcaccttgatctgctcaat

SEQ ID NO: 19091 - DNA, 487 bp, Oryza sativa
  unsure (1)..(487): unsure at all n locations
ctgacttttgctttgtatgataanacaagaagtattccactgtgaaattctttaatagttgttcatacacttctgaagccaatttataatctcgtcactactaagcttatgtaccaaagacaaatcggcaggtactgtaatataatgtgcaacaagtggatgctgaagataaggcgccaaccccaactctttaaacagtccaaagctcgtcattttgcatatctcagactctaaatcataaactgaaacaatgttccttgctgcaacatatcaatggatgaatgtattcacctgacaatagaaatgccatgcccatgtgaaatatataagcagcatcaccaagtataattgaaccaaatactgatgatctgatattaacaacatcagttcatcagctgtatgctcactctaaagtgcaatgaacagcaatatattcgatacatattgtaaaatcgacatcaactattcaaatcacagttacaaaatg

SEQ ID NO: 19092 - DNA, 290 bp, Oryza sativa
ctgcaactgctatccgccgttttattacattatagcattcatgcttgtataaatatatagatgcacttaatatatactacctctatattttaatgtctgacacagttgactttttgttcaacgtatggaccgtcgtcttattcaaaaaattattgtattatcaattattctattgtgatatgattcatcaatcagtgttctttaagcataacataaacattttcatatttgtttaaaagattgaataaaacgaatagtctaacattacttataaagacaacgacgtctta

SEQ ID NO: 19093 - DNA, 362 bp, Oryza sativa
cccaacttaacattatggcacttggtaggattaacatgtgcatgaacacactgaatcgggataacttccccgtctttccatgaccgatatatgagaactcatttgcttatactaaattgaactactgatggtggaatcgatacaatacgacgctatgagcaccaggtatactgaaacatgcatctacctgtgaatgcatcacttcgcaatctatttctctctatttgttaagaaagatgagcatatcaatacgtaattctactagttgctagtctaagagatgacataaccgagagggatgagtgcacatgtgagaagtgagacgatcacctatcatcttctagggcggatcatacctaaca

SEQ ID NO: 19094 - DNA, 407 bp, Oryza sativa
aacaaaaaaggcatggtgcatgtcaacgaccaaattcttacctatcagttctgtaagtaaagttgaattcatagcacatttacctgtttttctgtcccaagaaatccaggcataggagagtcacatagagaccacagctccaatacattattctgcgattatagtggaatgtgtccaatatatagtaataccaatttcagctctggatcgatggaattatctacaaagaacatgaacaatgaaatatatagtgcaatgtaagcgaaccgaacagcttgacatatagcataccacacgatcatgaatgaaagttacctgattggagaccgctgatgatagacggtgtgtgctctcattgttcacagagatgtatttagatctgagtcttatatgtcccctatcagaca

SEQ ID NO: 19095 - DNA, 418 bp, Oryza sativa
  unsure (1)..(418): unsure at all n locations
acttgaagaaataactttcctcacctctatcagtagtactcttcccctctgcataatgtatgcatggtgatctgtagtaatgtccatatcaccttgataatttttgtacattgtgaaaccganggagtagaaacattgcgtatctgcgggtctttgctaaaggttacctggtaaatacgaaaaatcttgttaatgtggctggattgagctgaactgttgaagccttgaaacttgcctgcttctttcttttttaaagaacttgtgatgtgagatagatgcgttcgtttctatttggctgtgtgttctgttagtacatggctgcaagcattgtatgttagatctgtacttaaattcattgctatttaggaaaatgtgtgtgtcttaattcttgctttataacacaatcgatcatgacaca

SEQ ID NO: 19096 - DNA, 393 bp, Oryza sativa
  unsure (1)..(393): unsure at all n locations
ncacccaccatttgatntcatcaataaacaaaggagtctgattcctattatctgagggtttggttgaggtgccactaaactgaacctacatatttttcgtcatccatatctaaatatacaaaacttcagatgtttacatcaaaatttatctccaaattcttacaaacgttttcggcgactcgaaaacatattgcaaaaagtgggtgacacgtgacacacctataatcctattgagctgatcctctgacccctgttcataattatgctgtgtacagtactccctccgtccaaaaaaaaaatgatacctaanaggggatgtgatattctctatgacaacgaatctggacaaagaattatctagattcattgtactatgggatgtcacatcattgt

SEQ ID NO: 19097 - DNA, 504 bp, Oryza sativa
  unsure (1)..(504): unsure at all n locations
ctgctgcatgcaagcttactgcttcagatgatactgttcttaacttctcttgtgttccanaccaagattgagtgcactcattccatacaactatattggtacacagagagacatatagtttatacaattaggcacacatgtataaagctttagcaatgggatgctgcgagtcatgccttcaaacattataagtttacatgtgcagaagacgaatgattatcatgaccaggtatacatatataggaacaaataattcatgttggcagagttcatctctccaagacagaagacttatggatcaatcagcaagaatgtgcacggaaggctataactctctaaaagattatggctcgcaaaattgtagaagtattatatggaatcgtactcgatttctaaaagacaaactaatggatgggccatctaagacagtgtaccataggctagaatgtactaatcatatggtttgcaagctgtggaacctatcatcgagtatatttgaatatg

SEQ ID NO: 19098 - DNA, 427 bp, Oryza sativa
  unsure (1)..(427): unsure at all n locations
tcttttgtgatgatagctcaaagttcanatgttgtctattattatctcatttgccaagctaggcctaatgaaccattattatttcactgatttagtcaaatatttttgtaggtggccaccttcattgttcagaagattctcctcgatgatgttggattgcgctacatttgtgccactgctgagcgtttctttgctgtatgcagtgttttatcanacatggtagtttcacttgctgagcagccttccacaaggttgctgaagcacattatccgatgttaccttatgctgtcagacaattccaggtctgtgctgacatttgtgtgctatcaaattattttacttaaatattctgaacagagctattttttctacgcggcgtctatgcanggcatgtgctgcactacaaacttgcctccctgacatgctg

SEQ ID NO: 19099 - DNA, 296 bp, Oryza sativa
  unsure (1)..(296): unsure at all n locations
agcttcatcgngcacaggatagacaaatatgagattctgtattcactcttgaagctacccccgtcttatatcatcaccgattctttaacataccattgatctctactactgcaaatacgtgacggattcagaattatatcaagctttagtagcagaagatcatgataagaatgaaactgcgctagagttatcaaacttacaaatatttcaggcagatgttgaggaagcgagcatgttgctggctttgagatatggtaacagaaccctcacatatttgatctttttttagctcgata

SEQ ID NO: 19100 - DNA, 503 bp, Oryza sativa
  unsure (1)..(503): unsure at all n locations
ctaagctagctgagctgagctgagctttgtgtgattgaggatttctatcgagtgatgaatattntgaggggtgtagggggcgttgatatatacgtggnggaggagtggcacgtatggtacaagtggacgtttgatttggtgagctaatagggttgagataaacaactaaaccgagtagattatagatattatttgtagagacctgaatcttgtgcctcaaggctttgaaatctactccttgtgcttagaaactaattctttatgtttgtaatttcgtacgaacgtcggtatcttactcccaagtactagtacttaatttcttgggtcgattttattaattccagtataatgctatcagtaaccatcatatctcacccatgacaataacctacatcacattcacgtatatgttgcgtttcactttagtataccactgcacgcatgcacactactacttcgtacccggaatctaataatacgcctatacatgtacatatatacac

SEQ ID NO: 19101 - DNA, 306 bp, Oryza sativa
agcttaatagacacgtctccatgtcatttgctcttttattttgtgcaacacgttttgtctcagcttggcggcacaacactgcatataaatattataacaacaatcatattcagaatatcacagatctttacattttagaattcttgtgaatgactatgaggagcagttttttgttcaaacatggcagcacaacactgcttaaaaacaaatttataataaaaactataacatgagaactatataaagacagctttctacatcttagaaatttgtaattattaggtgcaaaggcggagccaaaaacac

SEQ ID NO: 19102 - DNA, 510 bp, Oryza sativa
  unsure (1)..(510): unsure at all n locations
tggaagctagcgtaagagtatatcaagaacatgttagacactatactaagttctcgaacaaaataggcatggtgcatgtcaacgaccaaattcttagctntcaggtctgtaagtaaagttgaattcatagcacattcacctgtttttctgtcccaagaaatccaggcataagagagtcaaatagagaccacagctccaatacattattctgcaattatagcggaatgtgtcaaataaatagtaataccaatttcagtactggatcgatggaattatctacaaagaacatgagcaatgaaatagaaagtgcaatgtaaagcgaaccgcaacagctatgacgaaatgcataccaacaagattcatgaatgatatttacctgaattggacaccgctgaagatagacggtgttggctttcactggttcacagagatgtatcttagatcttgagttcntattatgtgccctcatccagacacagtagtncagaagacatctcagaaaatcatatc

SEQ ID NO: 19103 - DNA, 387 bp, Oryza sativa
  unsure (1)..(387): unsure at all n locations
agcttacctaaatcgtaccaagacttcatccaaaagactggaccagttgcggaacctgtttacaaggctgtaagagattgctgcagaggtggtcatgtggatctcattggtctctcagcctatttagctaacaagaagaattcaaatttgataaatttaacacaaagtccacccattattccatgttctgtgatacatcctgacagagcatcgtgcttggctcataatggcagtgtctcttcatcaacgntcaagaaaacattccctctgtatttctcattgacatttgtcccatttgttgttctacgccttcaaaaggtactttctaatcttgtttccacttatgctattgcttgatcganatatttttctttcaaataaaattga

SEQ ID NO: 19104 - DNA, 454 bp, Oryza sativa
  unsure (1)..(454): unsure at all n locations
tctcatacgctccgggccgtntacttggacggatgaagcttaacgtgccctcactcagttgaaggcgtatctcagctctcccccagttctggtcgccccggagccaaatgaacctttgctactctacttagcggcgaccccgcaagtggttagtactgcgttggttgtggagcgcgatgaggacaatcctcattccgcgcacccncaccctgtgctggcttggcccgggagagagcatggaggagaggccctcgagccgaacggtggcccaaggcccccgacgaccggagcaggccctctgcccgcttgtcatgcggtgccaggtgcccccgacccccaggatggcccgagggccactgcgggaaggccgcacctatcgccctctgaccccgatgctaaccctgtgccgactcgacccgggagagagcanggagaagatgcccccgagccgaac

SEQ ID NO: 19105 - DNA, 472 bp, Oryza sativa
  unsure (1)..(472): unsure at all n locations
tgcacatactgngagagagatatttaagggctcctttattatgtangattgtgaaaacacagaaacatgaaaagaaaaacgtatgaatattgtcatgcccattaaattcctatagaaattaaaaacatagaanaattccaaaactaccgtttggataacacacaggataacacataaaacttgtgccattggaagaaaaaaaaatataaggtagaaccttatgctagaatttctccaacttcctttgaaatagcccattccataaaaaaatcaaaagaatttgtgaggctattgtttgttccagaggccacgtattagaaattcttttgtaggaataaaatcatccaaaattcctctagttntcatttagtttgttcttaatgagccctagctacacgataggggaaatagggagttctagactcctagaagtagtaatcctttttgcgtgtcgaaaaaaaaaacactccta

SEQ ID NO: 19106 - DNA, 407 bp, Oryza sativa
  unsure (1)..(407): unsure at all n locations
agcttgccagacttgcacatgaagattgtctctcattgtatatattatatgtcagcacanaccacacatatttgccagtgtttttcttcttctgttacaacatttcaaagaagtaaagtaactgtcgctgatgtgtgcttcctttcttggcctgaattgtgaaggtgcatggctgagtatcttcctaacttggaagaanatcttanaatccaggtactatagctctatagtttgcatgtaactggtggtcttgactgcctgctcttattgntgatagtattactactttacatcgtagtgtaattgtcatgttaatggaatgactaatcatcctttgaaaatagtgtgcggaaaataagtgacgattgatgaataaatgaaaaggatagacagtagatctgatgcta

SEQ ID NO: 19107 - DNA, 388 bp, Oryza sativa
  unsure (1)..(388): unsure at all n locations
ntcaccaatgtgggagggtccgtatcttgtggtcggcgttctccggccgggctccatacggctggccacgggcgacagcactgagctgcctaacccgtggaacatcgaacaccttcgtcgcttctacccctgaggggggggtcgggtgtcaggtttcgggctcgggccaaccccgcacctccctctggcgtgcanggttggccggnggctacaacatatgcatattcttttgtctcttacatctgtatttcaataaaagcagattcaacttcctaaaggctgtatctgtgctgcnttttccttttgaagaatcttgacttgaaataggtcactcgtgctcaatcctgccctcggaggctctggtcggctaaaatcgccgaacggagcc

SEQ ID NO: 19108 - DNA, 341 bp, Oryza sativa
  unsure (1)..(341): unsure at all n locations
atcctctnagtcacctgcggcatgcaagcttncancttgaggggctacaacgcctgaaatcttgtgttatacttgagaaagaaggactaaagcacagaacatcaccatcgnggtctttgtctttcactcccaaatttacagatgaaaaactgctgactggtttctcaaagcccaaagttgccatcattcgtgaagaaaggagccatggtgatatggagatggctgctgcattctatgctgctggatttgaaccatgggatattacaatgtcagacctcttagctgggaagtcttctctagaggagtaccgtgggattgcatttgtttgtggtttaactatg

SEQ ID NO: 19109 - DNA, 456 bp, Oryza sativa
  unsure (1)..(456): unsure at all n locations
actaagctttctactagctntggctaatagtgttagagtggcttatgacttcagataagccaaacaaaatagccgcttatttgttttggcttatacttttcgacttataagtcggcttataagcctaaacaaagagggcctcataatgacagtacctgacaaacaagtagtagtagtacccatttgagtgcacttgagcacatagcacattntattttcagtgtagattttgcaggttttgcactgactgcagtccatcttgcatgagtccacaaagggggtgcttagatcaggggagtaaattntttacgtgtcacatcgggtattatatatggtggtcgatatggtgttcggacactaataaaaaactaattatagaatccgtcagtaaaccgcgagacgaatttattaaacctaattaattcgtcattagcaaatggttactgtaacaccaca

SEQ ID NO: 19110 - DNA, 496 bp, Oryza sativa
  unsure (1)..(496): unsure at all n locations
taagctgccagacttgcacatgaagatngtctctcattgcatatattatatgtcagcacaaaccacacatatntgccagtgtttntcttcttctgttacaacatttcaaagaagtaaagtaactgtcgctgatgtgtgcttcctttcttggcctgaattgtgaaggtgcatggctgagtatcttcctaacttggaagaaaatcttaanatccaggtactatagctttaagttntgcatgtaactgttggtcttgactgcctgctcttattgntgatagtattactactttacatcgtagtgtaagtgtcatggtaatggaatgactaatcattctttgaaaaatagtgtgcggaaaataagtgaggattgatgaatacaagaaaaggatagacagtagatctgatgctattgtcgacnatgttacgtgattcaagcaagaaaaaatatcctgtgattcaatctttaatattagtggaagtacctttatgcataaaa

SEQ ID NO: 19111 - DNA, 362 bp, Oryza sativa
  unsure (1)..(362): unsure at all n locations
ntcaccaatgtgggagggtccgtatctagtggtcngcgtcttttctccgggctccatacggctggccacgggcgactgcactgagctgcctaacccgtggaacatcgaacaccttcgtcgcttctacccctgaggggggggtcgggtgtcaggtttcgggctctggccaaccccgcacctccctcgggcgtgcanggttggccggnggctacaacatatgcatattcttctttctcttacatctggatttcaataaaagcagnttcaatctcctaaaggctgtatctgtgctggtttttccttctgaagaatcttgacttgaaataagtcactcgtgctcaatcctgccctcgggggctcgg

SEQ ID NO: 19112 - DNA, 212 bp, Oryza sativa
  unsure (1)..(212): unsure at all n locations
agcttncacctngaggtgctacagcggctgagatcttgttatagactcgagaaagagggactgacgctcacatcatctgcatcgtggtcgttgtctttcactcacgaatctactgatgagaatactgctgctgcgaacttacagtcaatagacgacatcatactggaagaatggcgcaatggtgataaggacatggatgctgcgttctatgc

SEQ ID NO: 19113 - DNA, 367 bp, Oryza sativa
tttctaacttaactctcggctttatagtgttagagaggcttatgttttcagacaagcccaacgacaatgccgcttatttgttctggattaaacatttccacttataagtcggattataagcctaaacaaagagggcctctaaatgacattgcctgacgaacaagtattagtagtacccatttgagtgcactagtgcacatagcacattctattttcagtgtagattttgcaggttatgcactgactgctgtccatcttgcatgagtgcacataggaggggcttagatcacgggagttaatgttatacgtgtcacatcggatattatatacggatgcagatagggcgttcggacactaataataaact

SEQ ID NO: 19114 - DNA, 460 bp, Oryza sativa
  unsure (1)..(460): unsure at all n locations
gctttcttagagcacttaacagagctttgacattaccatttgagattntccaaataactaagccctcaagatggatcatctctccaagtgtattatccaagccttgcctcaaatcttcaagttctatggaatcaagtgtatgtagctgcttcaaattgacagtttgcttgggtaatttgaggataaaaccaaacacatgccttagtgtcttgatcatccaaaatgcctttgggagcttccggactttagtttcccttacattccaatgttgaagggcttgtagatntcctatggatgatgggatgttttcaagtgagcaagaagtgattccaaggtattggaggtgaacggctntgcctatngcacgtgtcaacctgttacctatctcaatgccttgtatattgataacacggaggaactcagatccatgcaatagttcttttatgtgagaattgatatt

SEQ ID NO: 19115 - DNA, 422 bp, Oryza sativa
  unsure (1)..(422): unsure at all n locations
taagcttggacttgatcgaagttcgtggcttgaacgatatgtccttatacatcatctctaaggccctcttcgcaatccgtccgtctgcttcgcgggtatgaagtatatccccgagtggaaacgatgtgaccaccgtgaccgagtgactttgaaagtagtgagataatttcctgacggtaattaagacaccatataataacttttgaacctgaggatatcttgtcttggagtcggctaaaacctcgctaacgaaataaattggtcgctggactttntgaatatgggcttcctcttcgcgctcgacaaccatgaccgtactcacaacctgggaggttgccgacacatataacagtagcggctcttgtggacgtggtgaggccaatactggtggagtggtgagaagattcttgaagtcttcaaag

SEQ ID NO: 19116 - DNA, 298 bp, Oryza sativa
  unsure (1)..(298): unsure at all n locations
tgtggntatatatgtcatgtcaagtggagattatatagttttttatcccatattncttatatgaagtacgcggtttcgattgatactgggatattccatatgtatagtcttggtttggattttatatacgtattgtgattctggctctactattctcgatttcgtttaataaagagataaatggtacgaaatgaatgaagctgtttttttttaccatttcaaccgggtgctgagaaagatttagttgactaattgatcagacctttttaacgatgtctacttacaagcttgcaatatc

SEQ ID NO: 19117 - DNA, 347 bp, Oryza sativa
  unsure (1)..(347): unsure at all n locations
ctcataattaatactataaattggaagtcgattattcaaactagcaataatagcaccacctactatttgtcgtcaacgggcactgtgaaatttccttgcttgatgacgccttgcctcgtctttcagttatatgaagctatcttccgccgcaattcttcaaagtgagcttcaagttcctgacgattggctctcgacaactctcaatatgtggtcatgatgatgtctcgatcaagattagtatgagagcccatggtatgaaaacatggtttcgcctatagcaacagaaatcgtcccagcgggagcatcaaataattgtgttggcaccangtaccgccatcacacattga

SEQ ID NO: 19118 - DNA, 298 bp, Oryza sativa
  unsure (1)..(298): unsure at all n locations
tcgagatccaatatgagacattctccatgttttctatgatagagngaatgtctcgtatgggaggctcactgtcattgtgaatgatctcaacgagcttgtggcaaactacaatgttcttgaggttgcccaaaagatgcttatggctctaccggagaagtatgataccctntgtaccatgctcatcaactccgacatgtctatgatgacactcgcaagcctctcggggaagatcaacaccaatgacatgtacaaattgaagataaacgagatggaggaagcctcaccttctaagaaatgc

SEQ ID NO: 19119 - DNA, 440 bp, Oryza sativa
  unsure (1)..(440): unsure at all n locations
ctacaacgcctgatatcttgtgtttacttgagaaagaaggactaaagcacagaacatcaccatcgtggtctttgtctttcactcccaaacttacagatgaanaactgctgactgcttcctcanagccaaaagctgccatcattcgtgaagaacggagcaatggtgatagggagatggctgctgcattctatgctgctggatttgaaccatgggatatcacaatgtcagacctcttagctgggaagtcttctctagaggagtaccgtgggattgcattngttggtgtgtttagctatgcagatgttcttgatcagctaaagggtgggctgcatcaatcaggtttaatcagcccctcatacagcagttccagaatttctataataggccagatactttcagcctttgagtgtgcaatggtgcaactaatggctctcttggct

SEQ ID NO: 19120 - DNA, 466 bp, Oryza sativa
  unsure (1)..(466): unsure at all n locations
nnttctaactagctntnggcttaatagtgttagagtggcttatgacttcatataagccaaacaaaatagccgcttatttgttntggcttatacttttcgacttataagtcggcttataagcctaaacaaagagggcctcaaaatgacagtacctgacaaacaagtagtagtagtacccatttgagtgcacttgagcacatagcacattttattttcagtgtagattntgcaggttttgcactgactgcagtccatcttgcatgagtccacaaagggggtgcttatatcaggggagtaatatttttacgtgtcacatcgggtattatatagggtgtcgtatagggtgttcggacactaataaaaaactaattatagaatccgtcagtaaaccgcgagacgaatntattatacctaattaattcgtcattagcacatggttactgtaacaccacattgtcaaatcatg

SEQ ID NO: 19121 - DNA, 361 bp, Oryza sativa
  unsure (1)..(361): unsure at all n locations
tatcggaatctgcacagaggaacaacagtcactgattgttcataaagcatatgacacaatatcatcgatgctgtctcttccagtgaaatcaatgacaagacatcttttggctggtgatgaggcgagttctctatactctggtcgtgatacatttctcatgtgtatgctttcatcggtcatagatggtcttcggcctcaaacacctgtaccagatatgctgatgatgattaatctctttaccgtcttcctactgaaaggacaaattccagctgcccatgcattagcttctattttcaacaaaacctacacaattctgaattctcacatgagaatanactggataangtgattgatactattc

SEQ ID NO: 19122 - DNA, 469 bp, Oryza sativa
  unsure (1)..(469): unsure at all n locations
cgaagcagagaaagctaatcagcaagaatgagcagcatctataggtgtttatctgtntaaggagtaaagagattctggttggctgtatactaaaatcgagtgaattgcattctggaccccttttcttactataatttcactttggacccctattatttccttttgcttcattatgcacccccccccctttttttttgcccttctcctcaaactcaggcacatatccactgccagtattatggcagcggctgcagaaccgcggaagtggtgtgacctaagagataatgctatttccagagctggagaagaagaacaagggggttcatagtgaagcacaaggtaaagcggattcaaagtgaaactatggtaacaagagacagtccaagctgcaattcactctactaaatcctgaatgatcctccatagtctcaacaagtaatctgaaagtggtatttatgtaccttcttga

SEQ ID NO: 19123 - DNA, 428 bp, Oryza sativa
  unsure (1)..(428): unsure at all n locations
cacttactgcacggatggtatagttggtgccattagaggggctgggatgcgaggcaacggtgggatcgctaacaccgagtccggagcgagaatacaaggtgaccaacaagcacactgagggaaggcgccctgtctacgccattgtcttcaatttccttcgatgttcgctactacgacatcttcgtcaccgcctgtggccctcatgtaagaattcctacgaggcgccatattgatcttactagggaagtagtagcgcttcatgtttctataaatagatcanaatctagtatttaccttactatcctatacgcattagatgtctttaatctgactttgtgtcacgtcccttttttcatcgttcttaatctgcctattttgaaaattcacattcgtggtcattcacctaacatagcttaatgaaaatttca

SEQ ID NO: 19124 - DNA, 382 bp, Oryza sativa
  unsure (1)..(382): unsure at all n locations
ataaatactcaactcggactaattaatggtcaagatgtcgactccctatgctgtctcatataaacatntataagnttaagcatcanacgcgatatggtccagccgagatggtcaaccagcccatatcacgttggacctttttgagaggctactggcctatggcccataaatgtatattgggcccagtttaaataatggtgtggggtctgatcccatggaagggcttttcttaacatggcccaagctacgttatttgttcttgcataacaaaaaggaataagttcacttcaggtccatctatatgacgctcagttcgattctcatccctacatgacaaaatacggagacaacgcatcctccaacttattaaaccatgcacaca

SEQ ID NO: 19125 - DNA, 470 bp, Oryza sativa
  unsure (1)..(470): unsure at all n locations
ctgtcagcatgacccaactttcctctatccgcatcaccccaggngaagagcttaccacttggagcattacccttgaaactgctcattacttccacgatggcagccgtgtgccatggaccacatgctaccgatttcactcttgatccttntaaggactctacttcttttggccgagcaactccttgagtatctccatgcccaagaacaccaaatgttccgtcaccgtatgtgaataactggccagaagatgttataatagctgtgtgccactcaccacaagcaatttttgacacagatatattgtccataggacccaaatatttatgtggaaaccatcggttccttccataccagtcattcatcaatcccaagctatgagctccttcacccccatcaaaaagttcgcctgaaaccgagattgcacacgtgtgctttgatccaaatgcaaccgccttgacatgtacagaggc

SEQ ID NO: 19126 - DNA, 479 bp, Oryza sativa
  unsure (1)..(479): unsure at all n locations
tgataattgtggtccacaactgattcttttgttgcaacatggacaagtactcatatatacatagctcttctctcagaaaaacaagtatatggcgtgctaccgtcgccctggcggattggacttgtgcttcatcctccctacacgtactgtgcacgtcttgcaccttctcttccaagtactctaactagtaaaacgtactctatagtctacttcgtatgtactacgaacatttctttgagaacataattattagcctgcgatcgagaagagaaacatcatgttacgatctagatcaactaaactctccagtgatttcggcggcttggaatttccatgtgtnttggccgagttaatgaactgtacaaagccatatgtccaggaaaacataaataatggaccaacattaactgcacttgttttggcattgacacgttgttcttcttcttttacaacatgcagctaaaaggaccatagcctcc

SEQ ID NO: 19127 - DNA, 424 bp, Oryza sativa
  unsure (1)..(424): unsure at all n locations
gtaatttacatatattatagaagtaacttattacattaaggaagtaactttgtcatgacattaacagtaaatccgttatggaggttaaaacatgagtctatctaacaattaaatttaatcagcacatattatagaattgactaaaaagataataaaattaacaactcacaacattatgattgtataataagtaatttaatcaaatcgaaaagtaacttttatatatgataaaaataacttacatatataataaaagtaatttacaacatagatatttcttttatcaaaatatnagtatgtaagatcttgttgtaaaacatttaattgcaacggacataatggtgtaatcggattataaattggatactactctaaaagaaaatctatagaagaaaaaaacatgatcattaatgactcgtatgaa

SEQ ID NO: 19128 - DNA, 470 bp, Oryza sativa
  unsure (1)..(470): unsure at all n locations
atcctctgagtcacctgccgcatgcangctttgtntatatggcagcacaactgctgttcatatttgtttgaatagaattaaagtatacgtctactgtgtacaccgccaaagaaatatataaggagcaagactcctagtatgtaacgtacacaggacagatctatacacttatcttttctatactataaacagttaaaatctagaattgccaaagggtttaattaatctcgtattggggtcttatatggactcctatttcagtattgattatgtttaattccgaaattcagatattttttagtttgatttctacatggactcttggttcttttttttgataatggggaatttctagcttcacagcgaacgtggtggctccgcgcaatgcccggtgcaccaatataaatatatatttttattatgatttacttcaaattattaatagtatctcgtgcttagatttgaaaaca

SEQ ID NO: 19129 - DNA, 290 bp, Oryza sativa
  unsure (1)..(290): unsure at all n locations
ttcaagcantcttctcaatctcgttctcactgaatntacttctactcctttgctgcggaaataaccgcagatcagatcatcagaacccggtgttcttttacatcgggtattttctgattcagtttcacacttgttactgcgtgccaacggctaatgggctctcgtggagaccgtgccatgtgccggtagcattcgattttttttttcttttgttctttcaaaaatgagccgctccaacggctatgtcgcgagcagtcgatcgcactaaaaattccattgggccaactgaa

SEQ ID NO: 19130 - DNA, 309 bp, Oryza sativa
  unsure (1)..(309): unsure at all n locations
agccttgccatcagctggatgactcaagacatttttcttatttacacgcttatcacgatgatatcttaagtctgaggctatgtccttgttcatanatagccacctgtaacctagggatcataggaaaacatcccacaactttgtgaggtacacgcttctatctcttgtgaatatttcatattgattcattacaaacagggcacttatcatagacttcaagatccttcctgaacaatacacaatcattgatgcatgcatgtatgcttgcatagcccacccctacatctcttaacatcttcattgcttcat

SEQ ID NO: 19131 - DNA, 411 bp, Oryza sativa
  unsure (1)..(411): unsure at all n locations
cgcatgtcagcttgagtgtgtgtgacattagagctgccagtacctattagtngataggagcgngtatattcttgtgtatgtctcttggttgctgctaaccatggcaggatcgcgcaaggggaaacaagatggtcatgctcaacgtcaacatctacaccttcgacgagatatgacaacttcttcacgtgatgcatatgaggtacatgactataattttgcacaagttgcatgtatgttaccagtctatgatggaaagtatgattccgctgcatacattcattgtgagctagcaatagaaaaacaattntatgagtatgatttttctaatgctcacatgattaaggctgctagtaatatgtgaccggtcttcatctttatgtggcttatgtggggaataagctgaacttggat

SEQ ID NO: 19132 - DNA, 468 bp, Oryza sativa
  unsure (1)..(468): unsure at all n locations
ctcagcttcacacacaccattgcttctttttcttatttggtatatcttttagttanaatgtaaagctagtggagttggcattggatgtgtgttgatgcaaaatggtaagcctgtcgcataccttatcgagaagttgcaaggccctgttttgaattattccacgtatgataaagaattgtttgctcttgtacgttccttatagacgtggcgtcattatttgtggcctaaagaatttgttttcactccgatcacgaatcgcttaaatatcttcgctctcagaataatttggatctgagacatgcacaatgggttgaatttattgaatcttttccttatgttatcanacacaagacaggtaaagataatgttattgcagatgctctgtttatgcgctatactttcttgctcaacttgattgtcgagtttggacttgatcatttatagacaaatgcgcttgatctgatttat

SEQ ID NO: 19133 - DNA, 459 bp, Oryza sativa
  unsure (1)..(459): unsure at all n locations
agctntacaaccncaagatcggggacttcggtttagccaatttattccctgataatatcacccacatcagtacccgtgttgctggaacgacgtgagtatttcagcatttagcagtttgtttgagtagaaagtaaccttgcagttgcagtaactgaactgatctatttgttcaatgcagaggctaccttgcaccggaatatgcatggcatggccaattgacgaagagagccgatatatacagttttggcgtccttgtacttgagatcgtaagtggcaagagtagttcaaggagtctcctggctgacgataagattctcctagagaaggtcagtcttactatcatctttactatccaaaattcagagatttgctttcaccttcagacattngctctagagacattccaattaagccgtaatcgctggactcttcatctaaatctttattagagaatggagt

SEQ ID NO: 19134 - DNA, 422 bp, Oryza sativa
  unsure (1)..(422): unsure at all n locations
tgaagatggngcttggaagttgaatcctatccattctgcttacggtggcggnggcggcctcctccttattattgttctgcttctggatgcaggcatcanccgcgacaactttggactctggtccgtttcggntcggtggagtagcgttgaagaaattgtggagcgtgaggtcgatgcagcgcagcgatttggattctgggaagcggctgtccatgatcagattcagatacctccgagagagggccattatcggagtgaacttcaagataataaataaactacaggacaagcatttgttaccatgaagaacgatgatatcatcacaatcaaaataaacaggatagatntgttaccaacggaaggtgagaaaacatgcctaccttatgtccatgtacagctgctattgcgagggaatgagtgat

SEQ ID NO: 19135 - DNA, 321 bp, Oryza sativa
ggattatctggttgatctgtataaatctgagtggacagaaaagaaactgcataattaacattgatgcctaactcatatgaccaaatgggatatatggaaaagatacaagaagttttggaggttccatatgtgtataccttcaaggccatcaaattctatctgaaattgcaggcacttatgaacataacagaagtaaaatgcctttagctgacgtttctagttatgcatgctctatttaaaaacttgctgagtggcattgcaactataagacttattattggcagaattgcattatgttttttacagctatatgtaacattt

SEQ ID NO: 19136 - DNA, 412 bp, Oryza sativa
  unsure (1)..(412): unsure at all n locations
attccctttcttgtttttgtgatgntgatcntgatgctccttgtgtttctgtacctgcgtattatgatcctacaaagatacgtgagcttatttgctaaatgatcattgttcatgagttgccattttgccttgtggagtatacatggtttaatgttttgctaaagaggttaaacccttcttacaaaaaggcctctagaaataccattagaagtgattgtataacgctttatgaatctgaacaagaaaaactgaagaggactttcaaagatgttagaaagataagcctcacatgtgatctttggacctctaaccaaacaattcgctacatgagccttgttgcccactacatatatgctgattggtcaatgcattgtcgtggtataactttcttgagttggagcactcacatact

SEQ ID NO: 19137 - DNA, 151 bp, Oryza sativa
aaacacgccgtactgaaagcaaaacctcaggacctacaaggaaggcaatagtgccaagatatctggcaaccctaaccaaacgcacactctaagcacttatggccttaaccgaaggaagcgacatgaggaagaatactaaaaggaaaacaaa

SEQ ID NO: 19138 - DNA, 457 bp, Oryza sativa
  unsure (1)..(457): unsure at all n locations
agctttccctagacactggttctcactagtgaatcatctctatcctattttatcaattgccntggggccctggatgaaccggaggaagatctgaccacacacattcccttggattcgatacccttggaatactccgtaggggaagtgctacatcggtatattcgtgcgcttgcnngatttatccgtaactgtatcaaataccaacaagcatttctggcgtcgttgccgaggaacggttggtgatcatttccgaacctagttcatcctcgtatcctttntcaattttggtattctaccttcnaccctgctatcccagagaagtattcctgcaaactcttctcgaccatggagcacctcttttgagctgctgctctcgggcgaatctatgaccactcttcatcgagccattataaactgctataaatcgtccgactaatatatgtatggaaatcttttt

SEQ ID NO: 19139 - DNA, 386 bp, Oryza sativa
  unsure (1)..(386): unsure at all n locations
tactntatacgaacggagattagttaggttaagtagtgaactcaccacctcctgattgacgacagcatcactcttgttctcagatgtgacagagccgtccgggttgaccttaccccttgcccgcgcccagttgcgagctctttgttcatggatgtctgaanacggggcagggacattcgctgctgcagcggctgcatcttcttgggcccatattgcctccttgccgatgtaccctgcggtgcccagccgatgcgtgtgctcattccgctcgtgcagtaagcgatgtgcctcgcttgataccacaccaccatatgctgggccatccctcatttgactacttncttcacaattcactctctgctcttttgtatcttgatgcctcacag

SEQ ID NO: 19140 - DNA, 271 bp, Oryza sativa
  unsure (1)..(271): unsure at all n locations
agcttggccacatgatctgtcactgtatggaatgatgcttagctgctgctgaagctgtatttctaacggcgtgtatgcacattgngctgtttgacctcaaacaaatggcacgatcctgtccccttatgaaacagtctcgatataattatgaattctgaaatatataaacccatgccataaacaagccattagtcacagaccggccaaaaaattctaaagacttcgatagagtaattagcaagaactacagttactaacctctaagcacgac

SEQ ID NO: 19141 - DNA, 343 bp, Oryza sativa
  unsure (1)..(343): unsure at all n locations
tgggggtacgattgtggttgatcgcgtggattttgtgttggagatgtgatgcaaggatgcggngaattgtgtggaaggacagtcgttaatgtggagtcaggtttgacgggcgtgatgcaagaattggagggaagtgggatctatattagaagagataaatacgatattcctgatctgatacttttcttttcttgagaagtanggacccaagccaagaattacgtattacaagtggactagtattcataggggccttttctttcgagaaagctctaataagaaaagaatttggtttggagaccaaacaaaaaccttctatcgactagagtttgatgtcgattta

SEQ ID NO: 19142 - DNA, 276 bp, Oryza sativa
atgcaacttgttgtcactgaacactgaatagtcagcactattatattaatgttggatggaggcaactcagagctcgtgtgtgattctactctggagtgtcaaataactacacctatgataataatcgcatctggtcgatctgagctaacccctgttaaatattatctgccatctaggctaatttacatggtgtgacgcatcatgctcctcctctctatgatagctttggtttgcgggtggatccagcatggacagagcagcatcggtcaaatgtat

SEQ ID NO: 19143 - DNA, 169 bp, Oryza sativa
agaacatacagtgttttgcaactttatttcagaaaatacgatcagacgatggacactagaatttataacccttcgtattaacagcataataaccaataaaaccaagattaagcataaacaaattgcgagcacgatactggggatacaccttggtgcgcaacgcgagagc

SEQ ID NO: 19144 - DNA, 514 bp, Oryza sativa
  unsure (1)..(514): unsure at all n locations
tcaggggactngcgcacctgacgctgagaggtttgtgggcttgctcgcatcatcttcacaagngatctcattgagaggattgctgaatacatagaaatgggcagatcaagcaattaattgttagtggatcaacacatcaacaaatatcacgtctggttgacaaattctgataaactaatcgctgacaaatgcatatagtgcatatagatagcactactagatgttactatattgcaagcagcataagtgacaacaagaattctggtaactcaaggatggtaaaattacccaaataataaagcattgtccttaacgagggatagaattggacctcgcttatgctaaatgccgatcgctacatatgataaacaaggcccagattctgctgtggtaaataacaacanaaatgaagcacataaccatacaatctacctaacccatattctggtactcaaaagacaagtaccatagcttgcagatgactttataacagctttccatatatctactaacc

SEQ ID NO: 19145 - DNA, 396 bp, Oryza sativa
  unsure (1)..(396): unsure at all n locations
gcttgtgacttgatcgaagattcgggcttgaacgatatgttctaagacatcaactctaaggcccacttcgcaatccgtccatatgcttcgcgattgtgaagtatatctccgagtggaaacgatgtgaccaccgtgaccgagttactttgaaagtagtgagataatttcctaacggtaattaagacaccatataataactcttgaacctgaggatatcttgtcttggagtcggctaaaactttgctaacaaaataaattggacgttggactntttgaatatggccttcctcttcacgctcgacaaccangaccgtactcacaacctgggaggtcgccgacacatataacagtagcagctcttgtggatgtggcgagggccaaacttgtggagtggtg

SEQ ID NO: 19146 - DNA, 414 bp, Oryza sativa
tgttacatgcgtcaccggcgtttcttacacatatttcatatataccgcacgatgacgtcagaattcgatggtatcgaagagaatgatccaccaccataacatataactatgaaggaaatacatgccattacaaataaaatacaatgcgtgttcggaaaatggctgaaataatgttcggagggaacaaagcgtaagataccagatgatatatcatgtcccacattcaagaagcatcgattttctttgagtacatgtggtactggaaagatttggagaattgctatgccatatatttcatgcatctatgatataaaaatgtgtttgataacactgtcagaattgtccttgacataccaaacaagacatagaatagtgtactatcacgtacctatcctataaatatgggaatcaagt

SEQ ID NO: 19147 - DNA, 234 bp, Oryza sativa
  unsure (1)..(234): unsure at all n locations
aagtgagagcacttaatgccttcttgncaacggctgattcacttcaaaaagatgcaaaagggttggctgttggtggaggcagcaataaatgcatttggcggtggctgatgtggtgatgaaggtgctgctgagtgtggtggaccaaatttggtggcgttggaggtggatttcgcggtgaatatggcggtgatggcggcagcgggatgaagataaatgaagcgatggtggaagtgt

SEQ ID NO: 19148 - DNA, 341 bp, Oryza sativa
tgggcttaacaaagaaattcaggacatgcttgattgtcaaagatatacatctctttctcatttgttacagcttgcttgcaatgctgaaagtaaaatataggaggacatgaagaagcaacatgctatgtgtttgtcttctattactaaccatttgcaggaagtgcataatcatgataaggaggagagagacatgatagagccgctagtcccattgatcacactcatagtcgatgcacctccattatctgaagagggcatcataggtaaacttaatggtgctgagattaataaaggtgagtgtgttgtaatgaattgaattcgtccactctttatgctatatc

SEQ ID NO: 19149 - DNA, 383 bp, Oryza sativa
agcttattccagcaagagcaggtgataggctgctaagctagctagcaagcatatattcgattcgattcgaccgcccacgccccgcccattaatttcttcattctcatcagcatctcgatcgatccatcggcagctggccggcatcaagctcttaacttaattagctagctagtctctccctccctccaccgcatatccatcccccaccagttgtagcagtagctagctccaagagcttcttgtccatgaattgttgatctcgatcgatcgatctctgctgcctgctagctaatgaataaacaatagctaggctatatatatatatatatatatatatatatatatatatatatcgatcgaccatgtcgtcgttgatgcaacac

SEQ ID NO: 19150 - DNA, 472 bp, Oryza sativa
  unsure (1)..(472): unsure at all n locations
tatgaattatgatattcctttccttatgtaatagttactattctatttngaacgccttctacttccacatcaattgtactcatggntggngattattgtctgtagaggccgaagtgatatttgcaatcacatcggcagtgaaggatgtatgtgggaaaccgcctacggagaggctcttccttgacaaatacgggaggatctgcttgtgccttgatgagattgttcggaaggtacacgcttgggttgatcttctagtgtgtgaagttgtttcccccattttctgtgatctactctagtacctgagagcttgatgatatatantatgcacgttgntgatgcacggtctgctggagaacaccgagaatgacagagtccggatggtgatcatgctataagccgcccgtgagccatgaattttgatcacttgtaatatgtgtgtatccttctcgcgtgtatcatatctctcgcaatt

SEQ ID NO: 19151 - DNA, 497 bp, Oryza sativa
  unsure (1)..(497): unsure at all n locations
agcttatccagaagagaccgaggtcaaagagaatgcggcatggaaagttatttattaattaggaatagnttgttagtttccttttatgtttaggaaaatgtgtttagtgtcctataaggactttatcttttccttttatctttaggaaagtttctttcttgtccggcaaagacttgtatcaacccatgggtataaatatgtacacccagggtccatgtaatctatcaattacgatcaatagaattcggcgcatcgccaccttttaccttttctgctnntatttatcgtccagcgggacttggcacctgacgcggngttgcatcggtgttcgatctccggcgaagggataagtccaatgttccgtcggtccaggcaattgtattgtctacgtcggcgtcgttcaaggctgcatcagtacattcgacctcttggattgctctggtttggatgatatatntgcctacctaattatcatatgtctatgtaattctagtctt

SEQ ID NO: 19152 - DNA, 391 bp, Oryza sativa
  unsure (1)..(391): unsure at all n locations
tgtgtgacatacatacncatataacatggtaatngnnctgttctctatcatcagagcagatatattgcagaagagtagttttacctgcgcctncatcttcaacaattgcgatgctactgtagccttttatattggaatttcctccttcaaccatggcaggatcaaataagagggtgattatagaatctcgatctttgtcacgtccaaaaaccttttcctcacgaaagggtgttgtgtcttgaataaccctgcttcctgcagtgtcagcactcacttgtgttgcaactgatagaacaccaaagagaatttttgtttttctaaaatgctcttgacctctttcaaatgattcaacatcttagtgttgtgaggggattagctagatatattactg

SEQ ID NO: 19153 - DNA, 397 bp, Oryza sativa
tcgcactgatgcgatcggatcatgtcgtgttcgtaggaaaaagaagtgtgcgcacaaaagcgttcttgtcatcactgacgaaattggagactgaaacatcatctgattagcctgccgttgtcgattttatatctgagctgtaaagccatcatctttcgtagaaaaattacagcaattctcgacggctcgagagtatttaatcgagtggtggcgccatggcggccaagttcctgaactgaagaggagtggatcgctttctgaaagagaaaggaacactttgctgacagcgaccaaatgatggtggatagacgaaagggccggagatcctagcatcatgggccatactagatattagcattgccctaatgatataactagtagttctcttggtattttt

SEQ ID NO: 19154 - DNA, 385 bp, Oryza sativa
  unsure (1)..(385): unsure at all n locations
tgttgcaagtgtatggaactatggacaaacaggggaatgcgagcgcatgtgctgcctaacttggcggaatccgaccaaaaccacactgccctcccgtgatgagagagagagagagagaaggagggagtgaccgagccttgaggctacaaatgggcaacgccacagtaatntaatggctaatccacagtaaactcggcgtggctaattgttgcttggtctatactaacagagattataatgtactcatcctgtccgcattatgcttgcggtacaatggctaaacggatgtgttctactgtggcagtggtagcactgttggtctgtatgatcagtacaatacagaaaccatgataagcttgtcttttaccatggttccaatgggagt

SEQ ID NO: 19155 - DNA, 431 bp, Oryza sativa
  unsure (1)..(431): unsure at all n locations
ttaccaaacttttaaacgattatatcatttgcaaccacaagctctgtagcacacatatgcccgttacgccatttacaaccacatacaaccgtgttgaaggctctggtcaatccaccccaaaccattntgntatcaattggccagcggataaaccaaacaaagctatattgcatacaaattggccctttgaaaaccatccatagatgaagctgataagttcttaaccaaaggccaccaccgatatggaacttttgttacttccatatgcactcgattgtgaaggatcgacaactaattgtaaaatattaacataatcttgactatctctgtagtgatatttacatgtatagttatggtatggagtacccataggctacacagtgttaactaagctgccttntgtttaacttgaggaaaccaactgcctaaat

SEQ ID NO: 19156 - DNA, 507 bp, Oryza sativa
  unsure (1)..(507): unsure at all n locations
ctaagcttaacagcattataactccttgatcaataagggtgtcatttggtatatataaagcacggatagttcttctacatagggataaagcatggataaagcagggatagcttatacagcacagtagccagcttgtggaaagcgatgtaaccatttgattatagtgtcttcaaggaacataggttttcatgttgcatggggcaaactcatatctgtatctggccgatcaatatcatangtcaatttagtcattagcagtggaattntcagttatgttccatcagaacaactgcatataatcactattatttgttggccgcatttacctaacacttcccaatgtggtagtccatattcatatgttgcatcaatctaatcactgtagtgtcatgtttgttcaaacatggcatctgtatctctggctaactgatgacatgtatacctaaaactgtccactgtgattgcagatagctaatacactgtactacaatccttcattgacattgg

SEQ ID NO: 19157 - DNA, 491 bp, Oryza sativa
  unsure (1)..(491): unsure at all n locations
gcttcatataattgcctcctcggctctaccattgtattcctgaacagcgctccaaaccncgacaagttgatcaatcaggtctgtcgttcagcccgcacgccctggcaagtccaagtcaagaagccattggttcgcttgcaaagcctgttgaagcgttctgttcattttttttggaggctacgtatacaagcggcgcaacatccttcaatctcctcccctgcgtacaggccgattctcagaagcttattatggcaccaatagtaatcagctaggcaggagtatcaactacacttaaaattcagttgtcttgttgacattaccaagcatctacacaatgtacgctacacaagcatattcagagagcaggtttgacctacctctgtataatgtgtatcttttgattgcaacaacctgtaatcctaactaaaattgttgcctttgtggaggtagaatctgtgccacttcactatacaaatgtgccactttaactc

SEQ ID NO: 19158 - DNA, 438 bp, Oryza sativa
  unsure (1)..(438): unsure at all n locations
attctgagataatcaagtttaatgcccggtgtcctgttcaaggagatgttgtcatggagtgcattagcctggatgaaaactttgaacatgaagtgatggtgttcanggtcatgtttaacatggcttttattgaagacaacctattgctacttgatagggaccagattgacattctgtgggacacaaaactccggtttcctgtagatttcagagttgaggtaccacttaactcatgcatcttgtacacatttttcacctgcacattccaccttcatatgtagttatgtactcgtcttgccttgattatcataggttatattttcggagatggacacaatcacatcgcttaactcatctcaattatcaagtgaggataaggaaaactcttctagggtngaagatgcattcagtcatctggattggtcaaccaaaagcgat

SEQ ID NO: 19159 - DNA, 410 bp, Oryza sativa
  unsure (1)..(410): unsure at all n locations
atccttgagtcacctgcggcatgcaagcttaatcagtgcctttgctaaatcttgacggttgttattatatcacaacatgattgcatttgtaatcaattttgtataatgcacatgccgcacatagatntacacgaacgcaacgtcaaccaggctagagaagaatttgtataatagttagtagtaatttcgattgcttgaatgaaataaagcacccaggaggccaggagcgaactacagtatatatctatcagnttgcacctacttgctcagactgctccgtccctctgcatctttcaggtgcgtcatgcgtgcgtgcgtctcgccggctcgccgctgtccatgtgttccccgtgcagatgagcgcgatgacgatgtcgccgtcgacgccgtgggcgatgttctcgagcacc

SEQ ID NO: 19160 - DNA, 479 bp, Oryza sativa
  unsure (1)..(479): unsure at all n locations
tctcggtggacctgatggatgtcttcatgatgtgttctatatctaanagaattgtttctgtgattcctgacttctagaagtgtggtttgtgagtatgactaatatgtagccactattctgggtttagttgagacttgggacatgattatgcactattctggctagtagtataatgtaagtaagcgaagcatgcctggtgatgattgtagcctatcatcgaagctctggaagttggattcagacttgatctgctgctgctcctttcattgtgagtatgcctgaacttccttctcaacaagagatttacttcatttcgattttcagcggagtacttttaaatntctcgcattagtaatcacgcaatgcattaatttcgtttgcccgttgattatatgatcaattaagttgacatgctctaagtctcagttggatgtgctgctctgagtctcaattggatgtgcangggtttgcgttatgct

SEQ ID NO: 19161 - DNA, 414 bp, Oryza sativa
gaataacactacagcaagtgaggaggactaatacatactagatttattggttaccaaaatggcgacgccagtgataagtactgcagttggcattatggacatcaaatgctcaaatcctcgaggaatggagaatttgggaagaccttgcggtattttacctacctaagcactccagaaatagaggattacataaagtatagcttttcctgacagacaaattatggtcaaccgacagaacaaaacaacctaattctgcgttcttctaacatggaaatcattcaaatgttgaatatatattgttatcacaaaagggaacttaataccaagaacaactacaatatatcttatacccacatttgaatatatgaacatcaatgcatcttataacaaataacaagagtctaatgatattga

SEQ ID NO: 19162 - DNA, 449 bp, Oryza sativa
  unsure (1)..(449): unsure at all n locations
ctcagcttctatgatgggaatatatntgtaggcataatanaatactttcttcttgganagacctgaaacgatatgtgagagatgtttatgttcccatgtattatgctaacattttgttcaacaaactgcaatgtttaaaacaagatactagaactgatagttcatattatcatgatatgcatgcttgtttattacgttgtggtttagatgaatgcgaagaagctatataattgaggtttttatgtgggcttaaaaaaaattcaggacatgcttgattgtcaaagatatacatctctttcccatttgttacaacttgcttgcaatgttgaaagtaaaatagaggacatgaagaagcaacatgctatgtttttgtacttgttggcggtatgtcctgatacccttcgaccagacctaccgaaaccatggaaccagcgaggattcaagctcga

SEQ ID NO: 19163 - DNA, 503 bp, Oryza sativa
  unsure (1)..(503): unsure at all n locations
agctngcagttgcaccaacatgaattatatatgtccgttatgcatgtatacatcaatgcaccagctaacctttcaaatttcaattaatatatactccatggacaatggtacctggattccatgaattcatgaatttatgattgataaatagtaacatactaaaatgtatataaataaaatcaaatatctctgattagattaaatatctttctcctaaagaatctttcaacgcctctaataagttgaagaagattccacaaatttttataaagaaaaaggcaaattgaacctcgaatccataaatgattgtatgatgataaatactccataacataaaaaagtatttttaaatcgaagcanatatctgtgattacattaaacacccttcccctaaaaagattttcttaacgcctctaataagttagtgaaaattatanaagttatggaataagacannataaacatacgatccttatttctgctaaatcaatcaaacctgcata

SEQ ID NO: 19164 - DNA, 493 bp, Oryza sativa
acacttgatactcagcttctttgagtttaccatccaatgagctcagctagattgtttggaatgggacagctatcaatcgacttgttctttgccgataagatccagtacagaggagaaatctcatcaacattgatgatggatcggctgctcaacatcccatgacctcctttatgcagtatcgagaacatagagctggcaaggttcatgagtaggaattgtgacagatggtgggggtgaatggaagcagcatatattccatcagccggcctctatgtacatgatagatttatttccagatgttgtccctcaggtatatttttactctgtcaattctgttggaataattgttagccgactcgaatcttgactaacttctttctttgccttgcagacaacagaatcttctcctcctcgcaagagcaacagtggcagggacatagaatatgctccatgccttctaccatatggaggtggattagctcccccagtcatc

SEQ ID NO: 19165 - DNA, 412 bp, Oryza sativa
  unsure (1)..(412): unsure at all n locations
ctgcgacgtgaggtttgcgcaccgatntgcacanatccgtcttgtttctgatatgcanagatctaatatacggagtacttaactactactccctccgtcgttgtgactttaagattatggacaaacataataatatgtacagtactaagttagttccatcaaaccaataattaaatatattgtcataataattgtggtttgggttaaaaatggtactacctctttctataaactcgatcaaatttaaatagtttgactgttaccaaagtcaaaacaacttataaactgaaacggaggtgtatttccgatggcattttgttagggaagccatacccataaatgtgattagcaattgctagtaacagatagtagatcgtcaattttcgtgtgcgctgtactgacaacacaacac

SEQ ID NO: 19166 - DNA, 361 bp, Oryza sativa
  unsure (1)..(361): unsure at all n locations
agctntccncagccccctttcatcaatggactcttgacttctattaaggagtgnggntcgntcgacaaatatctatctctatatctatctctgaggcgtttgggttttgcaaaactccatagatatgcagaagagaaatgctatcctcactccgaccaagacagaacttttactcaaagtgtattgtgatcttcttgttcaaataacaattaaggtgaagcacggtcaggaacaacgaatctcttttgataaacagatccattttgcaagctcgttattacgggtagttcctacaaagaatcggactaatgacgtatacaatgcttgaatattgacgtagatgctacatagtgggttctca

SEQ ID NO: 19167 - DNA, 302 bp, Oryza sativa
cgtcactgcacgttggacgttttctttaaagacgctacttgggtgactttgcgaagtggggactgctgctaggctcacctaccttaaagtcagcgcttcgccctttcctgcccccggatctatcaaatcaagtactgtgggacctgtagaatagcgagcctatacaatgaatagacatatacttaatagcaataagtatacgaggaagtcttaataaaatttaccggcaaaaataacgcaacactcatcaagcgtgaaggtcctatctcccatacatatgaaattcttggagatgagggata

SEQ ID NO: 19168 - DNA, 457 bp, Oryza sativa
  unsure (1)..(457): unsure at all n locations
tgccggcgaacgactgcgcggcggcacgaacggtgatctttctctggtagcggacggcgcggcgaactcaccggtgaccaatgaaacggcggatgagcagcggactgtgactgcgacaaggttgaagcggcggagaccttctgcttgacgacggcgacggtgctccggcggtcttcatcgactgcgaatgggcggacgaggacggcgacgcgacggcgaccacgaaggcgacctccccgagcgacggcggcatctggagcgactgctgcgcacggctggagcgtggtgtacgactgcggcgcgaggtcccacggcgctaatgctctttcgacggcgagagacgaacgcgatggtggcgacgggtataggagacaccggngatccttttatatgggctatgaggcggcggcgaatgccaccgcgaccggcgacgggatggaaagctcgggctcggaga

SEQ ID NO: 19169 - DNA, 359 bp, Oryza sativa
acggacacttaaaactaagcttccaccttgagccgccatatcattaacacatattttttattacattgctctgcctatcatgagagggacatgatcactatataattaattgctattgcttgaaaaagggcaacagcaatgaacaactaagatgtcttattgttatttctcgaagtctgctgaaaaaggaatgagaaatgacagcggacaattaatactaacaaatgtacagtcatgatgtattctgaaatatgaaaacactatctccgttctctgcatgttatgaacacccgtgatgcaatgaaaatattcatagaatcttgcatccatatcaacctaccatatcttaagcttttata

SEQ ID NO: 19170 - DNA, 198 bp, Oryza sativa
cccgcacacggactattttgagtggaacaaaagttatttgctgaacatgagatatttaaggattaatttctgggttatcaaaataatatcctcgcttgaaaaaggacaagactccgcttgtttcttttttaaaaatgaactaaaaatatatcccccatcccggggcataatatatcggctgccgaagaagaaaaaatt

SEQ ID NO: 19171 - DNA, 334 bp, Oryza sativa
  unsure (1)..(334): unsure at all n locations
ttttactaaanactaatcagtgatagttattatcagacatttaaggcaaatgaccttcacctttatatctacaaagataaaaggtgatgactgatgggaaatacatatacatactccccggtcgtcttgcatataactaattgtactacgttctataacacatttcgtactatttatnnttctattacacataaatacaaatatttttttgcaaatgtgctggttattcatatataaaaacaacatgaccttatggagatattaaatattattaaggaaagcaataagtgggtaaattgattaaaaaatgaaatgcattgtcatggttgttata

SEQ ID NO: 19172 - DNA, 344 bp, Oryza sativa
tttttttaataaaaaaaaagaaaggatcgtctctgacaccatgtaaaaaaaagagaaaaaaagaaaaaaaaatttttttaaaaagaaaaaaagggaagaaagaaggaaaaaaaaaaaaagaaaaaagaagaaaagaaagagaagaaagaaggaaaaaaaaagtaaaagaaaaaagaagaaaaaagaaaaaagaaaaaatgaaaggaaagaaagaaaagaaaaaaaagaaaaaaaaggaggaaaaaaagaaggagaaaaaaaaagaagaagaagaagaaataaataagaaaaaaagaagaaagaaagaaaaaggaaaggaaaaaaaaaagaaaaaaagaaggaaa

SEQ ID NO: 19173 - DNA, 300 bp, Oryza sativa
taactctctactagcctcctgcaaaagccctttttttatttgacccaatgaatctgtgctttacttttaagttaagatacatggtatgacaggtataatatgaagcacgtgacttcagcatcggccatctgtttttagtataaccccatgtcctcttgttgttcctgtcgacatgctgcaagcaagctacagacgagaaagaaaaaaaaccacctttctcggtagctaagtctcctgggcagttctatgatgtggacagcatatggataaactaacacacgagggatctcttctcctttg

SEQ ID NO: 19174 - DNA, 543 bp, Oryza sativa
  unsure (1)..(543): unsure at all n locations
atccttaagcaccgcggctgcagctttagaggggctgatgactcttccgaaaggcagatttatactgaatgttccccacctatgccatggaagctctggttagcatgacaagcatggtgaaaggattgaactggacactatgtaagctagaaaaaaaaaagcctgaatcatacttcttaaagttcttaaaggcagctgtgtcgtccaattctcctctcatgtctagaggatatggttccccattcaccatggtgaacggattcatctcaaggaatgagaaatccaagtctgccagaagatcaatagaatgaactgagttatcttggaaaacaacaattccagaattattttatttttcaactgtgaattaccttggaaaacagaatatacacctctgatgaaatcacctatntttgtccgaacctgaaattcagacagaagacgtgaatgacatgagcacaagatggctaatgcagaccaaaataggtatcatcaataataagttctaacactaganggaatgagtccagaatgggagaaaag

SEQ ID NO: 19175 - DNA, 332 bp, Oryza sativa
  unsure (1)..(332): unsure at all n locations
cgggaaaatgaactccccttccttccgtcaccctgagaggcctcacactgctcccgagtgagatggagcttcccgccgatggtgatgggccccgagagaggctgtggctcatcaccatcgacgaccttgaggcgacctaacgcctcctcgatcgacatcgtggagaggtctagcagagattcgatcgagcgagcgatctgtctgtacttctcatggacgcagcggaagagcttctcgacagctctctcctcgtcgtatgtgtcgtcgccgtactggcaccatttctgcangagagtgttgagacggagagcaaagtcatcaacatcctcacc

SEQ ID NO: 19176 - DNA, 471 bp, Oryza sativa
  unsure (1)..(471): unsure at all n locations
ttatgcctgttatacctgtactctnntttctattagcctttgtttggaagctgctgtaagtttcgatgaaatctttactactctgtcttgccaaatgaatcatgtattcattctaaaaaaattcgaaaaatggataagagccgagaagtcttatattatgaaccttcgattctaaaaatcaaaattcttctacattgaatgtatagctgcaagcaataaattggatcagcctttctactccctgcatctacgttgagcaggtatctttaggtaaccgcacaatacctaacctaatttattgataagagtgcttattataaatcaattcttgcaattnttttcacaaatngatttttgcatctttaggtgtcaaaataaacaaaacccatcctagtggatntgtgtggtaaggaaaaacgggtaatctattccttataaaaaaatcttggagaatatgtaatgcttactctc

SEQ ID NO: 19177 - DNA, 490 bp, Oryza sativa
  unsure (1)..(490): unsure at all n locations
tccctggatctgggaagtttctctntcacggtattgagatcgttttatctatttccttgatcgctacttatgggcgtgcgctcaaaggatacaaacagggattcgcaaacaaaaaggggaattcgtagtcactttttcctgtcgcgtaaaaaaaaggctttacgcgagagcaatagaggttgggatacatctatctcttctgagcaacctcttttggattcttaagaccacccttgcagtatgataccgtctgctttgggttctttattatattatctccttcgagggatttttaggatcgttcaggctatatttagtctattttggcttttactgtctccttttctcaaggaagtggttaaggacctcagaagatagaggagagcgccaggcgcatatttccggaatacttctacggngaatgctcattgaatgcgcattctccgtattatgccttgaagatgactcgaacctccacgctctttatcac

SEQ ID NO: 19178 - DNA, 206 bp, Oryza sativa
tagggagacctatggtctcatatccgtacacccataatctgtaggaatcaaaacctacgatgtacgaaaaataaggactccaagaacttgttgactagagttcaatggtcttttcgataaagcacaattgtcgctacttttgacaactactcaagttttttgaagacagcacgcccatgacctattgcccaaacatcttacacccg

SEQ ID NO: 19179 - DNA, 353 bp, Oryza sativa
  unsure (1)..(353): unsure at all n locations
tcaacatcttcaacatcaccaactcccaatatgctttgctataccgaaataactatgtgtttctataactgagatggggttagtcacgataaaaacttgggtggctcgaacgggcaataccaatgggntattccttgtggcttacgtagaccaggtcaacaattgtgcgtcttaattgtacacaaacacgccagctgggtgtttactccttgacaccgaaacagtagaatctgcatattgggctcgtagacccgcccccacatatattctatgaattcatagtatgtgctctattgaccatgtgcagcgattcactatacttgaacgccataatttctagacgcactccttta

SEQ ID NO: 19180 - DNA, 367 bp, Oryza sativa
actatatctcgtatgattgctaatataatacattagagcatacaacttctataactggatacacacagaagtgaattagtttacccatggatatcattgtaatgctgagagaacaatatatgagttcttcatacatgacctactttctttgctattggagcataccatacatgtatgctgatgaatgtgccttcaaatatcacccgaagtgagctgatgctgcatactgtcatgttctcccacccatagctgaccacaggaaaaccataccatctgtatgtgatgcagctgaacaaagctaatatatatggtatgcacgataattctttacactggccttatttatcactcttttgaatgtcaatct

SEQ ID NO: 19181 - DNA, 236 bp, Oryza sativa
ccctaattaactgagacatgtaagatatggtcccttcttaaatataaatcgagcaccatcttttttatataactagcacatatgagcatgcgttgcaccgcgtgaatatcaaacaaatatggatggttaagattgcttgtgtcttataacacatgtgcacaaacacattgaatttggaagcgtacagatcagaaagatatgctatgaattaccacacaaatccatcgaaatatctg

SEQ ID NO: 19182 - DNA, 453 bp, Oryza sativa
  unsure (1)..(453): unsure at all n locations
gctgaatngatnttaacaggtggatggtacatctgttggtgatgattacaagtagngaatggtgaaaggattcatatggctgctagatctattgttgctctaacactaaattataagatggcgaagaataagtcggatgcaaaaccatgggaaggatagcataaacctcctgaaggaattctcgtatacatagatgcttcctttgacatcgtctcgagtacaggatgaaccatagctgtcaacgagattcacaagggaattttctagctagttcttgtatgtacttgtctcatgttgctgatgcagcaatggcagaagcctacgtcctcatggatggactcatcctcgcccatcagattggttgtcaagatactacctccatcacaaaatgtctgacgcacgtgaattttttaaaaatgttggaccgttcgtcttatctaaaaaaattaagta

SEQ ID NO: 19183 - DNA, 489 bp, Oryza sativa
  unsure (1)..(489): unsure at all n locations
agctttganatatcccagttaaagaatagtttatgattcnctttttcctgagaggagtangattatgntttgaacataaaggannatttcatgaatcaatctcttatgaatgaagataatttgattcattgacaccaactcatttaatctaggggcaaggcgattagctagaacttgtgccacaattcgggcaaaactgtgcatcanacttattgngtgaaaatgctacaggcttattgcccctttattcttgggaaaaaagcanataaatgctgaattgaaatactcaagtggtcagtgttgttggctaggaagaactgtactgcctccaaagatcgtccaataatgttatcctccactgtaatactacctccccaggatataagggattttgcaatgcagatcccgtatattatgggatggaggtagtatcttctttctagtatgttaatccatggctctgcagtgcatccatgttccatttaaact

SEQ ID NO: 19184 - DNA, 408 bp, Oryza sativa
  unsure (1)..(408): unsure at all n locations
cttttcccttctctagcataaattggtcggtctatctgattgtttnngtgtaactataacttttttcttctaatatattgacgtgcaatccttttgcttttgcacgttcgtgaaatccattatcaattaattcattgcaaaattgcgaatcggagaatgtgatcgaacgatccanggccgggtgagatatgattgcatgtgcattggtgcagacaggctagctagctcagctcagctgatgatagctgtcggatctcgtgcgttgcgtccatggccggccggccgtgacattcaccgcgctctgccccgccgtcgccgctgccgaccgggcggtacgcgccgtgccgtcgctgtccgtcgccgtgtgtgtgtgtgacgtcgagggtactcgctctgcagtaaccgaac

SEQ ID NO: 19185 - DNA, 480 bp, Oryza sativa
  unsure (1)..(480): unsure at all n locations
tggcttaatgcatctgctctngcgtgtagactcatgtgttttttactttaattaatgctaaaataaatcttcccaaaggccgtgtttagatccaaaggggctgcttatattgttgtcatttcgaaccattctattatttggcaagttgctaaaatttagttttatttggtttactaccaaatattagtaatgcctataaaatttggcaagattctagaaacttctcctcacaaaattatgccaatatttagtaaggtaacaagctaaacattacctttacatttccaacttgccaaaattttggtattaccaaaatttgactttaccaacaattggtaaggttgattgtggcaaacactgaacagaccccaagttttttcttcgaacttctaactgtgtggtcacatcaaacttttctacacacaaacttgtaactgttctatcatattatttcaatttcaaccccatttaaacacaccc

SEQ ID NO: 19186 - DNA, 474 bp, Oryza sativa
  unsure (1)..(474): unsure at all n locations
gagctgcagcttatgtcagatnccttatgcatgcgtgccatttattacttttatggatcanagactaatatgcgatatgttgatcatcttagcggcacgctcagcttctgttcttatatcctttgtgcgttggtgttctaatcctttacattatggcttaagcttattccacggcagcgcatatattgattgattacagcatattataagtgcgaacgcattgattttgcttaccttttcatattcaagcagacattcgagtgggttgggtttgagtgtccatctgagatcgtgtccatgtgcgactaattaaaagtctggtccaggaccgcgctcattacttgcgataccgtgctgtgaaattaatccacgccacaactgtcacaaaatcgaacacaacagaatatatcacgttttgtgcgcaaggctatcaccatcatttaagatcgctgaatcggtacaacttcaaacatc

SEQ ID NO: 19187 - DNA, 428 bp, Oryza sativa
actggtcttcatctcaatctcttggatggccacaatgccaacgacctgtacgatggcggattctccgtctccaccatatatgctgtcacatccttttctcttattttttttcctgagatagatagagagagaagggtgagataagacatttgggaccattaattattttaattgttgttaggacaccactctagttcgattttagggggtaattcatccggattaaaaagttaagggtattaaatgtattgtataaagttagggggtaattcggctaactacaatagttcggtgtaattcggattaccacaatgtgtatatataattggtgcattgttacttgaactgatcgatacttaattctttttatcaaacaatgaaatataatggatcagctatttcttgatgccaaacttgcattgaaaata

SEQ ID NO: 19188 - DNA, 256 bp, Oryza sativa
  unsure (1)..(256): unsure at all n locations
cacttccttacatcatttgcacagcatttntattagatctatctatcattcttataatattaaaatagagtaacttatcaatatgtccatattaaagggggggtttattggttgtttcaagatgaatattaataagctctgttatttcatgtattttcttttacccctagcttgattgtaacaagaagatatatatcgaagattacttagtaatttgcgtagtaaagcgcggggaatcatctaggtggatactact

SEQ ID NO: 19189 - DNA, 433 bp, Oryza sativa
caaatatgctcttctcctaggagaaataattgccgctatctcgcctctcttgatgggattacattcagttgtatatatgatgatcataaatgtaaaacaaagatcttgcctttttcctatactgcactatgcactaaatggatggtaaagtgtgtattcttgactcctacagtattatgctgaaatataattaaattttcagaaatataatggcaagataggtacttttggctaggatgcccattatggtacttttgtatatcagacaatatttaatgaccgcatctctatctggtgccaaacacttcaccatatgagctttctacattattagcctgagactaacagtggatctgcgaacaacgactattaaattgcctaactgggtgtgaggtctggaatcctgatttgtctatgatccttggaagctcta

SEQ ID NO: 19190 - DNA, 392 bp, Oryza sativa
  unsure (1)..(392): unsure at all n locations
ctagtactatgctcacggtggaactcttcaacccagtgatggctccctaatcttcagcgaacagatacgcgaggctgcgcgtcgactaacggacgcagtggaagcctcttctcanggcacgttccgacccgacagagagaaggacgagctgtcacttgccctgcagactncagagcatccaggacgaacacgagggaaaggggtgattccttgaaagaatggattcaaggaagacatccacacgtacaggagtcggatgaagagcaagagagataccgaggcgaagattgcagatcttgagtacagggtatcgagctacgagctcagcatgcaagaggaggtggcaaggaanggtgatgaacgcatggccgcacatcggtcccatgatcccc

SEQ ID NO: 19191 - DNA, 421 bp, Oryza sativa
  unsure (1)..(421): unsure at all n locations
acaaccagatcgagacaagtctcatcttggtcggtgaggggggtgagaagtgaccaaatntatttatcaagatttgcacaactcccatagttggcctcgaagctggtttcccaaaccataccaattntccaaactttcagagttatgtcgtctccaaacaaccaatcactttcaaggactccctgtcccgctgtctccctgacagccacttgctttccaaaaatcatgtttcccagaccttaacaccttttcacaaagcagggtaaaacgaaaactacgctaatgaatcacctcacatctgcccatgaccgtgggcacggctgttcgaacagtttgataacctctgcagagggggtacactttacccacacggcattactaacccggatcacccatcccgtggggatcagccacgtctgga

SEQ ID NO: 19192 - DNA, 283 bp, Oryza sativa
  unsure (1)..(283): unsure at all n locations
acgacacattcagtgggtggtatgcgtcgacaggaacacttgcaggcacgtttctgtccatggaatcgccgagaccgagctgcacgcgcaactcaaaagttataanaagaactgcaacggtgaatggttttcttctccaagtgcagagctgaaatacgcacctgtccgtacttgttccatcctcagcagaagacctcgccttcatctgcataaatgtcaccacattntgtcagtagatgttagaccaggaacagcactttctacnggcatgnttaaacaaatt

SEQ ID NO: 19193 - DNA, 465 bp, Oryza sativa
cgacgcggtttcttcttttggctcgccggcgccgcgcctgccaccactgctgttgtgcatgcactgcccgggttgaattaccgcgccacgcgatgctgccgtcctagccggtagattatgtcgtaatttgtaggctgctccttttgttagttgcactaaccatggctgctttggcactttaatctcgatcgccgtctgcaaattaatcgctcatgggccatgactgtttcagctttgaactgctcggccaatgatgcgcgttatcgcggtcaagtgttcaaaaacttcgctgtggtcttgtggatagcaggatcgatgcatcctgtgcgctctgcagaatggcagagcaatctgaaggattgccttgtttgctgctccctctgggctttggttaccgtatacaacgcacacctgtggacaattgcacggtgtcaagcacgagtgtgctctgagcaagcgtgcact

SEQ ID NO: 19194 - DNA, 388 bp, Oryza sativa
  unsure (1)..(388): unsure at all n locations
cttgatgtaaagactcacttgcttggatcaagttaccacgggttgattggtagctgagtccgcgaatcaaataattatgtcgtcttaagcaatcttgatcagtcctaattacaggcacaaagntttcctccgtggacttcttaacaataagatcaagaaacaaattgtgcacaacacgacaggagacaacctcaccatgcttaaactgagctggctttatcaggcttctatatatgaggtcactgaagtagctctcagcaatatcttctaagtctcggttatctttntgggtaataaaatccttctgctatccattgtctcatcgagtctttcttcatgatgtcatagntntcaggatacatatgaagatatagaaagcacgtcttca

SEQ ID NO: 19195 - DNA, 459 bp, Oryza sativa
acattgcggaccactgtgtctagtaccatggggtaccgttcttggtggaccactcggtcatgatgatccgagcggtcaaacttgattgcaatctctgaccatcgaagatattggggcgtgtcgggctgaacagcattgatctcccgttcggtcaacttttgcttccttttagactcataagccagggggccgccgaagatatggttgagttccttgcggtggtcttgaaatcctgccggggtgtcgccgtcgtccttcttcctcgacgtgctttgttcttcgtcggagtttttccgtgtagtcttggtgtattgctccgcaaactgcttgtagacgaaacaatctttggccacgtggttggagttaggatggtgcgggcattgtgagttcatgatcttgtcgaacgtgttgacgcgcgaacgctgtcgagatgagtgagtggcggttgaacaagttctc

SEQ ID NO: 19196 - DNA, 305 bp, Oryza sativa
  unsure (1)..(305): unsure at all n locations
tttttgttccgaaaatcatgagctgtgacaaccgacctcgtgaagcttatcaacanctaactggttgattaaattaaggctttgtcgacagcattgctccaacttaacttccttcgtttttcacgtacacgtttcctaaactattgaatagatgtggtgttcaaaataaattctacagacaaaatattctacgaaatcatattatctctcttttaaaagagctaatacttaattaaatcatggtactgaatcattctcttttacgtgcgtgaaggaataagttctaacatcatctaccgaataca

SEQ ID NO: 19197 - DNA, 448 bp, Oryza sativa
  unsure (1)..(448): unsure at all n locations
tgacactaaaagaattggatggacagggaggagaatcttccaaaccatttcacanagaaatgccaaaaggcgagaggagacatcttgcaaatagggttttcagaaaacttgtccttatggtttgaccgtttggctcaacctgcagtcgagttggctctgataccactgtgtcacgcccagaaatttagcccaaatttccagactattttgtgtatcaaatccctgtccaggaccagccagtgtacacaaaacgacaagttataaacagctccaaacgttaataaagcgtaaaatacttacagaagatgcacttagtcctcacaccgaaacataagcagcagcagcggaaaaaggcgatcctatcggggctttatctccactccacaggcacaactcaactgtggtctgagccctgggcttctaacttcgtcttcaactcagaagcact

SEQ ID NO: 19198 - DNA, 416 bp, Oryza sativa
  unsure (1)..(416): unsure at all n locations
ctgccgcatgcaagcttcgncgnctccttgtctccttcttcttcttgtttgatctcgcaagntntctaggttggcgagctgcatagctttcgccctctcccaatacttaanaatgcccatgatgaacatgaaagaagagatccagaccatcgtaccggacccgcttctgatgactatattcttgtacatggcaaatgctgctcctgatacctgcaagatcatttctaccttctggcgcgtcgacagaacattgtcctccaaggagtaggcggtgatgttgtccggaccagcggcatggagcagcacggaaagcccccagagcgtcaccagctccagctcctgcggcgtgctgccgagggcgagcttgctgagtgcgtacgtcgcggcccaccggcccagctggttcgcccgccaca

SEQ ID NO: 19199 - DNA, 430 bp, Oryza sativa
tgatagcaatatgcagtcctatcacatcttttttatcctatcaaggatgatgcagtcactataacaatgccagctatatctctccataatcaaaatgagcagccatgtttgtggttttcagtccgctacttatcatggtgtaatcgaaagtttgcagcaatcatgtaatacataaatatattcatgtctataaacagtgggtttgctatgcttatggatgattcatgttgaggatacaatgtaccgatgttaatcaccgtcctttttttgtttaatgcagtgcctcgtattcatgttatgagggagaaatgtgtaatacagacaagttccatgaggattcttttggatgatgccggtatgtgactatgtgtataattgcttactgataaaggagacctagggtctcatgtcagatgaactatgttctaac

SEQ ID NO: 19200 - DNA, 439 bp, Oryza sativa
  unsure (1)..(439): unsure at all n locations
gaaccttttgcaaggtgtggaaaccgaatattcgctggcatttattcttgcggtgctgatttcctttagcgtttgcctgctctatatggtgcgcatttatcatcgcagtgaatggcttaatcgccgctggcatttgcaggcgctgacagatccgttaacgctcctacccaaccttcgtgcgttggaacaagcgccggagcaagaggcgggcaacaagttttgctgcctgcgcattgataatctcgagtttatgagtcgtcattacggcttaatgatgcgcgttcactgtatccgctcaatttgccgtacgctgcttgccgtgatgcangataacgaaaagttgtatcaattcgccggtagtgaactgctgtaatgctgagcggcccgatacggaacggcgactccacatatggttacatcctgatagtcgcaaatcact

SEQ ID NO: 19201 - DNA, 416 bp, Oryza sativa
taaaagcactaataaaatggggcgtagattgccatttgaaatgcaccatatctgctatatcactatttatgtagcactgcaagcatattattgctatcaaaacctatttcactgattatatagaaaaggtacataggcataatttcttctatttagatgctcaattataaaagaacacagtagcgccgcgaagagataatatatctatttctagtgagtctagaggtgttactggtcctgaacagataactgagtagttcttaataattctcacaatgtagaaaccaagaccaaaatgtagaacacatgcattaatagctagttacctgcatgacagctagtgtatatcgaattggtttccaattagagtgtcgccaatcataaaaatcaagccaaccaaattatcatgtgtcaat

SEQ ID NO: 19202 - DNA, 407 bp, Oryza sativa
  unsure (1)..(407): unsure at all n locations
gctctggcattggtagatctgcgaataaaatattgttgtgtctactcgacttgccaagnttcccatccctccagtgcattanaatggagggtttctgccgtgtcaaccatttgttgcaactccctctattctctcagctngagatgctagaacttccgtgtcacaaanaactcgtatcgctgagaaaactccagcatatttccccatttcacagtttgagaatgagagaagaactagtacaaaaggtatcaggttgtgaagtgttgccattccaaaatccctctgttcaagatagtcacgtatttgttctttctcaagtagaaatcaaacatgaatgctatcaaatgttgcatactctanagcattgcatgctntgtgggtttctgtgcatctcagaaaacttggac

SEQ ID NO: 19203 - DNA, 444 bp, Oryza sativa
  unsure (1)..(444): unsure at all n locations
cagcatgtggtttgttcttggcaaagtcggtaaattctttttacctccattngtgtatgaattttatgctcttttcttttgtaaaatacgacgatgccacatggtgatctagctaggtagcaagattttgtgtcagccgttattagttttcagaactcacatgagtggaaacaaacaaaaattcactggctgctaagttcagaagccctcacatgccatctgttaacgaatatcanaactgcaaagatgtttgtggatgctttatttgaccgtcacggctctcatcaatcatcatcgtcataggaccaaaaagcatttaatcaaagcagcagcactgtctctagttcagtgcacctgtgatgttcctgcactatcaagctttgagcttaatgatgatcattggcacgttttaccggctgcttttggcgatgcgcctctcttttt

SEQ ID NO: 19204 - DNA, 370 bp, Oryza sativa
tgtaaaggacattgaaatattgaatatgcatgcatagatgatgtggcatgacacatggcatgtgtagaggggctaaggactatattgaatcacacaataaactgatagtactcgtttggacaatacgaaatgttagagactagattgatccttatacaaaagttcaagcaggggcggagctagtatataatataggggtgtccatggaacctcggctaaataaacaataactatacctcatctattgtcaccatatatgcaccctgctcaatacatacttatgcatacgcataagcttaaacatgatctatagtgagtatatgaactaagtggaccaccctccatttcactctagctctgaccctgagat

SEQ ID NO: 19205 - DNA, 418 bp, Oryza sativa
  unsure (1)..(418): unsure at all n locations
ttcaagcaacgagtnggaccagcctttttcctggtcctggcattattcatagctcgagccatttggctagcaaccaaagccaaatcctccctcttgatttgttcgagatgaacatcggatgtggcattaaaagcagcaagataagaacgcatagatgaagaagcatcaataacccaagaggaagaagaggaaaccaaagcactccatntagaatcaactttgcgagaaagaatattcattcccatgtgtttcaatttagtataaagtgaatccaaagtccaagtaaacatgttaacagactcctgaatagatgaactttcatctcccaatagacatgtcaagccattccaaaatgacgagaatatagattgggatagttactcatagaaaatcacaatctaaatcctcaaattattaa

SEQ ID NO: 19206 - DNA, 484 bp, Oryza sativa
ggacattacggaccactgtgtctagtaccagagggttccttcccgggtggaccactcggtcaggatgatccgagcggtcaaacttgattgcaatctctgaccatcgaatatactggggcgtgtcgggctgaacagcgttgatctcccgttcagtcaacttctgcttccgtttagactcataagccatggggccgccgaagatatggttgagctccttgcggtgatcttgaaaacctgccggggtgtcgccgtcgtccttcttcctcgacgtgctttgttcttcgtcagagttcttccgtgcagtcttggtgtattgatccgcgaattgcttgtagacgaaacaatctttggccacgtggttggagttaagatggtgcgggcattgtgagttcatgatcttgtcgaacgtgttgacgcgcgaacgctgtcgagaagagtgactggcggtggcaacaagttccgcatgcttacgcttgcggtcctt

SEQ ID NO: 19207 - DNA, 219 bp, Oryza sativa
cataatggtaccgcgctaacggtggctaactgtaccgcgtgggccaatgcttgaaggttatccgatgatcttcgtacatgtgatgacgtgacttatactctggttattcaatcacttcagcatgtgtcaatggcatataaggcatactatcatgaagtaatcttcatggtggatgcgtgatgatgccctcaagcgcatatatgatgctcttatgaatat

SEQ ID NO: 19208 - DNA, 425 bp, Oryza sativa
  unsure (1)..(425): unsure at all n locations
ctgcagctggttacttattactacctttgactctgtttttctaactttattcagacaaatccaaaaacttgtgctattaattggataaaggtcttaactccctcctttcacttgtctttagatgccgcgttacaagcctgagtacctgtttggtggtgagggttttgccaggaagtgcgtacgatgcctttgtcattggaattgggactgcccctttttatgcccagattcctcatgatcgtcatgaagagaagtgccgagtcaaagtcaccctgaacagtaatagtgaagatatcccctcagtgatgtttgaagctggaggaagaaactacatccatgcatgtcangaggtggcanggatcgccataggagagctccgtgatcggctatgctatgaacgcatatagtctaattattaatatata

SEQ ID NO: 19209 - DNA, 459 bp, Oryza sativa
gtcgtatcgaccatttcgatcgtcatattctccttttatgtaaacctagtatgctcgcaatgcataatttccaaataaaatatctacttccactatgtgctatgctactaacatgtatgcacgataagcacgcataaatggaggagaatcgactgaaaaaaaaaacgaacaatcaatcggaagccatcgagaggtgatcaaccatcaaagttgggagagaatgaacatgaagaatgtgaatatattgtgcactaatggacccactttggtttgagctacaacatataaaatgagcaatcattctgagccataacatggtgtaccataaagtggggcccacatgtcaacatcctgaataatgctgtgggccaagggagcctaccatgggttcggccgaacccactactgtgccaatctatcctatttttcaccggcaattatctacgggtatcttatgac

SEQ ID NO: 19210 - DNA, 370 bp, Oryza sativa
gagcgatcatcatcagtacatcacaacggcgatcgatccatccatctcacatcttagtgcattgcgggaaaccgatgatgcccaggacgtgaaacccaatatgaaggcggctagcacggtggaggagatctacggcatgttcggcatctacccgggctccatcccggaggaatggttcaaccccggcggtgtatgcaacgccgtcgccgccgacggctgttcgtcagatccgtctccggtgccgtcttccgtcgtcaccaccgacgacgacttcaccctcgtgatgcagcacatcatgtcgtctctgtcgatgcttcaacctgaagagcataatatctggtacgcgtatatgcttggaacagcctgatga

SEQ ID NO: 19211 - DNA, 404 bp, Oryza sativa
agacgtcattctctttctggggaagctctgtgtgagcttgttctgtgcgctctttgccttccttatgttagacactcacaagtacaagtctgcacataacaagatatcatcttctcttgatccttgagtgggaagcatttaatcgttctgtattgcggctcgcaaactgacaaatgccatcttcattgctaagaacctaaggtgtccggatatattctgatgctgctacactgcaggtatcatgggcacttggttttattgtcgccaagcttttcttccaagtcgtcgagatgtcgatcgacaccataatcctctccttctgtcaagattcagaagagcactcagggaacgcgcagtacgctctccctcttctagtggagacactggatgaacagagtgaactc

SEQ ID NO: 19212 - DNA, 481 bp, Oryza sativa
  unsure (1)..(481): unsure at all n locations
gcttgatattagctaatgacatggttgngtgctccattatngangaaactgatgctcaagctctgaaagcggtcttgttggatgaaacacatgatagaagtgtaaacgctgttatcattagagaggccaaatttttgcttgcaatgaattttaatgtccatcaagtcatgtattgtcctagagaatgtaatcgtgctgcgcatgagcttgcttataattggtgcttctttgggtccacgaagccaatttgtttggcttgaaggattcccggatgatgtttgcaatttggtagctagtgattcagctggactacctgcttaatggaattgttcttcttcaaaaaaaataaaaatatatttatatagaactggtcaagtgaagaaatgctactacaggccaaatatactggtgaactattattggacctgagcattattccgactaaacatattgaagctgaaaacatgggcgaatcacctgt

SEQ ID NO: 19213 - DNA, 373 bp, Oryza sativa
  unsure (1)..(373): unsure at all n locations
aatcggctcaaggagaacggagttgcagaataatttaacagccgatgagtattataaccttatggccgatgagagagaagatctggttcaatcaccggtgcgagcccttgcanagggtaccaacgataaagagcgagttgctcggcattacaataagaaagtggtgcccaaagaattttccgaaggtgaacttgtatggaagttgatnttgccgattgggaactcggatagcaaatatggcaagtggtcgccgaaatgggaaggaccgttccaaatctataaagttgtgtctaagggagcttacatgtngcaaggactcgatggaggaagttatggaagagcactaaatggcaagtacttgaagaaaattacc

SEQ ID NO: 19214 - DNA, 387 bp, Oryza sativa
  unsure (1)..(387): unsure at all n locations
cttacgcttcttggccttcttcttgggagccagagccgatggatcgactgccggtgctttggacttactcttcctgccgacatcagctggatctctcatctgtccttgaagcagacttgaagtcttcggggcatgggagctgatgacaagaggagcttattcacctccgtttggtagaagggctggagcatattctatgtccctaccgctattactctngtgaggaggagaagattcttgtgtctgctacgtaaagagagaaattaaacaaggtttaagtcggctatcagttattcaagcacaatttacaaagtaaagatgtacctgaggaacaacatcaggaaacagatccgtcatatacatagatgctgactgacggaatatatg

SEQ ID NO: 19215 - DNA, 346 bp, Oryza sativa
  unsure (1)..(346): unsure at all n locations
tggcttcatcagagaggtacttcatccatatttgttatccnacccattcatggtgtggaaggccgacgggaaatggagaatgtgtgtcgacttcactgacctcaacaaggcgtgtaccaaggatcacttccctcttcctcgaatagaccaactggtggactcaacatacggttgtgagttgttgagcttcctcgacgcttactccggctaccaccaaatcagcatggcgaaagatgacgaagagaatacagctttcatcacgccgttcggggtattatgctatgataagataccattcggactaataaccgcatgaaacactttccagcgcacggtgtatggcgca

SEQ ID NO: 19216 - DNA, 492 bp, Oryza sativa
tggacatctacggcttactgatggacatgatgatgctttcacgggcgtacggcttcagcgactccaccatggtgtgctgcggcactggcctcctggaggtttccgtcctctgcaacgccctcacctactccgtctgcacccccgtctccgactatctcttctgggacagctaccaccccaccgagaaagcttacagcatcctcaccgacttcgtctacgataattacgtcaagaaactcctcctcgactaactatatatctctgtccatcattattatattatatatatctagcttttgctttaatttgctccctctcttttgtttcaactgttattggattatataatataatagtattgcttgctcttcttcaactaagccaagttgtcccttaattatttcttgccttataaacttactccacttactatacgcaatgatgcatatgtatgtgctagttattactaatatcaattaattcctctctctc

SEQ ID NO: 19217 - DNA, 495 bp, Oryza sativa
  unsure (1)..(495): unsure at all n locations
atccttaagtcacctgcggcatgcaagctgactatatgttaggctctgtgatngagtttgttttgattgattnttgacanatcactatctatttcatttatgcaggcattcttcagagcaacatattggctccggttttgggcacaaccgtanaagtgtgatgaagatggagaagctttgaaagttatatgtcgtaagcttgagacgacggttatgcaactttttgccaactatggatggagattcacaaatagacttaaataattgtgtgctccttatattggtctcggtcatttttttatgtttaggtgtgtgtttaattctatttgactacactctctgttaagtgctagattgtaataattggctgtagctctgntgagcaaaggccgagatgtatctattccattattaacnaaaagctagttagtgtatttattgttgatggcggttttacccgattgtctaaataactgaatataatttgtcttttta

SEQ ID NO: 19218 - DNA, 472 bp, Oryza sativa
acgtcacataagttaatataatgaaatacacatgtgttttgtttaaccagatcattcttgcataaacatatttgtttacaaggacatatatcatactaaagagagtatgtaagcacagaggagcacagaccgctggaagaagatccagagtcactgctggaactacttgggctaccacacttgttaggattgttgtgtgcaatcttttctatcaatataggggatgcattcccgcaaatatctacatcctcctcaactggatcaccacctgcagagaaaaagaagttgtaagagtactgtgatgttgcataaaactaagcattagcaaaggaccagggaaaaaaacctttgcagggatttgtatatgagtggctaaggccagatacattagcagcctcattctcagaaggctcagattgtgcctgctggctctgctctctctcttgcatatacttgtcaacaatgttcttca

SEQ ID NO: 19219 - DNA, 449 bp, Oryza sativa
  unsure (1)..(449): unsure at all n locations
agctntacaagatgcaagtntgcgtatgaatataacattgtggtatcagtcanggctggatgttgctcagaagtntgtccctaccaaattgcaatagcaaaaattacttattcatgagcgatatctgcaatgcgcagcatcatgagcctgtgtttctgagcagatgcatattatttgctccaggataattaatttaattttgtaaatgagtatctattcgcaacaagcagtgcaaatttaaatgattctgctattacttgtgtgaagnttatacagtagtcgtacctgaagtttctgtgatagtggtgtgggtgcctaacccgacgaggcgcaaatggcttctctatgcaacgattagtaattctgagcgatatgattctttntccccaatctccatttttggagtcgaatcaaggtgtgaccttgagagagacattgccgtgaaagca

SEQ ID NO: 19220 - DNA, 492 bp, Oryza sativa
  unsure (1)..(492): unsure at all n locations
tatatgaccttntcagaccctactggttcagtgtcaattttttgtatatataatgagaaatagtccgtgcatatggaaatataatggtgccctaatgctctatttaaacaacataacccccttcgcctatgcacaatgaataaacagagtccattggataatgtgtgcgagaaactagtatttattcagccagcatgaatacaatggccttttatattccatgttgtcttgcaccacctttacccacaaccttctgctatggaaaaaagataaatccaagatatctatgactcgatttgtccaaccagcaaagctaactgatctgcaacaaaaacattatatagccaccgcatactcatgtcttcaaaacttccaacaccaacactagatgaatgagtaaatgaagctcattcggtctgaatgagtaaactgggcattctgctcaatttcaatcgcatccagcattgatataaaaaaccccacaacgcatgc

SEQ ID NO: 19221 - DNA, 403 bp, Oryza sativa
actcaagctgccacatagagaagaatgcgggacggagatatttctttgcttaagcagctactacggtcgagaccagtatctaagtcggtgacaacgaaaatcaatcaatgaattattaaataatgaattcggcttctctgggggtacatcaatcggcctatggcggcatctccccgcttattccattcaaacggaaactgcccaagtaacccatcctttccatctcctataaataccgtaccatcttctgcacagctcaccatccaaatcaacagtaatgttctacagttagtgagatgtagagagagatatggctagctaatccatgagagatgtctagatagagagagggagagatgatcagttcttcagaagaagctactactatcctatctagccgcat

SEQ ID NO: 19222 - DNA, 465 bp, Oryza sativa
  unsure (1)..(465): unsure at all n locations
tatgtcgagtctgtataacatccctaatccttatttctattattgttcactcctanactatatattaccgtgcattttatatcttatagcatgactgatctctatgttcacttacgtggcatcctagtaacaaaaaaaataattataggacccatatgtatgagagaagaagaaaatgtagggtgcacatctcttattttttctcttttctcttatcttttctactctctcttatcttcttcagcgagcctgggatgccgtcggtggcaaaggggggagaggtggttcaacggttctgggagagagggggaggtgtccggtgagcccgtccgatctctgtcaccgtctagtagctcatgcgataggaggagggatacgggttgatgtatagattgacgaatatctcggcttggtatacacttggacaaggtggcttgtgaagatgacatgtgggcacgcatattt

SEQ ID NO: 19223 - DNA, 446 bp, Oryza sativa
  unsure (1)..(446): unsure at all n locations
gcttagactngatgtgtcatcacgatcttcttcctattcctattctcttgccgcgcaaggacaatagacgcatttggatctttctcaaangttagcatagcttgacaatgtgaagatgtagatagcttctttagcttgtgcggctaatttccacctacacaagaaaatacgtgttgatagggagagccaaaacacatatgtgtctagattctgtgttaggattagtctctttttggacatagtaatatgctctaaaggcaagatatgcttctttttcatttgctacatgatagatgtaactgttaattctttgatcgaccgaaccaaccgcatggtcttatcatgagcttggtttaatgggctatttaagctttgtcgagatatcaagccatgttaagacaccctaatgcagccatgatgttttcggctatttgaagaattggtat

SEQ ID NO: 19224 - DNA, 406 bp, Oryza sativa
  unsure (1)..(406): unsure at all n locations
tgcatatgatggtgggtggatattgccattaattggtaaccactgcatatatgtcagattggttgatacacatatatatacaattcgtcgtatatggaccctgatatgagtcttctaactaccgaatgtgagtggtatcttgtgcatttcatcatattttatctcatcaaacttngattatgccactacctggttctgagtacagtcagtgagtggtgagtaatatctcctagtatgtgagcgctcattcagcatacacatatatagtttaggaaaacctgatatattattgtcgtaataggtagacatttctacaatggcattattcatttcgtttcataacacttatgtttcatttttataccaaaatgataatataattggttggtgatctattcaatggtat

SEQ ID NO: 19225 - DNA, 419 bp, Oryza sativa
  unsure (1)..(419): unsure at all n locations
tgacgttgtnttcgtatatttggatgggatgatcgaagtctatttcttatctactagctagattcaatgcttctgcattgcaccgtgttgaaaatgctagtagtactaatttggntctcaaattaaactgtcttcggcactggttattttaaaactctaaccactctattttaaacttataagtgcattatcatattcaccataaatatcatactcttgaaaaacaccttatggtttgtgcccccacgtgagtcctatgagtggcctctgcactcttatgtttctgtttctgggatgtcttaatcaatcatatgctttaaacagataccaagagaatgcattacatatattacttatatgcttaatctactactacctcattcctctaatagagggatgtcgtccatataactatatcg

SEQ ID NO: 19226 - DNA, 412 bp, Oryza sativa
ccgaagccgccaagaactatgtacgtcacagcggttgtgttgtgcgggataacgtgcctgtcagtacggtgtactggcgaagaacaatggcacgcggagatcatgagagctttgtccaagattcggaaaatgagatgctgtggaccacaatgctcgagacattcacccttcctgcgggtacagatgacaaagtgaaaaggtggactctgaagaaaatggcagaacagttgtagagcttctagggagatctgttccacatgtttatactgaatgtgcagacaccgaactttgacacattcccaatgctaatggatcactgggacgagttcgttgcatataagacaggtgaacatgggaatgcgatgatggatagatacaaaaaaatgccgcctagaagacgtaccatcaccac

SEQ ID NO: 19227 - DNA, 464 bp, Oryza sativa
  unsure (1)..(464): unsure at all n locations
agagacgataatgtaacgcttggaggatacaggatactgatacggagntactacaggaataagcacgcacacctggttgaccaagagctgcttatatatgtcaattagnttataaacgactaaaaaaataatttgcatggtaaattttacatgtatacttatgcttagcaacttaaaactaaatgaagaaagaaacaacgttaaatatactctaaaattagctntaaaattatgttntaannaattaaatttagcaataactcatttttgttgtatgccaaanatgataaggctcaaggcctacaggtgtcttttggaactcgcattctcgttgtttgctcaatggctattaggggttntttctatttgtagccattttctaattaatattggcttctaaaccatgaataatacagataaaaagttacccataatattttttttcgttattcacatcaaataag

SEQ ID NO: 19228 - DNA, 482 bp, Oryza sativa
  unsure (1)..(482): unsure at all n locations
taagctgcgcgtagtgtcatattccgtcagttgctcggctggtgtatgttttgaaataaagatgatatcccatatcacatatatgtatattgacagataattcgtatcagttatttactgagttaagtcagcaatattatntgtcttcgatggtgctgaattatttgtgtgcatctatatatggattttctgtatgtcaatcgacaggaaattaggggacaaatattgtgaattcctaaccttctatttgctctgccatgcacgcacatatgctaccttatacactccatctctgtcaccttcaaacgcgtgcactacagcactagctaccatacaaatgggcttctgaagagatggagtacatttttcgatgaacctgtcagttctaagatcacaggtacatttttcgctgctaactaaagataaaaggtgcantgatagtataattcactggtatgtttaacacagcagcgatactcata

SEQ ID NO: 19229 - DNA, 337 bp, Oryza sativa
  unsure (1)..(337): unsure at all n locations
ttgagtgctccatgagaaggcacgaaccaaaatagaatttttcaaggaactcgcgcaacataaaactttaataatataacgtatcttacgtgtaatcagaagagaatatgagagtacaacattctatgatatgttgccgtgtctaataaggaaactcatatatcattgtgctaatacactcccataaacgacaaagaanataacccatcgcgtaggaaaataatactcctacacaaacagctngatatgtagaactgagcactnntgtgaagtttagcttaagacaaacatatggtggtaaacaatatagtttaattnggacgatggctcatcatgt

SEQ ID NO: 19230 - DNA, 428 bp, Oryza sativa
  unsure (1)..(428): unsure at all n locations
gaaatcactaagtgatttatttctttctaagtttgggccgaaaagagactagcgtctcgattcgactttaagagatgtttcaacagctcattgggtaatgtaccgacctcccgggtcagatcattacttctcggctcccagagccattccacttgattaatcggctcccagagcttctntcattttctcagactcccagagtccagctgcccagcagcataacaatccgcttccactctggaagcctagtctatgatgcccgcagacatcccgaatcacacagattcgtttctgaccactcatgtcatccatctgccacatatgctgattctggttacgattcccacaccacaacaacttttcacatagcacaggctatcaaatctacgcaacgggaaccacctcacatctgcccatgaccgtgggca

SEQ ID NO: 19231 - DNA, 443 bp, Oryza sativa
atacaatgcatgaatgcccctcttgattgttgttagaatatatatggaacttgaaaaagtaaagacagaaatggtgacattctaaaacctgttagatgttgtcatggagcactgaaaattaatcatggtaagaagaatcagctaccaaatctgtctcatccaagctggccaatgtttacactctagttatgcatataaggattcataaagaagattttgtttatgaactatggtaggacaacttggtgttgttatactaagacactatggggttcaggtaatttggagccgggagatacaggatagaataacagatagcactctgccactattgcaatgcaatcgccgttgccagaatacaacggccatctcgagcttggtcttggtcaatccatggtatacctatcttctaaacttttcagataggtggaaaagaaagataa

SEQ ID NO: 19232 - DNA, 436 bp, Oryza sativa
tactaagctttaactagctcttacagatctaccaaggcaagcggaatgttttcatacaccgactcaatcaatcaccccaatagatgttggatgtatcgatgccttggcaaacacttgctgtacggctgcaatcaaatcttgggagctctatgtaggcttaaatatgttgcataggaatatcaaatgctccaatcagataatgcaaagttgaataattgttcatagtcaagtaccgtgctggtcctacgctataacgtactatatactctagcctatacacaaacgataccacatgatatcactatgaacaactcatgcacaactctgatatatgaagttcagctcaaacataacagtatttttgtgaaagcaaactcaaagatacaaccggagtttctctcttctttcgttctttttctatcatgttctttctttc

SEQ ID NO: 19233 - DNA, 385 bp, Oryza sativa
  unsure (1)..(385): unsure at all n locations
atgaganaatgaaaatacagaccacaatgttctttattntatattcggctntacttttgcgcagatatgtttgagcagcatgtagaaacatagaactacattgtattttggactactctgcttatgaaagttgcatactttttcactttggacccgtcttttctttntcttcaccttgaactctttctgaacttctcattgaattcaaacacacttacgttgccaacactggttgtggataatgctgcanaacanaagagaagaggatgatttcatcatggtatgattaagatgcagattccatatcggtttttgttagcatgtttntaaaccgttaaacggtgtgtttggacaaaactttctatataaaagttgctctaaaata

SEQ ID NO: 19234 - DNA, 417 bp, Oryza sativa
atactgaactggtgattgatccgtcatatgaaagtatatcatgtctggagcaattgacaaaaaaaacgttaagaagcctggaaacgatagggtgcagacaaatccaaagacagatgaactggagcaaccaaatcagcctaaagaaatcacctatctgataatagaactaagaaaacaaatgcaactagtaacatgatctagcaagcagaatcttgggagtggaaagaacagcttcatggtaggaggcatagaaattatagatgcatgccatatttccacatttagtcaaatgctacactgactcatcatcttgcctatcaattatctctgcatagccgcaaatattatctactccactttcatggaatatcaactattgtcctggagactgatgctaataggcattagacactgaac

SEQ ID NO: 19235 - DNA, 351 bp, Oryza sativa
  unsure (1)..(351): unsure at all n locations
aagagcccttngaaaataaagaagttgagaatgcaaatgaattccaaaaatattacaaatgatggaataacatgtattggtcttttcttttgctcgagggatgactagcttgttcagtctaggggcggatccatggcccgacgatccangtagttgttggatagtctcacattggttgtggaagggtaatggacctaatatataagtgagggagtctcttacctcattagctagcttttgnggtgagaaaggctatttacgatattaaatttggtatcagagcctgactaggtcaacatttctgactcgagagacaaagtgtgtgaagctctaatggaccgtatgtgcctg

SEQ ID NO: 19236 - DNA, 490 bp, Oryza sativa
  unsure (1)..(490): unsure at all n locations
tgcgctgttctctgatatagttatatntggccggtctgtcttgtatctatttattagntggaatctgagtgttatttgctttagatgtatcttgctatgtatattcatacttaagatgaaagtgtgaatctagtgcacttcctgtgaactagattcacatgagtatgagttaggaatatttgagatgttgtagctctttagccatttttgtcaagtctcctgaatgtgtaacacatatggtcgccgccttcgagtggtttgacgggcacatctcatgctgaagttgactggcaggctaaaggcccagcaatgtctccaatattcctctctcgaggcgtcggatggttcattatgattgctcgatgactggaattattcactttatctcccaattataatagaaggtccggagagcctacgacagcatggtatcatagcatataccgactataggagccnctgtatgttggtcggtttaaaatgattctta

SEQ ID NO: 19237 - DNA, 182 bp, Oryza sativa
aaagatacaatcctgtagtgagctgttgtatatgaataataatatattcaatattgatgagactaatacttatatttgatattacctactactgagttgatttgatcgtgtactagcattccgtatccattatcccgtgaactagctgatacgctgcacactgaccacatgatggcctatgt

SEQ ID NO: 19238 - DNA, 426 bp, Oryza sativa
  unsure (1)..(426): unsure at all n locations
gcttctaatatttatgcacctctcctgaccagctgtattccatatttaaactntactgtngcnggaatcctcaacgccaatgtttgtgacaaaaatgatgcaccaacagtcacctaaattcatttaataaaacaaacagaatagaataagccatattatagggagaatcaaatggtgtgtcctctgtacaggaaacctgtaaaaaataatcaagtgtctgtttcacctttgaagtggggtcaaactgaccacggacaaagcgaagaacaatgcaacttttcccaacacctgaatctccaagcaataccaactacagaatanggtaaaataaaaacgaagggcatgaaccttttcatccaattcaacttaatgtcnacaatggagatgagaaatattataagaattatgaagacactagtgagtaag

SEQ ID NO: 19239 - DNA, 484 bp, Oryza sativa
  unsure (1)..(484): unsure at all n locations
tccattgttatgtgcaacttgcatttcctttaatgatttcctccttccattttntaatatacgacgccattaacattttagacatgtgtgtaactattgtttattttgttgtggcttgatttaccactaaagattctctatgcatgactcatattttttttatgtttgcacaaaaattttgaataagacaaatgatattaaaaaattcaacggcatcgtgcattataaaatgaagcactatgtgactcatacttacaacacactcaaatagacggataccaatgttacactcctaacacatgcaagtatgctttcttaatacaccatcaaagatggtacagggttcacagttccagttgaatatggttcacagttccagttgaatgcggtttggatttcgcataatccagacttcctataccgggttgaaaatataaaccactcggtggtttttggtgaaggtaaaaatattaactatttaaac

SEQ ID NO: 19240 - DNA, 254 bp, Oryza sativa
  unsure (1)..(254): unsure at all n locations
ggcgcgacactcctgaagatgctgcgcctgtcctcgtagcggagacgcgacactcaccacaccggcgctcgatagaaccttattaatcacgaacgcgccctctacctggcacgccagcttgtgaggggtgaccctctagctgggccgcaccgncgtgcacgccgaccgcgccgtacactgtctttcccgaaccgacgtgcgccatgccatgctgcgccatctcaggcgcctacatggacgggcgggacttgtct

SEQ ID NO: 19241 - DNA, 472 bp, Oryza sativa
  unsure (1)..(472): unsure at all n locations
ctcacttacggtggcctcgtacatgatcagcacctgcgagattttctctttcccgatcgtcgactcctgataagcataaaatcttcagtacgaaactgaacttgatgagaatttaaacaacatataagcacgtattgtntaatagcctggcaatcgtaatacaatcctttggctaatcgaaccacgatgctcgtcattccggctcccatgtcacccagaagtacctaccaaaatattgtagatgcccagataaactgacaatgatcaaataaccaaacaatcataaaattcagggtaagacatacacaccatcttggcctggataacatcgctccccatcgatcgatcgctcctagttcgcttttacacgctgccagttggatcangataattcataattgatatgcgagcacaactgaagcatcaatgcttttcttgtttcagtcgagcaaagactggacctgacgcgcat

SEQ ID NO: 19242 - DNA, 273 bp, Oryza sativa
agtctcggcgatgagacgatacttcccaagccgcttggccagcaagacttgagcgacacgcattgtctatctttggggcgccagcgtggcaagatccttcctcttgaggtaaatcatggggcctgtggcatcagcgcgcttgtagtgcatagccattcggtccgcaaagtacagcggcggctcctcgccgacgtaatccatgagattaccatcaacttctctctgcatagagcaaggtgctgtcaagcacacacactctcctgtattccataa

SEQ ID NO: 19243 - DNA, 420 bp, Oryza sativa
  unsure (1)..(420): unsure at all n locations
tagtgacattttcaactcatgatattttatttataaaacgtattcaattattgattcgatgaaactaatttagtattataaatattattatatttatttataaacctagttaaacttgaaataatntgactntgaccatagtcaaaacgtcttatgacctaaaacagagagattaatatctgagatgcagtgacagttgccaccctcctgccctgaacctaatccagcggccatacaattgctacgtcgtctctcgagtcaagaagttcaccatatgaactggatggcattgcgcacgctctctatctaagcctgtttttttttaactacttcactgcagagtatatatgtttgttataaaaagaaatcttatattagattgcttaaactaattgttgtcagcatggcagacaggtcaaa

SEQ ID NO: 19244 - DNA, 422 bp, Oryza sativa
  unsure (1)..(422): unsure at all n locations
cggacacttaaaactaagcttcatattacgactgagaagacagccttcttacttttgacatgccccttgcccaacagagacattggttgaaagatgtcgaagtactggagctaatacttanaaacactctcatttatgcctaatcattgatgtaaacttaacatgtagaccgcaagatcaatncaggcccaattcgacgtcttagtaataaaataagaagctgatgactagagagaagtcgcaatgccgctatccactcgtcagccatgttttaatacaacggtcgagtacttgagctgcaaatcttcacactgaagctgctcggaacatattaaacataaagaactggagatggggcaactacgtggaatgaccaatcttgcccaaatgaatgatctgtgaggttgcaacgacagtgaaag

SEQ ID NO: 19245 - DNA, 434 bp, Oryza sativa
  unsure (1)..(434): unsure at all n locations
tactggcttggcgtncgtcacaccatgagtttgtgctcaatcaccttcctggatacccccagcatgtccgacggctgccaagcgaacacatcagcattgtcgcggaggaaggtgatgatcgcgagttcctatntctcgcctagtgatgccccgatcttgacggtcttgtcagggttggcactggagagtggaacgattttgattgcaccgtccggttcgccgtcttgttggtttgctcactttcttgngtggctcanctgtggtgggtgggctgggcgtgtgctcgaccatgtcgaggctccgcttgtcgcattgcactgccagcttagcattcccttgaatagtgattgttcccttcggtcccggcatcttgagcacttgatacgcgtagtgagatgcggccatgaacttcgcaagtgcaattcttccaatga

SEQ ID NO: 19246 - DNA, 403 bp, Oryza sativa
tcgattcataatcatgtttgtatggcagactgcgacacatctattctcgatcaattattaagattcatcagacaaagcaagctaattcaactggccttctagcgttggaaaatctgactcctctgttcatgataatgctcaatatttgtgctatagcatgctcaatctgggctgatgcgtcgtatgaaggggagctatggctaattgtctaattttgaagtcactcatttatatgtttcctttttgtgtgaatcatacaccaatctcattatatgtttaatcggacactgatcgggttattactgctttagctgcattaccaaatattgctgtagcgttagcacatgcgtgttacctagttatatagtcatcataatatgtacacgcgtacccggaccattct

SEQ ID NO: 19247 - DNA, 237 bp, Oryza sativa
  unsure (1)..(237): unsure at all n locations
gtggtgtntcctcgttcgtgtccgtcggttgcatttctcggctgttctgagctgcaatctaagttaaggtaaataagtcctctatttatttaaagattgcntgattcatatttgcaccgtgagaccaacgctttgtctggactggtctgaatcgcgtntgtaaaagggtcgcccgttatctacacacgctctgtcggtccattatacgggaccgattggggtgacatctattattta

SEQ ID NO: 19248 - DNA, 462 bp, Oryza sativa
  unsure (1)..(462): unsure at all n locations
gatgtaccatccataattaccaaggttttgtttcttataacctaaccgaaacacagaactatttcggtttaaaacggaggtcgatctctccgactgggcgacgacttgtcgcatatggcagcgggtcctcgccggctctgctccatgaccggccgacctccatcgccgctccattccgccatggtgtccgctaatctgtcccgcgaccgcgagggcaaggctcgcgaagagggggtggcgaattgtggatttcgttggagaggagaagatgggctgatggaccttgggctatggatagctgacaacctgtcctggaagggtctacgcgtcggacgtccgatcagattagcataaatcggacactgacgtcagcatgacatcaacgtcacgcatacatgcaaaatcactntaaactgatttttctcttatattatttatccaaatcatgatccgattgcacta

SEQ ID NO: 19249 - DNA, 161 bp, Oryza sativa
  unsure (1)..(161): unsure at all n locations
agctcaaactcattggtgccaatctcatttgctcggngaggagacaagaaagaaagagagggagaagagagatgaagtggtacctaacatgcacggccaaccttttttatcttatngtttggcttattgaaccaccatatcaacaaaaaatatgcaactta

SEQ ID NO: 19250 - DNA, 482 bp, Oryza sativa
  unsure (1)..(482): unsure at all n locations
cccgacgcctgtgtcggtgccttgtgaaagattatgtttttttataaataaaactcgcgacacaaggccattcctgtgcggaatacttgtgcggtcgcatctaatgaccgattcctttggaattacatccgagcatacaatagtgtgaccacacggttggaatgggatgcccctggctgagtaatatgctaatcggnggagccttgatgccgagagacatgtggattcgccatggtggtgtctgtgaggacccatgggcttcctggcacagtatggtctgggacctaacctgttgttggtctgggacccctctcgtcggcatatggcaatcctgtgtctgctctcgaaatgccttgtcatgaaagcccttatgtcaccagacgtggtcgttctacacaggctaggtgattcgtggtagtaatgtcgtgtgtgtaaagcgtccccctctgctaggttaacaaactgttcgacatgcgtgccac

SEQ ID NO: 19251 - DNA, 408 bp, Oryza sativa
  unsure (1)..(408): unsure at all n locations
ctgcagcttctgaaacctattgcaaatggccctcttttcttcgttattttttgcaaacagctattaagttctctttcctgtccctccaattcttttagttgtcaaacctggaggacataccgtcagcgtcatgcctgttcggaagtcaagtcgagcctcgagcttcatgccgcaaggaccaaaaagatcagtccagagccgtcgttccgcataggtcaagtgatagtttcccagagatgacctanacccaatctgtcccagaagagtagnnttcgtagcttctagatcgtgtgttgtttgcttgtgtgtaagggtatgggttgcgtcattggtggggatgcgaccatactatgttgcttgcttaagcacttgaataataaaatctactccaacagaccattattaagt

SEQ ID NO: 19252 - DNA, 399 bp, Oryza sativa
catcgtgcacaccaactaacaaatatcactttattatctaaagtattatatcccaatataaaatcttaacctcaaatttattatatttttacctaataataataatttgataattgtaaactcatatttattatatctttttagatctaatttgaagataaaatgtatccgtgcaattttatctataattctcagtgatatttgttgttagtgtgcacggtatgtacacacgaaggcttatgtgtatacgattattgtttccaacatgtatacccttttaccagatacaacgagaacacttggagatggggcataacatggagtttttactgatgccaggttacaaccctataccagataagcatatatgcgctcgacaatgtgggacaatcacagtcc

SEQ ID NO: 19253 - DNA, 383 bp, Oryza sativa
gcagatatgaatcgactggttcttgggcgataatagccacagcatatgagacatctcgtcatcattgatagacggatcgggcgctcaacataccatgacctcctttatgctctgccgagaacgtagaactgacagtgtcctagagcatgaattgcgacacacgggcggggagtatggattcggcgtatacaccatcacccgggctctatgcacatgacagatgtattgacagatgtagtcccttaggcatatttatactgtgccaattctgttgccgtaatagtttgacgacttgattataggatgacgtgtgtatctgtcttgcagacaacagagtctactgctcctcctgagagatcaaatggcacgcacactatatatgc

SEQ ID NO: 19254 - DNA, 475 bp, Oryza sativa
  unsure (1)..(475): unsure at all n locations
gcagcttctgaagncaccctttctatctttcgttcttgtttactatctgactatctatctcttctcttctataccactcactgacagtacccattaactagtggtcagacctgcactcaagttcatttgttacaagttactccctaatgacaagtcctgattgattgtataaggcccttcgagaatggtacttagccatggacatttgttattcccttttttcctgccagttatagtttaccaaatcctgaattcagcctgaatgaatgtataatcacaaaaagttagagccaacaaagctgcgatttccttttctgaggccaagtctaaagagctttattcatcagtggaaataccattgtgcgcgatagtatctcctaagaatcacgagtgcagtgttaaatgagcacactctgcacaatgatgaagcgtgcaattctttgctattccaaaatatgtatcatgtgctttcggt

SEQ ID NO: 19255 - DNA, 385 bp, Oryza sativa
caagccacaccggagatgcataattaatgcattgtgtacaacgcgataataatataaaagtctaagtttgcagtaaacaacatttaataatcacttatttggccaaagctattttgtaaacacgatcctaaagctacacagtattattaatcaatgtcgtgaacccacatgaacctgccttaacccaatgcctatgatgattcataccgaactggcatcccgaccctgtgtgccagctcggtccaagccaacccatgcctaccattccacattttagttgttaacaaagttttaagaatataacactatcttgggtacattgctctgctagcccataaccgatggcgcggctattcaatatattatactctgatcagaggtgtac

SEQ ID NO: 19256 - DNA, 494 bp, Oryza sativa
  unsure (1)..(494): unsure at all n locations
gcttgcttgcagtaatatatcttgtgaganatttattctgttatcaattcatagntgaaaaactaaattaacttgtggttagcaattacattaccatgacaaagcaatcatggaaatgcaaacgcagcagcgccggtgccatggaagggtcagcatcgatcaagccgtagacgacattgctgatcgtctgctcggcatttgggcacgacgagccgtataaattgtactgcagacttgcagttgatatggagatgaggctcatagcctggaaggctaccatgagaattagcttcatacccctgctgaacattctgaattctgacaaggttgttcactatgagacagcaaagaaacgcctgataccgaatgaatatatgtgtagtgatcgctacctcaaaggattgcgtgatcgttgatgatgtgacaggcacacattcgatgttttatatgtcaaatggatgtgcaactgatcttgatattgactactcctttga

SEQ ID NO: 19257 - DNA, 76 bp, Oryza sativa
  unsure (1)..(76): unsure at all n locations
aataaaaaaaaaaaaaggaatgtctccgcaccattaaaaccacngccaacgcccaacagaaaatctctacaccaca

SEQ ID NO: 19258 - DNA, 386 bp, Oryza sativa
catgcaagcttatgagagcagcagcaagcaaggctagacgctcttgtgttctctttgtctgctcaatcaacaacttgtggttgccaacccaacacttggtgatgcgctctcctagtgcttcttccatcttgttcaaatgggcggcgataaccttggcgatagccttctcctgatcatcccaggcctccggcggagcctggcatggccagcaccgctgggtgacgtaggaccgaaccccctcagtgatggcggcggacttcttcttcaccagagatggcgcctgcttgccctccaacgccagcttcttggcagttaggccggccatggaggtaggcgcgaaagcacggccttgtgcttgggcacaggtgtagtgacgatccccccgc

SEQ ID NO: 19259 - DNA, 482 bp, Oryza sativa
  unsure (1)..(482): unsure at all n locations
tactgtatagtggacacccaagctcttgcatcactattattttcttcacaaagaanatattcctttgtctgtggggttccaatatctagaacattagtcattgaataaaacaaaatagagggtcccaaaataaatatcacccatgcaaaagaatgtaaggttaaaaaaagttagtccgtgtggatacagaaacagcatccatcatatttcggcagtccactgcaccaaaggaaacatgagtcagtttagtgcttatcgcgtaagtctgaaatataataatggactatgaatgaagcatatcgtactgaaagttcattggcgacaacgtcacagtgcttgttgaatcaaacactattattcccctcacagctgcatcacttctacgaatcctaaatgagaagttaaactatgaccacaagataaataattctatggttcaaatattcataaggagctgtaattntgcatacttgtattccatc

SEQ ID NO: 19260 - DNA, 438 bp, Oryza sativa
  unsure (1)..(438): unsure at all n locations
aagcacctgcggcatgcaagcttcagtgaagatcagcaatttctccactggtttgtttgtctttcattaaaaagaagaccnctagctttgatcagtgcgcatgcatcgactctactacgtgtaaactctacagaggcacgcctcatgagactttccttgatcagctatagcttcatcggtctgaacccactcatgatgaactctctgaaactctccgcgttccactaacaccacccactaacatcatcatataatgttttgctccgctcgtacacgcaaagagacgaacacgtcgccgcgcccgagctcacggtgcgcctcacctactgcaaacctctgcaaatgcctataaatacaccgacgaggcagcgatcactcttcattcacagcaacagcacatctcgcagcttaatttcagcttactgatcagtgatcact

SEQ ID NO: 19261 - DNA, 346 bp, Oryza sativa
  unsure (1)..(346): unsure at all n locations
atatatcttgacttgcacctgaaatacccacaaattctttcttgctagctaaaccctgtcgaatatccattacatgcgtctgaaacacagaatgaagtgtggaggccttcgcatccatgggtcggaccctgcatgtaaagctgggntgcaaaccaccgatatgcataaatatactatcatgtgtgtggataatgcctgcgcgtcttggggaagagcccaagaggaggcatgaaatgagcatagcatcgatagtattaatatcttacaaatgtatccttgctaatttgacagaggataatatctttagaaatgattgctactttcaatatatcagatgtgaaaatgg

SEQ ID NO: 19262 - DNA, 292 bp, Oryza sativa
  unsure (1)..(292): unsure at all n locations
atctgaaaaataaatcacgtacctcttctagttcgagtttgatctgggccttgggtcttggaattctatcatgtgctaagcacaaggggttgtacaccctatggctaaccctgngacattcttaatcatatntattcaatagtcgtgatcgattagaggtgggtgttgcttacgttagtctgccaccatatgccgcaatttcgcagttgacatgttcggtttgtgaaacccaacttcaagtgctaatcattcatctacaattctgattgtgttctttctctttattgtgagt

SEQ ID NO: 19263 - DNA, 467 bp, Oryza sativa
  unsure (1)..(467): unsure at all n locations
acatatcctanggatggatgggttggctaagcactngtgtcagatagattgngccgaanagtccatgaacttgcaaggacctggaggaaagcaagtccgctntacccctaacacccctaccgcaagtcggtctatcctaacctgtttacaagtcacctccttggagtcggtgcccatagtctgtgaatatcccgacgtatttccagaagaattaacgagtatgccaccagaccgagagattgagttcgccatagaactggcaccaggcacagctccaattgcaaaaagaccctaccgaatggcagctaatgagttagcagaagtcaaaagacaaatcgaagagttggagagtaaaggttatgtgcgacctagctcatctccttgtggagccctagtgcttctggtaagaaaaaggatggctctgagagaatggtaatcgactatagagccctgaatgaagtaactat

SEQ ID NO: 19264 - DNA, 341 bp, Oryza sativa
  unsure (1)..(341): unsure at all n locations
gcagacaaataggctacttanggccgagttagttccaaactttttcttcaaactcttaactntttcatcacatcagaacttttctacacacataaacttccaacttttccatcacatcgttccaatttcaaccaaacttctaaatttcgagtgaactaaacacacccttacatgatgtatgttaatatgcatatgtaacagtgtagcaagtcttcttttaagcatntttattaagtacttnctctggtcgatattaagattattnntagctcatcccatttatctcaaaataaattggattttagtaataattatatcaaaggttataatagtaaagaata

SEQ ID NO: 19265 - DNA, 489 bp, Oryza sativa
  unsure (1)..(489): unsure at all n locations
tactaagctgatcggacannaaaaaatgaactagaanagattttatttctgtgtttagattctaacttttctcattaaacttccaacttttctgtcacgtcaaatgtttggacacatatatggagcatcaaatgtagacaaaaagaataactaattgcacaatctgactgtaaatcacgagacaaatctttttagcctaattacgtcatgattagctataagtgctacagtattccaaatgtactaatgatggattaattatgcttaaaagattcgtctcgcagtttacaggcgtaatttgtaattagttttgttattagtctacgtttaatactgtaaatgtgagtccgtatacgtaaaaaagaaattgacgatgaactaaacacggccattatctataacaaagatatttataccatccacatgcttatctctctccaaaattaaatattaagtangcaaataatggtttttggttttaataacatc

SEQ ID NO: 19266 - DNA, 375 bp, Oryza sativa
  unsure (1)..(375): unsure at all n locations
ctcaactatttctcgcgatatcttcttacgaagtttgttagggcatctataacagcctctggtttaggtgggcaacccggcaagtagacgtccacaggaattaacttatcaactccccgaacagtactataggaatccgtactgaacattccaccagtaatagtacaagctcccatagcaatgaccgtatttggttcaggcatttgctcatataatctcactaaagaagggagccatttcattgttactgtaccggcttgtaaaattaggtccgcttgcctaggactngatcttggtaccaatccataacgatcaaagtcgaatcgtgagcctattaatgaagcanattcaatganacaacaactggtaccatat

SEQ ID NO: 19267 - DNA, 105 bp, Oryza sativa
aaacacaaaagccggggaagcaagcaacaggaccaaaacaaggaaaaacaggcgacgaccagggcgaccagcgcacaaaggggaaagagacaaaagcagaaggaa

SEQ ID NO: 19268 - DNA, 333 bp, Oryza sativa
  unsure (1)..(333): unsure at all n locations
gatgatgcgcggtgtagaacgacgaagtggaagccgaagctctgataccattgtggatagtataaggagagaggatattgcgaatcgcggatagactgtattgagcctcacggggctggtatatataagagtacatggagaggagataatgaagaattacagatatggaacgagtctacacaaatcaatcatattctaatatgactctaactaccatatactctaacatatatgtccaggttcgttgattgacatcctactcagcaaataaagataaccaaaaaaatacctgggagcccacatgacagctatcctnctctttcttctcttttc

SEQ ID NO: 19269 - DNA, 452 bp, Oryza sativa
  unsure (1)..(452): unsure at all n locations
tcactaattaacaagatgccacatcatcatccactaacaatcatcacatttatacatcatgcaaacatgctatatcttcataagttttataantttaaaaggctttcagatataaacatattaaattatcatccaacataattcacataatgttttaatggatatctttattatattttatgatatcctatatacttatataagtcatcctcacttagttagtgcttaaatgattaatctatggtccaaantatctctctcctttgtttctctaattaagtcatatcacatcaattatttgtagcctttagatgattaatctgcggtccaaactatctccctactgttcttcttccatatagtcataccaccttactttttacgaatgatataccattctatatactatgtagnattaaatgatcatataccacattaatgtacttaatctg

SEQ ID NO: 19270 - DNA, 239 bp, Oryza sativa
atcttactctatcataccctaaagtattattatgggaagaaatcccccccagaatactgattgagatatcaagtaagatatgtcccgctgttaccccttgttaggcaagaaagattttctttatttagaatttggaacattcacaaagagctttccagcaaacaatcaaacttatcaaaaagactcatgactattcttaaaaaattgataaaaaccgacaaagcgacaaaatgacaaaa

SEQ ID NO: 19271 - DNA, 250 bp, Oryza sativa
tccgcataagcgaacctactgtcttccatctgaataacagaagcacccgttctttcgtactacgaaacgatctctcggacaaggagcatttgtgattgatgcatgcagccactaagtcctatttctatcgctattggacagaatactaaaaatacaaattgaacgaaatctgatctccgactgctcagatctcttttagtttaacattaacgttggacacatatcattctctttttccaccaactgactt

SEQ ID NO: 19272 - DNA, 430 bp, Oryza sativa
gtgaccgagacgaggccatggcactgaggcattgaagtctgagttgaacgccaatatcgagaagggcatcgagtacgttcactaacagcagacagcagcggcatctggttgaagcaagcagaatggaatctatacaaggaagataataaacggaagaggctcttgataccttttagtttccaggctagaattttctcttgtcgacgcgtagggaaaggctccagactatctgcattggattggcattgctaatatcttcagaatacatgacggcgataacgcccaaactgctgcctcgtttaacacaaattttgcttcagttctgagagggtggtttgagctggacaactaaagaataaataattcctgatcgtttcagcattctctacgatgtgaagttctgaagatactcacttctgcatttaacttc

SEQ ID NO: 19273 - DNA, 492 bp, Oryza sativa
tctagctgctgtagcttctcctaggattagaagctaccctttcttttagcttttgatccagattctgagaaactgtagttgtagaatatagaaaataaactagaagccagaagctgggaaacccagcttttccaaattctctgtgcatatgccgagtaaaatcttctcggaagttatttcttcgaatgttaagctcccgagagtcactctgattgagtgctcatatgccacatgtaccccttgttgagctggcaggtcaaatatgacgtggaagtatgaagcactcgcaagtcaccgtactgtcctcatgagaagctgctcagcaggcgtcacctctgcgcctgtagcttcagatagcttgtacacaaaagcagcgacagacggtgtagcagtagtagcacgtcatacctgtttataagccgagcaacacatgtaccatcacataagtctctaaacataagcatcatattcataccacttatgtaacacctt

SEQ ID NO: 19274 - DNA, 371 bp, Oryza sativa
  unsure (1)..(371): unsure at all n locations
gctacctttacttgatgccttcaggcttacgttgttttgatatattanaccgagaggcttctctagaaacatcttcaagtagacgcatatccgtcttatatagaagtttgtctagtgctagctgcagcggggactgctgcgaattctgtggacacaaagtggcatctgagggtggccatggatctcggggccgggaattcccttatgcaatatgggcggataatatttcatttcgatccgcgctctctgtccgcttttaagcttggattgtaatgtccagctgatctagttctatattaattggtgggttacttttcttgtattaccttaccaacccttgaggcaagtcctagaaaaaaaattcatgtgac

SEQ ID NO: 19275 - DNA, 480 bp, Oryza sativa
  unsure (1)..(480): unsure at all n locations
taatcacactctttgcttgcctgcttatttaaactcattccttttctcttgtagnatatcattgatatacgatattttgtattgtttgtactttcaattgtgaagcctccatagaaggattcatacatgaacagctatagccaattagctattcctattggagtttcctactgatattataagccgaacttctcaacattggttcagctactatagtggtgaagttttgaatcctgacaatctggaacttattgttgatgacgaattatcaacgcgatgttggtcaagtcagtcgcacaagttattccacacatgtatcatatttgtttatcagaaatcatattcccctgcatcctcaaccgcttaagcttcgctggctagccgtgacatggaaccagagatatcattatcatgtatcatggttcagaggtcctgtctgtctctctatatattaatgaatagaataatgtcaaaaggatg

SEQ ID NO: 19276 - DNA, 422 bp, Oryza sativa
  unsure (1)..(422): unsure at all n locations
gggatactctntgacccggcgctcgacacgtcgtcccgtctcttcaagctcgtgttcaagcgcctctcccacggcggcggcagcgagcggagcgagcggtagcatcggcagcgtctgagtgagcggcggcggcggagcggcaacagcagtgagcggcgagcggtattgtgcggagcggcggcaagcatcaacggcagcagcagcgtgagcggcagcggcgttgatcatcaatggcgcggcagcggcagcagcatcggtggtgactgcgccggagcagaagcagcggcgagagagagctagaagataagagaagatggagagaggtagaagatgagggcattttcgtcatacatgcaaaatacatatcttagtggcactactgagattacaaactaatagcaatggcatcgntccatatatgc

SEQ ID NO: 19277 - DNA, 470 bp, Oryza sativa
aagtcacctgcggcatgcaagcttatcaagactgatctatctgttcctacagatgttgttcatttgcagctatcatttgtatggataagacaactacttctgatcttgtcttggacaacgacaactatgggagtaatgctggttctgcacaggagcctcttactaccaatggtaagactagtggggtcagaaatagatacaaacaaactgttaaaaggggaaggaaaggcttccacatatcaccaagtataacatatcccctgagatcttcacatagtaatgtcagggtgcttcgctctgcctcacaaaagaagaatgagacacctattgtgcccacaaatgataatactgctgttcaacgagttgcgaagaatacgaaaagaagcatacccttgatacctgcacctagcaaggtgctcctctctacctcggaaaagagaataatgcacatattgagcttctaaatgatg

SEQ ID NO: 19278 - DNA, 454 bp, Oryza sativa
  unsure (1)..(454): unsure at all n locations
caggaggatgagaattactcanatctctttcttttctaattacgtgtacaaactaaatcattgcatccgctttgaacggtaagaaataagccgcgtcaaccatcgacgcatttatgcaaacgaaataatttgaccaactacgcgtactgcgcacatacaccactacaccagcactatggtgtagttgtaatgcatacgcatgccacacgaataacgaaaatgtgcttatggtaagggccaactacatatttgccaatggtgtgaaccgttattgtgaatttcattgtaagaaatgtaattgcatatttgccatataaagggtcataacccaacatacctgtcattggattgataggttagacaaacaccgttagatgatggattttccataaatatgacaagaatgccctgatgcatgctgctgcagaatgcctcggcaccatcctgacgactg

SEQ ID NO: 19279 - DNA, 478 bp, Oryza sativa
  unsure (1)..(478): unsure at all n locations
gctagcatcattgggctagataataaatcagcttctatctgtcatattagtggctgaccttataattacagcagttgtggtttttatgggcagagcagcactcttttgtttttngcactatccagaacagctctagcgattgtaagttacgtctaaataaccacaacacaactctttagatgttttgatatgcaattttggggaacttatgagtttagactcgtgtgctggtgtggttcatcattggttttgtcctacaacaatcacgctgagacatagaagcgatttgtttgattngaacgttgaaatgatgtanaggattggcatgcagatccctcattgtacgtgctcctattcaaggacacagttttgatccatctgggaattggctctcctgctatgtatctgcatgtatttaaaccctatcattctgactgtgggactaatagtattgtgatgaatagctcttagcgtctcg

SEQ ID NO: 19280 - DNA, 445 bp, Oryza sativa
  unsure (1)..(445): unsure at all n locations
atatagaagacactcgtgtatnatgtaagtggatggactcccaagatggtcatgntccaagttggccatttgtctgaattaattttntttagaataatatttaagtaaattgcacccacaatgtatcaacttggcaggtgggtgtaaattggtgtaaaaacttgtganatgagcgttctagtgcaacaacttggtaggtaagtgttatttaatacaagaactttataagtgatcgcataagaacttgcaagatacgtacaatttngatataataagttaagaagttatgcgacaacttaattatttggagcacttttttttatacnatattcaattttaagacttattttgcaataactagtgtggattgatataacatatttatattttatcctaatactaaaactgaagtaattaactggatgtaaaatatatatttggtgag

SEQ ID NO: 19281 - DNA, 490 bp, Oryza sativa
  unsure (1)..(490): unsure at all n locations
tcataatgtcttcatataagaggtgaggtcatgccataatttattgtgaatntacttcggtgattatatacaaatcggaggtgcctaaaaggttagcaacttcatcctccaatgttgtttttgtcatattacatttggagctatgttttgcacacttttttatctctaaaattttgttgtaagttgatgagagagaaaacttgtgtgggaaaagaaagaatatatagaaattttgtttatttgctaaataaggttttataaaatatttgagtacgaaaatatagtgaaagttaatcttaaataaaagaaaacaaactaaattgaaaattaaaagaatttacaacttagaaaataataaataagaattatgtggcggaatatgttaataattttggatgaataatgatatgtcattattggatgactgttgaaagagtttgtgattaatttatcattattgtatgactgtcactattgtacgaattattat

SEQ ID NO: 19282 - DNA, 297 bp, Oryza sativa
gatgtgtcttgttctactaattcccatatgacagtctgattgtgctgctttgttggatcggattgcactgagtatagcttgagatatgactgatgatcgaactcgaacgcacactatggtgctgctgttgaatatgatgccgaaaatcacaggaatgatgatggcattgctggacgaaccagatgatatgtctctctcctgcatccttcactgcgatactgaccatgatacctgagacttactctgtgggcaaacatgaatctacgattgtcattatcgcgcctatgaatgtgtgca

SEQ ID NO: 19283 - DNA, 396 bp, Oryza sativa
  unsure (1)..(396): unsure at all n locations
atggctatgtacgtcactgananacttncagacaggataagtgctgatcttactgtgaatgcagntagggatggtccatcctgatcgcctatactctgaagaaattaaagatctgtggagtgaagctgatcatgacggcgatgatattgttgactacaaagaatctcaggtaattccttgtgtaatattttgctggagattctgccttgaactgaacaataatatggtgcccataattagataagaaaggaggtcaacaagatctaatgacaggtggaacataggaaatgtaaatcaattaataactcataggagtatatgctgcgcaactaaaacaggaagtcaaccattaataataagatcgataaaggccagatgaagatagtcatggttata

SEQ ID NO: 19284 - DNA, 459 bp, Oryza sativa
taagcgtataaacgacgaagatgttcaatggtccaagagttgtctacgagtgtaccgtcttcgcgcttgagtcgataggaacctggtcgggtgacttcagagatgataaatggcccttcccatataggagataacttgtgccgatctcgtgtagtttgaattttcctcataaccaggtcgccgactagaaaggcacgggatcgaacattgcgattatgataacgtcgcaacccttgtaagtatcgagccgactaaatcaaagctgcttcgcggacttcttccaattggtgcaagtcatccactcggtcctcttcgtaacgttcttcgcggaaattacgaaagcgcaaagactcgaattcgacttcactcggcaacattgcttctgccccatagacaatgaataaaggtgactggcctgtggcccgactgtgtgtagtacgcaaagaccatagtactgat

SEQ ID NO: 19285 - DNA, 222 bp, Oryza sativa
  unsure (1)..(222): unsure at all n locations
tggaagaagaagatagaagccatcacccctatattactcatgcaaccctaccagacaaactccatgctcaaacacatagatctccattgcatgcatgcagtacattggtagccacagctataacccactataggagattattagtgcacaatatcatcaacataattgtgtggatttgtgccaagtaaattgagctgagctgcatncaattggtggctcatt

SEQ ID NO: 19286 - DNA, 458 bp, Oryza sativa
  unsure (1)..(458): unsure at all n locations
gtgcttccttcttgattttgtccggtgaaattgtttgtttatttgagagggggggttgctcttggtgttatcaagcanatctgaaattaacatataatattatcataaggagagctttgtcttatgcattttgtatattcttgtgcatgctaccaatattatgaaggttcataatactttgccatgtattttgcatattcttgtgtacgcattttattgttttatgaagcttacatattgctttttagtgatatggtgcatggcactaattcttttacttgaatcatagataaaatgcgatgttgtatctagtacatactttggatgatgaacgcttatgtatatgatcgctgaatggttatttctcaaattgctctttattttctcatcgcgcaagagaataaataaatttctatgagagaacaaatatgtattctgaatcttggaacaatcttgac

SEQ ID NO: 19287 - DNA, 346 bp, Oryza sativa
  unsure (1)..(346): unsure at all n locations
acatattatatataaaaaaccgggggtgatctcaccgcncccaaacacagnagagcaccggcagcccccttttccacagaacacgcccgcaccgacgcccgcacccgaccccagcggcaccccccccaccccccccccgccaccgacgccccgccccaccccgcccccccccccagccacgaaccccgccggccacccccccgaccccccaaccccagcccccccccagcacccagccgccgcgacccgcgagcaaccccccccccccccccgaggagcagcccacccaccgccaccccccccccgacgaacgccccccccacaccgcacccgcccccacgccccc

SEQ ID NO: 19288 - DNA, 190 bp, Oryza sativa
aacaatatatgacaggtttatcatatagagcatttcctaaacaaatatctaaatttttattgtgcataacaggaccaaatatatattatataatgaagaagattaagactgtgttctttcactactacataaacgacttttcacgacagggagccttttatattgcgtgcatgcggtaactcggtccgca

SEQ ID NO: 19289 - DNA, 333 bp, Oryza sativa
  unsure (1)..(333): unsure at all n locations
atgtataaaccattaaaaagcctctcacatcatttgaacaatttaaaccctttgagcacaaaagccacaaagctaatggctcatttagcacagacaaagttcataaatacaaccctcaacttgagtaaaaccttgagcaacaagtctagctttatttctcacaatcaaaccatccttcatttgtttatattngaaaacccacttggttccaataatattatgtccagaaggtggttcaactaaagtccaatctttggttctctcacaatattcaagatcttcatgcatggccgtnatccacgattcatcaggtaatgcatgtgacacatcttt

SEQ ID NO: 19290 - DNA, 492 bp, Oryza sativa
tgcatacgagtatatgcttgttctgggctcttggtcgtgtcttcttcttgctgtctgtatggattgagacgatgctaggcagatagcacattaacgcttacgtgtccatgtacttgtgctgctcgagttgtacgaactacagtagtgtactacgactcgagtcgtcgcagcgaaaaggttgcattgggccggtccatggaccggttaaagcatggtaacattgcgttagtacattagtactctgtacaatattggactatgtgctagtacaagtactatactctgatgatgtactaactggccagcctactatcggccatagaactattaattgtattttgtcaaaatagaaggggaaaaaaacttgtggagcttgattctaacggtcttaaatcgttaggagtatgcatgttggtccggcatataatttccagtcactcggtgtttacgagtacaatggaacggccccaccttgtcattcaactgcatgct

SEQ ID NO: 19291 - DNA, 249 bp, Oryza sativa
gtggattttttttttcctgaacagagatattgggcacttctgctatgttattaagcgcatgtcttgagtttctcaggcaaagaaatcaacagggcttgcttaagaagacaagtcttcttgcacaatgatttattgttactgcagaatcgtgggtaccacgtcactgagggccttgagacctaaatctcctctttactaatccttagatctcatggtgtatgcagccttgttttgtcctgtgttgggtaa

SEQ ID NO: 19292 - DNA, 473 bp, Oryza sativa
tatggtgtacatacatgcacaccaattaacaaataccactttatattatagaaacaattgtgctcgtacttgcaatagtattacacatatatgcaaagttgcatcaaattcattatattttagtcgtaaccaaaaaaacacaaaattattaaatatatatgctttatgaactatcgtatttttttggttatggctaaagaataatgaatttgaagttgatactttacagatatatgtaatactattgaaagtacaagtacattttttctagaattttctataacatttgttagtttgtgtgcatgaagcatacatcgtaaacttgtgtgcatagaaggttcaataatagatggttcagggtaaaatgaagaaattgagtgagggggtggtgaaggaaaaaggtagtattctataagtatacttatttggggacgaagtggagtctttcttatcttgaaatctcaatctagttc

SEQ ID NO: 19293 - DNA, 498 bp, Oryza sativa
  unsure (1)..(498): unsure at all n locations
gcaagcttctcgctttctttttcttgtggatatatatgtatcttcgatgtacaatncacaacgtggtaatgtagagtacattaaaggactcgtaaaatctataacgagaggcctntgatctggtcttacgcagcgacgcctagcacggccatcctgattagtcgagaaacattagagtttagaatttgagagaagcatcagagtgttagacatccatgtctctgtcccttctcataaaattgtctctcaaattacttatccgatctacaatccggttacaccattatgttcgcggcaatgtaatctttacaacaagatatcacatgatcatattacgatgaanaattgcaaattacttttattatatatctaaattacttttagaattcactaaagtacttcttagacatattaaaagtaaattcaataaagtctaagagtaacttacatatatgtataagttacttaagaaaaacagaaagtactttgtcatggcat

SEQ ID NO: 19294 - DNA, 436 bp, Oryza sativa
agcacaaactcgccctatgtggttgcttgaagagtccaatgcaccatcagaggtggctcgaagaggaaaaaggttataagagaccggacttttccttcttttttttcatgattgaacgactaacgcacactcacacacaccattacacaagctacacaagcaacaccacactcacaccccacgaatgcccctgtttaacactcgctctattatacggtaaccatcaacagatccttgatctcactagaatcctgttggaagctcacctgcatgtcaataatattcatgggcaccatgatatgaaccctattgaggggagtcatgcaccctcaactccctcaccacaccatcggcgtgtcccttatagaaatctggctcttcaaagcccatcaacacagacgtatgattgcttaatccaaacttcggtgtctacctt

SEQ ID NO: 19295 - DNA, 461 bp, Oryza sativa
  unsure (1)..(461): unsure at all n locations
gcttaacgntctgctcccgagagacatgcttcagtattatctgtcgaanactattcatcaattcccagcatgtctctgtgtagatcatcaacgcatcatttntgcattcgtattccccttgcaattgactgatcaccaacaaagaattctccattatctccacggcgtgggcttcaacttccataagcaactgcaaacccttgagaactgcttcgtacttagcttgattgttagttgcataaaggtttgttgatgcttcttttnttgccaacacaagatcacctaatgatttgcggtgcattaaacagagtcgccaaaatcaataaatcaaaattggctagtgaaaccgatttccagattaattcgctttcgtggaatcacacgactaatttacgagcaaattagtaaagaagataatatcgtacttacctgacgacgaacgactagtntccgagcaaact

SEQ ID NO: 19296 - DNA, 414 bp, Oryza sativa
gcggtcgtcgctgaatgttccgaaggccgctctctctgagcatggcaagtcacatcatccttgaacatattgaatcccagtttataaaactattgcgatgtacattattgcattattgctttatttaaattcccgcgttatcactgagttatttatccatgcctatctacctttgttaagacattattatcgctattgttattattaccttgttcaccctagaataaacaaaaccccaactagtgggtactctattcgtggtgccactactataaatttaggtagatgcttcgctgattaattaagcaacattaagtggtttataactgtagactttgcaattctcatatatttgacactatggaattgtggatattggggattggacaaccctctcttctctttaaaacccta

SEQ ID NO: 19297 - DNA, 289 bp, Oryza sativa
catgggccaatatgccagtggacgattgcgactatctaatgcgagctactctcctaccaaagagagatgcgacgaaaactattctgatgagctcgaatgctgcatactgtcacagacgctatgttatgtgggggatgaagatcactatggtgtactaccttgcattacctggagactctggtgccgagagtacaatattccacgatgtatcctcccaagattaatggacacacctggctacttatctctgatacaactcaaggttttcgaggcgctccctctatatatg

SEQ ID NO: 19298 - DNA, 188 bp, Oryza sativa
tgctcttgttcttaccctgtcttcctgagatggtcttgccgatgcgagcatgatcggaatggaggcactcctctaaattacagatctccataattatagcaagtgtcaacagatttttccaggattacggtacgagatgctttcacaatagtctgtgcgctttctttttcttactgacatacacgaca

SEQ ID NO: 19299 - DNA, 419 bp, Oryza sativa
  unsure (1)..(419): unsure at all n locations
agcttgtcaacgggtcggcaatgttcaattggtgcccttctgccgtgtaaaccctataatcaaaccatggccgttccgagggtgcgctctggagtttattggtcaaatttattcttcgtcatcaaaggggcataggttcgtgctagttgctacgaaatacttcaccaagtgggccgaagccgtgcctctcaagaacatgactcatacggaggtaattgactttattttgaagcatattatccatagattcgatattccgcanacattaactacggatcaaggtgcttcttttacgtctaaggaagtaaagagtcttgccgaatcttatggtattaaattggtgagttcttctccttactacgctcacgctaatggacaagccgagtcgagtaataaaacattgttgaagctagtgaaaa

SEQ ID NO: 19300 - DNA, 445 bp, Oryza sativa
  unsure (1)..(445): unsure at all n locations
tctcttactgaatgagggagaaagatagagcattaatgagttcttccacagtactcatcatgccacaccggcagatgcatgattaatgcaatggggtacaaggggataataatatgggttatgctctgcagtaaacatcatttaatagacacttatttgcccaatgctattttataaagatgatcctatagctacactatattattaatcaatgacgtggacccacacgaacctgccttaacccatggcctacgatgattcataccgaactggcaacccgacctgtgtcccagctcgtcccaagccatcccatgccaaccattccacattttagttgttgagcaaactttaagaattaaaacactgacttgngtacattgctaagcttggccatatccgaaggctcggctattcgaatagaattactctgatcagatgtgtacat

SEQ ID NO: 19301 - DNA, 464 bp, Oryza sativa
tacattttggatcacaggtgcacctatcttattcaccattgctcaaagaagccagttcctcaagtagctccttttctcgtccgctggaaagaacacaaattcacagagatatgggctcagtgattatgtagatttagaccaacagtatgtattctaaagtatgttcaagtcaagaagcatataaccctatacgtttgggtatagtgaccttaatagtgaatagatgatcaccacgaacagatggtttattcaatgatggaacaccttgctttgctagaaccactacatcaccagggtgggtacctggaggtattctaagattactatttccatcaacagttctgacctgcttggaagaagaatatgagcataatacataaatgcctgtagactatataccacaagaatcattactaggacatgctgtctctcagatctaaaattaatatgtacaaataaataac

SEQ ID NO: 19302 - DNA, 475 bp, Oryza sativa
  unsure (1)..(475): unsure at all n locations
actaagctaacgaatggcctggcaccattctttggaagcatagatattctccggtgagctgtatcgctagtactaccatatttgtgatgcaagtttgacctataaacgcaaggtcccttgcttgctctggaaaaagaaatcagaagacgattgcagacggtgtttgaactcaaaaaatcataatgattggccctgaaaaagtctgaccacccacagttaagatgaacacaaattgttaactgttgcttgcactgaaggacattgagcagtgaattcaccacgggttttaacctacaggtttgcagcaagcgtaatctttggaataggttgtaacagcatattctaatgactaattagtcgggcaataataattccaccagatacaaatgtctgcataactctgaatactattacagtgcattntgtgaggtgcaatgcacactatagaatctgaatctctagacagagcacagca

SEQ ID NO: 19303 - DNA, 496 bp, Oryza sativa
  unsure (1)..(496): unsure at all n locations
acctgcggcatgcagcttctgagtaagaaattactctgagaactngtgtcgntccaaagcttacaatcttatcagatcggctcgtgactanntatttacttccaactgcaacacctaatttggaagctgagtacaatcttccccatacaccctcatcaatgtctcccattaattcgataatgattagcatcctgtctccaccaatagaatggtttttatgcttaattacaccacaatctctaagagccaccatgtttgcatgtcctacatcatcgtcgttaaaacacacnaattgagagaagcggntacgcactctttcatcttcgcaggcatgctcaatcanggtgctcttcccaactttcctttgccaatgatcggcangacacctagaatttcagcactgtgaatgtcctctttgagcangaagttcatgatgtgctccgtttccattngacgaaccgaacaagcacctgtctaaagcaagtgcatgctatat

SEQ ID NO: 19304 - DNA, 484 bp, Oryza sativa
  unsure (1)..(484): unsure at all n locations
tgctngcagcttgtatcagttggttgcaaggacaatatattgtttgcctcctttgaaactaangaaaagcaataggaattcttgaggattttatcctacaaaaaaataatccaatgaagccatttgaaacaaaggattgtttttctttgaaattcctatgaaatgaatcattctagagcaagtttttctcttcaagtgtatagaattcctgtattttctctgtatgctaatcaaacaatgtttcgaaacattcttgtgttttaaaatccctaggaatccaatgagtatgaacattattatattcataagttgtccctattcccgtgttttctcaatcccacatttcatagtgtgccaaggcccatctcacatatttgtgtatttggccttcacgcaaaatccgggcctctggccttctctctaaaaatctcacatatttgtgtcacattgttgtccctttntataaaatctgtactttgatcta

SEQ ID NO: 19305 - DNA, 368 bp, Oryza sativa
  unsure (1)..(368): unsure at all n locations
ggatcggaaatacttcttcagattcgacaccctttctgaccaacattatcacagctgagaaatgtttagatatcaaaccaatgcctcctcctcggaccgatcgagatgctcatcggacatggcatcanattaatcaagctcagaagacttctatgaagaagcacccacgtctcaagaacgccatgaatataccacaacacttgacttagaatcaatcttacgagaaacaatatgcatctcatgttgtttcacttcggtgtaaagcgaaatccgatgtccgagtacacatatccacagactcctgtattgatgttatnttcatcttccagatgacatgtcatgccattctaatagtgcgagaaacctca

SEQ ID NO: 19306 - DNA, 440 bp, Oryza sativa
  unsure (1)..(440): unsure at all n locations
agcttactcaagctgtgttcggctctactggatctcattcttctctgcctcgagcctcgngcgtacgcttaccaaactattagatagtgtattctttgccaaatatatctatatgaaagttgctctgaaaaatcatactaacccattttttgaatttttgtagctaatacttaattaatatgacactaatccatcgctatgttttccgacagaaagtgagtgttccaaccctcaccaataacacagcccatcttgtttaaaggatggcatcacgctcataacagtcaacaagactatcatggaaaacaacttcaagtctcaacgtccaattgaaagttaggcacaatcattactaatgacagatatctgacaacatgtatctacagggctgattgcagtagaacatatagattaactggagtattgccatacgatagttt

SEQ ID NO: 19307 - DNA, 350 bp, Oryza sativa
  unsure (1)..(350): unsure at all n locations
tagntggcagggccaaattagctatgatcctgccctctatatgggaactactcgtgaaaaataagctatcggcacttatacaccaattataaatcataagttggccactcttggtcaggctttataaagcactctaatacatttgcaccctatcagtgtcctctttcatgctccaaccctcgcatactaatccttgggtctttaatttcctttcagcgacattgatgtgaaaagtacatcatctactatagagtgaaggtgcgcacgcatcattaaagcgtgcaaacatcgaaactgtgcagatatttggggcttgcccttgcctcaattctgttcgtcctataaataag

SEQ ID NO: 19308 - DNA, 514 bp, Oryza sativa
ctgccgctgcagcttctggctatatccttctcgctggacattttcgttctctgctttggattaattagacacggatctttcttgtgtcttacagcagacaataccattgacttgatagcactatcaagcatgggctctatgacgtagttaacaccacggggtataaaagaataacgattagttcggccttccgtgagtgcatgaagatcatactgccactgtcttcccaaaagcaagtgacaagcattcatcggcactacatcacagtcaactttatcaacatagcttccaatagagaatgcaactctcaccttatgagtaattctcagtgcgcccgctcgattcatctattgaatataacgcggtgtagaaagccttcgtgtagacaaagataatacatgcaccaacgttatactgatagcattagtaaaactaccaccatcaattattaatgtgataccttctcttgaatgtgactctaactggaaatatacagcgtgccctttgatcacat

SEQ ID NO: 19309 - DNA, 398 bp, Oryza sativa
catatattaccaagtcctccgatgggcaaagggaaagcctcaatcaaaaacgctgcatcatttaatagcgtcaagtattttgaagcaagccgaaacagccatcatatcaattctgctctcggatatataataaaatgctaccgtgtctctgatttcaacatgaaggtttcttttatagtggacccggcacttttgctagctggttgcaataaatgagctcatttaatgtaggatcgagattcaataagttattaaattgacatgtgtgcactcttagtcaaaggattgttagtcataattgctgcactaataatgagcaagaccggatgttatccattataaaataagtttattagtcagacatcattataacaacatcagtcaaacaaatatagcac

SEQ ID NO: 19310 - DNA, 413 bp, Oryza sativa
gcaagcttgagacatcgactctggaggacgagagataacattccacatatgagcatgaaagtgtttattttgaaattccccttaattcatgctcgcttaagaaatccccagagtcctggttgattagtaccacttccctgtttgaggaccacaaccacctttcggttctcatttctaacatgtttagaaggatggttgtggatgcttatatttatcataatactgcaaatctcgtacttggttgtggcactaatcttgcagagcgatgttccgatggtcaagctcttgaccataaacaaagcactgtcaggagataccctgtattatcatggtaagtttccttaataatacaagcaagaaccagctcttaggataatatgcaccttcgggtattcttggtcactaatcatttc

SEQ ID NO: 19311 - DNA, 507 bp, Oryza sativa
  unsure (1)..(507): unsure at all n locations
actcagctttaaccaagctcttacaagatcttaccaatgcaggtggaatggtgactcaaccaagcaccccaatagagggtggatgtatcgatgcctcggcaaacactttgtgtacggctgcaatcaaatttgtggagctctgggtaggcttaaatatgtagcaaaggaaagcaatggttcaaatcagagaatgcaaagttgaataatggttcaaagtcaagtaccatgctggtcctangctagatcgtactagagacacgagtctagacacaaacggtaccacaagatagcactaggaacaacttatgcacaactctgatatatgagagaaaattcaaagatacaactgatntttctcttttcctttttttggtgcggctattcttttctttctttatgcacctttcttgccttttttttggattgttctaacaaaacaacctcaggactataagcaagttacagnactctatgtaatataaaaaatacaggactcactgtaatgtc

SEQ ID NO: 19312 - DNA, 456 bp, Oryza sativa
  unsure (1)..(456): unsure at all n locations
cganatatacacctacacgttgtctctctatgaataagattatatacnngcaaaaaccgatgttctttgctgcggctcgcgtgtcgtcaggctatatgcagctctttgtcccaccatatgcgatggacatctctggccttatactttcgtacaaatcttatcatgctaagcgatggtcttgctttggagttcatagttctgtgctctatgatgtgcaatcaacttgggggncatcaatatataatcttttgctgctgcattctggctattgtactaagatgtaactgacgaaatgatctcttggatgttagtggccttccatgattgatatgagctcgtatctattgctgctgcattctggtatctgtaacgaacacaataattcgttggtgaggctgaataacgctatttgaatgtncagtgcttactctgaacatatgcaacatatacatgggt

SEQ ID NO: 19313 - DNA, 430 bp, Oryza sativa
  unsure (1)..(430): unsure at all n locations
accttaagnncactgcagcatgcaagctnggggggctaatacgagctcagaacggtactgttcattttgctgcacctctatgtgctgctgatactagatatgtctattgatgtcaacttcgttagtcatctcacatagatatgcataaagactgagaaatgatgatcatggagtcacctgtagagatactccctccatctcatataaatccacctaactaagactggatccgatatcgatacgtcataatacaatgaatatagatatgcctgctgctatatttgtctactaagactcgtactattagtgatatcaagttcgtaagcctagattatatcatattctattattgatacattcttgtcgacaggggatacccgtagaccggatatagagggaatagcggtacgcttgtataatgatctacgta

SEQ ID NO: 19314 - DNA, 355 bp, Oryza sativa
ttagagtgacctgccgcatgaagcttgacgccaggatgtgaagcacattatccttgttctctctaaagaatgcaggcatgcatatctgtgtctataactactctccattatattcccagcttaaaactacagatcaggtcgccctgcagaacttcgatcatagtgttatacttttataccacattcattcgatatatgcccttgctctgagaagaggcaatttgtttatgccatgcctcgcttttaccaaattctgtagagcttacaggccatgatattgctgggagttcttgatatgagggttgagaatctgtgaaccttataatcattcggttgctgcaacatacaagatact

SEQ ID NO: 19315 - DNA, 359 bp, Oryza sativa
  unsure (1)..(359): unsure at all n locations
ngactggagtatttgtatgtgctgcaacacgggttgctctcttagcattagaagatgtaattggcgcagcctgccaatcaattntagatggactgcaatgaccaggcgcataacatcgagaattattccacatggaatgaaatgctatgaagactgacattttactgatgagaataagattggaactcaaatagcttgagttgtttcctttaattgttaatgggttcatccttttccttatgtgcagtatgccacaatcaattgatgctgcactcttgcagtccggaagatgtgaccgcctgatcttatgtgatcttcctggatggcatgagcgttcggaaagtctgataagtcactct

SEQ ID NO: 19316 - DNA, 354 bp, Oryza sativa
agagaagctaaagctgtcatacgagcacatgaatcaactctgaatgtgtggcaactaacaatgtccagagtcaagctccatggagcaattctggcacggctaatttcatcattttgaccaattaggtgccaaatattccgagtacgctcatctgatggtgtcatgttgatcaggaacaggaaactgtctcatactcgtactacctagcaacagaatgaaccattccagaggatccatgtcggccaaaccaatgaacatgcagttctcaacttcacacaaccaggtcaagtggcacctggtattgtagagatacttctgtcctgacatgtcatacatgatacacctgacaccgac

SEQ ID NO: 19317 - DNA, 412 bp, Oryza sativa
agcttgtgtaagccaggatgatatgctaattattataacataccaacatcatggggaaggcatagacacatattgtgtatggttttctttctcttttttctcttgaagaaagacacaatattgtgtgtcgcttgtgacagagaggtaaggatgtataatttcattttggctcaagtaaatcgtggatttgaacgccaggtgagtcatcaatccagatattccatattcagaaacactcagcatcgatcatatcctatatgtgaataacgtcaggttcctgacttcctgtgaatcgatccacacgtgatgaccacatttgatatcttttatttttggtggaaattgctcccacctgtatttaatatatgcccatgcaagttcctatacaccaaagaattgtcttttagataat

SEQ ID NO: 19318 - DNA, 302 bp, Oryza sativa
  unsure (1)..(302): unsure at all n locations
ctggagaagaagacttaagtggagtcctggcttataccccatgtgagcgcctgcgaagatggagccgtaggcctgctattccgctgctgttntttttttttattgtcaggcccgaagtgcctttgtaataatgtaaatattatcgatataataaagatgtggctttcgtatcatgtttgtttggtgtaccccggcttttcctgggacggngaataatacactancgttcgggaaaagcaattttctgatacgacactggtgctggggaaaggcttgggtgncaatcccatcttggatatgct

SEQ ID NO: 19319 - DNA, 238 bp, Oryza sativa
  unsure (1)..(238): unsure at all n locations
aagtgtttctttgttgtgttcagggtgaatggttgatttatgctacgagaaggaatttgtcttaaggtggagtttgttgagttgtgatccaaattcatttatacacatataaaggctaacttctgacggagcgaagcagaggcccgtcgccggaggcttgggccccgtggaatggatcgntatgcttttagggtttcacctttatagatatacatggacggacacagtatanggacat

SEQ ID NO: 19320 - DNA, 185 bp, Oryza sativa
accaatctcaagagtggtggatccaccgtctatgggctcacgatctaagcggtgaccgcggttgatgagacgcatgcctggggcttgataacctgccgaaaagggcacgtaacgatggtggatgaggcatgcgccttggcctcattcctctgttgcacggttgggagaggtggatttggacctct

SEQ ID NO: 19321 - DNA, 502 bp, Oryza sativa
  unsure (1)..(502): unsure at all n locations
ttaagtcacctgcggctgcagctatngatagattctttcgtttccgtagcacgtttttaactgctacgatatttcgtgtgaaactctataaaggtgttaaaaaatccacanatttattcataatatatattccttaattttaattctgaatctcagttatttcctaattgtatttctatatggactctagtatcctcttctaatattcctaatgttttaattccgaaattcaactatctctaaattgtatttctatatggattctagtctcctcttctaatattccttattnttaatttcgaatttcagttatttctaaatcgtatttctatatggactctgctctttctctttcttcgataatgtgagaattctaggccataaacgaacgtggagctccttttctatcctttaataaatatagattaactgatcaagatctaagttaaatgagagagccattgggaaataataatatactaatttttttttaccgatctgg

SEQ ID NO: 19322 - DNA, 392 bp, Oryza sativa
  unsure (1)..(392): unsure at all n locations
tacttggtaattagtaacactaatatgcctgtgctatctctattgttatatagtaatgcgaattagacaatcaaatgcttaaagatacatattntagcaaactaatgtcaaatgtcttaaaacctgaagaaacaaacaatgatatatatcattgtaatatatttggcccaaaaaatattctcatattcctgtaaattctcgtacatgtcatataaatttcaatttaccatacctatgctaaacttttcacacaaaatagttaatcagcccttaatgatacagtactattgacatgatcatacatctaaatgttatctgctcgtctcttccaggatatctttctgaacttgtacggatatgacccgcgttccttacatattanagacactaac

SEQ ID NO: 19323 - DNA, 110 bp, Oryza sativa
tggacctcctacgactggtgagagtgcccttgagccttgcgcggctatatcttacctatccgttaaggccctcaatagtgaacgtctgtctgactagatgctctgctact

SEQ ID NO: 19324 - DNA, 124 bp, Oryza sativa
gccagataggatacacttgccggtccctacttcttggcgctggctccatgtgatagaagacctgccagcgggaactcttgtcatcaccaagtgaacacactgaccgcttatgaccgacggcatg

SEQ ID NO: 19325 - DNA, 352 bp, Oryza sativa
gggtggattctgagcattgctctgttctctgcgatcagatcatgggcgactgcatgaccgatcgcatgtgggaggtgacgacgagccactccaataagtgcgttcacggcgacaaggtgtacatgtacatgacgcaacgcggcaccgtttacgtcgactccatcttcgagctcgtgaaggtcgagctcgccggcgtggaagaccaactgcaccagctgaacatgggtcataacgcgttcgtgcatcatctgctgctggcggcgtacgagctgcgaaactacgctcaagaggccgacgccatggctgttcactgcaacgacgttcctctgctgcagagagagtatcggtacta

SEQ ID NO: 19326 - DNA, 251 bp, Oryza sativa
  unsure (1)..(251): unsure at all n locations
tctaattctccaaggctactctaagtctaattctccaaagaagaatgaacccataactgtgactagaaaatcacattccgcganccagactactcgttatatattactgccttaactacattacacacgtggttcaggcggnaattctgaataaaaaatcattactaatgcacggctgctgagagaagacaacatactagtgcgttcttttgagctacgaagacataatactccctccgtatttaacgtat

SEQ ID NO: 19327 - DNA, 328 bp, Oryza sativa
  unsure (1)..(328): unsure at all n locations
actaagctggtgctcagaaaagcccaaagacaaacagttttatatttcccatattgcaattctttcaaagttccttgagaaggggacagtcttgttgcgatatgagggagatgtggatcttgaccacggagaccgtaccctacccgaccagagggggcacgctcngcaacggagctcccggacagactacaattacacgcagcttgcttttgattggatagtgtcataacgactgcttgttacttggtttggttaggcaggacttgtctataatggatgatcgcgatatactgatgaaaagactgaagctatttgatgagctttacga

SEQ ID NO: 19328 - DNA, 249 bp, Oryza sativa
  unsure (1)..(249): unsure at all n locations
agctatgaacaagcagagcaacccaactgatgatgaatgaatgaatataagttacactactacgaacataggtttcgatggtgacaaaatctgagtgtgcaggcggccgatccaccaacctctaacaaagtaactaccagttgcacaaccgtctatgaaaaatagattttcagaagcgagtactctaacgagaccgcttgtgaattgattntgaaatgcgatactctaaacagatatgtccatgctaat

SEQ ID NO: 19329 - DNA, 484 bp, Oryza sativa
  unsure (1)..(484): unsure at all n locations
gcttattagaanacaaagtgtcgtagactatcatgatatatggtctggccactggtgtggatatcatgatatgcaacttatttatgactactccacggcagcatatatagcctngcaggggattcanagtgcgaattcaagttccttatgcttgcatgatgcagttgtttacgaaacgatagtgacaatatcagctttcttgttgcacaagtaggatcatgcttcggtgcaacaatacacagcaccgttcgcttcgtcgttgccagcaactggaacgggaaaaatgattgtatacattatctacagcataccgatgattcttgtcctatatgttgaataatggtaatttggtttcatgttcctatttctagcttacaagtgtttatgttgctgctcacggatgaagacattccagcatacagtagtcagtacatcagtcctctgcanatatgcatttattatatttcagaaaactatgtctatc

SEQ ID NO: 19330 - DNA, 536 bp, Oryza sativa
  unsure (1)..(536): unsure at all n locations
ttaagtcacctgcagctgcagcttcagctcaccctataccggcagagcagatttcttgtcgcaacttctacactgcattgaaaaaattagtttagtttgccacatgttggtagttgaataaaaaaacttccgttggttcatcaggatttacctgttcagtcattttcaccaactcctctgccagagaattccgaatagattctaatgaggcctgtaatatagagtagcattagttcagtgatgggcatgtgcatgtcgtgctaacaccagcaagctcaactaatagcaaatacgacgaatattaacaagaacacatgcaagggtacttaaataagagatatccaaaatgagaattagtactttcaggatatctccanaggacataccaaacgcgatgtgtaagaagctagctctccatctttctgacggagtgctgattcanaagcacttggagtcatgctccgaagataatacgacatattactntcagcagacattctcctctctaatgaagcgtngtctgacacatctaatga

SEQ ID NO: 19331 - DNA, 311 bp, Oryza sativa
  unsure (1)..(311): unsure at all n locations
tncgccaagatatactcctgctaagaccaaacaagattctgatcctatgggaacaggttttgatcgacaagaaacatggcttactccaagcaacggacgaggcggtctgtgtggccgtggacgatgtattctatgcggttcatgggatgcagatcccggagtcgtggtggcaaggtcccaataggtattatcagctcccccaagatcgagttcangggttacagtgccagcgccgtgtcatctgagaaagcttctcgaaagtatgctcgtcgagggcgtaatcgtggacgtgggcgtggacttataactgt

SEQ ID NO: 19332 - DNA, 488 bp, Oryza sativa
agctagatcatactagtatcatgtatctatcttatgtaacagatgggcatttgtgcaatatagtgatgtttttattctttgtactactcttggttgttgaggaacaagatgaacctagtgcagttcatatctggaaggatcctaccagctaactcgatcgcattcaccagatatgacatgcttgagagtcactactaaaagctctatcatggtcaggtagttatatttcttaatctattccactcctaataatccactctctagtgtctagtatccttactaatgactctgactggagacgactatacattggttagatgtgattgggaatatatgctgttatacataacgataaaatcataccagattggtttgacaaataaactcacggcaccacccgaactatctcaagatctataaattacaccaccagatagactaacatgtgaaatctaactactacttactgacgatggctttcaggcaca

SEQ ID NO: 19333 - DNA, 402 bp, Oryza sativa
  unsure (1)..(402): unsure at all n locations
aagccctagacccttactcaacattcaatgtttgtttttaccacaaacggttcaggatgttgtaatattcaaattaaagtccataatcaagctaggtgcacttaaacagaagataaactaaaaattgcttacttcaataaagctaccatctgacaataatgcacgaccagactcacggcctcttctatacggagatatgaaacttgcaatgcatactangcctgcatctgcgaatagctttgctaacctacctgctcagaatagttggatataaatgtcaagcacagatgtgcataaatgtataaaaccacaaaagattatatattttacctaatcagaacttattcattgcccatgaaagttctggtcagggatactaccaactctccgctatttcagcac

SEQ ID NO: 19334 - DNA, 317 bp, Oryza sativa
  unsure (1)..(317): unsure at all n locations
cttccaatgcaatantctccgccgtgaggtcggattattttctcttggttgacggacttgaaacgccaggatatgtgggatacattggcattggctcatgagggatcttccggcggtcgtgacgccaacattgaattattggaaggaaggcctggaagacttgtgatggatgataacgagacctcacaacagatgtctgatacgatgatgatcgcttgccaacagaataaatgacttgggagtgcggacatgaccaaccactttttggccaagagatactctgtgatttggccaagaaatccactcttgtataatga

SEQ ID NO: 19335 - DNA, 386 bp, Oryza sativa
ttataaagggaaaagtggataaaacactctttggtcttaagcatggtgaagatcaactttttgttcagatttatgtggatgatatcatctttggttgttcatctcacccttaggttgaggagtttgctgagactatgcgcatggaatatgagaagagcatgatgggcgaattgacttactttttggtgcttctaatcaagcaaacaaagcaaggctcatttgtgcatcatacgacatacaccaacgatcttctactgtcgttcaagatagaggattgcaagtctatgtctacacccattggatctactcctgtgttggatcctggatgaagatggtgaagttgtggatcaacaggagtataggagtatgattggatcatactctat

SEQ ID NO: 19336 - DNA, 488 bp, Oryza sativa
  unsure (1)..(488): unsure at all n locations
agctngtcaacagccacattcctgagctcgccccatagtgttgtcatcacttgcatcatatgttgctgccgctagcctcatgctcactttcgcatgcacatgcgcgggcatattaattatgtttcatagaatttattatgttaagatgtactggtgattntactttattatttgttaaaaattaaattatatgatcttcatcgaanaatgtttggtattgctgatccttcactgggtgtatatatntacaaaaaccacaaaggtatttatatagataactgtgcgggcatcttgttaatatattacanaattatacanaccatgttttttttctcttgaatatgagtgtttgatattntaaaaacaaaattgttgaacatatttgtcactanaatatttgaatcaaattaaattatattctatatgacggcttattccagcatcgtaccattatatcttttcctcacgcgtgcattattactagtttc

SEQ ID NO: 19337 - DNA, 300 bp, Oryza sativa
acaatgtgcatgcaaaaagtaatatttatattacgactttatgtattgggagaggagaaaatgagagagtacaacctttagcttgagactgcaccataagaaataaaatgctgttgtatgtttgtaatgtacattgtggtctttgaattctacatgtttaaaggtaaaaatatgttttcctcagtgggttccacctttattaaggttaaaaaaaaatcattagcattgtagcatatgctattataaaaaatatatatgggttcaaccttatagcctctacgaacttaaacattgagaatg

SEQ ID NO: 19338 - DNA, 484 bp, Oryza sativa
  unsure (1)..(484): unsure at all n locations
gcttctatgcattctctgcgacttgagtctgaggtatttttcaggntgaggactacaggaggctaaagagatatgggatactntgcaattggctcatgatggatcacccgccgttcgtgaggccaagactgaattattggaatgaaggctcggaagatttgtgatggatgtcaatgagacaccacaagacatgtatgataagatgatgaatcttgtcaacaatattatatgacttgggagtgaggacatgacaaatcactctgtggtcaagagacttctgcgtgcatttggtccaagatatcccactctttcttatcaatgattccggaaaggaaacacttcaagagacttaccccaagtgacattcttggaagactgtgctcatgagatgcagacgaggaagctcggaagcgagacaatgggaatatgccgcttgattaaaatcaaaagtgctttgaggcaaacaagaaaacagtccgttgtg

SEQ ID NO: 19339 - DNA, 220 bp, Oryza sativa
aattaaagccaacataactcactaaagcatagtcgacctgccttgcagctcacgagagtatatgcatcttcacttggagagggtatatatattgagactctcctctagtgattaatgggttgttccttccaagatctaattcactgtatctccgatcacatagactgtgttaccaccataagataactcacatgggtctcaacccatttgcttcgatgca

SEQ ID NO: 19340 - DNA, 409 bp, Oryza sativa
  unsure (1)..(409): unsure at all n locations
agcttaaacatnctggaattctattcgggaatttcttggtcgtacacgntaggatcagagccaggtagaccgcatgacacactatctggaaacctaagagacctctgatcacactttcatctgcatatgcctttatcacttggatgtgtgtcgggaaaatttggggattcgcctctatggtttgcggaaaacatcttattcgttcattcagatcggatctttaagattagctcagtctacggctttagaaaacatatatttggagnttattccacagccagtctggaaattatcaggggatatgcactaaggcgtgtctaggttccatggggcagactcaagcgtatcattattactatgcatctactttatgcattaattcatgggtcagtcatgcgcataagtatct

SEQ ID NO: 19341 - DNA, 463 bp, Oryza sativa
  unsure (1)..(463): unsure at all n locations
actaagcttgccttgcaccaaccgacccactcctactatatctttgactgaaaacagtggtatgcgaaggaacaaaactgggcacattaatttgcaattggaaataccatgatgttgttgaatgtgatgttgtgcccatgcaagcatgtaatattctgctaggtagaccatggcaatttgatagggattctatgcatcatggtaagtgcaaccagtactctnttctgtaccatgataagaaaattgtgttgcatcccatgtctcctgaagatatattgcgtgatgatgttgctaaggctgccaaatccatatgtgagagtgatataaaagccccatctgatggccagaaacctgagacaatcatatttgatacccaaatgcttacttactacttaatctgatatttatgagttgattgatcaccttagatgcctatgctttgtatgcaagatgcttgatttac

SEQ ID NO: 19342 - DNA, 284 bp, Oryza sativa
tcactaagaaatgctctctatgctctacctattatcgcttgggttccttggatgaaccggcggaagaattaatcacacacgtttccttggattctatacccttataatactctgtaggggaagtgctacatcagtatatgcgggcacttgccgatttcttctgtgagcgggagaaaacctcactcacatgaaagcctatggatgaaaggacccacaacttaggtgtaactgtgcggaaaccaccttaactgccacacaccgctaaaggacccacctgtcagtga

SEQ ID NO: 19343 - DNA, 421 bp, Oryza sativa
  unsure (1)..(421): unsure at all n locations
agcttcacatttggtcagcatggaacgtggatatggtactggagttatggtacactgctccttggttgtcatattattccgcgcaaaagttaagtggacaacatatatcagagggactacaaagaattggaaagattttatcatagcctcaagattaattgttcacttccgcgctaanatggaattggattcaaaacttaagaagcgtggatccctcanagttgccataattntattctgtgcatttttttagagacatttcttcttccctttttttcttgaaaacacttttttcanaagtattattgttcaccagaatttcggtaagcaaaaactcatacggngcttaagataacatacacgatcataacagaagagaagtatacttactgtgcaccttgaaagggtgatgtgtacttct

SEQ ID NO: 19344 - DNA, 434 bp, Oryza sativa
  unsure (1)..(434): unsure at all n locations
tgtgaagaaacagagcacttacaaactgtgggctgatgaggaggacaacgatgctgaaaccatcacatcgacgagtcgacagagctccgcgagtacatcctctaagagtagaaagcattttatgaggaaagctgaagaccacgaccatgggaatgatgatgatgtaagtgtaaggcaggcgcagtatcatgctttggttatgcccctttcacatattgtgaccctgtgtctcaactcttgtaatgttttatgaaacaaaaataaaacaggaatctgggaggaatgtgaaaagacgaacagaagaggtggatgatgaagatgatggtaatgatactgatgtaagttcttccaggaaccacattntccttttcatgaaatattggaagtacggggtgtcannataagacgtgctgaatgtgattcaatgtntgatg

SEQ ID NO: 19345 - DNA, 336 bp, Oryza sativa
  unsure (1)..(336): unsure at all n locations
agcttaantagctggtcagatgctatacaattaatgtctttatcattgctgaacagaacattagttacagtgagccaatggcgggtggctattatacatgtactccctccatttcaaaatatttgacaccgttgactttttagtacgtgtttgaccattcgtattatttaaaaaatttaagtaattatttattcttttcatatcattcgattcattgttaaatatacttttatgtacacatatatttcatgtacacatatagtattacatactttaaaacaattttaataagacgaacgatcaaatatgtgcctaaaaggcaacggtggctaacat

SEQ ID NO: 19346 - DNA, 398 bp, Oryza sativa
  unsure (1)..(398): unsure at all n locations
tgattcaaatacatgcatatattaataataaggctggggaaaaaaaaaggactgatagatattgtggaaagttcttcgcgttctacactacgaggcagttcaaggcgtcgactatcacatctattggtctccctcatacagaccatgcttctgcatgctgcacaaccatgtgtcagttatttatttttaaaaggaaaaagtcaagtaccccctaaattttatatagaaatccgtgtggagataatggataccccatacccacatggcatgtatatccgactagatatggnggtaccatatatggatacaatatctttagtaaagaactcggctggtttcctaacttgtgatgaaatatccagggatctagncggtacgatagcattttattacttgct

SEQ ID NO: 19347 - DNA, 370 bp, Oryza sativa
  unsure (1)..(370): unsure at all n locations
agctttcttgacttcagctggagcctcaaccttaaccgtttgtctaatcgctggcaatggaaccacccncttaccgatggacactggttcgttccgaggctggagttgtacatccttaatctgaacagggatcgcaggtgacagcgcttccttcggtggctgggattgtacatcctttatctgaacagggatcacaggtgaaagggatcccttaagaagctggntttgtgcatccttcacctgaacaggcatcacaggtgaccgggtttcctttatttgntggtgttgcacatcctttatctgaacaggcatcatangtttcggcccttggactgctgaaggagtaaaaagaggaggagctggcctgatg

SEQ ID NO: 19348 - DNA, 335 bp, Oryza sativa
ttgccttcaactaacatcacatgctcctatagtgaaaacataacctgtgagcgatcttcgcctatccaaatctgcagcaagatctgaatccacattaccaaccaaaccatctctagatctcccacactgcaaacaagcactatattgaccacgtacgtatctgaaaatccattgaacagctttccaatgctctctgcccaggatagccatgtatctactgacaacactcaatgcatgtgataagtcacgatgagaacataccatggcatacataattgaaccaactgcacttgaatatagaactctaaacatgtactccatataataatctgact

SEQ ID NO: 19349 - DNA, 213 bp, Oryza sativa
  unsure (1)..(213): unsure at all n locations
tgcaagcttggaggtaaatacatagagtgacatngagatatctgttatattattaaagcaatcttgttatgttgcgcgattccatagtctatatgatgatactagtgaccatctataaagagtgatcatganaaacattatgtgattatcattcattttattgcgattggattcatcatcaaatggtctttaagcatgacactaatatttcat

SEQ ID NO: 19350 - DNA, 118 bp, Oryza sativa
ctcttaatctccatgttttttgcatactacatttgaactatgtttcgcacacttctttttcttcaaaatttagtctgaagtttatgacacagaaaatgtgtgtggcgaagaaagaata

SEQ ID NO: 19351 - DNA, 300 bp, Oryza sativa
agacagcacgacagaggtaaattggttcccagggcccaatcccttgcattcaaagagaatatttaatggacagagtgtaagaacctattgctgttggattctaattattgtattggatggatatcccactcctctcatgatatctaagctcgttggaaaccactttatcaacatctctgcctgcacatggaatatctgagattcggatctatcgagtttttgtgaagaacaaatatgtatctacaatgagttatgttgataataccgaatgatcatagatctcgttgatgcttgcgcctg

SEQ ID NO: 19352 - DNA, 490 bp, Oryza sativa
  unsure (1)..(490): unsure at all n locations
agctngtcccggttgttacgagatcaagaaattgcttatcatgangaccatcggcgatgatcttgcgtcggttgatagtccgattgaggactacttctacaccgaaccatcgaatgagtacatccagagctgcgacattgttgcgctcaacaagatctgaaagttattccataagtatcagagcccgtcgttttatttgctagcgctgctctcgttattatactgaagcaatcggatgaccagctgccttattttaaggaatcgatcctatattattctatagatgatgatgcatgccatatatattattctgtaaatgataatgtgctgatggttcatatctagatacctcatttgctgcacattactctcttaattcagtaggcttagatacctgacttgctgcatatactctcttattcacaagtggtcatatctagattctcatttgagcacatcaattgattcatatggcatgtaatttatctgc

SEQ ID NO: 19353 - DNA, 285 bp, Oryza sativa
  unsure (1)..(285): unsure at all n locations
agcctaagccanacagataactagataacgaacatatatgtctcctacttagccctaactcacggcctctatcttgcttatgagataaaccttcactgaaactaacgcagataagttcctactactcgcaagaatatattgcacgaagaacaattaagaaacatgatatggtagattataataaacagtaggaactatccccagggatgtggaacaagctacagttacaattcagcctacagctacatgctgcagtttacatctactccatatagtacatcattg

SEQ ID NO: 19354 - DNA, 392 bp, Oryza sativa
tcagttagtctatccatagaaagctgtgatagtaattctttcttatgttcgacgcgtagtatagtgaatttttatagtcaatcactgggaaatacctccgatatggttcagttctcagttctcccaatagccattatggtcgacgagaatgtccagccattacgtttgaattttcacttttcgtgtattataatttattaggaataaccagtctctgatctgtaacattcatatgcagtgcgagtattaatacagtgattttattaataacggatgacatggaatcatgaatcacctgtacaccacaaaacacacaacgcaattatggcaatgaatagaaatctataactaagtgcgatatgctccttccaggatggcatgtacttctactt

SEQ ID NO: 19355 - DNA, 229 bp, Oryza sativa
  unsure (1)..(229): unsure at all n locations
agcttcaaagcgccaaaagaagttttctgtgtcctattgtttttcatgtaatgcaagcattcataagccaccaaaatattatcagagattagacgggccacgtacaaaagcagatggctctatagagatgatatccggcagcactacctttagttgattngcaatagtcttggatatatgggcggcgcggctcggcattgtgccaggatgcggcccatgtgggagggga

SEQ ID NO: 19356 - DNA, 339 bp, Oryza sativa
  unsure (1)..(339): unsure at all n locations
ggcaatttccacccgacgttcgtactccatccaagcatgaatgaactgtatggtcggttcatgttgcgttatcggcccgccacttgaagtaactctgactgtgtcaatccattgtacgaattgacatttccttacatcctcctatgtacatccattntgggatagttaagttaatgatagtactgaggagtgatgaaaagaatagttgtaattaccacgaaatcatcgtcgacaatgtttggacacacgaaacacctttgtcctcgagttcggtgccttacggaccttatgacctgacaacggtcaccacaacgacactccggacgctcacgccacgtg

SEQ ID NO: 19357 - DNA, 116 bp, Oryza sativa
  unsure (1)..(116): unsure at all n locations
ctgcagcttatactagagacaaaaacacaccgctcctgtttctcatatcgaacaactgaggacccaggttgatcgaccgtgtctctnttatctacgtgagagaacacctgccgcag

SEQ ID NO: 19358 - DNA, 426 bp, Oryza sativa
  unsure (1)..(426): unsure at all n locations
agcttcttcgacgatatgcgtcaacaccctgtattaaccattgagtttctacttcaacaatgctggtgtggactcatgtcggcgaaattgtcttcccggtctacaccacggtaccaatctctactggtccatcaatgaccggaaactagaacaccgtgtgtacaaccctggatggctccatatcgaaggatcctcccgcagaagtggagaacggaacatcaacgacattcgagcccgagaaggatcctaatgcggctaaatcttgtccctccgacgagaatcacgagctgacaaggacaacttccgaggcaacaaggtcctggtgttctattcacaaaaccagaaaacacaccttgcaagcttgctgngttctcttgacgtacaatccngatccatgcctgcaaagagcgtggaattcaacgtact

SEQ ID NO: 19359 - DNA, 386 bp, Oryza sativa
  unsure (1)..(386): unsure at all n locations
tcatatctcctgtgttngccgctgtgccaccgcttgtcctatcgccatatgctccacgctcctccccttgtgtctntatctttgccccatctactattgtgcacttgggtcttggtcaaacagctcaacatggaatcaatcgactcaagcctagcctatcatgcaacttgtacctctcccctacaatcaggttgttaccacactgccatangcagattgccacctagctgccacacatttccttgccttgcagcctccaacatggctctaatccctgttgagcggtgcagatatgctaattangtgcatcacaaactgtcatacttgccagttgcttgacaaaatgattgacttcttaaactttgaaccatttgtgcatgtactct

SEQ ID NO: 19360 - DNA, 489 bp, Oryza sativa
  unsure (1)..(489): unsure at all n locations
agcttntcctgtgaatgatatcaatatgcagncctgacactatatcacttatccaatccaggatgcatgcactatgacaatgtcagctatgtctctccagaatccaaatgagcagccacgtgtgtgggttcaggacgctacttatcatcgtgttatcgggagtttgcaacaatcatgtgataaatgaatacattcttgattataaacaatgaagtggttatgttcatggatgattcatgttgaggatgcaatgaaccgatgtcatcaccttcccttcttgttaacgcaaagccttacattcatgtaataaaggagacatgcgtaataaatactagttctatgatgagtactatcggaagacgctgatatgggattatgtgtataattgttactgtcaatgagacctaggcttattcacaggactatgtctacctgagttataccaactgtgaggaaaaaatcagcattatctaaagacattgtttgact

SEQ ID NO: 19361 - DNA, 287 bp, Oryza sativa
acacatggcttaaaaagactttggcttaatacaatgggtgactcctacaaagaaagagaaccacttctgctatgaaaagctgactaccgcatatattattcacgcctataagccatccttcttgagagataaaaaacaactatatttcctgttgtattgagctcctcggaaactgaaagtgatgtataagaggaaaagcgctggaaatgggtcaaccactttttctagacgagagactcgcaggctttaactactgggtaaaacgacgctaatgtatatgttccttc

SEQ ID NO: 19362 - DNA, 410 bp, Oryza sativa
gatcttcaccgatctctttgactatttccatcgacagcattggtgcgtgctcaacttgtagtcctcttacctttatgaatgtttttctataggtcctttaacattgacattctgtatgaacattgctcaatgttctattcgaaaatctgaaaccaataccagattaagttagtctcacaggaaacccacttattatcatctatgctgcgctacttatcaacttttggcacccctactcttaaaataaaactggcctagcagtctaacctgtggcctccttgcttattagttctgtgcttgtacatagtattgatcgcttctgaatgatttgttccatggggcaatatgcggctcctttggtcatgcctaatactgatagcctttctcttctgaaaccaaatgtgacaact

SEQ ID NO: 19363 - DNA, 241 bp, Oryza sativa
  unsure (1)..(241): unsure at all n locations
ttaagcactgcagctgcagcttgcatataatngctagtaccctgtgtaatttttatatgatcttccaacattcattcgttgagtgaatgttgcatctaccaatccatttagcccaggaagctattactggtggacctgaccatgatcgtggatgtatgccattgaaagggttttgcgaatgttgaagtcttttgtataaaacacaactctccctcaaagatctatagctcacgcatatatt

SEQ ID NO: 19364 - DNA, 448 bp, Oryza sativa
  unsure (1)..(448): unsure at all n locations
attacgcacacatanaaactcagctcgcatcctctcttttatcaaacacttacagctctatatttatatgctatgaaacaagtccagaatatttaggctgtacctatgcagcgaggccagatagctctgctacatcaattgatttactttctgtatgacatgggaataagacttaagtacacatgccaagaattaccattgctgagaagagttgcaactgtactttgatctcagtatcatcatacgcacagtaatgcattcacaacttgcagatcgagggaacactgctatcggatgaatcgtatgatcaaccattcttcaacagagacagatagagattaaagcctacctgtgcggctcgatgatggcggatgagtgctccacccatcggcgtgcacgaacgcctctctgacagactctgaatctgcgacaatggacagggaacacg

SEQ ID NO: 19365 - DNA, 262 bp, Oryza sativa
cctgcatgcaatacacgaataaagttaatgagtctcatggccaattagcaactgaaatcgagagacgaaaccaaccttttgaacacataacaaaagcaatgatgtgtatcctagtgatctggacatcaacaaaggacgactgcttgctcacattaatttaccggtgagctcttactgtctgtactagtagaatctctcactttcctgctacatactccctctataccataatataaggcgtgcacatatttctagactgaac

SEQ ID NO: 19366 - DNA, 454 bp, Oryza sativa
  unsure (1)..(454): unsure at all n locations
gtcacctgcngcatgcaagctaatncacataatgacagtcatcgcacaacactatttgttttgtatgggaagagaagcctggattactgggtctatgatattaatgaatactatatgttatatatcattgtctgtgcatggaaaggaattttgatcgatcaaactaacatacttgtatcatgtcttgaatgagatcaaacggctccaggatatgtacgagcatgaggagactagcatcaccatatacaggccacagtctttgggctgcacttgccacctatcatgctactgacattgactccaatgagtacaacaagagctgtccagtgtctgccttcgtcttccgtagcccaagagtgggcaaccctgattttcagaaagcgctcacagtgcttcagatttgagattgcttcccattcgaaactactctgatgtggtgcacactggccaaact

SEQ ID NO: 19367 - DNA, 316 bp, Oryza sativa
tcagctgcgctgctaccgccatggttggtcttcaggtgctcttctgcccggccgccgtgttcctctcggcgctcgtcgtactctcctgcttcaagagcgtgccgtacctgagcaggatgagctcctccgagctcccctcctacatgtcctactttgagtcgccgatctccaagtgcgacatcttccatggggagtgggtgcccgacgagagctcgccgcagtacaccaacctgacctgctcctacatccaggagcaccagaactgcatgatgtatggccgccccgacctggagttcctcaagtggcggtggaagcc

SEQ ID NO: 19368 - DNA, 449 bp, Oryza sativa
  unsure (1)..(449): unsure at all n locations
ttatttattggagagagtaataacatcctaacataaatgactgatggtacaattccagttagctactaagacaaaatcctggccttaaaaaagtaagacagaatccatgacatgacatataagagtgatcagtagtaccaatcctctcacagattggccttcaactactagattaatgaaacagtgcncttatttgaccctaaaactattagtacattcaccgaatgtgcctttcgcttggagtctacaaatcccgaccactacccattcgctgtcgtgcagaaaattactacttgtagaactaatatgggcctntcattgatagatcatactacagttaattctgcgatatacttctccaagaaaatctctcaaaacactaaggatgctaacaatccatattagaagatttgcagaaagaacatattgacagacataaatgctatttt

SEQ ID NO: 19369 - DNA, 404 bp, Oryza sativa
  unsure (1)..(404): unsure at all n locations
ctgggtgtatggtgttactacgtaatgatataaatatgggatatagttagcaatgaagctctatgatcatgtaatgctcctccattatttctgacatgaaccatctgtaatttgaatcatgataaggaggttctgggacaaaggcctattccatgtgtctactctcttctgccctgaaactgtaaagaacgcattcaattttttcaactatcttctatgacaattgccatctgttgattccagagttgtctgccatatccaattcaattcactagttaaattcacatcatctctaacacttgctgaataactgtttgatcacctgatttctacactccaatatagagtaatataacggntagattgacaacgttgttggtacagtacgggcagagcgtaatatc

SEQ ID NO: 19370 - DNA, 249 bp, Oryza sativa
agcttaccaacaatcagagccgtggatgctctgtctatgtatattgcatacccggcattccacttatcactgtgcacatgtgccccaaggtggtgtggatcttttcaactgtcgggcggtatgtgctggcatctttctcactagctctgacaggtgggaagcggatcgccctgttgtataagatgtacacgagtgtatcaccaaccctacccatcatcttatatgctgactcctgacaagcatgatctc

SEQ ID NO: 19371 - DNA, 486 bp, Oryza sativa
  unsure (1)..(486): unsure at all n locations
tggtagtatgcaagaccaatatctctatttatgcttatgcttcttactcaatactactcgtaagtctacgattgtgtgtaactattgtatttgtatatactcgtaagcaaggtgttccaaaccgcttaggctggggttaccgcgccccggccgtaagcacagttaccgcacggtataccacggtaactgtgataaactgtacaaaattcatcanaacattaaagtatttcttaaatttatttgaatctaacgaggttaccgcggtatttacattaccgtaccccacggtaaccgcgcggttaccgacggtacagtgaaccctgctcgaaaagttntaattactagattcgctccacaggctaagtctaagtcttgtagtgactacatccatctaaagtacagaaatttagttataatttgattttaatgttatatttatgatggaagaaaatgttaagactacaatgataatcggcaatgtatatg

SEQ ID NO: 19372 - DNA, 415 bp, Oryza sativa
  unsure (1)..(415): unsure at all n locations
gctatgtgatttttattatataagtaaaacaatagggataatatttatcttgcgattcactcttttccttctatactggccaggataacatgaagaagacatcgccatgcaatttcgtgatcactttcctgcaaattatgtacgtgccataaatntccaggtatacttcagtgctaagccaagatatatacaaagaccccagagggagaaagggagtgcatagtcgtgtagtcctttttnttttgttntgtcctaatatagcaatcgctatctatctcagtaatgtgatcacttgagcaataaggtttccctgacagtaacatcaccagctataggaagataagccctccggcgtacagtaccttaatcagtgtcccaatcaggctagtaatggatcgcgacatatgaatgaaat

SEQ ID NO: 19373 - DNA, 311 bp, Oryza sativa
  unsure (1)..(311): unsure at all n locations
caagtgactgcagcatgcacttgctggggacatcgtgatgacaccgcttattgttttttcttcangngnatgcgctggcgcagggcaatattctggttggcggagcaagaacctctcctggcggtatcagtgttcaaggtaaccaactggacggtggacggatcaccaatggtgcggttattgaacgtgaattgcccaaccagattggcgatcggaatactcttaatttgcaacttaacgactaagaattcagcattgcgcagcaaatcgtttacaccatcaaccgcgtgcgtggatatggcagcgtcacc

SEQ ID NO: 19374 - DNA, 351 bp, Oryza sativa
gctttggctgcttatggagtagtacgtaatatgagttgtacagggagggagctgcggcaaagtatagcccggtgggtggattgtattgatgatgcatgcacggattgatattactgcttaatgctgctgcaccggtgggctcattgtgcaggcgtgcagctagtacgtcgtcgtaggtagagcattcattcactcaacaagcataggcttaattatgcttgctactgcagcaacaggcaacaggcaaccaaggcatgcatgccgataatacacgacggagcagagaaggttctgagaataactgtactatcaggagctcttttatctactcctacgtgaggacactgccac

SEQ ID NO: 19375 - DNA, 405 bp, Oryza sativa
  unsure (1)..(405): unsure at all n locations
acgcagagtgggcgggccccgttcggatttcacaccgggcccgcgtctttgtgtgagctcgtgtgtcctctctttttccccttgggtatcatctaatgcgtgcgtacgccaagatctcgtcattaacgcaacgcctgccattgatgccgcacgttaagacgtgcaccggnggtgaaatgaacagtgaacacggggattgaatacagtgccagtgttatgcacatctgcactctgcagaaagaggaagtccagccttcagagcaaatactggaaagggttctgcgaggataatggagcanagttcattccgtcggatnggaatggtaatactccgtcatccatgaacccaactacatgagatgtgcacacatatatatagatggactactactcttctaaaaataa

SEQ ID NO: 19376 - DNA, 448 bp, Oryza sativa
ctgcaacttatacaacagaaaattttgttttttacaaaaacatgcagaaataggccaacatatagcctataaattacatgctcatcttacatctacaattgaccttggattatagtgtttggatgagcacaggccaggtatctgttcacaaatcaagaatcacaggctaacagtataacatggaattcgaaacaactacaaatattggtactcaagagtaaataccgaacacactctatctaacatgtatcaaacataattgcaactctgagagtcaacacatcaacagctaatacgaataacgaagaatgggaagtatcacaattaacatgtcacactgtgattgcatactatttctgttttttaaagtaattcttgataaaaaacaaatttctgaatgacagaaatcattaaatgtgactactctatactaaaattgcaaaagaac

SEQ ID NO: 19377 - DNA, 238 bp, Oryza sativa
tcatcttcgagagaaacgaacaccacttctaagctctatcctctctgttcagacgtctgtctcaagagatcaagtcaactggatttaagatataatcggtgtgctgagatagtctagttgaacataacaatcgaagcgatatgggttataatatttgctctattggaaacctacctgacactttactttcgttcactgattcatgcggctctgagtctttatcactgacctattattc

SEQ ID NO: 19378 - DNA, 260 bp, Oryza sativa
  unsure (1)..(260): unsure at all n locations
atgcgcacactgctntaacagatgtgcttaagtccctataagacacatggtttcaccacacctggaaatatatggcatatgcggtggacaatccgagtaaataaactcataaaggatttaccaaccgcctataaaatgaccacaatatataatcaggctaagccataatataggtcaataaaaatgcacacttacgtggcgaaaagcaatgatatggatccaatcactgctaataacccaaacacaccttgactatatat

SEQ ID NO: 19379 - DNA, 279 bp, Oryza sativa
ttagcgataatggaatccatttcactacggacagtcttctttcaatagtctgcatcacgagatgcatattgcttttgaaatagacttaagagtgtcattcaccacgtacacagtgaaatcatcaccaaaagacttatcctgcctttgcctttacttcatcgaggaggttactgacacctcctcaaagaaagttcatgtgatgctcagttgtgtcgtgggagattgaatggaatattcagagggtgttcgaacctattgtatcttataggaaaagctcta

SEQ ID NO: 19380 - DNA, 453 bp, Oryza sativa
  unsure (1)..(453): unsure at all n locations
agcttattacttactctcggaatgacaagancaatgacttctttaagctggacagggtattacgggcttagccaaagtggtagtatcaacgctctgcagatgtagaattgcatacacacctttagcatatctgcgatctcatctctagttgtaacaaggccaataagttgttcaccaacattacgaggaatagcatcagttattacctataaaagaataaatcgatgtattttacgacagttaaagcataaccataacgcaattttaaccacaagatattaggataataccttatgcaatatcgtggttgatctgatagcttcttttccacctttgatgagaagacattaccacttcgaatcgcaaagatgcatctatcacgatgacacnatatagctactataatatatgtatctgaaaagaatggacacatgcatagcacacaaatcctga

SEQ ID NO: 19381 - DNA, 230 bp, Oryza sativa
acttccacaccttctcatggacccgacttacatgaggggccgtcacaactctaccttaattattctggggggtgggtttcgcaaaccccatacatatgcagaagataaatgctatctccactccgaccaagacaaaacttctacctacagcttattgggatcttttagtttcaataacacttcaagagaagcacggtcaggaacaacgaatctctttatgataaacagat

SEQ ID NO: 19382 - DNA, 243 bp, Oryza sativa
  unsure (1)..(243): unsure at all n locations
caattacactgaggggctatacacgtacgcagaataggaataaccatactcaccaggtctctctacctaccatcctgcgaatctagcatcgaacaatggatatacacagggctagcgtccgtgatactgacctgcagacagaggaatatgccagatgctgagcacagcatgcacattgtctcacgctggatggctgctgaactcactggcttagctcatgcagatgcagnggatgacacatgc

SEQ ID NO: 19383 - DNA, 358 bp, Oryza sativa
tattaggaccttaaaactcagcttaaaagaatgaaagctccacattgtcgagtcctactattgctaccacccacagaagttgtttaagtataactatccggcgctcaaggcaggtacaataacataggttaagccacctataagcatattttaatgagataaatgaacagatatgaaaacagcgggctacatatctgtagccagatgcagcacggactctaagacgtaatgtgtgtatgacaggcgaaaccatgtattaataatatacttgctgccgtttataatgtaagtcattctagtatcggccacatttatatagatgttatgtgtgtctagattcattaacatccatattaat

SEQ ID NO: 19384 - DNA, 523 bp, Oryza sativa
  unsure (1)..(523): unsure at all n locations
agcttctacttcaagcctcgcatgcgtgcagcatgataattaatgcctcctgctagctagcccgagggggcaccaagaccctctgtcaaaatccctctctaagagatctagtgccatcgcgaaatctctctcttctaaacccaaatcagagtgttgatcattcaaaacggcgacgagccaaccccatacccatcctccttactccataactctcccctattggttccgccactagaactatgacgcattcacgatgggtgatggagctctaggcaatatgactgggttgcgggcgaagcgtggcttgaggcaacgtgagcggatgcggagcaccagacgacgtctatctctctttctttgtccacagcatgctcgatgagctctccacanacgatacagagctaggtgagcttcgccttgactcgagctaggctatggtcaagtgaggttgtagtgacctcaatntcttcctcctcttactatatccctgnctcatcctgagcttgagatgtatcgactactc

SEQ ID NO: 19385 - DNA, 301 bp, Oryza sativa
  unsure (1)..(301): unsure at all n locations
ttaaagatgtagctgtgtgtgatgaagctcagcaagaaataatggagtttgtgcatctccttaagaatcccacgaagtatgaagagttatgagctaagataccaaaaggtgccttgcttgtgggtcctcctggaacaggcaagactctgcttgccaaagctacagcaagagagtctggtgtgcccttcctgtctatttctggatcagaattcatggaaatgtntgttggggttggaccatccanngtacggaacttattccaagaagctccgcaatgtgctcccagtatatatttattgat

SEQ ID NO: 19386 - DNA, 430 bp, Oryza sativa
  unsure (1)..(430): unsure at all n locations
tgcaaatcatatantttcatggatacattntcacgctaatctaaaccataatactgctccatcttcaagagccagagcatcttctcagccttcaactgaagaagagtgaagtaacaaatttacaatggcaactacatcattccatactacttgctgcattatgatcgtttttaggtaacttcttaagaacctactatttcagtgctatcagaaagaatgtttaaacattttcattggacacaatgtatggatattacttgtttgcattaatgcgaagtactggtgctaacagtcttcttggtctgatctcatggtaatccaatctcgggatattgttntatgaattttctacataaagctgtattattaattcgtagtgtgtaagtatcggtgatatgggcgtcgaggtatcatgtacacttagagggag

SEQ ID NO: 19387 - DNA, 497 bp, Oryza sativa
  unsure (1)..(497): unsure at all n locations
ctctattaaccttgctctaatactgcaacccttcgttgtttctgcgagtnacaaaagcagggactaatgggtttgacgtaccacggcatgatggatcaagctgtctgaatatggggattgggataaccaaactgcgtctgactggttttgagaagctggataaaactgctttcacaggaaaaatgtgtatacataactgcacatgctggagcatgatcaagctaacagagaacaacatgctatacatggacattggacacgctctattccaagaaacgagagaaaattacttccatacgcctgaaattgtagccgattgcttctatgccgctgaattttcttcactcccttgatacctctgaattctgattggatccttcctacccttaccgcaatgacctgtaataagatagaanagcaatttacccttcatactgagaatatgtgaatctgaactatttgtcgtagaagcaattgtgtggatatatattatagat

SEQ ID NO: 19388 - DNA, 487 bp, Oryza sativa
  unsure (1)..(487): unsure at all n locations
agcttctgtatatagaatacagatgaggatgaaatattctacttttgtgaccaagatacccttgtacaaattgttntttgccagataggataccatgaattcaagtcggatttccgacacccattctgtattttgagtagtatttcatatgtctatttctttttacattggacatgaaactgacttggattccaacacgtgtgtctgcatctaaggaaaactgntaatcaacatacactgtaccatattgatgtaccttcaaatgcttgcccgtcacctaaagaaaacatgaaacgtgatttcttnatgctctcttcccttgatatacgcaatgatattatgtatatccagcaaatacttgaacgcaatgtcaacttgnctctccatgctctatgacacttgaaatgtcactcacacctccttgacaaaccaagaggcaatgcaacactgagactaagatcatgacactactaacactgtgcacaag

SEQ ID NO: 19389 - DNA, 454 bp, Oryza sativa
ccggatcttaagtcaccgcggctgcagcttactcctctatagcattgaacaatcatctttattttcggccaatgaaactccactctcctaagcaaccaatttatcctacggccgattgatgaattccacgaatcccttcatctactactctcctagcaactttagattgatcattatctaagtaatactgcatctatttttcggcgatataatatttgaacacttgccaccgaatctttcgatcaaccttaagtgtaggatctttcaaatatctaatcaaaggaattccccaagctatttctaactcatgggcacaaatgtccgaatcacaattaattcggccttttaatcaattgtaacgtgcctcccagctctctgcccgagatcggtcagaccggccgtgcaatgccggtcagaccgcccgggtctacccggcagaccggtcatgcatagt

SEQ ID NO: 19390 - DNA, 456 bp, Oryza sativa
  unsure (1)..(456): unsure at all n locations
ttngcacaagaccaaccattcacatgtagcagccttacgaagttcatcaanaatcttgatttgaccatatttggccaaaacttgcatatgatgggttgaacacattgagccaaaattccttgtgaataatggcatgaattagtatctctaaccaatctaaggctttccaaatgtcaaacttcataaaaatcttatttggatgtgatttgacactttggttgagatttattgacttgaatggcctacaaaactctctttgacatttctcttgatagaaaaatcttttctgagaaattctctttggaaaagtttctattaagtgaaaagatcatttctgcatagtttcgcatcattccgatttataatggatagaattatgacttttctcaccttgctcaagttgctgagattttcagaaaaatcatgngttntgactgatttgcgaatttatatctc

SEQ ID NO: 19391 - DNA, 441 bp, Oryza sativa
  unsure (1)..(441): unsure at all n locations
tagcttcttgttgataaatcattttcatcgacgatgagactatctgctttatcatcgncatcgctatattcacttaactccgagcggattttctcgatctgagattgaatgtcagaaaactgcttgagcctctcctctttcttgccttttaagttctcaagtactggaacgactgtccgaagttgttctttgagtggaacaacactcttggctttctgcacgagtgtttgagaaattagtgaatacagcaacccagacatagtcacagtaaaaaaaggtgcagttcatctatcaagcagcaatttgtgtgaactggttcacagtanaatgaacagtgtattatcaattgtgaatcacacagttgtatagaaggtacttgtgctcagactttaccatcgttcgtatctttgtagaataagtatactgacatctatacaatct

SEQ ID NO: 19392 - DNA, 507 bp, Oryza sativa
  unsure (1)..(507): unsure at all n locations
ggatccttaagtcacctgcggcatgcaagctnggtcgtatgctatatggaagtggccagccatattatgcatataacatgacatcgcgttaacttctttttcanaacaaaggctgataatattaaatagaagaaacaattataaccttacatgcaaacaagacattaagcatgtcaacacacaacataggcgattcacattctataatgctacaagagattcgagcaaacgagcgcaactacaacgctgactaaattatatatacatctaacgggagaaaggctttaacaatgaatattgaatgattataganaattgatttatactgngtaagcatccaatgcttggatcctcacatgcagacctcggagaagttcatgctataattaccttggacaacttccaatacacaaagtgaaaattgctaaactccttgcanaagagagcactgagaggttgacaccaccngcaaccctgtcttatctttgctcctgcgcgacaggtccg

SEQ ID NO: 19393 - DNA, 414 bp, Oryza sativa
  unsure (1)..(414): unsure at all n locations
tgaatagccatttgcttaacaaacatctattcatgatatcaagaattaggacacccagtccaccttgatcttttggccggcatatataatcctattttggtaaccgatatttctttttctagctatcactgctctagaaaaagctcgatcggtagtaatccaatctttgaagtacacctcgaggtatttaaanaaggataacatgaacatgggaagactcgatagaaccgagttaagaagaaccaatctcccaccataggagctgttntttgcccttcatgtgctaagttntctttgaaacctatcctncacaaatttccaatcagaattnttgagttttcgatcgtatatggcgattcctaagtatttgaatggaaaggaaccagaattacaaccaaacagttgtctatattg

SEQ ID NO: 19394 - DNA, 351 bp, Oryza sativa
  unsure (1)..(351): unsure at all n locations
atcttaagngactgcagctgcaactccacgactttgtgagaactttttttccgttttgtctatcggtaagaacatgcgtgatcttgctctttcacataagtgacatcttgtacggcatgccgttctgctacctcaatctaactcacatcgacagaaaaaggagggattattacttcgtaagacaaatttctaccctggtggcatatctcacttcaccatacagggtcatataatatcctaagacttctgtgaccgcctgaaattaagcctctacacctaatactacagtgtggcaattagtttttgaacagtcccatgaagatgtccgggaaatcttcttggcccctatta

SEQ ID NO: 19395 - DNA, 386 bp, Oryza sativa
  unsure (1)..(386): unsure at all n locations
tgcagaaccctcattgacgggggcagcgcactcaatattctcttcgccaagaccttggatgatatgcagatttctcgctccgagctaaaaccaagcaatgcgccttttcacggagtaattccaggattatccgcaactccactcggccagatcacactcccggtcacctttggcactcgggaaaactttcgcacagagaatatcagcttcgaagtcgccgatttcgagacagcttaccatgccatactcggacggncggcgttagccaagttcatggccgtcccgcactacacttacacgattcgcacaagacaggaaggacgcgatcaatgaggaattaaccaagctggtagcagcaggcttcatcatagaagtccttcatcccg

SEQ ID NO: 19396 - DNA, 420 bp, Oryza sativa
  unsure (1)..(420): unsure at all n locations
gctaatgattntattctcctattgcttcctgagaaactatgtgagcaccgcaacatttataccgtgcacccttcttcaggtagggcttcanatgccacatccattggataagacaacttgtcccacaccttaagagacacgccagcgtataaggcccatccccgtataacctactgcacacctgtctctgccttcattgcaattcatccgttggtgcatgggtctatcatccgcatgattcgccgctgtaaactctatgtggacgtcgcgatttgttgttgatcttgcatgggcccatacctgcactcacgtgtgtggtcgcgtggagcccctttgtgctttcctaaattggaaaaggcatggacattaaagctggttgtgatgcttgtctattaccaattaatacataagtaagtctat

SEQ ID NO: 19397 - DNA, 490 bp, Oryza sativa
  unsure (1)..(490): unsure at all n locations
actcatatactaagcttatatagctgccccgctgactntntaatatagtcatggtgctgnttgggtttttaagcaattgattggatacaatatcgttgcttttcgccacgtaagtgtgcanttttattgaccaatattatggcttaggctgattatatattgtggtcattttctaggcggttggtaaatcctttatgagtttatttactcggattttacaccacatatgccatatatttccaggtgtggtgaaaccatgtgtcttctagggacttaagcacatctgttaaagcagtgtgcgcatggcgtatgcccaatactttggaaatttctttattcacaatatacaagcttctttatagctatnntgctatatcactcatcatatttttacaaagcagtggtatatcactcggatcatgttatntggaggattcacaccgcatatgctatatattgatatcaaagtcacttggtgattacgattatc

SEQ ID NO: 19398 - DNA, 405 bp, Oryza sativa
atacaaatttaacctcatatacaaaatggtttctgataatataagataaatagagttctagttggacaccacaatgtctactcgaaatgtattcatacttgactctctaattctccttatacaagaggacactcgagggtaaaaatacaagactctctaagaggagatgggccacaacaacataggttaaggcaaactaacacaaatcagcacaagccaagccaagcttatagcgccacagaagccatggcaataaaagacatctccaatctctccaagttcatatttgagtaagtcgaccatcactaaccatcgacgggccaccgctaagccaacaacggagctacaaccgggatcacccataaccctatcctaacaaccaacacttactacactctatccaca

SEQ ID NO: 19399 - DNA, 377 bp, Oryza sativa
tatctcttacgctccaccggctcgccttgaccgccgccgactggtgtttccgcctgcacggctggcctattatgccgccgttgttgggcgtctacgtcttcaccgaccggcttgccttcgtcgccgccgactggtgtttccgcctgcacggctggcctattatgccgccgttgttgggcgtctacgtcttcaccgaccggcttgcattcgccgccgccgactggtgtttccgcctgcacggctggcctttatgccgccgttgttgggcgtctacgtcttcaccgaccggcttgccttcgccgctgccgactggtgtttccgcctgcacggctggcctttatgccaccgttgttgggcgtctacgtcttcaccgaccg

SEQ ID NO: 19400 - DNA, 417 bp, Oryza sativa
  unsure (1)..(417): unsure at all n locations
tagctntttgaacgatcgtcgatctggtgaataatctgtattaatattgcgctgctatttgactacattttatacatacttccactatgcttatttattttatatggcacatgaagcatgttattaaatttgacaaggaacatgtattttatctttattgtgaaccaggaattattatattcaaccccggtaactcttgttgtatttgaatggccacatatttctttgtgttgtcaagttaattaattcattcagacacaagcccaacgcttttctccagtaacacgtgggaaaaaaacatacgcacgtatggagatgaaactcaagtgttacatgatcgacataaacagagtacgagtaaagaataaagacactctaattaatacatatagatactagtctgatggagatgacatg

SEQ ID NO: 19401 - DNA, 262 bp, Oryza sativa
  unsure (1)..(262): unsure at all n locations
ccttgaagggctcattttattcatatgtaaccggaaaatacattcttaccctcgatttgctatatatgtacaaacctctctnggnggtattttaagtctttatacattaagttatacaacactctaaatatggggttattccccaacatcccttgttgaagtttctctagtggcttatataattctttgcttacttacacangaatgagcgataacatacacatcatggatcggcttaactcatcagcctaatctgatacat

SEQ ID NO: 19402 - DNA, 330 bp, Oryza sativa
  unsure (1)..(330): unsure at all n locations
ggatcttaagcgactgngctgcacttccagagcttcaggagcacagggtctttgcatgaagcccttcaagaagaagctgagaaagaaaaacttattgaagaggcagaggccaaattgagcgccgaggcactccgcaagaaagaggaaanaaaaagggctcgtcagatgaagaagtccatgcccaaagttaaaatgctccgttcctagtaacatcaaagatatatcacagcactggctttagctattcagttgctgattaagctaattgttgcctgccagactctattatgttcttctgggccatcaacttttctttgccatggngggata

SEQ ID NO: 19403 - DNA, 400 bp, Oryza sativa
  unsure (1)..(400): unsure at all n locations
tcggtagtcttaaccacatccacatctgaatcaatagcacacaaccactcatgttggatgatggtgcctgacgacaacaggcctcacagagctgtctatatgtccacgccaacactgctgagccccaactgaaacggcccagatcaccaaggttggtgaccaaaggaatccatatcgccgaagcaatgtcacccccagcatcaggaaacagaacccctcccaacaagtgcaagatgtatgcacgggcataacactcaacacgccatggctcagcatcgtcgtcaagatgtgagaagttctgactcagccaagacaggggtattccattctgcttcttctttcncccttgcccctgctcaatattcagtggaatgccaaacagctgctgcacttgtgcatg

SEQ ID NO: 19404 - DNA, 456 bp, Oryza sativa
tattacggacacataaaactcagcttggctacaattgatgttcccgcatctttcccaataccagactgagatggtgctgatggtcttcctctgattgtgagtatatcagaatgtcatcaatgaaaaccacaacaaacttgtccaagtattccatgaacactttattcattaagttcatgaagaatgcatgagcattggtcaagccgaacgacatcaccgcgaattcatacaacccatatcgcgttatgaacgcggtcttcggaatatcttcttcacgaatacgtaattggtgatatccggaacgaagatcaatcttggagaatacagtggcacctttaagctgatcgaacagatcatcgatccgaggaagagggtacttgctcttgatggtacctcattgagagctctgagtcaacgcacatcctcttggcttgtctttttctctacaaagataca

SEQ ID NO: 19405 - DNA, 208 bp, Oryza sativa
taagcactgagctcagctactgctatatagccttattttttgtttacgctgtgttgttggtcataaacagttatcgaggagtttatgaccactggccaaaactctcagctcagcattactttctattagagacagctcttgagctatgtggactgccaagaccacagttaggaaatattaagcgttcccaacgggagaggttattttt

SEQ ID NO: 19406 - DNA, 487 bp, Oryza sativa
  unsure (1)..(487): unsure at all n locations
tcttccaagcatacggctttctagatgtatatgacgatctctatacagatggatcttatatgaatcgtatgatgaagtaccacatgagtggatatatatgaaaggaatccaaatctgccgaatcgctcatgttatgatcttctacatcctaggtctccgcgttccgtcatctggcttatgttcttcatgtagcattcagatcgaatgactctatgaaattacgtcgatacttctacatattatgggtaacgtaggagacatccctattttcccccggcggtcttaattaccactgcttagctttcaattcgcctctgaccatcatattaaatgtgaataacctgtccttctctctttgaaacaaagggcgcgttcggttcttgtgcgtgcttcaaacaatattngtcttcttcatattaccatatctctagagtcaataattttctatgaggaactactgaactccatcacttgcgtgcggtactca

SEQ ID NO: 19407 - DNA, 431 bp, Oryza sativa
  unsure (1)..(431): unsure at all n locations
agcttctacttaattcgaggtatgtatgtctcaaatatttaatggaatatcaacagatgttttctagcccacaatatagccacaactgacaattttatctgcatgtcaagttggcaacaacgatacgtatgtgtgttctgtcctgcgtataaagtagggatgactgcatgtgactttgttaattatctggcagtagtgcagaagttatctggggaccaaaagctcaaacattttgatatatgtcacgggaattctaatctagaatatgttttttaaataaatatatcaaggccatcccgtcaaattcgggggccctgtgcatagttgatggataaaanataattgatgaataatatgaaataattatattacgtaatatatctatagcaatctagaatggcctaaatgatatccaaatagggataccggat

SEQ ID NO: 19408 - DNA, 460 bp, Oryza sativa
  unsure (1)..(460): unsure at all n locations
tgtgctataattggctacaaatctgtagcatggttttcttctcttttctctacataagtacaaatgtgatataataacttgtacatctcaacataaaaaaaaagttgtgcatctcacttacatcacccgattatactcactctaattaattaacaagaaagtgtgataaatgcaagacacggcaccgatactatctatagtcaccaaacacaccacgcaattccaacattaaccggaaaaataattggatatagcagttcacgagttgtcaacccaatctagatggtaatccatctgataataaaaaactcttaaaattctgaattttttagtataatgaatttatcaaattatgaccatacttggattntaaggtaaatacatngtatgtggttataaactgtgcatgataaatncgcatatcatatatgatagtccgtccatcttatactactaaaca

SEQ ID NO: 19409 - DNA, 451 bp, Oryza sativa
  unsure (1)..(451): unsure at all n locations
atcctcatgcaactctagggcgttcattgtttctagcacgtgagagtctcttggctcttcctcgggaaaagaaaaagtcctcaacacaccatgattaaaatttatgcgtttcacaggttaagattcttctcttcaccaccacactcatatgcagtctctacccaattggcgacaacctgatgtaggagcacccgcctctcgggccctacctcaaatggctgctccacccgaagcgcaccctgccctcgctcagggggagaaccnatactatgcccgggatactcgcctccgctctgctatctaatccgctaggtctatacccaaacgagaagtggcggtgacgggggtcgctcatgcttaacttcatggctcgtccttaattaccgggaccgactagcctttcagatccaccgaaatctccgtcgaccagcgaaacagtgttaagttattc

SEQ ID NO: 19410 - DNA, 107 bp, Oryza sativa
ttgcggtctacagaacacatttatgataagaatctgctgcattataaagagagaagttcagattgtcagctggcagtaccttcaacctccttcaaggccgagtccct

SEQ ID NO: 19411 - DNA, 235 bp, Oryza sativa
ttatagacacaaatagtaatatttctaatataacataaatatggtatcagaaaatatacaatattaaactaaatgagactaatttgcgattataaacgttgctaagttttcaataaatgtggataaaactagaaaaactttaaaaaaaaaaaccaaccaactataaatgaaaaaagtagctcgtacttactcctattaactataagatgtgagataaatcataacacatggagga

SEQ ID NO: 19412 - DNA, 318 bp, Oryza sativa
tgacgttgtcggcgcctatgccgccgacgaccactgtggcggccgccgatgccaatgtgtctcccagcgtctgctgcagagccttcatcccctgcgacagcgcgtcctcgacctgctgcgaggactgctgtatgttgcagatgcccataaacaactgatccgtcagtggctcaagatggctctcaagaacctgcacaaacaacatcatcatcatcatcattcaacaatagcagtcaatggtagcttcagattctttgctctgtactgaattgagtgggtgatcactcgtgtcaaaccttgaggagctcagaggaacag

SEQ ID NO: 19413 - DNA, 494 bp, Oryza sativa
  unsure (1)..(494): unsure at all n locations
cttaagtnaccgcagctgcagcttactgttgacacctttaagatgcagttgacctttcttctattaagntaagtaactgcggtataaaaggattttaaggtattgggcacttgatcacgcgcactatggcctaagcaaaaagtgcctaagtccctaaaagaacgtgacaggtcacacctgaaaatatgggctgcagacatattaggcctaggccaaaaaatatgccttcgacaccctttaaaggatgacgcatgtaacatgcttccgagtaataaatcttccgggtaatatagaccaggtgtagctcatatgaatagcttctgatctgaatgattatcccttatgggatactccaaaataggtgtaacaattgaatcccgactggcgcangtattcggttgatagcccttacggggaataataatcggtccagtctttgagcatagaaaatagactcatgactatgaatncatgtggaatgtatccggaataag

SEQ ID NO: 19414 - DNA, 162 bp, Oryza sativa
catgaatgccaaggtggaagaaagggtaacaaggtgctcgccgacatgaatataccccgagtcacaacacctgctgtgcaaccaactcctcgtgtacaacacgacgcgagtccgtcacagcataggagtagttgtcatccacagggtgccggccctgtctcc

SEQ ID NO: 19415 - DNA, 467 bp, Oryza sativa
  unsure (1)..(467): unsure at all n locations
ctaagcttcacacacttgcctctaaatgtcatgtaagctcatatgatgagctggatgagagatattaaagaagagagaatgagccatctctcatgtaagaggtaatctctatacaaactataagagagatgataacaaagagaccaatgaattgataggaaacagataaaataaaattaatactccatccgtttcagaantataaacattttagagttagacattattattaagaaaatagatacaattaaatagggaagggttgtgattggatgagaagtgaaggtatgtaggaacattgaatggtggggagttgtgattggttgaaaagagaatgttggtgtagaagttgttatatttgggacaaattctagagactagaaatngttatantttangacgganggagtatgatgtggggcaagtgtgctagaaggaattngtggatctatattgcctctaataaa

SEQ ID NO: 19416 - DNA, 507 bp, Oryza sativa
  unsure (1)..(507): unsure at all n locations
ctaagacactgagctgcagcttcatatgattatgcttgaacaaattctttctttatattaccatgatggagtttcaaacaaacagaaactggcataacactgcacagttggtctgtcataagttacttatgtctgcatataacatctcacgaatttggagctagaattgtcaaaccaagctagttatggtactaactgctatgggctaagagctactgaatcatcataatcagtgcaagagtaatacatcagactatcagatcattatgtaccgtctcgttgctcacaattgctaaggcaccactgcagctttaaatcctcttacacacacacataagaaaatgacacaatactggttaaacactaaacagtattcttttttgcaaaatgaacataaatgatgttatgctgggctgaaaaacatcattagctgaccgacatctangatactacgttgcatgcaacatactggctagttgcaacataattggtatgtatgattctctg

SEQ ID NO: 19417 - DNA, 485 bp, Oryza sativa
  unsure (1)..(485): unsure at all n locations
agctcgcagcttatcaattcctcatatctttatgtcatcctttcaagtctatgtacattaaatacacgtcaatcaggaatagaaaatgtactatgtgaggagatgtgtacaaaaccatttacattgaaacatcttgatcaacatataacaaaatgtgcattcaacttttactatcacatagcaacagttagacaagatgttccaatacctgttagatcaatttatagagatattcctttcaaaaatttacagagacatgctactgctagatagagagtattgtacagagtctttcttattattagtagcgccaattntgctacagtacacccgaaatttgtgtaatntgctgatagacatcgaaaaaatgtgtcacggatgagaaacatcctataatactggtaattttctagaggacatnttcggctcaatnggatagaacattcttaagatagagataatgccctatgacacatcttaaacat

SEQ ID NO: 19418 - DNA, 491 bp, Oryza sativa
  unsure (1)..(491): unsure at all n locations
ggatcttaaagcaccgcagctgcaactttagaaagcacagacccggggctgtctttctgttgcgcaagaagagttagcatgtcccacccaatagcgcagcagttgcgcatcaactgaagtggcagaaaaatcatcatcggtccctaccgccatcgaccacataacggtaaaagtcttgtccacaatgcatgtaaggcttaacgaatccatatgttatataatatcctaaaaaaatttgatgaatctatcgcaggaacaaacgagctgcaccctcacagttagggtgatgccgaccttcaagggttcggcagccgagggacttgcgtacaagctgaccccaaagacaacagtgcatggngcgcaacttatggccaactgtgcaaaagttcaagtagactcggtgaagcccgaattcgagctnttcctactcaagtatccagcgaacgacaaggtcctatcactaggaaatgcccctgggaccttcatccaat

SEQ ID NO: 19419 - DNA, 472 bp, Oryza sativa
  unsure (1)..(472): unsure at all n locations
gatttgagtaagatggggacctcgattttgcttggtcacaataaattaaaactcactaattaaaagatcacacccatgacagcaacctcacattcttatgggcaaagttaagtaacatatatatatatgcgcaactgtgcaccatggctccttgaaaagtttacaactgtgtggttggtcatcaggctcaatgatgcaatgtaactatccacatttattcatgcaaaattaacgtggagagccagacaggtggcaacaattgcagcacatcttgntggatgcttccattcatgcaagggtagtactccagtagtccagccgcaaaataagtcgttttagtcaatattgatttgaccatcgaactttcttgcatttgcatatatatgtcaaggaaaaaagttatacaagtgcanatattgacccaaaaactacatggtttggagggctcatagaaattggcaatattaataca

SEQ ID NO: 19420 - DNA, 138 bp, Oryza sativa
ctaacgacttgacaattctcatcggccaatagcaggacttcaaagccgatgctgactctaagccgatgactactccgggcttaccaaatttcactgttaacagctgggggggagggaatgcggggagctgtgggggtc

SEQ ID NO: 19421 - DNA, 317 bp, Oryza sativa
  unsure (1)..(317): unsure at all n locations
tcgggtggaacacacanatcangaggctggagntgtgattctgattgtgatgttaggctatgttaagcagttccatcttgagtttgtaataggagctttaccttttgttatggtatatgtgccatgagtatggtcgttttgttgagttagtctgtaaaagatctttcatttcgttaatgaaatgggaggactctgtcctctttctaaaaaaaaaaaaaccgggactaccaattcaggactaaagatcgctatctttaacgaaggagagaaaaaagtgaggggataccgaggagatatcggcagtttattttggtccc

SEQ ID NO: 19422 - DNA, 469 bp, Oryza sativa
  unsure (1)..(469): unsure at all n locations
ggccctaacttctgtgggactaaagctgcagctgttgctgttggctataaatgaagtgtcacagattntgttcattaaatgagttgttcatttagcgtgtgccagtgaaagtgatttttgatccttctatttgaaccatgtctttcagataaagcatttgcctgttggggatggtatttggattgctcgtgatagaaagcttcacacagagtatgttcttgatttcattgttgaaaggaagaatgttgcagatttgtgtagttcaatcacagacaaccgatacaaagatcagaagttaaggctcaaggtaccatctgcgctatcatcgccttcgctttaatattgaactttaatgttaattccccttgtttttatantttcagntntgttacttgtacgaaattcagtttgtttcttattattaatctatcagcacgtgtggctacttgaaacatttatttgttcatgt

SEQ ID NO: 19423 - DNA, 294 bp, Oryza sativa
ccaacttacaaaaaaagaaatgaaagctacttaatcctttctctatctcttccgaagacttccggactcctgattcctattctaattctattccaccagctagatactactaaactaaacttgagaggaatgagagagctcttacttgacgtgtgtgagtgaatcgagaacgtgatgggtttatatagcctcccaatgactgttgtgacggttagaatggtcggaaataccctcctaccgtcattgggagctaatgcacatccgtcataataaaccctgcttccaacagcgatg

SEQ ID NO: 19424 - DNA, 375 bp, Oryza sativa
  unsure (1)..(375): unsure at all n locations
tctcagctttggcaaccgccaaggctgattgtgatatctccatcaagactgttggttgacagatcaaggacacggaggtgggtcaggtttccaagctgctgggatatggtgccgactaagccggcatcgctcagattgagggtggtaacacgacctggatgccggcgatcgttgcaggaaatgccggtccatcggcagaagacaggtgctgtcatgtnggtagtgttgctgctggtgtcccacgaggacagcacctctcttgggtcgttccttatgagggatttgaatgacaggagtgctgagaggtcatctccattgatggactgagagctggctgtgaacaatangatggcatgtgtgagaagagagaagcaa

SEQ ID NO: 19425 - DNA, 440 bp, Oryza sativa
  unsure (1)..(440): unsure at all n locations
gcttgtatattctgctaggtagaccatggttattgtatgggattctatgcatcatggtaggtcaaaccagtactctgttctgtaccatgataagaaaattgtgttgcatcccatgtctcctgaagatattttgcgtgatgatgttgctaacgctgccaaatccaaatgtgagagtgataaaaaagcccaatctgatggcaagaaacctgagacaatcaatttgaaacccagatgcttacttgctactaaatctgatattaatgagttgattgcatcaccttcagttgcctatgctttggtatgcaaagatgctntgatttcacttcacgatatgcagcattctttgccccctgctgttgctaacattntgcaggagtactctgatgtgntcccaaggaagtgcaccgngctgcaccggtgcgcggatgagcataaatcac

SEQ ID NO: 19426 - DNA, 259 bp, Oryza sativa
  unsure (1)..(259): unsure at all n locations
aacagataactacctttcactgatctgaacttcctgaaagcagtatacccttcaggccatatatgctnnttgttatggaaatagtctgagtcagttactatcctacctgataagctcaaagaggagtacaataatggaagggttaaacttagatacactatgaccaaaagtatcaacatgaaaaattcatgctgcaccaaaagaggcactcatcaaatgctctacaaataaatttttgataagttcaacacagacaaat

SEQ ID NO: 19427 - DNA, 297 bp, Oryza sativa
  unsure (1)..(297): unsure at all n locations
gcttcttacgcctgtctaaatatatgtcgctttgtataatcccttcgtctcacaaagacttgagtttttgatatctaaaatagatcagtactggtatgctcaggcgtgctaacttatgcgcggttgttttgtctgctggagcccattaaaaacgtaacaagctccaaaagaactcttaaagtaaatttcacaaaactacggatactttgccaaactatcacaaaatatagacttgacacttaagntatcacaaagctctaaatttaatagcaaacatcacaatactatagattaatt

SEQ ID NO: 19428 - DNA, 458 bp, Oryza sativa
  unsure (1)..(458): unsure at all n locations
gcttgacaaatggaagcatcccctttgtctctttgaacttctctatttcttgaggaagagtacaaatttcacagtagtatagcttattgacaggatcgcaaccttcataagtacctagtatgatgtactgtccacaaaagatgaggttatgagagaactcgttttgtgggctattaatagaattagacaaaagtcattaattaaagatgtgaagagatactcttgtttttaagggtggtgcaacaaacatgtagaccataaagatcacactctactgcaacatccatcacgaaatgcttatgcaatgaacttaatggaatattcaacccttgcaaaatcagaaatcaataatttcacattggaaattcattaatttcaagctcaaaactaattatgctagctcatttcgggtgtntcaaacaggttgccattgatttatactcctcatatataagcct

SEQ ID NO: 19429 - DNA, 409 bp, Oryza sativa
ccaatttcagaggaaactgaactaatctatcacagattcatactactagctaggagtactatacaacaatgtcagctcatctagctagctagctacagcagatccaacacacaaagttgtactactcatcaaactgagcaacattactggactcggctggaggatctcagtatccgattcctctgctattgactggagtgtatgtctcctctttgataagaatgtggtctttgctcaggcacacatcatatactacagcagtcaagtagccagagcagagacctgtctgatatgtgacatccagatcatactttgtttacttgcagcataacacaactctagctagctacttgaattagctaggctccacttcacaatgagcacgtcagatgtgtctgaacgcaacgtg

SEQ ID NO: 19430 - DNA, 433 bp, Oryza sativa
  unsure (1)..(433): unsure at all n locations
atggaacagaggatgtcatcgaatcttgttatattttattgaagactcttcgccaattgtgtgtacctgaatcgcgccatgaatggagactactgggaaagggaactctcggaaggaaagcaataatgacggtagacaacaatttattccgtaaagcctatntcacaggtctgcaacaatcttcattggtagctccttacatcgaggagcacttggctctagttcgggccagaaacatcggtcattccgatgcatggattacacggcatcacattgatactttccccgcgtngctacgacaacatctcatgggtaacgagacgatcaaccaacaactggtctctctgtcaaggcgaccatctgtgtcgatcgctacattccagggatttgagatcaatgtgtacacattctactcgagagctcaagacatgaa

SEQ ID NO: 19431 - DNA, 408 bp, Oryza sativa
  unsure (1)..(408): unsure at all n locations
agtccgaaaccttagctctcaaatcttgatctaacaatatatcggatgtcttaagatctctatggatgaaagtttcctgtgccaagccatgcaaatattctatccccctagcaacatccaaagctattgtcattctctgcgtccatgtaagagggataaacccactctgctgaagatcacagagatgctcacgtaatgttccaccagacatgtactcatagaccaagagtctctcattgccatgggtgcagtaaccaagtagtgcaaccaagtgccggtgtcttactttcctaagaacatcaatttcagccaggaattcttcctgccctttagtccccatggtaccactgtcgcacctcttcacagctaccagctttccattgaagttgctcttganaaccacaccaa

SEQ ID NO: 19432 - DNA, 437 bp, Oryza sativa
  unsure (1)..(437): unsure at all n locations
actaagctccggcaatttggcgaagaaaaaactagtcggataaataacagaattaacacacatacttgttaaactaagtatattaggcataacaagcgtttcgttcttgtagagtagataattggattttgattgagttatttttctaagggaaaaaggaaaaggaggattcaaaatccttctttcttcggactttcccaaacacaaaatacctccttgtattcgcactctcaaatgagagtggaagaaattcgactntcatataatatcttaatagaattccatgtaatgatcaatgcattttttggattctatattattcgcatgtctagaatcctaccaagagaataccccccacttttatgtaattgaagtaggattgacgaataagaaataaacataatactgtntattagtgtcgcataacaccccaaatg

SEQ ID NO: 19433 - DNA, 309 bp, Oryza sativa
tactcaagcttcgcccgcagcatattcatcagtatttcatcatcaatcatcttctctgtgaatttctggcttgctagtagcctgcagcttatcaactgcacctgtatattatagaaagtatcccataagttagtgagtaactcgccaaagaatagtctggtgtctatgaatgatttctccaaggccaaaaaaatagcacagcaactctgcaacgttacaaaccttgtgggtctcatccgaattccatcaatctggttattgttcagacacacttattacccctccttttttccccctttttagctggtc

SEQ ID NO: 19434 - DNA, 333 bp, Oryza sativa
  unsure (1)..(333): unsure at all n locations
tcttganattcatacaataaaatatatatttctattacaaaatgatntaganaaggttgcatgttcctgagctcaacacgtgtagagaacggttcaacattttatgaacccgatgcttaaacccaagtagaggttttcagaatagtggacactcttccgttaaaaaaagaaaaaaggaaaagtgggccgggccaaattgggccgttccgatgttcaaggtcgggcttctccagtcctgcgccaacatttcaacagggctacaaccaatgcaataagttcaccctccatcccttaactttacaccgagtttggtagatatccctaaattataca

SEQ ID NO: 19435 - DNA, 385 bp, Oryza sativa
  unsure (1)..(385): unsure at all n locations
atgacccttaccgttcacggtggatgacactcncaaagattcctcacaatgagtgtttcatgtgctcagacaaggagtcacttgcagtgggcaccgaactcctggtttttggcaaggagattctttcccacattgttctgagttacagtattctgacaaactcgtggtcgcctggtgttgatatgaatgcccctagatgcttgtttggatcagctatgcttggagagaaagcaattgtagctggtggcatggatgctcaaggtcgggtgctacgctctgctgagctgtacaactctgaaactaagagatggataacactcccatgcatgaacaaggctatgcgaatgtgttctggagtctttatgaacggcaacatttacgtaat

SEQ ID NO: 19436 - DNA, 460 bp, Oryza sativa
  unsure (1)..(460): unsure at all n locations
agcttctncaagattatggtacatgagccctgtgtgtttttatacagatcgnctccttgcatgaacgatggaaaatgcagtaagtcttatcctaaagaatttatagagaaaactatggtgctgcccagtgggcgtgttatatatgctcggccaaataacaacattaccacagagaaaggttggtgtagatgtcgataacaactatgttgtagcccataatgttgatctcttggtaagtatccagcacacattaatgttgagaatgtaatcgtgagggaatggaaaacacctattcaagtactaaccaaaggtgctgactatgctaagattgngattccggataatgccgatctcttgggtaagtatcaagcacacatccatgttgagattgtaaatttgatggaatggagaagacctattcaggactttggaatggagaagacctattaatgtctcaacc

SEQ ID NO: 19437 - DNA, 399 bp, Oryza sativa
  unsure (1)..(399): unsure at all n locations
ntgagaaatggtggcagaagtgacaaagttcgaacaccgatatacccagcggccacttggtagtgctaactcttaaatttaactttagaaattgggtctggagtgcagccgtggagctgactaactatagttctacttctctagcttgctccctctgtcccattttaagtgtagccatgacttttcgtgcccaatattgatcgtccgtcttatntaaattntttttgaaaaaanttaaaaacataagtcacgtataaaatactattcatantttatcatcttataacaataaaaatactaattataaaaaanaattaaataagacagacgattaaagttaggcacgtacactaatggttgcaaaataggacggagggaatatcttnttaaagagcattt

SEQ ID NO: 19438 - DNA, 351 bp, Oryza sativa
  unsure (1)..(351): unsure at all n locations
acttgaaactcaagctgctctgacagattgctcaaagacaaataaattcttactgaatgcgcctatgcgtttctgaaacaagatgcctgacacccacaagaacactactgtcagtatagcaccaagcagtgcaactcaagtactcaaccgtagcttttgcccagatcaggctcagcaacctttgctgctagccaatagccactgcccactggtcacttcacttgtatcagtagcatcttcctgtacagcgaagcacatgcttgccttccatgcacggacgagccaaagctgcccatgcatggacgagtgcatcagttcnggaagcagaattcaaagatcatgacaaagcgt

SEQ ID NO: 19439 - DNA, 458 bp, Oryza sativa
  unsure (1)..(458): unsure at all n locations
agctttagttggtaattcaacgaggatacatgccaacttataatgtccgcanaattcttctaaaagcatatggcaggacgatcggcatatggacaataataatgcagtggcaaaatgctcctgctagtactcaagacggtggtttctagctctgatatccatacttctttgtagctacttcactcgattattgctgcgaattatttattccacgccattttttcttttgttgtattgcttgcgtaatgagtgtacaattcatagtcaataatggaaaattgagctagggcgagaaccaccggcaaagctacattatgttaggagggtgccaaggaaaaccggttcaaaataattagctatatttcattttatttcactgaatgacgtcattctctcagctaaattagattccgcttattgatggaaagtaaaaatgaagacccttcacattcttagct

SEQ ID NO: 19440 - DNA, 384 bp, Oryza sativa
  unsure (1)..(384): unsure at all n locations
taagagagaattgtntagaggaagacttaaggagaaacttctttttagatatagagagaatttttttatggagagagaggcgggagatgtggtgtggacttatatgagtgtgaaatctttttgtgtgtggtgcaacaaatatatgggaaagagagcacaaggtagtgtgtgcatgttatatttgagagaagggcctacacacatgtgaccatgtcttggaccttgtgattagatgcagctattatgggtcaaagctcatattggttgcctgcatgcctctccttaattatagtgtctctttatgtttctgtcattctgtgatgactgttntcttttgatctcttggcaaatagagccaaagttcagttcttaccagatgactca

SEQ ID NO: 19441 - DNA, 471 bp, Oryza sativa
  unsure (1)..(471): unsure at all n locations
gcttatcgagaattgcatcagctttgcttggatcacatgagttatatgatcctggagcccaaactaatgttactgcagatagatgctctttctggtccaacatgaattcagcagcctcttctatgttgcaaacattctcaagacctgaaacatgtaaatgatgaatgtctctcagattcttcagttcgacaatagtgtaaccaaccttttgntggatgctganaccatatagctcatgaagagaagtcaactttcctatnaaaggaatcatgggccttattacaagagttagatgcaaatggcgcagattaaccagcttgcacattccttccatttgtccttccatagggactgcnggtctcggattattgaacttcattgttgcaagtgatatagaatggatacaacttgtgggaaccaacangaatgtgtcgtgtttccttcgccccacatgagagagagagacaaata

SEQ ID NO: 19442 - DNA, 414 bp, Oryza sativa
  unsure (1)..(414): unsure at all n locations
tcacacgcgcactagggttgttgatgacgaagaaaatctgaaaccaattatagcgatgaacttgtcatgctgatgtacatacgggctgagcacccgctgcacaataatggttcttgaatgccgttgtgtcattacgaccaaagacttccgcatacttatccataacttgttcttccctctattccctttacacgtcagatgcggtgatgtaccaatctctgatcaacataggcccattgactacggaatatttctcacattcccaacccttggcacggtgcactgaatggtaccgatcagcacagatgagcactcttgcgggtacctgcgaggaaccttacctgactctcatgtcgtgggaagatggtttcggtgccganagctccggatgcactgtcacttgatcctggtggg

SEQ ID NO: 19443 - DNA, 424 bp, Oryza sativa
  unsure (1)..(424): unsure at all n locations
agcttctngaccaaatcagaactcaacaagttnttgcagttaccttcatcaatgatcacacgtgcacgatggttgttgatgacgaagaanatctgaaacaaattatagcgttgcaacttgtcatgctgctgtacatacgtgctgagcacccgctgcacaataatggtcctgtagtccgttgtgtcatcacgaccaaagacttcgccatcctcatcctcaacttcttcttccctctcttcctcttccacgtcggaggtggtgatgtaaccatcttctgtagcaacatacgcccattgactagggcaatatttctgcacattcccaaacccttggcaacggtggcactgaattgcgtccgtcgaggcgacagatgaagcactctntggcggtacctgcgaggaacctttacctgactctcctgtcg

SEQ ID NO: 19444 - DNA, 369 bp, Oryza sativa
  unsure (1)..(369): unsure at all n locations
tggagctgttctctctcctgggccacgtgcatgattgtgttcatgtgtctctactcaagaaatgcctctagagccatccgatcaagtcgtctcagagctaattgaagatcgcgaagatttgacctatgtggtgaggccagtgataatcctgtacaccatggagcgcaggatcaggaacctggttctccgttcttgcaaggaccaatggagctaccacgctgtataataagcttcctgggagcgtgaatactagctgaaggcagcccatcccagtctctacgcagatctactaatctcgggacgacatccgtgtatcggggtggttngcacgtccataaagatcttaatacattctgaattggccagaat

SEQ ID NO: 19445 - DNA, 487 bp, Oryza sativa
  unsure (1)..(487): unsure at all n locations
agcttatgatntggcgtcggcaatcctcttggcgatcttgctgatgctgtagttggagctatcatggaatgggttcgacgagttgatgcacttcggccacgatatcccccccccctccccgccgccgccattgtgccctgtgctcaggcttcgagattcggtggaaccctaaaagaaaaggattagcttcgcgtgcgattagggattgagaagctacggtgatggcaatggcgacgatggcaaggtgatgtggtgggcttttccctccttcgcgagctcttcgtgccgggccaccatggccctttcctcgctggccaccccgctccacgcttgagaatatgagagatgggatagagagggaagaggatggagaagagttggctgctgacacgtgggcacatgtggttcccacaaaccacgtcagccaataccgttcattatattgtcgagggaccaaagttgagacgggtgtgtgagttgggagatg

SEQ ID NO: 19446 - DNA, 476 bp, Oryza sativa
  unsure (1)..(476): unsure at all n locations
actcacgcttataagatctcgcccaacttctctataagcctctcgtagtttaataactngggatatatcatgctgttctagaagagcagcacgctgttctcccaattcctcaatcctattagcaaggtggccttgttgttgtagcagaaaaagtacaatcctttcaatctgaagtgaaacagcaagtatgaaatttagctaatcaaaacaatgataccactttaagaaacacgagttctttattaaaccaacaatagatgaaataaacaagttgatccaataatatatctttataattaattaaaaaaagaaatgtttgcatatatacctgttcatcaagaattcttgagaactctntaagtacttgctctcgatcttttccaccaagttgggtctgctgaacgtattgcttcaacattatcttcatcaatttgtagntaatatagcatctagtaatatcaagatgaggaaatcat

SEQ ID NO: 19447 - DNA, 209 bp, Oryza sativa
ctctgtctagccactattatatgtatatcgtgagagcgcagatgatcattatggactgaacatctgctacggtagcttcatagaacatggtgaatctgactcagagtatgaacataacgaggtcagcgctgttgaagaatctataattattttgagcggaagaaatagacttgtgagagattctagacgaatgaagttatattgaatct

SEQ ID NO: 19448 - DNA, 424 bp, Oryza sativa
actatatgtgtcaactcgatgaactctataatatatggatgatttccagcgccctcctggcaaaaataacgtccctcgtaatctatcgtcaccatctaaaaccacttgaagaggatgccttcatgggtggcgaagaacggtgcaaacacgagcgactcgacagccatcagcttgatgatgatgttgagcgaggggcctgatgtgtccttgagaggatccccaatggtgtcgccgatcacagcagccttgtggcagtctgagcctttcgggcccagggtccttgcatgctcagatgcaccagcctaaaaccagtgagaacgagagttataattgttggcgaatatgggacgtgaataaaactgcttgacgtcaagtgttgctgtgatggaagatggctgcatagtacttacctcaatgtacttct

SEQ ID NO: 19449 - DNA, 303 bp, Oryza sativa
acaatagaaaaaaggtggcgatgcgccgaactattattgaactgtcgtcccatgattaccatgtgtcgggtcatatatataccccaggtgcataacatgtccttgctggacacgactcttatctgtattacattttaaatatgaacaagtcccttaggcggactcttaccaaaaatatctctaaagaaaagcgtcatcggctcgtctctatcggatttagcgtcagccgatacatacgacaggcgatgccgcctgtatccgattcatactgcaggcgatgatgctcatagccgatacgcactc

SEQ ID NO: 19450 - DNA, 268 bp, Oryza sativa
tacaaggatgactgttgcttatacgtattcaactatatggtgaactacgatggtggtgcgcctctgaaccctattactgaggtacataatgctttcgtatccgcacacaccgcaatccaccataaatatgatctcactaagctgtaaagaatataatctaactatcgcatgacccgtactaccttcggatgcagaggttgatccaccttttgactcttcgtgataacgaggctatactaccataatatgaggtggaccgtcttcgaca

SEQ ID NO: 19451 - DNA, 197 bp, Oryza sativa
cccgtttttatatatttcccctcaatttggagaaggtgcataacaaccatttatccaagaagcattactggggactctccaggaccgggatgatccatggaaagctctgcgaaggagaatctttgaaaaaaaaacctcccctgaggacaaactggggaaaatatacaagaatgtgaaattttgtcatagacccgcaa

SEQ ID NO: 19452 - DNA, 442 bp, Oryza sativa
  unsure (1)..(442): unsure at all n locations
gacctatgaatactcagcttatatacttagatgcaacaagatcttgacatatagggaagatttaacatgttaataaaacacataaagcaaatgttgnttaatcagataagatcggctgaaacctcgatgctaccctaatcggcaaccagaaggcaggctagagattgatgttctaagcacgacttaatagatcaaactcaactgatgcagcattaagtatgaaaagaagaacaatatctagacaatcaagccgctggaagtttcatagagtggtagatatcctatataatctaagtcaacatcaatgtctaacctaatcggctgccctctactatcagatgttagccgattgtaggttagatagtgacattgctagagattatgtaagatatatgataactcgatgaattacataaacaagattagagtgtcataaggatgg

SEQ ID NO: 19453 - DNA, 418 bp, Oryza sativa
  unsure (1)..(418): unsure at all n locations
atctttggtcacttgcttcccatcacgaccaatggcgaccagccgaaggatcccagtgaatttgaagatcttactcaattgttgcttcctttcgtcttccaaaggaagagcaagccatggcatgccagagaagaactcatcgtatgaactctgctctcgatcgctagaaataaatacgatctcaaaatcattgggcttctccttgatactcgtggattcggttacaaagttaggcangaatgctcggcatggagggcaccatttagctgaanagtagaggaggacagtcttcccaacaagttctgatacaggaaccttcacattaaanagcagatgttaatcttcatgtactaatcacacattcagataggtaaataacacatcagagtgtaggcgaaaatgtgcaagaatctacaat

SEQ ID NO: 19454 - DNA, 305 bp, Oryza sativa
  unsure (1)..(305): unsure at all n locations
ctggccagtgattcagntctattggttgctatgcatgtgctttatagagtnggtggcgtncgctcatcgtgctaagagccagtgccatcaagctgggcagataggccaacaacgttcagcataacagggagactatagaacaccaggtcaccagcgaacagctgctgctagtttaattaccttttggtttgagaatgggtcgaacatattctttctgtttgtttatgggttcgattaacaatgcaccggcctgaggtgggttccgtcggattatgtggccgagtgacaaaacgatttggactggt

SEQ ID NO: 19455 - DNA, 450 bp, Oryza sativa
  unsure (1)..(450): unsure at all n locations
aactgcgcagtaaatgggaatgactcgttcgacgtcatcgacaccctcttcgcacggtgcaatcacactccgcgatgactcaagttntgaataactgtgggggagatatcccagcttctgacgtgcatatactctgaataatgttgaatctctgaacacctagaaggaactgaactcagcagaaaattgcagagggattatgcaccaaagtgtgtcggccgaaccagtgttggccctaattgcccacanattttacaggtaagtaggtaagcacgtctattatctgtatatctctaccatggtatagtactagaggtgaaaatntacgatacacttggttcaagcataagtgaaagataaaatttccaactaatgaaattcttcatatgatngatcttgtataatcattattctcagccgaacttgtgcttgtgaacaaccattcatgtg

SEQ ID NO: 19456 - DNA, 496 bp, Oryza sativa
  unsure (1)..(496): unsure at all n locations
nggctntcgctcacggtacttgataaggattgaatccctgtttacgaaagtacgcctgaaggtcatcgtgctgttgctgcatcatgttgttgatgttggcaaactgagcatcagcagattgttgccattcttgtgtttgagctatgtgttccgtgaggttgtactgaatctcccccgtctgcatatcaagggtgtccattctcctagttatttcacccaagtcccaacgagaggaactcgagcgacattcacttggagatggaggcgcaccacttgacctgngaggttgattgtccccccattggatatcatgaggcgcatgccacaagtcctcactggcagttgcccacgttgagactccgatgctatggcgtggagcttgggtccatctcggtgcatccncagttggtgcccaacctgcctcatacatctgcacggggtgtgaggatgatgaactctctcgttcgttccttgcatgctgcgcgtctccctgtat

SEQ ID NO: 19457 - DNA, 477 bp, Oryza sativa
  unsure (1)..(477): unsure at all n locations
agcttgtgctttcttgtgccctctgcctgtntgatgtcttgtctaagcaaacgcactggagctgaggttgctggcaatgcttaagtggatttctgcgagcgtgattcttgcttagctgcattgcgcaagtgcatatgaatgctcctacaatgaggtacaatgcagctgcctatgagattggcatgcagatggtaatgtggacagattgatctggaaggaataatatgaaccttgcattttagcacataaaggggaattgaatntctgtggccacacgctgtaatgtttcggactttaaatacttgatctgcgtgtgaatatttggttctgataaatttggttgtgacctttgataggtactttggggagaatgggtggcctacttcanagatctttgaaacaccaccttcaagcgactctgataaggagaagctagttgacatcattcangcatgccttttcttatgtatctggaac

SEQ ID NO: 19458 - DNA, 290 bp, Oryza sativa
  unsure (1)..(290): unsure at all n locations
tggtcgtattaattaacacaggcatatgcgtcatataacggttgatgggtaatagttgctctactagaacttagatgagttgcagcgtctatttcaccttgcagatcgatccagtactctccattttctgtgctaactctctttttttcacttcgtaggtgggtcaccgttggaaagcccaaagtacatgcttcttgtggcaggatgcctactctatcttntatttatattgacatgatacttgaaactcaccaccagaagatagaatttctcactttgaggcatttact

SEQ ID NO: 19459 - DNA, 385 bp, Oryza sativa
  unsure (1)..(385): unsure at all n locations
actggngttgctcggggatttgggtcttgacagacttgcgactgaattattcttgctcgcagcgcctgttcttggttctgggtgtttgagttcttgatttaccgtttaagttgtgctaccgattttagtttgtttatcgaaaacggagttccacgggttgttgtgatggattttgtgctatggattttnggtctctgaagctagtgatacgttaacgttatgtcagaatttgagatcttcacatgttggaacttggaacctggaagctgntagccgtaactgattagccaaacctggaatgtgcttcacttttagcagtagtagtatataaagattgctctcttcattaattattcccttgtaaatcatgtgacacacggatttg

SEQ ID NO: 19460 - DNA, 444 bp, Oryza sativa
  unsure (1)..(444): unsure at all n locations
atagaacagtctctgcttgcaagaatagactctgtcccatgtggcctcgcggccacgcaacaaagagcacccgtcttgactaattntgccaatcacgtgcaagtactactgactttttgtttgaaggatcaaaaaggttactgacgaggcagataactggttacatccaagtcaaggaacagaggacatcanacgcatagtatcacctgttgcatttccagagcatattgtagcaatatttgtggtatttcttttgcccaaacggaaaagtcactatgtttatctttaaaaaaagggttatcatgttgaattaacaagcatgaaaacctggttgcacaacccaattcatatctacccatcaacacctcttggccatcatgcaaatcagcatacagcatactatgcagttacatcaaatataggattatacatccgataaactta

SEQ ID NO: 19461 - DNA, 342 bp, Oryza sativa
  unsure (1)..(342): unsure at all n locations
agctgcaacttcgcagatcagcactcgtcacgcggactgttttatctatcacaacggagtggaggcgacgacgtcctctgattggtgagcggggaatactcctcttcttgctggctggggaaagtgagaactgcataatttgtatggagcagcaatttgcctgattatgtggaaatgatgcatctatgtgcttgattcccatggcatttgtttgactttgatatctggaaatgctgattccgggtaaacgacgcaccatgtgccttagatttcgatgcatttggtgattttgatatttggaaatggngcaacggacagcctgtgtaatgatgccgacttttt

SEQ ID NO: 19462 - DNA, 462 bp, Oryza sativa
  unsure (1)..(462): unsure at all n locations
agcctcatactcggagcagaataacataccgctcctgctctctatatcgatcaactcagaacccaggttgatcgacggcgtagcttatatcttctgagagaacacgtaccgcagtcactgctcaaggaaaaataaaagagtacaagaaacggcaacagcttcgttttttttttctcgccgggcagcctgagtttcatttgtatttgcggtcaagcctttgtcatttgctcaatttaagacacttgcgaccgaagttggagagtgagtatgctaagctgctagccgtctgtatctgaccggttctgcttgccacgctggcatcagaatgctcacgattacgcactgcggcggaggagctatacatatgccgtcgctgtcgctcgaggcaagcaacanaaatctcttgtcttggcccctccgtacggatcataccgatacctgcaccacgttgcacttgcacgc

SEQ ID NO: 19463 - DNA, 449 bp, Oryza sativa
  unsure (1)..(449): unsure at all n locations
ctataccagtttcttatttttctgctatagnttctatttggatccttaatatttctaaattccacattcctgttataccataaagacgcctcagcaaccaagccaatcacacattcacaaaaagcaaccttgcttactgaccttgacctgagatgttgactgtgagnttggcggttggttgctccattccaataatctgttacccgctcgtgcaatttggtgtgttgtacagtcacaccatgttgatgtgaatgactagagcttaaatcctagatctggacttggcgaaggggaacagganaagatggcctgccccttatggccttatggcacccgcaatgggtatctatangttctctacaagagatctatgtcagcatattttcctacttggaatagatcgaatgaagagagagagcanagctatctactaacctggagataatcta

SEQ ID NO: 19464 - DNA, 484 bp, Oryza sativa
  unsure (1)..(484): unsure at all n locations
gcaagcttggaccatntgagtagttggtggtgtccgatcgatgtggcatattatggtgtcngcctaccagtgaggtcccacgggtggcgtgacgcacgcgctcctcttgcgtccactgcaactacccacggtcacatgcactacttaggccaccagcccatgaggcccacatgatgcatgcccactgcctacgcgacaagtacaagtttgtttcgtttggcccacactaggatccaacctaacctcattgcggaacaaaaaaagtgacagtgacatggtgtagaatagttcacctgaggcatggcccacatggtagccattcgctcactgttntttttaatttttggaagcaaccaatcatgagttctttaatntttaagatgcaagtgagcgtcattcattctttcgaaactcgttatttccctaaacgcattctagctggacctcgagatatattgcgtgccacggatatgntcttacgcac

SEQ ID NO: 19465 - DNA, 433 bp, Oryza sativa
  unsure (1)..(433): unsure at all n locations
gacactatataatactatagctctcgctgcaccaganactgctgcagagccacccatgtcatatcttattagctcaatactgcagcctgctacagtcttaatgttgtaggcaccactgcatacaaaaccgctaatcaatagtgagaaccaacaataatccatataaaagatggcatatatatgtgacacaatgatgtatgttactgcaatagctcacaaaatatgcatatgtttcacaaacctgtcacaagttatacccttaccaacaatggccagctatatgatggcattcccaccaggctggttgtagcacaagtggatgaacgtgggaggattcggacaacctgcatcaactcacaagtangaacccatctctaactctatacatttctccacatcatatatgtggcgctctgaatacatgaatggctgt

SEQ ID NO: 19466 - DNA, 473 bp, Oryza sativa
  unsure (1)..(473): unsure at all n locations
gcttgcttgagaggggtatcgaaccggccaccgctaaatggccggatcgatccaagttctagtactatgctcacggtggaactctcaacccagttgatggctccctagtcttcagcgatcagatacgcgaggctgcgcgtcgactaacggacgcaatggaagcctcttctcanggcacgttccgacccgacagagagaaggacgagctgtcacttgccctgcagactccagagcattcaggacgaacacgagggaaaggggtgattccttgaaagaatggattcaaggaagacatccacacgtacaggagtcggatgatgagcaagagagataccgaggcgaagattgcagatcttgagtacagggtatcgagctacgagctcagcatgcaagaggaggtggcaaggaaggttgatgaacgcatggccgcacatcggtcccatgatccccagccgacccattcctctgcgatg

SEQ ID NO: 19467 - DNA, 409 bp, Oryza sativa
  unsure (1)..(409): unsure at all n locations
tatcggtaaacgtaggggaattgtatntaaatntntggtttatgaaatttgttcggaacataccggctttccaccggatttcacgaaaaccgtcattccgctagagacagaaacggaaggccatctcggaatcgtaacccctaggcctatatgctgacttagctagttggaccaaatcaacatgagcgaatatcgcccataaaaccactgtggctgatttgcataagattcaatagttggagagccaagatatctgatattacgattgagatacgaataagattggaccaatatttgagggaactaaggctgtgtttagttcctaaaattgtggagaagtttagagaaagctggtagtttggaaaacaattggaagtctatgtgagtaggaagggtttggatgtgatgg

SEQ ID NO: 19468 - DNA, 473 bp, Oryza sativa
tggctagagctcctttctcctgctacacctaccctcctgttccgtccccctctccatctacgagccaaggagagggctgccagcaccagatctggagatatctaaggcctccccgtcattggatccgcctgagccatgtcagtgatgaggtgatgatcgcaccggcccctgtggcctccacctcgatgtcatgccatcgaggaggatgccgatcgatgtgaatcctcctcccacgcaactgttagtggtgatggagaggagacaaatgaaggtgctagatttggagtttcaattgacaatcgacgtggtgttgcagacatcgtgttgctcgtcgacgttgtgcgcaggtatgtcgtgcatgtggcgtatcaccatggcttagctggtacctacaggtattaggcatggtacgaatggtatcatgttgatacctacaggtttcagggctggtacctatggtatcatggttgata

SEQ ID NO: 19469 - DNA, 486 bp, Oryza sativa
  unsure (1)..(486): unsure at all n locations
agcttaaagcagcttatgcatatcgctgcatatntatatattacgcgtctcggtcaattggtatagtagtgacagggccagtcagacatgataaatcatatcaagtaacacttatcgttaaaaaaagcatcacaatatacacaattttatctttcatggataataaatcatatcaacacatgtatatatatgttttgaaataaaaacgactttcatgcttatgtgagtaatagcatggattcccatgccctatcattatttagtggtggaaacgaaccaatcgcatacataactcttgtaagaaattaattagtactatctaaattaaaatggagaggcaaataatactgcgcttattaagaacaaattggtattaaagactcaattcagaccatattactgttggcgatcacgatggctgatcatgatattaacaagcaacaacgatctgcagctatggatcaactaaggtgccgattgcatatg

SEQ ID NO: 19470 - DNA, 265 bp, Oryza sativa
  unsure (1)..(265): unsure at all n locations
agctttctttagtagatagatttccttaaacgaatatatcatgaatccgactattggcgacttgataactcccatcagctgattccgagatgctgcagccgataatgattctaagccgatgacgtctttgccgattaccaaatttcactgttaacagcgccggccactcctcttncacctcttcttccgtcatcagcagctgtcaaggaggatcgatgccggcgncgcgcccccgcttacgtgctcacccggagtaccccggtcg

SEQ ID NO: 19471 - DNA, 356 bp, Oryza sativa
ctattattcttctattggtatgggctgtatgcacttagaatgtcctgattcgactatataatgctgtagttcacaagtcctcgttaataatttgcagctttcctgctgatgtctgtgctgatttttcatgatggaattattagatcctggtgaacaaggggcttatgactccaatgatgaattctcttgaacccgctggtgtgatggactgtagcttttgattgtttgcttaactaacactcatacagtgatgattactataatttaattgataagatattctaatttaataccacgataatcagctggtggttattcatgatgacactgattgctctctcgtcaattttgtaata

SEQ ID NO: 19472 - DNA, 446 bp, Oryza sativa
  unsure (1)..(446): unsure at all n locations
tctgagcttancgagcgcgccagatctcacgtcagacagttctataccgaacactttnttgtttatgagggatatactgataactcttttaagcacgaaggtagaagtccacccatttctcacattatcaactaaataattatgaaacttctttaaaattctgacaagatagattgatatgtaatatatcactctaataaatgcaagttgaaatcaacttctcaagtctaaaaaaacaacaattaactattactacagtaatttgttttttttaacttgaaaagtaaatttgaacttgctgtgtggaagtgatatatttatataataatttatcatttttataactgtagttacatgtagaatcagtgacgtcactcggagataaatcctcttttcggatctaaagctttcggtgactgatgaaaaatcatctacataaatattgt

SEQ ID NO: 19473 - DNA, 317 bp, Oryza sativa
  unsure (1)..(317): unsure at all n locations
cctctctcccagtgttagcggtgacgacggagagcccaacccacgccgttgagctcgtactccaccgccccctncacgccaaagtcctatgcgggaggaggcactcgagagggtccaaggatccgcgacttccacatccactggtgatggggaatggccgcgagatggggagcgtcgccttcttcgttacggcgacggcagcacgccccagggcgcgctccaagctgcgggcgcgctcctacgtcacccgcccattgtccctgtacccgagtctccagcccaacgttggctagacgacgtggccaacttggtcatga

SEQ ID NO: 19474 - DNA, 395 bp, Oryza sativa
  unsure (1)..(395): unsure at all n locations
tcccagttgagcttaagcctttctgagagaggagttntacggtacattatacttgtcttatatactatacttgcagnataaataatctaacggtgtggattcatccgatcttttttttacagtataaattgtgaagggtatatttgtctttccatatcttctgcggnggatatttttgtattttcgcgttctattctttagtcagatccggatagtgagaaagggactcgtcccatgcgctactgtcgccgccgacagccaccgcgtcgcgccccggcccgctcgccgctgacagccaccatgatcaagcgccgccacactcgcatgctatcacgtatggngagagaggaaggtgaagcagcacagagcactggagcagcaacatcagctctgca

SEQ ID NO: 19475 - DNA, 447 bp, Oryza sativa
  unsure (1)..(447): unsure at all n locations
tccattataatcaacaaggcgtataactgaagtcttctttataacatctacaaatagatcttagcagcaggtaaatcatcaagttatatacttggcatcatcaacatcaaccataacaacaaaacaacaaacaaaaaaaaatgcaggttctgccccccttcagttattagctactatctcgcaaaccacatatgcaaattgcatgaaactnggcataactaataatatatgagtttcttccaagctgacaaaatctgcccaatgggacatcgnttgattcatcaaactaacactctaccaaatactccacatgctgaaactgcagagacccgaaatatggtgctcttctcaattaattatcgcacacacttatcagactgaagtgctctgagttaagaatgaaactcaccaagttggtgccagctgatcacgttgagtctcagcact

SEQ ID NO: 19476 - DNA, 319 bp, Oryza sativa
  unsure (1)..(319): unsure at all n locations
gcttcaaaaattcatatggacccatttttgaaaaaaaaagctaatacttaattaatcacgctctaatggagcgctccgttttctgtgcgcaattcgcatgttgggaacagctgattctaaacacagcgttgattcgtcttcgagatggaaaaggactaccacagatctgtagggtgtcaagaaccagttaccttngggtacatcatgcgtgagttcctgtaagtttggtgaaacatcacgtttattatccattttgttgcagaaactatcgactcgtatgtataataacttctataaaacgagggtcagaaaacacctc

SEQ ID NO: 19477 - DNA, 337 bp, Oryza sativa
catactgcgaaaattctaaaaagccacaagtagaattgttaatggggaccataattacaaatgacatgatcaaccaaactttcatattctaactgacatatatgatgaaagaagatgttctatcattgtacagcttatctatttatattcacgtcgagtgactaatacaacatccacgcggtattacagaacatataacactttcttcctgtgctatcataacacgggaaatattacagagaaccgagatcagtatgatgctcaagcatgcttgacaaaagggccatttgtactgatagcaaccacaagtgatgcactatttttaattacagaggaa

SEQ ID NO: 19478 - DNA, 469 bp, Oryza sativa
  unsure (1)..(469): unsure at all n locations
tcagccaattgatgcttaagaatcttcagatattngcaacaatatattngaaccacaaggagcatacttgaanaataaagtgtatatgcagcaaggaaagatgttagatggattcagccccttcctcactagccagatcattctggttaatggttattggtgaattataaacttgacatggttggaaactgaatcaaacttgtaaattttaagtttgtcctattacatgactacactgagcgagaaaccactgacgtctcttcatcaggaaacaatggcatgagaagcatttcagtctcattggtgtaggtagctaagtggataaacttctgaatgatcaattggcaaaagaatgaactgtcgtaaactcataactatcacatcttgaatacgcagaacataataagtctcagaatatgacganngtaaatatgtaccacaatgttggcccctatgcttgtaccaacac

SEQ ID NO: 19479 - DNA, 480 bp, Oryza sativa
  unsure (1)..(480): unsure at all n locations
agctnttatgcntttgtaaatctgaagaataggtgtactgaatcaagaccaagatgtgtagatagctgcaataccatcaacaatgggaagactatctgaaggtgcagtancatcatcctttgctctcctgatcactgtcttaagaatgcatctatctccgggtaaatctatggtctcagacatgactggttttatctcaagaagagatcctgaaaatcagcatagaacccactagcatataggtgaagcaaaccacaaccaatttctttctacttttatgcatttttnntaaaatttatttcttctatttgatccaagaatgcattttctcaaaanaacaaaactattaggatctaatgnaaaaacatgggacgctgatatctgattccttaaattgaatgcctaagagattatccagcanacgagcanaacatgtaaaatggacaatcatgttccctgaatattcttcctgaataatat

SEQ ID NO: 19480 - DNA, 473 bp, Oryza sativa
  unsure (1)..(473): unsure at all n locations
tangatcactggaattgcacacctcagcctggtttccgccctgcagaacgcacagaggagacggngagatatctaagtgattatgctcagaccttcaatgttccttttgaattccaagctattgcgtctcgatttgaggctgtccggatggaggatctccacattgaggaggatgaggttctgattgtcaactgcatgttcaaattcaagaatttgatggatgagagtgtggtggctgagagtccaaggaacatggcattgaagacaattacgaagatgaacccacatgtgttcattcatggngtggtgaatggatcttacaatgcaccattttntgtgacacgcttccgggaggccttgttccactattctgctatcttcgacatgttggagactaacattcccaacgataatgagcagaggtngctcattgagtctgctctatttatcccnggaagcaatcaatgtgatct

SEQ ID NO: 19481 - DNA, 474 bp, Oryza sativa
tgcagcatgcagcttcacattgtcaccttggaacgtggaattggttctggatttattgtcactgctccttggttgtcattttattccgtgcaaaagttaagtggacaacatatatcagagggactacaaagaattggaaagaatttatcatagcctcaagattaattgttcacttccgcgctaaaatggaattggattcacaacttaagaaacgtggatccctcaaatttgccataattatattctgccaatttttttagagacatttcttcttcctttcatttcttgaacaccattttttacaaaatctttatcgttcaccaaattttcggtcagcaataactcatacggtgcttaagataatattacacgatcatatcaaaagagaagtatacttactgcgcacactgaaaggtgatgtgctactcttttgcttgttgcaattatcgattagttacctgagccctgacttac

SEQ ID NO: 19482 - DNA, 340 bp, Oryza sativa
atgacatcgatgctgaatctatcacatcgacgagtcgacagagctccgcgagtacatcctctaagagtagaaagcattttacgaggatagctgatgaccatgacgatgggaatgatgatgatgttagtgtaaggcaggcgcagtagcatgctctggttatgcccctttcacatattgtgaccctgtgtctcaactcttgtcatgctttatgaaacaaaaataaaacacgattctgggatgaatgtgaaaagaccaacagaagacgtggatgatgaagatgatggtaatgatactgatgtaatgtcttccaagaaccacattttccttttcatgatatatt

SEQ ID NO: 19483 - DNA, 494 bp, Oryza sativa
tgcagcatgcaatcttgaaacttgggatgaatgcataacaatgatgaggtattttttttgtgtttcatactcgcttgcagtggtgagagcaatatcttaaagaacccagtggagaaacaggttatgcttgtgcctacgattactggatatttgtatggagttcaaaacattcaccatgaggagaagagcaattgctcgagatgtcatctccttcactcaccaaggaagaagagaagactgatgcacctatattatctaaagagggcataaaaggaaaattaaatggcgctgatattactcaatgtgagtgtgcttctgatgagtcacatttagtcactatccatgctaatatagagcagatattgggggaaactacttctgattctgcattgtcacaagtagatttactcgctgttgcctgagataaagaagagatgagtgataatgcttcacttatatctctaccactactagtgaatgaacattgctattct

SEQ ID NO: 19484 - DNA, 437 bp, Oryza sativa
acaccgggatgtagcgtccggcgtgggtgactgggtatgggttcttctcctgcactatctagcggcatccttgcctggattctctcgcgggaagctatctcccgaaattctatggaccgtttcacgttctcgacataatcggcgaagcggcttatcgttcttcattgccggccggcgcgcgtcttcacgacttgctgcacgttgatgccctctagcagtaccatagcgaaccaccggcgtctactcctacgctgccagccaccgtcaatggcagggtgctaccgcgtccggctgccgtgattcttggaacgatagcacgcatcgaacgcgaagtcttgaccagtgggacttgatggctgcactatatcgacaccggagaatgatgctgcgcttcgccatcatactcacagtttatcttacgacaactgttgctaaga

SEQ ID NO: 19485 - DNA, 486 bp, Oryza sativa
  unsure (1)..(486): unsure at all n locations
agcttgctatggaagaacagaagttagccgatctcccgatggctattgaagaacaaaaatcgaagttaagatcagctaccaagaacgtagctgatttgaccaagtcccttaaagttattacttgaaccaatgctcaagttgctcacgccatcgaagaaatcgaagaaatcaggcaaaaggcaatatcggtcatccaacattatttatctgcataactgatcgactgtaatagggacttagtaacttttggatccatttgtgtaatcagctaagaaactntaacactttacttaattgtcttgatgatcctttgtgccgattaatataacttgctcaaaaattctcaattttggatatatgtgccaccctaattntgcaatgacgaaggcattgataaacatataattcagactaagggcgatatgttacatataggccatcatacatcagcagaacacaaccgagtatgaagaaacaaaaaccact

SEQ ID NO: 19486 - DNA, 509 bp, Oryza sativa
  unsure (1)..(509): unsure at all n locations
actcttaaactccgcttagganatcgtcgccgtggagagtcaacccaatgatgactgtatgtgtggatcggttgagctactgatcaggccctccgcccgcgacatcggctggtgcggccaatccaagccgaactcggcaccgtgtccaacccgtacacagtcagcatgatcctggtgatatattaatccacgtcctaatctaccgcatgcatggaatctctactaaggacgcacggcatgacaaacaaggtaattagtagattaattaatttaattgatctactaatttcgtagatatatccggcatatatctacaaaggtacgcaatattctatatgaatttatcgtacctattcagatcatacagcattgtcagatctacacattactatgtttacctagagcatgttgtttatacaatatctatcgcgtgagtgtttccgacgttaaactgactacggtctaacgctggggcctcactttgttctcttctgtatgaatcatgtttt

SEQ ID NO: 19487 - DNA, 503 bp, Oryza sativa
  unsure (1)..(503): unsure at all n locations
ctcacgcttcttttagaattcatattggtcagctcatttgtttgttactacanaatggaccatattttaatctgcaacaactctatgcatggatcaatgatgctatataatcaggtaagtgtaattttgatcagtcttttgaattggtatccggataatttgtgagcgctctagcatctttttaacctcataggtgctgctagatcaatagcatcttttatctctctgtagttgtcgaatgaaacttcacaaatgtggatgtgtgtttttctttcaaataatgagtggtagctgctacaagtatatcttcctatgtccagatccatcatggttttcattgtcaatttgagtggaagctattctcaatattgttcttgactgcataggtcccttcttttttggctcatagatactgctatggcaacttgattttggaaattactcacttgacaacgatatggtgagagcttanatatcttttttttacatgtgattggtattaa

SEQ ID NO: 19488 - DNA, 474 bp, Oryza sativa
  unsure (1)..(474): unsure at all n locations
agcatgcaancttttggacaacaagctgctgcacatctatagtttttatcttccacatgcatgcatgcactaaatattctaccctgagccccactaagtagaatctcctgccctcttagtgatccacgtcacctgtttaatggcaaccatcagataacacatcactggctcctcaaggcacctcttaagattcctatctcatcgcatgcctgtgatgaattaatcaaagaagcccactaacgtttaaacatgggatgtcccgttaattttggatcattgtggaacctaaacttccgtgagaacaagctgcatgcacatggaaagcctcttctcttgcacatgcatgcatgcactaaatgttctaccgtactaaaaaagtaggcggacagcattcttcaatatccagtcttataacatcttcgatatggcatacagattcatgggcggacaatatcatgaccggaaacggattgt

SEQ ID NO: 19489 - DNA, 318 bp, Oryza sativa
  unsure (1)..(318): unsure at all n locations
aaaatctcaagtgaagagaacaaaacatcaaaaggaagggaagagaggaactcgctgctgttgctgtttagnttgtgctattatcgtgctattttgagtggctacgcttgtgactatgctcgcgtctttaaagggtattgcctacgaccagcacaataccatcgttgaatgattattcaacttgctttgaataatgaggttctagctgtaccttgatattacttgcagccacctatagctccacaaatttctatctactatatcacaagatcgtgcttgntgaccgctccggtactactaatcgttagtgctggtctt

SEQ ID NO: 19490 - DNA, 471 bp, Oryza sativa
agcttgagtaataagactagaatgagctaatcatttcattttatgagatcatttacaacatttgttataatgaacgaatgcctgaaaacaaatatgaattatcaaagaatatacctagctcctgaagattaacattcggggaaaggaaagagctctctttcatcttattcgtatgaatttgaagaatctgcaaacggccattttcatcaggcaggtttatctcaatatgaacttccaatcgtccaggcctgtaacagatgtgtcaaatgtcaatggatacgtgcaaatagtaaaacaaaaatacaaaaagaagattccccaatggtttaggcctgcaatatctaaaataatcaaggcaagcataatttttctgaatacacagtaaatgcagcacagagttatgtttagatattaaaatgtacataaaatgaaatggaacaattttaggaggtctgatgcatttcatgatct

SEQ ID NO: 19491 - DNA, 354 bp, Oryza sativa
  unsure (1)..(354): unsure at all n locations
ntctttgcctatgaagcagtgaagcaccaacacgcaagaattttaatggtgtcagtgaaactctgttactgatatgaaaaaatcacacttaaacacacttgttcatatatctgaacctttcttacctcgcgcaatgatcatgcagaatggacgagacgattcagtttcactcctgacgctgtaagctacttctatctccgatcctctgttaaggaaatacacccattcctgcagcacacaacatggagtatagtaagtagcaactaatcttcaattctgaaaataactgacatgatcatgagttcagagtttcaaacagaatcacacagatgataacgcagcattaccatgtga

SEQ ID NO: 19492 - DNA, 479 bp, Oryza sativa
agctgggctcttgcgcataaactatctctacattttctctctcacgttgacataacaatcctttcgctctccacagccattgatgtgacccgttggccaccgatatgccttcccccctcaacctcccaattttaccgcgtgcatcctattctgctctttcaaacattgctgcatgccccctctctattgctccttccttctcgacgcagtgtaggagacggtgcagggaccagatctgatacccaaactgtagacccctgattttggaaatcggaaatcttctatggttatccgtaccaatccctggatcagtagttggtacacacatacatagttggatcacaacatatcacgaatgaattcatgctataagagttaaatacttacattaaggccaggtaggccaacaactatcagagaacaacagctgaagacataataataatatggcccggttaacatgctacaggcagtcgact

SEQ ID NO: 19493 - DNA, 448 bp, Oryza sativa
  unsure (1)..(448): unsure at all n locations
tcactccttggccctacaatgagccatacatggagaagactgtgtgcctaccttttgagagtactgccactgcacatgctcaccgngatgtggcatacaagcattatgtcaatgagatggactgcttgcagcctcaacatgtaagtacttccaatatcacttctagttagacatttacttctttaattgagatactaaccaacgacatctcttcaacttttgcagattgagtggttaccataccacacaaatgaggcttcaagcctgaccctgaactcgatgtgcaatcgagactctgactatntcatgtaccaatgcccattgatttgtttctgggcagttgagtaccacctctcgcaccgtgtcatgcgacagttcgggaagaaacaagattggccggttgacgacatctcaactggatgtcgaatacacnaagaaatatttctta

SEQ ID NO: 19494 - DNA, 482 bp, Oryza sativa
  unsure (1)..(482): unsure at all n locations
agctttcacatttgaacatttctcaacatttgcacaatgcgttcgttaataagtcaaaccagcctcccacaagttatattcattgatacaaaacaaaaggtggtagagaagagcttcacaagttgcattgcacacctcacacaccttatacagctgtataaatcatagcagagaattgacaatgcatctacctttgatgcgactgaggctgattaaccatcttattggtttaatgattagctacttgctgtgcttctaatggcatgtttttatgttcgagtcgatcgtcaatgggagtgagtcaacttaagaaagcacatagaaatcttcacaagacatcgagacagtgacaagctcaaagcatatgaaacaggcaggcttctcgcctcctcatctgcaacttatattacctttactgatcaaatgctccaanaacacaatgatggtgagatgacaatggaagtggcagnttacttctgaat

SEQ ID NO: 19495 - DNA, 347 bp, Oryza sativa
  unsure (1)..(347): unsure at all n locations
ggcaacacacagcgcggggaatgcatgggatattccaaatatatgttggacaatgtctctgaactcctagtaataaagtgccctacgcctangcagtgttgctggtctccaagcgcttgcaaggaagctccaggagaggcagatcattgggatactcacgcgtcgattatgtatggtagatccacccccaataagatgtgcaacaaaccaacaggaaaagaagatgattaacttaccggctagatgatccccaactgatgagatccccaacttcctttgnggtttctcctcctgctccagggagggcggtggccggcggcccgtgcggcgggaaaaagacagctgga

SEQ ID NO: 19496 - DNA, 475 bp, Oryza sativa
agcttcactccatataccagtgttcagagactatatatttttattgtattaatcacaaatgtgtgtacagtacgggactaaggatgtatgtgggtcaaccaccaacccacttatagatcataataaacgggtttgcgggctatcttatcctataagtgggtttcgcacgttagccacatacacccctagcgtacaagatatatgtacatgtatgatgatatgtgcatcctttgtgtgaatagatacctgtatattactattaaccgcgggattaattttattgagacaccataatcgacctaattgtcgatatttcatcgacactttgatcgaatatggatacttcctccggttccattataattgacgctttggataatgacaccgtctacaaatatatcttaaccttactttctattgaatatatacattaataatgcatgttactttattatagacttaaacacaaactata

SEQ ID NO: 19497 - DNA, 202 bp, Oryza sativa
actctctcacacgctccttctctctcggggaaagactctctgagattatgtgtgacgcgctcactcactccctcccctcccatggcagacaccggagcggcacagcctccgccgccgcccctgcgggcgcccgcctgcgagccggagaccctgcgccggctcctcgatctggtcactgacgtcctgttgtgctgcttcctcg

SEQ ID NO: 19498 - DNA, 321 bp, Oryza sativa
tgactacccgaaccaaaagataaaacacataacacaattagcaaatggttacacaggtgctacgccatctaaaaagtgacacaagataacgactaccaaaaccaataaaatagcatcattatgcataaaacctattggttcatttaaccttgtcaccaaacaatattcatatttagaaatcgactacctttttgtaaaaatataaagacttaacagatgtcacttcatcaagcgcatatatataaacataatattaactttggcataataatctagcattaaaacacataaaggttccacatactgacaatgggaaaatat

SEQ ID NO: 19499 - DNA, 465 bp, Oryza sativa
  unsure (1)..(465): unsure at all n locations
tatgannattaaccatagggaacgcccatcctgtccccatttttaataaccaccaccttcgcattntctgctattccaagttccttcctcacctaatagatcanaanagggaactgtaaattaagaaagcagaatgttgttcaagcccatggagcatcattcatcagtagaatcacacaaacctctgatctagatttgcgtagccctcttaccacaagaggcacatcagtgacatcacggaaagccggcactatggatttaaggaaaactcattttttaaaaaaattaaaactgagaaatgaaatactgacaattntgtccgttcgaaatatgaacattntanagaaagaatanganaaacacanatgaacatactanggcagtatccaggtagtcgaagtaagatatcacaatgagaaataatctccgctatctgcanaatattgagtagatagttggatattg

SEQ ID NO: 19500 - DNA, 402 bp, Oryza sativa
agcttccctgccacggccacagactcgccgcggcactgcggcgggcgcagcgatggcacgagcgccgacacggtgaggccgaccatgccgagctggtacgccaccgagcccgcggcgatggtccagaacctgccggcgaatgagtcggcgatgaggccgccgacgatcggtgtgaggttggacgctccgtggaagatggtgagcgtgttggacgcctccaccagcgggaggtgcatctccgccgtcggtacgtgatcagggtggcattgaacccgatcgtcgcgaaccggtcgcagatatcgttcgctgcaccgcacaaattaatctgagatctcacctcagcattcatccacaagaaccaaatgggtagcaacattgcgagaagaacaccttaccgagatt

SEQ ID NO: 19501 - DNA, 410 bp, Oryza sativa
  unsure (1)..(410): unsure at all n locations
taatntactgtttagagcaatcatgatgcaatgtcctggttataacgtgcttaaattaagaaaatcgcacagaacaaagttaaaaaactatatgagatattgtaaatcgaagccatttggatntacaggaatcatatatgcgcaatttgaggtagcaacatggcttggcctatatgcatattgccggctgcatgagtgacatatcatacttatgcccatgccgtatcatgtattgtgcatgattaagacctatcgtaagtcacttattactagcatttctgttcctgctttgtgctaatgtggctggaattctttccgaactntgtgctaatcccttgagcatgggttctgaagtaaatggaacaactaagagaatgtangctgagtgtgggcacactaatagtgtgagt

SEQ ID NO: 19502 - DNA, 483 bp, Oryza sativa
  unsure (1)..(483): unsure at all n locations
agctggcagggcctggttggcacaacatacttgtgtgtggtcaatgcaaccagaaaggagtatgcgtgcaagtcgatcgcaaagcagaagctcgtcattgatgacgacgtggagttcatccgccgcgagatcaggatcatgcaccaccttgctggccatccaaacatcatctccatccggngcagctacgaggatgccatggcggtgcacattgttatggagctctgcactggcggtgagctattcgaccgcatcatcagcaagggatattacacagagaggcaggctgctgaggttgcccgcatcatcgtctctgtcatcgagtcttgccactctctcggtgtcatgcatcgcgacctcaagcccgagaactttctcttcgttagcaacgaggaggatgcgccactcanactcattgactntggcctctccatattcttccgccaaggtaaatcaatcaatcagttatgacaccttcaccat

SEQ ID NO: 19503 - DNA, 452 bp, Oryza sativa
  unsure (1)..(452): unsure at all n locations
cctggatgccttcttgtccgatcaatctgatatatacatgcagaacttgatatctattaatttcttatctcctcttactccatcatccatactttntgttcactatagtttgctattatgtttgttcaaaagatacgacaatagtgaattggtactgacagatgaggtggtatatataacaggacgacgacatatataatgcctctatgcatttaatacccatctatatatgttcgtagcaggaggtagtaattacatttctctcatcaatctngtggttaattattttgaattacagtgtgaagtagatgtatatataattatgctttctgcataaactntttgtgctattccttaatcacccttgaagagctaaaaatagtgaagaccactttgtatacatgcaccatagtcaagtccaaactaagtatatatgtggcacaatgtaagtc

SEQ ID NO: 19504 - DNA, 385 bp, Oryza sativa
agcttgtaatgcttgatataatctccacagctgccttgagcttgagctctctcaccaccccggctggatctatgcagctccgtcgccccagcgtgccatcctcaagctcgagctcttctctggccgccgtcgcccctcgctagcttgacttcgtacttcacctacggccgcacgtcgttcctgagctagagctcctctccgcgcgccgatgtcgcacctcgctcgaactcgatctcttgtagcactcacacgccatacttgggctcaagcttctcttcaccgtcctggcttaacctcaatactcacgggtttcgcgatgcccgcgcgccatctcggagctcaagctcctcttcatcgctatcgccttcgcgactcgacttctact

SEQ ID NO: 19505 - DNA, 411 bp, Oryza sativa
  unsure (1)..(411): unsure at all n locations
cctggtcttctccttccggtctatctgacggagagacatggtcacgttctggatgtcatgacagtccaacaacaattcaccctcttctgtcacttgccctgaatttcttgcccataccccaattctagttcgcttatttatgggctgcacaatcaaaggattgccttcagacgcaaacttttccttcgtaactcgccatttcttctcgtgacaggcgtatncacttgaccctaacctatgttgatatatgttcttcttcgccaggtccgacatcttcttcctcttttctagagctataagcgttgtcatcttggccacgaacttgtcccactcgactgccgaaatggtgccccattcttcatatggagtcctattcttctgaacataatgggtgttatggtcaacttcact

SEQ ID NO: 19506 - DNA, 192 bp, Oryza sativa
cgagcgcactgaaccgcggcgcggcgggcgcacgtttacgggggacgcgccgacccggggcagcgcgaagccgaataaggcgcggaccaagaaaccggaggcccgcgaaagaaaaaaaagagggcgcggctaaaagagggggcggagctggcggacgcccaatgcgaaatgagaggagagaaaaaggggaaa

SEQ ID NO: 19507 - DNA, 443 bp, Oryza sativa
  unsure (1)..(443): unsure at all n locations
aaatgacacacctnctgaactgatgaggctntggacaagctcggatccagactctaagcattttcgtgataacaatagatacttcaacggccacttctcattcactacccttggtgtaagccttgacaaggcctttgcaaacatgagttcgggcgtgtacactnttcgggctcatggtcagatatatcataatatacattctttcagtcctagagattctggtccagagcatctcgagttgtatttctacgatgacgatccaacattgagtcatagattccaacgttcccctagccttgaccaggatgtgattaggactgttgcagacgtccttcggaacaacccgtactcggagacatttataagtctacggcaggctgaagaccatcgcgaatatcgcgtgacactaaatctggatcataagttgaccacnagcgtacaat

SEQ ID NO: 19508 - DNA, 476 bp, Oryza sativa
  unsure (1)..(476): unsure at all n locations
nagcttagcaacatggggtatatgaagagaacatatgcttattattgcaatgattcaatcattcaggaaagcataaagaagtcaccactgaccttaaggaaatcaatggtgatcatcaccataagccaaacagctacatatatacagctttagtcctgcacacaagttctttgaagagcacataatactgatccaattaacagaaaaggtggagggccgaggagcttactttcatcctaccctttgtggactagaagctgccatcccgattggcctatccgtgaactgcgctgaaaacttaaatgagctacctttttctccccagcagccatgtcaccaacagctatgtgagacacatgaatccctatacaatattgaggttgcgaacctggtcatctttcaagctcccaatattatcactcgaaaatgcatcactcatatgtttacttcaaacatactcccatgaacatacgaag

SEQ ID NO: 19509 - DNA, 455 bp, Oryza sativa
  unsure (1)..(455): unsure at all n locations
tactatgcaccagccctattangttatgtctctttgagtcctaatgatgtctcaatgacgtactgtagtactagtactaatactcctagaaataaagccataggcatagaaaagggcacgcatgattgtcaggatgcaaatggattgtccttgggatgatttgactaattaattgtagtactagcatctggtcaatgctgaacctaggcaaaaggacaccagatgatgtggtatgggtcaccctaaattgccttttgtctctccccggctgggtgataaaagcagggatgatgctgtgctaaacaccctcttatctgtttctcctgcacctttggcgaanacacggcaatgcctgatggttacagagctgtgatggccaacatggcttactgagccatcangacagctacagccgaaagttttgttgggaatgctacactagtggctgatgatac

SEQ ID NO: 19510 - DNA, 390 bp, Oryza sativa
gctcatcataagtgtcagccatgaagagaacacaggaagtctacgatgcgcgagcacatcaccggtggtgacggcaggagtgaagacgccttgaccgtgcgggtgtgatgaccggcgacagtgatgccatggatgtcttccaacggaccaccgatcctcatcatcaccgatgaatccatcggccttgcttgcctggtaactgagacagagagaacaggagacagagaaacatttagcattacccatggcaagtaataccaccactgccatgtgctgccgatgacgatgttcaccttcttctctgatatggatttgctctcagcaatatggctgcagagcatgtgctgcgtgcattgtgtgtgttgctgtgggagtcctcctctcttcctc

SEQ ID NO: 19511 - DNA, 380 bp, Oryza sativa
ttacattgaatataccaagccattcttcataatcttcagcttatatactagctatttctaagccctccaatacctgcatatctcaaagttacagctgttaacatatggattgtttgatggaacaaataataacatgtataaccaattatagccaggtccatatacaaaaaaaaaaatcatataacttatagcgattaataagaatatatatactgatctgtcaagaaagttattcacagggtgaagtatctgttaggttttatcagctatttttcttgcgcactttgcactagtataaaaatgctgagacaggccattgggatatggatcttccatgcatacaaaatgaatatgtataatttctagcaaacaagaccatg

SEQ ID NO: 19512 - DNA, 456 bp, Oryza sativa
  unsure (1)..(456): unsure at all n locations
ntgctgctgaaggaggaatggagtgaactgaagcaatgtattgtttttgtacggtgaggaaggcttggaaagaaacatcgggtaaaatacttcctctgaactttngaatgtgcaaagtggaacatatgaagagtacagtagatgaaaaacaaccttgtgagcccaatattgtaactgtcacatcagagcctttgggagaaaggaacctggttatgaaaccgtttctttgtgtaaaacatgatgtaaagcttccaaatccagaactacgcattgctagctgttggttgtgctccataagctgtgtttagttccacgctaaaattggaagtttgaagaaattggaacgatatgacgganaatttagaagtttgtgtgtagtacagtccgatgtgatgganaagttggaacgttgaagaaaaaagttggaatctaaacagggccataataatatatctg

SEQ ID NO: 19513 - DNA, 425 bp, Oryza sativa
  unsure (1)..(425): unsure at all n locations
gcagcagcagctnttcttatcatgctacacgatcgattttttatacnagattggcatgacgaacagtctaagaaattaataagaatgagtggcactttggtagggacaagcaactcggtggatgaaactgacacactatgcatgagatatatatagaaacatagcctcggtatcacaagcgaattataagacatcaaaaataaattgaaacggttatagaactatattgtggacgaaatcatagtagatatgcgtatacaagagaaatcagcaccttgtagaccagctacttcaaatcgatcagtgcaacttgatctgagtatctaacctggcgttgctacgctggaaacccgggatgctaaaagacaggcaactgaggctataataaatatcctcgaaattatgttagacaattaggaactgaa

SEQ ID NO: 19514 - DNA, 223 bp, Oryza sativa
ctatatgtactcatattgcacattattatgttcatactcacaatgcaattgttatgtgcactcatcatctttattataatatttatatggacttaccatttgtactatatcttatataaccaactacatctttacaatgtgccttattaagtctttaatatttagtaacacatttccggagacctatcattcttattacaatttatatatggacttagcaatc

SEQ ID NO: 19515 - DNA, 395 bp, Oryza sativa
gggacctctaagcgactgcagcatgcagctgataaagctttaagaaacatatacttggttgaatatcaagcacagctaaatacaccagaatgtacaagtatgcctccatcgctacattatgctcaggcagaaacagtactttcatcatcagagttattactaccccggctgaagatcggcgttgcggaattgatctacgacgtcacttgcaatcttgtcagccgcaattcgagcaatgctgataagatcaagagcagcctctacgcttggtctgtctgaaagccattcatggcgtcaatctcaatcctcgggacaaggatttggtactgccaatgccgtgctacttccctacttccagctttattgatattcttgaaaatacattcggagaactc

SEQ ID NO: 19516 - DNA, 324 bp, Oryza sativa
  unsure (1)..(324): unsure at all n locations
taaccaatggtgcaatggtgtgcaagaatgtatcaactatctagtgaaagggttcaaagattatcgcgatgaagtatgcacgggtgcggtgaaattctgagatcattctttctgcagntttgccatgtcgcagacaatagatcaagctgagaattgtaagctgctgatcgaggcaataggtacgccccttatcatcacttgacaaatcaaactctgattcttcttcttcagacatgttcctgatctgcaccgctcttctcacgtttggcatgggaatgtgcatcatgttctacggctcctcgagcattcagaaaccaggaatgc

SEQ ID NO: 19517 - DNA, 388 bp, Oryza sativa
  unsure (1)..(388): unsure at all n locations
cagcatgcannacttaccaaactatagaaatactacaccttatctctcttttcaaagcaggagataaaatggaacatgcataatggttcactgtaaacctcataactgattctgcatcaccataactgggcataactcctattcttgaatagctgcccttcccaaacctgatcaacctgtaccaggggattgcgttcttatggttcgcacgtttaagccacacaatcttttaatataattaactttgatgacatacatactgaatgcctcttgttatctcaccgatgcctatcggaaaaggcatgtccatcatcatgttcgtacctgctttactataaataaacgtggaatattgactctcgctttactggacactgataattaaact

SEQ ID NO: 19518 - DNA, 315 bp, Oryza sativa
tctgacgagcactctattccttcaccttggtctatatcttctccagcctatttatgattggagaactcttattgtacgaattgtcatttaaaaagagaaaggtttggcaaactaattcctgtttgctacagctctcataaccgtctattaaatctgatctgcttctaattaatcttatatacaatatgccaaattttcagcattttaagcagcgtgttatctgctttcatttgcacaacaataattatttaataaacctaacattttcattgcagaacaataattggttataatactaacactatattttcatta

SEQ ID NO: 19519 - DNA, 459 bp, Oryza sativa
  unsure (1)..(459): unsure at all n locations
agcttaacagggntatatagatattgttcttcgaaaacatatataaattgcatgtctcatgtttctttatctagtaatgattagtccactcaagcaggggcagggatgtagctatcaatggcacatcatgtggcttcagcccgatatttcattttattctttgcttttgcaatttgctcgattttctctatttatttatgaattgaaccgtataagaagattgtttggatggcactgttatgctgatagtgccctatatttatgttctgacttcactatggtaaagctgtgcaaatgcactcccgattctatcaatgtaccacatagcataaataatatattctcgagacaaactcataatagaacacatacaccacaagaatcagtggaaagtacaaccttgaattcattcccaactatgattaaactaaataaaatatatccctaaacatataataa

SEQ ID NO: 19520 - DNA, 326 bp, Oryza sativa
  unsure (1)..(326): unsure at all n locations
gcaagccactcacataaacaacactagtgagtgtcatcgcctgcccaccccacgtgcagtccgaggttgacgaaaccttgtctgatcaaactcctccctcagctctccttgctcgtgctctcccttagcccaagcgacgatgaggtgcatgctcctatacctacggccttcccagtctttggcagctaaagctgcggagacacccatgcctcctatgcattcctgatgccactatatatcccactaaacttcgtcaacctattatatttnggtgacgccggtgagtcgcttcatagtgcatatgcaccatctacatggatatccat

SEQ ID NO: 19521 - DNA, 448 bp, Oryza sativa
  unsure (1)..(448): unsure at all n locations
agcttgagtntatntgcgtaccatagtgttgtctcagtgacgcttgtgacacattggcttggggaggtattttatntagtaaactcgtcagttagtctcacaatcaaggggagaatgttggatgatattcttggctaatgccggttagctaggaaaaataaaatcccactggttttcctatcctaacaagaaaccaaagaagagaaatctgttttgtgtgatcggtacaaaatagattccaatttagcttgagaaaaaaccctgagccccaccgatgtcgctatatatagaaagagaagganggaggcaaattaacaacctaactctatctaaccctaaaccctaagtcaatcgtccgatcgattangcactggaangggttcgtgaggcatctctagaagaagaagatagcataagaacaatggcttcatttttaggtcagtaaatc

SEQ ID NO: 19522 - DNA, 484 bp, Oryza sativa
  unsure (1)..(484): unsure at all n locations
taaactccgcttctatctgttctntggttaagaaatccatcacattgcgtgatggctggatggcgtgtggaccacaggaacgaanaagctagtaagggcgatatcgccggccatgactcccttcgccacctctgctgccaccatccctccggtcaccccgacgcggtgggggcggaggagggattccacctggttgttgcctgtcaagacattacaaacagaactgttatgaaatgaagatgtatggtaagacttgtttgtgagttgtgactctaggacagcattatcttacagaacatatcccagacgaccgtcagggagcaccattggtaccatcctcattccagctggtgctggtcctctaccatatatcatangctgtaacaaaaatgttgatagagacaatgactaaattgtcaatatgcagtggtggatgcangatttctagcatgggtattcagaagtacttaaagcatatttcatg

SEQ ID NO: 19523 - DNA, 444 bp, Oryza sativa
gggctgcgccgttatatatacggctatgggttaggggagtatatgtggagctcacgcgatgatggagacagttaagcatgcatgtctcgatatgaagcgagagagatctacggagggggatcaagctaagctatatgggagttgacagggacaggagatgacttgaagtgcacttcttgccgagcagcatgcgatcgaggcaccaccaacacatgggggtattatacccggcgtgtgggtagggcttaccatggggcggcaaccatattcattgcggtgctctagccatgcaacatttgcacatgtcacctgtgaccgcctctgtcatgcacatgtatatgatctctctcgacaaacataaccggaagagatactactgcatatactccttctgttatcttataataagcgtcttgaattttcacttttgggttatcacgttat

SEQ ID NO: 19524 - DNA, 452 bp, Oryza sativa
  unsure (1)..(452): unsure at all n locations
agctngcgtgaagccatcactatggcgtnagctatctttttcatttcaatgtacctcgtcttcgctccttgcagtgcttcggagacgaagcagaccgcgctttgaccgaactctgtttcttggacgagggcaacactgactgccaccggcgaagctgctaagtataatagcagttagcttcctggggttggccttatcacagctggtgggctatgcaagtattgctttagctcgtcgaatgctacttggcactctggtgaccaattaaactttcctgcgccncggagggtcttgaagaagggcaaacctctttcggctgcccttgagaggaatcgactgagtgccgcattcggccagcaagctatagtacttcatgtacgcttgatggaggctcacttgctggatagcatccattttcccgggatcgcctcgtgcctctactgaaacaagga

SEQ ID NO: 19525 - DNA, 446 bp, Oryza sativa
  unsure (1)..(446): unsure at all n locations
tatttatattgttttataatgggcgggagaaagggatatgtctgaacttgcctaccaccgtcattaggagagcatctggagcattcacgccaaaccccaggatctacagtgatcagggagggtcgggctgggccctctccgcttggacttcggcctgtggactcccctgactctcctctatccgnttctcggaatattgggcttagtctttggtattttgatgaagatcacaacccatccttctatggatacttgtttctcctcactttagtctgaatgtcctcctaacttcatggtttatcacctgtatacaaatatacaccaacacttgtgagataagctccatcactatgtggatgtttattatctgaacttatgtagatgtggcggatagaattggatttacacgcgcaacaaacaccgccactatcttttgtcgtcctgat

SEQ ID NO: 19526 - DNA, 493 bp, Oryza sativa
  unsure (1)..(493): unsure at all n locations
tactcagcttaggctagtatggtagtcggcaagagtttacagaacttcttgagctcgttaatgacctgttgccagaggggaacaatttaccatagacgacatatgaagcgaagtaagtattatgtccgttgggcctggaggtcagaagaattcatgcatgttcaaacgactgcattntgtattacaaggaatacgctgacttggatgtctgccctgtctgtggngcatcaagatacaaacgagcaaagagtgaaggtgaaggaagtaagtcaaagaggggaggccccgcanaggtggtgtggtatctcccaattgcggagcgcatgaagagaatgnttgcgaataaggaacaagctaagctagtgcgctggcatgccgaagaacgganagtcgatagtatgctgatgcacccagcagaatcagtacagtggaggacaatcgataggaattaccangaattctcatatgacccangaaacatgcgtttcgcaat

SEQ ID NO: 19527 - DNA, 134 bp, Oryza sativa
tggcctacttgcaccgcagcgctctcttgcacagtcccattctcgccacgactcacgccgtcatgtcgctgtgcttgcgtgctagattgtctatctctagcgcttggtacgtccttctatgcctttgtagttgc

SEQ ID NO: 19528 - DNA, 474 bp, Oryza sativa
  unsure (1)..(474): unsure at all n locations
agcttaattaaatctgccttagagcacaataaattcttgacgatgacgcccgtgattccctcacattaacaacagcaacatacctttctttcacaattccacatttatcaacgtacctcaacacctcggtcatttgctctttaccagaactatctattgactcattaattagcaagcaaaacacatcatggccaaagtctccaaaatggaatgcaatatatcttgggcaaagcagacaacaatattcttctgaatctcacgagctatcataagacaattcttcgatgcaattttntctccactaccttgcctaaagcaacatcatgctctgctaagatatcacgaaactctaagaaattgcgtntgtggatgaatcacttgaatcatcattgccccgaaaaggcaaacctagcttaacaacctcctagcgacattaattgatccattaaatcaacaaaatatgcattttaggac

SEQ ID NO: 19529 - DNA, 423 bp, Oryza sativa
  unsure (1)..(423): unsure at all n locations
ctatattctctagctatcttacgtattatttctacttattattatagtaaatnctagaanactacactcttattgactaaactatcactctgctgcaacctttacaccacatttcatataactgcaacattaacgctggaaattatcacatagccgcaattccgtcgagatacctcgttcctgacattctggacccacatgtcatacatatatgcttgagagagggaggaaaagaggaccacattagcacgccacctcatggttttttactgtagcgatgccatgttagtgtgcgcttgcgcgaataaaatacgtggtctggctgcaccactttggcttggtcacgggcacacgccgatggggtcgagttttcataggaggctatggacaccactttggctccgtcatgggcacaagctgatg

SEQ ID NO: 19530 - DNA, 421 bp, Oryza sativa
attttcttttctttctttcaccatgcctcctttgtctcgccttacctgctgtatcaaattaatgagaatactcaactgacaaatgttcatgtacagtgcgacagagcatgcctgcctgaagtgccggtagcagagggcagcgctgagcctctcaaggtaaggtatttacatgttgtactccatttcacttactactactccactctaattgctaattatttcttcattctatcatttcgcacatatgtatatgcatcaggggttaattaattggcatattatatcatcaacgcttttactgactgaatcattctagtcaagctcgaacccttcctgcgcttttacatctcctgcagcttctatatttgtgcctgttatacatgccaaaatgcacttctcttttttatctttgacaaataag

SEQ ID NO: 19531 - DNA, 426 bp, Oryza sativa
  unsure (1)..(426): unsure at all n locations
ntatcacgttntcaagtcaactaaaagtatggatgcctctcttgatagtaagtcacgtgagtgacattcaagatatctatttcttaacggtgatgaccacggatggtggctcttgagacacatagtggagctgtcccttttggctgctgtagttaactgcttcattttcgttattgggtactcttcctatgtaccagaacctgctctcgattatataatatatggcctgtttattgcattctaatctctttaacaatggtttattccattgggcccacagctatcttgtgttcagaggagccaacaaacaaaaacatatcttcaagaagaaccctaaagctcttatttggngtaaacctcccacacttgtcggngggaagctactngtatctggctactggtaagatggatatgcatcttatggag

SEQ ID NO: 19532 - DNA, 278 bp, Oryza sativa
  unsure (1)..(278): unsure at all n locations
tatcaaattcatttccattacttcttatataaatcatttccgttagtattggcctgaatggccagtgctactgctattttaacatctaanacaatatgcagctagcgatgtgtacttgtcgatcttgtccaaataccaatcaattcggatctttccggttaatttcctactgatattttatcgaatctgtataccactcgttcattcattgaatntgtcttactcgaatataaagtatgctcactataaactcattaactatgtatatttctgattct

SEQ ID NO: 19533 - DNA, 437 bp, Oryza sativa
  unsure (1)..(437): unsure at all n locations
cactgcagctcactggaatcatctaggggatggtgcttatccaagacagangattgtgccaaagttctcactttcaggaccttgagatagcatatcgtttaccctacaaccctacgaagtggtctatctaacctgttacaagcacctccttgaagctggaaccataatctgtgaatatctggacgtattttccagactaaattaacgagtatgccacctataacgataagattgagttcgccttataactggcaccaggcactgcaccaattgctaaaagaccatcccgaatggccactaacgattatcagaagttaaagacacatcaaaaactggaagtaaaggtatgtgcacctagctattctcttgggaacccagtgctttggtaagaaaaagatggtctgaagatggtatcactataagcctgatgaatacta

SEQ ID NO: 19534 - DNA, 333 bp, Oryza sativa
tggatgcatttgtataactcatgtctctgtgcttaaccaacgtattatgggtatgggtgatcacttgccagcacaattatcgatgattcgttgtttcgggtggaccctcgttctggaatttctgactttgttaccattaacggccatttcctgacgagagctcattgatggctttcttgtgcctttgcggagacacgttggtaaagggtgctgagggcatcaaaactttcttcctgttcctttttttctactggacgcttgttgtatcgagttatgtcatgatgcctacattgatggctggactgaagagcctgatacctctactgcaccctc

SEQ ID NO: 19535 - DNA, 402 bp, Oryza sativa
tactaagcctgacacgctccttgtggtggtgaacacaagaatgagccattgttctatagagattatgagaaatggaagcgagttgttactgccatggtaatagcagaggacgaaccaacctgatgttcatgacgaagaggtagagccccaccctcctcggccagccggacaatgcggctggcgccggcagattctccggcgccgccgcagccgccgccgtcttcttctccgcgccggcggcaccgttcatcgtcagcgccgcgtcggtgacgacgacagcggccgcacgcttctcggccgtactgctcgctgcaacagcagcagcagctgctgtgacctcctccatcttcttcagaccagccatgccggtgccgggcggggaaacgtacgtgttctgctctt

SEQ ID NO: 19536 - DNA, 371 bp, Oryza sativa
agatctaagacgacgagcgcgactttgccggtgtcgatcgcgtttatattggtcgctgatcgatcacgccgagatggcctctcgccgcgccatgacggagtgggacggagatggactgttcgttcgtctagagaaagagcacagggcgtagctactggtcggttgattgatcgcgcgatcgatggagaccgactcgagagaccgggccggcgcgcgagcgatgatgcaagcgaagcgcgcgcggatgcattcatcgatcggcgaccgcgcgcgcgcgcgtactcgtcacgtctcgctcgtggagaagctggcgctgctggcgatggcgctgtccgggtttcttgtgctcgcgccgcgcgggttcttggaat

SEQ ID NO: 19537 - DNA, 368 bp, Oryza sativa
  unsure (1)..(368): unsure at all n locations
ctaagcttgttctgctatatttgccttntattctttgcattgttcactctttatttcctttttcctattctatgccttctttatggcacagaattgcttattctttgtttctgttgaatatctatagttgctgctgctgctgcttcacgtcatgatcctttagacttcattttctcatgaacacaaggaacttctctagggttcactgtattatgctaccactattacttttgccacttctatattctggagaacctcttcaatcgctatagcccttatttgcaacttatgtgctggngacgagatgtgcgtatatctccagtccttagcttagcgtaacaagctatgcatactttccttgctgacat

SEQ ID NO: 19538 - DNA, 383 bp, Oryza sativa
cgcacaccaaagaagacgatggcttataaagacacgcgctctttttacctgtcgcgccagatgaccgagcgcgtggctgctcacccggagaccgcgcacgtcccccctattccgggtcggccggtggcgctaattgaggttcttcgccctcgatctgaggaacgttagcgagagaggaagaccacaagacaccggcgacgtagacacgttccggccgctgtgaagcagcacaccctactcctgtgctctggtggatctgtgtgtcaacgcaatacatagagctctatagcctcatcgagatcaggctctatcacccctcttcttaccttttttcctcactctctctctatttttctattctaggactgcgcctgctttttata

SEQ ID NO: 19539 - DNA, 354 bp, Oryza sativa
  unsure (1)..(354): unsure at all n locations
acactgnnntaacatatgtgcttaagtccctaaaagacacatnggttcaccacacccggaaatatatagcatatgtggtataaaatccgagtaaataaactcataaaggatttaccaaccacctgaaaaatgaccacaatatataatcagcctaagccataatattggtcaataaaaacgcacacttacgtggcaaaaagcaatgatattgtatccaatcaattgcttanaaacccacacaacacctcgacttatataaaaaaagtcaatggggcagctatataaagctntactgtttgacgacctttaagatgcattgtaccaactcctnaaaagttgagtaactgcggtata

SEQ ID NO: 19540 - DNA, 474 bp, Oryza sativa
  unsure (1)..(474): unsure at all n locations
cctcatcaaggacaagtttttatgggatcctttcgactggtgacactggaaggcgaagagntcgaccattcctggaacgctgcctctctcaagcttttctatgtctagaacgggtggcacccacatcgccaaattgtaaaaatgtatgtatcgttatgtaagcccttcgacactatgtaaacctttctgcaaagaagaaaaaaggaaaaaaagaaaaaaaagagganaatggtaaaagacgaaaaactggatgtanggctattatctaccatggaggcctgaaccataataaaatctctgtgtnctccaccttcgtcttatttatttgtgtgattgataatttgtggaanaaccccaaggcaaacgcctgatcagcgaaaaaggccatggtggcgaaacanatcngtcgaagcatcgctcgccgaacgttgaaaccgcaacagcttggttcggngacaactaaccgacaccgta

SEQ ID NO: 19541 - DNA, 326 bp, Oryza sativa
  unsure (1)..(326): unsure at all n locations
tttcatgntttttaccagatgagttctgacaagtgatttagaagactccttatttacctatcattcttcatgcatacctttaatttcatgtgctaatggttgaatttgctgatgcagttgctattcggattttatgatcatggtaatcgaggttttcctggatgggctcttagaaattatattgcattcgtgagcctgcgttggaagattgagaaagttcattttctctgctaccgagaaaaacgaggacgtcctgacatacagcagtcccttgtcggcgaagcatcatttccggcacctcatggtaatttcgtacatctgagaaa

SEQ ID NO: 19542 - DNA, 460 bp, Oryza sativa
  unsure (1)..(460): unsure at all n locations
tagagngcagcaaatgggattcacctttngaatcctttcctctgtccttagtctataaaactgtagcctacgtcacttgagtagaaaatggagactgcttccagctttctattgaaaaggagattgtttattgcctactcaaagataacctgatcagctgacttttgagtttatattgttcaggatggaagctctcttgacgaagttaacttactttacttatgagtgcattattctactgttttcacttttcaatataatttgcacacaaattattattgggagacagtgctgtagtcatgtttgaccaacaacctcagagtagcgctaatgaatcaagctcaaacttgcatatctataatcttcaagccacatagcatgaatacatctaaaggaaccctcagattatcataccatgcatgacactgtccaatggtaatctatccagcttcttgaatca

SEQ ID NO: 19543 - DNA, 425 bp, Oryza sativa
tcattctcctcgatctttccatcgtcctgatctagactaattatccgtctcttcctatgtctgccattagcaataaagtgataatattttgtattattatcaccaagaagaatatcggtagttttagccctttgataccattttatttcttcctcccgaagaagatgtgctaatcgatctctggaccgagcaagacactatctttccagatcaattagagcacgaccttcagcggtgatgtcaagataatcgattgaatgttgtaagctcactctttctttacgataatggccactgatgtgtgctgcccatcctctaagatgacatcgtaaagcactcatcttattattccaacgttggactgcattattcccttttaccggcgtatttcagatgtcaaccactctatcatgtgagtcatcacg

SEQ ID NO: 19544 - DNA, 454 bp, Oryza sativa
  unsure (1)..(454): unsure at all n locations
tccctggatctgggaagattctctttcaccgtatttggatcgtntgatcgattctcttgatcgctacttatgggcgtgcgctcaaaggatacaaacacggattctcatacaaaaaggggaattcgtagtcactttttcctgtcgcgtaaaaaacaggctttacgcgagagcaatagaggttgggatacatctatctcttctgagcaacctcttttggattcttaagaccacccttgcagtaggataccgtctgctntgngttctttattatattatctccttcgagggagttttaggatcgttcatgctatatttagcctattttggctcttactgtctccttttctcagggaagtggttaaggacctcacaagatagatgagagcgccaggcgcagatttccggaatacttctaccgngaatgctcatcgaatgcgcacttctccgattatgc

SEQ ID NO: 19545 - DNA, 421 bp, Oryza sativa
  unsure (1)..(421): unsure at all n locations
ntactggttgacacctcttaagatgcatggtaccaactcctataaagttgagtaactgcggtataaaaggattttaaggtattgggcacttgatcacgcgcactttggcctaagcaaaaagtgcctaagtccctaaaagaacgtgacaggccacacctgaaaatatgggctgcagacatattaggcctaggccaaaaaatatgccttcgataccctttaaaggatgacgcatgtaacatgctcccgggtgatatagaccatgtgatctgagtgattatcccttatgggatactccaaaatagatataaaaattgaatcccgactggcgcaagtattcggttgataacccttacggtgaataataaatagtccagtctttgagcatagaaaatagacccatgatcataaattcatgttgcat

SEQ ID NO: 19546 - DNA, 477 bp, Oryza sativa
  unsure (1)..(477): unsure at all n locations
catgacagaactgaagtgttatgtgtctaggtgacctgnggacgaaatccatatatataaatgctaagtgacgtcatctagccgttactcacaagtttgaactggaaacctgccaggaggttccgggcaaaagtgccaggaacttncgggcagaacttatgaagttttttgtaaataaacggcgcccggaagttccggccagaacctctgggtagccctctctgtcccggtgtgaaaantcattttcaaaaatgattccaaaaatcttttgactcatggatatgactaagagcactntgtataccctagaaccacacttgaaacccctcttaatagtacgggttttcctaaactcaaattcgaaagtgaagaacctagtctaatcaccttcggtgtntntcgcacttaggaacattcannatgggaggtctccttgcattcttagccatcaaaacttgggttgggacgtaaactcta

SEQ ID NO: 19547 - DNA, 254 bp, Oryza sativa
  unsure (1)..(254): unsure at all n locations
tactaagcttctcgtttacgtgctgatggtacgtacgatggaagaagntgttatatgttgagttctctttttcgacggagggagtatgcttttagccctttacatgctagtcagatgcaagttatacacatggtcggatgcatagcaatttccatattgcaaacacacggtgcattctcaatgtaaattgacagttaacattcgtctcatttgagtaaaatacgatgccggtccttatagtagaagcgtggtat

SEQ ID NO: 19548 - DNA, 451 bp, Oryza sativa
ctaatatacctaaaagcaataagatctctacatagacggcagatctttcatatctattaagcacataagaaatgaggcctacacaggtgagatcggctgaaaccccgatactaccctaatcggcaaccaaagacaggctagagactgagattctaataacgaactataaggtccaactcaactgatgcagctataagtatgaaaagaagagcaatatctagataatcaagccatcggatattccatatggtgcgggatactactatataatctatgtcaacgttggaatttaacctaatcggctgctctctagagatagatattagccgactgaagggtatatagcaatattgccacagactatataaaatatatgataactccgcaacttacatagacaagattagagtgccataaagatggatacactaataccgagaacgcaagccgc

SEQ ID NO: 19549 - DNA, 477 bp, Oryza sativa
  unsure (1)..(477): unsure at all n locations
tgacacagatgaaggtatgaaagaggaagatcaactatctgttgatgaagatgatacagaggaactagatgaggatcaagacatctctgacaatgatagtgaagaaaatgatgatgagctagaattggactctgatatggatgaggagaatgatgtatctgaatctgatgatgatgaggaactcagtgagaaattggatgattctgatgaaggctctgatcaggatgatgacagtgaccacgatgataagtcaaaaaacagcagtcgcaaggcaaataagagaaagttgagtgattatatagggcaacttaatgctgcagatgcaagccttcgagctctgaagaagttggcaggagccaagaaggctgaagcttcgtgcgatgaagctggtnaaatcttatctgatgaagaatttaagcgtattaaggagctaaaggtatgggagttttntcagctgtagtcatgctgtggagcttc

SEQ ID NO: 19550 - DNA, 443 bp, Oryza sativa
  unsure (1)..(443): unsure at all n locations
tggtgccaccttgctgtccctactntttgatccagcggtatctgttgttgagacactacggtatccgagggagaaagagatagggaaggagctcactggtgtgggagaagagaggctcaccggtgcctcatcaatcaagctccaggtggtgattggtgagagctggacgtggcaaagaaagagatggagagggtgatccacagtgcaaaagaggtaaacgtatctcagctttatgtgaaaacattaggttaggggtagtccaaaatgaaagttcggtaaaaaanaatactaacccaaactagacattactctaaattttagaatatattatggaacaagtgtatttacccaacggcggagggggagcgacctctggtgccgatggtggaggcggaggtggagcatacttgggcggtcggcgtcagatgatacgcggagcgagc

SEQ ID NO: 19551 - DNA, 379 bp, Oryza sativa
  unsure (1)..(379): unsure at all n locations
gaatactaagctggaagatgaatntatttgatttctctacaaaatccgcgtctatatagtgtgtttacccctgcgncgcccacacgcatgcgacacggtgggcgaaccccaccgctggcgccgacccctctcgtctnctccccctacctcgccgccggcaaagccggccggcgagctacgaaggcgtcggcggggctttctccacggtggtgctccctctcaggcgtgggggaggtggagttctcgccggcggtggggagtggcgacggcgatggatcccggccaagcggcggcagatgcggcaccgccgtcgccggatctggacggtgcgccggcggcggtgtcttggggcagcacaaagcggaggagtcgtggctgg

SEQ ID NO: 19552 - DNA, 419 bp, Oryza sativa
cttcttgcgcatgagctccttaacgtagaggatggcgttgttttgttcctcggtccaacatccgcgcggcgtgcgcctcttatatgagagtgacgcgcatcatgttccgccagaacttgagccagtatgcagactacacctgcggacggacccccacgcgccttcagaaaccccgaagcaggagcccgccggcacatacggcgtggcagcgagctccgttgtcgagcctgccggagactgccgccgcgcgatctagccgccctatgcccgggagcgctgttggccgcagatccaccactcccgagcctggcgccggcggagacggaggcgacgcattaagcggtgagggaggagtaagccggcaccactagcggcgatggatgaggaggacgcacgcgcacgctttcatcgtcgatacc

SEQ ID NO: 19553 - DNA, 469 bp, Oryza sativa
  unsure (1)..(469): unsure at all n locations
tgcanagactattcaaaggtttcttaaaagttatttattattctggccttctggggttcatgagatcgaacggtaggcacggcacaggtgtgtatcatcatgcgaagatgatttgattatttgattgttaatcacgcttaccaagtgttcctgccattcagattctgttggaaaaagcagaactacttctcacaactttctgttctgaacatcagaacatggacaactcatgctagagaacattngatggagttgcaggggctggagctctcagttgaacttgtctctataaaatggcagatgaatggtgctgaaatattgcaactgaaacagatgaatttgctgtgaaggtaaagggagttatgaaactgaatatcatcttgtcagtgacacgttaaggagttcagtttgctccaacatcttacctttggagcctcaaccgatagttgctgcaaatatgtggagaatt

SEQ ID NO: 19554 - DNA, 472 bp, Oryza sativa
  unsure (1)..(472): unsure at all n locations
taaggctgagggagtgtttaatcagaggggaaaagattatatttgttttatacgcanaangaggtaagttatgactatataattaattgggtattaatcatttcaaacttaaaaaataaacaagataaataacctaaagatgaagtatacgaaagtatacgaaaaacaagataaatcttctctcaatctcctgggacgaacacaacctaaagatgaagtgtaaaatattgcagtatacgacgggttgggtatcttaaagatgggactggcaactaattntaattttttttactatacttatatttttcatcatttatattttaaatctatacgaacatccatatncaaaatttatctataaaatatttntcccaggatagaaaccaaccagcgtgaggttntgctaactacaatcactattatgtggtgtgcaactagtacatcctatattatcagccggtgatattggata

SEQ ID NO: 19555 - DNA, 384 bp, Oryza sativa
taatttaattttagcaaccagcacggatcatcgtcccaatgagacaaggactcgtgaacgctatccatatactccattcgttccataatataaagcatttagatccttgaccagctatatctactaaaaaaatatgttctaaataaaaagagttgcatacgatgataggttctttaatttattaagactagaacactaattttacatgattaatctttgttattctttctatcaatagtaaaagctaaaatattaatttgtacttatataaaaatattttatttacaacgtaagagatatgtaggacatacaaccaatggtcctaatataagccgatgaaaactgtgactgtacagcgatttctaatatatgtaagagcctaat

SEQ ID NO: 19556 - DNA, 426 bp, Oryza sativa
ttatattttagcaacaagcacggatcatcgtcacaatgagacatagactcgtgaacgctatccatatactccattcgtatcataatataagccatttagaaccttgaccagcaatatctataataataagatgttctaaataaaaagagttgcatagtaagatagcttctttaatatattaaagctagtaacattaatcttacaagattaatctttttttattttctctattaatagctcaagtgagaaatatttaatttgttacttatataaaagatattatgttttagaacgcacgagtatatgttatgacatcaacaaccatatggtcactaatcatgatagtcgatgaaacacctgtggacttgtcacacggtcattcctattataattggtaatgagccacagatgtctttcatatctacc

SEQ ID NO: 19557 - DNA, 350 bp, Oryza sativa
  unsure (1)..(350): unsure at all n locations
attcttgccaacatggcgatgtccttggcatggtgaccattaacccatggtgtcatccattagcctcatcatagtgggacctattccttttcacatctcanaggagaacattagtctcaacaaatcggntgtcatccttcacttgatgaccaaccggttgcatatgaaagatatgtatatgtttgttgagtattcattaacatcacaagtgtcatatactcgtatgcaagctcaagtgcaaagatccgatataaataataggtgaacaacatggatctaaaacatgtacaataaatgtataggatttgctccccctaagtatatgcatacanagaaatatactacagaga

SEQ ID NO: 19558 - DNA, 322 bp, Oryza sativa
  unsure (1)..(322): unsure at all n locations
tcattggtgaaccgatgcctaagatgatagtgccaaagaagcccgaggttggtgtttggaaacaaacaaagagtggagcttcaacttctaatgcccctaggaagaccaaggtgacttttgatatgcttctggagaaatatgagaggcaaggtggtgagaagattcncaacaaagggaaaagaccaagatcacctcctagggagccgattggtcattcaccaagatggtcgcattcaccttcatatcatcatccacaagacatgtcatggggtccctatccaatgccgccgccgggttattcttattcttacttcatgccatg

SEQ ID NO: 19559 - DNA, 371 bp, Oryza sativa
  unsure (1)..(371): unsure at all n locations
aattcaagaatccattgaagtaactgttctatatgctaactctgtctgtgaggcatatgtcaaatgagcaggaacttctttgatcctagttgacattgcattgggctactagaaaacataaacctctctaaatgccaacacaaagcattactctgtgatgtacaaacaatgccaatatccaatgcattggctagtgtattgtntgatgagagtctagtaatattgtcatctgatgagtaaagcagacaatgctcaatggtagttagctagagtgtttccctgtcctgtgaaaacaaagaccaggaacacagctgagccacatcttgagttctgatcaaaccatagcttcatgatgtttccaagcattaata

SEQ ID NO: 19560 - DNA, 240 bp, Oryza sativa
ttcttgactatgtcatacttcgtgcaatacacacctttgcaacagggcagcagaaggatatagataaccctcatgatccaacccaagcggttgcataagatgcacaaaaaagcgatgcctcaaagatacaagcaaaataaaactacgctataggcccaaaagcctctgatatagtcctgacatgtgctcaaccctagagaaacctcccagggatagttcaatgacgaccagtgaacaaac

SEQ ID NO: 19561 - DNA, 491 bp, Oryza sativa
  unsure (1)..(491): unsure at all n locations
ttcatcgaacaaccatagtgaggtttcatattgtatgaaggcataagcttcataatgcttagagtaagtataataggaggatgtaagtcggctaaatgctgaggtggaggagagaggagaggagagaccgagagagaggagaagcgggctgtaaacttatatctcgattggacgcaagaaccaacaaattctgtgagagagacaagtgagccctgtattagttgtaaatagctaactattatatgtgtgggctaagagaaggctgcaaagaatcttatatagctaacaagtcttctgtattattagccttgctctctagtaggcacaaaataaatcatgagtgcaaggtgggcaaaaaaccaagcaccaaccaacaggcggtgaagctaggaatagatcaagcgtanggctgagctaactcttctagctaatcattctgtagatcaacaattntgatggtatnttgatgaaatctcaataatttatagggt

SEQ ID NO: 19562 - DNA, 402 bp, Oryza sativa
atcacggaccaaaaactaagctgaacatgcgtcagcgactacgactgctccttttttgtcttagtactggggaaaatctcaatcgcacccaggtatgaatcagggtcacgctcttggtggctcacaagaccaacttcactgcagaccgcgccaaagaggccgacgaagaatttatgagtttaccgacctcctcctctaacctctccaagattgcagccagcccgtctagcccaagcgcgagtgcctgctatgtgggcgggagtttgctgctcctgcgcacggagatgcccactcgacggcccgcgcgctccagccgatcgagtgcgtcagagagctccccctgcccaagctcgtgtgtgaggcggagagccgtgatctctctatcctgaactacgccagcac

SEQ ID NO: 19563 - DNA, 492 bp, Oryza sativa
tacaaggcttgtactacgaaagcttacaagctttctgtgttgtcattttatcttatcaagattcaataaggtaggggtaacaaactaaacggcctccgtatccaaccaaaatttagcatggttaaatttgatatcaaaccaaactgctctacatatggaatttgtaccaaagcattacgctcaactctacaaaatctaccaaagatacacgcgccctttttgtttgaagaaaaagctaatagagctaaccaagtttttgtggcatgagaaccacgtgaggcaactgctacactcaagtacttggatttctaagaggtagatatttcttttttggctactgaagaaactgactgcataatctttctctggatgctcgaatataatgtagttcaatgtgaaatcgacatggcacacgccattgttaacctagttgggtgacccacctgattgcattcacagcatatttgccgggctatgcattagtactcttac

SEQ ID NO: 19564 - DNA, 435 bp, Oryza sativa
  unsure (1)..(435): unsure at all n locations
tgcccgcaggtacaccaaacacacacttatcagggttcagttttatgcgggcggagcggaggttctcaaaagtttccgctagatctgaaagtaaagtttcttggttgcgcgtttttacaaccaagtcatcaacataagcctcaacattacgtcctatttggctacccaaagaaattcgagtagtacgttgaaaagtaggacctgcattctttaacccgaagggcattgatgtataacaataggttcctacggnggtaatgaacgcagttttttcctcatcctccctagccatgcgaatctgatggtaaccagagtatgcatctagaaaacacaaaaggtcgcaccccgcagtggagtcgacgatctgatctatgcgaggcagggggtaaggatccttanggcatgccttgttaaggtcggtgtagtcaatgcaca

SEQ ID NO: 19565 - DNA, 494 bp, Oryza sativa
  unsure (1)..(494): unsure at all n locations
actagcttagcccaacagtaaataggcggggcaactgtttttctaataattgacgggaaaatatctggtatttgagtttaggggtaattcgttcgaccgcaatagttatgggggtaattcgtactttttcctaatagttatgatacaaaattaaatntattagactcgtattcaaaggtacttataattatacttttatatcacataaatgttattatgatatcctaatagatcaattgttggtcaaaactctattggaacaaaaccaatttaaattattgatttatgagttatataatttgcaacattgggagtactagtattatcacaagtaaaaccaatttaaaccattgatttatgagttctatccagagtagaaaagaatattntattactagtagttgagttgaggtggtagtacaaaaatatattatccattcaatatgaagagacgaatgatctagaataactctagtaccacataaacatacact

SEQ ID NO: 19566 - DNA, 481 bp, Oryza sativa
  unsure (1)..(481): unsure at all n locations
catcttgtaactccatatatgtattatatttttgacaggaaacagaaaaggttntccactatctacggacgactaaatacttgcttctcaagattgaaaaagaaagaagtaaatctcacaaaactataactgtttagtcaaaattatcactatggctagaagcctagaacttcatccaaacatttttcacaaaacaacaacgatagcgaatgattttatcacaaactaagtgtttgacatctatgcccacagtgtaacacgtttctgataaaatcaactactgctgtagttctctgaaatagccaactaatattgcagcataccgataatttagacaagatagttgtaactttctgagatatactacaacaaaatcattggttctcgtctattctattgctcagttaatgttaacagcatatatacccttctggcatgtctaacttgaaccanaagttctcaatggattcttcatactcta

SEQ ID NO: 19567 - DNA, 501 bp, Oryza sativa
tcttcagtgacgcactggtggaggatgacttgctgagatccatctctgatcttttatcgccggagaaagagctcaggtcgatgtactatggtttcttgtgggagcggagaagacgaagagcgcttgcatgcgggatgttctttgcatggtgggcgaacttcaaaatggatcctcaaaattcctctaaatagacgcactaccgacggtgcgaattccaaggaacagagagagatgcccgccggatatttctgggtccgttacgcgcggcggttttttggacttcagtttaaattcgctcgtgaccgttgggcttcaaatggtgctctcgactacgttatgtctctacggtcctcgcaccgggaacgacaacagtcttgacgccataagtcgcgaatggttacactagcttcatttaagcagaagtctggggctactgtcagggttaccgattatgtataccctatactctttgatgtacgtcacatatcggtatggcatacc

SEQ ID NO: 19568 - DNA, 439 bp, Oryza sativa
  unsure (1)..(439): unsure at all n locations
cataaaactaagcttccctggagggagtgccgtagttagcacccgccagtctctctgttgttcacgacattgtcgatcataagccgcttttctctgtaagtattgctcattactttcggatgcgaaataccagcgaccttcttgtaaacaagtggttaggtcgagaacgggattttttgtatcgatccactcgatgtatgcacaagccgtagtgcgggtctgccgaatagagtagtgttacgaagaataaagcgattgcccatacagaatgaataagcatatgcagataataaaatacctcacggtcatagttagggcacctaanaaagcgccttccttgaatatcaggattcctcgaagccattagttggcatcgatcaccgcatangcagagaggacgctggcaccaacgtggtagtaggtatacacaaggatcgct

SEQ ID NO: 19569 - DNA, 483 bp, Oryza sativa
  unsure (1)..(483): unsure at all n locations
gaaactaagcttgtttatttctgaccatgaagcgttgcatgtcaaagtgattattatatgtgggcattcaaacctacaacaaagtgcaacacaatcttgatagatttgataataataacgtggacttctagtaaatgaagctggcaaaataatattctgtcctgctgcagatccttctgtaatgccagcgctaacagcctgaaccaaagagttgtatgggctagctctaaatatcttctgaaatgactcatccctgtaatggctcaagcgaccatcctcgacgcaacaaaaaccatcaacaacataggcttgagtcaatttcttgcaccgtaaaggagtactaaagtcatcagctctatcatgcaatctatatgcaaattactcaactntggtgacatttttcttcttaataccccttgaccgttgacattgacggtacctgagatctttatggaagccatctntctcatatgggaacaatag

SEQ ID NO: 19570 - DNA, 464 bp, Oryza sativa
tcatgcctcgcctcacctcgcctgagtcccagccatcaattgtatcgacgcccggttcccactagatcaacagggccgcgctacgggagggaggcaagagcaccgtctcaagaagccaatcaagaaactagacacatggacatgccatcgccactaccaccagctgttcgacacggtgaggcagctatagcttgggtgctcacaagggcggaactacatagaaccatgggggttcctaggcacccggttgaaaatattttgtaagctggtagtatccatctttaccatgtcggcaccccgccgacctaactctgtgtaccccaagcagccaatcaggccgagcaagggcaataaaccaatagagacacatagtgatgagtattcttgtgggcatagcaagattagtttggctggtgagtataacactagtcgatatttgacaaattgcatgctagagcccaaca

SEQ ID NO: 19571 - DNA, 482 bp, Oryza sativa
tactagtttaaacttaaaagcctaacttggctcgaacttactatatcgttacgactttacctttaaaccaatccgagctgattcgagtcatgagctttgagctctccttttcccactccttctatctcgaaagacctcatcttttccaatcttgtgttgttttgagtgaagtggcagccattattatcttcatcctaaattataaaaacctatattacaaaatgagatgtatatttgtactatgaatcggcttagattcacagtaatagaatatgttgctttcattcctttatttttatattttaggactgcgtacgcatggatctctaatctatgtgagctgtagtatgtaaaggtgtcacatgccactatgtagtctcatctcatgctacttgtggcatacgctcatcctacttgcctaacgcagataatctgttttgcctttccgtgcgaagatcaacaatgacagtcgacatgacact

SEQ ID NO: 19572 - DNA, 440 bp, Oryza sativa
  unsure (1)..(440): unsure at all n locations
ttgagattaatncaacattggtacatgcatggtgtttacattactcacgcccatgctnctaaagaaagaagcccaggccagctagaactgacactccaatcagtgcatgcacctaaaaatcatacggatttgccttttatgttcgatccaacacaaccgtagactgtttcggttntgaaagatggtgacactgacatcatatgcatggcacaccatagggagggaaaaaaaagaaaaaatgcaagctaaaatatattcagtgcattgcatgcatgcatactacacatgtattactgcctctgacaggtcggtcactagcgtcatcagcaggccacaaatttgtaccgcttctaaacgacgcatgcatgtgcatacataataatttgcacatgcaatgcagcggtggtacgcctcaatatactccctctattttaatagat

SEQ ID NO: 19573 - DNA, 496 bp, Oryza sativa
  unsure (1)..(496): unsure at all n locations
acctatgaaactcaagctgtatgacgatatgtgttctcgagagtagtgcttccatcttcatgatactctaatcttgtgtatgtaattcgtcgagttatcatatatctcacgtaatcgttgatagtatcgtcatgtaacctataatcggctaatatctgttaatagaagatagccgattaggttatatagcgacgttgacttagattacgtgacatatctaccactctatgaaacatccagcggcttgattgtctagatattggtcttcttttcatacttaatactgcatcagttgagtttgatctattaagtcatgtttagaacttcaatctctagcctgctttctggttgccgattagggtagcatcggagtttcagccgatcttatctgatgtaactacttttattctatatgctagattgatatgttaaatctcgccttcatattaagatcttatcgctgttaaggatattacgcntatgagtgatatattct

SEQ ID NO: 19574 - DNA, 487 bp, Oryza sativa
  unsure (1)..(487): unsure at all n locations
tcagctgtgtgctgatcgcatgctgcacatctcgggtgcagtatctcttattgatgtatcctgataatgtctcctgatgctccatatgcctatgctcatgcagctgatatttgagagattgaatggcatatgcactgtttaggtttttatgggagtttttggtttgtgcaagtggagggggtcacttgataaaactttgtgacctatgagactgaggttctctcttacatatatgggcagttcttcttgattgaacgaatgtatagttggtacaaacgagctagattatttgcttcatattaacagggccggtcctgatatttccaaggcccagagcaaaataaaaatagagaccctcaatgggtataatatgtagaaatttttttcttaatgattgtagatctaaccaacctanaatacgatgatactacactagactacgtcagcttatacttattaaattattgtaactattgtggagaaaaca

SEQ ID NO: 19575 - DNA, 425 bp, Oryza sativa
ctaagctgatcgactctgaagcacacgacttcgactagagcaagcattggttcaccttgtaccgacacacacatggcagctctgctctgctcgttggggtctatgtagatgaccttgtgatcatcgggccattgacaagaacaattgaataattcaaggaagagatgaaggcgaagtttcagaagtgatcctaccaacactctattaccaacaccttgccgccagaaaatggccatgttagtacgctagggtggtggagaagggatacattctctctctctctttctctctaacccaactatgaggatggatttggagcgtgtcggatgtccagctcctacatgatggatgaccgacgacaatgtgctgtcttgaggccgtcactgaagtgttcaatatgggtggctctaatacagcaagcacct

SEQ ID NO: 19576 - DNA, 463 bp, Oryza sativa
  unsure (1)..(463): unsure at all n locations
tgcatgctagtgctagtgatcatcttaggttgttatacgatgtgtctaggatatcagtcgcttgcgtcctgcttgagtaactgagatgttcatgtggatatccttccccattgcgtataaagatgaaagctgattgggaaacggaggaaaacggccaccgcacgagctacgctgctagctagtgcagccggcgtaaaagaagaanaagaacggtatagatcgcccatccactagtggaaagtattttctacacctaggtgccatggtatctacgtgtatgcatgcaatttaaaaagttatataaaaattctataaaatttaataagatagattatgataatataagatattatatcaacacaagtctaaattcgatcaacatatgaagaaatagaaataacaaattttatctgcgttggacatatactatctactatctggatttaatatatttgggtctata

SEQ ID NO: 19577 - DNA, 400 bp, Oryza sativa
  unsure (1)..(400): unsure at all n locations
acagagaagactgacacagagaggtttctgggctattgcacacctgacggatgcccatgggctattgtggcaaggttacagcctgactgaaaatatatgaaggtactaacaaccaacttagcatggctatgttacatattcaatatttcgcttcttagtgataattataaaataatacatntcgatcattcattgcggtcttttgtgctgaagttactttgaacagattttcccatcattgcacatcaaccgtgagagttaataccaagatggcatcctacaagtgggtagcagagaacgccattccctttctatagaaagaccaaatattggtgcacaaagctcaacatgagtgcaaccacaccaaagtccagcgggtactcacagttatgcaggatgc

SEQ ID NO: 19578 - DNA, 357 bp, Oryza sativa
cataaagtagacaggtgaaacagaatggcattatgcaccgaagcttcacatgatcttcagtagtggagcactgaagagtgaagacatctgaacaaatgtcattagacgcaggatgcacataacaacaaagtgcgtacttaactattcatcatagacagcaagatcttaagtccttgtctgccttagttaaagactactgacaaatcaccaggcagcacacacaccatgccatgcagtcatacactgacaggcttcaattcaagttcatcaacatagaagtatataattcatatcatgaatgagcatagacaaaatggcacccatgcttcaattcatggtcactagagagtataattc

SEQ ID NO: 19579 - DNA, 497 bp, Oryza sativa
  unsure (1)..(497): unsure at all n locations
tagatgcgtcgtagtacacatggaaacccttctttggatcatgctatatcaaaatgggtgttgatattaagcgactnttcaactcttgaaaactctgctcacattcttctgaccacttgtacttcacatctttctaaagcagttgtgtcatgggcttagcaatcttggaaaaattctctatgaacctccggtaatagcctgcaagacccaggagactatgaatctccgagactgtcttcggntgnttctagttgggtactcattccacattactcggatcaacggcaactcctccggctgagatgacgtgtccaaggaactttactttatacaaccaaaattcacatttgctaaacttggcatacagttgatgttctgtagcttctctagagcaacgcgagaagtggcttcatgctctctctttgttcgggagtagataagaatgtcatctataaaaaccaccacgaacttgttcaggtattccataaacaccttat

SEQ ID NO: 19580 - DNA, 491 bp, Oryza sativa
  unsure (1)..(491): unsure at all n locations
tatatacagcttcactgtttgtttcagagctttgatacctctatanttaaaagagttacagaactgacgtcagatctctaaaatatgagtggctgttggatacagatacacttgatttcactgacaacttataacacattaccattgaaaaaaaaggatgtccatcaaaatatgcaggcctccaaaaaggccactaatacttcagttagaattctatttgtggctcaagcatatactatattgggaatctggggggattcctggtcaacataatatgacctgaggttctaagatcttaggtctgaactttgagaaggctcgagctgatggtttgtgataaacaatattcatacatctttactgcacaaagagtaggtgctagtgatgtcatggtatatcttaaattggtaatactctgtggatggatctacagtaacaagaaattagctgttgtaatgttttttctaatactgcaccatgcacacattcat

SEQ ID NO: 19581 - DNA, 487 bp, Oryza sativa
  unsure (1)..(487): unsure at all n locations
tgtgaggcctatntgcagggaatggngttgggacgctcacttatgatgcctgcaccaccgagagaagcaaagaacagccatgctcggtgggtttcaaactcgcattagcaaaaattatgccacggttgattactgccctgaaggacgctggagcaaattgtgaccaatatgagcaccttgggaaaacggaaactgctcaagaacactgaatgacttgtatggatatcattttttggtttcagaaagatgatcacctcacctgctgtttttcgtataaatgtacattacatttngttcttgtttctattttaaacattggaaaatttggttccaaatgtgttcatctcttctcaactgggagcttgagctgccctgtacagattgttntttgtaagcttgcangggtcgttatggccacgatagtatgccaattctgaaccgcgcctagaatnttcaggaatagagatgtgaaatctaatggatagta

SEQ ID NO: 19582 - DNA, 452 bp, Oryza sativa
  unsure (1)..(452): unsure at all n locations
tagaagaccaccaacttcaagaagaagaacaacaacaactattcttatcatgatgagaggagttgctttgtgtgtggtcaacctggccatctggccagaaagtgtccacaacgcaaggggatgaagacacctgcagggcagacctctaagttggctaatgtgaccattggcaacactggagatggaagcgggtatggtaatttacctactgttttttcagttaatcagtctactaattggtgggttgatacaggggccaatgtacatgnttgtgctgacatctcattgttttcttcttatcangtcgcacggggttccaccgttctaatggggaatgggtcacatgcttttgttcatggtgtnggcacggtagatctgaangttacttcgggaaagatcgtgcagctgaagaatgtgcagcatgtcccttctatcgacaagaatctctgtag

SEQ ID NO: 19583 - DNA, 492 bp, Oryza sativa
  unsure (1)..(492): unsure at all n locations
tacctcatcagtactggtatagaggtgtcgcgtctaagttcttcactgatggtngntntgaaactggcattgaattggtcttctatactagtgacgcatcttgacaagtgcggatctccatgggcctaaaggtctataactcanattaattttcaccatgcatactaagttcaataggccaaaataggctggactggcaggatattggctcaaggctgtgtcccctatccacccttcaaagcttaaagctgcagagagatgatggtaatggggtacgttctttacataataatatcttggtcggacaataggaatatctgaaccagattccgtttgatatctatgtgcgtgtcacgcactgtcatgagtggaactggatttacacgacaatgaccaaattgttgtatttatcatgactactgagaccagtaagaatcacataacataagacactatcagtacattatctgaacaatgacacagtcaacatta

SEQ ID NO: 19584 - DNA, 400 bp, Oryza sativa
ggatgcgaacgaccgtgggtcatcggtggcgcatgtaggccgtgggtgctcagactgcacaagaatggcatccggtagtttgtaacgggccggccaaattttaaacaaaggttgtgtatttggcggtggaataagttcacctttgaatctttgatcactcagcttgacgttgagtttttattacaacattgaactgcaattacagatataatacgtccctcaaatctcaaaatcattgcaaacaagattcctatacagtttttactgatgtggctgattcgagttagtcgtcgtcctacgtggtgttgacatggcactagaagcaagattttaaaaatataaaaagttagtcaaacaaaaaaaaaataaaaatagtggaacccacgtcgatgagtcccac

SEQ ID NO: 19585 - DNA, 430 bp, Oryza sativa
  unsure (1)..(430): unsure at all n locations
ggattaatgtaccaatgttnggagttttcttgagctctttgtaatggaaactgngagtggccagttcggttctacaacattggttgttctggtagctcggttgatttagaaggatcagttctgattattatccagcataactaatatacgctgaatctctcccattttcttcttataagagacgtaatagcagaatccgaatcgaccgtcacaatactatgccggtgaattagcaaaacataaaccaacgcaatcacaaaggtatggacaaacgaagaagcggcaagaacaatgtacgcacctggctgatggcatggcacacttcccggattcattctcctgcattaccatggacttatccagcgttaagactaatgccattgcacaacccaacgaaagcgcaatgatcattaatctctgcacagaaata

SEQ ID NO: 19586 - DNA, 392 bp, Oryza sativa
ctaagctactctgttcgttgcgacttataaaatctttagtcttatccatactacacatgcgaataacttaaccagataattgttcaaacacgggaaatgtactaatttgatgtcaggtacagcaaaaaagcgactgaagaactatgggggaaactaatcatgttacgttactgatagaataatccagccttactgtgttcaatgacaaatattttttgtgacgcagatgcattcaataaatttaatggagatgatggcaagtttcaaatgatatatcgaatgacccaaaggggctactaagtttatactacgctgcacacctcctcattcatggtgagccagaacttgaagaagcaatctcatttgcacgaaaacaccttgaattgatgagt

SEQ ID NO: 19587 - DNA, 453 bp, Oryza sativa
  unsure (1)..(453): unsure at all n locations
tctggacacattggacttgagatggatcttcctgttataagtccgtattcaagctcaaagtctttctccctgcatgttccaactaacaaatttggtttgcatatcaattcaaagaaagtactaaattgcttcattctgtttccacagtgatgtccattgatggtgagacaagtagggtgatgaaaggtgtccagcatggtgcttgtgattacctccttatacctgttcgaatgaaggagctccgcaatatttggcagcacgtgtataggaagaaaatgcatgaggttaaagagatcgaaggtaatgatagctgcgacgatcttcatatactaataaacagttttgagggactggatgagaagagcctttttatgagatctgactctgataccatgaggaagagaanagatgtggacaaagaccatgcagatcaggagtcaagcgatggcaaca

SEQ ID NO: 19588 - DNA, 434 bp, Oryza sativa
cacgccttaaaactagctttgaccataacttattggcctaagtgagaatttattttatactactatcctttcgacatgtcaaccgggtcgtctttgtggacttgtgcaccaccacactccattatactgcagtgacatgggagctccacacgctaggctgtttttgtaagaaaacaacactgtattatcgggtatgttttgcagcagcatctaatagataacttggctactctattgcacggacaggctacagttggcaatgtaagcaagaaacctaacgttgctacaataatgtcatcggtttctggcattgaaagagacgaagaatcatgatctctgcccgcccaagagtgattgcactgaaggatatggtcctgataagagaataattatgggacatgccatgccatgacttcgtacgctctttaatactg

SEQ ID NO: 19589 - DNA, 378 bp, Oryza sativa
  unsure (1)..(378): unsure at all n locations
tctcgatcttgccttaccaggaacccggtgtggctcctatctactccaccccggcgtttccaactatgggcatgcgaggttttcctanaccgactagttacttaaccagcgtgttccattccaccttgtggttgcactctgattatgctcgatgagtttcccacaggaatcgagccttatatgtgaatacgggacagtgccacgcaggcacaacccccacatcgcgaggtttcacaattcactttatttttaacacaccgacacctcacgtcgggttttcaaggctactcaaacccatttcccaattttctacaatcaacggtgtatgtgggataattggtatacacactcaaagagcacggatatcgaagtaccaca

SEQ ID NO: 19590 - DNA, 389 bp, Oryza sativa
cttgacgtaattcatgcctgattacagccggctgatataacataagcatgtctgctcggaggagcagccacgggacttatcatattttgatagctaaaatccctcactaatatgaacatggggtttaagagagggaataggagagagcaagggattccaactcacatagggattgagtgacatgggagggattcactcaatccctccctagatatattccacttggggattataatccaaggaactgaacaaggccttaacggaccgcactgattcctttcatgtgcataataactcttccatgacgatctttgtgattaatcccatatttcctgagtcatcagctagcatgatacgtttgtggaaataacatggttccgcatggagag

SEQ ID NO: 19591 - DNA, 319 bp, Oryza sativa
atcaccgcatcgtacttgcgattatcggtcgacagagaatccgccagccacactcctcacctctatgggaggggagtgacagacaagtatacctatattctccctctacaatgcagaatatgcatagcctttagatggaaaagcagaaattccacagaggcagcttgagcataccactttgattagctcaccactgcgtcttctgcttgccctacagcaagaacgactgtactacacttttcgagctctgttgctaatctatgccgctacattctactatattgatcttggaatcttgtgtgcttcggaatacatacct

SEQ ID NO: 19592 - DNA, 495 bp, Oryza sativa
  unsure (1)..(495): unsure at all n locations
ttcttacgacgagaacgatctttcacttcagcttcatccatattgttcttgatcctgcgcgactggcgacgacccttagtatcaactaataaatttgagtcaggaatccaattggcttgccctagaggaggacgagtgaaatcgcacacggcacgccaaccacgcaattcaccacgccaagttgcctcccatgattcctttctgaagtagggagaaacaaaaatgtttccatcaacacccccttttgcggaagcagctagaacatgggaacatagccgatgtaacaggtaagacttgttgcaattgaatttgcaagcatgatactctggccacaacgtgcattccaatgtgatgttagtagtcccaatgccgacaccactcttgtcatgaagtcgtatctcatataacaactctctattcccagcaggccacactctgtnggattctcccttcttacttttctcatccatgtactgtgtaatagtggcgctatac

SEQ ID NO: 19593 - DNA, 241 bp, Oryza sativa
cattgcaacctcttccgatctcccatactcgaggaacccacaaagccacaagcgctcaatacaaatctcactataaatctaccctcatctgcttccgagccaggaactaacagaatataaataccatgcattccccatctcccctattcgacgaggagatcaagcagtgcgctgtccagcagggctaggttttataagatgacgactgtatcgtcgacgctgggacgctgatgccgattca

SEQ ID NO: 19594 - DNA, 383 bp, Oryza sativa
  unsure (1)..(383): unsure at all n locations
ngagctgctgcgngcttgggtactactactagctatgcgattgcatgattaagcaataataataagtacttttatctcttcagctaaatatatagtgatgagtgctttttaatttcttcttgcgctctgttatatatatatgtgactatctctgacctgatcatgatcatcgtcgtcatatactcatatatctctactcgaactcgtggtatgtatggctgttgattccatcagctgtggtgaactgattgaccctgtacaaagattgcaaactggatatgtatctgcggctagagaatgtgtggtataatttgagatcttgaatgggtgttgcttaagggctccttattttccctctctggaatgattgattattggaacat

SEQ ID NO: 19595 - DNA, 459 bp, Oryza sativa
  unsure (1)..(459): unsure at all n locations
taaaactcagctaatggatatgggatataaagctgatgatgactcagaaattttatgaatatataccagnctctaaacgtgaggaatcagaaggaaaagcttcaagcctgcgagcagagcttaatgcattgaaagaaacaggaaaaatgatggcacatggtgtcgatggtgaatccacaaccaatgaacttgggaaaccatccaactctgacataaacaagggcaatcaacacggagtggcttctcttgaatccaagcttcagctagaacgcgaattctttcaagcatttattgttcatcatttagccttcatagtattatgcctaatgcagctatttctaaacaggttccctgctaaagaaggtccaaaatgtgtttctaggaatgaagatcagcatgtacagatggcaagatccacatctatttacttcttgactatgctagatcgatatactggaa

SEQ ID NO: 19596 - DNA, 364 bp, Oryza sativa
caagagagaaccaatctgtggtaaaagaaagagatctatccgatagagacttacctcagcatactcggctggtggcgcaccacacgggatggcggaggacgacatcgtcgcgggcggaagtctggccggagatgaagacacctggggatcgccttatgcgtcggaggaatcgccggagagagagaggataaagttcggcttcagcggtaataacggaggaaacaatgtgaaagttctcgggggtgacggttagtatttatagggctggagtaacggtcagaaaacggcaagtgcgatattactcggactcgatatatggcaaatccgagacattaccaaatattccggacttggggggcatgtg

SEQ ID NO: 19597 - DNA, 472 bp, Oryza sativa
  unsure (1)..(472): unsure at all n locations
ctcagcttaagatgactgacacccattaagcctcttgcaagcaaatacatactccagttgcaaggttggcctttccttagagatgtccaatcatatgtagtaacaaaatactatggtagcaaacctgcttgagatgacacgcttgttgatgattaagcgtgacaggccatgatgcatgcacaacatgcctttgctaatccacctttggattcaaaaaaattggttagtttctctagcctttatgtgcacttgtaaccacgaatgatgccactgcaattcttttctctctttattattagtatttttttcccttgcggtcagaattagtgatgggtgatgataccagcatctgatgttatcatggacatctggtcttgatatggcaaatcaatcactgcatattatacaanatctcttccctgacagaagagtagcaaatggcactttgatcagcatgcattacgcatatata

SEQ ID NO: 19598 - DNA, 438 bp, Oryza sativa
  unsure (1)..(438): unsure at all n locations
tgtcctcctcgtgcccaggctgagctcaagccctttctctctactgattctttagctcaacctcttcctgcactttatgccggagtcttgtctttatttcccttgactacaaaaaatacccgcgcattgtaacgggtgaaggctattctaattgtactattgttagatatatttgtttttgtctaagaagtatatgggatttttgttttgagatgatatccaattgaaacccttgtattttcaaaaacgaacgaatttaaaaccaacttaaatacagatgacataccacaactatcggtatntttgttttgagatgatatccaattgaaacccttgtattttcataagcgaacgaatttaataaccaacttatatacggatgacgtaccataactatcggtagaacttcttcaattttattaacatatgaaatactcc

SEQ ID NO: 19599 - DNA, 257 bp, Oryza sativa
  unsure (1)..(257): unsure at all n locations
gacctatgaaactcagcttcacaacgctagaagggcagtaattaactattctctagtagtctgtgtgaaaacacacaacgaaacgaagcaattaaaccagctagcactcatgtttcctcgcttcgaacgatcgatcatggcgccgcggcgaaaccggcgaacatctatggctttgcctccacctccacaggccggagcttggggaacttgacgaatggagtcttcttgatcaatggcagcagnttcttgaacagctc

SEQ ID NO: 19600 - DNA, 219 bp, Oryza sativa
  unsure (1)..(219): unsure at all n locations
tctccacaacctcatcattgacgagggcgagaactcttcttgtggtattctccccttactctagcatgaacagattggtgtcatacgacatcatatactctctacacctgataatcatatgttaagtacattgacggtatgaatgatggaaccaatatcaaggatacctatatacttatcggtgcatctaggatcggctggtctggtacnactacatct

SEQ ID NO: 19601 - DNA, 280 bp, Oryza sativa
taaatatagttaggcatcatatcttacctgaacatacctttatctaccaatgccattatttattaggttttgcatagatatagccgcttccacttgaagtgctacggagaaccaaacagataggtcatctcaatttaaacttatagcttccacaaactttatggtctgagtctttatctgatcatgctggttatatgcgtcaccacttaccgaacaggttgacgaaaacagaaatgattgtttgtgaaagaataacgttgaagagcatatcaacatcctc

SEQ ID NO: 19602 - DNA, 431 bp, Oryza sativa
  unsure (1)..(431): unsure at all n locations
agcttattgttacaattatttcaattctttaaccaatgaggactatcttttctttttgtttgattcttccttcatttcccagatctgttcccaatcatctcatctgtatgcaaataacattgccagctacggtattcagatacacaccgagcttggtgaattgcaagtgcatatgcaagatgaatacaaagaatttttaatggggaacgtatttggtgttgacacctactctggctccctaatgcacattgctcgggtcaatcttgattggtgatacagggggcctgagatcgaagatatggctgaaactagtagacttactctctgattttccatcgatatcagcggcatatgtgtaaaatttggcttcaagcatttggaatctgntgcgcttaaattgatgacctttacgactctatttaagagtcttg

SEQ ID NO: 19603 - DNA, 351 bp, Oryza sativa
gctgcctaaatacacaatgctgacttagttaacactttgttatacaagtttgctttagatcgaagcaagggtaatcggcgggtatttgcctacaccccgtccgagtagtcttgtattcatgctctttgttgtagctatgaagaaacgaactttgggcatattcaaaagacaatcaagctcacggacaagaagacatgataagccgagtacaccttcttccgcggatgcatccatcgaggaggcgtacgtatcaccaatgctgtacgaacaacttcgatctcgacctcgtgggcgaccgggaaaagcaagcctatcatatgctgaaagaccgaaagtgtgctcagacctgag

SEQ ID NO: 19604 - DNA, 467 bp, Oryza sativa
  unsure (1)..(467): unsure at all n locations
ngagctgaattataagaggctctattgcactatattgtgtactataataggaagagagtagaatagaagaagtctgaagaattcccgagttgtcggtaatcttctcctatctcttttattctggttattactctgagctcaatataatattcttcttgaggaatctagatttatctcatgagaattatctcttgggtagttcctaaatagcatacaggattattgttcactataaccaactaaaatatagtgattgctctagtgagttataaaaactaaagtagatattaattgcttagacgtggtgtttaggtagttggtatccagtaattactgcgtatcccacagtacgtttgatgtgggtgtagaggtggtgacagccctcgagatcacttaagtcctccctatccgggtacgcagtagagcgatatctgggaacaacgcgtttccagtgcctgaatattgcg

SEQ ID NO: 19605 - DNA, 464 bp, Oryza sativa
  unsure (1)..(464): unsure at all n locations
tgcttctggacgtggatcacgttagcagcaatccactacactatcaccatgaactgtttgntttagctgcggtcagaacggccgggccatgctcaatgttcagacttctacggcctcagctgatcaccaccaaacgatgtggatgctctgcatgcccccacaggcaaccacccgaagatttgttactccgggttttgccgctccatgtggcactgacatgtgggtccttaaaggtgttacatgtgggtccttataggtattacaggtagtcggtggtagcgagacggtctgtttgattaggatgatggtggaaaagaanaaaaagggatagaattgcttgaacgatgatgatagggtgtgtatgcctgggccctcgcatgtttgcggatgcaggagcatgcaaatggaaggttggcactatntttcggatgagtngtaagcgctgtacttgagcaatttgatgg

SEQ ID NO: 19606 - DNA, 327 bp, Oryza sativa
tgacctcacggatgaattcggcctccagaagtcgcgccacctcctcgcggatgaaggcttgacgtttcgaggcctgacgccgcactttctgccggaccggccttgcgcccggccgcacggcgagacagtgctcgatcaccttcctggggaccccgagcatgttcgccggtctccaggcgaagacgtcggcgcttgcccgcacgaaggagacgagcgcgtcttcctatttgtcgtccagaagaccaccgattcgtgtggtcttggacgggccgtcgccaaggccacctccttgtacggacctcgttaacgtgacatccgctgctcggg

SEQ ID NO: 19607 - DNA, 396 bp, Oryza sativa
  unsure (1)..(396): unsure at all n locations
taccttgatnagggcatggtagacaaagctgaggctatgctttttacaaccatggctcangatcattccaactacagaacattttgcatattcgcagaattctatttggagaaatctaaaatgaatgaggcactgcaggtctggaaagatgcatataaaatggtgaaggggcacgaatgggtgccacaaaagcttgtgaacagatatctgaagcactttgaggattcaaaggatgtggatgggatggagacgttctgtgaatgcctgaagaatctcggtcgccttgatgctgaagcctatgaagccttgatccggacctatatatctgtaggtagaacaaatccatccatccctcagcgcatggaagntgacagggttgatattcggcctgatatg

SEQ ID NO: 19608 - DNA, 346 bp, Oryza sativa
agtaacaaaatatgacacgtaaaagtcacggatgatcacacgttctcacggtctcatcatttcgtttatacttatgtctatcagccaaaatttatattttcaatcttaaattcaaagtcgatttgaggattttttgtcgaagttatcttttacatcgctaagaacacgtatataaaagttttattcacaaattattctgagtaaagtgcatcggtgagccttaaacttgtaacgctgcgacatatacgctcttaaactctcaaaatgcatattcaaacctcataatctatcaaagtgaatatctatgtcccaatgtgcacattctctctaagatctaccgggcgct

SEQ ID NO: 19609 - DNA, 391 bp, Oryza sativa
agtatgctgtgaataaagatactcccacagtcttgttctctacttcatgcgcacactgctttatcagatgcgcttaagatcacctagagacacacggattcaccactcctgaaaatatatggcatatatggcataacaacccaccgagcagactcataaaggatttatcaaccgcctgaaaaatgaccataatatatcatccgcctaagccatactattggtcaatacaaaagcacacttacgtggcgaatagcaaagatattggatccaatcaatcgcttgataaacccagacagcaccttgactatataagaaagacaacggggcagctatataaagcattactgcttgacacctttaagatgcatcgaccagatcctaaaaagtcgag

SEQ ID NO: 19610 - DNA, 333 bp, Oryza sativa
gaaactcaacagccttctcggcgttcaatataactgaagcagctttcatgcaagtacaagtagtcttttgtggcgatggggattctgctcccttcagaattccttcgcttgtacgggagagggaactcctgccattgggtctccttctctagccacaatcttcaagaaagatctttctctcttgaacgaatgatggccgcatcaataatgggaaatagtattaactactcttataaaaaatattacaaacactaccaacagcatagattgcttactgtagccttggaccccgcacatatcaataccagtcaacgcactgcaaagcttctcctg

SEQ ID NO: 19611 - DNA, 400 bp, Oryza sativa
acactatgaatactcagcttcctagatgttgggcttgaagacatgcaatctttatgactctggtaagcgcgcccaaagatttataggaggatatagtctgttcagtggcaagatgcaggataacatgaaaactcttaagaatagttccagctaatccaggatcataagtgcaacgttcaagcacatctaataacgctgagcactctggctactaacaaaagtaaattattttaataaggtgaataaaaatagaatggcaaaattcaaattatgaacaatgcgcaacatcttatgtgacgcagcagaaatttacgataccagattgttgtgttctcatttattgttgcggcaactccaagaaggaaatagcttctgcttgaagaatgttgacatcagcttg

SEQ ID NO: 19612 - DNA, 434 bp, Oryza sativa
  unsure (1)..(434): unsure at all n locations
atgcaagctgtgtcatgcaattactatagcacctncatcttctctttaaattngttttcaaatccttcgatctcatgaaaatctctaattccattaggtatatatattgtatttatcggggcaacgtatctggtgcactcatgcacacacacacacaattaggcccctccaatctagatccaaaggctaatatttaggtgaggtaattntgcaaaaaaaaaaagcccgcctcttgccctatagttntgcgagaaaccccatggtaattagttntcctatccgctcatcgatcagatcgtgtgttctcctgcgaacaaccgccgccgccgcatggctatcttttctctagcgctttgtcactcttggtgttctttgtgcgtantggtggaggcgatgagtggngactagatgcactgaacaacaattgccgccat

SEQ ID NO: 19613 - DNA, 419 bp, Oryza sativa
  unsure (1)..(419): unsure at all n locations
tactaagcttataaccggaagcggctcggcgaattaggggttaaggtggtggatatatgggataggaagaggagggagttacctgagcttataggaatgattgtgggagacgacngagagggggtggatggtggaatggacggacagcctgcatgtgttaacaaataatagccaagctaagtgagtggaaagaagcaccgataaaggcgtcaccagcggtagagagccgtatagacgggaagaaggtggggtgggaacacgtcaccactgttggctataaagaggagacgatggataggaggttggtcacgggcctcatcggtgttgttggcaccttcttgttatgcggtaacgccgctgggcaaggcgtcatgcgttaagcacatatggaggcgctttatgtgagaaggtactttaca

SEQ ID NO: 19614 - DNA, 424 bp, Oryza sativa
  unsure (1)..(424): unsure at all n locations
agtattgccagtgttaagatctagcatatntaaggtaatgttactcatgttttggccactcatagttatcattggttggcaagagttttcatcgatgatttgaacaagaggactcaagagtgatactgtgatatatggacatatttcttgtgcattctgtaagttttttcgtctcgtttgaaatggacatgctttttatgaacaatgcataagatcaaggagaggagggatgatttatgattctttnttccctgtttccataagagaatatatcatagctcacaacttcgttttctctgagacactctgctgtgcaactataactagagcagtgcctagcaaatagcaagtgtggatataatacagaagaaatcactgacggttcaggacagtaaaattcatgttctaagttngcacctttcaa

SEQ ID NO: 19615 - DNA, 493 bp, Oryza sativa
  unsure (1)..(493): unsure at all n locations
ctcaagctaaaactnnttgcctcgtcctcttgaaattctcaatagaagcactgtgtggatcttgctcccaacggtaaagcttgacctgatctttcaagtccttttctattgatcctttaccaccttcatattccccaagaacactgatgtcatgaaaacgttagttataacccaccatgaagaaatgaacaaggaanaacttcacataaatcacgaaaagcaactcacagtggcaagaactgcatgtagtacccaaacatgttgtacagaatattctggattttcttcaacgagttactgtcaagaaacataaagtcagaaaatgatgcccattttcaaaacatagcacacccagttttcagaacagtgaataattataatgggcaattcaaaatgaagataacaatcatgctgtactaaacaaagtggaacaagactctngatctcaccttgaataagcaccaacaccagcaccatcagaaaagtcaccatg

SEQ ID NO: 19616 - DNA, 431 bp, Oryza sativa
  unsure (1)..(431): unsure at all n locations
agctnntagctccttatctgatgatgtgaagaaaactcttgatgacatccatcatcggctagaggcatcatctctagaaagtttggtggtagactgcggatcaattatgacttggctacatgaagttcaagctttggtcccagaagaactagccgacgtcctcactccaactgcttattttgaacaacatcaattcaagttggagaaggccaagctgagattatccgaacgtcgggagcgcaaagacatcgaagccacaatccaggccaattggcaacttgttcatatagagaagatcaagcttgatcagctatctgagggcccgatcaaagccaatattgatcagctcgaagctcgcaagaatgaactcttggcacaacttcaagaatgcaacgccgagctggatatggaacacaaaaagctagccgatc

SEQ ID NO: 19617 - DNA, 486 bp, Oryza sativa
  unsure (1)..(486): unsure at all n locations
ggagatcgagctcagccatggctggatctgcttcagctcgttccantgacctcgtcacaagaatataggttaatatagggctctttatgcaaaagctcaagacacacagaacagtcataggactgcgggttgatttcctgaaactataggagcctttntgcatattggcctgagactgacagtgcaccccttggaaacaaaatctgaaattataaaagaacagtaactaaaacttgtgaaaatccatataaaattaaatatagctcattctaagatgattcaaatttctgtgaactcaccaaattgtgaactttgatgttatggaataaaaacttgcactcacagtacatatttagcctctaaaatttatccatgttaaatcacacagaaagcacgcacaacatttataatatgcatacaaaattcatttcaactcattgtggagcacactcagtgtctacagactcaccaacttatgttctgcta

SEQ ID NO: 19618 - DNA, 416 bp, Oryza sativa
  unsure (1)..(416): unsure at all n locations
ccttaatagtaactaagtaagatggttgactgcatgctttctaaaatatcatatttctgaacggatagaatttggtcctaaatttgggtcttgaatgtacatgtaaataactcacgccttactggatttttttatttaatatgcctcagtacttctataaaaaaaccacaaaggatctctgtaatttctcaactgtacaatgatttgcataagtaattaagtaatgtgctttccacaaaaactgctatgcacctagctagaatccaactccgtttgatcaggcattgaaacaattaaatcagtgagtagttggtatggaggacgtctttangcagggagtactagtacaatagtagtatcatcatatgatctgtgcactatcctttagtgaggtgtaattttctatttgtgacagt

SEQ ID NO: 19619 - DNA, 449 bp, Oryza sativa
gctaccggcagggtttttctggcctactgcagtgtccgactctctacaaaatgagcgcacgtgcgaaggttgccaatttttcgtcagacaaattcatctaccagctcaagagttgcaaacaatcccgctgtcttggccgtttgcggttaggaggctcgacatggctggcccgtttaaaaaggcagtcggcggttacacgcatctctttgtggccattgataaattctccaagtggatcgaagctaaacccggtgcacaatcacagcggacaatgctcgagacttcttcatcagcattgtgcatagaattggagtgcccaatcggatcatcaccgataatggcacacaattcactggcggagttttaaagactttttgaagacctggaattagatttgtacgcttcatggccacccatgacaatggacggtgagcagccatggatgatac

SEQ ID NO: 19620 - DNA, 464 bp, Oryza sativa
atccttaagtcacctgcggcatgcaagcttctggatggtgggtttaaataatcattagtctatcaaataaatcagatctgtgttttctctctatccccagctacaactgtgcaatagaagttaacactttattctaagttcataaactattatatgaaaagatgctataaatctaagttgtttagatataaatgaaacaagcaaacatattagttccttttaccaatctagagcaagaaaaatgccactatgtgagaggcttcttcaggcctgtcgtggcagcaatcatgtggcaagtctgcattgtcaagggatgaggcctgtggcagataagtcattaggcttagtcagttgacttgttattctgaatggtcaggttatctgttagttggtctatccgttagttgtgttggcatgttagtttgagtgtatgccatatctataaagggctgcctaactgttat

SEQ ID NO: 19621 - DNA, 469 bp, Oryza sativa
  unsure (1)..(469): unsure at all n locations
cgtgccttcaaactcagcttaggttttaatgatggttntgtatgtgatctaatgcagccatgcangtgcatgctacaaggttacaatggaactagtcctaatcaagaaaagtaccaatactgaagattcataggatcatatcatatactattgctgggaaactaaagccagaaatggcggacatgaggcgccattcggtagatgttccactgtcaagaacattggtgcagctgaagagagtgaggtcgctgcgggatccagcaacaaactctttgagcaagtatgcatctccttctgacaatatgatctgggagaccgcttctagcaatggggttgcaatggacctangcaggtcagcacatcatcagttgatcgaagaagatggagaattggaagctgaagctacattgngttcagagcggagttntctggcaccaaatgcaagaaccgcatcatatcggaaatcttc

SEQ ID NO: 19622 - DNA, 441 bp, Oryza sativa
  unsure (1)..(441): unsure at all n locations
gggccatggggccaaagactgtcgacagccacgactcgtgtctgcccacgtcgcacgggtggaggaggaagagccggctctgctcctagctcacgcaagcatcgagctacctccagcggcaccggccgcagcggctttcctccaccttgatgagccgaaggtactcgtctccctctgcgacggctccagcaacgacaaggctgatgggtggtacctcgacaccggcgccacccatcacatgaccggccgacgggagttcttcaccgagttcgactccagcgtccgaggcaccgtcaagttcggggacgcctccggcgtggagatcaagggtggtggctccgtcaccttcaccgccaagtccggtgagcacangctgctcaccggagtctactacatccccgcgttgggaattctatatcagtgtgggacagctgatgagaa

SEQ ID NO: 19623 - DNA, 462 bp, Oryza sativa
  unsure (1)..(462): unsure at all n locations
tagtagctagttgtccgtgaatatgtatacataataatctcctatcacatggtcacagtgacttatattgtgcattaacccttctccnctctacagagtaccaagccaaaaataagacatacgtatgcatttgtgtttcatagaaactatacaaggaaaaagaagaagaggggatacagaaggaaggagagcggcatggttgttttttcttgcgatatatacatacgtataccatatgtatacgtacctatggggaggaggagaggtacgcgggaccatacttgtagtgtccgatgtgcttaagattaatctaatctaacggtttataatagtggacgccaccaactttaagtgaaaatcaggtacggatgttattctttttctcagaagttttaggatgttctctaatatattaaagcgccacgtgtcaacttgagaacggtatgaggaaggctaatggac

SEQ ID NO: 19624 - DNA, 360 bp, Oryza sativa
agctggccgttcgcctcgggaacgaccacacgtgttttcttccactccggatggaagacctcacggatgaatccggcctctagaagtcgcgccacctcctcgcggatgaaggcttgacgttccggggcctgccgccgcactttctgtcggaccggccttgcacccggccgcacggcgagacggtgctcaatcacctccctggggaccccgggcatatccgccggtctccatgcgaagacatcagcgtttgcccgcaagaaggagacgagcgcgtcttcctatatgccgtccagaagaccaccgatccgtgtggtcttggacgggccgtcgcccatggcaaacttcttgaccgggacctcg

SEQ ID NO: 19625 - DNA, 417 bp, Oryza sativa
  unsure (1)..(417): unsure at all n locations
nntactttatctnttcactgaggcctcattcgatagagtatatccagcccatccatatagagcactaagatccacacggattggattggaaccccacccttctgggccactgagtggtaaaagatgcccttgaaaatatgctcttaccacttaaattgcgtggtgcatgtaaatggcgcattcacaagtgtgtacattgtgagacagtaacatgaatattttcaagtatatttattagatacaacaatacatttttcgatatatattttcactatagcagcagtttaattatattcaagaaaactacatatgctggccaggctgccatgagcccaggactagttgtagtcatacttgttgatgaagcatccctgtcaacaataggtcctaacttcactttgtattttgtaaactttt

SEQ ID NO: 19626 - DNA, 433 bp, Oryza sativa
  unsure (1)..(433): unsure at all n locations
acttctgatcatcatgttctgcagctagtccatataggtgacgacaccttgtaaagttggngcagcaaagaatttaagggtcacgttgacctgactgaacaagatctgtcatgtggatgcaagctttttgaatacttgtgaattatatgctcccatattatcagagtaagtttgaatattaagcagttctcataacgctgctgtgtttttgtgtgttaatgcatagacgttttgcaggttatggtatagtatggtttcacggaaataccgaagaagtatatcctgaagaggtggacacaagatgctagagattcaatcccaaagcacttggaggagtcatacttgaaggataaggaggcggcatcatcgagaacttatcggaacaccctcctgcacaagtctgcacttgatatggntagacttggtggtacta

SEQ ID NO: 19627 - DNA, 381 bp, Oryza sativa
  unsure (1)..(381): unsure at all n locations
ctaacccggacaacattctcattgtgcaaacaactgtagtatgcagcgcagaagagcatgtatatgtacagacaactgctgtatgcacggaagggtacatagatccacagtgcaagaaaggtggcaaggtcaggttcaactgcccctcaaatgtgtacagctttggcattgttctgctggagatcgcgtgcagaggcaagcgcagggaggagacctgcggcctgtaccgaaacaaatgtgatgtcgtcgaggctgcagacacaaagctagagaatggtgctgactntgaaaggagggagatggagcgtctcatcatcttgnggctctggtgctcttgctttgagactcagcatcggccgaccatgcagaaagcaatggatg

SEQ ID NO: 19628 - DNA, 476 bp, Oryza sativa
  unsure (1)..(476): unsure at all n locations
gcttgagaatttcgatttgctctgacctgttggagcatattcatcgcggactgagtcgattcttggcaggtcttaagccggaggagaagctggtggatctgggctctcgtaactatttcctttgcgcacggagaacacctgctgcttaattttcaatctgctttcgcttttgataagcatctgctttctgctctgctgcttaggacttgtttagttccaaattttttttttgtcaaacttccaatgttccatcacatcgaacattttatacacacgcaacttttctatcacatcgtatcaatttcaaccaagcttctaaattgtaaaatttcagtgtgaactaaacacgaccttaattgattcaagcgagcagagcatgcaactgatcacctgctcgtcacgagctgctggatcacgagctcgngatcatacgtgttgtgcttgacatgccgtcngctagctcatcgcgacgtcgc

SEQ ID NO: 19629 - DNA, 369 bp, Oryza sativa
  unsure (1)..(369): unsure at all n locations
cgagatttatggtgtgcttncacaatatttgtagtgttgtatttaatgtttaagactacttctttgatacattgtgaatacccttatatttgatccagatacaacctccatctgagaatataagggatttcccccatataattctataataaaaatccctcatattcttatactgaggtagtattaagttgtgtcaagcattgctgtgtactacagtaatgtgtccgtatcggtcacgggctgatgcttcatgctttgcattctctcttaggccagtcacaatgggggtttcactggtgtgtcatgcacatttaatatgggtaagactgaataanaaatgattatttgcatgaaatggngatgagagag

SEQ ID NO: 19630 - DNA, 137 bp, Oryza sativa
gacctccgatagcccgagctgacaaagcgcggccgctgttccggcgcccctctcttcgttccttggtgtcaagacgacggtgactccatgggcagccagctgcttgcatatctcgagcccaagtcctttgttccctc

SEQ ID NO: 19631 - DNA, 419 bp, Oryza sativa
  unsure (1)..(419): unsure at all n locations
attacgttcgcgataattaagctgcaagtcttcttctttggcggncttctttctcctgtgcagaatgcacgcattgcgcgctgcgactgacgcatcaagtccacgtttcgttcttttctcctttgatgattattccagatcacactnggtattaaccgtcagattcgcatcctatagctgcagggtttctagcttcctaagaaaatggcgtacttctagccgttggcacatttgtggtgcctctcctctcgagtagtggcccggaatatcggcgggcctacgtgcattcccgcactagtgtcacgctaggacgggcgcgtccggagcctttaagattcgtgcatgtctgtgattgtgaaagattataaatttataatggcggcacacgagcgtggagcctagctaaggcgtgcccctgt

SEQ ID NO: 19632 - DNA, 345 bp, Oryza sativa
  unsure (1)..(345): unsure at all n locations
atggcgatggctagctcacatgtcgcgtcgntcctctttctcttttattgaatactagtatatggttgcgtgcgcgcacgaggaatgggcggnttgccgggtgttcaacaaagacttggcggcaaagattgcccaaatgccgccgcctccctttccgcgcaacgactccttcgacctcgacctcgacgacttcctccacctcgacgccgacctgtcgccgtcatcgacgaccccttcgccttcacctccacgctcaagacggagccacctccgtcggccaacctgatgcacaaccactacggctacttctccctcccggcgtcagcgaccaattataaccacagc

SEQ ID NO: 19633 - DNA, 467 bp, Oryza sativa
  unsure (1)..(467): unsure at all n locations
tcaagcagtacacatgttaatntatagccgattaagcactgtattttgtccataagactacaactcctaggtggtagtacatcgcttcatgaaattcaaaatntatgtaatttactgagggacactacataatcatgtcgctgctgatgcctgatggacaccacacaatttatgtaatggttgtaggacacccgagataatactttatctattttggcanaactaggggagagaagtcttaaaacgataaaattaccctcagccctatccacttcagttccatcaggaccatcacactgcttccagcactgcttgccagctctcgctgccaccgccagcgcctagggttagggtcttttgatggagattatggtacggtgcatgtgggtataaggttcggtgttgcgatggttcaatcacgctaanggtaattttgtcttttaaaaattcaactctctatgtctaaa

SEQ ID NO: 19634 - DNA, 489 bp, Oryza sativa
cttatgcgaagcacactgcgtcatcatgcagaattatatatttactaactctactaaaacaggcacacgttgcatagaagtagcaagctctttataattggcagattgtacgagtcctttgtatgatccaatcaccataactaagcccaccagagagggggtgaatggttggtatacccaaaaacatgacaacttttaacggaaataaaagttaccctcgaattcgacggaccgcggtatgaccaaagttgttgcaccggtctgaccgatcgatgaacgtccgtctgaccgatgtatatcgatcggttgaaccgccgaagacctctgtcgcgcctgacgccgctggtcggacagactgtatgccgcctgtctgaccgccactagccgccggtctgaccgccggtatatcgccggttagaccgtcgaaacccggtaaacacaaatcgaagaactcttaaagtggataacgactttattgattctctctat

SEQ ID NO: 19635 - DNA, 381 bp, Oryza sativa
  unsure (1)..(381): unsure at all n locations
ntgattcaccaatcgcccgtctgtcgaacacctagngcgctatctactccacattcttccatccatcgtgacgcctatatacacgtgataacacctcatatcaactatgttatagtatattagaccctaacccaagccctgcgtcgagatgtacctctgcgcgccaagccaaacaccgccgccctctcactgctcatttcatcgtccccgagaagattttccggccgcaattctgctattcaaccgatctcgtggagtacttacgtgttaaccatccacatactccctagatcctattttagcaatcactttgcactatcatgtcgccctctgggctgccgacttgagcacaaccgctgccaatggaggcgctcgtcagca

SEQ ID NO: 19636 - DNA, 373 bp, Oryza sativa
  unsure (1)..(373): unsure at all n locations
ctaagcttaagcggaatatggattaaaatggtatacataaatgcactctgtgtttatatctanagtatgaatccaaactgcagtcctattgcatcacatcaacctgacatacacacataacttttcggacacatcatctctaatttcaatcaaaatccaaactttgcgctgaactaaacacagccggagatctgtattattggagatcaagactgtacaatgcgtacatctacaccaacatggttgtatgcacacacatgaacatattgaagatgacagtcaacctcactacgtagcctatcatggttgcatgtgctgcgagcatgcattcaacataactacatgctctactctgctatgtgtggtcatgcaa

SEQ ID NO: 19637 - DNA, 485 bp, Oryza sativa
  unsure (1)..(485): unsure at all n locations
gcaagcttctgacctctgccataggatacaccattgccggattatatcttctgcatacgccttccaaagcgggaacttgtgtagctgtgtacatgaacaactggtgaagtttacatggcggaacaagtcttctctttggcttgagggaggggggttagcaggagttatgtaaatcacttgcagaccataatataatagcactctctatatgctatattataagttgcctttgttatatccagacaaacttctataacattgtgaacgacaccacactaatttattattaatactaattaagacattatgataatatgcctgccttgtggtgacaaactgctatagttttctatagacttaaatcaaacctanatcaattgtgacttagacaaacctcacagctcttataatatactgacgatacgagtacctatcagtatgaacagggatacgaggacatattatcatacacctgtacccactat

SEQ ID NO: 19638 - DNA, 348 bp, Oryza sativa
actcagcttcatgttagcaagtcgcctctaaattagtgcatatatattatgtgcactaccatttgcagcagatcgcgacaaactagctacgaggctagtttgatagcttacactcccctataaatatggctcagtcgagtgctcgcttggaagcagcagctgccagcaagctagagcactgagcagtgagcgtacaaacgatcggtcggtcggctataagaggagtagaaagaataatggtttgcgtgtgtgtgtacatggattggagcatggcggagaacgcgaggttctagcatgcgctggccatgtacgaccgcgacacgccggtgctgtgggagcgcgtggcgg

SEQ ID NO: 19639 - DNA, 399 bp, Oryza sativa
ctaagcttatcttagcagtcgcctttaatagtgcttatttaatctgcctaccatttgcgcagctcgcgaaaactactaagagctaattagatagctacactcccctataaatatggctcagtcgagtgctcgcttggaagcagcagcagccagcaagctagagcactgagcagtgagcgtacaaacgatcggtcggccggcgagaagaggagtagaaagaagaagggtttgcgtgtgtgtgtacatggattggagcacggcggagaacgcgaggttcgagcatgcgctggccatgtacgaccgcgacacgcctgggcggtgggagcgcgtggcggcagtggtcggcggtgggaatactgcggacgacgtgaggcgccacttcgacctcctcgtcgacga

SEQ ID NO: 19640 - DNA, 358 bp, Oryza sativa
  unsure (1)..(358): unsure at all n locations
gttggtctcacatggaccaagccttaataacgatgtaccaatcatctcaaaagattttttgagacatttgcaaccacaagcaagctattataccggtatctaaagntgcacaatgcacaactaacatggctagtaatcattaaaccagtaaaataatgcttttaataagaacatattaacaatggtgcaaatanaaagaataaacacaaataatcaataaactatcaatgtatatgcaacgacattttttttactaatcatgcactataacagncgtcatcttcaaggctaatgaanagaggcaatggagatgtcttccaacgtggtaacatcagtatcacatcttgtacttgaactt

SEQ ID NO: 19641 - DNA, 383 bp, Oryza sativa
  unsure (1)..(383): unsure at all n locations
cctgtctctcgcctcatcttgacgagttggtggtggtcaatcaaagtgctttcttcaaaggccattcaccctactataacttttgctatgtgcagcttgcggccaaggcattccatgccaggcacacgccacatctgcttctcaaagtggatattacgaaggcctttgacacggtcagttggtcattcctatttgaagtgcttgcgcaccttggattcagccgccgctggcatgattggatctccctgattcaccgttgctcctcttcccgggtgctggtcaacagggtgatgggccatcgcttcctccaccgatggnggctccngcagggtgatcccttatcccctcgctcttcttcttgtcatggatgtgctcaatgcaat

SEQ ID NO: 19642 - DNA, 491 bp, Oryza sativa
  unsure (1)..(491): unsure at all n locations
acactatgatactcagcttcttttctctttcattctcaaggaagagactgttggtatgtatctctagcttagagcaagtacagtaatgggcggtagtagtcagggtttagggttccgaaatggccttccgtttcagactctggtagaatgatggttttcacaaattccggtggaaagccggtagattccgaacaaatttcataaaccaaatttaaatacaaattccgtaagtttatcgataagcttacgaaaaccggtcagctntggcaaatcttcgagcgaaatcatcaaaatttctatcggtaactagaaaaaaaggtaaactgaaagtgtnttccttttttctaattcgttattcttttctttcctattgtaaagttcattaaatacgcggaatgcatcaatgttattcaaaaattatatcccaatatgttctatgaatatcatactatntataagaatttatttggcttttccctttttttatcatt

SEQ ID NO: 19643 - DNA, 371 bp, Oryza sativa
gcttcgtgatcttcaaccctagaagttcataataagaacaaccagattaaagcgaagtatctcgactaatggttggtacatatcattagcagtttttttaatattaattaatgctcatcccattatttggcattatttgttttcatccatgatcaacatcgagaagatttaatgtgatgtaccattggaatgcactacttctcttagcacttggcaaccactgcaatagtccttctgcggcggcgccagcgccggagcggcggacgacgacgtcgacgcgccaccgtactcgccgtcgattttagagcagttattaccaaacgcggtcgaccagtccacaagatcgtcgaccgaggaaccaggcttattaa

SEQ ID NO: 19644 - DNA, 243 bp, Oryza sativa
  unsure (1)..(243): unsure at all n locations
gacacttagatactcagcttctacaaccttctggagaataatcggaggggacctcatgttcttgttctcactgtgattcgaactganaaatcatgcaggagaggacttccttaccagacaaaaggggaaatcactcactccgagctatcttggatggatctcccgctccaccccaccccaagtccagtgcagcagaggggagtaggggactgtctggagaggaagagagggagggggagtttc

SEQ ID NO: 19645 - DNA, 462 bp, Oryza sativa
gcttacaagaatacgcgcaccacgcatggtgatccgtgtctggatgtatacggaggggcgagatccggcgaggcggagagcgggaggtgattgtcgcgtggtttttggttgctcccccctaccgccagctccggcgatcccgaccacccaccggcgacgatgagcggcggcggcggaggatgcggaggcggatgaggaggaagccccaacaacacggaatggcgcttcaaccagacgctccgcaacgtgcaagggtgagccccttctctcgtcccctctgagctcccatcacgatccgattcctttgaaatggtatgcatgctggtctgcttggtgcgaagctgcgtgaaagtcagagcttccgtgtagattcgggtggatcctggtgcattctagagcggtggatctgggaattttcatagtatttgcgaggacatggctgtctagtgttagagaatgttc

SEQ ID NO: 19646 - DNA, 395 bp, Oryza sativa
  unsure (1)..(395): unsure at all n locations
attacggacctataaaactcaagcttatcccaactcttaagagtggcacatatatagttntatgtttatatttatgaaaacctaagttaacacaaaatatgtgcatgcaaatgtgggcccaacaagcaccttggagtgggccccacatccaatgttttagtggaaaggtgttgctcataagaggggaggaaagaaagggttaaggtagagaggtngccctaagctagcaaagctatagctagcgcaaaagaggagcaagataatgagcagaggaatatataanaaatatgcatcattgcagttgcagtgcagctagccacactatcgaatgatcgatcgaagaatacgatgcccctccaaatctgatcctgcatgcagctagcttaacttaatca

SEQ ID NO: 19647 - DNA, 406 bp, Oryza sativa
agcttaacaaatgcatgccattccagaaattgagactatttctaacacaatttgtacaactaatttctgccgacaactgcactatatttatattacttacaaatgatttcatgcatcccatctgataatcaaagtttcaaaagtttgattgcacttatgtataaacatgtatttgtgactggaatgagcagtagatactcaatttgatgataataacatacatgaggcaagggggccatacaccacactgaaatttagacttggaccaactgaatggattagtgatgacgatgaattgggctaccagtaagcataattgtccaaattaacaaccaaaacattacagctccataaaagtatctgcgcacgataggtagatgactcgcgtccgagttaattaaactat

SEQ ID NO: 19648 - DNA, 484 bp, Oryza sativa
  unsure (1)..(484): unsure at all n locations
tcagcctanagaaatccaagaaatatactagtatgccaatactataataacgagtttctccggattgtcaccatcttctaagaatctctagctcccaaaacatgtagttgaggaacataaatacagagcacgtcaagactggaacaaacatgaacatccagattaagcaccaagtataactgggtatatatcgatctgttatctgtatgacttaaggcacggtacaacgacaaggtaacatcatagcgaactagctatgccataagtttctccttttggagtgacgaacagctacatatatcaaccatgttcctgaaggtaaccgagactatatatataagcggccactacagttctcagaagtattcagcatttggtgcttgtctgatgatctganagagagctgcncaaagaaaagagtagaaaacacaatgactttggtagatgttcataatagtatgatgaaaaagatgganactactgc

SEQ ID NO: 19649 - DNA, 486 bp, Oryza sativa
  unsure (1)..(486): unsure at all n locations
atgctccaccaaagtcaagcgcacaggctctcaacatatcctctagtanttgattgactcgctcggtctggccatctgtttgtggatggtaagcagtgctgaaattcaaccgggttcccaattcttcttgtaatttctgccagaactttgaagtgaattggcttcctcaatcagacacgatcttcttaggtacatcatgtaaacacataattcttgccatatagagttctgctaatttcttccctgagtangtagtgtgcaccggaatgaagtgagccactttggtgagtcggtcaacgactacccaaatagaatcatgccctgatgacgtcctgngcaaaccggtgatgaaatccattccgatttcttcccacttccattctggaatctgaagtggctgtagcaaacctgctggcctttggtgttctgcccttactcngtgacagacgtcacagagtgctacgaattcagctatcttccttctca

SEQ ID NO: 19650 - DNA, 356 bp, Oryza sativa
  unsure (1)..(356): unsure at all n locations
ctaatggccggatctatcgaagttctggtactatgctcacggtggaacgctcaacccaagtgatggctccctggtcttcagcgatcagatacgcgaggctgcaagtcgactaacggacgcagtggaagcctcttctcanggcacgttccgacccgacagagagaaggacgagctgtcactcgccctgcagactcccaagcatccaggacaaacacgagggaaaggggtgattccttggaagattggattcaaggaggacatccacacgtacaggagtcgaatgaggagcaagagagataccgacgcgaagaatgcagatcttgagtacagggtatcgagctacgagcttatcatgc

SEQ ID NO: 19651 - DNA, 473 bp, Oryza sativa
  unsure (1)..(473): unsure at all n locations
acgtgcttagctccaaccatctgcatgacttgtatgtcgaataacaaagcattgtattcggcttgattatttgtacaataatattccaagcgaaccgatgcttcataacacattccattaggcgaaaacgaaactacccctatgccttgaccttctttgcaagaggaaccatcaaaataaatattccaaggtataacttcaacaatacaaacttctccctcataagcaatatccacatgatggtctactataaaattacatacaatttagcctctcatagaaattaaattttcataagccaaatcatattctatcaaagcatatgcccatttgccaattctcccacttagaattggcctttcaacatgtgtttaataacatcggcttgacaagcaactatgcatgtactagataacanataatgcctcaatntggtacaagcatagacaaagtctctctataaagacatacct

SEQ ID NO: 19652 - DNA, 442 bp, Oryza sativa
  unsure (1)..(442): unsure at all n locations
agctggcttccatacagcacatgggtgactgatacaatgtactgactgaggaagccttagtcgggtgngcacactctccccctatcggtacacaactaatcaccatatgtgcaccacttgaggcccaaacctaaaatccatgtttttccaccattttatttatcataatcacaagtattaaagttctgtccagattaattaaaaatttattttcatgtttgtaatgagcccataatgacaaggaagacaattctaagcatggctaagctgtatatagtaacctagtgtcaccaaaagtcatatataaagtggtatagtcatattgttcctaaggttaggagtgagggatatggatatatgtggggtcaaggtgaatgcaaacaataggagtttgtccaacaagtttaacaaaaatttaatttattagtgtacaatcgacatg

SEQ ID NO: 19653 - DNA, 390 bp, Oryza sativa
  unsure (1)..(390): unsure at all n locations
gatgagtcgaacgtgatggatcgtttcttcacttataacacacacatacatatcactatatcagttataagtatttacagtccgctgagaagagatgccatgccacgcagatggcgaaatccccactcaaacagtaacaatgatcgaggcgctcacctgaaaccgcgcacagatcgcgaaggctatggcgagggcgagttgnggatcagcttgatgtgtggcgcggtcgtcgatcaacttggcgagggcgaacactgcgagggaatcggcagcggaggcggtccagagctggcggtgagggcgtgctatggctccgtcgtcagggttgccgtcgctcggaggttgcggagaatacatagcttccgcctcagcgcgcaaggaacggcgaac

SEQ ID NO: 19654 - DNA, 499 bp, Oryza sativa
  unsure (1)..(499): unsure at all n locations
gggactgagggtaagcanatataccgctgaatctggtaagatatatcatcacaataatatatatttatctttactaattggaggccccttaaagtcctcacgttaatactacaatggtaaaaagttaaaattcctgcattacactcaaaataaaaatacagttacaaatttcatcattaacaagtgaaagaccatgatttttttttaactcctgatagccgaaatggcccatatattagatctcacaggctaaaacaaaagtatnttggtcatccaattctctaaacgattgcaagagagcatctncttttctatgtaggcacaactacacatacgccggacgccaaatcaaacaaagaaaatttggatggtcaaaatattgcagttgaccataagtgaaccattatgataggtagtgtttggttgaatgacgattggataaatggagtaacctattttatgaatgtttggttataagtgagtgggatgggttagtctc

SEQ ID NO: 19655 - DNA, 452 bp, Oryza sativa
  unsure (1)..(452): unsure at all n locations
agcttctaacttattcaaaatagcaaggtggagattatttattgccacatctttggagcgggatcacaacgattacaatcttttgaatagcattttgaaaagcatcaatctttagagcaacaaatatccaaattaagcaccaatctttagagtgataaatatccaattttctcctttntaacgtgtaggctactttggtgtgtcatgtgggcggagctctaatttgatatggacttttcggcttgatgccaagtttatgccaatgtatagtatgtatcagcgaggaactaaactataatctgggattctaggtgctataaaaatcttgcgagatgctatcaactntgtggttccctctacctgccatgtncctacaactcattgcagatctctctgtcttgggctcatcatctagccccatatagaggaccacttgcttttcaatcctacac

SEQ ID NO: 19656 - DNA, 476 bp, Oryza sativa
  unsure (1)..(476): unsure at all n locations
taagtgcaaagatccaatataaataataggtgaacaacatgtatctagaacatgcacaataaatgtataagatntgctctccctaaatatattcatacaaagaaatatataagagaggcaagtgtatgcacaagtagagaagaaccaatggggtttatcctatacacatggagaaggtatgtagcaatgataaagacaaacataaacacatacctttatcatctccatgttcttaatgtaaagaacactaaataagaaaatgctcaagtaaacattagtctcgcacttatataacaataacatggaaatcatatatatgaatctatcaaaaagtatgagataagaagtgatacatatcgctttatctccatgcatttcatctntgtcatgattaagatccaccaccaaagaatgcatatctaccacatctcatcatcggggaaaaacttctcatcattntcactttcatatacaaa

SEQ ID NO: 19657 - DNA, 390 bp, Oryza sativa
  unsure (1)..(390): unsure at all n locations
tctcangcccaataacactgcttcatactctgctgtgttgatggttgtgttgaactgcaatcttgctgcataccgaattgggacacctcatggcgaggttaggatcgcagcgatgcccgcccccttatgagaccatgaaccattggagtgcatgacccatgtttgttcgaccggtttgggctctgggacagtcgcaggcgttcattccgccacaaagtcgacgatgacttgtgacttgattacagtgcaagtgataaagtgcatgtcgaaaggtgatagctcactggcccatttgcttagacaccctgagatatctttttctcgaagcactttccccaaagggtactgtgatggtaccacgattctattcgctcggatatactcgttaag

SEQ ID NO: 19658 - DNA, 474 bp, Oryza sativa
  unsure (1)..(474): unsure at all n locations
agcttacacctgggctactgctgcttatgcctctcttgtaatctgacaaactgtgatgtaatgttagatcaagttatctggtattaaacttgtgtgtgatgtaacgccagacaattaggccatctattagacttatctgtgatgtaatgcaagactttatggcctgtcattgtagttgccagacttaatggcatattgatgcagtcaagaaaaccatctgggangtttggctccagctgttccagcatcaacaattntctgaagtcctctgcaggttattagcagttttttgcttcctctgtccagcgcagagacatcgagttgcttaatgggatgatggctcctattgtgatggatgaagtatctgctgagtaagttctgtaataattataatcgtatacttgacaagaatgcatctcctgtgcttagntagctctgcatcatgtctactattctttggttatattggacagg

SEQ ID NO: 19659 - DNA, 421 bp, Oryza sativa
gtcttgcattaaaggaggaaattcctgttctctgtttctttttcgcattatacatctactataactgagagaggagtagcaacaactaaagcatgtatgaatgtaatatggtactcgtcgactctcagatcgaagctagactagcttggtaccttcctcaggaaaagaacatcgaattaggtaggccagtgtctcataatagtaatttaatgattactcctctctgtcttcaaaagattaacaatagcaatctgatctggtatggagggggaaataaaaataaatttgcagtaccctgccctagatatgctttggtgacttcaatttcagtttctgatggtttagtttcatctactccaataattccacttgggcactaattgtagaaaaatgttcgaaaaagctcttcaaacacggaaat

SEQ ID NO: 19660 - DNA, 449 bp, Oryza sativa
  unsure (1)..(449): unsure at all n locations
cgtggagacgtacgtgttgcgcatgttcaacgagaaccaaaagacccgggctgagaccgagaggcacttctggctgttcaaccccaacaagcccccgtcctacaaaattagattccactagacaagagtgatatactaatattacatttggatttggaatacgctagctgctcatgtcaaatgcaaaaccgcatgcatgcatgggaacgtacggccagcatatagctntgtggtaataagcacagctgctcaagatacagcaacgtacgtgtaactctgccttggcactttggcagcgaatactgaacaataacgggaattataactctgtatacctgaaaataaaacagggcacttctgaaatatatagatcgctagcacgtgtagcgtccagtggggcccattagtatttgaacactacactgcggaattccgtacgaacaagacat

SEQ ID NO: 19661 - DNA, 401 bp, Oryza sativa
  unsure (1)..(401): unsure at all n locations
tttttcaacaatctaagtgtgtgctttccacaaacagagcgagacaagtctcagcttggttgggggcgagacgtaaccaaatttgatttgcaagatttacacaactcccagagttggcctcaaagttggtttcccaaaccaaaccaattntccaatctttcagagttttggttgtctccaaacaaccagtcattctcagggactccctgtcccgctgtctccctgacatccgcttgctgtatccaaacatcatgtttcccaaacctcaacatcttttcacagagctgggtaaaacataaactacgctaatgaatcacctcacatccgcccatgaccgtgggcatggctgttcgaacagtttgttaacctctgcagaggaggtacactttacctacatgacg

SEQ ID NO: 19662 - DNA, 455 bp, Oryza sativa
  unsure (1)..(455): unsure at all n locations
ntatgccagagctattgctgttcaatgcacagattgtctgtttattcttccagaggttgcttgtcgatttgttcaaattcatggaaccatatttaagatatgctgaactgtgacaacccgtaagtattatatctgcatattcatatgtggctgtctggtacatggttcactgcattctgattttggcacactattatgttctttttttctattgtagatacacctgttgtactaaggaactttgagagtgatactagtgctactgcatgactttcctgagtatctttgcgaataccacttcagtttctgtgatgtcaatacccccagctgcattcaaatgctcaatgttattcttagtgctttcccgcaatatgagacttcctgatcctcctctcacaatttaagagatttactggttgtgttcatggacacttactcaatgcttttcacgctat

SEQ ID NO: 19663 - DNA, 421 bp, Oryza sativa
  unsure (1)..(421): unsure at all n locations
tatatgatagagagaggtaatcgacactcaagtgtgttggttctcatgcaatagctaacttaacacaagcgttaagactaatacattaaatgtacaagtgacgcgagaaacagatgaaggagaacaaaattatgcccaaccattatagctaactattatatatgatggctacaacataggctaagtagatgaagtgagctcttctatagtctagctctcacgagaacatctgtgctcttgaaatccgcggtggtgacgtctcgaagcttggtcgatctcgccgaatcgaatagttgatagtgattatgacgatctcgtcggcggacatactgcggtcatgtgagatctctctacatccgaagtcgnttagcagtttatagttggagaatccatctcttgaaccaatctcgcttaagcttga

SEQ ID NO: 19664 - DNA, 370 bp, Oryza sativa
  unsure (1)..(370): unsure at all n locations
tgctctaccaagcgttcaccaagatgcagcttgtggttcattattacctctntcccttcgagacgacgtatcaacctgccgcgacgagaaaatgatgagaatgagtagcgactgacagctccgttcaccttgacttgctcaactccagtgaggtctctgcaaccgtcgctaggtatcctcgatcgccgtatatcttggctctctccactagatcctcggagttcacctcgatatacaccagcatagtcaccttctcgaggtcgcggagcgcacacttccactccatcctcggngttgtcgtcaccaagaaccaccaccttcaagtgtcgtcggccccaagctaccttcgagtagagaaagtggaaaggga

SEQ ID NO: 19665 - DNA, 403 bp, Oryza sativa
  unsure (1)..(403): unsure at all n locations
agcttgacatcgatctgctgagccatcctggctttagattgattctcgnttagcatatttagtatgtattgacatcccagcatatagcagtgttggagtacaagccaatacacgttgggtttgcctatcggttatgctatgagcgttcataatccttgcttcagtgtaaatttagacacaagtgatttatactatctcggtgtgctgtccgatctatcacttagtttaaatataccctgaagcctagattacgtactgctaatatctacagccgatagagcggatctaatactttacttactacacccttcattgccgatctgatctacgtcacatcgccttggtatagacgatatgtcattggcagcccagccgatcgattatcgctgatggatttaacttt

SEQ ID NO: 19666 - DNA, 277 bp, Oryza sativa
tttctttttggtcctttcataccttgaatcctttgggcgcgcacaggaataagtgtagtactattgtttgtcaaaaaaagtaaccgaccagtagtaccaaatataacatcgtagggtgtgtttagttccacgcttaaattgaaagtttgactaaaatttgaagtttaaagaaaaaaggtagaagtttacgtgtgtagaatatgtttgatgtgaagaataagttcgaaagttaaagaagaagttgggaactaaacatatgcgtactatatgacacatg

SEQ ID NO: 19667 - DNA, 456 bp, Oryza sativa
  unsure (1)..(456): unsure at all n locations
gcaagcttgataggccataacaataatcaagagatgcgcgtgtgtcttatgcatgatacaatttcaaaatttcgtgatggccgcgtatgtttcttgacaatgttaatttatttcatttgtcaacgataagtgataaccacctgtcagttgcagctcatttattactcaatgccagatgatttctcataaatgtttttgacatgccttgcaggttacactnttagtcgcaacaagcgttgcagaggaagggcttgatattcgacagtgcaatgttgtcattcgatttgaccttgcanagaccgtcttagcctacatacagtcacgtggtcgtgcaagagagcctggatctgattatatattaatgcttgaaagggtaatttactcgattagcaaatatagacacaaaattgaacgattaagcctttggatatgatatagcggcgtattttactcaat

SEQ ID NO: 19668 - DNA, 397 bp, Oryza sativa
gttgacgccatggagaggtctgaacacaacgtcttccctaacttcgttacctacgagattctagcataccatgcgtgcaaagcggggaggatggattcagccatgctgattcttgatcagatgttcttggagaaattgacacctgaagatgacgactcacacagccctcattagagagtacttatacgctggtagaatagatgatgcttgcagatatgtcagtgctatgagcaccagagacaggcgctcagtgaacaggaactacagcctgcttaccaatctactgtgttaggcagggatgatcgtcgatgcacgaagaattctgtatgaattgatggagaaagatgcactctagccagaccattctgcttacgtataatgatcacagatttgcaca

SEQ ID NO: 19669 - DNA, 476 bp, Oryza sativa
  unsure (1)..(476): unsure at all n locations
acgcgcgaggcaacgacgattaaactttctttgctccctcacaggccaggagggagatggtggtgttaaaaatatgtgatttctatgatagaaaatggttaggaattcaggggaagggaacaacctaacgtgagagggactctcccctggagctatcctgacgatggcttgatcgttgtcaggtagtagccatagcgtagcggagtaaaggcgttntgtggaagcaaaagggatggcatttcngttgggaagttgattggattattgtgaatgatagcgagaaaaagcaagggagtgggtagccgcctagctagcttagccgcttattagcacggntggttggtgcacagtacatgttatgttagtgttacaagtgtacctgcgagaatgaggtagctgaatactcgtagtagctgattcgctcaactggtgatcccttaatcattgctaatctgacgctgtcacccgataaacag

SEQ ID NO: 19670 - DNA, 438 bp, Oryza sativa
  unsure (1)..(438): unsure at all n locations
ctattgtaacaggtttgccgctctaccagtactatgtgacttgtattatactatgacagttagttggtgattttgttggctagcaccgcgatcttgtagtgaagacattgggagttcgactcctgctcaagcgtgaactgtgtcaaattttatgccatccgatagccatagttctaaaagttttttccccatcatatgcagaaatctcgaggcgatctgacgaccaaatatctgaaagtcttgtggaacaactagcggatagtttctagcactttcaataatataatagatcacgttggttctcttctcacagatgtcncgtaagatgtaatagatccattatatactatangtccattcaacttcatgcatacgctcctaaaccatcatgtagtgtatacaaccgttccttaccaccatgtgacactctaatatatt

SEQ ID NO: 19671 - DNA, 370 bp, Oryza sativa
gatgaccctcaggctgaactctgcaaaaagaataacatcaagtgggcttcttgctgtggctgatggttgcaagaatctatcagctatccacctcatcaattgcaatagaatcagtgggacctttgaatggctgaagtaccttggcagtgatggatcactggaagaacttgtagtatagaactgcgaacgaatcacccagttcagcctcctattgtttggccaggatggatgaagctctagaagtctgtgttagaggccaacaatctctacaacatatttaaacctcatgatccctcgtatgagtcgaattaccagtattgctatgaatactgctgcgagagtctgaaggaagtgagttcgagactgattg

SEQ ID NO: 19672 - DNA, 462 bp, Oryza sativa
  unsure (1)..(462): unsure at all n locations
ctcagcttttcaaagaatagacaattataataaaactagctatgttcattatgtataatataaaggaagcttggaatgttcaatcaatgaaatgataacaaatacttaggcagaagcagatgggagaaggttggatatggatcatgatcaagtctacctcgtaagccacttaaagatctatgagcagctcgagagagaaatccgtcttcattggtacaaaataaccttcgccccccttttgtgttatgggatggtggttcctgtctatcaactaatgtgagaaattgattatataagaatctagtagatcacgcacctattgtatttagtgtgatcttgtgggagagtaacgcaacgagtgagctacgattgagactccttatggatgttanggttctcgaatcaccgattccatcgatcgagaaagttagcatcatgcacaagtagaccgactgatacaac

SEQ ID NO: 19673 - DNA, 460 bp, Oryza sativa
  unsure (1)..(460): unsure at all n locations
gttgagctcgattaggattatttatttgctcaacggatggagaaatggccggattagcagccaatccagtcgaggctctcggcgacggcgcgcattgcatgggcgcaggtcggcgtctagctcgattggtgcaatcgaggtcggcatggaagtggaacatggtgagcacctcactgggcagtgtcaggtcgacgacctctgacgacagccgctcctccttgaagacgtgtcgtgcctacacctncagctctcaacactgcccctcttctcgtcaacccgcgccacggtcaccgccttcagcagcatgatcccgagcgcgaacacatcacccttttgagtcgccacggccactccaatgcgacgtacgccagcgccgagccaccgatagagcctcgccctcgctacgcagcgagcgcgccacactgctgagcttattcgactgcgtcagtcgtcttgactc

SEQ ID NO: 19674 - DNA, 364 bp, Oryza sativa
  unsure (1)..(364): unsure at all n locations
ntcacanatgatctagatccattcctaccaacaatntagtcacaaatacatcgaattagatggaactaacaatctataatctttgacacaacaatgccacaaaatcctactaatatacatcatcatacatgtgacaaagtccatgtcctacaaaagaatcccttccttgtctttcttccctccatcgcagccatgccatgccatcaccacgtcgtcgccgagctccgccctgagctcctcccacccgaactcctcggcaccgccgtcgccgtcgccgtcgttgtcttcctccagcctcagctcgacgagcatcatcgacggcgacacctccgacatctccatggacatggcgacgaggcccgag

SEQ ID NO: 19675 - DNA, 468 bp, Oryza sativa
  unsure (1)..(468): unsure at all n locations
agcttattgccaacagtataccaccaaaaagatgcagtatctgtacacttattactagcagccttaatcatttgagcattagagaaatcatactcatcaaaatggttgtctactgctagctcccaattaacataagcggcggaatcatacttaccatcaaaaactggcaaattagattctacctttgcaagatcattatcatgtacctcatatgctatgcgtgaagaagtcactatatctcgttgatggtgaagaagtcgatgttgagcatgatcatctcgtttccccttgcacaatcctgccatggttagtagcaaacaagaacacacacaagaatatgtacgctcttatcaactactangtagtggcagctcaaatatcacacacactcaagcttttaaccaagctcttacaagttcttaccaaagcaagtggaatggtgacatacaccgactcaaccaagcaccc

SEQ ID NO: 19676 - DNA, 452 bp, Oryza sativa
  unsure (1)..(452): unsure at all n locations
tgtgaggcagaagttgtggacaagagagaaatagccacagtatggtcggcacaatggaaggctccattactgacgccaaactacctcttcttcctctcctcaatggcacaccttctctgcaggtaaccattgctaacctttcatgcatgtctctgctttcatcttagttttctacttttcttctgggcgagggtaaaaaaaatcgtttgtttgtttgagaattgagacggatggttaaacatacctcctcagttgcatgcattgatttatatttcatatgagaaagtngaactttgttggtgagatatttctttgatttcctttttcttggcagatctagttgttgttaacaaaaaaacaagagaatgaaaggatgtgtttgtactttggaaaggcaagggcagccgtcgttttataactcattcctacttcctaagatcgatgtgatggtc

SEQ ID NO: 19677 - DNA, 427 bp, Oryza sativa
agcttctcgggttcttggtctgtggccgaggcttgttgttttcctcgagaagatacgagctatagagcggatgctcactccaagtgagcttacggatgtgcaatgcgtcaccggctgcatggacgccttaagtcgattcatatcgaggctgggagagaaggcactacccctatttaggctcctcaaacgccccgggccgttcatctggacggaggaggctgagcgggccttcactcagctgaaggcatacctcagatctccctcagtcctggtcgcctcagagccagatgagccgttgctactctacctggcggcaaccttgcaagtggccagcgcggcgatggtcgtggagcgcgacgaggacaaccctcactccgcgcatacacaccctatgtcgactcgacccgggagagagcagggacgtgag

SEQ ID NO: 19678 - DNA, 416 bp, Oryza sativa
  unsure (1)..(416): unsure at all n locations
gagacgatgattatgatgtgtccaacatatgtgcacggaggggagggagggcgttgtggtgtggatgcacctanggaactccctggtggtggcaatggacacagtcagcgttgttggatgctatcaagcttactcgcaaccgggaggagcagtagagtatgagagtgagtggacgaattataggagcgtcttattttctccttgggagttagccgcacaagcgaaagcatatcaatgtttttgaccctctcatttcatttctaaaatgtacgtggtttcatatttacgtacgatcataaagtatttgaggtggaggatgcaactaagctatttgagtgatctagccattatatctcagaactgtaaccaatcaaatatattggcctactactctgcttgttaccttctgtatccct

SEQ ID NO: 19679 - DNA, 416 bp, Oryza sativa
  unsure (1)..(416): unsure at all n locations
ctaagctctcaaatcctatagactcctgagncagctgttggtctattatcatcaagaccaaacaaaaacttctcttgcttctcagcatcggtgcgcacgtcctcaggagcgtatcacgcaaggcggttgaactcatgcaggtattctgtaactgttctggttccttgatgcagtgcgcggaactctcttttcttttgtgccataatcccctcaggaatctgtgccttcctgaagctttgacaaaactctgcccaagtaacctccgttgcatccagacgggtcaccacgtagttatcccaccaggcagaagcgagaccttgcaactgatgtgtagcaaaaacaaccttctcttggtcgttgcattgcagaaggttcaacttcttctcaatagcacggagccagtcattgtgcctcat

SEQ ID NO: 19680 - DNA, 383 bp, Oryza sativa
tgcattaaataaaaggtagaaagcttcctaatacttcctccattaccaagcgaacaaaatacatgggtgcattaagaccaagagagaataagaaccatctcatactacattaactctgacgacaaactcaatgcatgcacattctccactatactttagccaatagcacaacaaaacactatgtgcatggatgcatgcatcaatgatcaattacttcaatgcacaaacaacaaacaaacctaatgaacgaacacaaatatgatgaatcatttagaacattcttgaacataatatatgatgatcaatttggaatggagggagtattacatttgggaacacgatcacaggttttcggcaaatgaagacaaaagacaatgaacaca

SEQ ID NO: 19681 - DNA, 344 bp, Oryza sativa
tctgtatccaataacatggcatgtagtagaggttgtatgtttgtactcacatttactctctccatggatgcgatagcacgcaggagctcccctggggcccagttccatgccccaccgccatcgttctagggcccaccttacatcgtcagggggactccacctaccgcggcccagatgatgccccagccacagcattatggtccacctgcgaccatctaccacccttaccagtcttggacagtgctttactctcatctgtcctcccaattagcatctgtctagctcatttgcattgcacatttgccactaccacttcagcaattcagttagcttgtgaattctca

SEQ ID NO: 19682 - DNA, 416 bp, Oryza sativa
  unsure (1)..(416): unsure at all n locations
atgtatgactcatttctttaacttaagacattaaatccaccggcttaaacaaagagggcctaaacttgttgaaagcacaacggtgtgttcttgatatactcattcacgtgctttcctttgtttcttaacttccttttatccaattttaagtcatctaatttcaaaatatgaggtctattatgttactgaaattgaatggtaccacactaccactcactggtagtcatcttaaaccaaaaaacaaagaagcctattaaggatgctgttggttaaacgtgtcatggagagttgattagttaagataggttctgtcagtttgcttatatatttgtgtcggngatgagtattatattggcttangtggtttcttggtattaccggcgtatttaccatcttaataacttgtgaatggcaca

SEQ ID NO: 19683 - DNA, 289 bp, Oryza sativa
tcctcatcctagctggatctggcagtgctcactctcttatcgaggatgtctgggcacagcggtggccagaaattgagggggggatggtgggaagaggagggggattcttctttttttctgatctttttcttgccatttctcttctttatttttctttcgtcctctctctctgtctgacttatattctgatgtcttcttcgctcacgttctgttccgcttccttcctctctccctcttcttattcttttcctctcttcttcttcctttcttttctctttttttcctctcc

SEQ ID NO: 19684 - DNA, 456 bp, Oryza sativa
  unsure (1)..(456): unsure at all n locations
agcttagcttggctagactcattagactactattttgttcttattntccaccccatcgctgagtgcacctcttatcacactcaaagaaataaatccaatcaacaaatctatggttttactatcctattaaaaagagcaattttaccatccaatatttggtatttcgaggtaccacattatacacataaaagtttggtatcttgagataccaaactttacactagaggtaccaaaatttacactagaaaatatgccgatgtaccaaatatttgtggacactatgatttgtggacctcttatgcactcagcatacataaatttgtcacactatgattanatctggtgggtctggggtggaatatggatgcttcccgttaaaggaatatcttgtatgaaagttaatcataacgattactgaanaattcttatgtattagactcgagatatgtatatgtc

SEQ ID NO: 19685 - DNA, 393 bp, Oryza sativa
  unsure (1)..(393): unsure at all n locations
actaagctntaagaaatttactaccagactaacaaactgagaaaatatcatgatacanaaggatggcagcaggtacaataaaacagttattgctgtacaaaagctggccacaactgttcatcatgttctttgacacaaagaagtacagagaaattcaggaatggtacaaacacctggaacctacccaggatatatctctcgattccattgcattctcaggatgatgaactcactaaagttcacttttatgttcacctagcatactgaaacagcacattggtacatgaaagataacagatagcatcgagcaggataaatacatatgaaccccttcttccgactgctacaaagacgagaggcgaacgtcgcgccgtgcttaacaattcgatccta

SEQ ID NO: 19686 - DNA, 474 bp, Oryza sativa
  unsure (1)..(474): unsure at all n locations
gcttagctagcccacctgggcaccaatgcgaccagcctaccattgcatgtattgcttntgctacctagtgggagatggaatcccccaggccccctgcacttgagcattacgaaagaggaatggctttcccaagagcaaacaacatccaaaaaagaaaaaaaaatcaattgtgcatcatatcaaagaggaaccatttcttgtacgatcttttttttttaatttggcagaaattctgagacttacatatgagtttgtatgctctgccagcaggtggctaggaagaatttttntcatagtttttaggaacataaattggggtcatcaattagttctgtccctccatgtctccaagaatgattttgaacattntgaaaacaaanaacttctgcaatggtatacggtagaaacaggtgataaaacttaattagtggtacgtaattaagggaatagataaataatatnacccttcgtctt

SEQ ID NO: 19687 - DNA, 482 bp, Oryza sativa
  unsure (1)..(482): unsure at all n locations
gctcttacaagttcttaccaaagcaagcggtatggtgacgtacaccgactcaaccaagcacctcaatggagtttggatgtatcgatgccttggcaaacacttgttgtacggctgcaatcaaatctatggagctttgggtagacttaaatatgtagcaaaggagagcaatagttcatatcagagaatgcaaagttgaataatggttcaaagtcaagtaccatgctggtactaggctagaacgtactagaaacacgagcctagacacaaacgataccataagatagcactagaaataactcaagcacactctgataaatgaaagcaaactcaaagatacaactgagtnttctcttttccttctnttctttcttttatttctttcttttcttattcttnttggtttttccttttctttnttttggtgcggcttgtcttttcctttttatgcaccnttatgccattnnttctcttatttttttttg

SEQ ID NO: 19688 - DNA, 447 bp, Oryza sativa
tagccgtatagctcgttgacaatctgttctatgttctctatggcctgagcgtcggatgcatcggtgtcatggttatggataccacatacctaatagaagttgactaaactcggcaggacccaccacataccacgtcttatacgagaacaaacctcgtggggagagaggacacacccaccacagacgcacaatacacaagccaatatataccaagacaagccgccggatatcaacatcacagattagtctagacataccccatccggctcttacggaggtcggcaagagggatctagcaccatttctgatctcgccgagtacggattcgaggaggaagactaccctgtcgtcgactacgagttggttatctagccaccaagtcgatgagagctagataggttatcacaaatattgtatctgtgtgattcatatgaataaagagcaata

SEQ ID NO: 19689 - DNA, 455 bp, Oryza sativa
  unsure (1)..(455): unsure at all n locations
gcaagcttcgcattgatgtttagcgagatatcgcgctctgtttgcttattgatcggntcgcatggataacaggaggtctcgcatacacctgatttcgtgtacggcgttcggcaaaccattaagaccagttccagtgtctggcgacgggctcgtgttggagttgccccaaccatatgaatgaggcatccacctgtgagcagcttgacagtgtgcattatacttagttggtaggaaaaccggaagtaatactgcatttgtatctcttccctatctgtctacagaaagacattcctacgatgaatctgaccactacgattgtgtttctttggatggagagtatgctttaagtaaagctgggcggagcgtttctctaaagaaaatctgccttgtattaaaagaaatgtaaacacagtagggtgcagcctctcttgctattttacgatgcttaattttaa

SEQ ID NO: 19690 - DNA, 405 bp, Oryza sativa
aacttgacatctgtattggtttttacccttgagtgaccactatagtctctgtatacactagcaacacgaggtactccatattgtaactttcggtttgatagaccatgcgttcaaaatagttgttaaagttaaaagtagctatctgaaaacacttgttgcaaacaatggcatttgataaactaaacatataaaataattttaaagatccaattctgttatgtatatcatgacctatgaactgagagaacacacgaattaaagcaatggcaatttatggtacttgattaaagcgatgacaagcacacgaataacaggaacagctcctttcaggaatgttacgatcgccagaaacatcagcaggatgctcatagaatcttccttcagactacaacatatattagcaat

SEQ ID NO: 19691 - DNA, 327 bp, Oryza sativa
  unsure (1)..(327): unsure at all n locations
ataatgcaacaagattcttgtgatgaattttcgttaaagactgagcctgaacaaggaaaataagatcaccttctagagtccgaagaaagcgttcatcattcacttgcaaaacgccgatgctttgctatgaaattctgtattcacatgtttgaactatgccatagtatcagaatatataatatgccaacttgtaacagcattagtgggataacatattcactgccatcatcactagatcatntaaaagctgcatagatatactattcttgagtcaacattaccttctgcaggaacacactatatccttggctgggagactcatcccgt

SEQ ID NO: 19692 - DNA, 442 bp, Oryza sativa
  unsure (1)..(442): unsure at all n locations
cggacactatgatactcagcttcctcttcagaatcataaagcaatggagtttgaaagctttgtttctgtagagcaggtattctatccgcagtattttcctctccttttagttttagccttttaggtggaccgcattaacttgtatgtattttccaacagatatatgaaaagttgatttctggcatgtatcttggagagatagtgcgaagaatcttgctgaagctcgctcatgatgcagctctgtttgtggatgttgttccatctaagctagagcaaccgnttgtactaaggtatatttctgtaccatctctcttttgatcttcattccttccttttgtcatggcaaaagcacgtgtacttagttgttaactatcatgctggtcaagatttttttttcacgatttctgtgactaccccttggataagagtgcacatgatataa

SEQ ID NO: 19693 - DNA, 490 bp, Oryza sativa
  unsure (1)..(490): unsure at all n locations
agcttgcatgagcaanatatactggcacatcactaatgtttcttgctattggcgcatgaatgtttccagcgcacacgttnttcttataactatcatccgaaacctctttgtccaaagctcttttatcttacaactttcatcgaagaacttttattaaaaaattaactatcgtatgaaatggtgtgcactgcgaatatacgttgcaccacatagcacacctgcaacactaaataccactgtgtattgaataggatctatgcattacggatctatcttatttgtacagttcggatggaaaataacatttcttttttaatcttatggagaaaaagatacccatattggagttcatagcaatattaaactttatggtgaacacatatacccatactccttatattgtgagagagagggacggaatggcgacaaatntcattacctctttttttagagagagaagcctacagagcagaggcctacaacttaaaaa

SEQ ID NO: 19694 - DNA, 466 bp, Oryza sativa
  unsure (1)..(466): unsure at all n locations
cggttctgagttgtgaattatagggcttcacaactccacccctgattcatatctacatgtatgagttagagctctaccaaatggatctaaggtaagagacagattcatgaagaaattaacttaagagttagagctctaccaaatggatctaacgtaagagatagattcatgaagaaatgggcctttggtctggtaactccggaactcactaatttctaggccttaacacttcacttactaatngcttttagtacaacatcaccacctcctaaagggatgaaaactaactgcctttaagtcggtgacaaaactattccaaccgagctgattactatggatgtgcagagatgtcatcacttgccaccccgctgatctagctntccttgttagtaaaatgaaccttcttgtagatgacgcatactcttgcctagacttcagactcgcaacattcttatagagagcatct

SEQ ID NO: 19695 - DNA, 444 bp, Oryza sativa
  unsure (1)..(444): unsure at all n locations
atcttaagncacctgcggcatcaagcttctcggttntggtctctgcccgggcttctatttcaccccgagaagatcgagctatagagcggatgcgcctccccagcaagcttagggatgtgcaatgcgtcacccggtgcatggccgccctaagtcggttcatatcgacgctgggagagaaggcgctacccttatttaagctcctcaaacgctccgggccgtttacttggacggaggaagctgaacgtgccctcactcagttgaaggcgtatctcagctctcccccagatctggtcgccccggagccaaatgaacccttgctactctacttagcggcgaccccgcaagtggttaatgcggcgttggttgcggagcgcgatgaggacaattctcattccgcgcacccccaccctgtgcttgcttggcctcggagagagcaaggaggag

SEQ ID NO: 19696 - DNA, 394 bp, Oryza sativa
  unsure (1)..(394): unsure at all n locations
ancaccaaactgcagcggggctgaaacattgaacatgtctttctcccttgccactgcccgccatgcaagagagaggcttctgatatgctgcggcggtgtgacatgatgggttgtggaggacacacaggacaacatatcaaatcttctggaggagtactagagcggaggcgatgtatgagaagcttgaactgcatacgcgagctgcacatgccgatcttcaatcatgaggtggtcaagaacgcgcttgtcatggcaatggtaaagaagaacgacaggatcctcggtctgctgcatgagtgctttgtngaagggatcatcaccatcaaccagatgaccaatgtgttctttagggtgagggatgggcttgatgatctggctctcgatattcctgatg

SEQ ID NO: 19697 - DNA, 482 bp, Oryza sativa
  unsure (1)..(482): unsure at all n locations
ctcagcttaagcctttgcccgtcccgagtgaagaacttgcatagacaatctcagttgttgatcaggagttgctacaatgatgtatatctcacaggtacagggtgcatagtttgagtactctctctctcgttaagtgagttagcacggtggcttacgcatacgcccaatacctatgggacacatgcttctcttatatcttggacgattgagagatagaacggntagtagagcactacttactcatttcttggtctaactttattccagaagttttcatatgattttgcaaataaaaagaccaagttacacaagtgattccctcattcactcaagtgattcccttgccacttttgccctatcctacagcttaagtatgcacaggttggaagagatcaaatgaggcatacttgcattcacatttattactaagtcatatagccaggccanagaagatcaagatcgcgcatgtgtgtgatatatgg

SEQ ID NO: 19698 - DNA, 497 bp, Oryza sativa
  unsure (1)..(497): unsure at all n locations
agctttagaatgacctaactctgctggttactatattatttataccatctaaaaacctanacttgaagattaagntaaaagggaactaacttatgtgattgaactcccggccttgataagaactccaaatggactctgaaaaagatggngttgaagcaagggtgagtacaatgtactcagcaagctattatattcaatatgaatgtatgaaatagcagtatttgagtacgactagatctacttgcagaaagcagataatgtacaagaagaaagcctatgatgtttgaaatgcatcagtatttaataaaatcttgaattatgtttctaaccaaataccatatgagtcccgatactcaaatccgtgagcacggctattcgaatagattcattctcactttactgcagtaaatgtacgctttaccggcagtccatgacttgccaatattcattagcttagtcatggcccactattacgttattaacaattgtggcacctg

SEQ ID NO: 19699 - DNA, 411 bp, Oryza sativa
  unsure (1)..(411): unsure at all n locations
cccctctccgttgatctcatggaccacctgcatataaaaataacaatgctctcataaggggacattattatgagccagtgctttgtggcactntgctgcatggcactattggtgctctccctatcaatgtctagaaacgatacgcatacgaagaaatctatatgtatactaaaacatttaaggctggacacgaatcctctgtagtagtgtacttacaatagcagtggttgacaagtgaatccggttccacatgtcagtggcagctactgtagggacaataatactgcagtctgcagataatcccaacggttcaaggctcgtttggatgataaaggatttacatatntacattcacccccaatccatcatgttttgattattgatggttggatatgttcatatgcagatgtt

SEQ ID NO: 19700 - DNA, 447 bp, Oryza sativa
  unsure (1)..(447): unsure at all n locations
agctntgatagaagatgcagcagattagtgcataccttatgcttgccagntagcntacaagcgaatcatgaacaagagagaaccttattagaccttcggaacataaatgaggaaacaggctagtgtagcagcatcctgcaatagcaagcaatatacttacgggtcccgaggctcagctactatttccaattaaacttctttgaaagctgaaacagtacagtactaagggtaagcaaaacttacttcagatgtcataggtatcagctaacatagaacggtgatggccaagttgtcatactatatactaaccaattcacaactcttcttttagaaagtgttcttagatgaaacctactcgcacttataaactacatgggccaataagcacttgaacagtatcaaactccagacatccatgctccagaaataaattcctgggcatcaaag

SEQ ID NO: 19701 - DNA, 463 bp, Oryza sativa
  unsure (1)..(463): unsure at all n locations
tactcactcctgttaagaatgatcgacattggctcttcgtgttatgccatgtctacttccacaaacctttttgccacaaacatcattgttaatcttcagacacatatatggagtattaaatatagataaattaaagaactaattactcaggtaagagaaaaatcatatgatgaatcttctgagcctaattagtccaagattagccatatgtgctacagtaatccacatgtgctagtgacggattaatcaaactcaaaagatgcgttgtgcggtttacttatgaaattatgtttttcattcgcgtcagaaccccttccgacatccggtcaaacgtncgacttgacacccaataatattctttcgcgaactaacaaccctaagccaagtctaggggtgttgggaataaaggtaatcccttaaagtatactcaaatttaataccatatatcggttcaactgcagct

SEQ ID NO: 19702 - DNA, 394 bp, Oryza sativa
  unsure (1)..(394): unsure at all n locations
cttacaagagaaaagttattacatcccacaagttaagttcttatattaaataccagacttagctcatccagacacgtatctttggatggacgatattgccctctgccttatttgatctactncatctattgtcttggcatcggctgcatcagtgctatagatcggcttctaagactnggtcagntcaattagatgctctacagatgctttcagctcggatttctgatcttcgatggcttttggcaaattggcaagcttttcttgctcaagagcaagttgtgcattgcgttgttccggttcggctaggagttctatcttccggatattcagccgatcaatgttagcttgagttgcacttgtaccagccttcaaatcattcagcttagcttttctt

SEQ ID NO: 19703 - DNA, 361 bp, Oryza sativa
  unsure (1)..(361): unsure at all n locations
gtgcacgcacggccacggtcatacacattgctgccaacctggatggattttctctcactgtgcacagcacagcaaacaccacactggctctcagtctcagcagccttgtagtactactgtcacagatctcacaagcacagcttctttgtcgttgtcgaccagaagcatccacacgaagaaattttaaattagtagtaactgagccatgtccggcggcattttacgttatagtaagacctagtattactaccggtgataggactaattaaagattggtcttagaataccctgagaatgagagaggctnggagatggaacctgcctagccaatggcccatgctagtgctacctacaccaagtc

SEQ ID NO: 19704 - DNA, 320 bp, Oryza sativa
ctttagcgcttcaagccgctctatgatgctatttaacctcacgttcacaatgcaccacagtcagtcatgcttgtaggcttgtagctctctcatatatgaaggattactgtacttgatgctccttgcattgtcttgtgcatacacacacttctaagttagttgctcatctgatttattgcagaagcaaacagagttgggtctggaggagaaccaatccttataatatgctctacacgaattgctgcaagaacttgcagtaagctttcttaccacgcatgtgcctgcactagtctttgttctctgtaacaacactattacaa

SEQ ID NO: 19705 - DNA, 481 bp, Oryza sativa
  unsure (1)..(481): unsure at all n locations
agctttaaccaagctcttacaagttcttaccaaagcatgcggaatggtgatgtacaccgacttaaccaagcaccccaatagaggttggatgtatcgatgccttggcaaacactngttgtacggctgcaatcagatctgtggagctctgggtaggcttaaatatgtagcaaagggatagcaaatgttcaaatcagagaatgcaaagttgaataatggttcaaagtcaagtaccgtgctggtcctaggctagaacgtactagagacgtgagcctagacacaagcgataccacaggatagcactagaaacaacttaggcacactctgatagatcatcttcagctcaaagatacaactgattntttnttctttctttcttcttccttctttcttcttctttattttctctccttttttttttggggcgggctttcttttnctttttcttttatgcaccttcctgcctntcctaactttctttttt

SEQ ID NO: 19706 - DNA, 479 bp, Oryza sativa
ggacacagccttgaactattattctgtcagtccagcctattttggcctattgaacttagtatgcatggtgagaattaatttgagttatagacctttaggcccatggagatccgcacttgtcaagatgcgtcactagtatagaagaccaattcaatgccagtttcaaaacaaccatcagtgctggacttataaccgacacctctataccagtactgatgaggtaagcttatcgatgtcgaattgagaggcagcactgattgggaatgaacaactaatactaaaagcacagagatcggctcacttcatcgagccgatgtttcgagccatgatcaatatcactaattcagatattaaatctcataatcatcacagatgctaccaaaatgaagcagaatatatcatcacatagacattacagactgataacattcatcacaaatctgaattacaaataacatacattatagcaccactgtcat

SEQ ID NO: 19707 - DNA, 326 bp, Oryza sativa
tgaataggaacctcataggatggaattgtgttcaccacacgaggtgatcaatatatcatttactgagcttattgttacactgctcatgtccaggtacttataatgatgtacagtgagtaaccatgagatatttactgaggacatattatcatccatgaaacgcatgttaaggcgttgtagattagtaagggtatccaactaatgaggcactctacccaacaatatggatgtacagacacacaaaatactcatgttcttattgaccaaatactctggacatgcgtgcttcaactggataccaactagttaaatagacatcagctcca

SEQ ID NO: 19708 - DNA, 463 bp, Oryza sativa
  unsure (1)..(463): unsure at all n locations
agcatggctgtcacanaaatattcagaatgagatagcttttgctaacaacaaggtactctgtaaacaaccatagcattacttacctgtcttgagtacagagatgggattagactttgaacatgggaatgcacacgaacagcttgaggggcaaaaagaacaagctgctgagcaaatctaactgatctgcacgattcaataaatgttatataaattccataactaaaaatactctagaattgcatcatatattgtccaaccaactgcttgttaaattaaacagaggctagctggttatgtcaaattacatactctataagcgtagccgtttcacttgaggaacttatctctgcaatgacagactgaattttaaaatattagttatgtggaccaacttctgaagacatcaaagcaaggaaatagttacaagccattcttttatgcaataattactctgcccattac

SEQ ID NO: 19709 - DNA, 509 bp, Oryza sativa
  unsure (1)..(509): unsure at all n locations
tgcaagcttgacgctacccctacctggcgcgccaactgtctaatctagatntcggcaataataaaaggcggtggctatcaagctggaaaagtgtatgggattggagacaaaggatntatacaggttcacgccttcttataaaagaagtaataccctactcctgtccggtgatgaatccgccgagtgtgttattgattgtatgatttaaagaaaatcaacatatgcccctagaggcgcccggaccccccttatatatgggaaggagtccggattacaaaagataatctatattcctaacggaatatgaagatacaggtaaaatacagtcgtaaccgactaagtctcagggtgtttccttgatatacaagttaagaaacaaacccgagatacagataagatattctatctacatttagtatccggtactcaatccaaataccgtcgccgtgtagatatgggatacccataatctccacaataacgaaatccattgaggatanaaatataag

SEQ ID NO: 19710 - DNA, 449 bp, Oryza sativa
  unsure (1)..(449): unsure at all n locations
ttctgccctccataactagcagaaggcaatccatgtttgttttacatataatatatcatctcgccttggttaggaatggttgaggtggtccaaaagatatggaatggtggccaatagtaagaagttgcagagtcacttccgcagatttctggacacatcttaattttacaattcaacagtattagtacaatttgtttgtcctgtcggtgtcatcaatacctaacaattcacaactaaatcatataacgtaatcatgcattatatatgtatgcttgtattctatgcgttgtgattacttctatcttgttcaggactnttctgagcatggaggaactcacagctgattatgagagtggcgctctgcatcctgctgatgtgaagctgtgccttgaanagtcattgaacgagatattgcaggtaatgctcttgtctgacatatgagttctgat

SEQ ID NO: 19711 - DNA, 378 bp, Oryza sativa
  unsure (1)..(378): unsure at all n locations
tggagtctatagctagctcaattagctacgagaactttttattatgagattatccagggcaggagaagngaattaatcggacagaaaacacggttgctgcaacgcgcacgagtaattaaccaaagaggcatcatctgtgctggtgggaaattatccaccattagctgcgagagctcgttcgatcgatctctcagtggaggcttctggtgccgaatagcaaaaataataaatagacgccggcgccggccagggatcgttagcacacacgacagcgacgcagcggtcactttccgtcgttgatttgatcgaccgcgtgtgacaacgacgagattgcaagtccactccacggacgccgaaaggcatgtggcaatgcacttc

SEQ ID NO: 19712 - DNA, 349 bp, Oryza sativa
  unsure (1)..(349): unsure at all n locations
atgcaagcttgcttcttgctatggctcatggcggggatcaattctctgtagcggagaaacgctngccagacaacttgttgttgttggatcatagtgttaaagtttgcaagctgtgcatcaacagtctgctgccattcccgtgactgtaccacatgatcttccagcatgtgctgcatgttccctgcctgcagttcaagtgtatccatcccccggatgaattttcccagatcccctcgagaggagattgagcaatgcatccaagaggatggaggtagaccacttgaactgaaggagcgcgaataaccccagtgcagcttctgcggctataccaccggctgtcgctagcact

SEQ ID NO: 19713 - DNA, 497 bp, Oryza sativa
  unsure (1)..(497): unsure at all n locations
tgcaagcttataattaatacaagttttatacaacagatttatatagtctcgaacatattattagtagcgaagttntatggttcatgttgattaacgataacacggattctagaacatcgagtaaaagagagagatcaagacaagagaataatttccatgttacagagaacaaaacatacaccaaatgaccaaaacatcatcaaactgaagtaggtagcaataggaattaacccaatggcaattaaattgggttaaacctctatccactcaccagaaaccatacgtatctatgatgagtatatgactcctcacccagcacctggcctgatctgcttgtaactaaccttcaatnttattatttaattatttacntttgcacaagaatctccaataattggctncacatataccacgccatatatatctacatacaagcatgcatggtgcaaccaactaagaagctgntagctagttgtatatatggtggggtatcacac

SEQ ID NO: 19714 - DNA, 423 bp, Oryza sativa
  unsure (1)..(423): unsure at all n locations
agctgtagaacatctctttctgctgaagattattaagaacatcaacgtaaaagtgaaactggattaagaaaatggatagtggatttaagttgatatattagagagatgatgatgctagtctataggtttcaaaatgttacagaagactaattctatcaaaggacacatttctacttcagaagagagcatctgcttttcattactcaatgttcaatttatattttgaactcatgaaacagtaaaagctgaagtactcctacaacatatttagcctgtcatgaccaaagtagcacactgagataattcagaaatcatggtttgcagagcaacagaacatcaattcaccaaatttattgaacagttctacattngcacagtaacaactaactttcaagcattcaggaatattcactcttattaaca

SEQ ID NO: 19715 - DNA, 309 bp, Oryza sativa
  unsure (1)..(309): unsure at all n locations
tacttaaataatgaatggagaggttttgaaatcaatattccaacgatttgttgacacaagggcgatgttgtgatctctttaatggagaatattttcatagatgggttcacttatccaatacaaacttccttctcttgtcttaaccactgaaaattacctggctcatgtagaactttgatagtagtaatattcaaattaagaattggtatgagcctaagttattcgaagaggcacaaatctatgcagagcctaagcttgtgtattagattgagagcttntctctcccatataaacctgagtgaaatatat

SEQ ID NO: 19716 - DNA, 351 bp, Oryza sativa
ctgcagctttctcacatctcctgagccgccaccgtgatgcttctatcatcgcgaccctctattagggcattgccaaacgaccactatctcatccttcatgggtgactgtggagcctctatcgtcacctatccacaggcattgcccaggaggactttcgttcctcactgtggccgccttctctcactataatcatcgacattacctggctgtagacataatgctctaggtaggaccaagaggatctacgtctctctcgctctcttgctcttctcaaccactgtacatgagtttaaccgagagctctgacgtcgacgctcttctgtgaggagactgtgtatggcggggcacct

SEQ ID NO: 19717 - DNA, 282 bp, Oryza sativa
tgagggtggaatgggctcccaccactaatttttgacgacatttctggtagtgctgtagctacaacatgacacgatccacacagggacacgagatggccatgctcaacatcgactccttcatgatcaacgagacataacgacttcttcacgcataacatatgacgtgcatgattatgatctcgcaagggtcgaatcgcatatgccacctctcgatggcaagtatgactccaccgcttatgttaattgggagctaacggcagacaaacaacttgacgagcatga

SEQ ID NO: 19718 - DNA, 235 bp, Oryza sativa
  unsure (1)..(235): unsure at all n locations
agcacctgngctgcagctgctgtgggtgggaatgccttcaagatttttgctatgatacctgaattcnctcagactgatacatgtgaattacttatcgcagaccgatcaatagatcaggtatgaggtggaatgtcaaacttcaagtcatttctggggtgattcttgccaatttcccttttttagtggtttagtttgactgactaccacatcgaatgaagcaatgaattgttctcat

SEQ ID NO: 19719 - DNA, 453 bp, Oryza sativa
agtgtgagcgattttcgagctgccactacctattagttaatttgatcgcgcatatttttgcggatgttgcttgctctctactaacaatggcaaggatatgcaagatcattggggatagctgtgctcaacatctacatcttcgccgagacatgaggagggatcaacatgaccattatgaggtgagcgatgatgatctaagttagatcaaatctgcactgccttatgtctatggaaactatgatcctcgtgcttacattacttgggagctatcgcgtgatagtgaatttcaaaagcatgtcttgtcagatacacacaacgttatgtgtgcctctagcgttttaagtaaacacgcctttaatgattggaaacggctgtgtaggcctatcatagtaccacaatcttgtaaagacctgtaacgatacttcagagatgtctatgttctcatggattatg

SEQ ID NO: 19720 - DNA, 347 bp, Oryza sativa
  unsure (1)..(347): unsure at all n locations
naggcctgacggtactatctgaaaatcatagctcggcttgttacttatggctatactcacaacaaacgcgatgacttctttgacacttactcacctgttgctagactgactcacattcttgtgctactttccctaacagccactcatggtcttctcgctcatcaaatggacgttaagacagctttcctttacggatagctgggtgaggagatctataccgatcaacctgatggctttgcatatgatgtcatcaaggcccagtgtgctctatgctgataactttgtctggtctgtaaccagctcctaatcaatggcatgagagatttgaccaaacaatgacatctgct

SEQ ID NO: 19721 - DNA, 340 bp, Oryza sativa
actcgaagcgtctcctgagcgtttttttgtatacgaagcgcaagatcaattcacttactcgcacattgtttgcccataacaggaaaaagtactggctgtggccgactggtgtttaccaaaaccaagactgatggagctgtccaccatttgcggaatggtttaccggcaaaactccgcttaatcctgaagatatgacattgctgctcactgtcatgtatgggaggcatgagcataaaattaatccaagcttaaaatcttaaactcgcgtaatgttgcatataggagaccatggcctcaactagccatgtataagatctaacgattgtggatggaacggtac

SEQ ID NO: 19722 - DNA, 428 bp, Oryza sativa
  unsure (1)..(428): unsure at all n locations
gcttctatgattaatcattcgtgtganaccaatcttttatatctcaattggttattagcattaccacgatcccattggcttcgtgagagacgcgattgcaaaccgaacggtcatttccatcccgctttattgttttttccgctcccaacgggccgcggcccacgacatcaagaaagcttctcccatcgagccaactcctcctcccgagctcttctctctctctctctctctctctcaggccaagcgcgacgaggggacggcgacgcanaccacaagccagcgagcagccggcgaccaccgcgccatcaacggcgttcgagattcccctggagatcgccgtggtgagaactcgccaggtatgcgtgtgctcctctaccctaaactctagcccgatctcctccggccatcccgcctagcgcgaccaggtc

SEQ ID NO: 19723 - DNA, 287 bp, Oryza sativa
ttaatcttgcactgcatgtactgatgccacttgactatgatataccgtgcaatttcacgctgggacgagtatagatattgatcatatcgcgtaccaccagatccctctgcaatctcaaagatagagagataatgcagttaagttaactgcacgtatgtatggctctcagatcttagagacttaccatgctacgcttcaatcgcaagcaactgtatcaattgtattgccagtacatgcattgcattgcatgcccggtagtctcagcatacagcaggcttcctgtatca

SEQ ID NO: 19724 - DNA, 364 bp, Oryza sativa
cattccaatacttcagagcaagttcatctgtagacatgcccagctactacaagcagagactggagaggtaattagagatcatcaaacagctcggactctctgtttatatcttttattctgcgttttcttttttgcaacaaagaccttaacactattgttgatgcgaacaacgcaatatatctatctaagttatattaggccatatgatggtctgctactgaactgaatttaacgtaatgaccattatgtattaggtgtggacctcttttcaagactagccttggaggtcagcttctggtcttttctctagatccagaggtgaaccggttcatatttcaaatgaagggtaagttgttccggactt

SEQ ID NO: 19725 - DNA, 484 bp, Oryza sativa
acgcagagcactttggctatcttgttagcatctatctcaccaagagacctgacaacgtccttgatgtaccaactagaatagtattcatcagaactcatcttgagactctcctctacacgagagtcaagtaattcatgcattattatcccccgcaaacaagaactcattccttgcacttataagaacagaacatgcagcagacttctagccctttctgctgatgttcatcaattattgagtaacagtgtgacaactagccaattctttgtctgatggaactattaacaatgatgcgatgaattaaacacgctacgtgagcattaacacatcatagcaggacagcaagtgctgagccacagtcacatcgcatgatgctactagtatgcaacaaatgcaccacccatccgagagatatatctcaatttctcaaccgaatgtatttgcgcaagtcatagcatctaagagctaggcatatggtcataaa

SEQ ID NO: 19726 - DNA, 376 bp, Oryza sativa
tctaagcgactgagcatgcagcttagcacgattgctgtacacattattgtatctatgatggccatgactactcggtctatgaaaagaacgacaggttcaaggagagaacgtattacatatggcccaatggctgaaagggataggataagacatgagtacctagaaacgaacatttgcgtcaatgatacaacttgtattgacatgcttagacttagaaaaggaagcttttttcgtttatgtaagctatatatggaacgtggattacttgaagataccatccacatgtgtattgaggaacaagtggctatgtctctgcataccgtgggacataaccttagaaatacgttagtccgcactaattatagtaggtctcgag

SEQ ID NO: 19727 - DNA, 427 bp, Oryza sativa
  unsure (1)..(427): unsure at all n locations
ngagagaatatgatagaactntactcgaggcgtgatgattatatgagaataggagctccttaacatagctaccaatgactgatgtcgcaattggaatggtcagaattgccctccaaccatcattggggagtgatccacaccgtacattcaaaccctgcattgaacggtaccacagtgggttcggtcataccatggactgtgccggcctatcccacattcgactggaggcctgctctaatgctcctctttacagacttgtgaaatttggcccaaatcgacgtgtcaatgatgagctcttggcccattcatgcataagtggaacgcccagattttcgttcgtgaatataaatcaatgaattattcatcttctagatatataaataaacgtaaacaatcattctattgaataatggagaataagattttc

SEQ ID NO: 19728 - DNA, 368 bp, Oryza sativa
  unsure (1)..(368): unsure at all n locations
tccatatatgggtcantgagcgtgtgtgtgtttcaagagttcatgttcataaataacgcagtcaagcgcccaggtggcatgagctgcgacatacttatctttgctcttcagcgagggtagcgtcgatctaacagtttcttctttctgaatctatatagtatgctatacgcgcttgtgttggaacgagatgctctgaatactgagactgacatgtgggcccatgaaacaaggaccacatgttggtgctctataacagggaaactattctgaccctccaaagatgtcactcatattgcatgccactaaagggaccaagaatttgaaaaatttagagatgagaatctatgatctacactaaatatgaaggc

SEQ ID NO: 19729 - DNA, 433 bp, Oryza sativa
gcatgcaacttgtaccgccaacccactattaattattttcttatacacttgacttatcgaaccgaatattaagtaatatggaactaccagtcctgaagacgaccggtcacttttgtttcaaatgtgacagagccgtgcgggttgaccttacccactgaccgcgctcagatgcgagctctttgttcacggatgtctgaaaaccgggcaggtacattctctgctgcagcggctgcatattcttgggcccatatatgctccttgacaatgaccctgctgtgccaaccatagcgagtgtcattccgctgtgcagacacgatggcctcctggatccctaactcttgggggcttgagaagcaaattcttcacactgttcgaatttgaggattatctaacggtatattgcggctggtgactattcgtaaaacttcacttc

SEQ ID NO: 19730 - DNA, 393 bp, Oryza sativa
gtacgctatctttccatgctcaatgtgctagctcttcattgtgtagagcatatgcattggtgtgtgttgtaatttagatgaagagataatgacctggctcggctcgttattaatagtatcatgactagccagctcggcttattaattaaccctaacgagctaaaagcgtggctcggcttagcttacgaaggtggcttgttaagctcgctagtaagttcaatcttatttatatcaactgtaaaatttcaatatttaccaatttatcatatgttagtataatataagcaataactagtaaaatattcactaaatacaaatagttagtttgctagtaaattacaggactaacactacaccatggtccactctttgctacaaaagtcagttggaaaa

SEQ ID NO: 19731 - DNA, 451 bp, Oryza sativa
ttcttgtacacacacttgcaccctcatatgttttcatccatatgggccgctctgtcacctcccaagtcccgttcgcgataatggaatacatttcactaccgacagccttcttccagtagtctgcatcaggagatgcatatgcttctgaaattgacttacgagtgtcatccacgaagtacatagtgaaatcatcaccaaaggacttacccgtcctttgtctcttactccttcgaggagcttcattgacatgctcctcagagacatgttcatgtgtatgttcagcttgttctggtggtgtgattgaactgtgatatatttcacagggttcgctcgaaccactatgagtattcttcattggaaataagctctcacagaacgcagcatcaccagactccataattgtaccacacatgcatgttatgtacctcggatttaactattaacaatctat

SEQ ID NO: 19732 - DNA, 453 bp, Oryza sativa
gctatcaagtcttgctctataaagcagacttatggtcccttcgatttggaggtataacatatgaatttccgatgatattaaacctataggacaatctcctatgaagccctctattgattgaatcctatccaatcctttgaaattcctatggaatggacaattctatagagatattgcacgaaatttatcaagaggttcaacctcttggtaaactgtcttttgagtctatctctctcatccaattcctatatatttcctacggttcaatcagacgggtattcttatattttttctgcgttatgcagtcctctggtttatacttacattcctatcacaatcctatatttgtcctattattaccgtgtttcaatgctgcgattcataggggcgcttatattgcaatactggtagtagacagatggtaccacttcgtaaccttgaactaatctaact

SEQ ID NO: 19733 - DNA, 500 bp, Oryza sativa
  unsure (1)..(500): unsure at all n locations
gcttggaggtctcccgacgtggctgatccccacgggctttgtgatccgggttagtaatgtcgcgtgggtaaagtgtaccccctctgcagaggtcaacaaactgtttgaacagccgtgcccacggtcatgggcggatgtgaggtgattcctagcgtagttttgtttgactactgccttgtgaaattgctgttgtgaaaaggggatcgttgtttggaaaatctgcagctgatgggatcagctaggcccgggtggccgtttgaaagttgttggcccgggtggccgtttgaaagttgttggccgggtgccaatcttgattcaatttaaagactgatacattgcacatactccgaccggacgagacgcactgtctcatccgtgtcngttgagaagcactcacttagttgtttntagaaaagagttcanataanatcaatttcaagacaacagccctttctttgaagcctgcttaaacacttatttcccatggcttgctgaatact

SEQ ID NO: 19734 - DNA, 109 bp, Oryza sativa
ctacacaactgcacgaacacattttaacacaatctatggttgtaaaatatgatccatctaaccaatgaaccgatcttttcatgaacgcaaatgcttttaagcgtggata

SEQ ID NO: 19735 - DNA, 313 bp, Oryza sativa
gcagctgcagcttggacggagaatgagagaaatcaaggattgattttttacccgagaacaagagaggacatgcgacaatttcagacattctcgtgtgtagaccccacagttaacacttagaccacatgtaattaaacaggcattccaaattaacgagaaacaacacatgctcgtccagccaccaaccaaaaaaaagaacagcgtctcctatctagccactttttcagcggcatccacggagggactcgaaaactgtgaaaagatcaggaatcccaccgatacaagaaatcttgtactcaatattggtttctac

SEQ ID NO: 19736 - DNA, 498 bp, Oryza sativa
  unsure (1)..(498): unsure at all n locations
gcagctggtgtggtgattttgagctgcactacctactagtttatangaacgcgcatatttatgagtatgtgtcttgtttgctactaaccatggcangattgcgcacggngaaatgagatggtcatgctcaacgtcaacatcttcaccatcaacgagatatagcgacttcttcacgcatcacatatgaggtacctgataatgatcttgcaagggtagaatctaaatcgccagttcttgatggtaagtatgattctgccgcttatgttaattgggagctagcagtagaaaaacaatntgatgagtatgatttttctaatgctcaaatgattaaggctgttagtaataagtgtatcggttctgcatctttttggtggcatactgtgngaaataagcttgaacccgcgatgaatgcaaaatactgatgagaaaaagaattgtggtttcatactatagacatgctctctttgagagatttgacatataaacaaggtacaaact

SEQ ID NO: 19737 - DNA, 418 bp, Oryza sativa
  unsure (1)..(418): unsure at all n locations
gacacatagatactcaagctnttaaccaagctcttacaagatcttaccaatgcaagtggaatggtgatgtacaccgactcaaccaagcagcccaatagagggtggatatatctatgcctcggcaaacacttgctgtacggctgcaatcaaatctgtggagctctgtgtaggcttaaatatgtagcacaggaatagcaaatgctcatatcatagaacgcatagttgaataattgctcatagtcaagtaccgtgctggtcctaggctagaacgtactatagacgcgagcctatacacaaacgataccacacgatagcactatgaacaactcatgcacaactctgatatatgaaggtcagctcaaacataacaggatctcctctgtactttctttcatctttctacctttctttatttctt

SEQ ID NO: 19738 - DNA, 448 bp, Oryza sativa
  unsure (1)..(448): unsure at all n locations
agcttggctagctcggntaggatccgctctgttttgctctatcataagaggcgccgaatagtctatctcttcttatatgtaccggcttatcgtataagcacgtacaaatatttactacaccgttctgtcatagagtttttctaataaaccggcacctataaagagctacatgtattggtttttaatattaaacccacatgtggtgttaggagttcggggaaggcttatatgtgttgggtctagagatcccgacacctatagggcccgtccctatatgttgtttgtagtcatagatacatgaattacagaagtaggctaaggccctgtgtgattcagcttaggattattatactctagcttattacgagtgagctgagacaaacaagtacattattataatctcatagtcagactattattatctgataagctctctagaggagctttt

SEQ ID NO: 19739 - DNA, 377 bp, Oryza sativa
  unsure (1)..(377): unsure at all n locations
tgttcaaagagatggctgattctgtgataccagatgccttctcatacaatatactaattcactggctctgtcagcgtcgcataattcgcgaagcgcttaacttgtgggaacagatgaatgaaacaggagtgaaaccatatatcgtgacataccacagncttgtgttgtgttattgtgtgaatgggtgcatggatgaaacagtcaagctgtacactgagatgcctggaatagggttcacacctaatgttgtcacttacacaacgctgatgaaagggcacataaataatgctgcttttgacaaggcttatgccctccttgctgaaatgaaacagaatggagtctcttgcaatgattatacatacaacactctcataaat

SEQ ID NO: 19740 - DNA, 354 bp, Oryza sativa
  unsure (1)..(354): unsure at all n locations
ctgcagcttacaacanattatcatcctagaagactctatatttcatctaacatcgaatagtccaagaactgctatgaatggctactagctagatctgcccggtccatgccatcgaccattctccacaacctcccagattctgtgagggtagggagaaggcttatagtgaaaaaaggaggtgaacctatagagaactcaggagttagcttgccgagctcgtcaccgcgattgcatccttgtcatgcccatcatcggccacccacagtcatgttgcattcctccatctccccacctctgcaattggtcatccttcatctcccctttatccctcggccaattctagcacctcttgag

SEQ ID NO: 19741 - DNA, 502 bp, Oryza sativa
  unsure (1)..(502): unsure at all n locations
tcttcgcttataggtgcctgttgagagggagntgtgntgtttaataagtttcttcaacagaactaacaagtcgttaatactactgtcagaccaaccatttctggccttcaatctcataagctcaagcaccgtccgcaacaatgtgaaatccttctcacagccctttgcctcatcgtacagaagatcattcgctgcctttttcaatgcatcataggtatccaacccatgagcggacccagcaacaacctcaggttcagcatgatgcaacatctcttccaaatctgcaaaagtaccatcatctacgctgacaagattgtgtagcgttcaacaaatccatgcgtcaccaagtgttgctcgattacagatggattgttgcaacttttctgattnttgcagtgcacgcatggacatctaatatctctggtcttcttagatgcagcattctttctagcagcgttcatgaatatatcgactgcttaatggatgacgcacaatatctctc

SEQ ID NO: 19742 - DNA, 351 bp, Oryza sativa
actgcataattactatatttcttctaaaatatatataagacgtatctaagattaaactaacgagggctacgacatcgaatctagacaaactcttatttggtcctaaattactaaatactgagaccgcgagagagtatatgttagaacagtatcattagctgcggtgaatgatgatggagttgagagtgcaatttgtccatcaagtatcgaattctattgctcacaatatgtactctgtgtaaatctaattactacactcgaagattatattcattacctctaattaatacacctatattctaaatcaatctgaagtgaagctcataaaagattgtgcataattaattaatt

SEQ ID NO: 19743 - DNA, 427 bp, Oryza sativa
  unsure (1)..(427): unsure at all n locations
tttcttaatgatatttcttttatattattcccagcaatggcgcagaattactcctggtatattatggttacagagttcatccgcaagcgcacggatataccattgtagcatttcacccgagagttntccaagggtatcgtatttattatatcccgtgggaagatcatgtggagagaagccgcccctgactgccgagttccttacgacagcccgtcatgaccatacaaccggggctaaatacggaggagtaccctccccagggaattaacttaggattatatacgcgcgcggaggaatacccgtactgagctatcaccatcagtggcccacctctcatccgcagcatataactccaaataataatatcccgtaatccagacgcgangtntaantaccagatactactctaatatcatctgcatgacat

SEQ ID NO: 19744 - DNA, 333 bp, Oryza sativa
  unsure (1)..(333): unsure at all n locations
gatagggagatacagaagcaaacttaagcatattaacgacgaagatgttcgatattccaagagttgtcaataggtgtaccgtcttcacgctcgagtcgatatgaacctggccgagtgacttcagagattataaatggcccttcccataaaggagataacttgtgctgatcccgtgtagtttgaatattcctcaaaaccaggtcgccgactaagaaagcacgcgatcggacattacgattgtgataacaacgtaacccttgcaagtatcgngctgactgaattaatgctgcttcacgggccttttccagtcggtgtaggtcattcactcggtct

SEQ ID NO: 19745 - DNA, 405 bp, Oryza sativa
tgcaagcttatctcttacgctccaggaatggatcagtcagaacatcaccaccggctcgcctcgaccgccgccgactggtgtttccgcctgcacggctggcctattatgccgccgttgttgggcgtctacgtcttcaccaaccggcttgccttcgccgccgccgactggtgtttccgcctgcacggctggcctttatgccgccgctgttgggcgtctacgtcttcaccgaccggcttgccttcgccgccgccgactggtgtttccgcctgcacggctggcctttatgtcgccgttgttgggcgtctacgtcttcaccgaccggccgcctcgttcgccgccgactggtgcttccgcctgcacggctggcctttaatgccgccgtatgtgggcgtctacgtcatcacc

SEQ ID NO: 19746 - DNA, 414 bp, Oryza sativa
  unsure (1)..(414): unsure at all n locations
ntgccatgacaaggctaatgtgtntggcacgtcatggattgtgtgtaaagcgtacatctactgcagtatgaatatcctcaaaactattcgaatagccgcgctcacggttatcgggcattgggactcactatggcatcttggatagaaatctaattcgaaattctattaaatattgttgcatgtagaacattacagggtttctacttctgcattctctgctttctgcaagtaaacctagctctacacagatattatcatttcatacattcattgttgattaaatataatagcttgttgagtacgttgtactcacccttgcttcaatccccttttttatagtccattatgagtctgtgccacagctgggaagttaatcatataagttagtttcatttcaacctaatcctcaagtct

SEQ ID NO: 19747 - DNA, 467 bp, Oryza sativa
  unsure (1)..(467): unsure at all n locations
agcttgggagaggctaacgagaagacaaagatggtttattattcctacaaccaccagcccaagggttcatcccaagggaggaagctggacaatctcaagaaggcttttcaacaagttggtgctgccttcgagccactaagtgatgtaaatggcgaaagtggagatgatgataagggaaacaacatctccgatgtttgcttcatggcgcgtggtgaatctgacacagagtatgaagatcatgagggtaagtgcttttgaggaagctatntaatatttgagtgaaaaaaataagaagtgtgagaagatgtatagaaaacaggaatttatcattgaatctcttaaatctgaaattgctagattaaaatctcttattcctaatgatgatgattgctcanattgtgaggttctaatgaatgagattgaagaattagagatgttaatgctgcacatgatctgagaaataaatc

SEQ ID NO: 19748 - DNA, 470 bp, Oryza sativa
  unsure (1)..(470): unsure at all n locations
agctttaattcaatttctaaaaatgacttaaacaatgtattnttaaattaggcgattnttagggcgtgacaactagccacccggaaatcatccaaatcttacgtattgtcccaatctaagtatatgatattttaaccagattgtaagcaaaataagcaatactaaattatctgggtctctatgactaatttatgcatagaaaatagaaggttgaatagaaggctataaataaataatttgtaaaatataggcttaaatgatcaataggtatatggtaacttgccttgctcgatgtcttgagattgattgatattatctagagtgtcagaggaatcctcacgacctanggttagacatataaaatccanattcaaaaaggagttttaaataaaatctanaaataagaaaaatagagaanataaaataaaatgcanaaatagcaaaaaggggtccaaaagatagagaatgat

SEQ ID NO: 19749 - DNA, 471 bp, Oryza sativa
  unsure (1)..(471): unsure at all n locations
ccttgatactaagcttgctacaatgatgtcccgaactttccaacaccagacggagatggtgctgatgngcttcctctgattgtgagtatatcagaatgtcatcgatgaaaaccacaacaaacttgtccaagtattccatgaacactttgttcatcaagttcatgaagaaggcaggagcattggttaagccgaacgacatcaccgtgaatatatacagcccgtatcgcgtggagaacgcggtcttcagaatatcttcttcccgaatacataattggagatatccggaacgaagatcaatcttggagaatacagtggcacctttaagctgatcgaacagatcatcgatccggagaagagggctctgtttttgatggaacttcatgagactctgtaacaaccacatcctcttcttatatcttcttctcacaaatcacagagccccaagagaagactggacgatgaccctttctt

SEQ ID NO: 19750 - DNA, 442 bp, Oryza sativa
  unsure (1)..(442): unsure at all n locations
gctgacttcaacagcgggcgactgcactccataggcttttcntttcngcagcgaccaaaacaacctttctaagacaccttcaactggaaagaacttctgctctggtgtgggagaaaagaaagccagactgaatactacccactgtactcagcaagtcataccggaagaggaggtatgatgcacgatataaccaaaggaggctaggggttcatttgcaatatagcaggcatttaaaaacagtagtcgaaagtagtaaaacactngcagtagattaagcatataaccaatcactgtcaacgctacanacgttgaacaggcccaccaacccctgactacacagtgcataagctaactagggggagactaatacgtgatctggtgatcgccataacccnggnccgctattcaatagattactctgccagangtgacaactgtctca

SEQ ID NO: 19751 - DNA, 432 bp, Oryza sativa
  unsure (1)..(432): unsure at all n locations
tatctggtgtgtgactgtgaaatgagtttgtgacccacatgatgctcatctgtcacactgtcacactttctctgcagacccagctggtatgtactgtgccatgtacacacaagctgctaactggaactattcactccgtatcaaaataacgccgtgtttagttccaaaatatttctttaaacttccaacttttctatcacatcaaaacttttctacacatataaacttccaacttttccgtcacatcgttccaatttcaaccaaacttctattttagcgtgaactaaacacagcctaaggtcccttcgattatctaattctttntgaaaatttaaccaatttatagaanaatgtagtacacacttaaagcattataattagttcattaacatactttgatagntcttttgttttgtgttgagatatttctat

SEQ ID NO: 19752 - DNA, 464 bp, Oryza sativa
  unsure (1)..(464): unsure at all n locations
agagtcacctgaggcatgcgcgcttataacttatgaattctttgatgtcatcttatgtgtatgtcagctcttgtaccaagagcttagccagaggcttctaaatggttgcgtcaccaccatattctgctgggcaaataatgtctcacaatgattttggcttaaacacgctagccaaaatagatatctaaataactcccatcggtttcatttccatttgcataatgaatatgcccttattacttatggncagcaaacgctagagactataaatctaatgttggcactaatttagagatcgtgtctcacttatgaaacttagcgtctaagcaagtctatgtcctctagcatcaaaatctgcaatatgacatgtgacgtttctatggagtgctctgcatcgtgatcagagaaagaaagctgatagtgatgttatgtatctgacatcattaccctaaatctatactctt

SEQ ID NO: 19753 - DNA, 348 bp, Oryza sativa
taatacataacaattacatgagctcatcatattcgtatatcatattatcatgcgagtattcttagaaaaatacaaataaagaggctggagattacagtggggtaatatacaccaataccatacttgcagcaagtgaccaattcaaggaacttaagaatcaagatggctcattttcttttcctagatcctagctagtgcagaatcttcaagccattgatggaaatattaaacttgtgtgctctacatgaacatgaagcatattgcttcctagcttccaagtcagttacatatgaaagagatattacactagatgaaatattagcagtcacataggatatgaagtgattc

SEQ ID NO: 19754 - DNA, 405 bp, Oryza sativa
  unsure (1)..(405): unsure at all n locations
acataatctcaatgctctttatgttatctatgaaaagtagttcaaataattcaatacactattctgtgtgggatagtataaaggctaacattgacctcccttcgaggctcagggccagggcccttaacttctcaaatttttgttctcaatcatattaaaagatantttgactctcctgagatgtctcaattaaaggactgcagttaacctcaatcagatacatgcatctcgaagtccaaggatgccatattgaaggcaaattcacaaggcctttgcagccataaaggatgaggtagtaatatggaaggaagctagtatgttgataaataatgatgtttagctagttttcttgcttgctttgtgtgaggaagttggtccgcttgacccctgtattgacagctacat

SEQ ID NO: 19755 - DNA, 449 bp, Oryza sativa
  unsure (1)..(449): unsure at all n locations
agctngagttgggacaaggataatagaattagtatttctctttattatgcaacaaacaagtggacacagattattagattgtgtatctctattaattggntagaaacatgaaaatataagaacttactaaatatgtgcttttgtggtggcctcctctaatccaactagatgtacacaccaaagcttgtgctgttgatgggagtaaagagctgtgataatcactaatcacttgaccccctgtgctgaaagctgattcagatgagactgangtgatgggaatagtaagaatatccttggccaactntgccacaattggatactttaattcattcatcctccaccactgaagtagattgaaactttttgcangaatatcctcaacaggatcatctaagtacctctttaaatctgacttangaagactagcagcattctttgatttcatatac

SEQ ID NO: 19756 - DNA, 475 bp, Oryza sativa
  unsure (1)..(475): unsure at all n locations
cttgcacatgaagattgtctctcattgcatatattatatgtcagcacaaaccacacatatntgccagtgtttttcttcttctgttacaacatttcaaagaagtaaagtaactgtcgctgatgtgtgcttcctttcttggcctgaattgtgaaggtgcatggctgagtatcttcctaacttggaagaaaatcttaaaatccaggtactatagctntaagttttgcatgtaactgttggtcttgactgcctgctcttattgttgatagtattactactttacatcgtagtgtagttgtcatgttaatggaatgactaatcatcctttgaaaaatagtgtgcggaaaataagtgaggattgaggaataaaagaaaaggatagacagtagatctgatgctattgntgaatngtttangtgaatcaagcaagaaaaaatttcctgtatttaatcttattatttagtggaagacctttatg

SEQ ID NO: 19757 - DNA, 285 bp, Oryza sativa
  unsure (1)..(285): unsure at all n locations
acctgccgcctgcaagcttcactatatatgccatgtgacgcccactatctatttattatggcactctcttntggcgattcaggactatttaagccagaaggattctgcttatctctatctctgggagnttctgcggcttagatgcttaaccatgtccttttgttgtcttaatctgctaccgctggagcgtgctgctctttcttgtgggtaaaattcaactgaagtttgtcgttggacgatctcgtgcaatgctttgtgttgcatctcttcagaacacactcattt

SEQ ID NO: 19758 - DNA, 481 bp, Oryza sativa
  unsure (1)..(481): unsure at all n locations
aactcagctaactgtaatgtttctggatatgggtgccctacctggactgacatggtatgatgatctttctttatcacttgtgatgatttgaacttaagctcatttattaagtactaaagaaaaggccatttcttattttgagaaatgtcaatgtctgcaagttctatggccactgtaccaatagtccaatgcactaacgagttatgtcaatctctcatttcatattgtgccatgacctaacccatctatattcacttcacttttcctgcactttgccaagntctatggcccatggataatatccaaaanaaaaaaacctactactaatataatcagggatataacacgtggaccaaagtttcttaattctcatggagaatcaaagattatgttctcaacgaaaataaaattaaacatatacgcacacagaataattaagaaaagatcagattaattccttgctaattnntgtctgaacttc

SEQ ID NO: 19759 - DNA, 472 bp, Oryza sativa
  unsure (1)..(472): unsure at all n locations
agcttcaccaacaaactgacggatatcacccatacatgcatgttgcacatattaatgcatggctgggaaatgtgacatataatacatagtcggatgaagcatgagtctggaatatcagaagtggtacgacaggacgctggtaggtgtcaggtttaaaacctaactgaaaatgccattccaacttaaaggattgaacagactgctttgtaacctcacagttaaatttgccggtaaggctttgtttagttcatcgcaaaaaagtttagattttgattgaaattaacgatgatgtgactganaaggtatgtgtatgacaggttgatgtgatggaaaataactgatgtttggatctaaacacagcctaattaaatgactgtactatatatgtaaacatgcttcgatcattcttttgtactgagttgtatatattcaatctagagagcccctgcacttaattaattcacagtacgta

SEQ ID NO: 19760 - DNA, 453 bp, Oryza sativa
  unsure (1)..(453): unsure at all n locations
tgcccctaggaagcgaagggttcctgctacctccgattccgtctccgacgacgaggacgacgtcaaagagcgtgatggcaatgaggaaggggaagaggaagagaaggccgaggccgtggtcgaaaaggccgcggacgaggtagttgaaaactgcgtcgacacccctggctacacccctacaccaagtccaggtcacaacgagaccggngtggagtcgaacagctccccccttcatcgaaaggaattggagggggcgaaggcgctagtggcgttttcagtaggcaagacagcgaatggaggtccggttaaaaagatctccaaaaagaaaggactcgttgatgttgctcgcgttntcagcaacgacgagtcttctgacgagactntgacttcacccgctggccacagcttggacctttcgaccgctcccattctttcgctcgacgctggtggagt

SEQ ID NO: 19761 - DNA, 371 bp, Oryza sativa
attatgaccattcgtagaaagctgtattcttgaaatggtgttaccatgcatggtattgagtttcatcgagaaccgagctagctctagcttgacacaatgacatacctgctcatgacaactgaactgaattgtctgaactcatctgcatgtggcgaggttgcctgtggagaaagccttccatgacacatgcatgtacaaagtcaggacaaccgacgccacttccgccgtgaacaagtttgcatttgtagcaggtactcggtacacagctaacgccatatacttatgggacagaacatgatcatcttaattagctcttgggagtgatcctgaacaaacattcatgagcagtacattggattggtctctgatat

SEQ ID NO: 19762 - DNA, 442 bp, Oryza sativa
  unsure (1)..(442): unsure at all n locations
agctttacccacctatggctgagttcggtactctctcttccttacccacctctctcggtntcacacgcacgcttttcaaactactaaacggtgtgttttttgcaaaaattttctatacgaaagttgctttaaaaaatcatattgatctattttttaaaaaaattaactaatacttaattaatcacgtgttaaaaggctgctccgtttaacatggaggagggatgggttctcatcctcctctgccgaacacactcgtagcgaggcggcttcagtacgagtattcaattgcggtgtaaccaatgccagtgttaggaagctagaggcgcggcatcctncttgaatattagattgactcaacatcctgcatgagtattgaatcgatcttcttctttacaaagtactccatccgtccttaaaaaannaaagcaaacactggatttcc

SEQ ID NO: 19763 - DNA, 387 bp, Oryza sativa
  unsure (1)..(387): unsure at all n locations
ctctccaaccacaacaaaacagagaggatttccaagtcaaggggcttacatgattttctaaggaaagagatgaacaccacgaggatcgccagccctgccaagatgcctacgattattgccacagtccgcccgacgtcatcttgcgaataatctgcagcacanagcctactattatcaccagaatccanaggaaatcagacagagattagagtagcacggcacatatgtacaggactacaaaaagcagagtcacttgcagagtgcccctttccgttttgtttatcgcgaatatattcagcatgggaagtggttgagtggctaaggcgctaagctaagcttatcagccgccgctcgccgtcctaaataaatttgatatgcttagattga

SEQ ID NO: 19764 - DNA, 351 bp, Oryza sativa
  unsure (1)..(351): unsure at all n locations
cacctaagttcccgtgacttgctgagtacgaatattcttacccttgctctatataaanatatatatatatagntcctccgccctaaagagaagataaagtgaagtgaagattatggtttcgtcctggttcccagccgtcgcctgtggtgttgggtgttagttcgttggttccgctgctgctgcttgtgatggtgtttcctcgtccgtgtcgtccgttgcattctcgggttgttctgagctgcaacctaagttaagggaaataagtcctctatctattttaaggatttgcagtgattcataattgtcaccgtgggtaccagcactatgtcctgggactggtaccgagatcgc

SEQ ID NO: 19765 - DNA, 351 bp, Oryza sativa
aaatattactatcaagagattttctctactactattgacaagatatactagcttatattctaaattttttatgagtggactgcaaagagttgctatgcctcttccaagaatttggacgtgtaagctgattaatttaataatagagaggcattttcttcaaaaaaaaaagaggctgcgttgaaagttatgttagagaaagaatacgcaccgacattcaatcatttttttcataaaatgattcttaccacaatgatggaattatgctagctcttgacatgatgcaatatatatcttaatctgtgcggatgattgatacccctgcgacgtagagacattgactatatactgcat

SEQ ID NO: 19766 - DNA, 406 bp, Oryza sativa
  unsure (1)..(406): unsure at all n locations
agcttcagcatatgaagataggtaactgttcctacttatgttatttcagttctctttaattcttttgtggtgtccaagataattcatctggcatttctagttataacatccgagtcgtctgaactggtttgcagtgatgagatcattcttccagatagccttggtctctactgagcgctattatttcttcaccaatactacaaacacactgacaagagattatacattggtacacaaattattattattattattaattatttacttgccatagattatgaataggtacacagacgcagtgaggtcaagtanggtttcacagattattattaatagtagtagtatgatggttnttgggttatacttataatacagaacttaggattcacacgtaagcatggtcaag

SEQ ID NO: 19767 - DNA, 462 bp, Oryza sativa
  unsure (1)..(462): unsure at all n locations
ctaattctcttcttgtaagagctttctctgatgcatatngggcaagatgnttggatgatcggcgttctactggggggtttgctgtttctatagggcctaatcttgtgtcctggagtgcacgtaagcaagctactgtatccagatctattacagaagcagaatataaggctntggctaatgctactgcagagattatgtggatacaaaccttacttcatgaactgngaattcaggtacccaaaattgctaaggtatggtgtgataatattggtgcaaagtatatgacagctaatcctgttnttcatgctcgcaccaagcatatcgaggtagattatcactttgttcgtgagcgggttgcaagaaaactttacaagtggaatatatatctaccaaagatcaagttgctgatggcttcaccaagacactgtcagtcagacagttagagatgttagaaacaatcta

SEQ ID NO: 19768 - DNA, 344 bp, Oryza sativa
aaaatggattatcagcttggttgggttattagatgacctgaaaaaaaatacacgtatgtagcaacgagtgaaggctaatttaatcatattattgtgaacggctaactaaggtaaattcacggcgggaactgcaattataagtctgatcatgtcaagttagtatgcaagtttataaaacagatttcttataccgtctcttctcctttctttattgtaaagcgaacgaattaaataccgactcatacacggatttgtatttccaaatgcatataatgaacttaaaaagcgactcatacacggataacgtaccataatatccggtagaaacatcttcaatttttata

SEQ ID NO: 19769 - DNA, 438 bp, Oryza sativa
  unsure (1)..(438): unsure at all n locations
ngactactntcgctccaggttatactggcaaagtgatggtaataaataaagtattgtcttgctaaatggaacatactgtgccgtcccaaggaacaagggggattaggaattcatgatttggaaattaagaatatggctctacttagtaagtggttattcaagttgctctccacggaaggggtttggcaacagttgatgcgtaataagtatcttggtgataaacctctntctcaagctcaatggaaggcaggggtcacacttttggtctagcctcatgaaggtgaaacgggactttcaccgttttggatcctttataattaaagatggctcccaaattaggttttgggaagacaaatggttgggcaattcaaccttgaaagaacagtatccttgcctttacaacatagttaggcataagcacgctacaagtgcacaagt

SEQ ID NO: 19770 - DNA, 438 bp, Oryza sativa
  unsure (1)..(438): unsure at all n locations
tgcaagcttcaggtttcagagttcagagatcagacaccatttttgttcttacagcacaaattaatccagaagaatgttgcaattcagacggagaaagcttctgatttcagaaggaacggatatggggagaaaaaaaataaaggtcaccgaccacactttacagatatgagatatcgatcgaataagctgaagaacaaactgaagatgatgcataactgaaaacatgacctctgaatccgacagcgacatncaacaaatttgcttcgtcagccgtgttggcgacaggcgtcaaacgatcgatcgtatgcgcccatggtttgcgacaagtgggtattctctgaaactgtgatcgatcaagctggtttactgtcgagcaaaatcagcagtagattacagtacgttagcatcgtcgtcagtgacagcatgcttatctctttc

SEQ ID NO: 19771 - DNA, 480 bp, Oryza sativa
  unsure (1)..(480): unsure at all n locations
taagctccttacttaaatataaatcanaactaacatttggtttgtacaattgacggagaaagagcttttttttttttggcacgataggggttgtattttttctcccacgaaaaagtacaatctagtgttgtttttccttaaaaaaaagacggagaaagctcacacagaaatcactcgggttcaaactgtggccgtcttcagtaactcgataacccgaaggaatacgattataaggatccgtacgtaccgacatctgaaataccggaaaattttaagtgaaatttggtaagattatattagccatctggctacagcaccaatcatacactcgtgaacagatctgctcgctctttggttcatgaagaactttttgcaacgctagcaataaagctacaataatgcttgatgaacacattattancagtgccataattaagtggcatgagaactgaaaccaaacgacgacatcagtagcatatg

SEQ ID NO: 19772 - DNA, 432 bp, Oryza sativa
  unsure (1)..(432): unsure at all n locations
agcttggccatagaaacctccagaacccaggaaattattatataacaaataaagtcagaagaaccaagagaagaaatccaaaagttaagtttgataaggtattaagtaaggaagagcaatgggaagtaaatgagaaattattactagagagttatgaagaagaaaacaacctgatagaggaaatagagaatatagaagaagaagataatgcagaacaatataatgattttatagactcattggatgaggtangtttgcataatctagataatgcaatggaagccatggaagtagatttgggaacaggaaaaaggaaaagatacggagagggttctgtaaaaaatgaaggagaaagagaaagaccagctagggcagcaggaagatggcctccagaanaagaagaatattcatatcattatatcccaggacagt

SEQ ID NO: 19773 - DNA, 513 bp, Oryza sativa
  unsure (1)..(513): unsure at all n locations
actcagctaaagatgactccctgngcattagattcaggtggctaatattttaggaaatccagctcatcatcacggtcactagaaaactaacaatttccatacaataatttgtgtaaatatacaatcatccatttctcctagaataatgcattcaattcaattntgattattggtatatataacttaatttagtcttttcaactcagttgaatgtcgtggttattgatcaattgatggcaagtcggcaactgttcatttctcctcaagaaacactgtaccatgcattagccttttcaagttggagctgtgattattggtcaatgtatagcaaagtcagctactcgatcatttccattagcaaggaaacatcctttgattagtgggaattaagtcatgtctatgtaacttaatttagcattcgtgggtttccatatgannatgagctcagtactggtcaaagctgcgactattattgctgatatatcgatggtaattaaataaatcgggtattca

SEQ ID NO: 19774 - DNA, 450 bp, Oryza sativa
  unsure (1)..(450): unsure at all n locations
agctttagacgactgctaaatatagaaactaaagaatattttattacattaaaccaaagtcatcattggcaaccaaacattatctcaatggtatccataccattaggttttcagcaccaccgggttcacattagctaagcgaacagcaatttttgacacaaatcaatctataaaattgctgaggcaagcacaacattgtgcataccactgctataaatgcttattccaaccttgaataatggtagataaatctagagtgcanagtatctatttgtatcatttgaggtacttgaactcataagagtgacagagacatgggaggtggaggaaagggtgagagagagatgtaccagcatcttgatgaatgtggtcttccctgttccgttctcaccaagcatcacaaaaatctgagaatcagtgaattcaccttccatgacagtgagcttgaag

SEQ ID NO: 19775 - DNA, 146 bp, Oryza sativa
ctcagcttcagcctctgcagatcgtatctgtccgcgctacgatcattgctgcagccatgaaatggtggggttttgggtccgatggaccaccatggtcgtcgccgccgtcgccgccgccgccccaaagctcgtctccttttctccgc

SEQ ID NO: 19776 - DNA, 439 bp, Oryza sativa
  unsure (1)..(439): unsure at all n locations
agcttctgaacggaaggatctatgagttttggcaaattcttcacgtaagttacgtagatacgtagtacagttcttcaataggagaactatgcaactagcagaagagaattgagaaaactgacgaanaaaaacgcaacgcttccttgatcttcaccacaccaactcaccatctccctattgggaccaagtcagtgcaggcagcacaagatagaagccctcgatgcgctaccatgctgctggccgccgaaaactcatctttagaaaagatcgacgaaaggcggctaggttgaggagatcactcctcactcctcagtgaagccagcctcatccttcagacattctcctccttttcagtgcaaatccacggcagcaaaggtcgagctacaggctacctatagcagagacgaaggggacaagatgcggtcctactcgtggagtc

SEQ ID NO: 19777 - DNA, 462 bp, Oryza sativa
  unsure (1)..(462): unsure at all n locations
ggctatgtctatgcgacgaccttgttcaagtagtagctttgtattctgaccatacaaggagaatttttttttcagtcagtgtaatgcacatttttaatctgccaagccagaaattgacatccaaattccctctcaatgcatctgcagtagcatttgctgcggcaagtgtccctatgaactgcatctgcatggcaattttcttcagatatttgtactaatcgtggatggtccttagggttcgcacttccaaatgcgagcattttgaagaggtagctcaattcttcatctgaatggttgttaagaaacattggctntacagttccaagtttctctgattttctaagtctgcttatggttaccaccttgcttccctcattcatttgtgccacggatntatagaattcctnccaattcatctcattcacatctgaaacaaactccacaaccatcaaaatgttccct

SEQ ID NO: 19778 - DNA, 411 bp, Oryza sativa
acctgctgcatgcaagcttctgctactcatagaagagaatcaactattattgttgagaagtttcacataactacattatgctttatcatcacttaataactacagagtacttcctccggttccataatacttgtcattttagacaaggacacggtctccaaaaaaccactttgaccattattgtctattacaacatatatagaaatatcaacaaatatatgattttattaaagtgtcattcaagattattctatacatatagtttccatgtttggtaagtaatagtttaagggcttgttcggatcacaggatacgaaaaacacagcaataatataggaatgcatatgcaaaacgtaggattgaaaacatacgagattgatggtgtggagcgttcggaatacacgaatatat

SEQ ID NO: 19779 - DNA, 361 bp, Oryza sativa
  unsure (1)..(361): unsure at all n locations
caaccccgnggatgccttggactgggtgcacgccgttgggaaataagtggacaccgcccagtgcaatgttgaggagaaagtcatcttcgcaacccatcagctgcaggggcccgcatcggtatggtgggaccacttgcaggctacgtatccagaatgacagccaatcacctgagcccgcttcaccgccgctntccggaggacccacgtgccagctggagtcatggcccttaagaagagggaatttcacgagttgaagcaaggcaaccgctctgttatggagtatttgcatgagttcaataacctggcccggtacgcccctgaggatgttcatgaagatgaagaaaagcagaagaagtttctg

SEQ ID NO: 19780 - DNA, 454 bp, Oryza sativa
  unsure (1)..(454): unsure at all n locations
agcttaccanaagagaagagagaagctactatagccatacccgaacacttccgaaggcttccgggcttctgatttctactatattcctattccaccagctagatactactaaactaaacttgagagaaatgagagagctattgcttgatgtgtgtgagtgatgtgagaagaggagctccttttataggcaggtaatgacggttgtgacggttggaatggtcggtaataccctccaatcgtcattggggatcaaatccagccgttcatccaaaccctgcatccatcggcgccacgggaggtttggccggccaaaccatgaactggcccaacccagcccatcttcggctggcggcctcctttggtgtcctcctcccatctgcatatcaagtgtgtccattctcctagtgatntcacccaagtcccaacgagaggaacttgagcgccattcacttga

SEQ ID NO: 19781 - DNA, 471 bp, Oryza sativa
  unsure (1)..(471): unsure at all n locations
tcaactatagtgtanactcagtgtccaagttggaaatctttatgatcacttgaaatcgaagaaaatctaggggtattggcttggtggctaaaggtttcttcctggactcttgcttggtgagacaaggggttaactgagacacaaccctctagagctctccgtaatggagagtatgatccttgtgatctgaacttccggaaaaaaaaaattccttgtgtccccttgtcttgtcatttgttccctcttgctattttgcttattatacctgtgtggtgctattgcttgctacctgctatattgatatatgttcttggtttccagggaattgctttactcgctatgaggtgcttggaagagcaactcataggtacccanaagttcatggggaagaacttcggatgttccagccagctttctctgctcggttgtgaaagctaccaggaattcccggcattttgatatgaaagtttt

SEQ ID NO: 19782 - DNA, 457 bp, Oryza sativa
  unsure (1)..(457): unsure at all n locations
agctngagctatcccatactagcacatgtggctgtactgtatacgaaatgaactgacattgagtgaagtccttatgtcagattgggatcacactccccctatcggtacacaactaatcaccttatgtgtaccacatgaggcccaaacctaaaatccatgttttccatcattttatttgtcaaatacttcatttattcatctctgtccagaatcttaataaaatcatttttcatgttaatatgagcccaagtgattagtaagacaattctaagcatggctaagcaatatagtaaactagtgacaatgtaactcatattccaagtagtattacgatatgattcctaaggttaggaatgaaggatatggatatatgtggtggtaagttaataatgcaaataatacgaatttgctaacaagtttaacaaaattntaatatattagtgtacaatcgacatgc

SEQ ID NO: 19783 - DNA, 363 bp, Oryza sativa
  unsure (1)..(363): unsure at all n locations
agatctcaagctctctctgtgtgtggaaagatcgcgcgctangaacaaacgcgagacacaagcgatgtatacagtgttcgggctcgctgacgaagcggatatacacctacatcctgtgatttcggcggatctgcgtatgaaggggctacatagcgtgagccaacctctccatcgatctacgctctgaatctggcaagaatcaatcccctcctctatgggcaaagccctcctttgatacttcaaggagataccacatgcacccttctctctccaactggactgatctcttctcttgaatgggcggnatcaacacggttgctgtcgaatacgctcgatggacagacacacctacctcacttctgc

SEQ ID NO: 19784 - DNA, 145 bp, Oryza sativa
  unsure (1)..(145): unsure at all n locations
agctntatttagactcagttgattacatcaagaggattttacattaatagtccaccaaggatgtgtattttctttgtattatcaacggaacgggtataactttagactggcagctttatgggggtggcgcggctgaaactggagt

SEQ ID NO: 19785 - DNA, 379 bp, Oryza sativa
caaagcggagtatggttcgattaatatatactataagagattttctctactactattgtcaagattactagcttatattcttaatattttttatgatgtggactgcaaaagagttgctatgcctcttcagagaatttggaagtgtaagctgattaatttaataattagagaggcatttcttcaaaaaaaaaagaggctgcgtgaagttcatgtttagagaaatgatacgcaccgacattaatcatttttttcataagaagatctattccacaatgactgaaataatgctaactcttgtctgatgcaaaattattcattcaacctgctgcggatgtatagatcacccactgcgacgtcaaagtacattgacatattacat

SEQ ID NO: 19786 - DNA, 469 bp, Oryza sativa
  unsure (1)..(469): unsure at all n locations
agctngaacctttactcatcccgagtaaaagacgaaaggaaacaaaaacttggttgttgatcaagagttgctactatgctatatatctcaagtgtacaggtgcaaggtatatgtattctctctcaaattgaataatctttggcacggtggcttacccttacccctgattcccatgagacactgcctctccttgccttgagctgttgaaagacagaacagcaatagaggcgggtttaaaaagggaaaaacaaatatttcacaatatttatgtagggtttatnttggtcttacagataaattactctcttggtgtgactgtcacatctaacatccttccaattgcaaggatccacatcttgttcacgccagttgaggaatatcccatcagaagttgtaactgccttcttgaaagcaagaagtgcttcatctgtagaaaaccgtcaaaagaatcatagcanatgatcacaga

SEQ ID NO: 19787 - DNA, 469 bp, Oryza sativa
  unsure (1)..(469): unsure at all n locations
gagcctaanacccaaagaagctattaaaaactttcagtcctcgcaaactaagtagaaaaaccaaacaaggcaatgataaaccaagtaagcaaactgaattgataaaaaatcacactccattattatgatgatagcccccgactgacaacttcaaggagaaaacttgatgtttgacagtcaaaatagggaaatacaatgataaagttaagcgtagaaacgacgaagatgttcaatgttccaagaattgtcgacgagagtgccgtcttcgcgcttaagtcgatatgaacctggccgggtaacttcagagataataaatggcccttcccatagaggagataacttgtgccgatctcgtgtggtttggaatttccgtaaaaccaggtcgccgactagaaaggcacgagatcgaacattgcgattatgataacgtcgcaacccttggtagtaccgagctgactgaatcaaagct

SEQ ID NO: 19788 - DNA, 464 bp, Oryza sativa
  unsure (1)..(464): unsure at all n locations
acaatatgctagacattagcattagcagagtataagtttatgagataaccatgatcacagggtctgtagcgatttaacagaagcctttctttctttaaatattcattaaactcttgatcttttttgagtatttaccattgacaatctgttcagatcacctatttattggtcctagtccaatcaatgtacaaagccacgattatccttaatacactacagaggcttggaaatatggcgcatcgagaacttcaagccagttactattcctgcgtattcatatggaaaatttttcatgggtgattcttacatcatcttggaggtatccaagtacatattatatggcgtcataactcataatccatatatcagtctctcttttgtcctcttattcatatcattagtcttcttgcctaanatagtctatccatggttcagtatagagtatagatacatgcttattctat

SEQ ID NO: 19789 - DNA, 398 bp, Oryza sativa
  unsure (1)..(398): unsure at all n locations
tactaagctcgtttctctgcctttttttcctcggtatttatctatctgttaactctcactcccctttcggaaagatgattgtcacatgaacacgagtttgtgtgttcaacgctatagatggataatatatataccattgtggttctattcgtggccgtgtgtgttttatcgtgtactgatcgaagcacggtaatatagcgtacgtgtaaagtgtaatgtaaagtgtaatgtgtgtgttagcattcgctttactgtatgaagaagtattctatgccattgatgtttttctcacacgcagaaatattttcttccaagtggaggggttctgtcagtttttattatttatctttgtgaatgaaaattatgactccaacanaatccttttatttatataaatc

SEQ ID NO: 19790 - DNA, 420 bp, Oryza sativa
tcgatataagatgattaattaacaacaagaaggaataaataacacttcacccccaaatttctagtatggtgatcccacaaattacatagtaattaatattactaaacgagaaatcctaacataaagtgtattatgtcatcaaatgtgtgcatggccatggcagtaggcatacgcattcacccatacgtcaatgtgaggaacaatagaataagagcgttcacaccaatcatcagtttaagaacaaacggtcatagtacatgtcaggatgggttacacatgttaaactatttgccatgcctcaacgtgcatataaactagtaatttatagttgccaatatatagggttaagaagaaatttatctgatcaatatatcatgcacttcgtgtaatatagatatcataaactgacagttggatcta

SEQ ID NO: 19791 - DNA, 467 bp, Oryza sativa
  unsure (1)..(467): unsure at all n locations
agcttgcccagctgcattaatctctgacattntgtggatactacatgtttctgcttgcacagaatcctcttgtagttcaaagtagtgatctatttaccatctaacttaccatcctctgcaattttccaagaaacatgtgaatatggtcgaactcaaaatttcaggcctcatttgaaacacagggatttggccttgaaagcaaatataattagcaattactttattgtgtggtgcacaatgtttcacttgagggtatatntagccaggctttggcaaggctgcaagactatagtaaacagtgttttggttgctacgtgctggagaatccatgagcatgagcagatctgctggtgctgttaccgctgtctntgtaacagttattggtcaagcctttttatccactgtctacgtgctgaaatgtcacaggctgcagagcaagtngcacatgcactaaatgtatgacatgc

SEQ ID NO: 19792 - DNA, 417 bp, Oryza sativa
  unsure (1)..(417): unsure at all n locations
tcatgaatctactcgaacctccgtatattgtcaacaggctctgatttatgataacctgattaagtattcttcaatgaaacatatgtaaacagaataatccagcactattaagtggcaatagctgaaatgcgctatgtgcccaaattttgaaaaaacacaccctatgccccaagtaaacatgtcaatcttttatttaaaacgaatgtcttggttgcgacaagattgatggcacaaaacattatgttatatgtgcagtaaggaaactaataggctgtagactaagcaggaaaaacaaacttactagctaaatttcttaatgagatttctgcagcttgacactgtgcttctttccttgtcctgccaatgccttcgcctactttttctncaacaatccaaacctgaaagaggaatagacat

SEQ ID NO: 19793 - DNA, 469 bp, Oryza sativa
  unsure (1)..(469): unsure at all n locations
agcttgtctggcacatatgttcacaaggcaatcttatgactccacaagcggagcagacgaaggcagcacacagcaatatctgataaacacagtgaatcaaaggtgtggcttggttgagctgagggctaacatcagcttcagtggttatccttcaaaatgtccactataactacacaatgtccactagaactacagagtgtccaatgcaccaaagaacagatctgggatttcagctccacctcatctcgtcaaatatattactaaatataacaaacaatttataggctacaatgatagcccttaaaacagatggtgactaagattgaataatgcagaanactgttttcgcagtcaacagcagatacataacttgagtaaaacagaaacaaataaaacaaattgatttcatcattaacaatggcacagaaacaaataaaacaaattgatttcatcattaacaattgcacta

SEQ ID NO: 19794 - DNA, 504 bp, Oryza sativa
  unsure (1)..(504): unsure at all n locations
ngagccgagatcaacactngtgaccatccggttgaactatgtttatgccgaggtcttgtccatcatttgtcaagactttattctcatcacaagcttgacttcattcttgccaacatgacgatgtccttggcttggtgaccactaacccatggtgtcattcattagcctcatcgtagtgggacctattccttttcacacctcaaaggagaacattagtctcaacaaatcggttgtcatccttcacttgatgaccaaccggttgcatatgaaagatatggatatgtttgttgagtattcattaacatcacaagtgtcatatactcgtatgcaagctcaagtgcaaagatccgatataaataataggtgaacaacatggatctagaacatgcacaatanatgtataggatntgctcccnctaaatatatgcatacaaataaatatacaagagatgcaagtgtatgcataattagagaatgaaccaatggggtttatcctatacatat

SEQ ID NO: 19795 - DNA, 458 bp, Oryza sativa
agcttaattggcaaatctttggttcatgactatacttttatgcatgcttgttatattatagatgcgttcatcttctttgtattgcaatacatgacttgacatgctatatgtatgctaagctcttgaacattaatgaacataattcctatgctttgatgaaatcattgtcaaaagggggagaagcaaggtgaatatttttggagaagcaaatgagttgagaagagcatattgtttctggttcgattgggaatttcttttatttcacaagtgagagaagttttcttttggattttcgagcacgatgtgtacttcttgtacaaagtgtgctctttaccactcatggttttatatttccagacaccaaaacatattatatgggttgcccaatgtgttcatcaagcgggagattgtaaatcaaggtgtttttgattatattctgtgaaaacaattggattgga

SEQ ID NO: 19796 - DNA, 487 bp, Oryza sativa
  unsure (1)..(487): unsure at all n locations
ntccttcagcaactcaaccaaccccactacatttcaagcactaccccatcggcttacccggtggggaatacaagtcaaggtgcgcccaattggttgccaccaattcagccaggctcgggaccttcgctgtggagtcaaagaccgcagttcgacttcgtcaacactgctcatgtgccaaccgttcggcagcaagttccaaccccaggcttcggaacaaaccaagcaccaatccaagctgccatgatgtggtcgcagccaatctttgacccatccatggcggcccagcaagtaccaccagttggagccgggcagtcgaatgccacggcccaactccacgcacaagctgcgatttcgcccttcgccacactgtacccgcagcaaggtgcggtaaacaaggcgggaggtgaaaaggggctgccgctgagtgggggaatcaagactcgtncaatcccgccccagttcaagttccccacctatccacattatt

SEQ ID NO: 19797 - DNA, 462 bp, Oryza sativa
agcttgcacatactgaacaacagtggcacgaagacgatgcctatcaaacagctgtttaacgcgctgataagtgacctgtattcctgaatgacccccaacggccgctgtgtgaagattagcaagaattctctgttgaacatctacattgtgacccacccaaagtctgttctgaaaataaagcaccccattgcgcaaagaaaaatttggtactgctccagaattgatacagagagtttgtaccttgctgcaggcatcgggatcagaggaataaccagccacaatgtcattgatccactctggaactgcaactgataaagctgaaagttccacccgatcagaacctggataacgagataatgcatcggctgcgcttgtgcaatccctttcttaaaataatctataacgaagccccaagagtttggaagagccttgtgctgcatggagtgggagacgctgtcagta

SEQ ID NO: 19798 - DNA, 423 bp, Oryza sativa
  unsure (1)..(423): unsure at all n locations
tcggatgtgcatcgactacaccgaccttaacaaggcatgttctaatgacccttaccccctgcctcgcatagatcagattgtcgactccaccgcggggtgcgaccttttgtgttttctagatgcatactctggttaccatcagattcgcatggctagggaggatgaggaaaaaactgcgttcattacccccgtaggaacctattgttatacatcaatgcccttcgggttaaagaatgcaggtcctacttttcaacgtactactcgaatttctttgggtagccaaatagggcataatgttgaggcttatgtcgatgacttggttgtaaagacgcgcaaccaagagactttactcttagatctagaggaaacttttgaaaatctccgcttccgccgcataaaactgaaccccnngatagtgcgtgt

SEQ ID NO: 19799 - DNA, 465 bp, Oryza sativa
agcttcggttatcggtattgtgactatttgtgtgtatatgtaactgattaggggagattccacttaattctggaaattgtgcagtgtgaaaatgccaaataagaaaaagtagatagtagggatgtggatttagagcctactaatgcgaatatattaaaaacatatataacaatataatagggatatttttcataaactagcatggtggcccgcgcagattgcgtggctagcatcattatgttttctctcatataatagcatatatgttttctcattatattattcaaatatgttaaaatgacaacataattttaaatttttcaataactttacaaaactactaatgtataatattcatattatattttatatacgagttagctattaattatttctagtatcaaaatttagttatttggaaattatatatatcctatatggattctagactcgtctttcaatatt

SEQ ID NO: 19800 - DNA, 383 bp, Oryza sativa
  unsure (1)..(383): unsure at all n locations
agctttggaagaaaccgatccgctaggtctatatcatttgcaatacctganaaaatagcaccaattgtcgattggcaaaacagtattttgatattaacataattacaaaagtacaagaagcatcctttgacatctaacctatcagtatgcatcttgagaattggtaagtcgtaagcatgaaaagatcatgtagcacagcccggtctcttgttattaagtagtccatctcatccacaacgaccaacctacagaggagcagtaatatgaaaattgtgatgccaggaactaaatggcacgaaaaaggccaggttgtgaggatgggtactgggctcaagcagtccttacaacatccttcttggggctgattccttgtgggaaaacat

SEQ ID NO: 19801 - DNA, 469 bp, Oryza sativa
  unsure (1)..(469): unsure at all n locations
tcaggtgaggatctagtatgtgcgacgtagacgttntgtgagttctgataatgaccttgatccttattattagtttactgattaaggatgttggtggaacagagcgaccggtcagtgcaggaagcttaaactgggtttcgcataatgggctgagcaacatctacagatcagtgtcataaatggcctgacaatgactatacacccctgctgttcgcgtgctcgaccactgtggcatactctactctgatctgaaaccactctactctgatctgaaacctctgcatgtttgtacagattgcagaatttatagtaggcggtgttcatagcttcgtcatagcaaaaatcaattgtaactgatgtgctaattccacgttatgaaagtaatatgtgtgatggagactatacttaattccaattntcatgtntcttgtttggaatgcagtaattccgaaataaacagagcattcta

SEQ ID NO: 19802 - DNA, 468 bp, Oryza sativa
  unsure (1)..(468): unsure at all n locations
agcttactagtaatcctcatcacttgatcactagtactgtagtataaatactgcgatcattgcaagtagtgcagtttttgaatttcaacaggtcaagcacggagcagatcattccaagctttgttataagcaagcgatactcagtaaaaatcatgagacgagggcacctcgtcgcagtatcagcaattgcagtcctggagttttggatcgcatggataagccaacaaccaaatgacagggcatgacaccaacgacgccagaaatgcgtcagtcttggagtatgccgttacataatctcgaatgcaaatcatcaaatntggaccacctgtgatttaacaataaccatatagaggaaacaaactggtccagtagaaatatgacgagaaaactgaaagcaagcaaagaacaaaccattacaatntacaaatacaataaacagcaacagccagcaaacaagtagtacaaact

SEQ ID NO: 19803 - DNA, 475 bp, Oryza sativa
  unsure (1)..(475): unsure at all n locations
tagatactcaagcttcacgaagctcggctcggctcgtttccacccctaatataatcgtttacggtttttaatttttttaagcagcagatgcaggagacgtcgcgctgcggtgcgtggcggcgtgggggcaactggccggtgggcgggcaggacaggacagctagcgagcgcacagaacggtgctctgcgtgggcgtgtgtgtgtgttatttttttgggtatctgcgtcttctgcgatggcatcgtgtcgtctagacttgggacacggctcgtgcgcatcgttggcctggcttctgaagtggctgcgccaccatttctccgttacttgatttggtntattttagtatntagataatgaacccgttcactaattatagtggtgatcaactactaataaaccgcctttgctggagatatatatatactatatacggacgggtgtatctncaatcatatngacatttgtcattatatct

SEQ ID NO: 19804 - DNA, 410 bp, Oryza sativa
gtcacctgctgcatgcaagcttgaataggagcatgagtacggaagagttcaagcccctgataaacgttcacgcgttcttttgagggattatatgactgcaaggaaggacggatatgatgccggaccgaccactatgaagaacacgatacccttctgagggtgtgtacgtattaaatcaagaactcagccttaaccattaagtaggtaacaggaggaacatattcatgtcaccccaataggttgacataacgtgatgctcttaggatctcttctgaggtgactaactctatgatattaacaagatactcgtgcactcaaatttccctttcttgtactgaaatgacgcagtgatgtctagtcgaatgagttaatattattaatgctcgtattaattgaagcattgtgcatat

SEQ ID NO: 19805 - DNA, 384 bp, Oryza sativa
  unsure (1)..(384): unsure at all n locations
gatgtaactgaagctagctagcacacacatcgtgatggacttctccttggagtataggtgatgcatgcatgcatgcatagcctgacatgtacgtatagctggctggcttggctagcgaccgatgcaatgctgtgcgcgcgcagtagtacgtcgggctgtacctgtacgtggtcagtgctagtatgcacgcaatgatcatgcatgtgtatagacacatgcattgtgtagtagtccatgcatagggagcagtgcaccgtttgctgcagtgaagtgaaagcgcgagatatatatctaaacaatctcnagccaatatttgctactaccctgatcaaatcataggtatatatatataaacgtacgatatgttcatcatctattctgaac

SEQ ID NO: 19806 - DNA, 339 bp, Oryza sativa
  unsure (1)..(339): unsure at all n locations
tttggctatggtttgagacctcttcgctgcgctgttaagctgctaagcaaccttttatgttaccttaaaactcttattcagctctcaatagaagctggggtaatatcactttatccaaaaaaaaaaaagagaagggcttaacattcttagctgtgaccatttctctttgatgattgggcaacactactttggcagctcgcttcatcttctctccgggaatatctatagttatcagtcactacagcaattgattgacgttatttattttgaaaggaaacagttttttttttttgctagctcctgcagagaacattattgtcnncctttttttcatctctg

SEQ ID NO: 19807 - DNA, 271 bp, Oryza sativa
gacaagggcttaacattcttagacgcgaccatgtctctctgatgatagtgcaacactacttatgagagatcgcttgatcttctctcacggaatatctatagatatcagtcactaccgcaatagagtgacgttatttatttgagaaggaaacagatattgtttgttgctatctcctgcagagaacatactagcccgttattttcatctctgtacacgctgtactataactgactcgcaggctgcaaactggccactgtgctattcctacggg

SEQ ID NO: 19808 - DNA, 277 bp, Oryza sativa
  unsure (1)..(277): unsure at all n locations
gcttggcgatgacgggaggagcaacanggctctcccggagatcttaacgccacggcgaacttcgggttgaccgcgacgatggagctccggtggattttggtggcgaccaaggggccgacggtgtgcagctccttcttgcgaacctgacggaggcaacggcgagcagcaacggcgaccacagcgacggcgcggggcggctggagacacggcggcgacggcggcgctccggttcacgacgacgggctacctccgattggatttggcgcaaaacaacagc

SEQ ID NO: 19809 - DNA, 502 bp, Oryza sativa
  unsure (1)..(502): unsure at all n locations
ctcgatgtgtgtggagaggagaagctgaaagtggtgttcatcgtgggagttggaggaattggcaagactacgcttgccaacaagctgtaccgcaagcttcggtggcagtttgaatgccgggcatttgtgcggacatcccagaagactgatatgacaagggcttctcatcaatatcctctcacaggttcggccgcaccagtcacctgacaattggaaggtgcatagcctgatttccagtatcaggtcatatctgcaagataagaggtacgtacaatgttttcggggtgtgaaaccgacttattncattttttttgtttctgtttgctactaactggtaatcagtgcatttgcctattatactgatactaaatntatcttcataaaaatttccatcaaacatcaaggaatgagctgcaagttgcccttttaattaaggaanatatagacttaatanacattgcaaggatctatagcgatccccaagccagtggttctatgtgat

SEQ ID NO: 19810 - DNA, 423 bp, Oryza sativa
agctcgcagttccagcaactgttaaaaagtgaaaagatgttcaagaaaggtgagaggttgagtatgacattagacgcagagactatatcgaattgcagaaaacccagaaccaaacacaacaagctggctccgtccgaacaatcaatcaatctcaaaccatctctttttttttacatcagttgacctccaaactggaagggatcgactatccaattatccatgtatctcctggagaacatggcatgctatctgagcttcgactcgtttgatctgctgctccggaagtttgatagggagaagaacgaccttgacgctggaagacaaggagcaaagatgtttaagatggctgcagttattatatctaatgcagtgagacgatctatgttgcaagactaacattagttgatggggcagctcagccta

SEQ ID NO: 19811 - DNA, 460 bp, Oryza sativa
  unsure (1)..(460): unsure at all n locations
tcggctcattctactgccctcgacaaacgctactgagcttcatcattgttcgcttctgccgcaccgttgaactcatcagcgcgtcgactaagtggtgtggagaggagaggatatgagaggcgtcngttgggggaggaggagagggccccggccgtgaggaagacatgagggggagagggagaggagctcgagctagctcgtcccaaatctgcaccgccaagtcttgccatcccccactcccgagccgtcgatctcgccttcaacatgctccacgcgcatgccatccaggggaggagggccgccggtcgggggaggagatgatgagcattggtcataaggagatgggagccgggagtcaccgccggtagcgattatcgagattgatggagatgctganaggataatggagagaggggggatggagattcttgtatttttctcttgattctaaggtgttcgg

SEQ ID NO: 19812 - DNA, 458 bp, Oryza sativa
  unsure (1)..(458): unsure at all n locations
actcagcttaaagcagctcagtgtcaatttcagaatattgtttgcttgttngngataagtagcaagtacaggccttctattggctgataaacatagcgaacattttcagtctcaacataagtgtgctgcttcccagttccaaccagtttggggaaagctgcaagtaatccttcaatccttatgcgagacatgtcaacaaactgtcttgaaacaagtgctgcaattgaaaagcacagaaaagaaacagcatttagtctaatcacattaacttcctggaatgaagcatcaacaaattggtaaccaggaggtgctcactacatangattttagggttataggagttaagaatctactgaggtaacacgataacagctagtttagtatntgggttccacagaattgcatatgagctaacactcttattagcataggtgaatgattaaaacttatacanatac

SEQ ID NO: 19813 - DNA, 419 bp, Oryza sativa
agtcgagctgccgcatgccagctttataaacatgtaacattcagatgcacctattatgttttttattctatagccccattcctgaggcaagttaattctgctctgcagttgccaccggtcactgaaatacatgaacttataaaaatacaggacacatcgtttatctgaccggaaaacatctgcgaccacaacgatagtccatccatccattgattccagagtgatgatctgattactgaacatcattgcgcggcctgaaaggacaggagagatatcccaaccacaaactccattccgcgagtgtctaatacaagccacctatgggtgaggggtatcattcagtcaaagcacccatgagcatgggtgcgctgtccgagtccaacgcccatgactctcctcgactcaaagctagtgtcggg

SEQ ID NO: 19814 - DNA, 469 bp, Oryza sativa
  unsure (1)..(469): unsure at all n locations
tccgcacatctccatataacagcattaatcttctgatgatcatatcttggtcatacgaactctgaatcgacccgttcaagtctcctaatgtttgttataacctaaagaaccctgtgctttctttttatgtattgntattgcttctttataggcttgtagttttgcttgtgtgcttcgcgtagcttctgtcattccggaggttcccgaagcgtggttcgcggtcgtcgccgaaggttcggaaggccgttctctctgagcaaggcaagacacatcatccttgagcatattgaatcccagtttataaaattattttgatttaaattaatgcattaccgctttatttaaattcccgcgttatcacttgtttatttagccatgcctatntatcattgttaagacattattattgctattgttattattaccttgttcaccctangaaaataaacnccaactagtgggtactcta

SEQ ID NO: 19815 - DNA, 468 bp, Oryza sativa
  unsure (1)..(468): unsure at all n locations
agctcttcccaagtgagcaaatattgtcaatcaatgtattgtatgtcacttcatccgggtgcatccactactcttcatctcttcaaataatcgaagtgcaagatgaggatctcctactttggagtgcgttaatcagaatattgaaagtataaacatctggagagactcccttcactgtaacctagcatgaaaggtccaaggcttcctcaagtcgattccatgtgcataaggcagcaatgagagtgttgaatgtggtaacgtcaagcaagcaaccctgatccaccatctgattcaaaatttctttcgcctcttccagctgtccatttttacaaaggcaattcacaacgatattgtaggtgaaaacatcaggatgatggccctcctgaaccatcacatccatgactttgagagcatggccgacatgatncatttggcagagaccattaacacaagtgttatatgtcatct

SEQ ID NO: 19816 - DNA, 471 bp, Oryza sativa
  unsure (1)..(471): unsure at all n locations
tatttagcattccaataactgatggtaatgcacttaaaggttcttctctgaagggactttttaatctcttgagagattagctccggattttttccttttggaatgtttctttagtttgagggctctgaaaacacgaaaatagaaaaatcgtaggaacatgatgtcatgctataacaaatattataggaaataaatttattaatttataggattttgcaaaaaagtattgtttattagtagcaccatcggaaaatcaaaggaactttaaggctgcgttctttttagtttttagaaacggctaattagccgcactaaaacttttgaaacggctaattaactacacgtaaaacgataagtgtgattagtatatgattaattaagtactaatatgtaaaagaattgatgaatatatttattagatnttntaaacaactttatataaaanaattttacgtaaaatgcacccgttaa

SEQ ID NO: 19817 - DNA, 458 bp, Oryza sativa
  unsure (1)..(458): unsure at all n locations
agcttgctcacttaccgatcaaggtggctggagtttgatttgtgcacgcctaacatggcctatgtttatgtcacatactgatcttcggttcaagatttataaattatttaataaattattaatcgaatccatattaaatgctctttaatttacaagtgaagtaaaatgtgggaaataaaatttcttaaatctaaagcatggatggatttaattcttgttaaattctccatggttaagacaactctctgaaattgtctcggattttcagagctcaagtcttaaataatacagagaacagntcagtcaatatttgatcattaatgatctaattataacggttaagagcttttcttgtttaagaatccttaaactataaattgttcgttaaaacgaattattagaaatgattctaaagcttaaaagagaagatctaattgtaatatgctaaatctcaatat

SEQ ID NO: 19818 - DNA, 489 bp, Oryza sativa
  unsure (1)..(489): unsure at all n locations
taaaactcagcttcgtgcaggagcgagaagatcagttcagagtcgtcgttctgtgaatatctagtggaggtntctccgagatgacctaaacccaatctttcccagaagagtaagttcggtagctttctagatcgcgtgttgtttgcttgtgtgtacgggtatggtttgcatcattggtggggatgcgaccatactacgttgtttgcttaagcaacttgaatcaataacaatctactcacaacagaccattagtcaagcggtttaaggtcttatctttagcaacccctctctttcacctctcttccgccctggcagaagatggtcagtgttagagagaagagcaacgacggtgtattaaagtcacagatcgatggttcagttgaaagattgcaggtatcccaatgccagaataacccccgctcatgattaacttttggtgtcaagaccaaatgatgggtgtattgatgcaagagatgcatagctcgatgc

SEQ ID NO: 19819 - DNA, 311 bp, Oryza sativa
  unsure (1)..(311): unsure at all n locations
ccctaaatggggtattttcagtaggagtggctattcttaaaataaaatagattacttaatttcctaaattatcctctgcttgagttgagatagggttgaattagtgatgggattagataatatttatttggggcatgctatttgagtatttaacaggtaactccgcctggaagtctctccatgcacacaactagtgtgcagatccnctacaattggcccactttatggcattatgtacttagctcatacaacgagcttatagggaaagcaggttccagacgacaaacaactttatggattacttgcagcat

SEQ ID NO: 19820 - DNA, 62 bp, Oryza sativa
cgctcgggcagctggaggaggaagaagacatatatatatatgtgtgggactttcaggcccgg

SEQ ID NO: 19821 - DNA, 446 bp, Oryza sativa
  unsure (1)..(446): unsure at all n locations
agctngatgtgtgctctgtgtaaggttgtgattactgatttatttttgcttgcttgtgatgtgcatgcacgatgtgcatttccaggggatggatctcaaggatacgcctgccctgctcgattatcactgatgattaattttcaaaagaagattatcactgatgaaatcttgcggcggcttgtgtcctgctcagctctgcagttgttaccaggaaacacgagttgctgttgatctgttgtatcctccctcggcctccccaccaggcggacgcgcgacgggtgcagcatctcggcgacaaggttgcgccggaggatttgccacacgggcccgcatctgcagcgcgtgatggtgtagtccgtctcgccgaggagcgagcgcgccaccttcaggcggttggctagagcggcgccgcgctccacaagggtggcgtgcgcgacgcagcagtc

SEQ ID NO: 19822 - DNA, 476 bp, Oryza sativa
  unsure (1)..(476): unsure at all n locations
tataacagatatgacatanaggttacatatactatcttgtgttgtactgcttttgtcgaggcatttgccgcacatggttggaacactcctatgatggataatgttctgccatggntntacaaggtttcccagtgtaggttaataggttcctatgctggtggtagcaccaagtcatgtgactcagttgtcgacattatagaactggtactgcaacatttaaaatctgggtggaaggattgcataacagattntccctcttatagggcgtttagtgatcataggggtcaatgggcgcttcggcgcaacaactgtgaccaagaagacctggcttggagtcttagagtaccattngatgaaagtgtccttctctggcacctcgccacagatttctgcttcataagtaaaagatgtaccaatgaagtagccactcggagcatagaagattccaactatatgatgtaccttnntgtggataa

SEQ ID NO: 19823 - DNA, 415 bp, Oryza sativa
  unsure (1)..(415): unsure at all n locations
agcttattntatatgggtacatactctctagcattatttatcaaactatcttttgggtgaacaaagactattgatgaggctcttcaagacctggatgattgcctaacaattgtgattttgtttacaactactaggagatgattgtgtgtgaattgagaatccttcattgtcatctgttcagcgctataaactcccctataaaacttaccatgagacagaactatatcttgattccatatctcttttttgcttttgtggtatgttaattaccctataaaactctagccattttacccaattcagtttaattaacaaagctttcaagaattaatcatgagttgaactctcaactgttcgcaatgctagcacaggtgcagtaatgtcagatgacaatgaagatttgactcggtaatgg

SEQ ID NO: 19824 - DNA, 457 bp, Oryza sativa
  unsure (1)..(457): unsure at all n locations
cttctctgctttcagccaagtgatcacaacacttatgctgatatagaggctgcttacaaatgcctcattgagaactttggtgccaaggaagaagaaataattctttatggacaatctgttggaagtggacccacagtagatttggctagtcgattgcatcggcttcgagctgttgtcttgcacagtcctatactgtcaggattgagagttatgtatcctgtgaagcgtacatactggtttgacatatataaggtttgttatccttttttattccatgttgatttagcttgatctattatttcttgcatgctgcccttttctatattaacactcaactttccctcggtatccattgacttccagaaatatcgataaatccctcaagtcacctgccctgtgctcattatacatgntagtgcatnccatcatgcattaatttctttaagaatttgaatta

SEQ ID NO: 19825 - DNA, 159 bp, Oryza sativa
  unsure (1)..(159): unsure at all n locations
agcttgtgcctgtntggagagatacatcataaatatnatagtatgcctttcgcggnacataaaatggtcagccagggctgctgcgcggtaaggagcaatgtacttgtatgtaccaggggattcccccttatcacctactacaatagtgtataccaagac

SEQ ID NO: 19826 - DNA, 386 bp, Oryza sativa
gggagttatacatttgtgtattgataagaccgttcacaatttcttgaagctcgatctcccccccagatgaaccatatagcccagagaaaccatgaaccagaatagaagagcttgccccacccatgagtaaatatttcatagtagcctcattagaccgtagatctctcttggtatatccagacaataggtaggaacataaactgaaacattctggagctacaaagatagttattaaatcgttagcaccacataaaaacattccccctagagtagctgttaatacgaataacagaaactctgttatagccatttctgtacattcaatgtactctacggatagaggaatacataaagttgaacataataaaataagaaattgaaagatt

SEQ ID NO: 19827 - DNA, 468 bp, Oryza sativa
  unsure (1)..(468): unsure at all n locations
agcttagccctggcgatgaccaaatccctatacccgattatcgatattgataccgtcgatggctttgcggatgggacaagcgaagaggctgcccttgatcttattaacgacgctcaaaaagcagccgacaagattgcaagcgatgtattaaatcggtttaaggacaccaaccttctgccgactggcagcggcaactctgatgatgagaaaagtgatgctgattgaatgctaatatatctgatgatacatgatggaggcacaagttgtcaataccagtttatctatgctgngctcggtgtttcttgcttagacgctgatttcttaaaagctttggtcaagctttgctgagcctaaaacccgcanaagctattaaacactttgagtactcgtaaaccaagtataacaatcaagcagggcaatgattgaccgagtgagcaaattgaattgatagatatcacactccattat

SEQ ID NO: 19828 - DNA, 456 bp, Oryza sativa
  unsure (1)..(456): unsure at all n locations
taagcttctgtgtgttgcacgaaggacaagcgaactatgttgcaattacttatctatagtagtgaaaaaactaaactttgttaccactgcaatctgtagtatgtgcataagtgtacgaagaaccttgaaatgttactgtagcttataatttgcctacaggttggaggctgctgcatgtttgctcatgccacttcctttaagaactctagtggagagtgtagactgtaacttanataaacatgtaatcttgtggatatggaaagtttggtggttgttaaaatggtgaaccggagttcagttcctgcaaaaatctcccccatttatgtcagcacatttgtgctgaacgtaggcttcagactggttttacagaattcgggctccttgagtggtataattgacaaacgaatgctttggaaagagaatgagcacgtactcgatgaaactctgtcactctta

SEQ ID NO: 19829 - DNA, 450 bp, Oryza sativa
  unsure (1)..(450): unsure at all n locations
gtcacagctagattttcgttttatggtttataaacaatttaatattaaaagaatttatattaaatgttcataaatttacaagtgaagttaaatgtgggaaataaaatttcctaaatttaaagcatggatggatttaatttttattaaattctccatgattaattatactctctgaaattttcccggatttttcggagctcaattcctaaatgatacaaagaacagttcagtaattaatcattaatgatctaataataatggttaagttcttttcttgtttaaaaatccttaaatttataaatggtgtctaanaggaattattagaaatgattttaaaagcctagaaaagaagatctaattntaattnggtaaattccaatataaaatggngccatataaaatttcattaaatactntgcttaattctataattcctagattnttctggga

SEQ ID NO: 19830 - DNA, 418 bp, Oryza sativa
  unsure (1)..(418): unsure at all n locations
aacattntataaaacctaatataaaaatatattcaatgttatatattatttaatgaaattaatttggtgttgtagatttcgctaagtttttctataagcttagtcaaattaaaaaaaattaacttaaaaatataaaacggcttatgatataaaactaagagagtaatatattttgcagacccctcgttgagtatgatctgataatggattaccttacgtgtggcgattaacaagtcacttgacaatattatcttttgaatgaggaaagcacagggaatgttctttntacttgtcctttggctcattttgcttggaatgtaattgccatggtgttgaatntattnttggaatgtaactgtccctatctatctttctgggatggtatgagagctatcaaaacananatgaaatctcaagt

SEQ ID NO: 19831 - DNA, 433 bp, Oryza sativa
  unsure (1)..(433): unsure at all n locations
agctntccccagccccttttcatcaatggactcctgacgtctactaaggagtgtggntcgttcgacaaattcctacctctatatctatctctgaggtgcttgggttttgcaaaactccatatatatgccgaagagaaatgctatccccactccgaccaagacagaacttttaccaaaagtttattgtgatctttttgttccaataacaattaaggtgaagcagggtcaggaacaacgaatctctttatgataaacagatccattttgccaagctcgtattacgggtagttcctacaaagaatcggactaatgacgtatacaatgcttgaattatcgacgtagatgctacatagtgggttctcatccttcagagactacgagtgtaataggagcatccgttgacaaaacgatcaccctaagatgatcatctcat

SEQ ID NO: 19832 - DNA, 459 bp, Oryza sativa
  unsure (1)..(459): unsure at all n locations
agcttgacacttgngatgaatacaaaatactgatgagaaaaagatttgtattttcatactatagacgtgctctctttgaaaaatttgaacatctaaaacaaggtgacaaaactgttagggagtactttcatgattttaaaatttgtatcacttatatgtggttacaagaatctaatgagaacacaatgactagatttttcagagggcttaattccaatattcaggctgggcttgttaatgtgacatataatcatataggccaattgttcatgcttgcttgcaatgttgagcgcanaattntggaaaacccaatggagcaacaagctatgcttgtgcctnctatcactgatattttgcaggaagttcagaacagtccccanaatgagaagaacgatatgtttgagatgtcacttccatcactcgcgaatgangagaaggctgatgcacctacattatctg

SEQ ID NO: 19833 - DNA, 496 bp, Oryza sativa
  unsure (1)..(496): unsure at all n locations
gggacatctacaacagtggttccgtttattattattacttattttctaccagctntactgcatattacatcggttggttcactgaccaacttattgtcaccaggacgaaaccctatacctagcatgcaagtatgtcctctggatatctctaaagactaagtagaccacactccccactagttctgcatgtcatcattcccctctgacatctcatcttgactagtttctgcgcacatcanatagtaataataatatatgagtatgttatacatactcagcaagattagtacatatagcaatatatatatgttnttaaagacagaagaaaaatactactacccatagatattaacagccaataaataataaaggacattaaacatagtaaatgagttaagaatacactggagagggattaanataatcgtcataatctcgttccttcaatccatgttttccccaattagtgataccctcatctgagaaatcacgccgc

SEQ ID NO: 19834 - DNA, 428 bp, Oryza sativa
  unsure (1)..(428): unsure at all n locations
actcagcttgcttggccagctaggggaggaagaacacatatatatatactgttgagactttagtcctaagtggtaacaccaaccggcgctaaagatccccgggatctttagtcccggctggtaacaccaaccgggactaaagttaactttgcctgacaggccctgacagcatttgaaccgggactaaagatcanatatgcccgttaccctttttaaccgggactaaagatcatctttagccccggttnttattgcatccgggactattgtggaattcggccgaccgacaaaagatggtttctccaccagtgataggacggatgatggatgctagctgctcgtgcaagggggtaggcttcattgggccctagcctaccctctgattnttaaaaaaagaanatcttgaaaaaaaatctaagatgggcatg

SEQ ID NO: 19835 - DNA, 430 bp, Oryza sativa
  unsure (1)..(430): unsure at all n locations
agcttaaggagtntagtggggataactttatagtatgatattattcatctccaattatattcaaactagaaaactaaaaaataaaagttcaagatgccatgctatccacttatccaggaacactagatttcttcatctctatgcaaaaacgtaaaattgggtgcagaggtggtgctctgttcgctaactgttttaatcatttgagcagaaatgacacatgattntgttagtgcaacatttgacgatgtgcacccgaactctgtaatgcangcaacttcagttttactgagcggtttgctgtgaagtatgctggtgctgcagcaatgtacatggtgtctaagaagctaaagaagaagtacaatataactgatgcgcgtgcttcattatacgatgctgccaacacatggatggaagcccttgatggaaggga

SEQ ID NO: 19836 - DNA, 448 bp, Oryza sativa
  unsure (1)..(448): unsure at all n locations
atcgggtatttatttatcgcgtgccatgctcttgcatgagtattatttcgcatcatgtgggtaaagtgtagaaactctgcagagttaaaactaatcgattagccgtgctcgcggtcatgagcggcgtgtggatatgtattgagtatagacttgtgtttattcttctaaattctgaaatttaacttcaaaatgtgatgagatttgtgaatgatctccttgctaccatggatggcaatgaggtgtatatttatacatgattaatgactactttgatgcccaatatgtcaagtacttgcttgctgaaatttatntgaaagcacaactggattggaaatgttntatacaaataaaacttgctttatgctaaaaagaaccatatcatgccttctttgattatatgccttgcacgtagagtgttaggccagtcctagaaataatgtactgactc

SEQ ID NO: 19837 - DNA, 321 bp, Oryza sativa
agcttgaaagatctttgtgaactacgtgataacctgtgtgtctgctggatggaaccattctggattagctacaggtgtccaagtctgaaaccaacttatttccttgtacatgcttctgataccatatgctacattgtgaagaaatctactttatactatatatcacatatagactgtgcatttcaggagtttattctgtttcaaatatcataccatcactgatgagcttagctgagatgctgtactgactatattcagattcaggacagctcatcatgtgaggagatggatcattgggacagttcggcgctggtgatacca

SEQ ID NO: 19838 - DNA, 368 bp, Oryza sativa
taatatacatgtacttataaactaattctcaccgcttctcattatctcgagcttcaccaaatatcgatcaaacgccaacattcgaggaatatgatgaaagggtcaccatgtggctcaatcgctggctgacacataatatatcatgagtgctcatcacagcaaaaaacaaaatatgagtgctcatcacaaacagatatatcgagacagaactactcacactatagagggcttgattggagctatatatatatatatgtatatgtacatatctatatctatatatatttatgtgtatatgtgaatcttttatcatgatcgactagaatgtttaagcgaaacttttcagcacaatgtgtaattttaaaatt

SEQ ID NO: 19839 - DNA, 467 bp, Oryza sativa
  unsure (1)..(467): unsure at all n locations
gcttatgacatgctggtggatgagtttgtctacttatgtctataagggntaggagaggacgccaaaccctaaatctaattgcccgatcaagtgcgcactgtaaggagtacgtgaggttctctgctgtttcttttcatcaacaggaaatcagaacgagaaaagcaaatgaacaaaagacaaaactagaagaatcattgatggcttcaaacataggtcggtagattgattttataattaggagaggtgattgtttataggctaaagcttaagatcttgtaatctagaactctaacatgatgagggtaatacagcatgaacctggacgcgatccggcatgctgntccggngtgtatgaacctggacacgaatggtgacgaacggtcggtgaaatctgggaactgcacatcagaaggcttgtgttgctgtcaaccgaattaatcacgacgattgccatgaacaacatccac

SEQ ID NO: 19840 - DNA, 469 bp, Oryza sativa
  unsure (1)..(469): unsure at all n locations
ttatttgacctatatcacacttctgtacacatctgtgcacttcccactcttatatgtaagntggcacttttagtactggatacatcacaataacaagagctgcattagaaaatccatttcaagatgttgtatttttttaatcctgcaccctggatgggaataattgatacatatagaaatgtatcgttcataaaaacaaacaaacttttagatttacctttcaggcaaagtgatgccttgtttctcaagttccttgaacagtgatatgagccagttatctggctcggtatcctttgtgccatcagcaacatccctaaaacaagaaataaaacactagatgagaatttagccctctttccgtaagtttatttcattattgtgatgtgatatggtcagaactagaacgctatgattcaatgaatagaagctagcaacacattcctcagctaagagatacttctagtatttc

SEQ ID NO: 19841 - DNA, 458 bp, Oryza sativa
  unsure (1)..(458): unsure at all n locations
tatccagctagactatgcggtgtatcttatatcttgaatgggttttcatcgatttgattagatcttatgtttctttccacgcttaatgctacatcggtatgtttctttccacgcttaatgctacatcggntaagttcgatctgttaagtactgtcttgaaacgttttatctagttccttctttgattgctaatagagatagcatcggagttttagccgaccttacctgatttagtcgtcttggcttcttatctggntctggatagtctaaatatgcctcttatatcaagatctcatctatttaaagtatnattaagcttctattaatctgctaggttcatcctgcttgctagaatggtttcagttttacatatttcatctgtgctgatatcttggtataaggcagtattggagtattagccgatgcaagttaggtttgtcctatcggctatgctatga

SEQ ID NO: 19842 - DNA, 418 bp, Oryza sativa
  unsure (1)..(418): unsure at all n locations
ggcacgcgccgaacaccgggtccggtggcggccttcaactccacgcgcgagtagcggccaccaccggccgcatcctcctccgcttctcgaccgccgtcgggcgccgcctccctcagccgccttctgaccgccagccgtcggatctggcctacggngcacggatccggccaccacgggctctccccccaccgccggccgcttcctccttcgcctcccgaccgccagccggcgctgcctcccccgtctttcgaccgccggccgccggatctggcctatagggcgtggatccgaccaccacggcctctccccccaccgatggccgcttcctcctccgtctnccgacgcaccggccggcgccgctnncaccgcttncgaccgttggccgccggatatgacttacagggcacggatccgggca

SEQ ID NO: 19843 - DNA, 256 bp, Oryza sativa
agcttcctttaatagatccgactccatcaacaactcttctgctggtgacttgacagctgacattggccgactccaagactctgatgacgattctgactctaaggctgtgaatactccgggcttaccaaatgtgggcgctaacagttatatatgctcttttttggaagaggctatctgaataacacattgactgctcatatggtgctcttgagcgggtatgattttttttccttacaatcaatccttagtagccttt

SEQ ID NO: 19844 - DNA, 302 bp, Oryza sativa
  unsure (1)..(302): unsure at all n locations
tgcnttgatgcgcacactaggcctcttacatggctcaactttaatgtgggatccacacggaagtagcacgtctcattctgtatattcctaataagtatatgcttgatgcgcgacagcttatcaatagcgaagtttccgtgtggcttataaatcggagtagtgtttactgctttgctcgagggctggataaacctgaaagagtgtgccactcactgcactctaggcatatttcaacgcgatcgctgagggcttgattgggatctagtggtggaccttcagatcgtgcatgataccaacccttc

SEQ ID NO: 19845 - DNA, 200 bp, Oryza sativa
  unsure (1)..(200): unsure at all n locations
tanctcgctcgcaagtacagcaaatacacacttatggttgttaagttntatgcaggacgagcggacgttcttataagtgtcccatacagttgacactaaaatgtattcggtgcgcgcctttactaccaagtcatctgacataagacctcaaaatgcgtcctatttggctacccaaagaaatctagaagaaccttgaaaag

SEQ ID NO: 19846 - DNA, 324 bp, Oryza sativa
aacataccgtatatatggatccgaggagacatggccaagattgcgtatacacgcacttccttgcgatccatttcatatgccatcaacagtttggcccgtccataaaccaagactatcaaattacattctggatgaaccacaattatttggtagtccacaccaaactgatatctcttccctccaaacagcctcaaggagctaacggtgtgctgtaatatccaattatctgtatcataatcctacagaatccaaactgaccgtttgaagatgtcatctgatcaacactaaagcacataggcgatcctgatcttgatgaattatgcc

SEQ ID NO: 19847 - DNA, 473 bp, Oryza sativa
  unsure (1)..(473): unsure at all n locations
agcttcaccggacttaaccaaacttcaccacggagtttgtctttgaatctgaggagcatgagctcaacccgaatggcccacccagcgtggatacaactgcccagaaacgaagagggagaaggaccccagatccagccaccctgaagcagtgaagagcacaaccattgacgaatgaactgttctctagagggaacgacgcacaacgttgggaaagagcggactancagaaggtgaagcagaagcaccaactgggaacccgaggagggaggaggtcggagaagggcttcggccagctcggtggcagggacaacgacatcaccgactccggcgacgacgccatcatnccggacactagcaagaggcacaaagcaccaccaccatcccagaccacagccggcacagagggaaagagaccacaagcaataaaccttctcgtagagcaccaacagcacctccatgcgcagcagcaatga

SEQ ID NO: 19848 - DNA, 423 bp, Oryza sativa
  unsure (1)..(423): unsure at all n locations
tctcgacacccngttgngctggccgcctctccagttgggttggatgcccaacaatgcggtttggtgctatcgactgtcgctgggccggcttgtgagtcagctgggtctcggcctgaggtgcagtcacagcccagcccgctagcaatggaggaggcccaccatgacgcttctaccttccttcaagggtctgtttcagcccatgcagacccgttcctctcggtcgttctggcagcaaagccaagcatggcaatggcagcgccgggtgagtcagcgcttccgccgcctgactccgtgccagacgcgacactnggagtggaggctgtctctgctcctttggtgtgcccagaaacagcattggcggcgtnctcgaacgccgtatcacaagttntctctccggtctcggctttgccgactgcctccgcg

SEQ ID NO: 19849 - DNA, 460 bp, Oryza sativa
  unsure (1)..(460): unsure at all n locations
agcttagccactgcacatctataaataatgctgggtttagaatctcattctggcaattgataatggagaagcacaactgaagaaaatggaaacaatgcttgcgtatcatatttgatttttaatatgtgcttggctaaagagatgtgatggatcaggataaaatgaaccaatcttcaagggtttgagggatggaatggtgtaatctccgaagaagaatactcccttaacatcccgatgaactctctaccttaaagatccgtaaaatctaaatcgagagcgctctcgatttagtcataatgagcgaccttatcatccaatcagccgttgtccagatatgtcttgtagaatcatactttactatagtaataattgatcaagcagatagaacaaatatttctatcatctatgcttcanataaaactttctcttagatactcatctgattacaatccgatacacc

SEQ ID NO: 19850 - DNA, 469 bp, Oryza sativa
  unsure (1)..(469): unsure at all n locations
gcttttgtatttnttcaaatcaagacattatttttggaaattgatataccaatggttgtgtggaattattcagctcctaccacctatattcatggtagcatacaagctttttagtttttaccacgttagtcctcactaatagaggggtgaaaacacttactttgccaaaagttgggaaaattattttcttaccatataatggtgtgcctggntntgccactgaaacccttaagtccctgaaagcattatgcctataccatttgttttttctaaggcttaaaatgattgtagcagaaagcagctgataaattatgtattgtggaacactgctaactgctaagaacttctaccatattactatgttttcatagatgattctaccacgtatactttctgatctggatcagaagggtaaaatgatgtcaacgtatttatacatggtttatgtataactgctggcttatatact

SEQ ID NO: 19851 - DNA, 446 bp, Oryza sativa
  unsure (1)..(446): unsure at all n locations
agccattgaagatcaaaaatccatgttaaagacttctatcaaacactggactgagctgaccaaatctctgaagccgatctctagcaccgatgcaactgatgcccaaataatagatgaaatagatcaaattaggcaaagggcgatatcggccatccaaagatatgtatctggatgagctaagtcgtataaattcaactataaacttgcaaacttttgggcttgaatgaattccaagttaaacttttgcctttaaatttcgcttttgaaatccaattccaagttaaacttttgcctttaaatttcgctattgaaatccatgnttttctatatctttgcccgcctaattttgcaatgttgaagacattgataaaattataacttggactaagggcgatatgttaaataccggccatcatacatcggcaaaacataaccgattataataa

SEQ ID NO: 19852 - DNA, 400 bp, Oryza sativa
atactttgtaataaattaattcatgctaaaacctcatatataacaaatagttcttatacggaatcaacagtcgcgcaacgcgcgactatgcgcgactatggccttgtttagttcccaaaacaaaaacttttcacccatcacatcgaatgtttggacacatgcatggagtattaaatgtggataaaaaataaaaccaattatacagcttgcgtgtaaattgcgagataaatcttgtaagcctaattgcgccatgatttgacaatgtggtgctacagtaaatatttactaatgacggattaattaagcttaataaattcgtcttacagtttcctgacggaatctgtaattagattcgtattagactatgtctaatacttagatgtatgtctgtatatccgat

SEQ ID NO: 19853 - DNA, 490 bp, Oryza sativa
  unsure (1)..(490): unsure at all n locations
ttaagtcacctgcggcatgcaagcttgnttcagaaacttcaagaagaatatgactctgattatttatggttaccactaatcgattacttgtgcacatttggactgaaggaatctcattntacaaacatgtatgagagacacatggcctgctttcaaatcagtcaagcttctgcagaagaaaggttggagttcctgctaagtgttggtgttaaaagcaaggatatgaagaggatgcttgttagacaaccacaaattttggaatacactctcagcaacctgaagtctcatgttgcatttctggtgggcataggtgttcctagtgcacggataggtcaaattatttctgctgctccatcatttttctcttacagtgttgagcagtctctgaagccaaccataaggtatctgattgaggaagtgggcattgacgagagtgatgtgggcaaagtagtgcaactaagcccacagattctggtccagcgaatcgata

SEQ ID NO: 19854 - DNA, 477 bp, Oryza sativa
  unsure (1)..(477): unsure at all n locations
ttattgttgttatctccatgagatgattataaacactcaccatcttctaaacactcactatcttcaatgtcaagaatatatatcattatcagatagagctccattcagctggttcctctaggtccttttgcgataagtctgtcattaactcattatcatcttcaccatagatagtcagtcctattatagtttccagaatatntgtcattaccggagatctatttgtattccatctcgatcgtatattcgacctaactagctctctattgatactgtggatgcatattgtatactcccttcattttaaattaatctacatataagttttttaggttattcctacatgatctatatctttgtgttaatttattaagtctatccattattcgtgcattggagtaaatggatattgatgcatgtatccatgcacacaagtatttataatccacatgcaatatcttaatatgctatgatgca

SEQ ID NO: 19855 - DNA, 429 bp, Oryza sativa
  unsure (1)..(429): unsure at all n locations
ttaagtcacctgcggcatgcaagcttgaatgaacttcagagcaaactctggagagggaatgtatagtcttgaaatggggtggaattccctctctcggccggctggcttttatagggtacccacaacggtcaaaaatgacatgtgcgaaccactaacccgtacccttgccaaagtggaagggaaccgttgcctggtcggttcggccgaacccacggtgggcccaaccggccccactttcggccgtgggttccaacggtcaatgtggtcatggcacaaacaaatttcgttgaaaatttatttttgtttgctctgaanaattcgtttgaagaatttcctcanaattcanaaatcctaaatgcaactntgaaattcanacatgtgatgatgcaaaaattcanattggtgaaagcanatatgcggatacatacc

SEQ ID NO: 19856 - DNA, 475 bp, Oryza sativa
  unsure (1)..(475): unsure at all n locations
cctcacaattcctgtggtcggtgagactcttatataacctgatcacctactgcagactccaagtctcgccttcttgtgtcagcatagctcttttgcctactctgtgcagccaacatattttgtccaatttcctgtaccttcttcgatgattgctcaactatctcaggtccaagcaaagccctctcacctagagattcccaacacaacggtgaaacacacttccggccatacaatgcctcaaacggcgccatctttatgctaacctgataactgttattataagcgaactccactaaagcgagatgatcctnccaatntcccttccatgaaaggacacaagcacggagcatatcctccaaggtctgaatcgtacgctctgactgcccatctgtttgaggatggaaagctgtactaagtgaaatcttggtgcccattgccctttgtagctctgcacaacatagacacaatttgagtc

SEQ ID NO: 19857 - DNA, 440 bp, Oryza sativa
  unsure (1)..(440): unsure at all n locations
agcttctcaaagctggcttcatcagagaggttctccgtccatagtggctagccaatccagtcatggtgcgcaaggccaacgggaagtggaggatgtgtgttgacttcaccgacctcaacaaggcgagcccaaaggatcacttccatcttcctcgaatagatcaacatggcgaaagaggacgaggagaagacaacattcatcacgccgnttggtgtattctgttactttaagatgccgtttggactgataaccgtaggaaatactttccaatgcacggtccacggagcacttaacgatcagcttgggaacaatgtcgagacctacgtcgatgacattgttgtcaagaccaacacaagcgactcattgattgacgatctcgggaaacgttcgacaacttccgacgatatcgcctcatgcttaatccagagaaatgcacgttc

SEQ ID NO: 19858 - DNA, 439 bp, Oryza sativa
  unsure (1)..(439): unsure at all n locations
tcgctagaatttattttccgctgcagntttctttatggtgataactaagtgcatcttatgtaagtatttatcgctctagttattttgatgaatctgtatattaaattgtcagtttgcgtacctcggctaatttctggacgagggttttaatgcacaaattagttccgaaattacctgtgaatttctaggcgtgacagtatatctcctcgatatatcatgcattgcgattgctcatcagctctcgctacgcactcactgtcgttggctgctcgacacgtcggtgcanaagccggaactttcttgcttctgcgtgggcgcagatcatgtntggttgcgatctttcgcttggtggcgcgttcactgttcagcctttcttgtanagaaatacaaagcttttcagaagtggccggttatgttcttcaatctgattactgaactt

SEQ ID NO: 19859 - DNA, 456 bp, Oryza sativa
  unsure (1)..(456): unsure at all n locations
agcttgggagctcaccaggcaacgcctagccgtctatgttgcttaacctccaagagtaataaacacaaacgataatttacttgctatgaactaagtgctcaaaggatggagtgtatctctcaagctctcaaccttggaacctctcaatctctcaaatctcttcccaaatctcactcataaagatctaccactaaggtaggaggtttgggaggggctatttcgctttggataggtctattcttgcctaaactcagcagccaacacatgagagggtggaggggcttaaaaacccaagccctccaaaaactagcccgtactcacataacagggcccggaactttctgtccagaccaagaacttcctggcacccttctcgaccaaacagatagatcgagtcgaaacttcctggctcagaacccaaaacttccgagcttncctaacatcactttacaaaaa

SEQ ID NO: 19860 - DNA, 447 bp, Oryza sativa
tggagggctcccgacgaggctgatccccacgggctggttgatctctgttagttatgtcgtgtgggtaaagtgtacctcctctgtagaggttaacaatttgttcgaacagtcgtgcccactgtcatgggcggattgtaggtgattcctagcgtacatttggttgactactgcttgtgaaattgctgttgtggaaaggagttcaatgtttgaaaaatctgcacctgatgggatcagctaggcccgggtggccgtatgatagttgttggctctggtggccgtttgaatagctattggccgggtgccaaccttgtttcaattctaaagactgatacattgcacatactccgaccggacgagactctcttgttctatctcgtcgatcgatatacactccttagttgttttagaaagagttaaataaatcattgcttaacacagccttttttg

SEQ ID NO: 19861 - DNA, 371 bp, Oryza sativa
  unsure (1)..(371): unsure at all n locations
agcttgtagaccgcgaccaagctacaggcacgtcattttctctcaaaaagccagaactgatacacagcgcgatcgagactcgagagcgtttgttaaagtcgctttcaagcaaaaggccacgcttagcatgcagcaaacggtgagatacctgtcccccccagaggatagctttgcggatgctgaattgctgatatgtgtagcagagagaacctgtgattgtgtacgtctgacgtactctagatggtgtagtatgtcaagtaagcaacttgatcattggtgggtcccggaagaagaagaacacgaagagggagaggaaatanaacaggatcaccgtgaggattgaccattcgccgttcgcttgatgcgacctg

SEQ ID NO: 19862 - DNA, 470 bp, Oryza sativa
  unsure (1)..(470): unsure at all n locations
gctttgtaatgacctagtctncggtgatatgcctggagttggtgattcaatgaaagcttatgtttaanaaaagaatgtttaattagtagtactccatatagagttatagatgtagttgctttcagccccagctaattgggagttttcttcagattgctgatgtttgcatgtattggtgatgaaagcacaccaccgaatttcttaacaccgttttcatccctatcagtgtgaccattggccctgatctccatgttattatttgtataaaacttgcgctgctcttacctgatcatattatctangaagtttgatatgatgaagtcttatcaatcactaatatatcgttgtggcatcaggagcacgaagtataccattagttgggcaattattgttggacgttggtccctggatagtagtatatacaacgcagaattcgaccagtgacctaacaagatctgagatccatgata

SEQ ID NO: 19863 - DNA, 473 bp, Oryza sativa
  unsure (1)..(473): unsure at all n locations
tcaacattgcggtcgatctggattgaaaaacatctctgaatcatgcgttgataggtcgctcccgtatttttcaatccaaagggcatggtgatgtagtagtacgccccaaaaggcgtaataaatgaggtcttcaagcaatcggattcttttagtcggatctgatgatatcctgagtagcaatccaaaaaactgagtagctcgtagccggccgttgagtcaactacctggtcaatgcgaggtaacccacaaggatctttgggacaagatttgttgaggtcggtgtaatcgacacacatgcgccattgcctcgtctttttccgaaccaggactgggttagccagccagtcgggatgaaggacttctttaatgaagcccgctgctaacagcttggtcaattcctccttgatngcgtccttcctgtcctgtggaacacggcggagtcgttgcttgatgggttagcgtcttcctaacat

SEQ ID NO: 19864 - DNA, 426 bp, Oryza sativa
aatcttactcatggctttcaaactagtactccctccgcttgacgttataagacgttttaactttggtcaaaatcaaactgctttaagttggactcagtttatagaaaaaataataacattttcaacccaagacaaatttattatgaaaatgtaatcaattattgatttaacgaaactaatttggcatgtataaatatattcaattattagtctataaatattagaaactaatttgactatatttcacatgcgcagataacaaattaagtattcggataactacacaacttatctgttataatagaggggacagaaaatacctattttcgtagatagggcgtggacatgtctcgattcagttctttaccttcttcacacagtactgaacatactcagaaatgtgataatagcatcagaaatttgatc

SEQ ID NO: 19865 - DNA, 425 bp, Oryza sativa
  unsure (1)..(425): unsure at all n locations
aaatactcagctttgtactgcattgtggattgtaaaatctaacactaaatactgatagcctaaagaaaaggagttttttttttatatagatgaaaggagtagcaagagaagtacatagttgatttatggtttataagagaaccaatattttctggacatgcattntgatgcagcatacatctatacagatgtcaaagctacttctttttttttttcatcctcgtatatgtttgcaggtacttgccaattgaaaataacagaaggatcagggaaatatattaagaaatccgcaaaattctgcgaggattaattgtaaaaggagacaaagcaattagaaatggagaaaataccaatgatgatttattgggattattggtagaatcaaatatgaggcaatcaaatgaaagagaagaagtaggaatgag

SEQ ID NO: 19866 - DNA, 498 bp, Oryza sativa
  unsure (1)..(498): unsure at all n locations
ngaaacctgactgatggcgacaacataatatttttcactccatgttgcattggggaaaactactgaatttctaacaaactttgctgtaaagatcagagacaacgaactttatagcgaaaattgaggagaccactcaaaaatgagtaacaaaccagcaaattatctcaccaatcaaggcttgccaagctcctatctggccttggtcccctgctttcccatcacatttcacatacatgctactgtaggcttgtagcatcactcactgtcaccagccttcccaaccacagccacaatttacaagcaaaattttaatacaatcaatgtaccagaaaatgtagaaaccgtgaaatgccgatgcattttactcgctagaatgtaacaaaaaattaactggaatgctatntgtatttcgaatgaataccggctaaagaggaagtcatggagaaactggtgcacagagaggtgaaataatcatagcactatataacagcaatgaca

SEQ ID NO: 19867 - DNA, 479 bp, Oryza sativa
  unsure (1)..(479): unsure at all n locations
cttaagtgacgccgctgcagcttgtttggaaagctccttagattttgcgacatttcttatgatgctggcaatccataatggtgagtgtctgagcggtgaacggtgacacttatggtaaatccaagcgctagtggtgacacatctgccatgaaaatatgcctgtgtagatgatggcatcaagctatcttgaggtcaatagctctgatctcattatataatccatgagcagaaaggaggacgaatatgatgatatactccctccaggtctaatgctctatgaattaacaatggggggctacacgtgacatgtgctaatgatagattaattacggttaatgtttggcccgcggtttactaacggatttctgaattagttntttttattagtatccgaacaccccataagacatcctacatgatacccgatgtgacgcgctgaaacttacaccctagatctagataccctaactgatttattt

SEQ ID NO: 19868 - DNA, 346 bp, Oryza sativa
tgctctggttggctgatattgtaacagccatgctggtagtcatgctggtggactcaagagacacccagacaccaaacgcgccgtttgagatacctattaagtgcagactacaggaccaatggttacggcgatggtgatcttgccataccagtacctcaacaagttgattttgtccaatgggctgcaggttataaaacaaaggagcttccggtgccttccatgcctactatatctaggtattgtcctgggctcatagagccatatgtatagcccatcagctgatagaatagtatatgctcgtctcatcttttattgggaaataaagaatgggccatatgatttgatc

SEQ ID NO: 19869 - DNA, 469 bp, Oryza sativa
  unsure (1)..(469): unsure at all n locations
agcttcactccctctgtagcacttgaaataatcatcaattactttctgccaacagaattccactcttctaagcaaccaatgcatcttatgggccgattgatgaattccacaaatcccttcatgcacatctcccctagcaactttagattgattattgtctaaacacatcaatagcactccatctacatttcggcgatataataattgaacgcttgctgccgaatcttccggtcaaccccaagactggatctttcaaatattctattcaaaaggattctccaatctatntctgacttatgggcacaaatgtccgaattcacaattaatccggtctttaaatcaattgtaatgtgcccccagctctctacccgggatcagtcagaccggacgcacaatgccggtcagacctccctgtctatccggtcggaccggccatgcagagccggtcagaccgccngtcatcaccggt

SEQ ID NO: 19870 - DNA, 379 bp, Oryza sativa
  unsure (1)..(379): unsure at all n locations
tacatgacctangcgatctccacgatattcaccatttagaatgttatgatanaatagaggagatgcaagaacaagcgcgtcaacttgttgcttccagtcgtcttgatgaggtaattaaactatcgaacgaatccctttcatttgttctttgatcaagcctgctgaagtgctgatacattttcatccctcaaggaagtcccctcgttttccatatcattcaaataatctctaanagaaagtaataatgtagacaaaacataatgatatatcactccacagaaattagtttaaatcggcgtatacaactttcttaaaaagcaaatatgactgtgaatagcgcacatattcacaatcgtatttggttatgctgtntcaactt

SEQ ID NO: 19871 - DNA, 455 bp, Oryza sativa
  unsure (1)..(455): unsure at all n locations
agcttggctgagtcaacatggttagttgggccggcctcagttctgacctccaatgcaatggtagttggactagtgttggcgctcaacactgccacatctctagtggaatccttgttctcggataaatccaccttggtgtcgcgaaatgcctccaaaatccgatcgatcctagtgcacaggtcttgaatggccttgcctgcattctccaccaccttgtccatgctagcctcagcctccatggcctcggtgagtgaagccgacgttgttgtgactgctgatttggttgaggccgcacatgggctcatggtggccgggaacacgtgttccagagtagtaggagtgctctgggtatcagactntgtggtggcacatactggtacttgcatcgaacacttggtgggcgcaatgtcggctctgtcttcgagcaaggtcggcacatgttgcacatccaacac

SEQ ID NO: 19872 - DNA, 402 bp, Oryza sativa
  unsure (1)..(402): unsure at all n locations
gataaattatctgcagctatattagaagagttgaagnttaatctgctaaggttatgtacctctcctgctagatttggctctgctaaggtttatgtacgcctgttagattggctctgctaaggttgctgtaccactcctgactcctgttagattggcttgtagaatttaaaatcactctttcagtgtttagaattcaagagatcgcacatatgctctgattagatagcaaagtcactatggctgttagtttagctcgtatttagtcgatttgagatgcaactggagcatattttctgtggatctttcctatcatangcttgatatgatggcgatgaagtatcttgaattcatagtagtatatcatcgnttttcttctgttcttagttaaaaatttcgtaatca

SEQ ID NO: 19873 - DNA, 426 bp, Oryza sativa
  unsure (1)..(426): unsure at all n locations
ctgacatctttaattggttggatggaataaaattcccgagggagatgatgtccacagatacgagacacactaaacaaaaggagatcgtactcatataaaatctatgcgagctgccctacatggtttttttttttgcgttacagcagaagagatctttttctctataattcaggactagtaggcataagagatctactaaaagcagcacagttgtccttgcagcatttgctagctcatggcagggaggcaaaatgcaggagctttgattagttgacctaactggcccctgttagctgccacatataattatatntaatttctcaggattttgattgacaacaacatatgggctagctctatggagaagccaccatcaatcacggtggtgtccacacattcatatgacaagtgctcgctcatatcatt

SEQ ID NO: 19874 - DNA, 456 bp, Oryza sativa
  unsure (1)..(456): unsure at all n locations
agcttcacagntaagaaaacataatgtatgtaaatattaatattattacgcgaggatctctgcgtgcacaataagtttaggccattaagaatagaatgactgatctacatgatatataatagatttcaaggttctatcacaaagcagaattccatcaagtttatagtgacaaaacactaacttttgaaacattaacaaagttcaggagatcaaaactcaaccaaaaatagcaaaattagaagagacctttagatgttctatctaaaagaatagcatgcaaagtatatttatctagcaagatattgattaagagattatttactggtaaaaacaaataattagtttacattatgttaaataattagaagaagtcaatttctagtgtatggtgcttcttgctcgattctcaagtaatttatctctctgaccacaacggctgcatgatagtgtctgtct

SEQ ID NO: 19875 - DNA, 428 bp, Oryza sativa
  unsure (1)..(428): unsure at all n locations
actaagcttgcaggctactggagcagtgcagcaagctgcaagacaggatctacggcacgctctccatatacttctgagtcatgagccttctttttttgttgaaggccacatatacttcctgaaggtttgaaggggcaactagaactagctgtagctgttacgctcctgccttctttgttgtaagctgctgtaacattagtatcatgctgtgaaaaaccatttttacggccatatgagtgggcccagagtagagtanggtctacatgtaagagattccaaccgtactaaagagaattttttttttaatttggcgtgatccaattatcagcttttccatagtccaagatatctttggtcggtgtaaccatcgctattacacctgtcgggcttacgggagtggattaagttaagaattaagaagaggatga

SEQ ID NO: 19876 - DNA, 469 bp, Oryza sativa
  unsure (1)..(469): unsure at all n locations
agcttcttttgttgctcaatccaacgggaactacattgctatcttttcagcaaagtcaccattcaagctaaacaagtatatgcggtatgaaggacatggagtgtggggtttcccgataaagtgcaatttttcatttaacgggaaggaacttacatctggttcatccgatggttgtatctanttttacgattataaatcgtcgagacttttgagtaaaatacaggcatttaaagaaccatgtactgacgttgcataccacccagtaattcccaatgtgaatgcttcatgtagctgggctggtgaaatagcctgttttgaatgacacaatacaggttgtttatttcgctcttcttgccatagattgagaactatcntctaaaatctgctcaccgatgtctgtttcccctggccatttgatccgagatatctcattcttctatgtttcagaattcaaacccggcgatcacag

SEQ ID NO: 19877 - DNA, 484 bp, Oryza sativa
  unsure (1)..(484): unsure at all n locations
ntcaaggaaagatatccttcatataaaatgatactgttttttggtttgaaatcatccagcagtctgttatgattatgttagtttgctgctgctagcaactcattnttatgaacaaaaatcttcatatttatgctcaatgctataattatgtctcgatatatccacttttctgatctttattctttagttgaatttggaattttcctttgatacctgtttttggttctctccagctgagataacattgtttgatggctatattgtcgtttataagtttgtacaagaccttcatttttttgtcaccgctggtgatgatgagaatgagctcattatagcaaatgtactacagggcttctctgattctcgtggtcttttactcacgtattgtacttcttccagtattccacatgaacttgtattctgtaatgttggaacgctgttctctaagcagctactgtgcttaggggatgtgagagagactgcc

SEQ ID NO: 19878 - DNA, 499 bp, Oryza sativa
  unsure (1)..(499): unsure at all n locations
tgtagctgatgttntatgaaacactctgntccanaacctgtttgtttatgaaacgaataacaaaacctcgcatcacagaagcccagaaatctagggttttgtgaaatttgcttatcgtggtcgctgcctccttctttgttggctttgaagtgaactttcagctccaaagttcaatctcaccggtcaccatccacctcaactcctgaccctgactacctcgggtcctacagcactcaaagacgcagggactttgatggaaaaatttacatgtcctggggttttctgcaaaactacgaacagctaatagtgtgtgttccaactcacaggtgaaagggtcaccagtgcgcgccacatcagatcgtatatgaatggttttggctcggatttgcatggactaacttatatcgaatcatacaanttgtaaattntggtggatctatttatacagctatgggcgaccatgatcatgttccatagatgtaattactcttgaatgcaa

SEQ ID NO: 19879 - DNA, 459 bp, Oryza sativa
  unsure (1)..(459): unsure at all n locations
agctcttctaagtcaaaagtttacttaattactaattcttatgtttaagataccttatcgatatatcttggtacacttttgatctattntattatctatacttggattggatatattagtataggtagatttacgatgtttagattttctttttttttagtcggaacacccatattctaaatcctagatacaatcagataaaacatccgtttctgagcatagatattataagtttataacatgatccatattagtcacacacactcacaccaacatccgcatatcttttcaaatcaagtcattgaataaatcatttgcaaaaccaaatatttatcacaaatattaatcatgacaatgttttcatattaagtaccatcttcggctgaaaatatatgccctcaaaaatgtttcagaanatggtcaccatttgaggggaaatactgacctcaacactccaat

SEQ ID NO: 19880 - DNA, 437 bp, Oryza sativa
  unsure (1)..(437): unsure at all n locations
tgtactcnctncagtcacaattgatcatcacattaccanaacgaanatagtcatatttgattgtcacccaacatctacagtcatcaaatttcctttnttttttattgtgtgcatgcgtgcaagaatttaattgcgagattcgttaaatcctgctccatatttatcgcttgcatgcatacatgatttaatgagtgattntcgccagattatttaaatccttccgcaactttggttggtcttgtgccatgcgccatgcgcagcatgcacaggcaactgaacaggcactgcgacactatggctntggcctttgattgatgctgctgctacgggttcacgtcctctactataatggcaccaccattacagaagggacctgcatatcactgactgtaatggtagtgacattatggtagacgatcctcgcctgctgctacatg

SEQ ID NO: 19881 - DNA, 456 bp, Oryza sativa
  unsure (1)..(456): unsure at all n locations
ctccatgatacagatgtatctcatatttgcttatttttgaagacagctcttgcttgtcttcttagttcttattactgaagtacattgaagaaagaaaattctaattttactgctgtaaagcacatttaattctgtatttacctacttagcacagtgaaaatgtatatgtgaggtgctttcgaagctttatattgaatatttgatgagcttgtgttaagggaacacactcacggacatgtgcatgtaccttntccatgtaatagcaggactaataaaatagcagctatttgatgattgatttgataggcctttactttattccttccacgtaagcaaggcgcagaattgtcggaaaggtttgaacccatcaaggagtanagacgccaaagggtgtgttggttacttaccatgtaatccatcattctacctctaataatctaaagaacctgtgtgact

SEQ ID NO: 19882 - DNA, 463 bp, Oryza sativa
  unsure (1)..(463): unsure at all n locations
agcttcgcgtgctgcgctacgacgccaacgcggccgtgggctgcgacgacgacgacgagctgcagcagtgcaggctgaggtgcgttgccgttgtcgatctcccctgccacgctctatgtagaggcggcgtccacactgcctactattcaggtatcaactcttgatttgtgtttctttagattatcaactcttgatttgttgattgtacagtaatttgtccctgctatcttttcttttagataatgggtagaaattggaattttttttaaagaagctactaccacttattatagagttgttggttcaattaagtgcaataattaaaccatgacattctaatgaagttcaaagttcgccaaaattntacatgcatgttgactccagttccagcatttttgtttcacaattcacaaacctctgtgcccaaaacaaagctaatatatattaacttanaaagtatatg

SEQ ID NO: 19883 - DNA, 418 bp, Oryza sativa
  unsure (1)..(418): unsure at all n locations
gctcaaatatgtctctatgaaacgtaattgcacctgagtcaatgaaatgagaatgaatttttcacccgaggcttgaaaactcactggcttgcttaatcctcgttgaagcaagcccaacttcaccgctcaataccacgaaaccaccgtaagccccctccgtaaggggtgggcaacgtgggtgccgggccacgaagtggactacccaagcctcgatcactatggtaggtcttccttccttccagaggtggtgaactccaaaccactcacaaaccggcactaggccttctctataatctccttggagaggtcaccgggcaacacctncacaagccttctatgaagcagcaatctccaagagtaacaagcaatgacccagctcggagatgatcaagtgtcacgccagctctacaatgaagca

SEQ ID NO: 19884 - DNA, 489 bp, Oryza sativa
  unsure (1)..(489): unsure at all n locations
cagcttgcaagactgacccacaatcacaaggacaatgtggctgattggctgtcatgtatggtctgcttttaatattatcatgcttaattccagggaaatgataatcacattttttttaaaaaaaaaagaanagatcaccacatttctagtagcatgttgtttgcctttcattttcatcgtccgttgcctctgcagatgatgcacacaccataggtcactctcatctagaagacatgcattctcttgttccattctcaaccaagcatttggttatctatgctatagagtggtcgcttatgaaagtaatgttctagctatactcaagtaattcttttttcaacatgtgcacacaanaatcatataaatgacaagattcaagtaggtgataaagcatgtctctaccttacaaggaaggcccgtttttttttcatattatcatgctagccatgtttgcttttgtactgatagattttcttatattgaacaaaa

SEQ ID NO: 19885 - DNA, 271 bp, Oryza sativa
agcttgccgacgtccacaatccaatgccctccatcactatcgttgtctgcggacacactgatatactgatgtactgacatgagagagcatcctcttcagagtgaccacctcatggaaacaaactagcccttagtgcacgctgagtctttcagatggaacaagctgctacttcagcctgtacacctacacgacagatggacgaacccaacgcttcagcgctcgaatgccatattacaactggtggttaaccttttcatgataaatgtatgca

SEQ ID NO: 19886 - DNA, 196 bp, Oryza sativa
tataacccacgactgcctgacttttttcgaccggggaaggcctaaatagctggccggaacctggtactgcacatacgtacatgacgcgaaaatataagagaccctgcagctggcgcagctggcagctacggagatcaagcctgcaaaccaggtaggaaaaaggctagctaaaacctgacctatcatgtgtaggcac

SEQ ID NO: 19887 - DNA, 188 bp, Oryza sativa
  unsure (1)..(188): unsure at all n locations
taggcacaaacaatcctgggtatcttcggagtatcaactctcgctctatgaccgctctaactaacatgtcgtgcacacatagaagtgaacatagtcgtcactgctacntatttacttatataatgtaaaacatctgccttgcgattttgataatctccgaacacctaggttgtctttgtttctacaat

SEQ ID NO: 19888 - DNA, 470 bp, Oryza sativa
  unsure (1)..(470): unsure at all n locations
tcatcaatccaattctgaaagttgaccagaacaagcacaagattgattataatatgtgtatgccagcataaaggctgtctgtttcagcgggagaaacagagaatggttatgatgtccatcgatgagtgcaatggctatgtttactttctgctgaacatagagatgtgcaacattagcaattcctgggtcatacttttttcccacaatagaccaaattgttaatatagcatgacagattaatttgtattgagttctaatcagtgaagtgtatgcttgaatagcttatatactactaacaacagaagtatgggctgaatgataattagctgtgagttctgactataataagaggtgaagtggatagcatcnagattattctggtcctttatacatgctagctctgattgaagattcaaggaactagtacctataatctgaggacaaggaatgcaagtatatactgaatatat

SEQ ID NO: 19889 - DNA, 462 bp, Oryza sativa
agcttctgaccatgttaacatagaagctgtctctgaacattgttcctcttctcaaatatcagaaacatggttgcaagagtccattctaaaatgcatgacggccacaaagtttgtttgctccaaggccacaaacagcgtctcaaaatgtagtataaatttgtatgatcttccctctaaattctaaacacggttattgacaactgacaagtatggataaaaaattcgatgcctaacaatatgcacgagcctcaagtgatatctttagtaaggatgagtttattgtaataaacatgaatatatgatgtatgcttacacattatttctagaatgacattgtaagttctatataatacatgattcatgagtttgaaatggatatgcagttatttatatgtctgctttgtctcatgtgacatccattacatgcataggcatatttgttgattcttcttatgctattac

SEQ ID NO: 19890 - DNA, 416 bp, Oryza sativa
  unsure (1)..(416): unsure at all n locations
gaagtaatgatgggttggttgtcttttacatgattcagccaacaagtcacaagtgagagcacttacatgctttcttgggaagggctgattcacttcaaaaagttgcaaaagggttggctgttggtggaggcagcaataaatgcatttgggggtggctgatgtggtgatgacgatgctgctggttgtggtggacgaaatttggtggcgttggaggtggatttcgtggtgaatatggtggtgatggtggcagcgggatgaacataaatgaagtgatggtggaagtgtttgcggtgacgaaatcgtgagcagaactcgaaactctataggactaaactactagaaccagcaactcagccaatcgatgcaatcgagaactcagcangccaagactaagtagaacagcaaacgctcaacat

SEQ ID NO: 19891 - DNA, 398 bp, Oryza sativa
gcttgatgcccctctaataatagctcaagatttttggaggcgttgatagctgcgatcagagctcatgtcatcattcaatgacctgtgacaatttccaaagcattatgttgggcaccagatgaacccaggcagatgttctttggatcggcttttgtacacaagggtctatctgcacgaaatttaacaaaaaaaaaaactggccgtgcatcttactatattcgctatgcaatggagtttatggtgaaagttcaactgctttttgttctatgtaatatactcgaattataggctgaaaccaacttcttaatataatgagcaaagctccaacctttactctagaagaagagaaagagtcaccttcttctaacttacccactgtgttgtttttccattcacat

SEQ ID NO: 19892 - DNA, 484 bp, Oryza sativa
  unsure (1)..(484): unsure at all n locations
acctataaaactcagcttgccacttngatctgaataatatatttttgtgttcatggtatttctgaacagctccattcttggcacatccagtgcagagtttgttgtgcacgaatagaggtggtaaacaccgattccatcactgtccgtgatattcttcacagattccatcactgtccatgatatattcttcatgtccagctacagggtgtgaacttgtgattgcttcagggaaacataaaatggctgcaggcacaaccaaaactgtaagcatatgtgaattgatattgcctggaacttgngtgattctcttcttcttaacttgaaattgaaattgctatcgagagagatgttttgtgcatcccttgactagntaactnttctgctagactagtttacgggacacaataatcttcatttttatggaaacagttgtagtccacatgaactctattggttcccttcaacttatgttattggtaacaca

SEQ ID NO: 19893 - DNA, 460 bp, Oryza sativa
  unsure (1)..(460): unsure at all n locations
agcttatagcatgcagtctctgtcctctaatcctttctctgtttttntacacgcatattcattgttatcttggcntaaatattctttttctaaaatacatatcaatgtatgatctaattgcaccattgatttttttaataaatcttcataacatgatcttacatgattatattttgaccgaaggatatatgtctaaaaaagcaatcgctgctcctaagatataaaattattgattcaacccacttcataatatgtttcagacaagtgacacatctaccaatatatcaggttatcactacatgacacatgaagtcccaacgagtaaaacatttaaaagtcatacgaaacatataatatatctgcgatatacttggtttcattgaaatatttgtgtatcacgcgtgatatatcgaatctgtaattgttgaataataanaatagaaacacttgctgaaacatt

SEQ ID NO: 19894 - DNA, 392 bp, Oryza sativa
  unsure (1)..(392): unsure at all n locations
atcaggaacttaaaactcagctaatggtntgctctgctataatgtctgtatgttaacgttgatcctgaatagaacaagagagtatatttctctgttgccacatgcttcaattgattaactcgtatggaggacagatgcctgatggtccgtgccttcaaattttctgaaataataataattgatagttttgactagatccaccctgctgcaaacagaaaagcaacatattttggctggcaatatttaacttttttacttagcaacaatttctcgaccaccaaatgaacctattgatatgatcggttacttgaaattaagtatacaatttgaggcaccaagaactgaaatataagctcttttccatgttctgtgtgcattgagctaaaccgaca

SEQ ID NO: 19895 - DNA, 452 bp, Oryza sativa
  unsure (1)..(452): unsure at all n locations
agcttaaggtggcaagaatagcgttgtcgctgttccgtcttgaatnttccaaaagctggtagctcctgttgattgatctgagggcggcctcccactcctgccactgccttcttatggacatggatttccccacagaaacaagtgctagcggaagtcctttgcacctattacaaacctcctttgctaaacgttgtatcctcatgtccaagttgatagttgcttctgtgacattgtgtaggaatagcttccatgcatcatcttgaggtaggcattccacttttattgttgttcttgcctccatttcagcacacacttgctccgaacgggttgctaggactactttatggatcttgtcacgacctggtggtggaactccaatatcttcaaggctaattttcccccacaggtcatccaggagaagcaagaagttctttgttcagagatagtcgaag

SEQ ID NO: 19896 - DNA, 442 bp, Oryza sativa
  unsure (1)..(442): unsure at all n locations
cgcaaagtgtgtttcctggttttgtggataggacaccttgtatttgtcgcttcggaagctattctcgtcggctcgtggctcttgtctgaacgacaaggtttggccgcattataatccttcccgagctcggatgtcgtcgatgttctgttctctgcttcngcgggaggatccttcgacatggagtcgtcctgtgttgtagccactgcgttctcgtttccggtcattgatggaccggctgagatcggcatcgtggtgtaaaccgggaagacgatttcgtcgacttgagtccacaccagcattgttgaagcangaaacccctggtggaggctggtgttgacgctgctgtcgacgaagctggatgacatattagtagaaccttgagcaccaagtctccctacctggcgtgccactgtcgaccggtgatacccgtaagccggatatg

SEQ ID NO: 19897 - DNA, 471 bp, Oryza sativa
  unsure (1)..(471): unsure at all n locations
agcttatataagagaagagaaaagctactagagccataccctatctcttncgaaggcttacagactgctgattcctattctaattctattgcaccagctaaatactactaaactaaacctgggagaaataagagagttattgcttgaggtgtgttgaagtgaagagagtgaactccttaaataggcgggttatgacggttatggcggttggaaaggactgtagtacccttcagccgccatagggagtgaatctccatcgtgtcctcaaaaccctgcattcatcggcttcacgggaggtttggccgaactaccatgntcggccgaacctggggctggccgaaccagcctacattttggctggtggcctactctgctgctttgcttcgtagacttgtgaattttggcctaattcatcgtgtcaagactgtggtattgtgacattcatacacaagtctggctctcgacatcgcc

SEQ ID NO: 19898 - DNA, 439 bp, Oryza sativa
  unsure (1)..(439): unsure at all n locations
tgatttaggtgtgtggctgtccagccatctgcgctcctccgttggcatgttgctggatatgcagccatctccagtttggtcattctctgctgaaaaaaattaatccctcctatcacatctaacattngcttcatttcctttcagatatgctnttagacctgtcgaaacaagatttcggcaataataaagggggtggctgtcaagctaggaaagtggatgggtttggagacaaggaattttatacaggttcatgccttcttattaaagaagtaataccctactcctgtccggngatgattccgccgagtgtgttattgattgtatgattgaagaanaaagaatcgtgccccaagaggcacacggacccttcttatatatgggaagggatccgtaatacaaggtacagtccatatcctaacggaatatgggaaatacagat

SEQ ID NO: 19899 - DNA, 338 bp, Oryza sativa
tactattgcgggacgcctatgcctaccataatagttagtatatcctccccccattactcctaatgattatgacgacacaaaaggagtgacttggccttgtcgagccgaaaccacaaaagggaaaactgttattattggggatccttggccccagacaattatgatcaataatgcaaaggcctgacaatcgccatatttacgagagatgagtcatctatcttccaaaagactaataagccgaagctcagttttgagatgcttattgctaattacaagaaaagacttggttggtaacgacttgattattaaactagtgagtgcaaaagatcaagattatc

SEQ ID NO: 19900 - DNA, 415 bp, Oryza sativa
  unsure (1)..(415): unsure at all n locations
tgtcatagcacctgggtgaatagaaatatgacactacattctctggctcgagtctttcatgtcttatacaggagatggcatggtactaggaatcccagtgagctgtcacctcctgcaatcacatctctttacattaagttcaacaatgtattgagatcctttgtcgctaacctgaaatgctcccatcccagtaggcgaaacatagcatgtattagccatctctgtatttntctcgaccttccgttctaattctgggcagaggccacatggccaattcctttctagctctttctgcttggcgtacaacctgttcatgatctgatttctaatcctctcaagcatagacaaaatatgcatctccctggcatcagaatgaccttgtaaccacttctgagtactgctataacgatgtata

SEQ ID NO: 19901 - DNA, 456 bp, Oryza sativa
atccttagagtcgcctgctgcatgcaagcttggaggtctcccgacgtggctgatcctcttatgctttgtgatccgggttaagaatgtcatgtggataaagtgtaccccctctgcagaggttaacaaactgttcgaacaaccgtgcccacggttatgggcggatgtgaggagattcctagcgtaaattggtttgactactgcttgcgaaattgctgcgtgaaaagggggttcggtgtttgaaaaatctgcatctgatgggatcagctatgcccggatggcccgcttgaaaagttgttggaccgggtggtcgtttgaaaagttgatggaccgggtggccgttgaaaaagctagtggtcgggtgccaaccttgtttaaattctatagactgatacattgcacatactccgaccggacgagacacactgtctcatccgtgtcgtttgagaagcactcact

SEQ ID NO: 19902 - DNA, 351 bp, Oryza sativa
  unsure (1)..(351): unsure at all n locations
tataccgngaacctgagcatgaactcgtttgccgcatacagctatacatacactacacaactgctgcagatgagaacaacacgaaagtactgattcagtgttctgcaaattcacgtcttatcatcttangatgttatgtattcatgtgagattaatttatttgatacctgctaattgcagcactgtaacctattgctcatttctcccccacactccttttgctagctgtcgatttactgaacaccttanatgacacggatgattttcatggatggcattttttaccaattgattggttcctgtataacatggaaacaacagtatatcaatcattgatcaacttacttatat

SEQ ID NO: 19903 - DNA, 456 bp, Oryza sativa
agcttaacagtgaaagtcaaaaccatgaggctcggatagtattggtacaatatgaaatcgaggatctaaaaaagacaatatgcatgaatgactaaatagtactcagctgtaatgattgactgccttatgcatatatgagttgcacactaacaaaaaaaaaagaagcaaaagccaataccaggggatataattgatctacactgaatgataaatattttatttataaagtacgaacccaatggaataaaaaagatgactgtgaaagagtaaaggagatcctttccacaactcatgcatgttatgaagcacgtgagcaaaccaggagttggcaaacaaacctctgagaagtgaggtgataatcattcaatttcttgtccacccatttctgaacgggagataggaaagaatggaaaaatgtgaagtcttgaaagctatcctcagcatcaacagaactac

SEQ ID NO: 19904 - DNA, 451 bp, Oryza sativa
  unsure (1)..(451): unsure at all n locations
ntgcgttctagatctctagttagggctccgaatttggatctaagttttgaatctgtactctgatcaatagtaagcccatgttcttatgcttgctatgttttaacatttctcatacgaatttagctatgtctgttgcgatgggtgctgcatttcaatacctgtgacatactatgtatcgcatcggcgttttctgcctaacactaaattgtggcctgttaacataacaaattgcccttttgtccctcaatgtgaaacggttgtgctttcgtgacatctttcatgaatatgcaaatcaagggaattaatagatacaatatttctgaatactagctntacttgatcattntgctaaactaatttacgaatacaatcggtggtgtcgcatagacccatcctttccttaaattccctgcaacataaccacttatcatgaatatatatttaaattatg

SEQ ID NO: 19905 - DNA, 331 bp, Oryza sativa
  unsure (1)..(331): unsure at all n locations
tgactgtcctgngaggcttacgcccaaacttgccgactagttcttcgtggcgaatccctatggtgaacgcggcgatgatgacgtcgtccgtgatgtcngagatcttgttacgttgttcagaaaatcgccggatgtaatctcgaagggattctccagacttctgaataacgttgtagagatcatattgtgtgccgggacgctcgaaggtgccttggaagttggcgatgaagtggtcgcgtagttcggcccaagatccaattgtaccacggngcaatccatggagccaagatcgggcggaatccgctaaagccaccggtaaatagttcgccat

SEQ ID NO: 19906 - DNA, 222 bp, Oryza sativa
atgctgatatatgccctgtttggcggagcttgtcccagctgcagcttattgcacaacatgctcctgctgatagcagccgtaacaggccacaggcttttgaaaaatgaactaacaatccataagctggagaagcttggtgtcagagcttatccagaatctcacaatcttgctaccaaacagctgcttgtcagaatctaaagctgccccaaacaggcccatact

SEQ ID NO: 19907 - DNA, 499 bp, Oryza sativa
  unsure (1)..(499): unsure at all n locations
ggtcatctaacccatcacangcatagcccaagtcccacatcacctttgacagatttaatatggagctaagccaacaaaaggaatggaacatttattatcaaacagcttaaaacgtaatgatttaaaagtaagggagcatactgctaaaagaaatattggctctcatattactattgtaccatgttgacttatatatgagtacccagttatttggttgacatatttgagttgatcaaagaagaaatagagtaacaatcctattatatactaaaaatttagtgatacaaaaaaatgatttaataacattacagtatcatattcaacattataaataattctagtgaaagattnttcttttgtgtttatagcacttatttatctctatgattgttcaatccctttntnnttttttgcagaaacatgttacatgaagttccaataatcaattatgaccctccccagaatggttgagcatgactaacagatgaaatgaatcaat

SEQ ID NO: 19908 - DNA, 324 bp, Oryza sativa
  unsure (1)..(324): unsure at all n locations
gcttttttatcgntntctgagtcggacttntattttcctctttttctacctttntagacgattnttttactgacgacagaagcttttttaaatcctttttagtcggactttttttttcttttttaccgactatggaaatttcttgttcttttttaagtagagatagagattaaaactaaaaacataaaattaaaaccgattcaaatacggatgacgtaacaaagtaccggtaaaaacatntttaattnttataataatagagatagagatataaacccctgtaactttgcatattacaactatatccatagcagtgatctctca

SEQ ID NO: 19909 - DNA, 481 bp, Oryza sativa
  unsure (1)..(481): unsure at all n locations
ttgctacatgtacnggaaaggatatactatagtattagagcaagtntaatagtatagcaaaatgctaccttcaaattatntatagtcaacttaatagctaatttatacaatagttacctataaacatatactacataattaatatttagtcccacctgtcatacactacacatgtattntaaagtccgtactgtagctggctacaaatctgtagcccgccgctattctctcacatcttctatcttctcaaaatgagtctatggctaacttatagcctgctattgtacctactctattgtacctgttcttagggcatgtgcaatggtagtctcttaacgttactaattaaaaatgtttgctacatgatagagagagagagaaacaaggagaggcaaacattatntttactatggttaacaactttntagcgacgactntgaacatctataaaatgaaaactttgcttgcataagatgtgaac

SEQ ID NO: 19910 - DNA, 405 bp, Oryza sativa
  unsure (1)..(405): unsure at all n locations
agtgaaaacatgttacatcgtaatgcactctgcagtcgaacgatgacgcaatatgctgcaaatatttctctcctgttcggatttatggggctattttgggcctttgcccaagctggggatgccaggttcattttatcggtaacctgtgcaatcatctgtggctatgtttatcaggtaaatttttctaccctttttcggaggaatcatcatgaactctagcacataaaaaatgtgccattttgcaagaagctatctctactaacagctaaagctngaagcatttagcangtcactatgtntcacctcgatttcttcaatatctcagacatttcttcttttggattttctctttgngnagggcccaccattccgactaagttacaggggactaggtgaaccattatg

SEQ ID NO: 19911 - DNA, 410 bp, Oryza sativa
  unsure (1)..(410): unsure at all n locations
tcagttgtgaaaaaaaataaaggaaccatggaggttgtgcctgcatatatagattgcccccctcaaacagaaggccatcagagcagcaaacaaaactgaggggatgaagccccctctaagaagcctgctctgatgcacttatgatcttgccgtagaaaatattgcatataccgatgccccccctactagtagtacaacaatctaaccatttgcagctctgatagatggctttagaactcctttcaacttcaagcatacaaaaaatgatcatacgcctgactccagctatcttaccttcccttgttgcttangccgcattcagcgtatcaagtgccactctgcagaagcagcttatatgatcatcacgaatggtgggcattctctcttggcccttcaagcgaccgatacat

SEQ ID NO: 19912 - DNA, 402 bp, Oryza sativa
  unsure (1)..(402): unsure at all n locations
agcttgatttaatggtcatgagctctacccatcagcagttgtgtctaaaccaagagttgaggtccaagggggtgacctgcgatctttcttcacattggtgcggagcactcaacttcatagttggtttacgatttttttccctggttaaccataactcctcatgtttcaggttatgacagacccagatgtgccaggaccaagtgatccttatctaagggagcaccttcattggtaaccaaccatgaacatttgtatctaaatactatatattntgttcttgtgggtggttaccgattagctagacatgttagttatgtttctagggaagataggacaattactttagctttcatatgcatacaaacaacacataatctgactagtcttaacatgaaatagtat

SEQ ID NO: 19913 - DNA, 470 bp, Oryza sativa
ctatagaccactcaagctgggtcatgccttgcaggatgtcatccaccaagacctcttgcttgaacttatctcttctaagaggcttgacctcccccattgctgaagctccaaataaccaacaggtgcaaagataaagctctcctcacactacacctgcaggtgaagcgcctttgcaggagagtgtgatcatcacaccatgctgctggccaccatattaagggcacagtgagtgagtgagcgagtgagtgagtgaagagctctggatctgctccggtgagggccaccaccaccgacaggaatcactgtcgaacttattaaggcctttcatggcagtacacttgattgaatcatgtctgcacagaccaacccccacactggtgcataggcagcacggaagatgaagtgatgaaccattgctgctgtctgctggtttgatcagccacacagtatagatctagcacgaggacatg

SEQ ID NO: 19914 - DNA, 415 bp, Oryza sativa
  unsure (1)..(415): unsure at all n locations
tgtgctagcacacctatgctcatatggcatcttctttatctgcaaccaaaaagggacagtaaacatccaaaccattattcagttgcaaaacttaaatgacagaagtaaaacaaaagagctacatacctgccaagttctaccatctggcaacctagaagcatggatcctccatttgcacttctttgccatgcaataagctctgtatcttgtggcctcagagtanggaactgcaagttcaacctctntcangacagcatattgtctcatacacctgttaaaacaaattccatcctcaaaagtaacaccaacttctatccttggattgtctacatcagttatatggattagaggctcacaacccctattatcattgacttctaaatcatctactagatcatcattctctacatcacca

SEQ ID NO: 19915 - DNA, 466 bp, Oryza sativa
  unsure (1)..(466): unsure at all n locations
gcaatttgtctccacaagtagtaatactatactattactattacttgttactacttgtctgttgtacgttaccacaatcgcatcatgatgttactacactgtgttttactatattttttgagtagtgttactgcataaacacgtggtagcgtgtaccttccgtgcagtaacacttttacttttatgcagtaacaagtatatggttatcatatgagacttttaacctatatatttttgtttaaattcatgatttactgtaattcaccacaatattactgtcaaaagtgcagtaacgtcatatacatgcagtaacactatattggagggaggagaccgattttcttgagaagagggaggaagaacggtttcttgaagaggggagtatatagatgcatttttgaagttaacccttcacatgcagtaacactatagcatcatggtgggaacgatnntaaaaatatacata

SEQ ID NO: 19916 - DNA, 462 bp, Oryza sativa
  unsure (1)..(462): unsure at all n locations
aagcttactagctnggtgataatacttagcaagtgttggtacaacatttgctcaatcggacagactgcatattatacaacatgtaccaagttaatgtgagtagtacaagccactacgtcctcgtgagtatagcaaattctgttggagagagttttttttcagccttcaaaaaacattcatcaaagtcagagtgttaccctaaactacaagagaggtgattcttcaccctatactgtaacaaccacacaaacttcgtgccgtgatggtgtttttgcggtggctctagcaatcttaagagtagcattgctatcttgtcctaacttgatattgcatcacatatcatatgttctggatcatacgtcctctttgcatctcgctctttcaacactgtactgtgtgaggaaatgagaggagaaaatgtggcatgtggagtcacagtcagtggccacgatagcattaaat

SEQ ID NO: 19917 - DNA, 282 bp, Oryza sativa
  unsure (1)..(282): unsure at all n locations
taggacctatgaaactcagcttaaagtttgagaagaggacgcagcctaatacttgtgaatatttaggattgctacacaaccgaagtgtctacaacgttattaacttcttcctccgatgtatcttgttcgtatattacttttggagctatgtatcacacattgattgtctccaaaactttgttgtggttgatgagagagaaaatttgtgtggggaagaagaatatatacaaactccgttagcttacttacaaaagatggtattctcatagtntataatatgat

SEQ ID NO: 19918 - DNA, 483 bp, Oryza sativa
  unsure (1)..(483): unsure at all n locations
atccttaagcacctgaggctgcagcttctgccccctttntctcttttggtgccttgggtgtggttcgcgaaatgaaaatttttggttatcacatcagacgtttaaccggatgtcggaaggagtttccggacgcgaatgaaaaaactaatttcataactcgtctggaaaccgcgagacgaattaattaagcctaattaatctgtcattagcacatgtgggttactgtagcacttatggctaatcatggactaattaggctcanaagattcgtctcgcgatttccatgcaaactggtggaatagttgatcttttcgtccatatntaatgctccatgcatgtgtccaaatattcgatgtgatatttttgggaaaaaaaatttgggaactaaacaagggcctttgttcgtattatgtngcattatgataaccttggttagtgcaacagcttttggctatttggcaaatgaactttgtctaatctatg

SEQ ID NO: 19919 - DNA, 371 bp, Oryza sativa
  unsure (1)..(371): unsure at all n locations
gcttcagatgtgcatcgactacaccgatcttaacaagtattgttctaagacccttaccccctgccacgcatagatcagattgtcgactccaccgcggggtgcgacctttcgagttatctagatgcatactctggttatcatcaaattcgcatggctagggaggatgaggaaaaaactgcattcattacccccataggaacttattggtatacgacaatgcctttcgggttaaagaatgcaggtcctacttttcaacgtactactcgaatttcttgngtagccagataggacgcaatgttgaggcctatgttgatgacttggttgtgaagacgcgcaaccaagagaccttactctcggatctagcggaaact

SEQ ID NO: 19920 - DNA, 286 bp, Oryza sativa
gtggccgtcgttccaccgcgatgaacgtacggatgcggcttattgctaggaatacagtccccgagacagataggagaggagttcgccgccggtcgaggcttctcctttctgacataaaccgtcatccgcgccggcgcggcgccaaaacacttttcctcctattctggtggctcgggggccataattgtagaattcgattacacaccatgcccgtgctctctgcaacttcgacgacatccgccgtcggcgaatgaagtatatgattaataccgcctcgtcggttatg

SEQ ID NO: 19921 - DNA, 466 bp, Oryza sativa
  unsure (1)..(466): unsure at all n locations
agcttacaccaatgatanctcagttgtacttgagtctgcttatttcgcttcaacatgttccttttataggcacttcacgagtagtttctctaaaactttcggcacaacacgtgaaaaaagctagcatcttctgcctgagcatgtgaaatagagctagagtacaaaaaaactttcggtggacaatcaactttcggtgcgggcctacggaatggaggtgcggagtagcaattcattattttcacgcccaactttaatattctgtcttaatttaaaattataaacattactcacacataaataactattcatatntatcatctaataataataataataataataataatactaattactaaatatttttaataaaatgaacatataagtngtgcagacaaacttanggttgtgttagttccccctatntctaactttctatacatgtaaactcaaactttttcagtca

SEQ ID NO: 19922 - DNA, 250 bp, Oryza sativa
gtattgagcacccggacatggattacacttggctagacatctaaatctttaacttgtgtgggatgggatattgcatgatgatatttatgctgatggaccacttctgagaggcggaaacgtggacgttctcagaaaaccataacgactcaatggcgggaagctattcttgggatcacaatggatggtggacagaaccgtcattggttaatatgaacactggtatttaaacttgatcagtctatgctagatc

SEQ ID NO: 19923 - DNA, 114 bp, Oryza sativa
ggaatcaaaaaaccctactatcgtttcgtattttgacgggccaagacatgcccactgcagcccatccatccaatctgcttaccttttctttttctttaggattaaggaacttga

SEQ ID NO: 19924 - DNA, 386 bp, Oryza sativa
tgatattcatgcattttacactccacaaactgctcatacagttagcagtacttcaacggtctgtatttatggatattattgtttctgtactaatatggttcagctcttcaaatttttcgtattacatctattttaccgatataaatataaacagagttttataaattttatgattttttccgccattggatttgacgacttatttgatgttccattttgaaaagcataaccaaccagaatgttctgtgacacacaaaacatgaaaaaatattagcacatgtttaattgagtattaactattacaaacttgaataatctattgagtaaagtctatcacaggtccctaaacttatatcgttgtgtcattccgggccctacactcgtaa

SEQ ID NO: 19925 - DNA, 377 bp, Oryza sativa
  unsure (1)..(377): unsure at all n locations
ttctgaatccttcagaaagcttatcacatgaaagggcaaaaatatctcttatggtgggagattataccttcttaactcagntttttcgagctcctactgttcgtgctatcattctttaaaattccttgaggtgttcttcaaagattgaagtattacagatcacactnttttttgggagtagtggtgataaaaaaagaaaatacagggaaattatatatcactactagaaaatgcanttttcccgatgtgggggtctttttttcacagacggacatgacctttgaagccaaatgaccacctataaaaatataaatcggngtgaagtttgctgtccgcctgcgaaaatcgtacctaccccananaaaatctaagtctta

SEQ ID NO: 19926 - DNA, 447 bp, Oryza sativa
  unsure (1)..(447): unsure at all n locations
agttctcagcaagccacaccggagatgcataattaatgcaagggagtacaatgggataataatatatgggttaaggtttgcagtaaacagcatttaaaagtcacttagttgcccaaagccattttataaagacgttcctagagctacacagtattattaaacaaggccgtgaaccctcacgaacctgccttaacccaaggcctacgatgattcagaccgaactggctatcgacactgtgcccagctcgtgcaagccaacccaggccaaccatttcacnaatttagttgtgagcaaattttaagaattaaaacactgacttgggtacattgctcggcttgcccataaccganggtgcggctattcgaatagattatactctgatcagaggtgtacatctttatccacaagaacacatcttctcacgtgcaaccacgtgccacatacca

SEQ ID NO: 19927 - DNA, 504 bp, Oryza sativa
ttggagaagatgtcttaggtggagtcctggcttataccccattttagcgcctgtgaagatggagccgtaggcccgctagtccgctgctgtttatttttgattgccaggcctgaagcgcctttgtaataatgtgaatattatcgatataataaagatgtgtcttctatatcatgtttgtatggtgtaccccggctttttctgtgacggggagtaatactctggcgttcgggaaaaggcaattatcccggtcgcgacaagcgtctgtgcttcaactgcttctagcctgcgcactttgcggataaatgcccgaagccaaggcgccagcaaggtcaagcgcctccccgctccaacaacggtgggaaggatgtcattctgtgtcgtgtgaaccacgtgacggccgaggacgtgctgacaactccagacgtcatcgttggtacgttcctcattcactccatccctgctaccatattgttcgactcttgagctttccactcgtttatatct

SEQ ID NO: 19928 - DNA, 454 bp, Oryza sativa
  unsure (1)..(454): unsure at all n locations
acccgtgatcctcagagacacctgaggcatgcaagcttgtaaggcttcatcaaacaccttctgtgtcgcctttccaggctaatccactcttacctgaagatgtgcatcaacagtcaaaatggtaacaatgactcactaattacttaattagtaaccaatttagaactcaaaacagtttcatttttagtgtatgtcatatcacttaagcttaagagaagcatggcctagagaaacatggagagtagttagaggcatctctgctccataaattcagatgaccggacaaaaccaaagaattcagtttgtagctttagacaaaaacaattaacatgcctttagcctgngtttcacaagctcacattgatcgtttcatcgtcgcgtgacacaacggatgtcttggcgttctgcagcgacaagccactcttcctctcgtcctcagcaaccgatgagcccc

SEQ ID NO: 19929 - DNA, 423 bp, Oryza sativa
  unsure (1)..(423): unsure at all n locations
ttttcatgcaccatggttctcacttttcgcanagaagaaagttgcagtgtgtgatgccttgtttacgtaatctttaaagggaggcgtgtctcctgaacgggctcccgttcttcttcagatcagaatatataccagatcgagctatttctctgagatgctctgagaaaggttcaagtttgtgcatgaaccatagcaaaggaagccaaaaacaagatgcaagagagttataaaaaagaagaggacatcttgggcctgcaaatggaggtgatcactggacctaaccagttgacaagaggccctaaatgaattagttattgcaggccgagtgtcacactgtcactgatggatcagatcattgactagtttcacacaattgacatctaagcacaaaagaaagagggcaggaaatgagagcagaagaaa

SEQ ID NO: 19930 - DNA, 499 bp, Oryza sativa
  unsure (1)..(499): unsure at all n locations
acccgtgatcctcagagtcacctgcggctgcagcttctactcaactcttacagaatctggcatatcttcatctttgacatttgtgaagacatctggctgtggtgactgacaatgctgtgtggaagaatcatctgacacagtttccaacactagcttttcatttaaagattttgctggtgcagttccttgagtctcattatctgtaattcttgagcaaattttaggtgattggctatgatttggggaagcaccattcggaataggcttttcgcccttggtttgccagacacagaaaaaatgagagtattttccgcaagcacttacanataatttcaaattntaaatagtctacagaannaagtagagattaatggatgtaccgagaagcattctccctctctctatctcggtctctcttcaagaactgatcagacactagagatgctctcagccacaaagtggaaataaacatgtgacctgtacataagaaatacttctt

SEQ ID NO: 19931 - DNA, 480 bp, Oryza sativa
  unsure (1)..(480): unsure at all n locations
tgccattntgaacgccaaatcgtgggtgaaagttagcacgtgtactcaattgtgtgattaatttgcttcagtggttaatgtcagcaaatgcctatgtactagtatttcagatatatttctttttttcacatcaaaatcatgacgaagttagtgaaaacataggattgaaataattcatttgtggaggaatagaacttatcattgcacatggatttggaatttgggatagtgttaggtggtcctgaattctgatcggagctcccacctaccgacccaacaaattcgtgtctaggtggtgtttggatcagggacttaactttagtctctgtatttagacactaatttagagtattaaatatagactacttacaaaactaattacataaatgaaagctaatttgtgagaacaaatttttaagcctaattaatctattattagagaatgtttattgtagcatcacgtagactaatcatggatta

SEQ ID NO: 19932 - DNA, 395 bp, Oryza sativa
  unsure (1)..(395): unsure at all n locations
tgagagaaaagaagaatctactttattcgatatgcccttaggcacggccatacataacatagaaatcacacgtggaaggggtgggcaattagctatagcagcaggtgctgtagcgaaactgattgcaaaagaaggtaaatcggccactttaagattaccatctggggaggtccgtttggtatcccaaaactgcttagcaacagtcggacaagtgggtaatgttggggtgaaccaaaanagtttgggtagagccgggtctaagtgttggctatgtaaacgccccgtagtaagaggggtagttatgaaccctgtggaccacccncatggtggcggtgaagggaaagcccccattggtagaaaaaaacccacaaccccttgtggttatcctgcgcttg

SEQ ID NO: 19933 - DNA, 269 bp, Oryza sativa
agcttctctgctcctcttctctgatgcgctgcttaagatatatttagcaccaacaactggtatcagagcgcccatgttcgagtatggcgtgacagagtatcacggcgtatcggtattgtcaattgaagctacaagtatggcttcaagttccggcgccacaatggcgcagtctatggttccttgttttgcaggagaaaattatgatatatggagcatcaagatgcggacgctgctgctatctcaaggattgtgggatattgttgagaatg

SEQ ID NO: 19934 - DNA, 434 bp, Oryza sativa
tccaagtctccaacggtccaacttcgaatacctccacttcacatagtttgtgcagttcgatcaaatgggacaaccaacaatacaggaatgttccatgtttcttgtgctaaggatacttttctattttgaatattattgccatttgatgctaatatacagcatttatgctccagggaaagatcaaagcaattcagtactccctccgtcccaaagtataagtgcccatacccatttaactatcgggcatatctatttacccaataagatacttatgggtataaaatagagaacaaacccaaccctaataaacgttttaaccacaagtaaacgggcaaacggtcacaattaccattcctagtggaggaccctctcagtccctggttaacaacagagttatcgaacgtcttgcaggatcaaattgtttatacgaaatc

SEQ ID NO: 19935 - DNA, 482 bp, Oryza sativa
  unsure (1)..(482): unsure at all n locations
agcttctatataatactgccttagctctagttccttgtaaaattctttattatctttgggaaatggtccttttttcaccaatttgaattctagaagaatttcaaatttagtgctagtcttatttatagacttatagtttgtgttcttcttcaatagggaaaggtccaaactcacggaggaaattatagcacgcagacaaaagaagctgcttatccgacatactcgtgaaaaatacttggaggagactagttcaagggaaatggagcttttgcaagaacttgacaggtttagagttgttgcctttgtcatttagcatgtcagaaacaatataaatgttcctatccctatttctttngtggttatctgtatagggaaagggctcatgagatggaacgtgaaatcgaaagacagcgacaactggatcttgagcgcgtaagtctanggaactgnattaacctcatatggaagagaaaacaactcag

SEQ ID NO: 19936 - DNA, 490 bp, Oryza sativa
  unsure (1)..(490): unsure at all n locations
tgngaaactgcctatcggatattngggggttccaatcagtgatggcagactttcggcagctgaactatgaattccctctgaaaagatcgagaaacggctggccacatggaagtgtggtcacctatcgcaagggggcagagcaatcttaatcaattcctgccttagcagcataccaatgtacatgatggggatgtatttgcttcctgaatctatacaccataagatggacagtctaaggtctaggtttttttgagaaggattggaaaacaagaggaaatatcatatgattaaatgggaggcgctgtgtatgccaaaagaatttgaagggttagggtttaccaacacaagagtgatgaacatagccttgctatgtaagtggattttcagactanagtcngggaatgcagatacggtctgtaacttgctaaggagaaagtactatgggagtggtggttttttcaaacaactgctgaagggggtcacaattctt

SEQ ID NO: 19937 - DNA, 501 bp, Oryza sativa
  unsure (1)..(501): unsure at all n locations
agctngcatctttanataatcatgaaactcatgctccatttgtaaccatgtaganaatgaattaggagcaagtaaactataccatgtagatgcaaagtttgacgaagaaagaggaagcaattttaacttaagaaaatcgtcactaccggccttaccacattgatcaataaattggctgatatgctccattgttgttctagcatcctcacctatgaattntgtgaagttgggcacctcanatccttgcgggtaggggaccgaatctacgtgttcaggatacggtctttgatatgtatgcatagctactttggattctatntcactactatcccgcaagacattgtcatcatcttttccaacatcaacctgaccgacttgtgattcgatcttaggtgacaatgctatttcactttcacttgtgatacaatctgaaccgtcacttagttcggctatattttcaatgatgctattctctaagctagcaacacaatccgaaccatt

SEQ ID NO: 19938 - DNA, 356 bp, Oryza sativa
  unsure (1)..(356): unsure at all n locations
gctccaccaaaatcaagagcgcangctatcaacatattctccaagatttgattgacacgctcggtctgaccatcagtttgcgggtgataggccgtgctgaagtttaaacgggtccccaattcttcctgcagcttctgccagaactttgaggtgaactgactacctcggtcggatactatcttcttgggtaccccatgcaaacacatgatccttgcgaggtacaattctgccaatctctttcccgtataggtggtatgtactggtataaagtgagccaccttggtgagtcggtccacgactacccagattgaatcatgtcccgatgatgtccggngcagtcccgttataaagtccat

SEQ ID NO: 19939 - DNA, 417 bp, Oryza sativa
tattacggacctatgaaactcagcttgggctggtgggaaacatcgattcttcttgtgttatagttttcgatcctcaactatatctcgcgatatcttcttacgaagtattgataaggcatctataacagcctctggtttaggagggcgacccggcaagtagacctccacaggaattaacttatcaactccccgaacagtactataggaatccgtactgaacattccaccagtgatagtacaagctcccatagcaatgacgtattttggttcaggcatatgctcatataaactcactaaagagggagccgatttcattgttactgtaccggctgttaaaaataagaacgctcgcctatgacttgatcttggtaccaaaccataacgatcaacgtcgaatcgtgagcctattaatgaagc

SEQ ID NO: 19940 - DNA, 465 bp, Oryza sativa
  unsure (1)..(465): unsure at all n locations
agcttangatcaaaaagtgcctggagggtggtggcatgtctaaagccaaaactactccaactgataatgactcacggaagagggtgctggtaaggggcaagagaagatgcaagggatgtggggaatttggtcatgttcaaacaagctacaagtgttcccttaatggaatcaaaaaaaggctagtgtactaataccaattttttttgtctggagtacagtttcataactgtaatgcattattttgtattgtaatttgctggaagaggaagccaaggaggaacactacaaaatatgggaacacttctgacattcctagtcccaaaagaccaacagtgcagacaatacttgaagaaagtctaggaagaattacaagaagggtatcatctaaaatacattcacattactttagattttgcctatttcgtctatcactcattngtcaaaaccatggcttacagcggtaca

SEQ ID NO: 19941 - DNA, 442 bp, Oryza sativa
actagctatgggtgagtatgcaagacagcaaagattatttttatggacctggaagaaaccttggcgagcattcgcactttcacgatgaaactaaaccctgataagtgcatcttcggagtaccgtcagggaagctgcttggatatatggagtctcatagaggcatacaagccaacccggagaaaatcaatgccatcctcaacatgaaaccgccaagttctcacaaagatgtacaaaagttgactggttgcatggcggcgctcaaccggttcgtttaactacttggcgagcggtggatgcccttcttcaagctgttaaagaatacagacaatttccagtggggacccgaatcacagacagccttttaagacttcaagaaacttctcactacttgaccagttttgccctcaccacatacgcacgagccgctattgtatacgtgtc

SEQ ID NO: 19942 - DNA, 401 bp, Oryza sativa
  unsure (1)..(401): unsure at all n locations
agcttatgctagctggaacaatattagccttggcaatgagttatacaggatggtatgccatttatttacgattctgactatatagtcagtgttcaattctgataacctanaagacttaaacaatattaatctatatttaagcacctcctcattcctgtcatcatttgtctactgaggtactgttctttcattctatgatgaccaggaaacgtcttctactagtgaaaggtcgattcttgatgtgcacgaaagaagaagttattatgttatcccacaaaacaaacttggccaagacatatacattagaaccactgaatataggagttcagatgttacacttctgtcatctggggatgataggtctataaaaagtccagcttcaanggatcttctggattctc

SEQ ID NO: 19943 - DNA, 458 bp, Oryza sativa
attggaatgcgcccaacacgcatcactgcctctgatattgcattatccacattcgcgctctcgtcatcaataaccacaaacgtagcaagtgtggtagctgcacgctcctgtacatcctcctgagagctcttcaccaaactcagcagcatatctgcgccctgctgcagccagaagtcatacattccttgcgggttggactccgctatacgtggaagtgtctgcgaaggatacactcaagccagctcatcatatcaccaagagcattgtctatgcccttccagttacattcattgaacacctcattcttcttcacaaccttatcaggaaaaagtgagacgaccgatttgaaaatgtggcttgtaatggtgagtacaagcttgcccttggagttgctaaatgctccaggattgtgtgcctgttcctcctcaacagatatgcagctaagcgtgcatataagc

SEQ ID NO: 19944 - DNA, 399 bp, Oryza sativa
  unsure (1)..(399): unsure at all n locations
agcttaacctacaatcaccaccaggcaggaagcattatggaaaacacaactcaaatatggtaagtaaacaatacattacccattccgagtaaacagttgtaagcacaaatttcaggaattttttttccaatactttgtactgtgttcccgtagaacttactagtatggtggggactgaattgatatgaaaattgcaggagtagaagcaaagtagttaagactacgttgtcgaacaaaatcccaacgaaacagaggtagttattcgttctagcgtcaaatcatctggtactggacctaaacttacgactcgtaatcacccanaanaaaatcaaatttgcagccgcaaggccacgcaacgcgattctagcagaanactgcaatctatccatccgacatcta

SEQ ID NO: 19945 - DNA, 374 bp, Oryza sativa
atacaatcatgcatcgcgtaccgacctgatcaatgcaggtattaaatatggacaaaccgtaacccgatttaatttatgtgtagtttgcttttcagaatatatttatggacgtacgtagtgccatctcaccaatttatggaaatagatatattttagaaataaataccatccacaagtgttaaattctatgttttgctgtaaaaatatataccatcttacaaattaatatgtcagagaaatggcatcgtcgttaacttgatagtagaagttgtcagttatgcgatatataaatacaattctaccactctggtaacaacgtcaaaatcccaaatttccaacgtacacgctaaaacaacggcgacagacaacggaca

SEQ ID NO: 19946 - DNA, 452 bp, Oryza sativa
  unsure (1)..(452): unsure at all n locations
agctngngcctttgtcctgtatactggcgaagttattgtgcctacattcttttatggcctggttggggcaaaatgccaggctggttgggcctggtttggaagagaggatacaagggccttgtggctctctccggaagccagttactagttcaccaaggtccctcaatttaacatcaagatttttttaatattccttaatcacaaaacagaaatatatacacctaaactcacgtatgagcaagtttaatagtatagccaactactagctttaattcatctatagccaatctaatagctcatacatacaatagttacatactacactattaatacctgatcccacctgttatacacactacgtcttatagtccgtgctacagctggctataaatctgtagccagcttatagcctgctattatacctgctctaaaccatataactcatcgatgtc

SEQ ID NO: 19947 - DNA, 160 bp, Oryza sativa
ttcttcatgtcgatatagccagtgcttgaattcttgctctcttcttgctttgatctcactcggctgattttcctagagaatgtttctatggctataactagtactactgcaggtggtacttgttttgatttctacgaccaaaatgacttggccgctcgga

SEQ ID NO: 19948 - DNA, 436 bp, Oryza sativa
  unsure (1)..(436): unsure at all n locations
agcttagatcactntatgctnttaaaagcagcttatctgcaggcatggtgtttctacattctgggatttattaggttgctggtgagtacagtgtttatgttactttccctgagctgtaaagctagttctgctttcaagtgctgcttctcttggaggaaacaacagcaaaatataatgcagatgacatctcaacttttagagttgaagatggctccattttctgatgcgtaacagcgtaaggaatagacatcactgacttgctatttgtcacctncatctatagaaccgctgactatgttgatggtcttaccgacgaaagctgaacgaactatatgcaatggagagggtaaatgggtattgtatttagtccaccaccatcttcttttcttaatctagtaaattccctggtaagggggtatcactgtatttnccacaa

SEQ ID NO: 19949 - DNA, 455 bp, Oryza sativa
  unsure (1)..(455): unsure at all n locations
tgtcaattccacagtaaacacacatagctgccagcgcangcactccagactatccctctcacttggctggtctcgtgctgggggatagatatactcgggccattcccacgaggacaaggcggctacaggttcctattcgtagcgatcgacaaattcaccaagtgaattgaagcgacacccacaggagaaatcaaggccgacaacaccatcaaattcatcaaagggatattctgcagattcggattgccccatcgtatcataacagacaacggctcccagttcatcagtgtcgatttccaggattgctgcatcaggttgggagtaaagatctgcttcgcctcggtttctcaccctcagagcaatggacaagtcgagagggcaaacggcatagtactacaaggaatcaagacccgcgtctacgacaggctcatgtcacatgacaagaagtgggtcga

SEQ ID NO: 19950 - DNA, 449 bp, Oryza sativa
  unsure (1)..(449): unsure at all n locations
agcttgtcggccacattgtancacactatgcagatgatcatgacaactattgcttcaacgaagtataggatggcgcttttccttaacccattggcatcttgcgggtatactcctttggtaattaccctcaatactgagacaagtacacctgcgaaattcaatataagaaacaatgttacagtgtattgcaacaattgtcaaaccaatctgaattgcaacaagtacgcggattggtaggtgctggtatgtttccacattgccttttggttctcgaaatgcctgcattngcaatttcttcacttgaatgtngtaagtttgcaagactccattggcgtgcactctaactttaattngatgggattaaagagatggccagtagtgttcttgatactaacttaaatcaccttgttatgcataacaatagacttgcacaaatggatatcctgatc

SEQ ID NO: 19951 - DNA, 359 bp, Oryza sativa
actaagcttggattgtgaaatcgcgcaggagatcgaccaggcttgtatattgtattcctgctgcagcagagttgaagactccctcgacgacaagtgcggtcgagctgtgcttgctatagctggatgagattgcgatccccagtgcaatgcccaccggagcaccgagggagaagaaagtcgccatgatcactgatgctttcgccttataatttgcctgtgtaagaaaatgtgacacaaagtatgttcgattattgtcttatactataaacttttaagtctgatcctgtttcattgttatggagaggaacttatggtggaacgtggtatcacctaattgaatgaactaaaataaactgctg

SEQ ID NO: 19952 - DNA, 483 bp, Oryza sativa
  unsure (1)..(483): unsure at all n locations
agctngatccttngctcgtcccgagtgaaggacgaaaggaaacaaagactgtgttgtgatcangagttgctactatgctgcatatctcaaagatacaggtgcaaggtatatgtactctctctcagattaaataatctttggcacggtggcttacccttacccctgattcccacgagacactgcttcttcttgccttgggcggntgaaaaacagaacagcaactagagcactaatcacccgatctttattcaactcttattccggaagttttcaaatgaatttggaaaaggaaaccaagttcctcgatggattcactcagtccctctaagtgtatcaatttgaattcctcacccaaatgtgcctttgtgattcctactctaaggatttgatatgtggagcttggtanggatcaaacatggcatacntgcattcacatttattactaagccanaaacttagactaaagcagatactaaacatact

SEQ ID NO: 19953 - DNA, 425 bp, Oryza sativa
ggccaatcgctactgggttcgccttcttccttaggacgagatgactatgcatcagctccgtgggtcgaacttttttgttgtaagttgccgaagtgcttgtggcgtacttgtgcaggtgctcaagcgcttcgactcttactccttccaaaacttcgagcgatacttcgcgtccttcttcgcccccagacaacatcaccctttttgagttagcccctagctctgctggggtcattgcctcatcgctataaagaagcataaacagactaaacttggttggtcttgtgggggtcgtccgaagggcccagagaaccgatagtaattcctctagccatttgcctttcgctgccccctcaagtcttttctaggatcttgccaatttgacgttcggccaccttcaatccatcgagagaaatattccacagcta

SEQ ID NO: 19954 - DNA, 357 bp, Oryza sativa
  unsure (1)..(357): unsure at all n locations
agcttaattaatctgtcattagcaaatggttactgtagcaccacattgtgaaatcatgtagcaactcgcaaattagtcgcaatatgtgcaattagtttttttagcctatatttaacacttcatacaggtgttccaacgttcgatgtggcgcgcatgataaaaaattttggggtgtgatttaaacaggaccttaatagacaatggttaanttttttcgtaactttatcttatctaactcttaaccagntggttcacatgtcatactctatttttattgctaancttgcataaccttagaatggtattntgggatgttttgtcacgtactatgaatggctanggttccactactttcat

SEQ ID NO: 19955 - DNA, 455 bp, Oryza sativa
  unsure (1)..(455): unsure at all n locations
tcatatatgtccacttattattatgtgtaacaatactccttgcccgtgtcgagttgagtagtgttcttagaactagggcgccaagcacccncattttcattactataaatgaaaataaactacagcaagtcttgaaaaaaaaaagagagatagctatcgatagaaagaccaggtccctagccgataaccacaaaagaaacatccaacctgcccatttccgactatcacgcaacgaactcatttcttcccccgcgctgataagctgtagcaatctaacagaaattccatctgtgttgaccctagctactccaattcttcgagttgattagttggcatttgatcagtcagttaactgaaacattatacgcagnggcattttagcatgatctaatcttcgtgacgccgtttctcgtgcaattatgatagctacactaaccactaccaagcttgcccct

SEQ ID NO: 19956 - DNA, 405 bp, Oryza sativa
  unsure (1)..(405): unsure at all n locations
agctngcggacgatcggcagcgcaacagatagccagctgcagtgacgaatctcgcggacaaccgtagcatcataaagctcgagtacatatataccccgccctcgacccccatagtgcttatgggaatgcgagctgatggacaatatgctgcaatgttagctgcctacatataactatcgaaattaacgggtttgatgtcaactgattnttctcataccttaattggttccgatttatggacggccggcgtaacaatgtggccaggaagcttgcggacaatgtccacaaaaccacgaggaaatgactgcggatatatgtatggttgaattgggaggaggcatangcagatagaatcatttaaaanaatgtanaaccgtgagctggtccttatatatactcactaac

SEQ ID NO: 19957 - DNA, 457 bp, Oryza sativa
  unsure (1)..(457): unsure at all n locations
gcttatacgaacaatttgaataactaatatgacatatntgcatattatcagttataaatcatcaatttattcttatacagtgatatcatgctattattntttttgacgtgaaacaacagtaggagtcctactgtgctcatgctattattttattggtacttgttcgtaagtgagagctaatagggagcaaaaagtaatattgaagtcaaaattttagtatatactagacacgtagtcgcactatgcacgacttttaatcctatttaagaaccttttctatatggtctattagttattagttttaggtaagcttttaaaaatgttttcatataataagttattntttttacaaagtattgatttccctagccaactatacatttaactacttttgattatgtttaagaactttcatatatggcctattagtttaggtaagcttttaaaaagtttgata

SEQ ID NO: 19958 - DNA, 485 bp, Oryza sativa
  unsure (1)..(485): unsure at all n locations
agcttagctaactattatgctngatgcctttggtacatattcttgcatcgtttcgcatacgaaatggagggttacgcttttcttccactctatgtgttntttctagttttaactntgcactntgccatttgccctttctatactgtcttagcagggtcttcgccgaaaattgtgttcggccctcctttgggaattggcgaagtaaaaatgaaaagtttgtggcggtgaagggtttgccgaaggtccggtgtccatttcggcctgtttaccgcgagatggtcataaacggcaatagttacaaggttntaaaagttgccggctggatgcggacgcaccccgggtggaccctggacgactacgactgtgtccatgtggaacgtcgagaggatatgattcgcttttggcgaaaccattagaggaccgatcgtcaggaagcgaatgcccagcgtcgttatagtatagtttgtgtttcgccccttctcctc

SEQ ID NO: 19959 - DNA, 476 bp, Oryza sativa
  unsure (1)..(476): unsure at all n locations
actcagcttgaattcntatttgtcggaccagatcgagccctgataaatatttgttntagctagggttgtgcaatattggttttgattagaatatggaatcactatatataataaaagtgtgttgattcaaaatagttatactagcgtattttgtctctgtgaagagtactaatccttcgctagtttatggaccttgaattatccttttaggaagatcagaagacggccaataatccatacaaatttctggtctattntaagcatttcaataagtaaaactgttgtatagccacgctaattgcttgatttgtaatacaccagaacaaaaacgcttggagatttgtgcaacttagctttgttgggatcatagaagcaccatatatctgaagaaattatgtttatccatattatctactatcattcataccaccttgatctatcttcatacctctntgtctcttaattcattttataat

SEQ ID NO: 19960 - DNA, 426 bp, Oryza sativa
  unsure (1)..(426): unsure at all n locations
agcttcttacaagctgcaagaagaaccattcccctgctatctcttacaattattncagcacaagcatcacccgtcttctttctgaatccagcatcaatgtttaccttatccacacctttcggtggaggttcccatttaacaatttgcacaacattggcatgcactttttctgtcagtttctcagacattggtcgcttgcccttcttgtcatcaatctggtgtcggacaggcaacagacatgcttcatagttaaccaagaagttgatagagacagctataggaatggaatcagcaccatgtaccatctcatttcgaagatgccaagcacgccacaacatatataaattgataaagtaaattttaactcgcatatttgtagagtgatatatcacagaataatattacccattttaaacacttgtattt

SEQ ID NO: 19961 - DNA, 330 bp, Oryza sativa
tagagtcgccagatacggttgttccgagctcattttcatcgtcttccactgcgctcgtgtcgtgcccgaaccagccgggcacgaccacacttgccacctccccaaccgcgctggcaccccttttctctaccacgacgccccatcctctggcgctctcctcttgctttaaggcagaggagaagaaagaatgacggccgtcgccactgtctacgtgcctaaccctgtcatcgaggttgatggggagacgggaagggtaagagtcgtcatcgtcgctgtacctccgccatcgctgcaccacaagatgggagggacagggggagatggagtggc

SEQ ID NO: 19962 - DNA, 491 bp, Oryza sativa
  unsure (1)..(491): unsure at all n locations
agcttacctcccaaaggtaccattgggtctacaaaagagtatctcttcttcgtgaaaagaaccatctagcataccggaagggcaaataagtatttcccctccatcaagattttctgcaaaaataatcttttgatcatggaataaatcacgctacttatagttcaataattcagaaagaaaaggcattgttcctttggccattctaatgaacaatatttggctccaaacaactctacctaaatgctcatgtagcttcggatcaacggctttcattacggatgacaatatggtcagttgagatcgaactccaatggaggttgaactactcacgaaaattcctcgctgcagagntagcatgtacaatatcaatctctcagtatctgtagaaaaaataacagagacagataacacatgcagcanaaccactataatcaatcttagggggtttttcccatataatgttcattagttcatatcaatatcaataattg

SEQ ID NO: 19963 - DNA, 338 bp, Oryza sativa
  unsure (1)..(338): unsure at all n locations
agcttcaaatttctctaaaaagaggtgatgtcatgttctaatttctagngaatctatgttggtgattacgtacaaatcggacgtgcctaaaaggtttgtaacttcatcctccaatattttttttgtcatgttacatttgcaactatgtttagcacacttttttgtctcaaaatttagttgtaagttgatgagggagaaaattcgtgtggggaagaaagaatatatacaaatttagttgatttgctaaagaacgtttataaaatagttgagaaggaaaactatagtgaaagttgtcacgctccataacgactctaaaatacatcctctaaattatgcct

SEQ ID NO: 19964 - DNA, 484 bp, Oryza sativa
  unsure (1)..(484): unsure at all n locations
ntccaacanatactaatgggccccgaaattccttctagatcatcagctaggtccgtttacagttgatgctgtcaagaggcccgaatccgaatttaaaacgtgtagaactttatctcttgtcttctatggaccaaaaagtgatgtggtaagatggaagtggacttatagaaggtcttgatttggtccccaataaacttctttaatcatccattcattccttacgcacagtctcttttctttcgcccaagcaagtacctctgcaaacgagagcacacaaaactcattgtgtagcaacttttgttcaaatatataacaagtaaatcaaatatagaacatatgtatctttggttcattaatacataaggtaatcatgggtatatctgaagctagtgtgttcctatcatcctncccttcttgattggaaaccgtcctacgttttaaggtgtcatggagcgtattgaacttacctttatctatcacaaca

SEQ ID NO: 19965 - DNA, 479 bp, Oryza sativa
  unsure (1)..(479): unsure at all n locations
agcttattcgtttagttaactggtggtaaagacctatagggggactgccttgtgtctgcacaaatgaatgaatagtctagctaaccacanaatgttaatcggtaaaaatcgaatgctaaaaaatagatatgtaacttaagtgaatgtctacttataaataaacacacctaanaaacaggaaaacactcgtagaaatgtggtttagtcataaaagttacacaacaaatttaacactcgtagaaatgtggtttagtcataaaagttacacaacaaatttaaggcttcagttgtaaaaacttcatgacaaatttaggaatataatcatcgntaatggcatatattctaataagtacgaacatattatagtttgtgtataataaaatggtacatcatttttaaaataccacgcacttcgtccttgtgtgatgatccgccatagctaaatttagtgctgtatccgcactgtgtaaatgatgatg

SEQ ID NO: 19966 - DNA, 365 bp, Oryza sativa
  unsure (1)..(365): unsure at all n locations
tgaatatgctattacaaggtagcaaattcttctgatggctcatgatccattgaaaaatccttactgcagacaactttcagattcgggaatgggataacagtgagatttgccccttctatggtatagaaccagagactacccaccacctcctcatagattattcattcacaagacaagtatggagctccatatggaggaaattgggcctccacacgccttcaccatccctcttcactggagacatgctatgttcgtgggaagcttgcaggaaagaaatggtacgcaacttcgatggccttttcatccacacggctcggggtatttggttacaaacgaatggaataatctntaatgggatatacaat

SEQ ID NO: 19967 - DNA, 486 bp, Oryza sativa
  unsure (1)..(486): unsure at all n locations
agcttatccataagtgaccgagtttaaagagaatgcggcatgtcaagttatctattaaataggaatagttggttagtttccttttatctctaggaaagtgtgtttcgtgtcctataagaactttatattttccttttatctttaggaaggtttctttcttgtccgacaagaacttgtatcaacccatgggtataaatatgtacacctgnggtcattgtaatctatcctcacaatcaatacaattcggcgcatcgccaccttntaccttttctactttattttatcgtccggcgggacttggcacctgacgcggngctgcatcggtgttcgatctccagtgaaagggtaagtccaatgttccgtcggcccaggcaattgtatcatctacatcggcgtcgttcaaggctgcatcagtacattcgaccctctggatgctctggtttgatgatatactgctactattatcatgctctgtaatctaatcta

SEQ ID NO: 19968 - DNA, 436 bp, Oryza sativa
  unsure (1)..(436): unsure at all n locations
ttatggctgctgattggcgtcctgcgattattatgagattatcactagattatgaggggaatcttaggttatacagtctcaacaagacagacggaacttggctagtcacatggatggcatttactaacctctgctttgtacgtggtttgtgcggcatgaacggaatatgcgtgtatacacctaagcctgcatgtgtatgtgcccctggacacgagatcaatgacccaagtgacttgagtataggatgcangccaaagtttacaatcagctgtgacagaaagcagaagataagatatgtgaagctacccactactgaattcttatggtatgatcaaagtacacatcatcaggtttcgcttagtacttgcacgaacatatgcatgagtgattgcagcttgcagggtttctcatacttggcaggaaatggtaactgcta

SEQ ID NO: 19969 - DNA, 177 bp, Oryza sativa
atgatcggtaatcacacatacaggacgcccacatctctggatctgcatctatgatgctgacttatcacaaacatggaacataagccttcagcgagaacttttacgggtgttgcattctaaaaaacgtaatatccaacgctctatcatgaaaggtaccacttacaatggattcaagta

SEQ ID NO: 19970 - DNA, 231 bp, Oryza sativa
tatgtttaccagtaccggacattgcaagcattgcattccatccactagagttggcgatgttcaacgtaacccatagaggttcctctctcatttttattgaatctttaatctatcgcgaggatatcagctgtagataaaactttctatgcgcgccataccgaatcaataggcgtctgtgcattacttcacatagaacacaacctgacttggaaagagtttgaaatttaatat

SEQ ID NO: 19971 - DNA, 305 bp, Oryza sativa
  unsure (1)..(305): unsure at all n locations
aagcntggaagagaggaanggaactgatgaggaactcattatgaatgtaagtcaaaagggagagttagcagaagagatgacagccaaaacatctggacatgtatgtacagggctaggcacattattattattgattaattatttcaaaaacatcacaagtggctagtggacaatggatgattagctgcctaattntgagcgcctgccatgtgctctaacacgcgatccgaacaggcaacacgcatactttacaagtcttaaacaataataaactcaatgagatatggacacgtaataaaaaagta

SEQ ID NO: 19972 - DNA, 481 bp, Oryza sativa
  unsure (1)..(481): unsure at all n locations
tctgtctcgctgatcggntcggttgattccatgcatgatcattttattatgatttgtctcanaagtgatgtattggttaagagaaccaccgtaagacttttaacaaagcagtttcaatataaaatccctcaaatcaaaatagttaacccacccaccgaatatgggtgagaaaattggaattgaaattatacctataatatattataattgtagttagtttgcacacgtctggtccatcgtttttttctcattattgcaaagggtttagatatgaagttataagcctaatctagatggaggtgagcaggcttggcctctcccatggctttaaatctcgcactgaatgtactgtagatttagtaaatttcatagaaactaacactattggccccttcaacttanaaacttatagtgtttctagctccacttttggttattnttggtagacaaggtttcacgtaattatattcttggattatat

SEQ ID NO: 19973 - DNA, 342 bp, Oryza sativa
  unsure (1)..(342): unsure at all n locations
agcttcttggccctgttaaccgctgctcgatcgattaattacttattaattaactcgacatgctctacgactaatatatagctaagctaattagacactaaattagactttggtacgtgttgattcggcaaaattaagaaatcaagcacatnttttctctgatcgagctcgatcgatcgggcgaacgaaccaacacaaacacgtttccagcaaccggacggcgcgacagggacccaatcaacacaaatccatttcggatctgatgcatcattttaattggacgccatgattcaattctctctctctctctctccattccgaaataattaatttccatctttt

SEQ ID NO: 19974 - DNA, 482 bp, Oryza sativa
  unsure (1)..(482): unsure at all n locations
tgctaacttaccgatcgaggtggttggagtttggattgtgataactaaaatggcgtaaatttatgtgaggatttgatccttctatgtggcatgaggtatccctgngtcggcttggaaaaggctttgtcgcgaacctctgacaccggccagtgtttggagtaagttcgtgtcttgtgggtaaagtgtacccctctgcagaggttaactaactgttcgaacagccatgcccacggtcatgggcggatgtgaagtggttcccgttgcgtagatttgtttgccagcgttatgtgaaaagttgttgtggattgggaatcgtaaccagaatcagcctacgtggcaaatggatgacctgagtagtcagaaacgaatctgtgtgattcgggatgtctgcgggcatcatagactangcttcccgagtggaagcggattgcttgctgctggcagctggacttgtgagtcgaaaaatgaaaaggtctgggacc

SEQ ID NO: 19975 - DNA, 480 bp, Oryza sativa
  unsure (1)..(480): unsure at all n locations
agcttgtcgatctcgccggatcgaatagttgatggcgatggttccgatctcgtcgaaagacgtactccggtcgggttagatctccctatagccaacgtcgtcgagtagcttgttgtcggagaatctgtcttttgaacccatctcgtcgaaatcctgaagcaccaaaatccccctacctggcgcgccactgtcgacgtttgatgtcgtgattccgatatttgcatagtatggggatcgttggtactaggatatacgcaagactgaggtaaaagagacagagacagggattnttatataggtttgggaccctgaatggtcaggtaataaccctacatcctgttggtcgaagccggtattgctcttattcactataataacaccagtacaatatttggggtagcctatctaactggtgtcgacatagcgggctaaaggtctgactcgtagtcgacaacagggtagtcttttctctcgagtacg

SEQ ID NO: 19976 - DNA, 335 bp, Oryza sativa
cccttgtcgacagcttttccattcaatgtgcgaccggcagcgtgtgacccacagatcccttcctgtatgtcgatgaggagatgttttccgtcatctaacgagacgcatttgaggagtaccccgcttggcgccttcttgtatagatcgctgccgatcatacattaaattttggcttgacgggatattatctcggactccgcatcgtcttctggcaactcgtcgatacttatgaatttgatgagtggggtccgctagtcttatgtggtctcgatgtctgcgacgacatgttctgcctctatagcccccgagctgatgtccgggacaactgtgctatc

SEQ ID NO: 19977 - DNA, 458 bp, Oryza sativa
tctcgacgtacaagctgagatccgtgtctgctaatagcgtggaattcaacgcacttctctgacccgtgatgttcattgtcctattcacaagacgaagaatcatgacctctctagctgcaaggttcttctcagcgccatgaagacgtcacctcctatggtccagcagtcacgaatctctcttacagatgtagacaaggaacgaggagtgacagttatctcagaccgattcgttggggtaatcgacatcgatccccacgagccatcagtcctacacttgctcgaagaccagggcttatcgttgacaagcacaccacgcgatgtgtttgctatcgatgggaccagcacatccgcgcgtgctaacgcagaagaggagaatcaagtggttacaccggcccagcacattgtggccattaacgcaatactgagggaaatcccttatgatcccgttctgaacgatg

SEQ ID NO: 19978 - DNA, 499 bp, Oryza sativa
  unsure (1)..(499): unsure at all n locations
agcttgtcagtcagcttgatcctacaacttacaagacatataatcaacagatcaaatagccgatcggctgataagccgatggagtaattccagccgatgccgatactagccaatgccgatagggttttgagcaattagctatatgtccagtgtatatgatgatataaaaacaatcagctcatgataataaaacaacaatataatcccgtagaaaccaatcggctaataatgatatgatagaataagtgtcggtccgaagattaaagcatacatcgactgaaagcctgatgttataaaatccaatcgattagataaacagttaaacctttgttgaatcggctaaatccaacttgtatgtaatctttataagccaatgcaatgtccagataactcatctgctgaaatcccgatgaaacccttattggcaatcgaaaagcaggctagagatcattattctaaacacgacatagtangtcgaatgtactgatgcagcactaag

SEQ ID NO: 19979 - DNA, 486 bp, Oryza sativa
  unsure (1)..(486): unsure at all n locations
ntaactnttctcatatcctgttaaacttataacacaccacattcactactacaaaacctataataggggatgtccgatcatattcaccggtttatcgaaccggtacatataaggctttttctgtcctcctaagtcctgaccccttgtacgagtctaaaactaataacagcacctaagatcttatatgtgccagtctatttaaaaacggatttgctatcctactgtctacagtttttaggggtgaaaactgtcaatatgctttgagatttgtgctgtggaggggtgaaaactgtcaaatttttaaccgtacgatatgctttgaaatatgtgctgtggaggaaaaaatgaaaaanatacccgatgctcgcaacaaggatcaaacatgagacctgtagcttgcatgcttgttcaactaaccaattgatccatccaattnttcanaatatatatgagtacatattacttatattgcagtatatagtagta

SEQ ID NO: 19980 - DNA, 500 bp, Oryza sativa
  unsure (1)..(500): unsure at all n locations
agcttagccatganaataacataggcagtatcatcgtttcctactttnggacatgtttgctccagcgctacaaagttcctatnaagaaagctggtgctttcatccacaagcaaaaatggaatttccaagacagcatctctgagctttatatccaggagagaatggcgattggactcgctatatgctctcctcctaaattcaatgccagcttcatgatactgcgatgcccggcgccaccgatatggaaaatgaccattctgtgacgaacctaaattagctgcctcctgcttgtaagtaagatgtagataatcccatcctagctgaagaaaatgacgaatgtggtgccccgtatgaccatgatgctcatcctggtttggactgggtctgacgtacatatgacataagtgtaacaaatgatcaaaatcttttggacgatgggattctcttattgctttnggataacatggtacaaactgttcaatgcattgaacaatactcct

SEQ ID NO: 19981 - DNA, 435 bp, Oryza sativa
  unsure (1)..(435): unsure at all n locations
taggcacttgaaactaagcttctctgtttatttaccacgctaacctctagctttatttatgttagctaaaaataggttcacatgagtttatatgctatcttacgtagtgattaagaacttataatacttactctaacctagggtactacagtactatacttaatactactactctctttgttttatttttttttaaaaaattataggttgaggattaagaaaccacgtaaaattaaataaaagatgattgattggttgtaatgagaaaatatgtgaaaaaataatatatatgtgaaagtgactgtagtttacgacagtatgagtactaaatactagtacgtggcttaagagcaatggcgatgtataaagcaggtacgacgctatattctcgtatnggtaaaaaattgctttagattaatcatgtatgagtatata

SEQ ID NO: 19982 - DNA, 357 bp, Oryza sativa
  unsure (1)..(357): unsure at all n locations
agctntatgtatcgaaggtgaatcagttttgaaaagttttaatggaaagattngatagagtttacaaacataaatagaacacgaagggcatttgttttttttgaatatatttttgaaaaatatagccatattgtcattgtatcgtccaaaaaacatcaaagtccgtaaattttctatgtctatttttctcttcaaattttccatttctctctcaaaactttggccatatttatgatgtacagtgatagatatatgtcgaatagattgtgggatgttatcagatctaaaactttgtggacttatatntagagaactnttacggtacattctacttgtagtatatacttgcagtatata

SEQ ID NO: 19983 - DNA, 450 bp, Oryza sativa
  unsure (1)..(450): unsure at all n locations
gggacaagttcacaagagctctgagnatgcgatggttgttgtactaatggagagatccaagcaagccttgggtgggtttggaaacgccttgtgatggtgtggatagggacctcttcgccgcctcaacaaagataactgtgggcgatgggaatacaacgcgcttctgggactccgcatggattaacggccaaagaccaaaagacctaatgccgttggtctatgagatctccaaaaataggaagaaatccctacggcaagggaaagaagacgactcctaggtgcatgacctgaccctcgatgcgggttcatctatcacaatcaaccttctcgatcagctagtccgcctgtgggaggcggtacggaatgtgcacttatacagcgaggagccggatcagattgtttggaaattcacaagcagcggccactatacagcttcctcggctaatcatg

SEQ ID NO: 19984 - DNA, 426 bp, Oryza sativa
  unsure (1)..(426): unsure at all n locations
agcttgtnntggtggtgctctagctngngctccaaactattggtgtgntacagacttacagttagttctaccagtgcagagcgagtgagtcgtgactttgagacaaaaggacaagtgaaaaggacaagactggaattcattgccctgngcgagggcgttgtgcacgagaagaccacaaaaggcccaatcaatatgcatctcagatccgtcgtcaacgcagtggtaccaatgtggccatatatacacaacgtacgtgcattggctgcgtgccagctccacgctacaatacatgctctatctcagctcagccgaaatatgatggacaaaattggcacgttggcctgngctactggtgagcagatgcacatcttgtgttcccgtacctgaggacggatatgcaggtaaatttcagggcaacctattgac

SEQ ID NO: 19985 - DNA, 489 bp, Oryza sativa
  unsure (1)..(489): unsure at all n locations
tgngaagaatggagatgaggaagttcttgngttgngccatctgtcatactttgagaaggaaggactggagaatcttaagggcgagctcaaggcttcaattgagaagggtatcaaatttgcaaatgcgtagttaggccattatgcagactagcaactcatacctgtagatgaggcttctcttgatttgatttatgcttttttctaccccttgtgttgggataccgaggatttgagctttacaataagaatccggcggcctaatgccaaacagaacaaaacttgtacgagaggaactatntgtgtcaagatttgagttgttacattggacaaacattggattatgcacctnttgccttagcatttgttgacactggcctaatgttctgctttagccagttttaaaactataatttctggaaatacaaactactcatttgaatntgacgagtgaaaagagagactattgcttgtaacaagtcacaccactca

SEQ ID NO: 19986 - DNA, 502 bp, Oryza sativa
  unsure (1)..(502): unsure at all n locations
ttaagtcacctgcagctgcaagcttccaggataaaaatnttagcactattgctaactcatttgagggcataataccaccgaccttctcaaacgcatctgctctcgaatccttgcaacttcgtggaaacaaatatcacggcatgattcctagggaaattggcatccatggtaacctgaagttctttgcgttaggagacaatgtgctccaagccacacggcctagtgatttggaattntttacatcattgaccaattgtagcagcttgcaaatgctagatgttggccagaacaacctttgtggtgcaatgccaattaacattgcaaacctgagcggagagctctcatggattgacctaagtggaaccaattaattgggaccatacctgcagatttgtggaagcttaaacttacatctctcaacctgtcatataatctcttcacaggaactntacctcatgatattggctggcttacaagaatcaatctatctatgtatcacata

SEQ ID NO: 19987 - DNA, 452 bp, Oryza sativa
  unsure (1)..(452): unsure at all n locations
tgagcttcctcttcactaccagtgcacagagacaagcctatggggcttgagccatangcttgtgccctaaactcctattttaatctattaaaaattagtgagagatttgaaaatatatggtgtatatgtaagttgagccctactcttacagaggtgctagcttcagccagccacttacctcttcatgattaaaagaggaggccaggttcaagtttttatgtggaggagaacgtggttgttgctcctatttctgaaattgaaaagcaacacctataacacactataaatgctagtttattaaaaaccgttactaacaatatcagtatctgacttttaagaaaaagcagttgatcaatcagcangtgtaacatccccgcctagggcttaataggattaatagaatactcatatcaacacgttacaacttctttttcggaaaccaatctctaaag

SEQ ID NO: 19988 - DNA, 447 bp, Oryza sativa
  unsure (1)..(447): unsure at all n locations
agcttnctttctggaaagcaatggcagcctgagagttggctgtcactntcactggngaagaangtacgctgatatcaatgctaattgcactcttaaggtgccaatgctaacttacggtactactttgaaatgacatgggcctgccctataaatatttgctgtactatatatctctgtcgntatccattggagagagggcatgtagcatatgcatcatttgtacctcagaagatggtacagtagagttggtatagggtggtggttaggaagatggagaacttatgaccacctgtttctaatgaatttgtgcctcacactttccaatgattntgcttactcaatatcagctaataaacttaatttgttatttgtatcatataaacacaacttcatangcttcagctatttgtgtgaatatcatntatctactgttaacaactatttcta

SEQ ID NO: 19989 - DNA, 483 bp, Oryza sativa
  unsure (1)..(483): unsure at all n locations
tccttggtaccgtggaaaggtaaataatattattaattgtatgggtttgctatttgtaaatgattcaaggatggccacttaatgttgaaaaactaggagatagtccacttttgtttgttaaatgatggaaagtttcattattcgacattggtactgcatgtagaaactaagctaagactttaaaggtaacaagccgaattgatataccactcttccatctagttctggaaatacaactaaatgatttggtctacaccattataatatgttcccactattatcttagattcaaaggtgtatatctctctctctttctccggntaatgcggtagtttctaggcttttagaggaattgtggtctctccttttagccctctctccattgtatattangtcggcaaagtgatgattattatataaaccanaaggtccatacgcatagcttaatggtatcctatataatggagtatatgcgtgggcgta

SEQ ID NO: 19990 - DNA, 367 bp, Oryza sativa
  unsure (1)..(367): unsure at all n locations
agcttcanaaaagtgattcatcacatagacatagcattatgacactgtctttggaggaagtcaaatgatccaaacactaagatccactccttggctacatgggacctagtatgccagccaaagaagaaaggtggtttgggcattataaacctggaactgtaaaacattgcccttctgaccaaacatctggacaagttcttcaacaaaaaagacctgccctaggtaaaactaatatggaacaagtaatactctttgtctgactctcctcatgctcacacataanaaggatccttctggtgtaaggacatttntagattgattcccatcttcagagcagtctcaaagatcactattggcaatggggaca

SEQ ID NO: 19991 - DNA, 433 bp, Oryza sativa
aaaatcagcttctttaccagtctgtggaattcttttcattttctatcttgcttaggcccttggtgaacctaaagaaaagatgaacacacatgttccttgtggaaatcgataccttggaatactacccggtgagagcgctacatcgcgtatattccgtgcgcttgcgtgaatttataatgtgaccttatagaaataccaatagtcgagcgtaccaataactcgttgacgagtcttgacaaaacataccgccaaaatggcctcatgcgtcgcgatagttgttggtttttcttaacgacattactataaatatagatcccagcgcaggcgcatataaatacgcggtatattatggttatagagatcatacgccagcgcacggatataccattgtatctatttaccccagagtattctacgggatcgtattatataa

SEQ ID NO: 19992 - DNA, 386 bp, Oryza sativa
  unsure (1)..(386): unsure at all n locations
ttaaacaactatatggtatagattatgtggatatctttaagcctggtggtaaagcagctactatcagaattattntggtctcgtgcagtctcaagagggtggagtctcagaccacttgatgttcacaatgcctttcttcatggagtcttagaagaagaggtctacatgaaacaaccacccaggtatgaaaattcctctaatccccgttatgtttgcaagttggacaanggctcttatggcttngagcagacaccaanggcttggtactcaagggtaagtaatanattatgtgatcttggnttagagggtctaaggcagacacatcccttgtctactttaataaaggggatttaactatgttttcgctcatgatgttgatgatatta

SEQ ID NO: 19993 - DNA, 457 bp, Oryza sativa
  unsure (1)..(457): unsure at all n locations
aagctngcgcccacaatttgaattacatgtgaacttattcctaattatctttttatatgaatgcgagacaagaatgctacctaagttcgagtataccccagaatctatgagcttctcacactataatcatcgctcacatcttatatagaatccatatttaatgttctacatatatatatatatatggaaagctagtgagaccatcatttcaatggatttagttccacgtccaaattctccttctgagtcaacggaaatgtcgaatcaagagagcatctagaatcaatccgagtgttgcgtcactatctttcatggtgtcacgccacgtattgcgttgaaatccattatgaacatgtacagcgatccttgtntgaaccgagaacttatatattcaataactgcattatgttagagtcagattctacttatatttatctattcatgaacacttctgtca

SEQ ID NO: 19994 - DNA, 416 bp, Oryza sativa
  unsure (1)..(416): unsure at all n locations
gtcacctgaggcatgcaagcttagttagttctggagagagcaatccgggtatccttcttgtnttgttcaagcangcaggaggcactctgatctcgaattacaaaggccaaacccgtctgattagaagctggaagagtgcagcatctgagttaagtagtactaccatgcttgctggcggtggtttgcactttgtaactggaagggagagagatcacaccagaggcatttctttccttggagcagtacttgacattcatatctacatacgacacaattttgtgaatcacttgacacgggtgggaagtaacagggttgttcctagaaaanattcccgcttccatatgtgtcacggagaacagccagactgtctttgaagagagacctcggttaggaataaacaccattgctcgattgat

SEQ ID NO: 19995 - DNA, 483 bp, Oryza sativa
  unsure (1)..(483): unsure at all n locations
ggctcacgccacatcaatttagtcatatatatcgtaagtcatctgtatattctcatggttcagattattggtagtgccatttattttattctgtcaccactaaaatatttcttttacagcacttcgaaaaattattccagtttgctcggaaaattgaggaactaatgtacaacatgagccctgaggaggtaacccatcacatttggttgtgcatttcagtttcaaaggcgatatcattgagttattatcttcttcgggacagtgcacccacaatattgatcctttntcggactatggtccatttcttgaagtntgaagcagatacctgttctggcagaggattcaagataattagatgagatgaccaaatacttaagccgtcttttgttgaaataataccaccgaaatattgatggtgatgaacatatngaattcttatttnntatttttcacgatctataatatgatgaacactcatatgtg

SEQ ID NO: 19996 - DNA, 393 bp, Oryza sativa
  unsure (1)..(393): unsure at all n locations
tctcgggttttggtctctgcccgaggcattgaggccaacctctatatgatacgagctatagagcggatccgcccccccagcatacttagggatgtgcagtgcgtcactggttgcatggccgccctaagtcgtttcatatcaaggctgggagagaaggcgctttccttgtntaagctcctcaagcgctcggggccgttcacttggacggaggaagctgaacatgcccttactcagttaaaggcatatctcagctcttccccggttctagtcgccccggagccaaatgagcccctgctactttacttagcggcgaccccccaagtagttagtgcagcgttggctgtggagcgcgatgaagacaattctcattccgcgcacccccaccctgtgctg

SEQ ID NO: 19997 - DNA, 508 bp, Oryza sativa
  unsure (1)..(508): unsure at all n locations
ggatctctaagcaccgcggctgcagcttattctggggttgcatgttgtctntgcagttaatatcaaccaaaggacttattcccaaattaacaggagaaacatggccacattaacttattcctccacacaatattggagcaaacgaggccatgttccatctcaggcaaaagttctggacaggtgaattcagtagccccacgcagaatcagacatcccatctattttggtaccagaacaaaagaacctgagagggttggtcaccatgtgtttgctaagaaatgcgctgccagtagatgacaaataactcacaggattgtggtgaggtcgaactgaacanatggaggaggggcagcactcagatngaaggangggacatgtacctataacagaaaagttggtaatagtgcttagaagatcagaagaaaatagaacgtcactcatagaccaacttattaagagataagctactaccgatagatgacactgtaaaaaattactaactgtttta

SEQ ID NO: 19998 - DNA, 501 bp, Oryza sativa
  unsure (1)..(501): unsure at all n locations
atatttcaaactcgaggtataattacgttgataatatttgaataaattatttctaattattgtataaaaatattaataaaattcttaaacaccataatttaatatataaacttcaaagccactatacatataagggcatgtttagtagagtttaagattctaagaagcagttagctggtagccagcttctaaaaatctttcacttatggctttctttctagttcattttcagctataccttttaaaggaacttctgattctgaaagaaagtgcagctaacacaaacaggcccaagcttttcctatgcagcgctataataagataagctctaccttaccactatttaattnttatataaataatataggtgcatttattctaattttttatttataggataagatttaaataaataatagatgtgcccttattttgggaggtgataaggaacaccanattctctttccacattcacgttaccggcaaaaataaattaataat

SEQ ID NO: 19999 - DNA, 335 bp, Oryza sativa
  unsure (1)..(335): unsure at all n locations
acctgangcatgcaagctggtaactctngagatctctcatcttgaanatgtgaatactatatatgaagccagcggggccagacttatagataaagagtaccttagaaagttgtccttatcatggaatggaggcagcgtgagccttgaacctgacagatcaaaagatgtgcttgagggtcttcgaccacatcataatctgaaaactctaagtataactgggtacagtgatcctaactctccaacatggctttctagtaatctctcggntacatcactgcagacaattcatcttgagaattgcanggagtggaaaattcttagatctcctaaaattc

SEQ ID NO: 20000 - DNA, 483 bp, Oryza sativa
  unsure (1)..(483): unsure at all n locations
gggaggcactgagagaacactatggcatcgtctcgcatgacgatgcgcatatagcaatgcgagatgttatgatattgtctcacgttctccagaaaatgacttttgatctaaaactgacaaatgaagaactaatatacgaggccatgaaggcaagtgaattcagcaagatttcttaanttttaaaactccagctttttttagtgcttaaacttatttaaccttctgtgcacatgctggatatttttctagctggtgtcatctcggcattaaagaactatgccttttttactattgaaatagtacctgtatntttcaataaaaacctgcaatttggaccgaacaagttgatatctttattgctaccaggatgataaaaccatggctgaaccattngcattggatgaccatcacatctatatgatatgcttcggtgctggattcaacgtggaatgatatttcttcgactngtcttggcttatctat

SEQ ID NO: 20001 - DNA, 418 bp, Oryza sativa
gaccggatccttaagtcacctgcagctgcagctgccgcaaaggcatatacctatttacttgtcttgtcccgagcaattaagaccatttgaatgatttaacttaaaatgatgtattatatattaactaaaattgctgataattaaaattagatacttaccccacataaaaataataaccttgaaaaaaattacttcataataatttcacatcaccacctgatactatacttaataatatgaaattttacaatattgaaacacattagctaatttaattatactatgataatcatatttaaccataataaaaaatcaattaaacctaccagatatctgggcgggcatgctatccatgccgcctccctatatgcgtatcgatgtcatcctatcattttataacaatgaagcaattggaata

SEQ ID NO: 20002 - DNA, 494 bp, Oryza sativa
  unsure (1)..(494): unsure at all n locations
ctcatatntattaactctgaatttgtcagaatgttctgttatctagtatanatgagttccgttgaaggtcagtggaaactagtctggtgattgctagatcagtctctattaaaggatgtggtttaccgtttacgtttaggctgtatctgatctataacaaggtgtacttctttggggcaagtggtaaatggtgaacatactcgaacacaccataattatgctcgaattccttttataacctggatgttatttgcatacattattgcagtaacagcgacttgtatgcatttgctcctttatatcttcttctatctccttgaattatnttcattatacaatatttaagtgcaccatattttttgacactaatattatcttctggcagatagagcccattgttagtggcaacctgcctcctggaattgattcaagtacatgccggagtgtgaaagtatttgtcacctgtcttgccctgtttatgcacaacgaacttt

SEQ ID NO: 20003 - DNA, 501 bp, Oryza sativa
  unsure (1)..(501): unsure at all n locations
agcttgacttttaagtaaaacaatntatatttcaaggattatatntaaaaataattgatttctagtgcaccatattaatagaagagaaaaaaaggaataagatgaatatatgatgccaatacaaggcacttatttaatatcctaatttattaaataacaacaaatatcatatattactaatttcgttggaagctcgagctcagctcgacaaaccttgtgagctttgtgagaggctcgggcttggctcgtctagagctcgagccaagctcgaatcaagccttggacgagtcgagctcaagcagctcgcgagtctcaagcttttttgatagccctacgggtgctcgtatttatgaactaatatttatntagaggtangtgacatatccatcgacaacgaggcattcgtgttgacttcgacaaactcaagatacgctgttccaagtttttggatgtgctcatgtagatangtgtgtgtgtcatatatgtnggcgtacatgtact

SEQ ID NO: 20004 - DNA, 490 bp, Oryza sativa
  unsure (1)..(490): unsure at all n locations
actcagctttgagaggctgccaattgacttatgtcttgctatgagggcggtgatggctaanaaaagggcaacctgcaatgtggaaccacaagactctgggcagaacaaacacccattcacaagaatcctaaaggcgtcggcttggaggagaatattgacgacgagccgaccgctgccgtcaacagaggaagaatctgcaccacggatagcaccggctatcgtactgcaggtgacgagagtacgggaagtgacaaccgccacaccgtcgagcgcaacacacacgccgacgcctgtcgacgccaccaccagcgcatgcgcgacggagggagacgacaaccaaagtgacgccaaccacaacgtttccatcgacagcactcgcaacacaggcgcggcgaatggagacgaccgctgccgtatcaccgagcacggcgaagagtacatctgcacctcgatgacggtcgccgaaacgccaagcacggtgccgacatcg

SEQ ID NO: 20005 - DNA, 332 bp, Oryza sativa
  unsure (1)..(332): unsure at all n locations
agcttgtggcgttcaaacgaaggaaggagacatgcgcgcgccatgcagtagatgacaaaaagaagagcgtgtccatttgcttcgcgagcttatagctggagaagcaatcaatcaattaacaccaccagcagcaagccgagggcagtttgggaaattcaccttgggctggacactgggaacaaatgagactcctgttgggccgggcacgcgggcccaggtcgtcctctgttggactagtcgtggtgtactggtgtactggtgtgtttcacgaagcctcgttatctctcactggtccgcggngcccacgtncaggaatccatcgccagcgagtg

SEQ ID NO: 20006 - DNA, 490 bp, Oryza sativa
  unsure (1)..(490): unsure at all n locations
tagtgctcaagcccaaactatcctaggcgtgtctctgccgttgattacacggaaaatgtgcacacacgatgctcacactttcacgagtactctttttctttgataaacattcaagagaagaccaatgcacaacaatacattnttgtaccatactaaaagcaccctcgcgttggcgtaattgcggacactagctggtaggacaaggatttgaaccttggtaagtggagtcttagcaccacacacatctagtgattcccncctatttgcgttgtattttatattaaaatattgcactatttttactcgtgtatgaacaattctcggctgatgatatgagtgcttgaaagcatcttgtccaaaatagaaatcaattacatttctagcccatcacatctaatagatattatngagatatgttggcacatatatgaagtaataattaatgttaggtttatatatagctatgagaaatattggtaaatcgacgcat

SEQ ID NO: 20007 - DNA, 326 bp, Oryza sativa
agcttcgcagaaccctcattgacggtggtagcgcactcaatatcctcttcgccaagaccttggatgatatgcagattcctcgctccgagctaaaaccaagcaatgcgccttttcacggagtaattccaggattatccgcaactccactcggccagatcacactcccggtcacctttggcactcgggaaaactttcgcacagagaatatcagcttcgaagtcgccgatttcgagacagcttaccatgccatactcggacggccggcgttagccaagttcatggccgtcccgcactacacttacacgaatcgcacaagacaggaagga

SEQ ID NO: 20008 - DNA, 496 bp, Oryza sativa
tctttttgaacacccacttgcatcccacaggtttacacccatatggtcgctctgtctcctcccaagtcccgttagcgataatggaatccatttcactacggacagcctccttccagtagtctgcatcaggagatgcatatgcttctgaaattaacttaggagtgtcatccacgaggtacacagtgaaatcatcaccaaaagacttagccgtcctttgtctcttactccttcgaggagctgcactgtcatcctcctcagtgacatgttcatgtgtatgttcagtatggtctggtggtgtgattgaactacgaattatttcagatgaatggctcgaactactatgtgtattcttcattgggagaaagctctcaaagaaggtagcatcacgagactccataattgtaccaacatgcatgtcaggtacctcagaattaactattaaagaattataggcaatgctttgataagcatatcccagaaagacacagtccacacg

SEQ ID NO: 20009 - DNA, 495 bp, Oryza sativa
tgtcgatcatctcgagtaattcttcttctcttgccttcgaattgctccgagcattaatgccgacaatgagtagattatgacagcacggtccgattcttaaaacatccgtagctgccaaaaacttttttaactagacccgtctatgtgtcattatattggttttttatgtctcttccttaaactgaagagataaatccctaaagtcacgaaatttcttaaagaaacatccttgtaaatgcatacagttccaaaatttcatgccatgggtcatcacaaccgcaaacatctctcctattagggattattgaggactcccacagatcgggtttcaaaccttcacagaatttcgaaatgaacaacggttatgttattgcagaaacgtatagcttcttttttttcttgaggaaaaaacgtatggatattcaaacaattgaacgcaagatgaaagccagatggtgaatctcgtcaccagcgctgtgtacgagctatatatat

SEQ ID NO: 20010 - DNA, 417 bp, Oryza sativa
  unsure (1)..(417): unsure at all n locations
agctnggctatccaaacctcaagcaaaccgactatgggtaggcctctattagaatcaaagtcctgagcataacaatggtcttgagctatctatttaaattaaatctatcacttacaaaacgaagttatattcatatggcaagagtcagtacattaatcaaaggcaaaatttgctacgggacattcaaaaaacgcgtaattagctaggagacatnncnngaacacgtatntgctatangacacccgaaaaaactggtaattagctccttgacacccgtgagaatattttattatatccgaatgaatagagagagaacatcggtgtagtcaattctaccttcgacacctgtgaagaacgatnttttcttttgcttttctctatcgtcatactgcttctttgtcttgccttttctgcaac

SEQ ID NO: 20011 - DNA, 470 bp, Oryza sativa
tccttctgagtgctgattgaggcgaataactgtcttctgcttggtatcgccctccggagggtgattgtccttcgctcggcctggagtatgtctgggagagacacaacttctttcatcgacgacaattctttgctgaagccgtcggtgcagagaagggttagtgctgaaggtattattgccatgatttattgcacagttaggcggagcaagaggagcattggtgctgtggatgatatcatcgatgttgatgttggagctgactaactgacgagacaatcgtagggttgttcgttggatttctgcggtcttggtcaacaacacactgagttggcaatccttgggcacatggtttgttccttcgcacagaatacatgtcaccttgcgagtgggacacttccctgcgggatggcttcttcatagtgagtgcagagtgtgagacacatgctaacaacgtgtacaatattttcaca

SEQ ID NO: 20012 - DNA, 280 bp, Oryza sativa
  unsure (1)..(280): unsure at all n locations
agctnggctatccatacctgaagcgaaccgactatggttgggcctctatccgaaacaaagtcctgagcatgacagaggtctagagctatctatgtaaactaaatctatcacttacgaagcgaagttatattcatatggcaagagtcaggcattaatcgaaggcagaatgtgctccgggacattccaaagacgcgtaattagctcggagctatatgccacgcggagctattatctttagttcccggtggtaacaccaactgggacttagaaacacacatat

SEQ ID NO: 20013 - DNA, 318 bp, Oryza sativa
actcagcttctgtgatgttatgggcaaagtttttatgttgtttcccctcgccacgctgagatcccttcgattggcctggaatacgactgagagagacacaacttcgatcatcttctacatatctctgctgatgccatgagtgcatactatggttaccgctgaaggtattattgacatgatttatcgcacaggtttgtggagcaatatgacacatggtgcttcatgtgaaaacatcgatgctgttgtctcagctcacattcctacgatacaatccaggtcagtcaacggatatctgcagcttggctgcaacacgctgac

SEQ ID NO: 20014 - DNA, 493 bp, Oryza sativa
  unsure (1)..(493): unsure at all n locations
gcttattaatcagcatagaactaaatggatagtgcagcatctaaagcaccacaaggaaatccttccaatattaagacagatagcaactgcctttgcataaatcaaaaggttcaaatgggcctcgaagcttaactttttcatcatttagaagagccaaaaataattctagattttaaatatacggatctagttactagataggacttgagagaatatctaagttccatttgtatagaaaagtataccagtccccgttatagcttaacagtacaaatgctatatttccagttaaatgataatccttngtgcagtatgaggaggacaggggagtcaatgatcaaatanatacgtgggatatcagatacgtgcgtggaacaactaacttgaggcacaacactcttactaatgaaaanggaagtagtctgaagctttctgtatccttcactcccaccctatcatacatctaaacncagacacctgatggtataactat

SEQ ID NO: 20015 - DNA, 504 bp, Oryza sativa
  unsure (1)..(504): unsure at all n locations
agctnggatntattgccatccttgctcaccgcanacaagacaacactcaaaagcccactanggcctggtcaataacatctcanttggctagatgaacaaacaaccaagttgcccaacttatactttntgtctggaaccaatggcacattacttgacgacactacagtataacagcagaagaaaattaaaacagatcttacacaacagaacagtggtatggcagcactatgccggcacacgtgtaaagcagaatattggcaggtgagaagttgtttcggtaccgttgcacctgctacaaaccagatcacttttttggaattgaaagtataacagtctaaactatacagatgctctatggtaatcaactctagaatattgtggtgtcacaatgggtatgtctacactctggnggtatagatagtngcatgggaatttgcagtttcattgccatgggacccagcagagaaattttcacttttcctactacaaataaaaaagtagtaa

SEQ ID NO: 20016 - DNA, 500 bp, Oryza sativa
  unsure (1)..(500): unsure at all n locations
taagtaanaacatgagagagtatgtatatatatatatatatatatatatatatggagcagtaactagtttttgggagcagcaaccagagtcgataaaaatgcataatactttctccatcctaaatatttgacgctgttgatttttttaaacatgtttaacctttcatcttattcaaaaacttttgtaaaatatgtaaaactatatgtatatataaaagtatatttaacaatgaatcaaatgataggaaaagaattaataattacttaaattttttgaataagataaacagttaaacatgtttataaaaatcaacggcgttaaatatttagaaatagaaggagtattaaaggcacgcgagcgattggtggtgtggaattgtggataggaaacgatcaacgngtggataatttatcttgggtagggatggaaacagccaggctggcgtacagtacatggaaaaagcttataggggcanatgggatccagcaatcagcataca

SEQ ID NO: 20017 - DNA, 471 bp, Oryza sativa
  unsure (1)..(471): unsure at all n locations
agcttagtatcccatgcgcatgcttaccatgtgcgagccatagaactcagaactgaagaatgagcttgcaacagcaagacatgaattgtgtgcagcctttaggtggtgtttagatccagggacttaactttagtccctgtctttagacactaatttagagtattaaatatagactacttacaaaactaattacataaataaaagttaattcacgagacaaattttttaagcctaattaatctataattagagaatgtttattgtagcatcacataggctaatcatggattaattaggctcattagattcgtctcgcaaattagtccaagattatggatgagttttattaatagtctacgtttaatatttaataataaatntcacacatccgatgtgatagggacttanaagtttattcccatctatacagggccttaatactaccgtcgatgcatactgcagctatacctg

SEQ ID NO: 20018 - DNA, 486 bp, Oryza sativa
  unsure (1)..(486): unsure at all n locations
tggtgccgtgagttataacactatacacattacagagtcgtagttacttttacgagcggttcaacttccatgccaacgatggtaggccgtcgttagatctaaaatttttctttgaacttttaactattttatcacatcaaaactttcctgcacacataaattgttaaattttttattacatcgttacaatttcgactaaactttcaattttagcgtgaactaaacacagccttaaccaattcacgttcggacgttcccactgtggtccagaggcctagaatccgtatccctacacaaggcgataaacaaaggcacaaacatttatttgaccggatcagtgagcgctcgtgctccctccattaaaaannaagagacaaactctgggttttatatgccaaatataactgtctctcttatatgaagatnttntataatctataattttattgttggtagatgataaatatgattaatantttatacgtg

SEQ ID NO: 20019 - DNA, 310 bp, Oryza sativa
  unsure (1)..(310): unsure at all n locations
agcttgctttagtagattaatttccttaaccgaatatagtaagaatccgacaactgggcgattgataactctcatcggccgatcccaggactctgaagccgacactgactctatgccgatggtgacttcgggcttaccaaattttggcgttaacacatgccccccaatttttgagtatgaggtctcatgcttcaaaattatcttctgtccgatcttggtacctncaaaattgatcttcctttgcttcttccaatcggctttcatgagccgatactgtctgcattagataagcttagctgtcaaactcatg

SEQ ID NO: 20020 - DNA, 427 bp, Oryza sativa
  unsure (1)..(427): unsure at all n locations
tcgcggtgtaccaaaagatgtcagatcgtatgatgtcgaacgagtactcatcaaggtaattggtagattggttntttaaattaatctactaatttcgtagatacatccggcatgtatctacaaaggtatgcaatattttatctacaatttattatacctattcagatcatacagcattgtccgatctatgatttattatatttacctagagcatgttttctatacaatatctattatgcgagtgtttacggtgttaagccgacaacgcgttaacgctgggggctcgctctattttccttgtgtataaaacatacttggttacggcttacataatgcctgatatttacatctgctcgttatatactgataatgctagaagatccatgcagttttttttgagtacatactcgatattatctgctatatg

SEQ ID NO: 20021 - DNA, 401 bp, Oryza sativa
  unsure (1)..(401): unsure at all n locations
agcttgtgcttctgtctgaacccctgctctaatttgctcttcaatcttctgcacagagaggtgctgcacaaatatacgccactgtggctgcatttccatcatcgtcgtcggattatgtatgcttaggatcgaccagactagctctgatntttcggctacttcaccgaattattggctctgattatttgcttatatcgtctctgaaagtatgttacctcacaaaattctcatttattatatcgatcagactcatgtgtaaagtcatttcttagaacatttaatttatctctataataaagcatataatctgcgacaaaagtcatataaggccgagtttagtccaaacttctttttagacttctacttttccatcacataggactatcttaccacacaaactt

SEQ ID NO: 20022 - DNA, 455 bp, Oryza sativa
  unsure (1)..(455): unsure at all n locations
ttgtggtgtcagcttgcactctcacccnctccttttgtatttgcgaaagacgaacacaaaaccaatctcacaaattcacaacacaaatcatatcaaagccgggtcaatgaaagttgatctgtattcaaaaaaaaaaaaaaaaaagaatctcacaaattcagttactacatactgtattcaacaacaactaactaatcaagataaatacgtaatgaatactacctcatatatacattaaaggaaggaggtagcatatcaagagttggattggtgacacatactctttgagcctgatctcgatgtctgggaacttggcggcgaagtggtctacgcagtccttcatattgnggtacccggcggcgcacaggaatcatccggcgatggacggctgatccatacagaagacgtgcgcgtcgcaggcgtcctctacgtgcaccagcggtacggaccccagc

SEQ ID NO: 20023 - DNA, 288 bp, Oryza sativa
  unsure (1)..(288): unsure at all n locations
agcttgtgtggccttcgtaacaatgtgaatactacataatagtatttcacgacaatagaaggagaaattaaaatatatgagtgcatggactgaaacaactgaagttttcaaacacagctaaagctggaatgttcttacatcgatgaagctgacatattntgttctctgatttgtgagaacgatctctgcanggttgcttggctgatgctgaagaatgggtactgtgccggatatttcataggagcatcatcggcagccggtcgccgatgaggcctgacaacgacgtga

SEQ ID NO: 20024 - DNA, 370 bp, Oryza sativa
  unsure (1)..(370): unsure at all n locations
tcagcaacatgatgtgcctgctccttatcttctcctatatatataccatttcgntgccggattctcttagcgtaggctattcttatttatattcatcttgcaaacggcttgggttttgtttgcagatgattcatgcatagtatgtaagtttgtatatccatcatatcgagttgcttctttctctgtttttttgtatcatctcagaacctgaagtaggtccactagtttccatgaaggatgcgtggatgtacataccgagatgtgccattgtgatttattatggaatgtgaaatatcacctttttgaaaaggggggcaatttccgtcttgcctctactttgatgtccaatatagaatttgccactatattt

SEQ ID NO: 20025 - DNA, 439 bp, Oryza sativa
  unsure (1)..(439): unsure at all n locations
agcttataggcgggactnggatcgatccatgacaagccatccgataggaccacaatgctntggccagccgagtatgccattgccgaggataatcagaaatcttccgcttaattaatttgatcaagctcttgttagacgcctcggcctgcccattagcttgtgcataataaggtgaagaattcaacgatttgttgtccatgctcttggcaaattgaacaaactcattggacacgaagattgaaccttgatcagttgtaatagtttgatgaataccaaatcggtaaattatatgctcttgaacaaactgtattgcatcncagaatcaactntgttcanaggaatcgcttccacccacttggtaaaataatcggtcgctaccaacataaacttatatcctntaatcgatggtggagttatcataccgatcatatcaattccc

SEQ ID NO: 20026 - DNA, 400 bp, Oryza sativa
  unsure (1)..(400): unsure at all n locations
agctttaaacagtatctgaatctagagcatcttgatgtgttaaagctgcgccaggtgatcagngtactaacttgaaggtatatcagaactgtaatactggaatgctntttcaaagaaaaaatcatgctgacagaaccacctgacgaaatactcaggtatttatctacccatcagaattcacaagggaaaccgtatctaacaactaatagctgcaaataaatacctgtactcgaggtagaagtactaacaaaggtagtaaaaagttatgtttgaacttgctagatgactgttcttaaggcagaaagcatagtatttagttatataatcctaagctcgttaacgaataattatttgacacacccattataattggtaagcaccgggtgttgataataatacc

SEQ ID NO: 20027 - DNA, 491 bp, Oryza sativa
  unsure (1)..(491): unsure at all n locations
tccatggaattttgagacataaagccagacctgccaatgatgttgaagaacttcctccactgtcaccagatatctgccttgttaacttctataccagcagtggtaagttaggtcttcaccaggtacgaaagatccacaatcttcaacgttatacaattatatttcaaagattagtattacaagtcttcctcaataaattactccaacaaaatcctcacctaggtcaaagcagcttttcctatgggtattttcttcagagtttcttgtacttgcatttgtatagtataatgccttcaattcctctgcttttcaattgaaatgtttatattgctgtgatactctttggtgattactaactggactgtgtgaatggtatcattttacaggacaaagatgaaacgaaacccagccttcataagggagtgcctgttgtntcattttcgctaggtgacactgcagaattcttgtatggtgacgtgaacgatgtggat

SEQ ID NO: 20028 - DNA, 389 bp, Oryza sativa
  unsure (1)..(389): unsure at all n locations
agctnggtgccattggtgaatgagagaagctactcctatgtataagtgttgcaagactgaactgtacactgcataccttggcttctgaatattgtcggactttgcaagtaaaagttcgcgagaatccacaagaatattcaatgaagaaggactgaatgagtccagaacttgaattctgtccacttgcacaaacttaattcggtggtatttgcccgggattagcttattcaacccttgtttaattgcacctcacctctgcttgntagagacaagtagaggtgaggtggcttgtagaacgagaaatactcangggtctttcggctagctccacaagatggtgggctagacgacctgngttcanaacctaacccctttctattatttgatat

SEQ ID NO: 20029 - DNA, 457 bp, Oryza sativa
  unsure (1)..(457): unsure at all n locations
tatcttggtctccactaaggcgacacacacttctagattttcttccatcctggaccaagaagaagacattcttttggggaagaggaggtatggttatgatgtcaaacacatgttacactttgaccttagtttgcttttgttttttcgataatgtagattgcttttgctactgagatacttttggcaataaatcggcagactctgttttagtgtgtttgcagaaaatttgagttactactttatttttttcctcattatagttagtatgggtaacttcctgtatgataaaagttgctcgttcaaattgcagcttgcgtacctaccttacaaaagacgtgatatcgtgttggataatgaaagcaatgaattactntctcctgttgaaggacttggcatgacacttgaagattctaaggaggagaaaaagaatcggaaaggaagtcttaattggttaaac

SEQ ID NO: 20030 - DNA, 336 bp, Oryza sativa
  unsure (1)..(336): unsure at all n locations
agcttgtaccgccagtatctcaaccctcttgctgtctatcccatatgnaagaattgatatgttctttgggataaaattactattagcatctttacgatacgtggtaaaccacgttaaggggtccgtttggcacagctagctctaactttaaacttctagagcttgagtcgtgccaaacgatacgtattctctattntctggagtggaattagcaaagttgctacccaaaattgtactacggnggtggagttgggctttggcaaaggggcctcgtagacgatatcttcagggaaaacagcgatgataggcaccgacgttgctgtccgtcgaggtctc

SEQ ID NO: 20031 - DNA, 489 bp, Oryza sativa
  unsure (1)..(489): unsure at all n locations
tggtgagccagagaccgtcaaagccgccgtgccgttctactactgttcacttaaatgccgggcatggcatactggcatggcaagtgacaccgacgcgcgcgcgcgccggtgcgtgggtcacgaagaggaccggaggaattcnggcctcggctctctgtttcgaggcgatccgaatggccacgtcctgccaacttgggacctgcaaagctgcagctgtaagcaaggaacagtgaccgcagctactcacgtggcattccgccacgaatggaagattcggctccagtttccacagggccatggcccatggccggtgtggtcatgtggcggtcctcggggctcaatctctcaaccactagctgttctctggtacaatatatgtgaaaaagggttctttccaacaagttagaagtacaatattntttctactactgaaatggagtatagcagtacaatgttaaaacaatgcatcttggtgaacatagtgtattt

SEQ ID NO: 20032 - DNA, 408 bp, Oryza sativa
  unsure (1)..(408): unsure at all n locations
agcttcttatgataattngcctcgtttggtagccaccattgcccagaggaataataatacttactatgacctacatacatttacatcggttgaagatcgaacaaagagtgtgctgcaaagagcctttttctcattgggtgcttgcatcaatgcttttgtgcattgtcgacctgttctatgcatagatggaacttttatgacaggtaaataccgaggtcagatattgacagcaattgggtgtgatgggaacaaccaggttctacctatggctttcgcatttgtagagagtgagaacactgaaagctggtactggttcctagagagagtgcacattgcagtggtgcgtatgaagcccaacgttngccttatacatgatcgtcatgcgggtatgttgcgggctattgacta

SEQ ID NO: 20033 - DNA, 94 bp, Oryza sativa
aagcacgagctcactttgctgcgcctgcgccgtttgcgtatgctcgcagatgagcaggcgaaaagccaccgtctgcctgctacggggaaatcta

SEQ ID NO: 20034 - DNA, 456 bp, Oryza sativa
  unsure (1)..(456): unsure at all n locations
agctngatctcctggttgaaggtccgatcatgtccaacatcgatcgacttgaagaatgtaacgccgagctagatctggagcaaaagaaactagccgatctcccgaaggctattgaagaacagaagtcaagattaaaatcggctatcagaaatgttgccgatatgactaagtccttgaaaatcatccctggaaccgatgcacatgatgctcaagcaatcgatgaagtagaacaaatcagacaacgtgctgtatcggcaatccaacgatacttatctcagtgactctctatgtaataggacttaggaaaatctttttgaatcggctaaaaatctgatactaatggccgataatatgactctatattttccaaaacttgttaaaaattgcaactttggtgatgtgcccctatttacatgacaaggtaccccgattctatcaaatcaacctactgtggga

SEQ ID NO: 20035 - DNA, 427 bp, Oryza sativa
ccgcgagtcgctgctccgtagataattctacggactgagaaaccagctgtaccagcgccaccgaccttcaagactatggctaacaagtctctccgcgagtttgctgctccctctgctgacaatgtggccattgggccacatatcaacatgggagacgtggatttcgacttgaagtccagcctcatcacgatggcgtaggctagcccgttctgtggcaagcctaatgaggatgccaatgctcatctccaacagttcctggagatctgtagcacatacaccatccagggcgtcagtcccaacgctgtcaggctgcggctggttctgttctccctccttgtgagagcaaagcactggttctatgccaaccgtaatgttgtcaatacctaggataaatgctctacggcattcctctcgcaatcttcccgat

SEQ ID NO: 20036 - DNA, 356 bp, Oryza sativa
  unsure (1)..(356): unsure at all n locations
gcttacttacaggatcatctccaccggtggtgactggcacagcttaacgatgtccanncacagttccaggagccttacttacgaggattcaagcgatgatgaacgcaacttcaagaggagatggggaggcaaaagatagattggtcaccgtggacgcaacacaaggccgtgatacctgaatgaatgaagctgatgaacatcttgcatcattccatatcaaatgcttgttgatggatgtatgtgttaattgtaagctgaggagaaatcttccaaagcgattttctcctaacggaantgtattatgactactattaatgtacatgaatgagagcattctcattcccttatgtatgaca

SEQ ID NO: 20037 - DNA, 258 bp, Oryza sativa
agagagattgttgaagtcgcttgagcgacgaagtgaaaactcactaatctaagacgaagccgacgaatcatgaaatcgattccatcacactcgatgacaggaaactcggcgaacccctacctggcacgccaactgttcaaacacatattttgcaatatgacaagggggttacgcacgatacctaacagtggatggatgcggagacatacgcattagacaggctcatgccctctcaatgagagggaataccctactcct

SEQ ID NO: 20038 - DNA, 414 bp, Oryza sativa
  unsure (1)..(414): unsure at all n locations
atcctctgagtcacctgcngcatcaagcttatagagatggacttctacactcttttgattntgaatcatttgagacatgcgaatcttgtttacttggcaaaatgacaaaggcacctttcacgggtcaaagtgaaagggcaagtgaactattgggactagtatatactgatgtatgtggaccaatgagctcaaccgccagaggtggttttgggtactttattacctttaccgatgactttagtagatatggttatgtctacttaatgaggcataagtctgaatcgtttgaaaaagtcaagggaatttagaatgaggtacaaaatcatttgggcaagacaatcaagtatctacgatctaatcatggtggagagtacttgagcctttgaattgccaatcatctaaaggagtgtggaa

SEQ ID NO: 20039 - DNA, 500 bp, Oryza sativa
  unsure (1)..(500): unsure at all n locations
tcgttggtagatggtgatttgatctgacctctatagattatcttcaaacatatcacttgttccataactgggaatggctctcacgaacaagcagctcggattcactttccttacatttagtttacttcccactattctctttatgttgttatcatttagcattcaacgtattcctttacaccttcagccttgatgtgttctttctcgatggatcgattgctangaaagtgcgttgaacgatactagtgcaagtgcttttattctagtagcatctgatacaaagcccaaggttgaaccgagctttagattccactgttccggttttacttcttgacttcttggtcatgtcacanaagtttccatccttgtccncatagaagtacttctacctgtggtcatctctcttactcgtgaattcacctactntaatgacagggcaactgttgtanggtngatcgctatcgggagtcttcctcgagtgacacaaatcatggttctcg

SEQ ID NO: 20040 - DNA, 190 bp, Oryza sativa
  unsure (1)..(190): unsure at all n locations
gagacacctgangctgctgctctgcctctctggctataacgatgatcatactatcttattcttccagcagattcaatgcactggacgacgcttacattgagttaccaagaattctcgactttgccaggaaacattcgcgaggctacgcgtgacgactgcattaagaatgactgaatgtttgagcaacttg

SEQ ID NO: 20041 - DNA, 57 bp, Oryza sativa
ccctattcggacaaatagatgctgtggaccgccatgctccatacgttggcccttcct

SEQ ID NO: 20042 - DNA, 219 bp, Oryza sativa
agcttggtacgtacagagctctgaaatcatcggatattatggatgttttatcacgagcgactgcggatcgattagatctagcgatgcatgaccgaccactgcgcatgcatcgtgacacactgcagtcagaatgcgcagggtgtaatgcatgcccgatctaattgggtgccttgtgcaaggcgcctgaagccggcgctcactgatgctcaagctggatct

SEQ ID NO: 20043 - DNA, 491 bp, Oryza sativa
  unsure (1)..(491): unsure at all n locations
agcttanggccagnttagttcccaaaaatttttccccttcacccatcgcatcgaatctttggacatatgtatggagcattaaatgtggacaaaaagaaaaaccaattgcacagtttagctataaatcgcgagacgaatcttttgagcctaattaggccatgattagccataagtgctacagtaacccacgtgtgctaatgacggcttaagtaggctcgaaagattcgtctcgcgggttccagacgagttctgaaattagttntttcatttgtgtccaaaaacacttccgacattcggtcaaacgtctgatgtgacacccaaaaattttcttttccncaactaaacccacccttaacatacatcgatcacatcagtataaaaaggagagacatatgtactgtatataaagatgagctagagatcatatattcatatggagagccagagccatgcatgcatcgatcttaattaaagaaatgaaagggtaacat

SEQ ID NO: 20044 - DNA, 483 bp, Oryza sativa
tgtcagttagctctctatgccaaaatttgacaaactatgatgggaaatggccctccaaaacttgattaaatttagaaaggtttgacttatgacgttcatctattgccttttatcaataactctcaacacatgattcctatatcttgagactcatgtgacttgatctcatttgaacatcaacaccattttcatttctggagatctacttctttcattctcaataacattgctagtccccgtgatctgattatcagtctccacttgttgaccaaccgatcgtatataaaatgatacgaataaattgatgaatattaaccgacaacacaaatattatatattcacatcaaaataatatatagaaccacattattatgtatatataaagatagagtggtgcttatagcttgatctctgtacattttatgcttgttaaagagtaaatatcacaatcattgaatattttctatctcagctcatatgaag

SEQ ID NO: 20045 - DNA, 424 bp, Oryza sativa
  unsure (1)..(424): unsure at all n locations
agcttcanttagttctggagagagcaatctggntattctcttgtttgcagcaagcaggcaggaggcactctgatctcgaattacaaaggccaaacccgtctgattagaagctggaagagtgcagcatctgagttaagtagtactaccatgcttgctggcggcggtttgcactttgtaactggaagggagagagatcacaccagaggcattcctttccttggagcagtactgcacattcatatctacatacgacacaattntgtgaatcacttgacacgggtgggaagtaacacggttgttcctagaaaaatttcccgcttcccatatgtgtcacggagtaacagccaggactgtcttctgattagagagctactggttaggaaatcacacacccatgggctcgtattggcataatctcgtatgc

SEQ ID NO: 20046 - DNA, 319 bp, Oryza sativa
ctaatgtccaacatgagccctgagaggaaccatccattggttggcattcagtttcaaggcgaatcattgagtaatatcttcttcggacagtgcacccacaatattgatcctttttcggactatggtccatttcttgaagtttgaagcagatacctgttctggcagaggattcaagataattagatgagatgaccaaatacttaagccgcctattgttgaaaaataccaccgacatattgatggtgatgaacatatgaatttcttattcttattttttcaagatctatagtacgatgaacactcatatgtgcataatgcc

SEQ ID NO: 20047 - DNA, 407 bp, Oryza sativa
  unsure (1)..(407): unsure at all n locations
agcttagcctattctacaatgtctcaattgggttatatgatgttagctctangtataggttcttatcaagctgctttattccatttgatcactcatgcttattcgaaagctttattattcttgggatccggatctgttattcattcaatggaacctcttgttggatattcaccagataaaagtcagaatatggttcttatgggtggtttaagaaaatacattccaattacaagaacttgttttttatggngtaccctttctctttgtggtattccacctcttgcttgcttctggtccaaagatgaaatccttagtaatagttggttatattcacccttttttggaataatagcttcttttactgcangaataactcgcgtttatatgtttcggatatatttacttac

SEQ ID NO: 20048 - DNA, 293 bp, Oryza sativa
  unsure (1)..(293): unsure at all n locations
agcttcgccactgaactcggatgctntcatctccaaattntccaatagcccgttcatttctagcngctaatttgtgtgttaagagaaaaaatgatttataaatagtttacagtgttctctcgaccgttcgttttcaccctcgaaccatgaatcgcgggatagcgccctacgaaatttggcaggattctggaggtgagaagcatattcgttgctcggagattgagagacagacagagagagcatattagatgcatctcatgagatttccatgcagatgaatccgcggacccgct

SEQ ID NO: 20049 - DNA, 484 bp, Oryza sativa
  unsure (1)..(484): unsure at all n locations
tcagcccttctattgcctgcttcttggtgagcacctccaatgttgcattagtggtaggatgttacacatctaccatgagaacaataataaaaatactgatactgagatcctagatgcctggtagatgaacagcctgcagaatgcactagccccacttgttgactacttgcaaaaccagtctcaggattgatatttctcctttgcctttgtttttcttataaaatctcattttgtatgcctggtttctgatgtacttatgtcttgtggcagttccacatttaactatccaattaatttaagctgttttggaccacaatattatgtgcggtgcttcttttggagtaattaattntatgtacacaactgcctatgaggattactcaaatcattatgcctatgaatagctcaagatggaatatggatntagctatctacacaatattntcaaccatctacanaatggagctgcttatgttcaatatgc

SEQ ID NO: 20050 - DNA, 292 bp, Oryza sativa
  unsure (1)..(292): unsure at all n locations
agcttgcatcctcctcttcgtcatccaatccatggaccgtctcgtcctttgcttgggttgcttctggatcaagctgaggaagatcaagccgaggattgaaggggacccgttcagggaaggatcagggtatcagcaccccatggtgctcgtccagattcctatgtgcaatgaaaaggaggtataatttagctgaattctcatcggaattttgtatactctgtagttntgtagtgtgttatgttcattcattgtgtgtgcttactatgagacaggtctatgagcagtcgatttc

SEQ ID NO: 20051 - DNA, 461 bp, Oryza sativa
  unsure (1)..(461): unsure at all n locations
tgccaccaccgcgcggcgtttcgtccattgccagctcggtgaataaacgaggatggcgggcggcaagggcggcgcggttgctgctctagtggtggtggcgctcctgtgcgtgatgtccggtggctgcgtggagagccgccgtgtggcgaggatgggcctcgacatcggcttgggtagcgggcagggtattgggctagggattggacttgggcttggggtcagagcgggtacgggaggtgtctctgcttctgggtctgggtcaggttccggctcggtggctggggctgggtctacctccgggtcaagatctgggtcggtctcgattggaggggctagttcttctgctgggtcgagtgcccgatcgtatgctgggtcangtggatcgggagcacggtcctctgccgggtctagagctgggtcgggtggcggataagggtatggatatggtggcggcagtgggt

SEQ ID NO: 20052 - DNA, 337 bp, Oryza sativa
  unsure (1)..(337): unsure at all n locations
agcttcttcagctgcttttgaaatctgatgtagcggttccattgcgagtatgaaaagcatcggtgagagtggatccccttgtcttagacctcgcatgtgccatattgctttaccagggattccaatgaggagaattctcgagcttgaacttcctaaaatatttgaaatccaatttctccatctttgtccaaacccaaaattttgtagtacctccagcaaatacggccagtttacggtgtcagaggctttggaaatatcgacctttatgaaaagcatcggttntttctttctgctgaagtttttgatcatgttctgcacatacaggaaagtgtcatgt

SEQ ID NO: 20053 - DNA, 321 bp, Oryza sativa
  unsure (1)..(321): unsure at all n locations
ctttgcctatcgccgaaataaatagtttagcatagagagataataactggtgttatgcgtcttgcagctattcttgggtgggaggngggttattaactaccactcttacatagtggcactctttagataccactctttcaaatttcattacagaaatgccacatgagagaaagcttatatatatataatggcaatatcatctaattaaagttaaaattactctttcgcccctatttttatatgatgaagtcaccacgaacgcctctccgtcgatgagtacatcttccatacatgtcacaaactggaaagctactatatata

SEQ ID NO: 20054 - DNA, 361 bp, Oryza sativa
  unsure (1)..(361): unsure at all n locations
tggagtatacggatacacatttgaagtgttaaatgtagactaataaacaaataaattacagattccgccttgtaactgcgagacgaatttattaagctcaattaatccgtcattagcaaatatttactgtaacatcacattgtcaaatcatgacgtaattaggctcaaattaaagattcgtctcgcaatttacatgccaaactgtgcaatngtttttctcacatttaatatctcgtgtcaaacatttgatgtgatgttttttgtcaattttttaattaaatanggccttagtaattctatatgtaaatggagacggtacccgtgatatacgctttgcaaaatggcagtctatggaatgggt

SEQ ID NO: 20055 - DNA, 494 bp, Oryza sativa
gacctatgaaactcagcctgaacacactctctctctctctctctgcgctagtgtgcgcgccaagaagcctgtactacattcgttctaaaaaagaataaaggatatgtcgtgttggacatgaacatagtcttcaatatgtatgttttatcattaatatctcaaaactatatatttgtaaaaaaatattaaaaatataactatatgaaagttttttcatggtaaatctactattataagtttcacatctcaaatcatgataattttttatctattaattatctaagaatatttatgtttgactgctcgtactctagactggttgagcacgtcatgcagtacgtcacagagtttttttacaaatttattttccactcatcggtgaatcattcacatactccctccgtcctataaaagaccaacctattaatatatatgacacagtctaatactacgaatctatatatatgtgtccagattcattgtactagaatata

SEQ ID NO: 20056 - DNA, 415 bp, Oryza sativa
  unsure (1)..(415): unsure at all n locations
agcttttgggttacgctctagagacagctgtgttcacagtaaacatggttccatcaaaatcaatggataagacaccatatgagatatggacagggaagcgtcccagtttgtctttcctaaagatttggggctgtgaggtttatgtaaaacgtttgcaatcggacaaactcacacctaaatctaaatcagataaatgcttctttgtggggtatcctaaggaaacgaaaggatattatttttataatcgggaagagggcaaagtgtttgtcgcccgacacgggtgtttcttggaaaaaagttatttcaagnaggatagtgggacatgtgcgacttgagaaattangaacaccggaaacgcttcacgtcacacaacacacaagctgagcagatgttgtaacaggttgaacaagtgtgt

SEQ ID NO: 20057 - DNA, 481 bp, Oryza sativa
  unsure (1)..(481): unsure at all n locations
tcttaaattagaagagtctaccacttcaaaaggaggggaataatacatagaaatgtgtgtattgctcgattataaattaaaattcgtgaaggtttctggttttaatgtaaaagactcaaccgtttgatacagctcctaggagaattatgagaatgaagcggagctgatgagtggtgagaatatccctccatcctcgtattgtaattttttagcaacggagcgatagcttcgttatatgttatctaagattttgaaagtgtttgatagagttatagctctatgggacaaaaacatcaaagtaaaagttgtatcaaacggtgttttgtttattctgaataaatatccgaaattcagagagagaatcttagtacaagcgatggatgcataaagaagtattgcatgagtagaatgagagggtggngagaataaatattgacatattctacctaaaagatagaanatgaccatgtgtgacaactta

SEQ ID NO: 20058 - DNA, 341 bp, Oryza sativa
  unsure (1)..(341): unsure at all n locations
gtcacctgcngcatgcagcttattacattacatttctatttctatagttcccgttcagaggataaggtatatagcatactgttccccgaggaaggcaaacgacagctgatgattccaggatcgaaaatccctgcatcaagaaatggaaacttcagcaccaaaatcatctctggatttttatcagagggaccaataaaacaagggaaaaccatcaactcacattaaacttgctctggaacttccgtgatgaaattnttttccttcgtgtaactcattagattaacaattgaactatgataaactggaatgctgcaaagacatccatatcatagttactccat

SEQ ID NO: 20059 - DNA, 482 bp, Oryza sativa
  unsure (1)..(482): unsure at all n locations
ntctccacttatatattatattnttcgcttgtctacaactaatataatgactattgcgcgcgctagttttttgtaaaaaatgataanaaaagctatatacacatacgacgtaagaaaatttcaaagtcttactagctagcaccataaattggcacacaataacatagccagttatattagctacttctttcgtatcgaaaataaataaatctaatataaaatattatatattttaatattataaatctgatatcgtgggtggctgccttgaacgcagcaaaattacgaaaattgcatgcatcgtcgtcaatggacactacatattttcttactacaaacgtacgtacggcagcgagcggccgacgaccacgacgattgaccatagatagacgatagacaatatctaacgcgggatagatgggccatggttagctgggtggaatctcggagactagagcaacgggtcaccgttcgcacgccac

SEQ ID NO: 20060 - DNA, 377 bp, Oryza sativa
  unsure (1)..(377): unsure at all n locations
gcacctgangcatgcaagcttcccagacttgcaagtgcgacgaccacaagcaccatcaaacgcgatgcgctctattgcgttgaatactatggaggagcacaatggcggaacacgggaacagtacggtgagctcctacttcctcgaagtcgtcgctctggccgattgtcaccttgccaacttcatctcggccatcgtttttccgttcatggctgcatcgattggctactctctcacgctaccgtcgggcccagtcttttggagcgcgtgtgtagctcagcgactaaatagtcatcggcttatgttctttctcttcatttatcccctncagctcactattcgagcctacatggaatcactatcaccagcgttcacctga

SEQ ID NO: 20061 - DNA, 413 bp, Oryza sativa
  unsure (1)..(413): unsure at all n locations
ntggattagtggtggctacatggagatagtggcatgcgaccgtggtggtgacagctgtggaggcaagagcagtgagctctcttttgcggcacttgcctttccgactttccttggttacatagcagctgacttcaagtcaaccagatgtgttgaggtgaggttggagctgttgcgttatgagatacaataagttttgttttggtgagtggaggcatcaatcgtgaagtggccgctgggaggctttggtttcaaggtagctagatggagatagtgccatgaggcaagacaagagcgacggttntgttcattcaagctgccttatctctctataaatttggtggtcataaagtcggaccaagagcacatatggtgaggtgttgagattggttgtcgtgctcttttggatgcgggtg

SEQ ID NO: 20062 - DNA, 307 bp, Oryza sativa
  unsure (1)..(307): unsure at all n locations
agctcgcatnntttttcatatattttcattatgtgaacattcattgggcgnagttntatgttttcatgttgatatgttatactgattctctttctggtgatctttgttgggcagctggaggatctactggcaagtggtacgtgggcatttggtacaacaaaatctcagtgcacacagttgtatgggtggttaatagggaaaaacctgtatctgatccatcgncatcaagcctgtccatcttggatgatggaaacattatccttagtcattctaattcgaccgtctggtcaaccaattcaacaaatac

SEQ ID NO: 20063 - DNA, 378 bp, Oryza sativa
acagacaggtatcatgtttaaatccaatggaagcaagctgctttgtggcaagactgaggttcaccacttcagcttggagaactcggtctgtaaattagatgttggatatgcacagctcaacatccttaatgaattgtaataacaatatcccatggacatagcatgctatttggtacctctaatgttcacgttctataatccaaatactattcatgtcaatcaaacgtgttggaaatcggaggatgatggctcctcaacccataaaacaaacaatagttatgactgcatattatgagagagcaaagacagctgtgacccttaatacattgagcttcgtagttcattctgccataccttgctgatagaggatatgaatac

SEQ ID NO: 20064 - DNA, 391 bp, Oryza sativa
  unsure (1)..(391): unsure at all n locations
agcttcaatatagaatagcatacagaatatgacagctcattatgaggagaacaatgttggcccatagataagtttattttacaaagatatgacatagcaggactatggtagcttaatgccgacagtaaagcataaaaaaaaagtacagagaagttggactgatgacagcaatgtcgagctcaacaggactacaggagaaatgaaaaaaaggctgatcactatcatcatgctattcatctaccctataattcaccaacccactcttacacctacattactcattcatcanatccaacggccagaatcatccaatccaacggatcacattataccacgcacccnctcaaccttcgtatggaccccatccnccacttctctgtcaatcacgcca

SEQ ID NO: 20065 - DNA, 489 bp, Oryza sativa
  unsure (1)..(489): unsure at all n locations
tataattntagggcaataaaattataatactacctgtactttaatcttagaagggagaagacaccattaccacaactagaaaggtagcccgcgcattcgcacaggcatgcgtcatacgttaagtttgagacacttataagagcgaaatattaaacggagaatatctgtcacgatttctccataaattattttcgtcggcattaattgcttttataattttctaacctattagctttatattatatcatatttaagtaatatctataagcaattatatataatctactttatcatttgaaaagaaggtagacttattttctttagaaaacatgtcaacgaaagtaatagtaagtgtaaagcaaaagtaaggcgttcttcgttttttagttgcatatatattatcatatttgacctactcttttctttctgcgtagaatgtcttgattagttatgaatgtttganaacaatatatgatggtgcaatgtatg

SEQ ID NO: 20066 - DNA, 394 bp, Oryza sativa
  unsure (1)..(394): unsure at all n locations
agcttcngntaggctccaatatgctagagcatggttgatattatgtgttctaaggattagttangatggagagtggatggaggggcgtgaagtcaatctcacacaatgtgttcgaccgacgggcggaagtggttgatggtatggtttggcaaagcagagcttcagggttgtggggttatggttgatgatgatcgatgatggacaacgaagggattggggtcctatttatatggccagaagaagtggatgagctcgggcgccatcaacgccattgatgagcttggaaattgagcactgcangggtggcanggagctgtgagagggagggcaagatcaatttgagtggcgggaggccacgttcgaattcttactgacgaangcttgacttgaccat

SEQ ID NO: 20067 - DNA, 411 bp, Oryza sativa
ttccatagacactgtttctcaccggtgagtccactctattcttgtcttatccttagctttatgtacttggacgtacctggtgaagagccgacacagacgttccctgtggaaatcgatacctgagaatactcctgggtgaagtgtacatcggtatatctctataaggttaagaaataccaacatggacccagtcatgttccctgaagcagattactaggttggacagatacgatctacaatagccaatctaaacaattccttcttggagacaattggaccaacaacctagcgtccttcttgttccccatctcacggagaagagcaacatggagttgggaatgtcaatgttgaagatgtccctagcgaacacctgagtttagacccaggccgtaatccccataatgcattgcc

SEQ ID NO: 20068 - DNA, 394 bp, Oryza sativa
  unsure (1)..(394): unsure at all n locations
agcttcccacatttgtacaatgtggccaagtataatgtttattctgtcaaggatatgtgttctatgcaattggaagattctttcttactccccctatcgcctgaggcatatgctgagttcctacagctggaagaaaacttggatagcttaaaaatccaatctggaagaggtgacatctggagctttatatggaactctgatgtttacacaccanagaggttttacaaaccaaacttcactgctgtgcaaccncccagacctctcttgtggctatggaagacaaagtgtgtcatgaagataannagttttgcatggctcttggtctgcgatagactcaacacatgtgatatgttggacagacggcactgcgccacagaagatgatgatcttacat

SEQ ID NO: 20069 - DNA, 328 bp, Oryza sativa
  unsure (1)..(328): unsure at all n locations
agcttgtagcctcctaagaaacgagcaaggccgtcatctatgctctggagtgtggtctcttggaagcaggccaaggtgcactntgtgtcaagcatgagctcatggactgcgttgcagcgtgcaggtgaatttangcctctcacattccaggagatgagatctagactttgtgccatttaaaaacgaagagttctctatatctggaccggcccttagcctcttttaaaaaaggccacttcggggcgcatggcccattaacgtttggcggcccaattcgcaagtcagtgtngaaaaggcagcctttgggcaggcgcggcctgatacgcac

SEQ ID NO: 20070 - DNA, 461 bp, Oryza sativa
  unsure (1)..(461): unsure at all n locations
tatgtttgtaaaagccaacgagtacgccaaagctgaagacgtcgtcttcgcatcaaagcaatcgggtcccagttggaagccaaacaagggtacgccggccactggaggaggtggaagtaacaacaataaggaccgcaagcgttagcctgtggaacttgttgcaatcgccacccattcttctctacagcgttcgcgcgttaacacgttcgacaagatcatgaactcccaatgcccgcaccattctaactccaaccacgtggccaaagattgtttcgtctacaagcagtatgcggagcaatacaccaagactacaaggaagaattctgacgaataacaaagcacgtctaggaagaaagacgactgtgacaccccggcaggatntcaagaccaccgcaaggagctcaaccatatcttctgcggccgcctggcttatgagtccaaacngaagcagaagttgactg

SEQ ID NO: 20071 - DNA, 438 bp, Oryza sativa
  unsure (1)..(438): unsure at all n locations
agcttggggataatctctttcttggtccggttggttggataatcaattagtcatcatcaaagatcaactgtctcggttatctgggaaggaagcctttctgcggngatctctttttgtgctgggaaacctttntgtggtcatctccttttgtggtgatctctntctttatttggttggttagttaggacctataattggatactcctagtagtacttgtatggtactccctctggttcaataattntggacaaagacaccgtcttcaaaatgtatatttgagtatgatttttcattataacgcatgagananataggtaactattatntacatttattaatggatatgttcttaaccaaaatgttctagtgccctcaaactaaaataaaacttgtccgaaacccaagaatcatggaaccggaagaggggtattactact

SEQ ID NO: 20072 - DNA, 449 bp, Oryza sativa
  unsure (1)..(449): unsure at all n locations
tctgaatngtccaagtctggctacagntagtcagtttccctcactcactgtcttgcatgtctgtgatccattcaaagaagagatactccagaggttggtgaattcacacatgatgctggaagaattacatattgagtctgatacaataaattccatctgtcttgaccctctcaaactaccttcactcaaaaatctcgatgtaagatgccctattttgaagagatgcaatgcttttgccggcctcactttcctgaagatactatggatacgctgttctccacgacttcacatacctgattcactccgaagccagccggaggaattgcgtattctggatttctgataccgtataatcaacgtatatatcattgttatgtaccattctcattttttatgtacattctcattattatgtacagtttcagtatgtgcataacgttcggcattta

SEQ ID NO: 20073 - DNA, 392 bp, Oryza sativa
  unsure (1)..(392): unsure at all n locations
agctggtgtgcataaaatatgctcccgtgatcaagtatgtatttacgtacatgctccttttacatagtagttacagtaaaattatagcaaattatagtatagttagatttgaatgttcnttaacaaaacactatcgaaagttatatggctaatcgaacggaattgctaaagcaatatcgacggctctttcggctgatctgtgtcggtttcactggccatccgacgacagattgaaatatatctttacaatcttcaataaaataaattaaatctcanattaatttctaaattcttgaacaaatttaaattctaagtgtataaagagtttataagctatatacagccattctacaatccgatggaggaagctgtctttagctatatggataact

SEQ ID NO: 20074 - DNA, 451 bp, Oryza sativa
  unsure (1)..(451): unsure at all n locations
tagtanagctatactagaagactgcagtacataaacaggattatagcagcagcagcagcagcagcagcatggagtacgtaatgacagtagtgattaatgtactatcacagtctatcactcgactgtctggccggatcaatttcggacaagtaccattaatctctagtgtccgtgcttgtaagcaagcaatgctttaatcatcataaaaagaanagaacagttcattgtagtacagcacgttgcacctgctacctttctcgcttaattaattgtcggtcactggtttctccgtttacattattcgttggggcttaatgaaggcaagatcatgcaaatttggatctacctgctgcagctctgcttgcttaattgttnggcaaaattcagtcacatcttattaattagcatcagttgattcggttcctgttcatccagcatgtgctcagatctg

SEQ ID NO: 20075 - DNA, 393 bp, Oryza sativa
  unsure (1)..(393): unsure at all n locations
agcttattaatttagtgctggtcgggcagtttctccttgatctnngccatgaatgccttcttctcgccggcgttgccgtactccgcaccgtgcacgcctgtgccggcgccggtcattccggcgtggtcctgctgcccgtacgcgccgccagagttccacatcatatgctgctgctggtggttgttgcccttgttgtcgtcgggcagcttctccttgagcatctacttgattaccgttctcctcctccctcccatcccggcgtcctgagacgactgtacatacgcacacgagtacaacttatatttaataaaggaattcagaagcgacgcgattaattagatttatgaatggacgacagtgaacgtaccgagctggagcttgagctgccggagc

SEQ ID NO: 20076 - DNA, 421 bp, Oryza sativa
  unsure (1)..(421): unsure at all n locations
tatcagcaataaaagactacaaatatggccaccaagggatgtttatctagaatcaattcatggacctgaggtgctaggtttaattatggaacacttgaccagtattatcagatgggtacatagaaatggtcccaagatcaatcgctcaacacttataatcaaaagaatgcaatttagtcggatttattctgcttcaataatgtacggatactttctgaaatctgtcactacaaggcatcgtttggagctgattcttgctcagtcacaagaattttgcccaccaattcagtttctgaatgcacaatttaatagcacccagaaacaagaacacgaagagtccattggaggttctgcagaaatatcatcttcctcanaaccgagttctgttgttgatctgcatgactngaagagttacatgatg

SEQ ID NO: 20077 - DNA, 268 bp, Oryza sativa
atatgggtgccttttttttcctttttccacgggggaggggttgaattcctccacaatctctctgtagtgttttggttttctatgttttattcttttgtctctatttcctcaatgatttggattcatttagtaactcgtgtagtggtttattttatttgtttttgtgcattatgtttcgggatggcattttatagtctcactttggtagttttgatcttttttgttttgtgtttgttagcttgaaggttccttttattgtggtttgaat

SEQ ID NO: 20078 - DNA, 499 bp, Oryza sativa
  unsure (1)..(499): unsure at all n locations
agcttggtatgatactctaattctttatgaatagttttcttatataattatactgagcaaaagctacagcaacatacaaaacagttagattttgctgtggttggccatcacctcattgacattcttatgggtgaaaagagcttccaataaataaactgagtgactcatgcttaatctaactggaaaaaaccagtgtgaaaaagtgaatcantactggaggaaagtgatgataagaagagatctgatagcgtgggtttgaaagataagtctggagttcgtcattgcaactacaactgtaagctcccttctatgcttttattntagcaattcaactacacatacactgtggaatgttcagacanttatcttgacaaagttaggtcagctgtcaatctccattcaatggtgagttgttcggtttgataaactcaattaggctagatacatgtcaacagaacacagtattntgatgacctcatatctcaataagctactaact

SEQ ID NO: 20079 - DNA, 231 bp, Oryza sativa
atcctcttagtcacctgccgcatgaagcttgaatggtcgagtgaggcacgttttcccttttctctcgctacagagccgtactgcatgcgcatgagtcactccagatctgataggcccatcctcgactctacctctcttagagttcgagtcgaatcaatcaggttctgcttgccctgaaacatgagctgatctgggtatagcgctcttactgaatgtactttagaggtgcca

SEQ ID NO: 20080 - DNA, 433 bp, Oryza sativa
  unsure (1)..(433): unsure at all n locations
atgcaagcttcggatgtgcatcgactacaccgaccttaacattgtcctacttttcaacgtactactcgaatttctttgggtagccagctaggacgcaatgttgaggcctatgttgatgacttggttgtgaaaacgcgcaaccaagagaccttactctccgatctagcggaaactttcgaaagtctccgctccacccgcataaagctgaaccncgataaatgcgtgttcggcgtgcctacgggcaagcttttcgggttcttggtttctgcccgaggcatcgaggccaatcccgagaagatacgagctatagagcggatgcgccccccagcaagcttatggatgtgcagtgcgtcaccggctgcatggccgccctaagtcggtcatatcgaggctgcgagagaaggcgctatccctatttaagctcctcatacgc

SEQ ID NO: 20081 - DNA, 320 bp, Oryza sativa
tctatttatgcgctacaatcaggaaacatataggactccgaatacaagcggaactatattattctaaaacaaatatgcatggcaagcatatctaagtctcctttattctagctatattgagggtcgaaattcggctatagcgaccatcacacccggtttagagaatttcgcgaaagcgagatcaacctgatactatgtacgcatgaataaactcaatgcaataatcagctgccagatagcacgagtacataaataggttgctaggccttctacgtctcgaaccgacttatagaaccaaagttgggagaacaggaggacac

SEQ ID NO: 20082 - DNA, 104 bp, Oryza sativa
tcacccacaaacacccacccaaaagagggggcttttttacgccccagcgaggaaaccaccggacaccaacaacacccgcaacagcaaaagaaaaaacccgacaa

SEQ ID NO: 20083 - DNA, 122 bp, Oryza sativa
  unsure (1)..(122): unsure at all n locations
gacccaagcacgcgcagcaacaaggggggagaagaagaataagatagtcgnccggcggccggggcgaacacaaaccaacccgagaagaacccgaaatcaacgcccggagaagacaaaaacga

SEQ ID NO: 20084 - DNA, 301 bp, Oryza sativa
  unsure (1)..(301): unsure at all n locations
agcttctncttcaagcgcatgagtaaatgttggattcttcgtgtctctgctttcaaaatgctanacagtgtggtttgtgtgaataactgctgttatgaaagttgctctaaattatcagattaatccattgttcaagngttgatataatcgaaacttaataatacacacgttattaccacctcattgtgcgtgcacacgcaaatattatctncatattcatatccaggagattctaacaccacatttattaatacaccgtgtggattattcatctttgtctgcaactaatgaagtgatactt

SEQ ID NO: 20085 - DNA, 339 bp, Oryza sativa
  unsure (1)..(339): unsure at all n locations
taagatttttttatattcctctggaaaatgagggacaacaaattaaatacaaggtcacactaaactcatgaaacttttgtcgaaaatgtantatacagacaattgacaattcacatactttatgcaaaagacttatactcaaaaaatacagatctttactagatccctgctaaagaattgacagtttcgcaattataatatgaatctgacacaacttctcaaacttaggtaaaataataatatgtcatgaatacaagagtatactcctcgttaaaaaacattatttatcgacacttaccatttataaatatacattatccataaaagtaattgtaagac

SEQ ID NO: 20086 - DNA, 485 bp, Oryza sativa
  unsure (1)..(485): unsure at all n locations
actgaggcatgcaagcttcagatgtgcatcgactacaccgaccttaacatttgtttgttctaatgaccctnaccccctgccacgcatagatcagattgtcgactccaccgcggtgtgcgaccttgtgtgttctctagatgcatactctggttatcatcacattcgcatggctagggaggatgaggaataaactgcattcattacccccgtatgaacttattgttatacgacaatgcctttcggtgtaaagaatgcacgtactacttttcaacgtactactcgaatttctttgggtagccaaataggacgtaatgctgaggcctatgatgatgactcggttagtaatacactcaaccagtagagcttactctctaatctagcggaaactttcgatagtctacgcaccacctgcatatagctgaaccccgacaagtgcatgttccgcgtgcctgcgggcaagcttctcgggttcttgatctctgccc

SEQ ID NO: 20087 - DNA, 504 bp, Oryza sativa
  unsure (1)..(504): unsure at all n locations
actcagctataatgtgccaggatagttgttactttgaatgtgcaaggatctcattaatcttttttcccaaccaaataggtcccgttaactatattgggagaaaagggtgagcaagacaatatggaagaccttaggatcagttggggtagcgaagggcattccagtaactattacagctcttccagcacggtcagcaaaatcaagaccctcactaacctgcataagtataaaatgcataagtagtagaactaatatttgaggttagtcaaaatgcaacaatctgaaaatgaaaagcctaccttgttaatactcaaggcatctatccttccaataatatgtgattattatgctntgcttgantatagcacttagtctttttttagcagaattatagcactatagttgaatggctactatgtttattagaattctatgttcagtcctgctcttagtagtgtggtccatcattcataagattgtagctgtacctcataacatcattat

SEQ ID NO: 20088 - DNA, 399 bp, Oryza sativa
  unsure (1)..(399): unsure at all n locations
atgctgctctgngtctgtggctccaaatgtctattactcttgaagaagtaccagtagggcttcgaatggcatgaaattcagcctcagagcttgtttggctcccaacctgatgatcttctctgatcggcttgtgatcatgattttgatctcatgtgtcatttgctttctgaaagaagagtggattttctcgagtgttctttcatcaacatctcctaagagctcaatgataagcagcaatcttccatccatggcatcgtttgattcatttcgatgctctggttgacaaatttcactgaaagtttctgccttctcatatctcagatcatcttcactgtaatacatgatgagagagaagtgttcacgcactctcttgttcacggagatatgttcaacgagagt

SEQ ID NO: 20089 - DNA, 387 bp, Oryza sativa
  unsure (1)..(387): unsure at all n locations
ctcccgatatacgctatgcgtgtctagatcgnnacctatatttttatttttatgnngtttttaaantaaacctcgcggctatatcatatgattgtgccgcattctcttcaagttgaccgaaaggggatttgacgctgctgttctgtcctgaaattgggctgcccataacatgcatggattaaaaaccaagcctgaacttttcctctggccaattattttctgataatgtggagtgtctgtggtgataccgtgatagaggctactgttccatggtcctgccactttcaatntaactatcacttgtgttcaattgtataaattaactagcaacgcagttccaaagttcggcttgggtgacagttccagtaccacttcatgtggaatctg

SEQ ID NO: 20090 - DNA, 481 bp, Oryza sativa
  unsure (1)..(481): unsure at all n locations
gctatcaaactcattcattatctcatgtatctctgttatttcatgattgacggggaacaactattaaacaaaagtatttgaacactgatatatgagtattatgtgttgcttcntgactagcgctaggcttatcaagtactgcatttgctccagtgaccacttggcgattggcatgtctgcttccttaacatgtactacagctttgaacagacaatagctttcttacgctcgggttcttcatcttgtacctgatttctttggctgctgtgctggaacattcaaaggtacaatgccgatactggcctctgtcttgtcaactgatggcggaggctgaaattgagcattgacaccttgtggtaatgcactcgctggagttggaagtgttgcaacgtggtctatatgactgcttccggatgcatggatgacaattcgctgaggagcaagcttctgattgcaaggagttgcgtggactgacgtgctg

SEQ ID NO: 20091 - DNA, 375 bp, Oryza sativa
tactaatccttccggggaatgcctttatcataaactctttcttggacgcactttcttcattgtgcttgtgtgctcttatcattactggcactccgtcacccttagcttcttcctgtgatattacttgttccgattgtaccatgctatgcgccacaggctcttgtatgacctctgcatccctttcaagctctgttgttcatgcattggttattcaagctctagttgtgttaacagtgaaatatggtaagcccgtaagagaattatcacgtcgccaacagtcggatttctgctgtattcggtcgacgaaattaatctcgtaaaggaagcttatgcatgagtgaccgagttcaaggaggatgcgacatgacagtttat

SEQ ID NO: 20092 - DNA, 482 bp, Oryza sativa
  unsure (1)..(482): unsure at all n locations
agcttatgaagagttcaagcatgttctggtggtattgatatatggatttgatgatcactccctatcgnctgtcagtgcatgaggttctatgtccatgttatgctttntgagtttttcaactgaagaaccatcacaaggaatantttaatatttttctatcatttccattcgtgcagattcacttctttatgtagcaactcttaaggcttttcaacattaatagatctgagaggaaagaaaacctgtaactgtccatggaagtggctnttgattgtcttattaattcagtagttacacttgagcgccttactatttacctattcatattgtgaattacattatttctactgcatttntgaactacatttcagattgcaaagtttgatagttttcaagactttttactgaaccatcagaaagctggtattatttcagaataatggttngtcctatgacaaatagtttgctctatagtattctat

SEQ ID NO: 20093 - DNA, 323 bp, Oryza sativa
atacggtcagaagctatatacagccatatgcgctttattctgggatcagacacgcgaacgctaactgttcggaacagaggtattaccggaagtagaagagaaagttcgaatcatcagggaaaggttgagaattgctcagtcttcacagaatagctacgcggataaccgttgaagggagctcacttctgaggaatgagacaccgtgtatcttcgtgtcacctcgctccgggaggacaccattttcagacacaacgctagttggcaccacgcttcgtggcaccattccataatttggaacgcaggggagaagctgcttatcagct

SEQ ID NO: 20094 - DNA, 447 bp, Oryza sativa
  unsure (1)..(447): unsure at all n locations
aagtgactgagctgcaactgagacgctactacaaactggtatgatttttttangacagngaaataaactccaattaaatttctttgagtcaggctttgggccatggcccacgtggcctaatgcctatctagttccaccttcttgtcgcacatgacttataaagatagtaattcacaaaactacatgtatcttacacaatgtatcaaaaaaaactacatgtttaagagcttggttcacaaaactacagatatagtgttntcttgtatcacaaaactacaggtatgttatacaatctatcacaaaactaaagatttaacaactcgtttcacataactatatatttagtgtattcgnttatcatagaactacacatttagtggcttcatttatcacanaactatagatttagtgtctccattatcaccaaactacagggtataaaaatgc

SEQ ID NO: 20095 - DNA, 358 bp, Oryza sativa
  unsure (1)..(358): unsure at all n locations
ttttcaattcattagcttgttatcttatattnctttccccccattctattctcatggccctgcgacgcccgcgtgttgcgcatntgtttgctccctcggtggtaagagcccaacctctcccccatctacatgaacgattcttcactaagtgtgggggctaagttttctagccttatcctagccttaagttgagccccgggtgccgtcgacgcccgggacccagtgtgttggctcttccgtagcggctggctttggtcccgccggctggctacggtacccggcctggctcaactgtggacggggattgctggctctagagttttcggctctcacactcatgcgaaagtaatcgtgcatg

SEQ ID NO: 20096 - DNA, 392 bp, Oryza sativa
  unsure (1)..(392): unsure at all n locations
caactgtagtaggcagcgcagaagagcatgtagatgtacagacaactgctgtaggcacggaagggtacatatatccacagtgcaagaaaggtggcaaggtcaggttcaactgcccctcacatgtgtacagctttggcattgttctgctggagatcgcgtgcagaggcaagcgcagggaggagacctgcggcctgtaccgaaacaaaggtgatgtcgtcgaggctgcagacacaaggctagagattggtgctgactttgaaaggagggagatggagcgtctcatcatcttgnggctctggtgctctgcctttgagactcagcatcggccgaccatgcagaaagcaatggatgtcctagagtgtaatgcaccgttgcctgaccataacttcatc

SEQ ID NO: 20097 - DNA, 466 bp, Oryza sativa
  unsure (1)..(466): unsure at all n locations
agctngacaagttccaactgagaatggcaatgttcttctcttcatacacaactgcatgtntattcttagaacaatggcaagaagacaagcacaatttctggaaattgagcagaaacctatcggacatacgcacaacacagtgaccacaaactgagcatatgaagaataactctggaatcgctattttaaggcgggccactggttacaatacttgcccaatattatgaaagctagatagggatactctaatagtgaaacatgaacaatcatgcaattcatagaaaaagaacccgcctgtacactacagactgttcctccactctctataacagcatctgccgctttctgaaatttttctataccctgagatttctttaccatgagcacaagtaacgtcacttgtgacagcaatgcaccctgtatgaactacccttgcatatgactacgataactggagacatggctg

SEQ ID NO: 20098 - DNA, 467 bp, Oryza sativa
  unsure (1)..(467): unsure at all n locations
agctntacacatcanacttgtgcatctagcttcccttctctattaaaccataagntaattaatataggtttcgatggcatagatttatcatttctcttgatctattaagcgtgtgctaaaggacacgccgcgcccctcgatcgtgtcgtgtgtgcatatgcgtgcagcctatagtaataatatatatgcactgaaacagtataatcaattggtaagtgactgtcacgccccgagctagtcccgactggaattagcccgtgacgctccaaattaacctgttaatcgataccaggcccaggaaacagtgctggtatcacaggaagatagaatatcacagcaacagatgtctctttattatagagtaggagtacagtcatattgtgctgcggacagatcccggactcacaactgcattacaaaagggatacggaagccgtgactcggaccaaacaacacaagcgctactt

SEQ ID NO: 20099 - DNA, 351 bp, Oryza sativa
  unsure (1)..(351): unsure at all n locations
atggcctatgtgtatgtgaggagttgatccttctatgtggcatgaggtatccctgngtcggcttgcgaaaggctttgtcgcgaacctctgacaccggccagtgtctggagtaagttcgtgtcttgtgggtaaagtgtacccctctgcagaggttaactaactgttcgaacagccgtgcccacggtcatgggcggatgtgaggtggttccccttgcgtagatttgtttgcctgcgctttgtgaaaagttgttgtggtgtgggaatcgtaaccacaatcagcctatgtggcagatggatgacctgagtggtcagaaaccaatctgtgtgattccggatgtctgcgggcatcat

SEQ ID NO: 20100 - DNA, 478 bp, Oryza sativa
  unsure (1)..(478): unsure at all n locations
ngcttatgngcatagacatggagagggacattcattctgcctccatagcttggtgccctttaaggtctcatgatgtcccagtctgcaatgggcactgcaagaaggctacaaccaacggtgcaatttcacccaaatcagtaccagctccctctaatatggtttctgctgttagctcaatgctcttatcccttggagaggatcccttcatgaaagaacttgtaggtactcctcagcgttacgtgcaatggctgatgaagttcagagcatgtaacctagatgtgaagctgaatggctttacactcaataatttgagtgtataccagagtccagctggagatgctgctgaccatcgagcaatccattctgagctgcattngccattttgtgcgcagtgcgagcaccatcttctgccgatctatggagtagtgcatattggctaccttgacggcggagatggtgaagtgattgatcgatctca

SEQ ID NO: 20101 - DNA, 300 bp, Oryza sativa
gctcgatcgaaccgtaccatatatcccaagagggttttgatatttactctccgaatcctcaaagccagcataatcatctgactgaccgagccggacgctgtggcctctcaataacttcctcgtctatctgggccgccaatggcatgattcaaccgctgtcacatgtcccaatgagggtcggagtttgaaacgatgaccccaagaacaccatctgaaaaacgacagatgcaaggacttcactggcgagtaatgaggatgcatgcgagatttactctccatcataaatggcatgcatgatct

SEQ ID NO: 20102 - DNA, 478 bp, Oryza sativa
tactcagctttggcaatcctcacgaccactgatgatgttcaggtgacggttatgttgctgcactggctgctgtcaccggcgtgtgccgcagcctgcagctcgctgctgctgctgcccggactctggcaatggctgtcggtgctaatctgtgatgcttcgacgacgacatgatcatcagctgatgccgcagggcccttgcagcaggtgtgctggccgtagtagaccaccgtgtacatgacgggatgatcgccattgtaactgttggcatggtgcaggtcttctcgctgctgcaccgtctttgtagccttgcacttctcttcctgcctgtaggtgcatctatagtagctcctgctcaattcagattgatgcagatatatatattagttggcgtttatactgattagatcttgataacacgattaatcaacggtgtaattaactgaatgaaactattaattcatgaatgtctgattacata

SEQ ID NO: 20103 - DNA, 376 bp, Oryza sativa
  unsure (1)..(376): unsure at all n locations
attatanggggcgctatatgcaagagagaaatggtgacacaatgatttatactggtgcatgccctcatgatgaggtaataccctattccagttgtttggtggattatctttgtatccgttgttgagtgaagagagtgtccaaccccctaagcgtgctgcctatcccctttatatatcatcagggtgatcggcggcaaggtagatgtggtatccctcactatccgggtacctgccatccttcaagatatggcaggctaggtttccattctcctatttcncgtcatttatagtaacagactacatgggcctatgcccgacaacatttaagattagcctctgagaccgcggtggctaccccgtacgataactcacagta

SEQ ID NO: 20104 - DNA, 457 bp, Oryza sativa
  unsure (1)..(457): unsure at all n locations
tcctcatccatgctgnggatacttcgtgatctgcaggttccattcataccaaccaccgatcagctctgctgtctgtttcccttcgctctgatttccacttctcttgcctctcaatcccgatctgttttgctagtcatctctntgtgctgttccatgcctcctttttgctctgatttgcacttctcttgcctatcaatccccaatctgttctgctccccatgcttcatcaactgatctgctgtgctctattctaccttccgctctgcactttcatgcatccctgctgcccttcacctcgccttggccatgcaacagcatcaccgtgccttcctggcacccctcagatgtcatggtcacttaggctgagttcacgaggtggagtaccacgcacagcaaacggcgttgccctttaacgcgtgattaattaagtattagcctacaaaacttgaaaatggat

SEQ ID NO: 20105 - DNA, 497 bp, Oryza sativa
  unsure (1)..(497): unsure at all n locations
agcttataaggcatacaacanaatattcaatgaaaagaatcatccaactatcaaatcatacatgcatcacataatcacttctaaatatagtagatgatggtcaggatattacgccaatgaaaaaaagatactagtagatctgcactcattcaagggagcatccatgcctgtccccacacaatgttacaggtttcaaacagctggaacgcggaaccttgcattattagtagtttcaaactttcaatcaaaccagagaagactntatgtttctatccatccgcatcagagataaagaatatcgtcatactcacatttggatcagtaagaagacaagaagacagtaacacgataatttcttttgtctaagaagtgctacttttgcccctccttgnacttggaatttgaactacgtgaagcacttggaactcccaagtcactatcaccaccacagccgccaccactaaatcttggtggttgtacagacttaatggcatata

SEQ ID NO: 20106 - DNA, 492 bp, Oryza sativa
  unsure (1)..(492): unsure at all n locations
atggncccactggtcattactttcctttaatgtgaacatccttgctatacttatatttacttgcagatcagttgcctgccaataccgctgggcaatttgaagtccagaagagatgaacaaatgatgaacgcttcttttaatagttacttataatggtataactgttctatgcagaatttaaaccttctgagaagatcaaattgttctgttctggaaaagagcttcaggatgacatctccttggctatgcaaaatgtgcgaccaaactctattctgcatgttgttcgcactgaaatacatttatggccaaaagcacagagattgcctggtgagaataagcctctacgtcctcctggtgcattcagganaaaatctgacttgtctgttaaggatggacatgtatctttgatggagtaagtactcttactttntctcatatcatgggagtataatagttatcgtanacttatccacatgcaaattctaaatgttg

SEQ ID NO: 20107 - DNA, 299 bp, Oryza sativa
gactcgctcggcgttcttctgaacaccggatgctctaaagaagagtatgtccccactgcggtcatatgcatcacaatttgtcaacaactatgaataatgatctaacaaatactcaactaggggcgtattaatggcacataccatgttgtcagattcatctagaagataatcataagcactgtgtacatgaattgaagagtgcaaccctgaaattagcttgtacagtgcctctctctgctgacacatttcttcagacggatctgataaaaccgatacactcaattcctgtgtcagataat

SEQ ID NO: 20108 - DNA, 237 bp, Oryza sativa
  unsure (1)..(237): unsure at all n locations
cggcacatcgattggatcagatgattcgctgattgacaccggatatgctatatactgggatcaagggactaggttgactatcattatcaaaaacacatagggtaattggatcatagattgcttgactatctgtntatcttgttcagcgaatcacataggtgggggctacacgtattacgtgcatctattggatgcacctgactttattatatagccctccacagtcttcatatttgg

SEQ ID NO: 20109 - DNA, 458 bp, Oryza sativa
  unsure (1)..(458): unsure at all n locations
atcgatcagtttcgaccatcaatattatcttaatataggagaactattatcaggtatactaatcttttgcagagaatgaccataaagtggaggagaatcgacatcaacacaaacgataaatcaatcgggcgatgtcgagaatcagacttatgtatgaatgggccaagaaatcagaattgacacaacaaactgggccaaaattcacaagtctacataaaggagcaatagaggaggctaccagccgaaaggtgggctggttgggccggcccctggtttggccgaactagggggttcggccgaacctcccgtggcaccgatggatgcanggtttggatggacggctgggattgatcctcaatgatggttggagggtattaccgaccattccaaccatcacaaccgtcattacctgcctataanaggagctcctcttctcactttacacacacacctcaagc

SEQ ID NO: 20110 - DNA, 427 bp, Oryza sativa
  unsure (1)..(427): unsure at all n locations
agcttggactatgccaatntctgcccagtgagttatcttgctagctgataccctcatataccaagctggctagctnttttcggctgagggccaagatttgaaggtattcttccagagacttaaatcggggttggcaaatctaaaggggattcggttggtctcaccattgatgaactcggtggggtttgggttgccgattggaccaagaaagaattaatgctcatcggttatgctaggaaccgcaacttgatgagaaagatgctacagggaaagaaaatcgaagattgagcgaaagaagaaccaatcttgtacgtaaaagaggggatttagccgatggtacctacctcgacgtactcggcagttggcgcgctcgaatgatcggcggaggtcgacattgtcggtgatggaggtcggcgctgctgggagt

SEQ ID NO: 20111 - DNA, 481 bp, Oryza sativa
  unsure (1)..(481): unsure at all n locations
cctcagcttcacgtngcgaccaatctgagttggaaaacatctctagatcatgcgttgattttttgctcatgcgttcttcaatgcaaaaggcatggtgatgtagcagtaagccccgaagggcatgatgaatgaagtcttcaagcagtcggactcttttaaacggatctgatgatatcctgagtaacaattcaggaaactgagtagctcgcagccggccgttgagtcaactacctggtcaatgcgaggtaacccgaagggatctttgggacaagatatgttgaggtcggtgtaatcaacacacatacgccattgtgccgtcttcttccgaaccaggaccgggtttgccagccagtcgggatgtaggactttcttggtgaagcctgctgctaacagctnggtcaattcctccttgatcgcatccttcctatcctgtgcgaaagggcagagtcattgcttaatgggtttagcgccttcttaacat

SEQ ID NO: 20112 - DNA, 481 bp, Oryza sativa
  unsure (1)..(481): unsure at all n locations
agcttgagttntgtgctgacaacccacgcatctgtgtttcgtgttcaaggctatgggagttcgctaatccaaatgatgagacacaattgctccaccttggtttggttttgattgatcaggaggtcagttcttcagagcactgagcacccagctttctgtagaaacagattgctttactaatgtgcttttgaaacagggcactagcattgcagcacagatataccctccctgcgatctgcagttcagagaaatcatcactgaaggcaaagtgtactatcttgagtactaccgtgtgagggaatggagcangcgatacaggccagtcaacaacagcctgtcaatttgttttacaaggtggactaaagntgaacaggttgcagatccggcagctgatttccctttgtacacttactcactcacaccatatggtggactccgtcagcgtgtcgataggaaagaagaaatcacaggtattctcatt

SEQ ID NO: 20113 - DNA, 383 bp, Oryza sativa
tagcgaggatcgaattgaagcacagaactcatgcgagcgagctatctatatcactcttcttcagttcttctgctgctactgctgctgcgggtgacgagacgagcataaataggcggggagatcgagaaggtcacggtgaggtggggagcggtggtggtggcggatgcggcggccacgtcggcgggggagaaagaggcggcgacgtggagggcgacggcgtcagaggttggtggtcgcggtcgacgtggacgtcaagggcaccgtgcgtcgcccgccacaaaagggtcatgaagagtccacaatgcgcgcgccagtagtcgcggcggcagggtggcggtttatggcgccacgtgtcagtgaccggtgatatgcttatagcccta

SEQ ID NO: 20114 - DNA, 201 bp, Oryza sativa
catgtgtgacatgaggaattcaccggttgatggttccatccgaactgattctctttgtatccaatgacctatatgacgtacttggaaaggataggtcgacaaggcacagaagagtgattgagtgctccatgcgcaccatcaatctaaccactgcatgaggagacgtggatacttttccatattctgtgccgcggaagacac

SEQ ID NO: 20115 - DNA, 334 bp, Oryza sativa
ggactccaccattatttattgatctcttagaagggagagacagaaacccacccatacgaagaatcatatatatgctgcctctcttaatactacatgatcacgccatttatgacccatactatatattcgtggttctcaaagctgagataaatgttcaaagattccggaacctacccacatacaagcatgaagaaatatctctcccaacgcattatagatcatgggctcgtgaattccatatgtgcaaccctcgatcagatccttcaatctgatttatgagacgctgcgagagatgtatgcacgagacttggacatggaagatacaggactatct

SEQ ID NO: 20116 - DNA, 476 bp, Oryza sativa
  unsure (1)..(476): unsure at all n locations
agctntcatgattgcttgtactacagacattatttttgactataaaatattatagngggnatgcacaaaannttgtttgcgcctatgtcataattaaatcacacctaaacgtcttgcgatgatatgtattcactaccaccttgatctagacagctaaatcaagatgggtttcgtaagattaaatcagctaacggagtcaatttagatgaaacaaggataaacacaagtctcatgagtaagcggaaggtttacgggataaaccttcatagagatttcgcattctcacagtgaaggcagacgatttagacacacatcatcaaagatagacacatcaagactatacctatgcaaataagttagtgcgatattgaaaaagagatttaaatggctaatcgtgttgaaagtggattgtgactcaattaaaactaccacttattcgcgcgttgcacgactttgggtgcccgtaatgacaatca

SEQ ID NO: 20117 - DNA, 329 bp, Oryza sativa
aactaccatacggatgagtcgatgagactaagtaacatgtgaatatgcagatttagagacctatgaggaagaggatggggagtacaccaaccttgggaatatttgttccggactcggtgaggaggcgggacgctacaggcggtggtcgacggcggtgcgggtctaatggttctgcagtggtacgaatagaggaacgcgcgatgagggaggagtctgcggcgtctggtgactgggtgagtgcgaaccataggagggcggcggtgtccaacggtcgactgtgacgatgtgggggccggcgtggctatgtgcgggagtccggatgatggatt

SEQ ID NO: 20118 - DNA, 478 bp, Oryza sativa
  unsure (1)..(478): unsure at all n locations
agctntngtgcaccaacatcaaaacagacgatctcttaatctgcttgttctagtagaggctagatcagccatggcttccaaagtagaaaagcaaagcaaggctcacaccatcacgtctgctgccagcagcccaaagaccaaagatacacatagctttctagcactcattctctctctttttaatcaaagattagtatcatagtctagcccattggcaatacacaatcacttcatcgatataacctctcgcactggatttcctctccctgacaactcggtagctctttgtttatgtatttagaaaatgggctatcaagttgtatggaattgtatgtacttgttgtccatcgttaagcttgcccaggctcaattggatccaccactggatggaagtatatgtctaaaagttccctagctagtgtcagntntggtttacatatcttgtattattaacatatgctcgctagttatntgcatg

SEQ ID NO: 20119 - DNA, 280 bp, Oryza sativa
atataatcaagcaacttttggaccacaaggccaagagaagagtactcaccagtactccaatccacaaaaaccaataaatccaaacaaaatatacgcttatttgagctttacgaattttggcatacaaatcaacttgctaattagtccaaacaaacggatccttaatatatgtatattatccaacggtatttgattgaaataactaatgaataagaatagtgcccacgttttttatatgaaaatagctggaacaaccttttaataatacaagtttgtcgag

SEQ ID NO: 20120 - DNA, 435 bp, Oryza sativa
agatgctcgacctgagtcatagatgagtacagagaatgaatgatagcatacaggagatatctcgtccgtaaccacttagtttggagcagatctgcattacagatttcttacagggcctctcatgacaaaatggcatacctgctgtcaccaacatagtcagtagaaaccatgtcttcctcaacatatcctatgattcccttgagctttccctctgatgcagacctgtataacaattatcatattctcggcaaggacacactactaacttaaggataacttgtgcaggtctgcgcccaccatcacacgtaacttcactgttctaggaattcttcacatgtatggttcattaacatacatcactgagcggtatcccctgccacatgatgctgtcctagcatcagtgcgcattatgagatgtacatctcccttgcggtg

SEQ ID NO: 20121 - DNA, 248 bp, Oryza sativa
  unsure (1)..(248): unsure at all n locations
ccatanaaactcagctcggaatcagttcgatcggatcggcgaccttctctccattactaatgtacctccgccgcggccgtcgtcgagggccttctccgacgcctcccacccactttaaaaagacccccggtgtatcctttacccgtcgcagccctctgtcttcgcgtatgtgttccggaagagccctagcggcttgtgccctagcttcgccgtcgccgcccgcgctttagccgagctccgccgacgct

SEQ ID NO: 20122 - DNA, 365 bp, Oryza sativa
  unsure (1)..(365): unsure at all n locations
agcttaaagtagttggactctgaccatttcttatcttcttataacctganacggagggagtacaatattatacttaacaaaataagagttctaaacgaaggtaaagtatattgtcaaattgctatttagctatcaaagagctcaccgtctgggtcttgtgtatcaaatgccttatttgtgaagggagaaatatggcatttttttcacggaattataactagtttgtatgaaaaccagtcaaatttgtgttctagagaaggtctaaattacgtcaactcttgttacctaatcaagncgtatggaacatgccaatgctactttgaaacttaatatcttgcatcacgtctgactttatctacaactag

SEQ ID NO: 20123 - DNA, 233 bp, Oryza sativa
tcctgcacaaagctgacttgcccacattgttactgggcctaccactaatatggaacctctaactcttgaacatcgtatttaaacaatccttgacgggaaaaccgccatcttggaattgcgtgctttgaatacttcaatgaaggaactttactgagcatccacctcttctgactaaaagataagagctggactcttctaacctgtcagaaagtccaattcttactctttaatct

SEQ ID NO: 20124 - DNA, 465 bp, Oryza sativa
  unsure (1)..(465): unsure at all n locations
agcttattactaacaatagttggagtattatatcttgtaattgaccaataaaacgagtcattaactnggacgagtagtacagcactagctattaattactatatgcggcttgcgataattggacattagtggtaaactaatccaggttaggaatcgttccaattcccacattgaggcaagccgatatacttcagcttgtcaccactcaccagcttatattgtactctagagcaataatggattaatggcgggacgcgtgcgcttcgattaataatgcaccatccatctccgtgcctatgtggcaatccaagcactacgtacatacatataagcactatctaggcataataatccttcggtttcttgtgtgttaattataccgccttaatctctctaaaatgacgagtntgatagtctctcctgataagaatctttattatactagttgataccccacgcctttgc

SEQ ID NO: 20125 - DNA, 459 bp, Oryza sativa
  unsure (1)..(459): unsure at all n locations
ntgtgtctctaagagcaagtattgttagttctattcagcatgtggtatccgctcccacgtcatcaaaatcctacgtggcggagtgagaagagaagagagagaacggagcgggcttccaggcgctaagccgccgcttcgttcctccccttgatcccgtgcgtctctgccgccgnccccaacctctctttcttcacgcgccaaatccccctccctcccgctaaaatcgagtcctcccgctccaatccgtcatgtaaccctcccaaatccactcccatgccaccaaattcgtccncanatcgcctcctctcaaaccctagaccccaaattcgtcctcgaatcacatcaagatgaggcggcagtccaaaaggatgtttgcgccggcatcattggaggttccgccgcggcactaacaccacattccatggtgacctcctcctcaccatgcttctcgacggggta

SEQ ID NO: 20126 - DNA, 492 bp, Oryza sativa
  unsure (1)..(492): unsure at all n locations
agcttgtcnggagaaaatgatcaaagaaaatatgcgttatcttgatggttaaccatctacacgactngatgaagctcagattctttagataatttagcaccacttattgatgctngtagctntacatttcctgaaaatcttttgcgactgcattgtaccttctttgggtggcaccccttgaggtacggtgtttctctccttgtttaatgaaattggcagagctcctgcctttcccctcgaaaataaaatatatcggataacatcccttttcttttcccttataataacatgctttaatagagctatatagaaaacaagatgatcctatgcacatctgacctatngccctttgtttcagtaaaggcgctctttgttttagcaaaatcatcattgaaaaaatatgagatggatgaagaggaacgtgaagttagggtatgattaattaacttttaattattacaaacgttgagaaatacggttacttgatacttt

SEQ ID NO: 20127 - DNA, 493 bp, Oryza sativa
  unsure (1)..(493): unsure at all n locations
gcttctgaatatngngagaaaaaaacgattctctggcttcatttacttatttcaatttacatttctatagataactagaatccttgtcatcttaggttttcaaaacataatctaatttcttagttagacatatccctcaccaagcctagaaacttaggttagtttggttaggtgttaaaatcgcctattcacccccttgacgttttgatactatactgtcgcttcatctcccttgctctcgtcgcttcaactttcaatgaggcctccatcacaggtagggttctcgcttgccaaagctagaggtagccccccatgaccatccggatatagattctgcaccttctaagctcanagctcaagcaccttgcttccaatcctccaaatccactttctgcaaccctagctactgcatcaccaagtcatcaactttcgttgctctgatgccacttctagatccaaatttggagcggagagctcgcatcatcaatgggag

SEQ ID NO: 20128 - DNA, 471 bp, Oryza sativa
  unsure (1)..(471): unsure at all n locations
atcctcagagtcacctgaggctgcagctgtcttaataacctatgatgtaggggcattatttattccctgagtgaaggcccctnggagatggcaatctcttgcatcatgagagacacaatgtcgaactgacagccctgaatggttgcatcgatgacataccaagccaccccctaatatcatcattgttaccaaggcgagggaggatagtagctctcacaatcctattaaccacacttgggatagtcctcaggccggcaacctttccgtgtgtgtaccgcactccatcttcataaaactgagagagatagtctatggagagcggattatgggtgtgctcctcatgcaagtcatctccaaagtccaagcgaatattgatgagccgccggaattgcctnctggagatagaacactgaagggtgtcggacatgcacttcatctcactatagtctctatccacccactctgtagcat

SEQ ID NO: 20129 - DNA, 500 bp, Oryza sativa
  unsure (1)..(500): unsure at all n locations
tatntatgggacgtagaaatagtcaaaagtatatgcctattattataatntactctaatntaaanctatgcttnttaaagtttccaacaggtttattttcttatttaatagttctttttcctatatcaaaggtttccttttcaaaaaacgtgcaaaagcaaatgactggagtaaccgctggtttgttctaaatgagagaagtggaaaggttggctttctgtttaagcatcttacatcccgtaacgtcatttcaaattttcactgggtttttactactttgatcatgggacaatgaattttatccagcttggttacaccaagaaacaagaggagaggcattttcgaggcgtcatcaatttggaggtacatatcttcagtgctctntgcttgtgattcttctcatcgctcgagtaactntctcgagatgaatgtgatgatgtcatgcacgtagatggattctcggttgtgccagtaaatctataaaggcagaagaaacctac

SEQ ID NO: 20130 - DNA, 476 bp, Oryza sativa
  unsure (1)..(476): unsure at all n locations
acccattggtcgattgaccgtcatctaccgttctctcaagctcagacaagagctgcttgacaagaatatcgaagcgtcgcttcgcggtagggtatcttgatatcgactatgtgatcccttgcagtcttgaagcaaaagagtatgagcagaagaatcatggaacatcaatcatggttatatggcatgcatcggatcacagattcagagggtgaaggggagtggagtacctgcgagcaaatgcgtctatttcggccttttttcgctcatccagtgatggcacatcgggaagactgcccttgacgcgatcagggccaccaatcaacaaaactcgcattttgagatatatttcctcctcttctgtaaaattctcggctctaatttgttctttgatgaccaacagagggtcanagaaccattcatagagtgtattgttaagcctattgtcagatgtaatctcagagccatcacctgcaagt

SEQ ID NO: 20131 - DNA, 469 bp, Oryza sativa
  unsure (1)..(469): unsure at all n locations
acactcagctcgcctttgtntattaactgctctacctacaagccctttttttgttcatactcttacacagcgggagaattgtgctgcttgcttggatagtattggctaatactttgatttatatatactgagttctttagnaatatgagaaacagattcgtatgcagttgtatgaatgcatgcgagctcgagagtggtacatttgatctgctcaatactttcagggaaacttccgctttgaattcttgattagcttacatagtcttttgtattatagatattaaatttgaactatatgatctggtatgtccatgtctaatttgaatatgatagatgggatgacgatggtganacatggctgaaaggatgaaaggagaaagagaaattgcttaagtactctcaacattctttcaatatttaatagtgatacaacatagttagagatattcttatatacaggacaagcgct

SEQ ID NO: 20132 - DNA, 413 bp, Oryza sativa
  unsure (1)..(413): unsure at all n locations
agcttccnctcactctctacactatttctattgtttttatatacaatagagcctcttgtaattcagctcanagntgtgtgtgttgaagtgtggatggagacctcattttataagctccatatgacagttatggctatgggaaatgtccaaactgccctccaaccgacattgggaaatgtccaaacgagctcagatactgatcccgtgcttgctgcatcattgcttcaaactcctgcttcatctcaagtgtgaatttctctggatcgattggcatgacattgtcatcaatgatgtcagtcaatcctggcttcaatgccttgcctttaatggaacctgngcttgatggtggtggtgcttgtttctcggccatgaggaagaactgacatctgacttctaatcaactcccactgggc

SEQ ID NO: 20133 - DNA, 328 bp, Oryza sativa
  unsure (1)..(328): unsure at all n locations
tgagaagcacgcccgaataagagaacgctcatttgaatgtgttnccagcgccaggaggagtacggatccgcaccacgccccgcaagtcgacgactacacccgtacgcattcagcttgcacacagggacctaccttcttccgcagtggtacgctatgaanatctgctattttaaaagcttacacagcaaacactaataacctatgacagatttcaacatagaactgagctagataaaatttcattaaatactntgcttggttatctatcttctagatctttctgggaattatttgagcaaggaaagtatttttaataaatgatacatca

SEQ ID NO: 20134 - DNA, 429 bp, Oryza sativa
  unsure (1)..(429): unsure at all n locations
ttaagtcacctgcggcatgcagctatagctgggatagctcaggacgctttttattattntaagcccaacaatttgatatactagatttgctattaaaatttacttactcattaatattggaatgtaatggagctttcaccagtgaatcccggaagctggccactgcttaccgggcgggtggcttcggcactnnnnnnnagcaatgttcataggcggatctaagggtggttccggtgatttcgggaccacccaaaaaaattcagcccaatgtatatatatacatatgtgaaaaataaacttttgaaaaaaaaactcatttcatcaatctatactcttaactctattggatttaaggtattttaaaaaattatataaattagatcacctatataaagatacgtcacttcaccactggcaatgtctctcatg

SEQ ID NO: 20135 - DNA, 473 bp, Oryza sativa
  unsure (1)..(473): unsure at all n locations
tgctaaccgaatgcagtttggtgtaccagaagatagctcattgtgtcagtattggcatccccattngaatgatgttntattgttttgtttcacaataaattatcatggagacttagatttattttcttaacataatcaaatattggtgtcatcaggtgatggtttaagggaaggttatggcatgcttggacaggcaggaagtggaaagctacgcgtgtcaactgcaccaagcaaactttctgcaaaaattaccaagaagtacgcaattttgcttctctttgttacctgtcatcttgttttagaatataaaacaaacacttcaagaacatgaaatacattcagtgtgattgcatgatagaagttgcagtaacccatangcactgttagtgttacgcctgctaccataatgcctctaattctctttacgtaatctgccaaaataccaatattntgaatattatccccttgattct

SEQ ID NO: 20136 - DNA, 471 bp, Oryza sativa
  unsure (1)..(471): unsure at all n locations
agctntgccagaagctcagaagggcaatcatgcctttatggaacatgcacaaganaattacaacttatatacaatagtaacaagtgaacttagcagcagcaagatacatagcatagtaccagagtcaatcatttcattagtttgctcaggggctgtactggcatcaggttctatgtgtgcagatctgcatatctcttctaactctgaccttttcttcatgaaaatttctttcaatcttctagctttaagttttgttaacctctcaacctcagcacccatctgcatgataatttaaatatgaagctgttaaaaggatgaaggttagctggtaacaaagtagaaattagaacaaggcaaactgggaaaaaaccttttcaattgtttcctgtgagagaaccccgngggataagatttcctcttccgatgatatgagaacactaagtactctgttaaantggcttctctcttctt

SEQ ID NO: 20137 - DNA, 408 bp, Oryza sativa
gataccactggtaataccaacatcatggaatgtttattatgataagtacagaacgccatttatgccagcaaactgttgcagaaagaaaagggaccctccaatcagtgcaactgcatatacatcagaaattaagctattaatatcatggaaataaagatcataataatgcaaagggaaggaacaaatagaaacaagtatacagacattaagtcgccaccccctgctccccgctaccagcctggtcggcgcccggctcaccaccgatgactgtcgctgcccgccgcctgcgcattcaacgacaagggcgggagttcgccgcagccgcagccaccgctcccgtcgtcgtcgtcgttgccagcggccggatcaacggctgacggatccgctgacccgtgaccttcggccgct

SEQ ID NO: 20138 - DNA, 503 bp, Oryza sativa
  unsure (1)..(503): unsure at all n locations
ttaagtcacctgcggcatgcaagcttgtataaattatgtcacgcaatgtgcattgtctntacctgctntatcactccatattggatatttattccttgaacaaacaaaaccattatcccatatatcttagtagataattgggtgccagactatatatatatatatattgctaaatgcattgtcaaaataaaaatatttcattgatggttgctagcatcactgaaccgatggaaaaaccacccaaggttatttgcatagggatgagaccatacatgtagaggtcttataattacaggatgtaagagtaagcacactctttctattctttcccgcgctnttgttgtatttgaaattgtggaacggtttttntgtcgctttcgatggaggttgtcaatctattntagtatagtttaaggatatcacacacaccaccttataatatatgttactttccaatatacaaaacgttaaacgcgtacccaaccaaaacatatcattctttt

SEQ ID NO: 20139 - DNA, 465 bp, Oryza sativa
  unsure (1)..(465): unsure at all n locations
ggccagannatctaaaaccacaatgaatgagtttgtgctgttttctgatggagagntgaaaactaaaccaccaccaccccccacccnnccccccccccggcaacacacacaactaagctactcattagcacataattaattattaagcattagttaacacaacataaaaattgattaatatgtttttttagacaactttcctataatcttttaaactgtttaacctcctttgattgaaaggaaatccataggaattttagaggatattattcctataacaatttgtctctatatagccctttgaatcaaaggaataaactatatgaaatcctatgatatacctaatgccatgcacatcttgaaggaattctataatgaggtagaacctcatggaaacactcctatgagtcattgtatgaaacatgctacgtttttcctatgaaacattcctatggaaatatgcta

SEQ ID NO: 20140 - DNA, 401 bp, Oryza sativa
  unsure (1)..(401): unsure at all n locations
tcaatacttttttatgtttattatcaacagagcaacggtattgaagtggtggtgatctaaacatgatggtgatagtggaaacatttcttcaataaataaggacctcttaactctatgttggaccatttaaaatatcagatatcccggactggttaactccaacctttagattattctcaaacaggactataacaccatgttgaggactggatagcaagttccatgctacatataccaaagctcccaactttggggtgctctcgagtaccaaacccaccagcaaatcgaataattgaccgcctaatctgatctgagattntactagcacagattcacccgcaaagccaatcatccaaagcagctaaatcaattttccggatgagattcgcaatcccataata

SEQ ID NO: 20141 - DNA, 197 bp, Oryza sativa
actcagcttggcgcctcgtccctaccggctccgagcttatgccgcacattcaccgcccgtcgaagtcggccttcacgccgaggatgtaccccctggtgcactcctccctcagctcgcagcactcgcactccgctgactccacctacattgccgataattcagagaagagatgagctctctctctctctctctctctc

SEQ ID NO: 20142 - DNA, 441 bp, Oryza sativa
  unsure (1)..(441): unsure at all n locations
agtcacctgaggcatgaagcttggcttcgaggctggggtggatgagnnggctctgagtttctatgccttangnccttccgaggggtcccttttatatcgcaggtcaactgtctccaagtaggactcggagaagccggaccgaacatgacacaatgacgacccagttttgaccgaataggactccttctacctgtgaactccatgatgaatttccttaacgtatgacgaacacgtccgtatactcgtgagcataccatatcgatacgtgacgtatatcgaagggtagagggtataccctacccgtaaccttgacagtttccaatggttgaaaatgaagaataagataacaacattccagattaggctcaattcggtggaattgaagataatacaacaggcgcgacaggcgngcctgttgcagaanatgacagtgcagatgat

SEQ ID NO: 20143 - DNA, 414 bp, Oryza sativa
  unsure (1)..(414): unsure at all n locations
tgctntggagagtatatgaagaccattccattcacttttcctcagcngaagaacctatggatgctgaagattggntaaggatcattgagaagaagctaactcttgttcgagtacgtgaggccgataaggtgatctttgcggcaaaccaattggaatgaccagccggagattggtgggacacgtacaaagaagcccgagaagaagatgctggagaaccaaactgggaggaatttaccacagccttccgtgacaactttgtgcctgccgcggtgatgcggatgataaagaacgagttcaggaaactacggcgagggaataccacagtacaagagtacctgaaccgtttcactcagctggcgcgctacgcaactagagatcttgccgacgaagaggataagatcgacatattcattg

SEQ ID NO: 20144 - DNA, 438 bp, Oryza sativa
  unsure (1)..(438): unsure at all n locations
agcttatagtaggcttatagcctctaaacctacatttctatatataataatatctaaaattaccactggaaaatatatganacattgttggagtatgttggtgaggtttgagaaagcaagaggcgaattatgcaccttgagaaaaattcagaattccctgtcggtgacttaatacccacatgaattcgatataattcctgcaagtggtgcagacgtcctcgacaggaaaatcactggccatctgatgatctggttttttcgagtagtcattggacaataacgaggccatatatattgtgcttcttctttttttttagggagggcatattgtgctgtctattatntttttaagaagaatatcttcgtacagattcaaaaggtaaaaacctattaattacactcacgttcaatgaatctctcttaagatattcacgatgc

SEQ ID NO: 20145 - DNA, 420 bp, Oryza sativa
tgagcttctcgctctccgcatcgccctcagcatcatctaacttgtcatcatcctcatcatccgagaccttttataatcataattcacaaaacccaaaatgtgccacttttgtcagtacaagtgctaatcatttcgtcgatttgtaacaataccaagagctagcaaagaggagagaataaatttaacattagcagcagatgtttcatccagcgacggtgacgccacgcttgacaccgccctcagtgacatctcctgaccaaaccgaaacaacagaaaattcaataaatacatcgaaattccgatctgattacgcctcacaaagcatacaatgacactatggtaagaacagaatatgcggatcctcctatacttgagtttcgcgagcgccgcagggacttcaccgaagccgatccacgtata

SEQ ID NO: 20146 - DNA, 351 bp, Oryza sativa
  unsure (1)..(351): unsure at all n locations
agcttgcatatgagtatatgacgcctgtggtgttattgaattctcaacatacatatccatatctttcatatgcaaccggttggtcatcaagtggaggatgacaacttgtttattgggactaatgttctgctttgagatgtgcacagaaatatgtctaattgtgatgaggcaaatggatgacaccattagntgatggtcaccaaaccaaagacatcgccatgttgataagaatgaaagcttgtgatgagaagaaagtcttgaaaaatgatggacaagacctcggcataaacatggttcaaccggatggtcacaagtgttgatctttgctcaagcattgacctcaagttggat

SEQ ID NO: 20147 - DNA, 489 bp, Oryza sativa
  unsure (1)..(489): unsure at all n locations
ntntcttgaanacccatttgcatcctacaggcttgcacccatatggacgctcaacgacttcccaagtaccattagacataattgagtccatctcactgcgtactgcttccttccagtagtcagcatcaggagatgaatatgcctcttctattgttcttggagtgtcatccacgaagtatacaatgtagtcatctccaaaggattttgcaaccctttgtctcttactcttacgagtatctgcaatgttatcctcctcaggatttccctcaggcgcttgatcattatgttgtatcggtgcaaagtgctcatggngtatgacagtttcttgactagaagtgctaggtatatttttcatgggaaattcattatcaaagaatgtagcatctctagactcaataattgtaccaactcgcatgtcnggtactccagagtttactattaagaatctataacccacgctgtgaatagcataactaaggaacacacaat

SEQ ID NO: 20148 - DNA, 79 bp, Oryza sativa
aattcctggctaaaaattacctccgcctgcaatcattgtgactgtgtaattaccaacattctgcgcatagaagcataca

SEQ ID NO: 20149 - DNA, 437 bp, Oryza sativa
  unsure (1)..(437): unsure at all n locations
agcttcactaaagataacccatgtgctccatctattctcttgganataaagggaatgggtgcaccagaatcaaacaatattactgccggtgtcgagttgacggggaatgtgcccaatataacctctggtgctgactgcgcctnctctgcagatgcatgattaacacgggcctgaacgaacttgggttcaacacgtcttggcttcaggcactttccaaccgtgtgtccgggtttgttacaattgaagcagagttcgggtttatctcccaacctcttgtgctgttctggcagaactggctgaactgattgagctggaatctttagtgaactcggaagagggttgagactgtgctgctcactgtcgatgtgactgccactattggggttatagttgaaacttccccggtggtaaggacagtgctgtcggataatcatggt

SEQ ID NO: 20150 - DNA, 435 bp, Oryza sativa
ttctaatgaatattgattcttccaacggactctgtaatgggacgagggtggtggttcgaggattccagagaaacactatcgacgctgagatagtgcttggtcaacatgctgggaagagggtgttcctttctatgatacccctatgcccctccgacgatgagatgttcccatttcggtttaagagaaagcaatttccggtcagacttagctttgccatgaccattaacaaggcgcaaggccagaccattccaaatgttggcgtgtacctccctgacccggtgttctctcatggtcagttgtatgttgcattgtctagagcaacagcaagaatgaacattaagatcctcgcggtacaaagcaaggacaagagccatcgttccatgtctcgtgggacgtacacgaggaacattgtatatagagagggtctcacgtcat

SEQ ID NO: 20151 - DNA, 402 bp, Oryza sativa
  unsure (1)..(402): unsure at all n locations
aggtcattgagatatgattacttgttgtttatccactaccatagaaacacttatccattaacgtgagaatttctagcctataaaaatagccataaaagaatcagcgtcaaccgtattaaaaaccgtagttatactataacattgcggctnttaatgtgagctagaagtaaagaaagataaactgatgatagatcgttcgacctaagccacatttgcaaaaggttaaccacccccctccccccgcacgatcctctctctcgccaccacctatatgtttggtagagcagttgtagtgtgacatcccctctctctcagctctgcagccaccagatccactgctgccacctttctctctcgctcgaacgcaacgcaatgttatgaaccggcaacaaagtcattctt

SEQ ID NO: 20152 - DNA, 426 bp, Oryza sativa
  unsure (1)..(426): unsure at all n locations
taagctatcntntanacttacatctttaagtcccaactagattatttttgtttgtttgtcattgatcaggccncatgggatagccttctatgccaagccacccaaagaattttgcactaaacaagttttaaatttgcttcactagaatgaaatcaccaaataagatttcatatctaaacctttggcacacaagacttgtaagaaggctgaaacaatacttcttgcggaagaaagccatgacagccaagatcacaaatttgagcaaccgaaagcaattgaaattagagattaacaagagagacattatcaattgaaaaacattggtatagcaatttacctaaccaatacctttctttgtattgctccaatgtactttctttgtcattcctctactcaatgggtgaatagcctataccgcatggtgag

SEQ ID NO: 20153 - DNA, 428 bp, Oryza sativa
  unsure (1)..(428): unsure at all n locations
caagtgaccaaatagcagaaaatggcagacatagaatgtatgtcaaagttgctacttacaattgtngcagtatctgggagaatagcacctccaggttntagaatatgatcgcgtgcatatagaactgaactgagcatggattcatatagtaggcaatatcccatccattcgctcaccaaaacatcaaatttattcgatggaactcgtattttatgggttagctcttcagccttggtatgaacaacagttatcacttgagtatctcgcttttgttgcatctccatattttcatcgtacagaaaaccattactntntgcaacctgcatttatgtagtgtgtatgagagaaatcatanattaaacaagaaaggcagtctgatattctttttatttaaaaaagaacgtacttcagtagcgacagaaaccatc

SEQ ID NO: 20154 - DNA, 446 bp, Oryza sativa
  unsure (1)..(446): unsure at all n locations
ctcagctttataaccctagtgctactgattgcaaattcagatttgctgctcttgttntctccccagatcaatggacagagaagtttcaaaagctgcaaactatatgtagaacaaaagacattcacttgatgaagttagcttactactgataactatcaaagtacaatctgcaccaagccatgaagctcaacaagtacgagaagtatgaacaatgccatgtgcgtggcagaagaattctacatttcgctacaaggcagagtagagagagagagaaagagagagaggagacttgtgctcatgctgctgcaaagctgaagtgatgaaaccgtggcaactactgtagaaggttaacagctataggtggctggcactcganaacaatattccaaaccagcccaggaattacaagagacaagagcaacctaattaattacagagatggtatc

SEQ ID NO: 20155 - DNA, 427 bp, Oryza sativa
  unsure (1)..(427): unsure at all n locations
caaccctgtgggcacgcctaatggcaaattcagtcaagcagctggctagaaaataccatagcaattacagtcttgcaatcctttaaccccatgtgcgattctctggaacttggtttgtgattntagtgttgaaaattttntgttggtgagttggtttcccccttgttctaagcgggtaggatgtctttggtttcctgagaactgcatgatgaaaaatgtacacatacagaagaatttctgcgagctttgccctatgtgtagtcacattaatcagaattatcatatagttgaataaacagtgttaagtttctgttgcggatacatagttgttgtgcttactgtaatggcagcaatcgttgtgttatgtgttagctatcatattctgagatgaaactgcatgatattttctgataccttttgtttatct

SEQ ID NO: 20156 - DNA, 313 bp, Oryza sativa
agtatcggtatgcatagacagcttcgtgatgaatgttacatcattgtgtagctagagctgctgatagggtcatatattctacttgaattggccgtgctgaagttgtctttagttggagcagacatttcgttgctgcctgtggatatgctttgcgaaagtagatgagatagcgatcgagattgtcaattacataatagcatgatgatgccgcgaccatttcctatattatactagtgaagtattcgacatactccctccgtttcacaatgtaagtcattctagcatttcccacatttataccgtttcacaatgt

SEQ ID NO: 20157 - DNA, 464 bp, Oryza sativa
  unsure (1)..(464): unsure at all n locations
gctatntgcaacttccttctaccctcaacaaactcttatttatgagtgtcatggagatgagaatggttccttgcagcataattggcagtgcaactggaatgtgggttctgaaaatgatttccaatcgggaagcgtaacggtgtctatgtctgtgaaccgtgctttttaataccctatactcttatttttatcgctccaatttactcctatttgtgtactgttgaatgtgtgtcatggtcggtacacatgtagttgaagtgctaaggatggcgcacagggggcagaaccaagcggcagcagatagaccatcaatgcatntgccgcacctattcgacctccttatgtgtttgattcaatttgttaaggtgagatttgttaacttttatggttgttaggggctggcttatttaaggagcttggcattatcttgaataagagcaaatacaagcgactctctcatccct

SEQ ID NO: 20158 - DNA, 390 bp, Oryza sativa
  unsure (1)..(390): unsure at all n locations
caattcacaccganncgctattatgaattttttcattnnncactgcgtactgcaggcttctgaagttctgaaaacaaagacgtaagagaaggcactagccaatactagatcgcagccaagatcagtaggttcggtgtaatctttttaagcttaaggcaaggcaattccacttttgttgcagctacgaccttatccctgttagtgcctgttttgtgcatcggaatgcagtgcagggcctgagtttcgttttctgtggccttcattcgcacaacttgttgtgtggtgaggtggtgttgatattatacatctacatggacgtacgcttgctaatctagcgaatagtgatgtggatgttcttgaccctagctatctctaactttcacgtcaacc

SEQ ID NO: 20159 - DNA, 460 bp, Oryza sativa
  unsure (1)..(460): unsure at all n locations
agctttctatagagataatacaaacatatccattcttctgtactcttgccatatctctaactcaaaccgacataaatattctaattaatagatacaactgccttatatgaactatatctctaaacggcaatgacggttatctcaatcgatgcccaaactgagcctaagtagagctgtatcggctacctgccatatcgactcaaccaaattccaactctgtttccagccgatacgctgcccagtcaatgcgcagtccattnttggtaagattctatctccttcgattccgctttgatatccaactccaattcgagtctatcttgccaaatttcactgttaatagtagtttacgcatctaagtttgtgcaatataacagtacagtacctcatggngtaacagatgcgtttgccgccacgatgttatgttcaaggcgtatgcccaccacctaacggtcacact

SEQ ID NO: 20160 - DNA, 429 bp, Oryza sativa
  unsure (1)..(429): unsure at all n locations
ntgttgagcgctaaacccaaagaaagctataaaaactttcagttctctcatactaagtagaaaaaatcgaacaaggcaatgatagaccaagtaagcaaattaaattgataaaaaatcacactccattattatgatgatagcccccgactgacaacggcaagaagaaaacttgatgttgacagtcaagatagggaagtacaatgataaacttaagcgtacaaacgacggagatgttcaatgttccaagagttgtcgacaagagtaccgtcttcacgcttgagtcgataagaacctggtcgggtgacttcagagataataaatggcccttcccatagaggagataacttgtgccgatctcgtgtagtttgaaattttctcanaaccaggtcaccaactaataaggcacgagatcgaacattgcgatatgat

SEQ ID NO: 20161 - DNA, 314 bp, Oryza sativa
ggcacacacgcgtgattgttcacctacaagacactctgttataaatttcggtcgatacgcagatctacactaatctaaggatccgatttgcccggaggaataagatgattgcagtgatgcttctagagcatatatcacttaacatcgatggcacgctagtgaataaatgagtaacgcgtttgctatctatttgtggattatctaaacgcggtcaaaatacaaaattgcagcgttctaataactttattaacctgtatgctgctctcttgggataacaagctatctgcatgtgcacttatgttgctattgatgat

SEQ ID NO: 20162 - DNA, 396 bp, Oryza sativa
  unsure (1)..(396): unsure at all n locations
ttgcatacagatcgatcgatgcatgcactgctatcttaattctatcgttcacgactaatgatcaactcaaatntaaacaccaagaaccactattaaccaaaaaaaataaagaaattaacaccgcatgagaacacatcaagaggagaagagttaatcagagaacagcaattaaagctaagataattgattaccatatggatgcaaaggaaagaaaggataaagcaaggattgttcatggttgagattagattaacctgcatgttgttgtatcggctgaaggtcttgtatcagacggagcaagagaactgggtatggccaatgaggatctgtgactgtgtggggatccaatactgccccttggtcagctttcctatacctatggacgcgcaacccagc

SEQ ID NO: 20163 - DNA, 420 bp, Oryza sativa
taactgatgagtagctctcttcttctcttcacacagcatttgtggcactttcttcttgaaattctgctccaagactatatcagcttccactttgtcagtgggatcacatttaaaacaatactgccaaatcaagcaagaataatattatttttccacactgttgagactatcacaaatctgaggaaatcttacccaaaattctctaagaactcgcgtagctggcgacattattctttcatttgtagacctcttgtagtccctccaagtaagtgcacgtgtcctgaattctgggagaccaatagcactatgattgaacatacgcaacagtgcaccttgcactgttgatggtctacgagatgagatatgacgatacactctcaaagcgctacaaacagacagagtatatattagtatatcacc

SEQ ID NO: 20164 - DNA, 267 bp, Oryza sativa
aaataactaataaggcgcgggatctaaatatatatggacataaattaatatatggcactaatattttcctatgtatgcattaacttccaacatcgattatacttggttgcttcagagacagaacatattaaagataattattctgctcgtcaatactaaatctattttatagcacattgtcaaagtgactattatgcatcatcttgacattaattatttaactgttataaacatatctcacccaactgtgaatatctttcattggaa

SEQ ID NO: 20165 - DNA, 443 bp, Oryza sativa
actcagcttccatcctcgggccgcgtctttcccaccgactgaaattttgttctctctcgccttgtctggaccgcggcttcggctacaccatccgttcgtggtgcccggtcttggaagccatggagctcaactcctgcatcttcgagttcgacgagatcactggcaatgcgctcaggagtttggccattgatggctgctcccgacgtggtctgcaggtgcctgatgatgcattgtgtgtcacggcgccaaagcttacctcccttcggctcaagttttcgatacatgatttcagcgtgtttttggttgatcgaatgggttttctcgttgatgcgtcgatctgtaaaatgttttcgtccacgaccaactctggaaacaatgtatgcaacttgtagaagtcgaattagaatccatcgtccagttgcttgggagtctactcaacgtga

SEQ ID NO: 20166 - DNA, 196 bp, Oryza sativa
acacatgtctcgacatgcaaataccatctaatagtctggagcagacagagaaagaagatatgacaataagcaaacttgggaacaaatatgcactcaaatgtaataactcgctttgaaactgccggatgctaaatgacaaatggaatggaagaacgtaatgtgggaacagaagtggaacaactacagtgggaacaac

SEQ ID NO: 20167 - DNA, 482 bp, Oryza sativa
  unsure (1)..(482): unsure at all n locations
tgatgacaatcatcttggtggcgagataccggcctctctcttttacctgtcgaagctgcagacacttgacctgtcgtccaacaatcttaccggcagcatccctgcttcattggctcaaattccaggcatgctatcactcaatgtgtcacaaaatgagctcagcggagagataccggcaatgcttggctcccgctttggcaccccgtcagtgtttgcttccaacccgaacctgtgcggtccgccattggagaacgaatgcagtgcgtaccggcagcatctgaggcggcagaggctgcagcgcctcgctctgctgattggtgtggtggctgctaccgtgctgctgcttgtgctgttctgctgctgctgtgtgtacagcttgctgcggtggaggcgccgcgtcattgagaagcgagatggtgtcaagaagaggcggcgcagcctgggacggngcatcnggtctagcggcacaagcacagacagtg

SEQ ID NO: 20168 - DNA, 350 bp, Oryza sativa
  unsure (1)..(350): unsure at all n locations
agctngattgggacttagtattaaatgtatcatattctgttntctatgcaaagtgaaacanatntcatagcagtgcaagccctctgctgtctttgtgattattaatctgtagtctccatgttcgattggctcgattgtagattaagtttagttcagtttaattgtttaaatgcatgtgtttgttntgatccccttcgatatcaatttattgcagacacttagctagcattctgggtagagtaacataaaaaccatataactcaatcttattctgatctttggattgtacacctggtgatagagggagggaagccacatcataaaattatattatactcaaaccatatatg

SEQ ID NO: 20169 - DNA, 465 bp, Oryza sativa
  unsure (1)..(465): unsure at all n locations
tcatgccttcccttaaagagcaagactattatgaaataatgttacatgttaccaatgaaactaagacctagaaatttatacaagcatacatctatatgaaacaaaaagaacactttattttcctccatagcacactcctctctcatggtctcacattcatccccgtgtgaggaggtaggcactaaagttggtgtcatcaggggcggagcccccgcccaactagcccaggcagccgctcgggctcaccggtgaaaagtccattaaattttaatattattgaataaattgatgatgaaatttctgtagcaaatgatagttatagtgatgtttgcctgngctcaaaaatctttcttgctccgacattgggtgtcatcgagtagtgagcgaaggatcaaaacatgacattagcagagaaacttgtcctcaacctttccaatcctaatctatgtgagaaagcacaccttg

SEQ ID NO: 20170 - DNA, 417 bp, Oryza sativa
  unsure (1)..(417): unsure at all n locations
tcacctgangatgcagcttgaatgctgtncattagtgtaatatcgattcttttattatactatcaactgggcattgttgatcttcatgagtacagaacctcggttcanataagtaaacacagctccatctaatgttggaggtgcttgctacaccaaaaccagtgttgaagtacttcgacacgaataatgcaatgtcctcggaatcttcaaccttggaccacaacggattctcatcgaggaggttacacttgttgaccactatctcatatccttgccaggtagngacccgcaaaatggcgccgacgatgtacaactcgccatttatgtccatgtagctacgctggcagatatgtgccggctgaggcatcaagagcaacatgctctccgtgagaggagctacaccatcagtgttatcga

SEQ ID NO: 20171 - DNA, 452 bp, Oryza sativa
  unsure (1)..(452): unsure at all n locations
aagccattgctaacaacatctancatgatancaatattacgacttttattcaccttgatatacnggccggcatatataatcccattttgttaacctatatttctttttctggctatcactgctccagaaaaagctcgatcggtagaaatccagtcttcgaagtacacctcgaggtatttcaaaaaagaatagcataaacatgggaaggctcgaaagaaccgagttaagaagaaccaatatcccaccataggagttatctttgcccttccatgtgctcagttttctttgaaacctatcctccacacatttccaatcagaatttctgagctttccatagcgtatggggattcctaagtatctgaatggaaaggaaccataattacaaccaaacagctgtttatattgatccttcatttccttagctcccccacagcagagaatttcactcttat

SEQ ID NO: 20172 - DNA, 469 bp, Oryza sativa
  unsure (1)..(469): unsure at all n locations
ctgcagctatgtacgttaactgcttatgtttcttgtcatctgatagccaaaaactgatttggtcgaccagccaaggtcgtgacaaacaagacgtctttgtatatatcttgngtgtttgcttaacctacttttaatgttctcctgcatatcttaattcaatcaaactcttcttgctttagtcaacttataatctattaaatcggcaatgaggtgttagagacttagagttggttacctaagattgtgacatggaaaaacttttgtatggcttcgcctgggggcttaaataaagacaggacggcgtacaaaccaagcaagtcagccattgtacttgcttataagtattcggtattttgtttgccangtaaaanggtaatggtttgttggtacgtaaacctgangattgaatatgacgcgactggtcacggtgtcactataaatttatagaccttctattataaaataaaat

SEQ ID NO: 20173 - DNA, 363 bp, Oryza sativa
  unsure (1)..(363): unsure at all n locations
agatatacaatcatacacacaaaanaaagaataaatatcgatgtaattgaatatccatgtgtgtacttctaattagatgatcgganttttaaagttttggccaatttttatctcagaagccaaacctttcntttaacaggaaggagcaaggttataaatggctntggtactctgggctgtgccgaatctcttaggaagatgacggcccataacacggatgccaggacgggccaatcgcggttcgccggatcgctcgacgcggctcgcagtcgagggcaagatcgccggccgctccagaagaatctagaaaccgccacagaagcctccactgctctcgcccgcgctgtccaatctccgtgtact

SEQ ID NO: 20174 - DNA, 455 bp, Oryza sativa
  unsure (1)..(455): unsure at all n locations
acctgcggcatgcaagcttctgaaactnttatgacatatgatgagtaggtttgttctctttaagcactngctttcctgatagcattataatttaggacaccaaaggtgtgttcagtgaaatggcatgaataagattggtgatttcttacagtgacttggtacctactaactgactctgaatatgatgcattcagagcaactgatcatcttcctcagttgagatgctgaacccaacacaaccaaactgaagtacagaacactgcatcagctgaaaaagctacttgtgatgaagtgatgaacatgaagtctaaaaacacagatcagttgaacaggccggccaccgacgatcgcatcagctactgacttcggcgatgctgtgcagcgacgggcgccattgacgatgcctataatgtgttgccgacccgcactgtgcccgtgccgcgccgctcggcccg

SEQ ID NO: 20175 - DNA, 459 bp, Oryza sativa
  unsure (1)..(459): unsure at all n locations
gctgctggagagtacctgacaagtcagaatctcatcttttcatacctgttaatatgaatgtgaatggatccttttcatctttggttgccgtatagtcttgatcaatcatcttgattacacgaagcttctgtatcttgttatgctgccgnttccaaatatgtctcaagttgtgcgggttcactccctcaacattgagctccctgacattgttcattttctcaatcatctgtggggagaaaacccactgtgtgtactgtangtctagcacccacaaaccatganaacagttccaagactgaacctcctcttcagcatcaatgttcagatcaaggcagttatcaagcccaaggaatctcaatccgcggcaacagaggaaaggaggtgaagcaaatctataagtacagaggctaagttttagcactctaaggttctctgcatgttgaaacatgtcattataat

SEQ ID NO: 20176 - DNA, 455 bp, Oryza sativa
  unsure (1)..(455): unsure at all n locations
agctttgggttcgaacccatgacttaattctagaggagtttttatccactccgataaccagtcgagacaattggtgtttgtgacctatgattgctattntatatttgtagattgtgtgtggatgaagagaaataaaagagattgcaaattggcgtcgccctttgccgtggccgcacaccacaccatagccggcagcagcaaagcagagcgcgccgaggccaactccctggtcgaggcgccggagcgccgccctccgctagcttctatcccgtggtctccgccagctgctatccctccgctcactactcgtcggtcggcgctaccccgtggccacgctttcggccgctgcccactatgccagatccagcgcgtcgcgtgctcggcgcgatggccatcaaccgcgacaacctcccgagctgtatgagcacagagccggcctgccggcgagcctgact

SEQ ID NO: 20177 - DNA, 231 bp, Oryza sativa
attctattccaccagctagatactactacactaaacttgagagagatgagagagctctcgcttgacgtgtgtgaatgaagcgacaacgtgaaagacttttatatgcaggtatgacggttgtaactgctgcgaaatgtctgatgtaccccgcaaccgccatcatgagaggatctggagcgtccctgcccaatcccacatacaacggtggagatggaggttcggccgtacctc

SEQ ID NO: 20178 - DNA, 371 bp, Oryza sativa
ctgcatatgagaatcataggaatctcgattcagacgattaacatagactaaatatatcagagcaattccaataacatagctttgctattagctccaataatatccacatcaagcatttaagttaactagtaagagtagtatatatacaatagatagctactccatccgtcccaaaatataagcattctaagagttggatacggctattaagacagtcctttgaagtaaatggtggagggtcgtgatcgattgagtactggacgtagtgggagagttgcgattgcgcgggaacaataagctggtggagaattagttattatttaggacacatcttgtaatatatcatctacacacgtatccgcatcattcat

SEQ ID NO: 20179 - DNA, 433 bp, Oryza sativa
  unsure (1)..(433): unsure at all n locations
aaacctgctccttgncaactcgctnccattatatcaacatttctcttatccagcctccgngcacgtatggcggcactcctcatcaatttcagtgacctgcttactatgaactttacctggacattttaaacacaaaactcaataaagctgcagcattgctattaactcagcaagatcaaaaactagagtgaaccaaactacaaaatagccaacaagatagagaagtgcaataccttccgttggcaattctcagaaaaacgcttagcatctacttgccgtttcttagcaaagccatgaaatatctgtggtgcctatgaatgcctttaacagcaatagcatgccacacgttaatagtcctttctgactcttctcttgcaattcataacgatcctttcttattatttgcttctttgcanactacgctcgataatct

SEQ ID NO: 20180 - DNA, 433 bp, Oryza sativa
  unsure (1)..(433): unsure at all n locations
tgtcaataatatgatatcttgctagaaaaagttattctagatcttctagccatgggaccatcaatcccatgtaccgggctgtacgcttcgaccataccacactccacactctcctactgctattagccctaagcttagaattttccaaataatgcaagggtctatgagtgacatctgcgcttctcccatatgcttgtccatttcaagagaaattggctaaagaccagctccatgtaactattctattccttctatatgcttctcgtgtttgacgcgccgaanagtcancgcgcgcgcatatcgacggcgcagcaccttcacctgccagatatatgtatcaaaatcgctaaccactgcgaacaccacatggggaaagccgtcgccggtgcgatcaatgaaagacctgtaaccaatggcattttctatattatca

SEQ ID NO: 20181 - DNA, 472 bp, Oryza sativa
  unsure (1)..(472): unsure at all n locations
agcttctgggttcttggtctctgcccgaggcatttgtgtcaaccccgagaagatacgagctatagagcggatgcgcccncccagcatacttatggatgtgcagtgcgtcactggttgcatggccgccctaagtcgttttatatcgaggctgggagagaaggcgctacccttatttaagctcctcaagcgctcggggccgcttacttggacggaggaagctgaaaaagccctcgcccagttgaaggcgtatctcagctctcctccggttctagtcgccccggagccaaatgagtccctgctactttacttagcagcgaccccccaagtagttagtgcagcgttggtcgtggagcgcgatgaggacaatcctcattctgcgcacccccactctgtgccgacttggcccgggagcatgcatggaggagaggcccncgagtcgaacggtggcttaatggccccgacgaccggagtc

SEQ ID NO: 20182 - DNA, 490 bp, Oryza sativa
  unsure (1)..(490): unsure at all n locations
tacaaaaagcacaggccagaacaacanattctatctcttgattctttctccacaagatccttgcgaacaatgtccagttctaagggtatgattcttccaaacttgtgtggatcgatgtttctgtggtattcactaatattattccactctaacaattcgtggatgtataattaattactgcaggacttagtagctctgttcctccccaaggtggctctggagcatccaaaaggcacgcggacattcatcatgaagtgacaaaccttccaggtataaaagagaaaaatattctaaaaataaaacataattaatttactacatgattctttttgaattctacctttgaacgtaaatattttttgttgttgtttagccagatgaattccttatcccgtgctacttaatttgttccaaattgctgcttctttctccgagttagntgaataatataacgaacacatttggtgtatctggaagagggctgatatat

SEQ ID NO: 20183 - DNA, 428 bp, Oryza sativa
  unsure (1)..(428): unsure at all n locations
agctngaagaacagaccatatgagatgcattacattttattacttanatcaactttcaagtgtttattcaatgcaagcagccagcagcaacaaatttcaatctccanaatacatatagaacattaaaaactgtaggcccctatcacacaacaacctataagaccaacacttttcaatcattatgggggtcaaatccaatgaagccattcatccaaaaatacaaacttaaaggaacgcctcctccaaatcaacaacataacacaccaaccataccaacagggcgttcgattaatctagtattactgcagctctagggttccaagataattatcattatgggaaaaaaaaaagaatcccccaaagatttctgagaaaagagcgatgcgggaccttgaatgcgatgtattcgtcgctgagattcgatagct

SEQ ID NO: 20184 - DNA, 455 bp, Oryza sativa
  unsure (1)..(455): unsure at all n locations
tatggttgagaaacattcgagataattagtttgtggcaaacttatgaatattntcaaaaataatttgaactagattagtggttcagatccctcatggacccctatggactgaactaaagttatatggataaaaatgcagttggtaaaatatgacccagaaaaatgaaccaaaattccacttattaccttccccagactataatgcataataaggataatacccttttatgaagaaagtttagcagtcgcttaaatgctaatcaaaagtctatgagatacggtttaaaagcagtctataggagctgcttggcaagcattaagatacaacacacaataaattgagtttgtgaggtaatgcattggaaggtctgaagtcctatggtagctcggatgtaaatttaacttctgacttggtagaggccagcaaccaggtggaaagcaaatcatgtcgatgc

SEQ ID NO: 20185 - DNA, 210 bp, Oryza sativa
atcgtacctatgtgaagcgactattattagatacggtgaccaaccaaaataattgtttgcttaacatactatatctatatatacgcattttctaatctatcagagtacgtgaacgaaacgaaggccggtcgaacgacgcggaatttaacatgcacttgatcagcccgcatatttatatggaccgattcgttaccgagatccactttccat

SEQ ID NO: 20186 - DNA, 420 bp, Oryza sativa
  unsure (1)..(420): unsure at all n locations
ntcctgatgcctcttattcatatcacactatcaagtcataatttaactctggtattcttgcctcctctattatagtctcaactgtctttccttaagttatgtggtttagcttcgtagattgcttctaccaatactatctattgagttgtgaggaagagtaaagagtggcatttattctatctttttaaacagtgaagaactactcattgtcattgggcaaaagactgggtgatgtatatataaggataaaacatccattatttatttgcagtctgtgcattaattgtacgacacttagggaataaggatcagggtttaattttttggtttggccgattctatcggaggtcaaatntaaataaaatattaccaaattcaaaacaaaaaaataaaaatttcagctaaaataatatcgtaccg

SEQ ID NO: 20187 - DNA, 501 bp, Oryza sativa
  unsure (1)..(501): unsure at all n locations
cactatgatactcaagctgtaccgattcatgcaagttcaagctgtggatagattgttgattctttgctntgaaggagcatggttttgtaaatgaatagatgaatgtgctntccttttgataggaagaaatctgaggagcaattagattcagtttgtgttgcgtatgagcataattttttttaagctacagagttaatttgcttgttcaaacattgttttatcatatgaattctgtcgtaccaattatatatgagattgtatgactatattatataattgttggacgagtattatgtactaattttttggaagagtgacttgatttttgaaaatcataaaattgaatgctagtatttgatattaatgctgaatatttcctctatactctattaaaactaataaaaatatgaattcttccctagagtattttggaatcctcaggggaggatcacactaccatttgaagttgtttccctatggtgctgtccatatgaccctaag

SEQ ID NO: 20188 - DNA, 464 bp, Oryza sativa
  unsure (1)..(464): unsure at all n locations
agctggccaaatgaacaagagcgcctaattataatatgaactataaaaatgccgcaaaatggaactgtagttatatgatcaaattttaatcaggcaaccattttctctcatgacaaaaagtgaagagacaaacccgtggtgttatgggtacaacaaactttctgacatgaaggcagttaaacagacatataacattgcataccattcatgtagcttcctccatacttcctggggcaccaaagcgtagtcatctccttccctcanggttctttgaagctctggctcatcaccaatactgctgctttcctctgaaactagctttgagttatctatctctcctggtctacttggagcttgaggaagcatgttagcatcattctcatcaagtttgattatcgcacatagctttgcaggtagccccagctgtacttctgcaatccacacatgaattaatagcacaaatt

SEQ ID NO: 20189 - DNA, 283 bp, Oryza sativa
ctctactctgctctgctcccaatctggggaggaggacgagacgacgcacgcacacgcacgcacgcgcgacggatcgatcaagactggattggattggattccttcactctcctccaccacctttactcctcctctcgctttaccctttttgtccacctgtctcccaccctttcttctccctcttctctctaatctaatctcatctcatctccctaatgccaatcaatcgatcaatcttggtgtgcaaattggcaatgcaatgcaccttcccccacccttccca

SEQ ID NO: 20190 - DNA, 446 bp, Oryza sativa
  unsure (1)..(446): unsure at all n locations
agctgggcgaaagagggttcggtatcgtttacaatgtataccaatcaaattgtactatccaaccgtacctgcacgtgtgctcatctttttactagcttattaagtgatgcatttacgcgaccataatatcccttagtgaagcatattaatattatttatagtaaccaactaaaataagtgtttgtagaacatactttgcaagaaacgtagttataacaataacatgtatattctgatttgtaatgtggccggntcacgtgtccgattataaactatgtactttatctgtccacaaatataattgatcctatgtacttcatctatccactttaacattgaggtggatattattggtgttccaaaatcacacctatcgtttggaaattccatatttntggagactgactgcgtagatgagaagtacaacttttcaaatgacatccatg

SEQ ID NO: 20191 - DNA, 490 bp, Oryza sativa
  unsure (1)..(490): unsure at all n locations
ctataaaactcagcttgagctgagncgntatgataattggatgtgatatttattatgaggttttcatcactagcatcttgatagagagcgcacaatgctcccagaacataatatgcatcttgtcctatttggacatgttttcgtgctgatatgaagtaacttattttgtcagctaactaaatgtttttcatcatgctctgttaataatgtactgtcatatgtattgcaattatggagccctgtatttgtataacaaaaactagaaagtagtcattgtccaaatcattttcagtacaatactctctgctctgctttctgcaattccagttgtatagttaaatcacaaaattaataagacacacaaacttttattcattacctcaaatacatacaacaacatgggatcgggacgggcaagggctaacatattacagcttattataaaagcatatagtntcatgaccggctgtacattattgtcacatcatat

SEQ ID NO: 20192 - DNA, 146 bp, Oryza sativa
aagcttgcatcgttttggaatgaactgtattcgttcatatttattataacgatcaatacaggaagttgtcttataaaagggagaaatgagagacaatatatgtgagatgcatacaatttaactaggcaacatatcctatgcacaca
